United States Patent Application Publication US 2017/0009304 A1 - sequence listing, part 5

SEQ ID NO: 85961 - DNA, 100 bp, Homo sapiens
ggggaagaagaagaaacgggccgcgaaccgcagtatcatgctggccaagaagatcatcattaaggacggaggcacgggttttttatcagcaattggacac

SEQ ID NO: 85962 - DNA, 122 bp, Homo sapiens
caaggcgtgaggcgccgcccgggtgtccccgcggcgcaggaggcggtggagcgcagagcgggcgagcgcgatggcccactgcgtgaccttggttcagctgtccatttcctgtgaccatctca

SEQ ID NO: 85963 - DNA, 75 bp, Homo sapiens
ttgtccagttactctaacaagtctggagacagagtctagctctttcacccaggctggagtgaagtggtgcaatct

SEQ ID NO: 85964 - DNA, 75 bp, Homo sapiens
gcgggagagaagaagcgcaggcacaggaagctggtgacggcgatgaacgacctcctgccccccgaggtctgcagt

SEQ ID NO: 85965 - DNA, 88 bp, Homo sapiens
ctggtgcatgggaggggagccgggccaggagctcttctggagctggagatgaactcggacctcaaggctcagctcagggagctgaata

SEQ ID NO: 85966 - DNA, 100 bp, Homo sapiens
cgtttgtgttgcgaggaactatcttggtgaagcagtgagtcgaaatgcgtctctggaagtggcatcccctggaggaacgcgcatagatgatggtgacaag

SEQ ID NO: 85967 - DNA, 90 bp, Homo sapiens
ggggaggcgccgcggactgtcctttcgtggctcactccctttcctctgctgccgctcggtcacgcttgattgactacttcaacaatcaga

SEQ ID NO: 85968 - DNA, 82 bp, Homo sapiens
tgagaaccatgctcaccgaccctcggagctggagtttgttcagatcatcatcatcgtggtggtgatgatggtgatggtggtg

SEQ ID NO: 85969 - DNA, 100 bp, Homo sapiens
gagtctgagtgcagccaccacctttgagcctcttgagcctgtgaaggacactgacattcaggagactacccacaaagccagtattttattgaatggtaaa

SEQ ID NO: 85970 - DNA, 51 bp, Homo sapiens
tcgcagtggtcgcttcttctccttgcttgtagattttcagtggaaactggg

SEQ ID NO: 85971 - DNA, 83 bp, Homo sapiens
gtgagtcttctggcaaacagtgtttgcctctggttcagctcatacaacagcttcttagcccacttcgatgtgttgttcttgtc

SEQ ID NO: 85972 - DNA, 82 bp, Homo sapiens
cgcccagagactgctgagcccgtccgtccgccgccaccacccactccggacacaggactcagtggcttttgaggatgtgtct

SEQ ID NO: 85973 - DNA, 51 bp, Homo sapiens
gttgccagaactgcccaaggacatcaggtggtgccaccaccacaacagaat

SEQ ID NO: 85974 - DNA, 75 bp, Homo sapiens
ttgatgcatctctacctggaactttgccgcatgaactggaaaatattgaacctactcaaggcctttcaatagaag

SEQ ID NO: 85975 - DNA, 75 bp, Homo sapiens
acgtccaggacagcttcctgaccaatgacatccttcacgagatgaaagaaatgaccgcccggatgtgccactgag

SEQ ID NO: 85976 - DNA, 75 bp, Homo sapiens
cggtgacggagactgcccaggtgtggtcaccatgttcctctccgcggtcttctatgagaactggactgatgacca

SEQ ID NO: 85977 - DNA, 75 bp, Homo sapiens
atttgcttccacaagaaccgcgaggacagagaataatccagaatggctactctgatctatgttgataaggaaaat

SEQ ID NO: 85978 - DNA, 83 bp, Homo sapiens
tctctcttcatcttcacttgaaataccggatgattttggagattcctgaatttgacaacttgtacctggatatgaatggaatt

SEQ ID NO: 85979 - DNA, 97 bp, Homo sapiens
cttcctgctgctgctgccctggttccccggccccacccgatgcggcctccaagggtggactccgacgaccagtggggagagtactcctgcgtcttcc

SEQ ID NO: 85980 - DNA, 85 bp, Homo sapiens
tcactggattatgttataatgtggaacctggatgaatgtagagagaaagtacttcaagtgttacgagatgacttccgacaaaacc

SEQ ID NO: 85981 - DNA, 100 bp, Homo sapiens
gaggaatgacaaacaaccagctcttcagggcggcgactggcggcgcgatggacctgaccgggctcctgctggacgaagaaggcaccttctccctcgccgg

SEQ ID NO: 85982 - DNA, 75 bp, Homo sapiens
actttacattagcagatatactattgtactatggacttcatcgctttataatttcctttgacctcgctgagtaca

SEQ ID NO: 85983 - DNA, 75 bp, Homo sapiens
ggcccagcatatacaaaggcatggaagtatgaaaatgtgcgcagtggaaaatgaagaacttgtccagcatctggg

SEQ ID NO: 85984 - DNA, 74 bp, Homo sapiens
gtgaaacgtgtgaaggagacgcagaagcacattagctcgcatcaacagctgtattatagtcaagatgactccaa

SEQ ID NO: 85985 - DNA, 95 bp, Homo sapiens
caacatttcccacaggacacgaagtttgtcggcccttgccttggcagagctgagtgtgctcactgatccgcctccagggccaccgccatgtcgag

SEQ ID NO: 85986 - DNA, 100 bp, Homo sapiens
cgaacgacaggacgttggggcggcctggctccctcaggaccatggccaacctggagcgcaccttcatcgccatcaagccggacggcgtgcagcgcggcct

SEQ ID NO: 85987 - DNA, 96 bp, Homo sapiens
ttttgcacttcagttcacatactatttatgggcaatgcatgaaccattgcaaacttggcaagatgcaccatacatttttattgtacatattggcat

SEQ ID NO: 85988 - DNA, 71 bp, Homo sapiens
agatggcggatctggaggagcagttgtctgatgaagagaagccaatggagatcttcgtggatgatgagacg

SEQ ID NO: 85989 - DNA, 50 bp, Homo sapiens
ccaagacctgggaacaagtcaaggaaatgatcttcattggttagcatgtg

SEQ ID NO: 85990 - DNA, 75 bp, Homo sapiens
aggaactccccgtatagaagagaagactcaatggaagacagattgttgcctgccctgatgtgcttcctcggaaga

SEQ ID NO: 85991 - DNA, 82 bp, Homo sapiens
agcaggctgagcagctgcaaacccccgaaaaagcacttctcagaacttctggatgagttttcccagaacgtcttgggtcagc

SEQ ID NO: 85992 - DNA, 101 bp, Homo sapiens
ggctaccccaccatcaagatccttaagaaggggcaggctgtagactacgagggctccagaacccaggaagttgtgttggtgttgaagaggagaaggctgct

SEQ ID NO: 85993 - DNA, 97 bp, Homo sapiens
ggaggagtacgcgcgagagccttgggcacattaaatgatcgcacgaatgcaattgattttctaatggataggaataatgttgtaccccgtataaata

SEQ ID NO: 85994 - DNA, 51 bp, Homo sapiens
ctctcagctctcggcgcacggcccaggccctggatggggatttctctgaag

SEQ ID NO: 85995 - DNA, 83 bp, Homo sapiens
aggctacacatgaagctgttcatctcctttgcaggatgttggtctttgatccagaaggtggtttgaagttgacatttcagaag

SEQ ID NO: 85996 - DNA, 136 bp, Homo sapiens
taggaatcctgatgacatccttctttttagagatcgttttgatggatatatcttccttgacagcaaaggtactaggttttgacaagcttgcatcatgcgtgagtataagctagtcgttcttggctcaggaggcgtt

SEQ ID NO: 85997 - DNA, 82 bp, Homo sapiens
cactatctcagtgccactgacatgttgagagaaagcggttggaagccaagcaacgggaagacatctgggaaggcagagacca

SEQ ID NO: 85998 - DNA, 50 bp, Homo sapiens
cagcccaccacccaaaagcaaggtttgcaatggtctggagcagccaagga

SEQ ID NO: 85999 - DNA, 80 bp, Homo sapiens
aatatgacggtggctataccagggactctgttctgattagttcttgccagtagtctcagtccatttcgtgaaggaagatt

SEQ ID NO: 86000 - DNA, 86 bp, Homo sapiens
ctgtcttttcccaaaagacaggctcttcacctgaagactgggctggcttagatgaagatgaagatgcacatgtctgggaggataat

SEQ ID NO: 86001 - DNA, 100 bp, Homo sapiens
gtttgcctttctgttggggatagagttcctgctgacttacgcttgtttgagagacagaagagatgggtgatgaagaagttttctcctggttgaagtgtgc

SEQ ID NO: 86002 - DNA, 100 bp, Homo sapiens
tggctgaaacacagtcgaaaagaatactgtgaattatgcaagcacagatttgcttttacaccaaaccctcctcatcttttccctgccttccatcctcctg

SEQ ID NO: 86003 - DNA, 100 bp, Homo sapiens
gggcgagcagcccccgggaggccgagtgcatctgttggaccgtgcgaggaatgacatctttgtgttcctgttaagcacacgagctggaggactgggtatc

SEQ ID NO: 86004 - DNA, 98 bp, Homo sapiens
cccaactcccaccccatccagtggaatgcaccacagccatctcacatttccaagtacattctcaggtggagacctgcagctgttgtgctgtgtatgga

SEQ ID NO: 86005 - DNA, 75 bp, Homo sapiens
catttgggagatccaagagattcagtatcactcgctcccttgatgatcttgagaatgataacactttgtgtccag

SEQ ID NO: 86006 - DNA, 71 bp, Homo sapiens
cgcctggacgccgctgacggccccgagcacggccgcccggccacggatcaagctgaagtgggggaatggct

SEQ ID NO: 86007 - DNA, 98 bp, Homo sapiens
atggccccgaccgcgtgctggagctcttcgacccacccaagaatagcctaacatggcagaccagagacagcgctcactgtctacctctggggagtcat

SEQ ID NO: 86008 - DNA, 75 bp, Homo sapiens
cgtggggacggccgcctagagtggttcagccacaaggaggaccctgatgcttggtgtgacctgagtaaatttgac

SEQ ID NO: 86009 - DNA, 100 bp, Homo sapiens
gtaacctcgtggaggggatggatttccataagttttactttgagaatcgaatggccaacctgctgacgggccccaaacggaacctgatggccctggcccg

SEQ ID NO: 86010 - DNA, 74 bp, Homo sapiens
tgaagataagacactttctcagttacagagagaacaatttctcacttgctatgaaactactgaaggagctgcat

SEQ ID NO: 86011 - DNA, 98 bp, Homo sapiens
atcttcaggagcgaagagctgcttctgtatcttaagttcataattggacccttgaagacactcttcagtggttgatagagtttgttgaactaccccaa

SEQ ID NO: 86012 - DNA, 50 bp, Homo sapiens
tgggacaccttctggagtatgggatccgctttatcctcatccagaaccgg

SEQ ID NO: 86013 - DNA, 119 bp, Homo sapiens
taacggaaaggagtgtggtccaggcacgcaagttcaagaggttgtgtgcatcaacagtgatgatattgatgatgttaagaagttcaaaccgggttacctggaagctactcttaattggt

SEQ ID NO: 86014 - DNA, 75 bp, Homo sapiens
gcggcaccaacagcggcgcgggcaagaagcgctttgaagtgaaaaaggaaccctaaggactctgcaatatgaata

SEQ ID NO: 86015 - DNA, 75 bp, Homo sapiens
cctcaagaagtcacttaggcatggctgtaatatttcttttcactcccagtctctgctggatgaaccgaatcctaa

SEQ ID NO: 86016 - DNA, 83 bp, Homo sapiens
gctttgagtaacattgccagagaggaagtctgtttactgttaaaagaaaccattgattcaagagttcaggagtacttggaagt

SEQ ID NO: 86017 - DNA, 104 bp, Homo sapiens
ctgaacatgagcctcctcctctccttctacctgctggggttgcttgtcagtagcgggcaaggtgctggagaatctggtaaaagcaccattgtgaagcagatgag

SEQ ID NO: 86018 - DNA, 80 bp, Homo sapiens
ttgctcttgctgtttctgcccctgggtctcagccaatttcttctccagtcatcctccagtttggtcatgcagagactctt

SEQ ID NO: 86019 - DNA, 51 bp, Homo sapiens
atggctacgtcctcgatgtctaagtagtgaccaaagatggagtctatgtcc

SEQ ID NO: 86020 - DNA, 100 bp, Homo sapiens
gattcctcaaccggcccacccgccagccagccagcgccttcatcctggggctgcgatgaattaaacaaccaccatgtcgagcaaaaaggcaaagaccaag

SEQ ID NO: 86021 - DNA, 82 bp, Homo sapiens
cagcttttcggaacagcagagacacagagggcagtcatgaggtttttctatatgagtggagaagacagctgttaccagggag

SEQ ID NO: 86022 - DNA, 100 bp, Homo sapiens
ttaaagttgtcactccactgtcttacgaagtttctgatgagaggacatgtactcccaggattccatagatctccttgctaactcaggactacagtttcag

SEQ ID NO: 86023 - DNA, 74 bp, Homo sapiens
cttctacttcaggcagtgtcgtgggcatcagagaaatccaagtgggaaggaaagcagaactccctagaatctga

SEQ ID NO: 86024 - DNA, 95 bp, Homo sapiens
tccgcatcgagaagatgagctcagaggtggtggattcgaatccctacaggttttcccatcatatgattcccggtcctcctggtccccacacaact

SEQ ID NO: 86025 - DNA, 82 bp, Homo sapiens
gcgagcgcgagcggcgcgagaaagatgccggctccaggagcagcagtggaggtcgggaacgcctcattgtggagcccccgct

SEQ ID NO: 86026 - DNA, 74 bp, Homo sapiens
actgggatggggccctagggagcctgcatgaacatctctgagaggtacttccattcaaccaacccttggtgcca

SEQ ID NO: 86027 - DNA, 98 bp, Homo sapiens
tccctgcatcatggagaagaaagacctcggccccaagcctgctctcattggccaccgcggggcccccatgacgtggatgagtgtgcactgggtaccca

SEQ ID NO: 86028 - DNA, 100 bp, Homo sapiens
gctttagttggtggtggaaaaaagccgaaataccctcccaacaaagatggaacaaattccactgagctatcctcaaggtcacggattccatcctctgtca

SEQ ID NO: 86029 - DNA, 100 bp, Homo sapiens
gtcatgagatgcctccacacatctatgctatatctgaatctgcttacagatgcatgcttcaagggtggttctcttcccaaagtggaagccaaattcatca

SEQ ID NO: 86030 - DNA, 75 bp, Homo sapiens
gaaaactttttgaaggttggtgaaaaggctggagcaaagtgcaacattagtgccagcagtagttcccaagggctg

SEQ ID NO: 86031 - DNA, 90 bp, Homo sapiens
gttgttgctcccgcctgagcccagcccccagaaaggattgtgacatatcgttggacccagaattgagttgaagactgggatagtttccaa

SEQ ID NO: 86032 - DNA, 82 bp, Homo sapiens
caagaggagagaatggctgctgggtacctgccccgctggtcccagattgagaaaatcatgagttctattggagaagggattg

SEQ ID NO: 86033 - DNA, 80 bp, Homo sapiens
atgatcctgaagtacagaaagacatgtgtggaatatcaaacaaatgattaagttgacacaggaacatatagaggccctat

SEQ ID NO: 86034 - DNA, 88 bp, Homo sapiens
aagaacagtttgctcttgaaatgaagaataaggaacatgaaattgaagtcattgaccaggaccctgatgctcccataagacagaaaat

SEQ ID NO: 86035 - DNA, 100 bp, Homo sapiens
tcctccaagctgtggtgtgcaggtgaacaagctgtggtacaagcccgtggaacaattcatcttaccagagggaagtgttcgccagttactacatgaaaag

SEQ ID NO: 86036 - DNA, 75 bp, Homo sapiens
gttccccggcccacagtgggggtgtgcaaacccgagagaactggtccagaacatacatgtgcagctggcaaggag

SEQ ID NO: 86037 - DNA, 74 bp, Homo sapiens
agtgcttcgtgtggagcggcacggctgaggcccgcaagcgcaagtcctggatcagtgacattcgagcaggaacc

SEQ ID NO: 86038 - DNA, 82 bp, Homo sapiens
aaatactgcaacccaaactggctcctagtttctctgatgcacagaccgttatggaaacaaaggacatgctttacatcgtcac

SEQ ID NO: 86039 - DNA, 82 bp, Homo sapiens
cctggttctggaatcctcagttcaaggtgacagagctgaatgaacctctctccaatgaagatcgaaatctcctctctgtggc

SEQ ID NO: 86040 - DNA, 100 bp, Homo sapiens
atcacagcactcaacccctccaagggtgaagatgaagccatgtttgtagaatatagaaaacaactgaagttactgttggacaggcttgctcaagtttcac

SEQ ID NO: 86041 - DNA, 100 bp, Homo sapiens
atgaagggctgtgggagatccagaacaacccccacgccagctacagcgcccctccggatgagacctgcacgcagtggctcacagcagcacgatttgtgac

SEQ ID NO: 86042 - DNA, 95 bp, Homo sapiens
ccccgaagatgttggagatctatgattaacgtcttcaaggacccagttgctgatcccaacaaaaggtccaaaaagggccgattatctttacatag

SEQ ID NO: 86043 - DNA, 74 bp, Homo sapiens
gatcaaggacggatgatgaagtagtacagagtttgtaactaatcctgatattgctgccaagaaaaaaatgaaga

SEQ ID NO: 86044 - DNA, 75 bp, Homo sapiens
tcagttgttgcatcaaatacttcatatttggcttcaatgtcatattttgggtaaagaagttaaaagcgtttagtg

SEQ ID NO: 86045 - DNA, 88 bp, Homo sapiens
tttcttcgggacagctggaagagataacagcgagaatcttggaggcccatcagaatgtagctcagatgagtctaattgaagccaagat

SEQ ID NO: 86046 - DNA, 98 bp, Homo sapiens
caagattatttcagagcaaggtcgtgcggtgtgtgtagaagagagaaaaggaacagttccgtaagctctttattggtggcttaagctttgaaaccaca

SEQ ID NO: 86047 - DNA, 74 bp, Homo sapiens
tacgatgtgtcagcagagcatgcagaagtcctcgctggagtttcataagacagaccccgtgcggctgacacagc

SEQ ID NO: 86048 - DNA, 75 bp, Homo sapiens
aagtctatccgagagtttgcagcaaagatcattgaagaggttgacggatatattcagacgttacgacacggatca

SEQ ID NO: 86049 - DNA, 50 bp, Homo sapiens
caagaccacagctggtgaacagtccaggagtctctctctgtggccaccac

SEQ ID NO: 86050 - DNA, 73 bp, Homo sapiens
atgctatagtctggtatcaaaagaagattctgaaaaagagttccacgtcctcccttatcgagtctttgttccc

SEQ ID NO: 86051 - DNA, 100 bp, Homo sapiens
cagattttgaagaagggccgtcgaggaaaagcaaacggatgtttcagaagacagcaatgatgatatggatgaagatgaggtttttggtttcataagcctt

SEQ ID NO: 86052 - DNA, 114 bp, Homo sapiens
aacaaatccttgaaagaagaagatggagaagaaatagttacctatgatcgagaactgtcagaatgaggagatcctgaacagtctcaagtatgtccgtcctgggggtggatacca

SEQ ID NO: 86053 - DNA, 83 bp, Homo sapiens
ggagaaggaagcgagactcatacgcaacctcaatgaaaaagcttgtggtgaaggggggcaaaaaaaagaagcaagttctgaag

SEQ ID NO: 86054 - DNA, 75 bp, Homo sapiens
ctccggccgaagagcggcggcggcagcggcggtttggtgcacctcgatttggaggaagtagggcagggcccttat

SEQ ID NO: 86055 - DNA, 75 bp, Homo sapiens
ctagaactggacacctcgggggtttcctgctttatggcgaaggacaatgcagatcttcgtgaagactctgactgg

SEQ ID NO: 86056 - DNA, 83 bp, Homo sapiens
cggggaacttgtgagcctgcggtgaaagatctattaatgagatgaagcggttggaagaaatgtcaaatatgtttcagagctct

SEQ ID NO: 86057 - DNA, 75 bp, Homo sapiens
cgaggaacgaagaaacagacattcaacatgattgcatttgaagtgaatgagacctggaccctggagaactgcacg

SEQ ID NO: 86058 - DNA, 82 bp, Homo sapiens
aaatgcagaaacgtaaagaaatgcaattgaggcagcctggcatcctcgctacaacctcattgttgtgggccgatacccagat

SEQ ID NO: 86059 - DNA, 100 bp, Homo sapiens
agcaaactccgcttccgattgggctaccacgccattccgagtatgagctcgatcaagtcatccgccaaagaagcctgtccagtttggaactgttcctctc

SEQ ID NO: 86060 - DNA, 100 bp, Homo sapiens
ctccagcggtgcccacatctggcccgatgacatcactaagtggccgatctcgaaaaccatcaacatgcttgtgcgctggtatgtggacgggcccgcctcc

SEQ ID NO: 86061 - DNA, 100 bp, Homo sapiens
tctgatcatcctagcaaacaacagtttgtcttctaatgggtggccacagatgtctttaattccaaaaacctggccgttcaggcacaaaagaagatcttgg

SEQ ID NO: 86062 - DNA, 90 bp, Homo sapiens
gacagcctgcaggatgcctgggactacgtgcaggctcaggtgagcatctcctggaccaccctcaagcttcaggtgagctgagcttctaac

SEQ ID NO: 86063 - DNA, 83 bp, Homo sapiens
caaagagcttgctccctacgatgagaactggttctacacgcgagctgccttgccaacattccactaacccccgagactcagcg

SEQ ID NO: 86064 - DNA, 95 bp, Homo sapiens
gtcagatggcggcggccgagctgacggccccggcccagcttcctgcctgacacagctcacttcaagaagtgcacaatgtcagaacgtggaattaa

SEQ ID NO: 86065 - DNA, 75 bp, Homo sapiens
gaaccctggggactacgacgtccctcaaaccttgcttctaggagataaaaaggttcacagcatgtccgcctcggc

SEQ ID NO: 86066 - DNA, 82 bp, Homo sapiens
gaacatcacccagcgcggcaacgtcgccaagacctcgcttgccaattctgtaactccttgggatatcttgctgagcttaatt

SEQ ID NO: 86067 - DNA, 100 bp, Homo sapiens
ggatcccggagcctgactgctgtctacagtggcctgaagggtgagaagcacggccgcggaagcagataccaggtgtcccgcatgagatgtctgcagaatg

SEQ ID NO: 86068 - DNA, 90 bp, Homo sapiens
cagtacctgcagaaggtctctggagacatcttcagcaggaaccagtgaccttccgggatgtggctgtggactttacccaggaggaatggg

SEQ ID NO: 86069 - DNA, 88 bp, Homo sapiens
ttcccaacctcatgaatctcatcgccaccatctttgtctttgcagtggtcatctatttccagggtctgcaagtggatgatgagattgt

SEQ ID NO: 86070 - DNA, 98 bp, Homo sapiens
acagccatggacaccgaggaccagggcgtgaaggtcttcctgatctcggttctggcagagaagagacagctgggtggcaaggatggccctcctcatca

SEQ ID NO: 86071 - DNA, 76 bp, Homo sapiens
tgaggctctgcggctggtccaggccttccagtacacagacgagcatggggaagaacaggccgcccgcctgaagaaa

SEQ ID NO: 86072 - DNA, 100 bp, Homo sapiens
tcagctcgagcttccctcgtggccgacggaacaatgaaggttatgatgtgattgctcaagcccaatctgggactgggaaaacggccacatttgccatatc

SEQ ID NO: 86073 - DNA, 100 bp, Homo sapiens
tttggcagtgccacgaccatctcgcactaccctgactacagctggagcgcccagaggcgagccctggtggaggaagagaggcaaggtctcactcggtcat

SEQ ID NO: 86074 - DNA, 83 bp, Homo sapiens
ctaaaagatgacagacttggacaacatgtcccaacattacatcccacagagcatcctggccagaacaagccaaggagccaaga

SEQ ID NO: 86075 - DNA, 97 bp, Homo sapiens
aagctaaggattgaggctgatgagtttcaggtttagctgtgcctcccagtgactataatgacaaggaagctgtaaatgtatttgagttaagcttttg

SEQ ID NO: 86076 - DNA, 83 bp, Homo sapiens
ccgccgctatccactggcggagtctctctttccggattctgcctccctccgctaacctccgactcggcggtggcgaggactgg

SEQ ID NO: 86077 - DNA, 75 bp, Homo sapiens
aaggattccaagtaactcttatttgccattatgcagatgtagatcctgaaaaccagaactttttacttgaatcga

SEQ ID NO: 86078 - DNA, 100 bp, Homo sapiens
ggctgagcagaggacgacatgttgcttttcgtggagagtatccagtacaagattggatctacagaaaaaatctgaagcccttgaaagtatcaagcaaaag

SEQ ID NO: 86079 - DNA, 46 bp, Homo sapiens
cctggagcagtatgccagcaagaaaactacccctgagtgtggtccc

SEQ ID NO: 86080 - DNA, 101 bp, Homo sapiens
cggcggttgcgggggggaagtgactgggcggtgccggcgccggagacgatgccgttgtgtttgtaaaatgtatgaagaacatctgaaaagaatgaatccca

SEQ ID NO: 86081 - DNA, 100 bp, Homo sapiens
aatgctgattgaaaaagatccttcattagaaaagtctatacagtttgcattgaggcagaatttacatgaaatagattgtgcttcttggtcagaccccgca

SEQ ID NO: 86082 - DNA, 50 bp, Homo sapiens
cgcgatttgaggagctgctgctgcaggtatcttggagatggccgcttcca

SEQ ID NO: 86083 - DNA, 100 bp, Homo sapiens
gtatgacacagcacctcgaggcaaggaaataagaaaactgcctctgatccaagcagagaaggatttgctttcccatatgcttcatatggacccacatcag

SEQ ID NO: 86084 - DNA, 100 bp, Homo sapiens
gtacggaaagaagatatgacctatgcagttcgaaaactggataacactaagtttagatctcatgaggccatgatcatagctttcacgtcggacatgatcc

SEQ ID NO: 86085 - DNA, 82 bp, Homo sapiens
ctcgtgtggaccccagagcatgcacaggctggaactgtggctgcaccatctgtcttcatcttcccgccatctgatgagcagt

SEQ ID NO: 86086 - DNA, 78 bp, Homo sapiens
gtagccacctcctaaccttcccttcttgaacccccagttttcggctttgtgagaaaccttaccatcaaacacgatggc

SEQ ID NO: 86087 - DNA, 100 bp, Homo sapiens
agtgaacaacgatggcattttgaaaacagcaaaggagccagcaccgctctttgaccttgccatgcttgccttagatagtccagagagtggctggacagag

SEQ ID NO: 86088 - DNA, 101 bp, Homo sapiens
aaaaggctaatggcacaactgtccacgtaggcattcaccccagcaaggtggagtacgtcatcaagtgcgacatgtctgcgctgcagcgagtgctctaccgc

SEQ ID NO: 86089 - DNA, 75 bp, Homo sapiens
gctttgcctttctggacacagaagtatttgtgacagccccatctgctttgatatgattgaagaagcatacatgac

SEQ ID NO: 86090 - DNA, 136 bp, Homo sapiens
aaacaatggactatgatgatgaagaaacagactctgatgaagacattcgagagacatatggctacgacatgaaggagtcagcattggtaatagtgctgtgctgcggaagagtggagtctaaactttttcattgcca

SEQ ID NO: 86091 - DNA, 100 bp, Homo sapiens
cagactagccactttgcattgactggaaacaatggcatttacagaaagagtcaacagcagtggcaacaggtcgaattgacataaaacagttgatagcaaa

SEQ ID NO: 86092 - DNA, 100 bp, Homo sapiens
atacagctgctgctacagtgcgacaagttgttactgttgtttttgagaggatggttgctgaagatgaacgacacagagaaaaagcttgtggtgaaggggg

SEQ ID NO: 86093 - DNA, 75 bp, Homo sapiens
tgctgcccctgctgtcgctcctggtcggcgcgtggctcaagctagcttcagcgcctgctcctggtcatcactaac

SEQ ID NO: 86094 - DNA, 101 bp, Homo sapiens
caaggtcaaggcccagaaaaagtgaagaaaacaactcaggtcaaagactacagctttgtcactgaaggatccaaggagctggttctgctggttggaccaaa

SEQ ID NO: 86095 - DNA, 74 bp, Homo sapiens
gctgctcaagttccagatttgaggacaagaattttgggcagatttgaatgccatgaacgtgtatgaaacaactg

SEQ ID NO: 86096 - DNA, 82 bp, Homo sapiens
gccaagcttcctaagaacaaaaaccgaaataggtacagagacgtcagtccctatgtttggaaactggacatttggcactttg

SEQ ID NO: 86097 - DNA, 100 bp, Homo sapiens
ccccaacacacggtccacagctcatcatgatggacttggagctgccgccgccgggactcccgtcccagcaggaggtcttgctggagttgctagaacaatg

SEQ ID NO: 86098 - DNA, 90 bp, Homo sapiens
ctggagggcaaggcgggaacacatgagctgcttcagaaagagcaaaactattcagatgacgtcttggccaacatgattagtgaaccaagg

SEQ ID NO: 86099 - DNA, 135 bp, Homo sapiens
accgccgcagcctctgcggagccgggctcgggtcgccggagccgcgccccaccccgccagctccagagccacgtccggacactgtttgtcagcggcctccctgtggacattaaacccagagaactctacttgctc

SEQ ID NO: 86100 - DNA, 100 bp, Homo sapiens
ggaagaggtcctatgacaggatcaaggatgtacagttacccagcacgtgtacctcctcctcctcctattgctcgggctgtagtgccctcgaaacgtcagc

SEQ ID NO: 86101 - DNA, 87 bp, Homo sapiens
tggaccaaagacgatcaatcaaattcgtcaagatgcagtaaaagaagaagcattgcatgcatttattcagccagagattctggatgg

SEQ ID NO: 86102 - DNA, 100 bp, Homo sapiens
agcctgcaacaaagagttccttgctcatctaaaagaggcaatcaccgttcagtattccagtaccagtacccggagagaacatgtcaaagttaaaaccagc

SEQ ID NO: 86103 - DNA, 105 bp, Homo sapiens
atgaccaagagaatgtgtcagccgatgcaccgagtccagcccaggaaaatggagagctctttcgacgtgtagcagcagctttgccgggaatggaaagcacacagg

SEQ ID NO: 86104 - DNA, 100 bp, Homo sapiens
gcaatggcggaaggagaagatgtgccgccgctgccaacgtcgagcggcgacggctgaatgatatggaacctagcaaagctgttccactgaatgcatctaa

SEQ ID NO: 86105 - DNA, 100 bp, Homo sapiens
gaggcaccgggatcgtgaccgagaccgtgaccgagagcgtgaccgagagcgcgaatatcgtcatcgttagaaggccaagattgaaaaatgtggatcggag

SEQ ID NO: 86106 - DNA, 75 bp, Homo sapiens
gcatcaacaagatgttgtcctgtgctggggctgacagttacagaatgtctgaaggggacagtgtgggagaatccg

SEQ ID NO: 86107 - DNA, 88 bp, Homo sapiens
gttctcgaatcattctttgtacagaaattgaaaggcttcaaagctagcagattggtccagaaaagggcgtggtgcacctggcgacagc

SEQ ID NO: 86108 - DNA, 75 bp, Homo sapiens
cgcaagcgggtcctcaacgtcaccaacctcgagttctctgacacccggatgttgcttcagagtgtgaagtcaaat

SEQ ID NO: 86109 - DNA, 87 bp, Homo sapiens
tggacatgtcaacagtggacgctgacaccgtcactgagctggcccagtgagaaagatcagtctaaagaaaaggagaagaaagtgaaa

SEQ ID NO: 86110 - DNA, 83 bp, Homo sapiens
caggccgtcaagtacctcatgttcgccttcaacctgctcttctgggtgtttcccattaaacactaccaggacaaaatcaggcc

SEQ ID NO: 86111 - DNA, 75 bp, Homo sapiens
ctgagctcactttgtgcactgagtgctgacggggcccttggtgtgagtatcagtgcgccaggaggagccattgct

SEQ ID NO: 86112 - DNA, 100 bp, Homo sapiens
agccgttcttggtttcaggcccgcactcgacagccaccgccgcccccaacgtccatgcctgagagccctggtattccttgaacatgcatacctttcccag

SEQ ID NO: 86113 - DNA, 90 bp, Homo sapiens
gccccgttcttgaccaaacatgacagactctgaacatgcagggcacgacagatctatgcagttagatcagttgttcccaacaaaagcaat

SEQ ID NO: 86114 - DNA, 75 bp, Homo sapiens
cgcaagaagcaccagttcaagtggccctcagggcatccccgttttcggacctccacaaaaagtactcgtacatcc

SEQ ID NO: 86115 - DNA, 105 bp, Homo sapiens
aagacttgtgaatccaggaagagagactgactgggcaacatgttattcaggagacagatgctgagcccttactgtgacacgctcagaagtaacccactgcagcta

SEQ ID NO: 86116 - DNA, 97 bp, Homo sapiens
caaagtctccacgcggtccttcatcaaccgcccgaaccagagccggaggcgggaggacgggctgccgcagcatgacgtatcccagactttactcaag

SEQ ID NO: 86117 - DNA, 100 bp, Homo sapiens
agaccattgctctttgccagagaaattcacataatttgaaccagcagcaacgtgagtactatactggcaattgctggagaagattttgcaattgttgctt

SEQ ID NO: 86118 - DNA, 101 bp, Homo sapiens
atggaggacgaggagagacagaagaagctggaggccggcaaagccaaggcagaggtggaggagacactgaagcgactgcagagccagaagggagtgcaggg

SEQ ID NO: 86119 - DNA, 110 bp, Homo sapiens
ctggacaaagtctgcaacatggctagagactgccgggactggtcagatgaacccatcaaagagtgcggacacaactcagatgggaagttcatcgcccgggcacagcggat

SEQ ID NO: 86120 - DNA, 50 bp, Homo sapiens
ggactggaagagcaggaaacaaggagacggtggctcagggagtaaaggaa

SEQ ID NO: 86121 - DNA, 96 bp, Homo sapiens
ccatgatctgtggctgggataagagaggccctggttgcactagtcgggggttccatgctggggggcagaaggaatgctctctaccgtctgaaaccg

SEQ ID NO: 86122 - DNA, 75 bp, Homo sapiens
ccaggctaccatggtctacaagactctcttcgctctttgcatcttaactgcaggcgtggtgtccctcgtggccgt

SEQ ID NO: 86123 - DNA, 75 bp, Homo sapiens
tcctggtgaccgagcacccgcctccgggcatcttcaactgttcgagaacttgtcttggacaattgcaaatcaaat

SEQ ID NO: 86124 - DNA, 95 bp, Homo sapiens
cctgacctggagagcaggggctggtcagacgcaaaatcgaatgaagctaatggccgacaactacgaggatgaccacttcaaatcctcccattcca

SEQ ID NO: 86125 - DNA, 100 bp, Homo sapiens
aaagatgctcaggctgctcttggctctcaacttattcccttcaattcaagtaacagaatgaagaagcagtacgacgtctcatctgggaaaagaatctaaa

SEQ ID NO: 86126 - DNA, 82 bp, Homo sapiens
agcgctcggccggcgtgggagcgccaaggccgcaggtcaaaatgcagatcttcgtgaaaacccttaccggcaagaccatcac

SEQ ID NO: 86127 - DNA, 50 bp, Homo sapiens
caagaaatagacgatagcttggatcaaggcctctgagcccaagctaagcc

SEQ ID NO: 86128 - DNA, 50 bp, Homo sapiens
gtggctgccatgcgccggatacggacttcctgggaatgaaaatggttggt

SEQ ID NO: 86129 - DNA, 138 bp, Homo sapiens
gcaaatagtcgagaatagcgatccggggagaagcaggtgtctgtggggcccaagagaagtaccatctcggtactccaaagattcaggtttactcacgtcatccagcagagaatggaaagtcaaatttcctgaattgct

SEQ ID NO: 86130 - DNA, 73 bp, Homo sapiens
caccatgagcgacgtggctattgtgaaggagggttggctgcacaaacgaggtctcctctgagcctccggcctc

SEQ ID NO: 86131 - DNA, 97 bp, Homo sapiens
cttgactgccatccttgcctcgctcactgcacgccagaacctgaggagagaatggcatgccaggaagctgagctgaacacattacgatggatgatgg

SEQ ID NO: 86132 - DNA, 100 bp, Homo sapiens
tgattctttaagaaaatcagataacttgtactggagagaaatcctacaagtgtgagtacccaaaggcaagtggaacagctctaatggggttgaagaaaag

SEQ ID NO: 86133 - DNA, 100 bp, Homo sapiens
accattcgcctgatgaactctcaggtgtgatccctcacatccacaaatctctgattggaaagaagggacagcagaaaactgcttagagggatgctttaac

SEQ ID NO: 86134 - DNA, 98 bp, Homo sapiens
ctaagaagaccgagagtcaccacaaggccaagggcaagtgatttgacaggtagctacagcaagctgggtagcaggcagatccaaaggatatcatgaag

SEQ ID NO: 86135 - DNA, 82 bp, Homo sapiens
cgaggagcgggaagagttgctggggcctccggtgtggctgtctctgatggtgtcatcaaggtgttcaacgacatgaaggtgc

SEQ ID NO: 86136 - DNA, 100 bp, Homo sapiens
cttgtacttgaatggaaggcggatgaacaccttgcaggatatgggccctcacattttccaaacctgtccatctgctaactattttgactgcagagccatg

SEQ ID NO: 86137 - DNA, 100 bp, Homo sapiens
ggggaatttctgcaacccatagtcaacgattacatgtggtcatgtgcagtctacaaatgctgatgatgttgacaaccccttgggagacatcgcatcgcta

SEQ ID NO: 86138 - DNA, 100 bp, Homo sapiens
tcggcggcgggcggcagcatgtcggtggcggggctgaagaagcagttctacaaggcgagccaggacttggatgttgtgggtgatggtatgcagtgtcctc

SEQ ID NO: 86139 - DNA, 100 bp, Homo sapiens
tttgctccttaagaaacttaaagcctggaatgatatcaaaaaggcatcaccaaccagatgtccattgacgagctgtccccctgtgaagaagaggcccccc

SEQ ID NO: 86140 - DNA, 100 bp, Homo sapiens
ccccgccgctgagccgccggggagccgtccagtcttcgaatcccagttcctgggggaagccaaggtcccactccgagaggtcctcgccacccctagtctg

SEQ ID NO: 86141 - DNA, 75 bp, Homo sapiens
aaggagttcacgttcatgggcgagggaacagatgagaaacccggcaatgaaacctttgacgacccctatgccctg

SEQ ID NO: 86142 - DNA, 98 bp, Homo sapiens
cgcgctgctggacgaagagctctcctccttcttcctcaactatctcgctgacacgcaggtgacatcagttgcaaggggatgaccgagcgcattcacag

SEQ ID NO: 86143 - DNA, 75 bp, Homo sapiens
atagtggcaggtgacagtctgcatgtgcagttttcaggatgttttagaagaatgtatgtctcttcccaagctatc

SEQ ID NO: 86144 - DNA, 101 bp, Homo sapiens
actcagtcccatcactccaaggagagaagcaataatgacgatgaggacctgacaccagagcagaaggcagagcgtgagaaggagcggaggatggccaacaa

SEQ ID NO: 86145 - DNA, 100 bp, Homo sapiens
gttgtcaaggattcagagcagatgtgatctgcgctaggtggcatctcctctcacggatgcctcgatggcagttgaattcctgcatgaactgaatgttcca

SEQ ID NO: 86146 - DNA, 98 bp, Homo sapiens
gcagtgaaggagtgcagaggcatcacctgaaagcaccgggtgctcagcagttctgcttcttgctttccactcgagctgggggccttggaatcaatctg

SEQ ID NO: 86147 - DNA, 75 bp, Homo sapiens
agtggagaagcgggagactcagcttaatcacagacaaagttgtgcatgagaggaggctctgtcggtggtgagcga

SEQ ID NO: 86148 - DNA, 100 bp, Homo sapiens
atggagtccatcttccacgagaaaattctgcttctcagaagatgcactattatagatactctaacgccaaggtcagctgctggtacaagtacctcctttt

SEQ ID NO: 86149 - DNA, 101 bp, Homo sapiens
ctactcccgcatgcgggccctgagccaggagatcacccgcgacttcaacctcctgcaggtctcggagccctcgccaaatttgtatcctactgtggggcttc

SEQ ID NO: 86150 - DNA, 82 bp, Homo sapiens
acagaccagcatttcatcgcccagcctggggtccagacaatgcagatcttcgtgaagactctgactggtaagaccatcaccc

SEQ ID NO: 86151 - DNA, 80 bp, Homo sapiens
gggcgtaaaggctggcagcctccccgggtgcctccgcggaatggaagttggatacactttgtgacttgtacgagacactg

SEQ ID NO: 86152 - DNA, 101 bp, Homo sapiens
gtcgctcctggtcggcgcgtggctcaagctagaggcgttggggctgaacctctgctcccatggaaccggatgctgcaaacccagaatgcagccttccagcc

SEQ ID NO: 86153 - DNA, 100 bp, Homo sapiens
gagttggcgagtagtagcgaggagacgaagatgcacgggaacaagcagcacctgcagaaggacttcttcctgtacaacgcctccaaggccaggagcaaaa

SEQ ID NO: 86154 - DNA, 98 bp, Homo sapiens
tgcagcgccttacaaacctccccatcaacgccaggaggaaaagctttctcaggaaaaaggctatgacttctgccaggtcctgcagtggtttgccgaga

SEQ ID NO: 86155 - DNA, 100 bp, Homo sapiens
cgccgatgcccgcgtggccatcaccatctactgccaggcatcggaggagttcctgaacggcagggcagtgtggcagagtttgtggatgagcggccagaag

SEQ ID NO: 86156 - DNA, 95 bp, Homo sapiens
atgctaccttcaacatcattggacctggtattgtgctttccaaccctgaccgaccatgtcaccagctggtggagctgtctaaggctcaagatata

SEQ ID NO: 86157 - DNA, 82 bp, Homo sapiens
gtgtgaaacagctgttgaatatgctccagattatcaaagcttttggactttttaaccgtgattggagataccacaaagaaga

SEQ ID NO: 86158 - DNA, 98 bp, Homo sapiens
ctgaagtgtagcgaaaatgctactatgactcttcctggaatacacccacctaccttgaaccagacctggaatcatttttctgataatgaggcagagcg

SEQ ID NO: 86159 - DNA, 75 bp, Homo sapiens
ctctgcggcttctggttctcacttgtcggcaagagcggtgagcggggcgcctatgcctccttcgggagagacgca

SEQ ID NO: 86160 - DNA, 75 bp, Homo sapiens
gagaagatcatcgagcatttcaaacgcttcatggcggctgaagagatgcattggcctgtccctatgaaggccatt

SEQ ID NO: 86161 - DNA, 75 bp, Homo sapiens
agtaccatgcaggatgaaacattaaattcttccgttcagagtattaggccctgtacctttgatgttaagtggtgg

SEQ ID NO: 86162 - DNA, 100 bp, Homo sapiens
ccgcaagactgtgggcgtggagccggcagccgacggcaaaggtgtcgtggtggtcattaagcggagatccgttattaccccattcaagttgacaactgag

SEQ ID NO: 86163 - DNA, 100 bp, Homo sapiens
cttccggaacagcgccgaggccttcaagtgcatgatgtgcgatgtgcggaagggcacctccacccgatgcctttggtgcttcatgaagaatatttccaga

SEQ ID NO: 86164 - DNA, 78 bp, Homo sapiens
agagacttctactggctgcgctcctttctggccggagctgcactgggtgttcaacagccatcactccttggagcatct

SEQ ID NO: 86165 - DNA, 83 bp, Homo sapiens
gtctccgccggctactgccgcttcagttctcccggtgtggccacgagtcggggaaatcctcattgacgattcaatttgttgaa

SEQ ID NO: 86166 - DNA, 108 bp, Homo sapiens
tgtcagtcgcgagcgaacgaccaagagggtgttcgactgctagagccgagcgaagcgttttaaaatcaaagatgggaaaatcggagaaaattgcccttccccatggcc

SEQ ID NO: 86167 - DNA, 100 bp, Homo sapiens
gccaagggcaagtgatttgacagtgaagaaaatgaggcacgaggaattgttaaccaagaccttccaaggcccagctgttgtgtgtgggactccgaccagc

SEQ ID NO: 86168 - DNA, 100 bp, Homo sapiens
atgcagaagtaccttgcagagagaaatgaaataacctttgacaagattttcaatcagaaaattgtttaatggatcgagaagtggcgttgcttgctgaaat

SEQ ID NO: 86169 - DNA, 71 bp, Homo sapiens
caggtccaccacctgctccatttgcaagtccaacgagcgctcctccaagcggagccttggagggcacggcc

SEQ ID NO: 86170 - DNA, 100 bp, Homo sapiens
agcacctggatgagacatttgctacagcatcccacattaagtcaacgggcgccctgcgtccggcagaggaggcgagcatcccgctcaggtgatgaggaac

SEQ ID NO: 86171 - DNA, 82 bp, Homo sapiens
ggagaagctgtctctgatccgcaagcatgctcagaccttcattgctctgtgtgccaccggatgtgttcgaaatgcgctttgc

SEQ ID NO: 86172 - DNA, 82 bp, Homo sapiens
aaaccagtggccacagcatctttgtctagccccagtgcagagggagaaccgaagattacaggaggccagcatgaggttggaa

SEQ ID NO: 86173 - DNA, 99 bp, Homo sapiens
ctggtggatgctcttcagttcgtgtgtggagacaggggcttttatttcagaactgtggctgcaccatctgtcttcatcttcccgccatctgatgagcag

SEQ ID NO: 86174 - DNA, 101 bp, Homo sapiens
gtggatggggacctgcctgctggtttccactgtatccaaaaggaggggagaagttgcagtttgattatggtgtctatcttctgaacaaaaatatagcacag

SEQ ID NO: 86175 - DNA, 81 bp, Homo sapiens
tgacttcaaaagagtagtggattttctgaaagagaaagcctacaaatacatttggcaagtacccaagggcccattgaggtt

SEQ ID NO: 86176 - DNA, 88 bp, Homo sapiens
acagggatgataattgggcctccaagagattatgatgttgatgaagaggacatgatgaatcaggtgttgcagcgctccatcatcgacc

SEQ ID NO: 86177 - DNA, 100 bp, Homo sapiens
gcgcgaggtgaccggagtcacagttcccgcaggcggcgacagcagagcgcccactgcctccagcaggcaacagcattattgagaaaagcccttacagaag

SEQ ID NO: 86178 - DNA, 49 bp, Homo sapiens
ggaaaatctccccggtgactttcaggaagaaggaggagttgcggatgat

SEQ ID NO: 86179 - DNA, 100 bp, Homo sapiens
gtggagatatggcgcaactgcggcgcgctctgacgcccgctctgcggcttcggtgtttgaacaggccacagtccaggagcgcttacattcaggagctccg

SEQ ID NO: 86180 - DNA, 97 bp, Homo sapiens
cccagaccagcctgcactgtgccttaacagaaggtcttgagattctaagtgggaatcatttcaggttggaaagggcaaagaaattacaagaacagcg

SEQ ID NO: 86181 - DNA, 87 bp, Homo sapiens
ccaccacccactccggacacagtttctgtgtttgaagaacatacgcaccttcctgaaagtctgccacgataaatttggattaaggaa

SEQ ID NO: 86182 - DNA, 60 bp, Homo sapiens
cgactacgacagggcgtgcccagggcactgtgtttagtcttgagtcagaggaggaggaat

SEQ ID NO: 86183 - DNA, 100 bp, Homo sapiens
tgctgcttccttcggccttgtccgagcaaacagaggcgctcatccacagagccacatctgttagttggcctttaccagagtttgatccaagccagattcg

SEQ ID NO: 86184 - DNA, 100 bp, Homo sapiens
ccgccttccacccatgtgtgtcaaccctaccccaggagggaccatctctcgaggaccgtataatagacgctggccccaaaggaaactactctcgatttat

SEQ ID NO: 86185 - DNA, 97 bp, Homo sapiens
agaccctctgctcaggcttctgcctctggcgcgagggggaccagctgaccaagtcggaggcctgcaggactttggcacccgagaaggacaaggccac

SEQ ID NO: 86186 - DNA, 74 bp, Homo sapiens
aaatgaaattcattacagaaatctggcacccaaatgatatgtcttgtcgttcaagacttgcaacactaaacgag

SEQ ID NO: 86187 - DNA, 98 bp, Homo sapiens
ggctgcctttgttgctgctgcacattaggttgcagtatgtggccagttatttgcctcagtaaaagaggccgttgctccagggagaactgcaaatatct

SEQ ID NO: 86188 - DNA, 110 bp, Homo sapiens
ggcaacagagcgggactccattccaaaaaaataagaaaaacagaaaaataataattacatctgcaaagaccttatttccagtctttcccagggaactccgatgaagtgtt

SEQ ID NO: 86189 - DNA, 100 bp, Homo sapiens
ttaagaaatctgccccaaagtcttagaactgactctgtttgctggctacacggacaacctggtgcgagtgtggcaggtgaccattggcacacgctagaag

SEQ ID NO: 86190 - DNA, 75 bp, Homo sapiens
ccgggagcgagctgggagggagccgcgcgcctttgtgcgcgcgccgaggatgaccagtgtcccagtgaaggaacg

SEQ ID NO: 86191 - DNA, 82 bp, Homo sapiens
gcttccccacgtcgcttgggggccacggcgcggacgccatgatgtacctgtgtggtctaagctggaatctggtcaccttcca

SEQ ID NO: 86192 - DNA, 100 bp, Homo sapiens
ggaatcccactgttgaggttgatctcttcacctcaaaaggagaatgtcgaccagtaaagtgacagttctgggttatggtctcttaaccgcagatgcaaag

SEQ ID NO: 86193 - DNA, 100 bp, Homo sapiens
ctgcgcgccgctgcccgcgccacagagagcagagctgacatctgataaagacatgtaccttgacaacagctccattgaagaagcttcaggagtgtatcct

SEQ ID NO: 86194 - DNA, 100 bp, Homo sapiens
gattttctaaccaagcagatggagaaaatccaaccagctcttcaggagaagcacgccatgaaacagggtgctgtaaatgcattgatggaaaaaaagtggg

SEQ ID NO: 86195 - DNA, 100 bp, Homo sapiens
gatgggcccgtggacatgcgcacctcacacagggttgataggcactcccaaaagggagacctggctacagctccgagctgagctggaagctctcacagac

SEQ ID NO: 86196 - DNA, 75 bp, Homo sapiens
ccggccaccagcaattgtccgaccatggtgaatccgggcagcagctcgcagccgcccccggtgacggccggctcc

SEQ ID NO: 86197 - DNA, 75 bp, Homo sapiens
ccggcagcccgagccgaccaaatttgactacctgaaggaggagtacaaaatggttcgttacatcagaaggataca

SEQ ID NO: 86198 - DNA, 73 bp, Homo sapiens
tgccatcagtatcttaatgaagcaccttctagccaccatggcaacctcatctgaagaagttttgctgattgta

SEQ ID NO: 86199 - DNA, 98 bp, Homo sapiens
tgtcctggtgcacccccagtgggtgctcacagctgcccattgcctaaagaagtctcagtgctgtgccccccccagagcctagaggatgtttcatggga

SEQ ID NO: 86200 - DNA, 92 bp, Homo sapiens
agcccacatgcccgctcacctgcgctgtgatgcctgcagagctgtggcttaccagagcactacaaacaccactggtttcccgaaaagccgtc

SEQ ID NO: 86201 - DNA, 75 bp, Homo sapiens
aaaaacaatagctcaaggaaacctttccaacacagatgtccaagctgccaaagaatgctgctcggtcctcctacc

SEQ ID NO: 86202 - DNA, 74 bp, Homo sapiens
gggacacccgtttgacacggtcaagcgctcctggttgcagccagaatgcatgacttcaggaggactgtgaagga

SEQ ID NO: 86203 - DNA, 90 bp, Homo sapiens
aaggcaggtcctgtgatgatgaagactggcaacctggcctagtggctgagaatcaggctgaaagccgggcagcagtggaggggacagtgg

SEQ ID NO: 86204 - DNA, 75 bp, Homo sapiens
gatgagtcagctgaaaattgtgacaaatcacttagagatggctgcccaaagattgtcaatctggggagctctaag

SEQ ID NO: 86205 - DNA, 83 bp, Homo sapiens
tgcgacgcgcagtccacgcaggagatccatgagaaggatgatcggctgaatgtaacagaggaactaacgtccaacgacaagac

SEQ ID NO: 86206 - DNA, 74 bp, Homo sapiens
cagcctcctacctgctgattcctgcagcctcctatgtgctcccagagattgcagcgagaacattgggagatctt

SEQ ID NO: 86207 - DNA, 100 bp, Homo sapiens
gtgaagcgattcctgcaggcgttggttcccctctttgacctggagtggaaacaaaatgtcagtcagtgtgcatgagaaccgcaagtccagggccagcagc

SEQ ID NO: 86208 - DNA, 146 bp, Homo sapiens
ccgcatcttcgggggcagcccggcagctgccggcggcgcggcgagagagcggctgacagaggggatgcgagtgattccaaatctaagaagtcagtagcttataattacgcatgcatacttattttggtggtggttcagtcttccag

SEQ ID NO: 86209 - DNA, 101 bp, Homo sapiens
gcgacagcgctggggccctgtgtagaagctccatcccccttgtctttgtgcttgcctgcgtccccagactcagagcacaaacgtgcagatatctgatagcc

SEQ ID NO: 86210 - DNA, 74 bp, Homo sapiens
tgccgagcaattgtgatgagatattctgctgagtggaagttccagtgtctcgccccatcctcaccctcagggtt

SEQ ID NO: 86211 - DNA, 100 bp, Homo sapiens
tcttggccagggaactcaaacagcagatgcagaaaatgcatccgatgcagatttatggctcctgaacagttgcactgtaaaaaacccagctgaagaccac

SEQ ID NO: 86212 - DNA, 110 bp, Homo sapiens
acaacaaaaaatagttatggcgactttcagaaacaatcacatgaagactaaagcatctgtcagaaaaacagcacccaagaaaacctcatttggctcgctgaaggatgaag

SEQ ID NO: 86213 - DNA, 50 bp, Homo sapiens
atcctgataagaactgctttgagtcttttagtcctgctatacagctgcac

SEQ ID NO: 86214 - DNA, 85 bp, Homo sapiens
cacagtcagcccagggccacacgctggaggatgactaaaacggcatctgcataacaatggaaaaggaagaacaaggtcttgaagg

SEQ ID NO: 86215 - DNA, 100 bp, Homo sapiens
gaaggctcagcgagtttcagaatttacaccggaaactcagtgagaaggacagaataacgggctcccagattcacaagccccaccaagaggatcaccccag

SEQ ID NO: 86216 - DNA, 98 bp, Homo sapiens
gtcggccccggcccgactctatcacaagaagtttgcctatctggggcgcctggctcacgaggttggctggaagtaccaggcagtgacagccaccctgg

SEQ ID NO: 86217 - DNA, 74 bp, Homo sapiens
ccgaaggccctatcaggacatggagtatgaaagacggtctggagggtgagcgacctgcgagactcacaagaggg

SEQ ID NO: 86218 - DNA, 100 bp, Homo sapiens
agggtttctccgctcagccttggatgttctttctcagatactagagctggccacactgcaggacattgggaagctgcatcttcctcccgtgaggctggcc

SEQ ID NO: 86219 - DNA, 132 bp, Homo sapiens
ccggaagtggtcggccgcttgcgacgctccggaagtgacgtgctttcccgagccggttggtgttcgaggaagagacattgttgttcttggtgtggagaagaagtcagtggccaaactgcaggatgaaagaac

SEQ ID NO: 86220 - DNA, 75 bp, Homo sapiens
cgttcggccaccggaggagcgggagccaagcaggtgtcgtgaaaactacccctaaaagccaaaatgggaaaggaa

SEQ ID NO: 86221 - DNA, 100 bp, Homo sapiens
tttcagaactgttctcaggactcattattttaacatttgggagaaacacagccagaaggtatctttcagatgaaggcattgaagcttgcacaagctctcc

SEQ ID NO: 86222 - DNA, 51 bp, Homo sapiens
aaggattccaagtaactcttatttggcgagccagtgcagccttgaactgtt

SEQ ID NO: 86223 - DNA, 100 bp, Homo sapiens
tgaagaagtactgccaagtcatccgtgtcattgcccacacccagaccatgctcgacagctgaccaaggccatgatgcgaaaggccacggccagccgcctg

SEQ ID NO: 86224 - DNA, 74 bp, Homo sapiens
caggaactggtgaacgcaggatgcgaccagcttttccagagccttgtgccaaaggagaaatatgacaaaaatga

SEQ ID NO: 86225 - DNA, 75 bp, Homo sapiens
caagcccccagactggttcacaagctacctggagacggtggcagtgctccttttggacttttctctaggtttggc

SEQ ID NO: 86226 - DNA, 95 bp, Homo sapiens
gtcaaagacttagcttttaaattaaaaaggaagctattcaccattgaggatacgggaagaagaaatggctggtgatctttcagcaggtttcttca

SEQ ID NO: 86227 - DNA, 74 bp, Homo sapiens
agagtttgtagcctattggaggaaaacacaccaaggattacaagggccagaagctagctgaacagatgtttcag

SEQ ID NO: 86228 - DNA, 96 bp, Homo sapiens
gcggcaccggaggggagggccgggcgcggcggcggcggcggtggaggagccggagcataatgcatcctgaggttagcattacacttctcccagtgg

SEQ ID NO: 86229 - DNA, 75 bp, Homo sapiens
ggaaactgacaggaaaggatgacaagttgggagtcacaggtgaacctgagcaaggtgggcgagtattggtggaac

SEQ ID NO: 86230 - DNA, 100 bp, Homo sapiens
cttccctcaagtgattcttctgcctaatcctcccaaagttcttagattacaggtcagcaatctgaagatggtcttacggagcctagtagagtactcccag

SEQ ID NO: 86231 - DNA, 100 bp, Homo sapiens
gcggcgttagccggcgtcttcgtttgggacgaggagaggatccaggaggaggagttgcagaggcggtggagtacaacatcttcgagggtatggagtgcca

SEQ ID NO: 86232 - DNA, 75 bp, Homo sapiens
attctccactgccgtctactcggccactccggtcccgacacctagcctgcgactcagaattcatgattgaagaaa

SEQ ID NO: 86233 - DNA, 100 bp, Homo sapiens
cccgtgtccttcattgccacgtacaggctgcaagccggaacaacagatgatgtatgcagggagtaaaaacaggctggtgcagacagcagagctcacaaag

SEQ ID NO: 86234 - DNA, 51 bp, Homo sapiens
atcacacgtaccacctggatgttgtggaattgtattcccattggagagcag

SEQ ID NO: 86235 - DNA, 91 bp, Homo sapiens
gcaactgctggtttgtggcagcctgctcgtcacttgcctcccgggagtcgctgtggcaaaaggagggccgcaagaacgagatgctgctgtc

SEQ ID NO: 86236 - DNA, 82 bp, Homo sapiens
tggcaagattgggatatttgagagtccaactggcactgtaggagcattgcttttcgtggtgaaagaggcaatgatgaatctg

SEQ ID NO: 86237 - DNA, 75 bp, Homo sapiens
ttatattccaagacagagcacctaggattaaattggtttcctaatccacccacaaatgaattatcaggagtgaac

SEQ ID NO: 86238 - DNA, 90 bp, Homo sapiens
cttgaaattaccaactgctttcctttccctcagcacacagaggatgatgctgactttgatgaaggtccagaggtgtccttctaaagctgg

SEQ ID NO: 86239 - DNA, 51 bp, Homo sapiens
acctcactgcagaggtgctggagctggcagacagcaaggccatcgtggacg

SEQ ID NO: 86240 - DNA, 88 bp, Homo sapiens
atactttattgatcaacatccttcataggcagctgcattcagcctcagcggaggacacgcctgtggtgcagttggcagccgagacccc

SEQ ID NO: 86241 - DNA, 75 bp, Homo sapiens
tcactaaaaattatccctactacaggactgcggacaagggctggcaggatcttaccaacagtatcattacagctg

SEQ ID NO: 86242 - DNA, 74 bp, Homo sapiens
aaaaggcagactttttgatattcagagccttggaagtcaacactgtcagtggacagcgccatgtccctgatcca

SEQ ID NO: 86243 - DNA, 90 bp, Homo sapiens
ttggctgcccaggctcgcctcgactccaaatggttgaaaacagatatacaggagctggatggcctgttggaaatcaaccgcatgacccac

SEQ ID NO: 86244 - DNA, 90 bp, Homo sapiens
ctgttgtaccccactgctggggtggtggttccaatgagacagggcacaccaaactccatctgtttgcttgcctaaactggacttgaagca

SEQ ID NO: 86245 - DNA, 90 bp, Homo sapiens
gatggctgggtggtatttcaaccaaggtttactcctggcttgggggcattaggaagcactggaggctcttcgggaactaatggatctaac

SEQ ID NO: 86246 - DNA, 97 bp, Homo sapiens
gaggcctccacagccatgtggaactggcaagaagttgcaggaaaaatggcttctagcagtggaacttcctcatacacgtgatctgtttctgattaga

SEQ ID NO: 86247 - DNA, 101 bp, Homo sapiens
ttcctaggtgtcattacagtgatcatcataggcttatgtcttgctgcagaaatgagccgtcagactgctacagcattacctaccggtacctcgaagtgtcc

SEQ ID NO: 86248 - DNA, 83 bp, Homo sapiens
cgtcgcccaggatgggctgggaatgaagcgatgtagccttttaacctcgccgctcctgctatttgccaaccgccgggacgtac

SEQ ID NO: 86249 - DNA, 88 bp, Homo sapiens
tggtagatcagccccacagcctcctgagtatcctggacgcccagacatggctgtcccagtcacaggtgcccaggccggagtgcagtgg

SEQ ID NO: 86250 - DNA, 100 bp, Homo sapiens
agtggctgtcgtgaagacatctgcgtgtgcggggtgcgtgggtgcctggagatgaagctggaaaggtaatggaactgctggtccatctgaataaacgtat

SEQ ID NO: 86251 - DNA, 101 bp, Homo sapiens
cagaaaggaataaaagaggtcagatgatgacagctgtgtccttaacaaccaggccccagtgggacttctcctcttgcatgcctgaatgcaatgcttcacac

SEQ ID NO: 86252 - DNA, 74 bp, Homo sapiens
tgctgtgtatgaagaggcagtgaagactctgccaacagattaccccggaagctttcgagaagctgggattccct

SEQ ID NO: 86253 - DNA, 101 bp, Homo sapiens
tcatcctccacagctccagggaaggcactcaaaagtggggggcaggaaagttggtcatgttcggagtttgacctgaatgagattcgcctgatagtttacca

SEQ ID NO: 86254 - DNA, 82 bp, Homo sapiens
aaaaacatccccgtcatcgagtatgagcagttcatcgcaggtgttgacttcaaaatcaaaactgtagagctaagaggaaaga

SEQ ID NO: 86255 - DNA, 83 bp, Homo sapiens
accaccccaggtactgcagggtggggcacttccgccacaggagccgagcttcatctttatgacggttgtgtattttggtcccc

SEQ ID NO: 86256 - DNA, 117 bp, Homo sapiens
acacgcagcagccgctgccgccgccgcgggagccgctgcccgaactcccggcccgaactccagatccagacatttaatgtggatgcaccatgccagaccgtggaagatttaacgaat

SEQ ID NO: 86257 - DNA, 100 bp, Homo sapiens
tggctgcgttgcactgtggaagaccacctgagtcaccagttaactatggtagcccacccagcattgcggcatctggaggtagcagaagtagcagcagccc

SEQ ID NO: 86258 - DNA, 101 bp, Homo sapiens
aggctttgagaaattttgagtcctcgagtgaatgggcggatctcatatcttcacttggcaaactcaacaagcgggagatacagatgacccaccaagaatta

SEQ ID NO: 86259 - DNA, 82 bp, Homo sapiens
attttgtgatcgcagcgatgaaaggtccagcccagaatcaaatgcaggttccatctggatatggattgcatcatcaaaacta

SEQ ID NO: 86260 - DNA, 90 bp, Homo sapiens
ccgtgaccgtcgctagaactcagttgtgcgttgcggccagtcgccactgctagtggagcctttcaggctggcatggagagcttaaggggc

SEQ ID NO: 86261 - DNA, 75 bp, Homo sapiens
tcggaagagcgctcccaggagaaacaagtcacgagaagagaatgccttctagatgcaaaatcacctccaaaccag

SEQ ID NO: 86262 - DNA, 82 bp, Homo sapiens
atcatttttacagttttccagaactccacaaagctttggtctgctctaaacttatccatctctgtccattactggaacaact

SEQ ID NO: 86263 - DNA, 75 bp, Homo sapiens
tgtggggagtggcagagagtatgcattaaaggttatggaaacaaaggacatgctttacatcgtcactgaatttgc

SEQ ID NO: 86264 - DNA, 74 bp, Homo sapiens
tgcttcaaacgggcagggctctaggaaacatatgttacgatagcctgagatggaagattttcgaggtatagcag

SEQ ID NO: 86265 - DNA, 75 bp, Homo sapiens
ccggcgggaccataagggcttaactcatatatttaacccccctccaaaaaatatgaggccccaggattcctggcg

SEQ ID NO: 86266 - DNA, 122 bp, Homo sapiens
cggctttagtggcagcatgaagcgcaccccgactgccgaggaacgagagcgcgaagctaagtactatactggcaattgctggagaagattttgcaattgttgcttctgatactcgattgagt

SEQ ID NO: 86267 - DNA, 98 bp, Homo sapiens
ctggaagggatgtcgtctcagcagtgctcgggcgcagatcatgatacatggtgatggcttgcagagtcgtaaacaaaagaagacacatgggacttcaa

SEQ ID NO: 86268 - DNA, 90 bp, Homo sapiens
ttgacatttaattttagggtcctttatatagaagggagagtaggagtccaacctataccttctcagggaggcaaactagaaatagctggc

SEQ ID NO: 86269 - DNA, 80 bp, Homo sapiens
atgtgcagatcaatgacatttccctgcaggtgtccctggccagtgtccttccacctgtccacaagcatggggaacatctt

SEQ ID NO: 86270 - DNA, 50 bp, Homo sapiens
ccaggagcacccggcgtcccagacaaatttgaggcttaagcaacttcttc

SEQ ID NO: 86271 - DNA, 75 bp, Homo sapiens
ctggatcccaagagtgaagctcagcttcaggcttatgtacataaaagcgtgatggaggaactgaagagaataatt

SEQ ID NO: 86272 - DNA, 100 bp, Homo sapiens
ctgctagccaggaacatggactgaagtatccagcgctcattgggaatttagttaagctctcaaaggtctatggccctgtgttcactctgtattttggcct

SEQ ID NO: 86273 - DNA, 73 bp, Homo sapiens
attaacctggctgcagagccaaaagtgaaccgaggaaaagcaggtgtttgagaagtcccccctgcgggtgaag

SEQ ID NO: 86274 - DNA, 100 bp, Homo sapiens
caggaggctggagagcctgctgcccgcccgcccgtaaaatggtcccctcggctggacagctcgccctgttcgctctgggagccttttgtggcagatgaat

SEQ ID NO: 86275 - DNA, 100 bp, Homo sapiens
ctgtaatcccaacacttaggcaggaggatcactcgagcccagaagatcaagactagtgtgagcaacaaactctgtcctgtccccgtatgagaggcagctt

SEQ ID NO: 86276 - DNA, 96 bp, Homo sapiens
gcagagtgtgcccttcctgcactgggaggccccggtcacctcacactcactcactgccagctcagctcccactggacacccttcacggttcccaag

SEQ ID NO: 86277 - DNA, 74 bp, Homo sapiens
tggaagccatgaggccaaaggcagttgtattgatgcggaaaacgccatgcggtacataaatgggacgcgtctgg

SEQ ID NO: 86278 - DNA, 75 bp, Homo sapiens
ggacgaggaccagtgggaggatggagcagaggacattctagagaaagtctcaggggccagccaagcccccacccc

SEQ ID NO: 86279 - DNA, 100 bp, Homo sapiens
ggaaagctgggagtcctgagatccaaagagaaagtgacgccctcctgcaaaacggcccaactacgttaagcttggcactctggcacctttctgctgtccc

SEQ ID NO: 86280 - DNA, 100 bp, Homo sapiens
aagatctccattcctgaggaggaggtgttcctgatccaagcagaaccctgttatttgaagagcctgagaaatcttatcccgtttacaaatgtcctgggag

SEQ ID NO: 86281 - DNA, 75 bp, Homo sapiens
accatcctgggtgctggccctgtgctggagagaagaagctggaggagttctccgtggaagaggccgaggtgctac

SEQ ID NO: 86282 - DNA, 82 bp, Homo sapiens
ggatccagagcgccgcgcacttcgtcatgttcttcgcgccctgcttccgccctgcgctgccagtctcctacctgcaggccga

SEQ ID NO: 86283 - DNA, 114 bp, Homo sapiens
acacccgctgctgcccgcccgctgcctgcctgcctggcatctctctctcccgcaagagtgagccatggagctacgtgtggggaacaagtaccgcctgggacggaagatcgggag

SEQ ID NO: 86284 - DNA, 98 bp, Homo sapiens
ttttgagaacagagtgctgttttagagctggcagcagcatctcagcccaagagaagtcgtagtcgagatcgggatcggtatagacggagaaatagtcg

SEQ ID NO: 86285 - DNA, 75 bp, Homo sapiens
ggatcctgcactcttcctccctcagccttcctctgtcgcacagacgagtgcagtggcctgatctcagctcactgc

SEQ ID NO: 86286 - DNA, 100 bp, Homo sapiens
ccgcgcgaccgtctggatccccgcccaggaagcccctctgaagcctcctcgccgccgtttctgagaagaatgcatacttggaatgaatccttctagagac

SEQ ID NO: 86287 - DNA, 96 bp, Homo sapiens
tttggctttgcctttctggacacagaagtatttgtgacaggtcatcatcagatttgaaatatttaaagtggatacaaaactatttcagcaatgcag

SEQ ID NO: 86288 - DNA, 117 bp, Homo sapiens
ctttcatcagtcttcccgcgtccgccgattcctcctccttggtcgccgcgtccttggctggcgtggagtgcatccgccccaacccttttccccctcgtctcctgtgagaattccccg

SEQ ID NO: 86289 - DNA, 75 bp, Homo sapiens
cagcggccgcgaggccgcagctcccggattggcagccaccatttgcatgtgatgttgataaacttcattttacgc

SEQ ID NO: 86290 - DNA, 100 bp, Homo sapiens
ccgaagtcagttccttgtggagccggagctgggcgcggattcgccgaggcaccgaggcactcagaggagcagaagatggctgtgccacccacgtatgccg

SEQ ID NO: 86291 - DNA, 100 bp, Homo sapiens
tgaagcccaacgatcagcacttcagtcggaaagttggaacctctgacaagaccaagtactaccttcaaggaaagaccacagcaagattctttcattcgtc

SEQ ID NO: 86292 - DNA, 80 bp, Homo sapiens
cggaatccaccggcgcagtttcatctagcgactggtctctaattaacagaagatggcaaagcccagccacagcagctatg

SEQ ID NO: 86293 - DNA, 96 bp, Homo sapiens
cctgacatgacaaggagccgtcgtcgttagttctctacagaaagaaccaatgaacccaataggaacaaattctctgtggaaaacaaagcatagctg

SEQ ID NO: 86294 - DNA, 74 bp, Homo sapiens
gctggcaagcaagattataatcaggaagtggatgcctccatttttaaggctgtggaaaatctctgttctcacaa

SEQ ID NO: 86295 - DNA, 75 bp, Homo sapiens
tgtgatcgtcatcacagtcaactatcgacttggagtactcgatccaacttagaaataatgtttcattcaagataa

SEQ ID NO: 86296 - DNA, 98 bp, Homo sapiens
ctaccacgaggtggtggacgcggaggctggcagtgatggtgaaagcataggaaactgccccttttcccagaggctcttcatgattctttggctcaaag

SEQ ID NO: 86297 - DNA, 100 bp, Homo sapiens
gtgctgcttccaaagctcattgacttttctgctcagggaagttgaaagaatggagcctcatactgtatggcacagcagagcacccgtaccacaccttcag

SEQ ID NO: 86298 - DNA, 100 bp, Homo sapiens
aagaaagatgttcctccttcagctgtcacaagaccaatatttggtatactgggcacaatccatctggtggcagcaggctctccccggaggctcagccccc

SEQ ID NO: 86299 - DNA, 122 bp, Homo sapiens
gattgaggaagagcgagccagcgcccggagcaagcggagctcccccaagagccggaaagatttctcactatgtgcaatagacactttggcagtgttgtggcacaaaccattcggactcaaaa

SEQ ID NO: 86300 - DNA, 90 bp, Homo sapiens
gaagtacaaggctgtgtccatcagcacagagccccccacctacctcagaaaaggaaccagtgatttacttgcttgggaccccctatttgg

SEQ ID NO: 86301 - DNA, 97 bp, Homo sapiens
gcgacgcggggccatgtgcaggaccctaacgacaggcgcctccggcccatttacggtgtcatggagaaactccagctgggcccagagattctgcagc

SEQ ID NO: 86302 - DNA, 130 bp, Homo sapiens
ctctcatctcgctcggctgcgggaaatcgggctgaagcgactgagtccgcgatggaggtgttctcccatggaatgctttccctggcaaggtttgtggctccaaccttctgtccatctgcaaaacagctga

SEQ ID NO: 86303 - DNA, 100 bp, Homo sapiens
tttgcatctctccctcctttaaacagcttctccgggtctcagcatgttttttgctccactcaagcctgttagaatcaccatggaatacagctccagtggg

SEQ ID NO: 86304 - DNA, 88 bp, Homo sapiens
caatcagccatctacatcagctcgtgcccgtcttattgatcctggctttggaatatataaggcagactgccagattcacttacagccc

SEQ ID NO: 86305 - DNA, 100 bp, Homo sapiens
gacccaaatatcgtcatagccaagatggatgccacagccaatgatgtgccttctccatatgaagtcagagggcactgtgtttctggaatgggcatgggcc

SEQ ID NO: 86306 - DNA, 98 bp, Homo sapiens
ttactgtggatctggattctaaggcaacacttccttgaagaaacaagcttacagatattttcctcttctggaccctatctagaagaagtattccttag

SEQ ID NO: 86307 - DNA, 100 bp, Homo sapiens
tcctcttcttcctcctccgctaccaccaccacaccagaaactagcaccagccccaaatttcctgcagaaccttggcctgaaaatgctacattatatcagc

SEQ ID NO: 86308 - DNA, 101 bp, Homo sapiens
ggccccgccatgggctgctgcagctccgcctcctccgccgcgcaggcacaccgtccctgcagtctggtggaagaacgcccaaggcaaagaccagatgtggt

SEQ ID NO: 86309 - DNA, 90 bp, Homo sapiens
ccgatcctctccgtgggagccagcgagcctctctccctgatcttacgtgctcaagccaccagctgaacaggccaaagccagactacagct

SEQ ID NO: 86310 - DNA, 50 bp, Homo sapiens
cgtgtggcacgacacaaaaatcagagagctgacgccactggaggaggcct

SEQ ID NO: 86311 - DNA, 75 bp, Homo sapiens
ctttaaatgcagcatctgcgatgtgaggaaaggcacctccaccaggtgacctcacagtgactcaagctaccactt

SEQ ID NO: 86312 - DNA, 100 bp, Homo sapiens
agcagtcctggcccggagcgtcggtcctggtaatctgtaggaaaagcgctgcggcccagggggtaaagagaggtcccgcagcccccggaagccaatagac

SEQ ID NO: 86313 - DNA, 75 bp, Homo sapiens
gaggagcagcagcagctccagcaggcgctggctcctgctcagattccagactccatcatttctcgtggtgttcag

SEQ ID NO: 86314 - DNA, 75 bp, Homo sapiens
ctgactctgactctcggactgagaaacgcaagatagcctgggctggaagctcttctacgtcacaggctgcctgtt

SEQ ID NO: 86315 - DNA, 75 bp, Homo sapiens
aacattctgaaaatgtgcatatttcaggagtgtcaactggaggatcgtttaaaaattgatgtaattgactggttg

SEQ ID NO: 86316 - DNA, 75 bp, Homo sapiens
tcgaagacctgaggagcaagggaatcgagtcactggcatttacgaactcagcttatgcaaaatgtcagacacagg

SEQ ID NO: 86317 - DNA, 82 bp, Homo sapiens
gccgcccgtccacacccgccgccaggtcagcccaaggctgccccctcggtcactctgttcccgccctcctctgaggagcttc

SEQ ID NO: 86318 - DNA, 100 bp, Homo sapiens
aaaatcataccatatcagatgcctcgcagagcaccaggcccaccgtgaaagggagagataatgcatgtgagaaaacttcatatatgtttctacgaaagga

SEQ ID NO: 86319 - DNA, 75 bp, Homo sapiens
ggcggatctggaggagcagttgtctgatgaagagaagcttcctaaccaagcgaagccggcaggtctgtgctgacc

SEQ ID NO: 86320 - DNA, 101 bp, Homo sapiens
aaagaaatagcgtctgagatcataggattactgatgctggagacagaagcattaaaatgcgtggctcaggctagcaagaacagatcactggcagattttga

SEQ ID NO: 86321 - DNA, 74 bp, Homo sapiens
agagcgacaagaagctcacccaggaacaagtatctgacagagtgaaccagaggaaatgcctccagaagcaaaga

SEQ ID NO: 86322 - DNA, 76 bp, Homo sapiens
ctaatgatgatgctcagtttgatgcgtcacactacgacagtgagaaaggagcccctgcccggatggcaacagtagt

SEQ ID NO: 86323 - DNA, 75 bp, Homo sapiens
ctgccttccacctccagtgctgcatcagcgagagctttctaactgtcaaaggtgctgccctttttctaccacggg

SEQ ID NO: 86324 - DNA, 74 bp, Homo sapiens
atggagggagacgtgctggacacactggaggcgctgggaagctccaccatgaggcgaggtggatggaggaagcg

SEQ ID NO: 86325 - DNA, 74 bp, Homo sapiens
cacagcaaaacaatggtcctatggatgtaatcagcccccattcttacaattttactcccaaaaaagaagaggag

SEQ ID NO: 86326 - DNA, 75 bp, Homo sapiens
tctggagcttttcccctccccggctcgatgacttgtacttgatcgccatctgccatcgccggggcatcagatccc

SEQ ID NO: 86327 - DNA, 100 bp, Homo sapiens
gcggctgcagggtccggtcttcggtttgcacagctagaggccgcgcagcagcaaaggatgagcggaaccttggaaaagtgaccgaaggaagagaccaaga

SEQ ID NO: 86328 - DNA, 100 bp, Homo sapiens
gatggggctcaaagctgtgaatgtggccaaggtcgtcggactacgcccaagcaaggtttgatgcctatttccaccagaagaggaagcttggggtgtgact

SEQ ID NO: 86329 - DNA, 100 bp, Homo sapiens
gttttgcactgtagggttttgtggaattgggagcctaattgatttcattcttatttcaatgcaggttatcaatactctggctgaccatcatcatcgtggg

SEQ ID NO: 86330 - DNA, 100 bp, Homo sapiens
gaccagcggctgaggccaggatgccgtccaggcggcgcggcggctcctcactcatcccagcctgaagcaggacattctaaatgaaaagactgaattggaa

SEQ ID NO: 86331 - DNA, 87 bp, Homo sapiens
gagagcgcgaatatcgtcatcgttagaaggtttatggctacaaatgatttgatgacggaactgcagaaagattccatcaagttggat

SEQ ID NO: 86332 - DNA, 75 bp, Homo sapiens
cagcgagccgccgacccgccgagcaaaatgaggactactgagcccagccaggctgtatgccattgctgccaaaga

SEQ ID NO: 86333 - DNA, 100 bp, Homo sapiens
acgaggccgtgggtacgaccggaagccgcagataacgaaggaggcccaacttcattcaataaggagcctgacggatttatcccagacggtagaacaaaag

SEQ ID NO: 86334 - DNA, 100 bp, Homo sapiens
gaagaattcagaagaaacaaaagtgccaccgaagaggtgagaacaaaatcatggtgtgatgaatgcagactctgctaccattttggctgtttggatcctc

SEQ ID NO: 86335 - DNA, 98 bp, Homo sapiens
gaaaaactgttcttgaaaaccacctgctatttagtcattgacaagtttggatcagacatcataaaactaaatgcactcggtgatggaaagagagccac

SEQ ID NO: 86336 - DNA, 75 bp, Homo sapiens
tcacgtctggtgcaggcaccagtgcagatactcatttcaaagaacttccaactcttctccactgtgcagcaaaat

SEQ ID NO: 86337 - DNA, 100 bp, Homo sapiens
caacatggcggaacgcaggagacacaagaagcggatccaggagtcgggtgggagaatgtgctgctaaaggaaggtgagtcagcctcgaacgccacagaaa

SEQ ID NO: 86338 - DNA, 83 bp, Homo sapiens
agaaagcaggcgaacccgcggcgcaataacgtggagacctttggcgacttggcctttggcgacatcttcctccacctgctcac

SEQ ID NO: 86339 - DNA, 90 bp, Homo sapiens
agtccggcaggtcgtgctccacacaccccggccctgcagccagcccagggatgccctgagccaggtttcatggacccaggcactacggac

SEQ ID NO: 86340 - DNA, 50 bp, Homo sapiens
ccagaagatcacacagtgttgacctacaagaacagtgaggagcttcggtc

SEQ ID NO: 86341 - DNA, 83 bp, Homo sapiens
caagatgtctgacatggaggatgatttcatgtgcgatgatgaggaggactacgacctgattcgaattgctgcagaaggaatca

SEQ ID NO: 86342 - DNA, 74 bp, Homo sapiens
atctgtccagcatgactcatccccgggagtgttgagtgtcccgacccaggctaagcttgagcatggctgagcag

SEQ ID NO: 86343 - DNA, 89 bp, Homo sapiens
tggtcttgtgattggagtcctgacagcaagtatttcttcactgggagtcgagacaaaaagtttttccagaaaggaggagtcaaggaagc

SEQ ID NO: 86344 - DNA, 101 bp, Homo sapiens
cgcttctgctctcagtgtcccggacttcaggaaaaccaattctgtgtcctcggaggaccacagcccagttgggccccaggcgaaacccagcctggagcttg

SEQ ID NO: 86345 - DNA, 100 bp, Homo sapiens
ttcccacgctgctactgcctgggggctgaggatgacaaaaaagccttcataggtcatgcagaccatggaacccaagcagcggccagctgcgggggcacct

SEQ ID NO: 86346 - DNA, 83 bp, Homo sapiens
cccctacccgcttctcgtagtcctgggagcacagcagaagtgttgtggcagcactgcctgaaggtatgagaccagattctaat

SEQ ID NO: 86347 - DNA, 100 bp, Homo sapiens
cagcgcggagcctgcggccaagggaacctcagaacctgttctggatccacagcaaatccaagcatttgatcagctttgccgtctctaccgaggaagctcc

SEQ ID NO: 86348 - DNA, 80 bp, Homo sapiens
gatgaaaatgaagacgacattcagtttgtcagtgtgcagtagacattgttgcaatcatgatcggcaatctgaaaggcaca

SEQ ID NO: 86349 - DNA, 100 bp, Homo sapiens
cgcttctttgtgttaaccaaagccagcctggcatactttgaagatcgtcatggggctttatgaaggcaaagaacagatggagtttgaagaatccatgaga

SEQ ID NO: 86350 - DNA, 50 bp, Homo sapiens
gctcagagtttcaaatgtgcagggttcaggataagtttgaggtgctgaat

SEQ ID NO: 86351 - DNA, 51 bp, Homo sapiens
tgacggaggagcttgtaccaccggttgccaaggaaagtgtactgcagtttt

SEQ ID NO: 86352 - DNA, 75 bp, Homo sapiens
ctcggcgcggcagcgctccagctcgctctccaccttcagacaatgcagatcttcgtgaagactctgactggtaag

SEQ ID NO: 86353 - DNA, 82 bp, Homo sapiens
gacgccgcctggcaggccctgcgcaccaggccagaagcggactcctagaagaggggagcagcaaggatggaatgacagccgt

SEQ ID NO: 86354 - DNA, 82 bp, Homo sapiens
tgcacatccaggctggtcagtgtggcaaccagatcggtgccaagcttaagatctccttcagcgagacagccctggagaccac

SEQ ID NO: 86355 - DNA, 96 bp, Homo sapiens
tgcattggcctccggcaggcgccccccgggggcgggaagctggatgatgactttgagttcactggcagccacctgacagtaaggaatggctactcg

SEQ ID NO: 86356 - DNA, 98 bp, Homo sapiens
ggagaccatggagaccctcacggagctgggcgacgagctgaccctgggagacatcgacgggggggccctcagcctcttggccttgaacgggctgttca

SEQ ID NO: 86357 - DNA, 51 bp, Homo sapiens
tggcctccgttctcttggcccagcaggttcaggagaagtggcacctggtgg

SEQ ID NO: 86358 - DNA, 99 bp, Homo sapiens
actggcccaacccaagagcgctacaaggatggggtggtgaccatcggctgtgtggggctgttgataatcaggtgtatgtggccacagcctctcctgccc

SEQ ID NO: 86359 - DNA, 100 bp, Homo sapiens
tcaactgcctgcacgtcgtcaccctgtacaatcggaattcctggggaagtcggagcctgagcaccagcactgagcctggccgtgggaaggaagcatgaag

SEQ ID NO: 86360 - DNA, 100 bp, Homo sapiens
tattaatcggcttagggcagttgttttcagagacataattggttttcacagaattccatggactttaactgctgaaccaatgatgcactgattttgtcac

SEQ ID NO: 86361 - DNA, 75 bp, Homo sapiens
tggaaaaaacttgtttaatgggccattgcccactacgagcagtctgcagactactacaaaggcgaggagtccaac

SEQ ID NO: 86362 - DNA, 50 bp, Homo sapiens
cgggacccgcggtccccgctcttgctggctgtttcctgactgggcaccgg

SEQ ID NO: 86363 - DNA, 87 bp, Homo sapiens
ctgctgaatcacacgccgccatccgggaggcccagggaagatttatcagcaagactgttgaacgcataactgcccaagatgcctgtc

SEQ ID NO: 86364 - DNA, 98 bp, Homo sapiens
aaaatttcatggagaagaaggccttgactacggaggggttgccagtgacagagagtcgagggattgtggatagcctgcagaagttttcctcgctccct

SEQ ID NO: 86365 - DNA, 50 bp, Homo sapiens
tcaagaaacccaagctgctgagatgagcagcaccagcagtaagagggctc

SEQ ID NO: 86366 - DNA, 83 bp, Homo sapiens
aagagattccttgcagagacagctcaacacggcacttccacagacaatgcagatcttcgtgaagactctgactggtaagacca

SEQ ID NO: 86367 - DNA, 98 bp, Homo sapiens
tgcaggccgttgttggtcgagctggcgggtcccgcgggccaggccgtggagcttaaaagagccttggaagaacttcaggaagcactagcagaaaaaga

SEQ ID NO: 86368 - DNA, 51 bp, Homo sapiens
ttaaacctactcaaactattggtgtccggctttgctggcccagcaagcctg

SEQ ID NO: 86369 - DNA, 98 bp, Homo sapiens
agacccggaggaggttcgaagctgagtatgtgacagagggtggttcccacttcatcaacacctcatcgccgcgaggtgaggctaagatgagcataacc

SEQ ID NO: 86370 - DNA, 74 bp, Homo sapiens
gaacagctacaagaagagattaagagacttaatagacaattagcccaggagtcacagatgctgggaagtatggc

SEQ ID NO: 86371 - DNA, 89 bp, Homo sapiens
aaagaaggttaagctggctgtcctgaaatattataaggtggataaattagatgcttcagaatcactgagaaaagaagaagaacaagcta

SEQ ID NO: 86372 - DNA, 73 bp, Homo sapiens
tccagatgaggatatatccctgattgaagaaggtattgttgtaatggaagatgattctccagtggaggctgtg

SEQ ID NO: 86373 - DNA, 90 bp, Homo sapiens
aaggagttggcattagtgttcttgtcctcgcagtccgcctgagagagtagagaagaccccctcccagaaccttcctgtaaggtctccccg

SEQ ID NO: 86374 - DNA, 83 bp, Homo sapiens
ccaggatctcgggctcggaacgagactgcacgatgatatcatcaagttgaatcgaaaggaagggaagaagcagaattttccaa

SEQ ID NO: 86375 - DNA, 82 bp, Homo sapiens
gtacccgccgccgccgttggctggagggcagcctggacaacatgacctgcatcctggtctgcttccctggggcccctaggcc

SEQ ID NO: 86376 - DNA, 80 bp, Homo sapiens
agtccacccaccgccgccgcctcccaggtgctgcgacaagagactttggacaaaaattgacttgagtaggtgtaaggcca

SEQ ID NO: 86377 - DNA, 82 bp, Homo sapiens
ccgagtggttccatggtgcaatctcaagagagtcatttgaaccaattctccgcctccttccccagggaatctctcctgtcag

SEQ ID NO: 86378 - DNA, 75 bp, Homo sapiens
cggcgagcatggcccgcgcggcgccgggcgctgactgagagattaatgattcatcaagggatagttgtacttgtc

SEQ ID NO: 86379 - DNA, 83 bp, Homo sapiens
gagtttgtagcctattggaggaaaacacaccaagagctggagataagatgggtagactgctacttcccttttacacatccttc

SEQ ID NO: 86380 - DNA, 90 bp, Homo sapiens
tgattcaggagaactggtcgccatcaagaaagtattgcaggacaagagatttaagccagaagatcagctgccatgttacttgactcacac

SEQ ID NO: 86381 - DNA, 75 bp, Homo sapiens
gccaagtttctacaggaagcgagctctccctgatgaacgactggaaggatgagttcaaggcacactcgagggtga

SEQ ID NO: 86382 - DNA, 100 bp, Homo sapiens
ttttgaagcaaagtccaagcattgtatcacttcatctgcaaatatttcaataagtacccaaaaggtatctcagatgaagacatcatcaacattactcttc

SEQ ID NO: 86383 - DNA, 75 bp, Homo sapiens
aacgatcttctcgacctgcttcagcctccagctctactaaaggtatccagctcacatagaagacattgactacga

SEQ ID NO: 86384 - DNA, 74 bp, Homo sapiens
tcacacagtggcttctgctcaccaacagatgaagacagatgcaccaacgaggacagagcgggatgccaccagct

SEQ ID NO: 86385 - DNA, 75 bp, Homo sapiens
ctgtccttcatgcagtctctcattggcttctttgagactgaaatggcaggccctcgggaccaaggatcacgtcat

SEQ ID NO: 86386 - DNA, 73 bp, Homo sapiens
tatctcaactttggtctcctgggaccactcgttgctgacagtcagaaagttatatcttaagtgtggtgctgct

SEQ ID NO: 86387 - DNA, 100 bp, Homo sapiens
ggcagcagctcgtggagctgtgcggtcatgctagtgccgtggctgtgaccaaggtcagaatggcggcagcggagcatcgtcattcttcaggattgccctg

SEQ ID NO: 86388 - DNA, 88 bp, Homo sapiens
ttgttcggggcactcagaacattcctgctggcaagccatcactccaggctacagcatgctggccatagggattggaaccctgatctac

SEQ ID NO: 86389 - DNA, 101 bp, Homo sapiens
tcgtgtctggctctggaattgctactgctgcctctgtcactcctggtgaccagcattcaagggaatgtagtttcacaaagcagcttaaccccattgatggt

SEQ ID NO: 86390 - DNA, 100 bp, Homo sapiens
ccaggacctggcctgaagacatttcctctcctcccctctggatttctcagagtgcacttggaggctcctcagctcttcatatcccagcttttccaggagg

SEQ ID NO: 86391 - DNA, 75 bp, Homo sapiens
caccagcgcccgcaggatgcccagtaccattgtttgttgcaatgaccaaaacccatgtgatagcagcctcgaaag

SEQ ID NO: 86392 - DNA, 100 bp, Homo sapiens
acacggccaagacgagccgaggcttcacctaccacctgcacttctggctcgcggacaaggcaaaatctcagcaagttcggacctctagtacaataaggcg

SEQ ID NO: 86393 - DNA, 101 bp, Homo sapiens
ggaagcccagataagaaaaagcgcaaggcaaatacacagattccattggccgtgacatccccaaaatgcttgaattatttaaaaatggacatgaaattaag

SEQ ID NO: 86394 - DNA, 82 bp, Homo sapiens
cagagcctcgcctttgccgatccgccgcccgtccacacccgccgccagcatcccagccatcactcttccacctgctccttag

SEQ ID NO: 86395 - DNA, 100 bp, Homo sapiens
ggaaaggaaagatgtgttcgggtttttctagaacacggagcttcccatcgacggtcagtgcgcacgttgtaatcagctgaggccatgtcaggagacggag

SEQ ID NO: 86396 - DNA, 108 bp, Homo sapiens
agtcaagaaggttttagacaacagaaggaaccaagtagagcagggagaagaacagtttctctatactctgacagtacaaaatggatctgtacatcaaaaggatggatt

SEQ ID NO: 86397 - DNA, 75 bp, Homo sapiens
ccactgttggcaaagaaagaatgtcactaatttatttacaggaagttaaatgaagttcgaaagagattgaatgag

SEQ ID NO: 86398 - DNA, 74 bp, Homo sapiens
aaagtgcactcaacttgttcgagctctatcgtccgagctttgtgcacccaggggctgccacagtccccaccatg

SEQ ID NO: 86399 - DNA, 75 bp, Homo sapiens
taaagatgatgatgacattgacctctttggatctgatgatgaggaggaatcagagatcattgatttcttcctggg

SEQ ID NO: 86400 - DNA, 78 bp, Homo sapiens
ataaactgcctggccgaatcagccttttcacgctcaaggtgaatcaattccaataaggctatttttagcaggatatga

SEQ ID NO: 86401 - DNA, 100 bp, Homo sapiens
tcggccctgcaggagagcaggcgggagctgatggtccagctggaagagctgatgaagttgctgaaggggaaaaaagttgttccatgtagacatgactggc

SEQ ID NO: 86402 - DNA, 100 bp, Homo sapiens
ggcagatagaatgcaaatagttgtgattctctcagaattttttaataccacatggcaggaggcaaattgtgcaaggggtcagctttggtgtacaactacg

SEQ ID NO: 86403 - DNA, 50 bp, Homo sapiens
cccgtggtccttctccatattcgaggtggccaccgagtactaaattcact

SEQ ID NO: 86404 - DNA, 100 bp, Homo sapiens
gtgcctgaactcaaagatgcccttaaaaggagtacaagcgcaagctagccagagtttccctggtgcgcaaagaactcaggtcccggatccagagcctgcc

SEQ ID NO: 86405 - DNA, 89 bp, Homo sapiens
cccaacaaacagaggacagtggagccaggtgagaatttcaaggattatcgacttcatattgcacattaaagttacaaattaaagtggct

SEQ ID NO: 86406 - DNA, 83 bp, Homo sapiens
cttgccttgagtcagtgcgccgctctccagcccgcttgaacgcttcgttccagagcccagcatgaatggatacgcggaatttc

SEQ ID NO: 86407 - DNA, 88 bp, Homo sapiens
aatacttcccccacaacacaacctacagcctcaggggagcgcccctggccactgaactgcgctgccagtgcttgcagaccctgcaggg

SEQ ID NO: 86408 - DNA, 100 bp, Homo sapiens
cgaccaagaaagctcctcccccgtcctccgttagctaattaaaacatttttcagggacgtagccatccagagatgcctgaaaacttcatgcctcctgttc

SEQ ID NO: 86409 - DNA, 100 bp, Homo sapiens
gtctccatcaatacagttacctatgagtgggctcctcctgtccagaatcaagcattgctttgtgatggtcaacagcgtggcgctgaacggggatggctgt

SEQ ID NO: 86410 - DNA, 90 bp, Homo sapiens
gaaacaaccaggtcagcttcggacaaggttagcagagagcattagtttggatgaattcaagtcattttgccattttacaacccacttgga

SEQ ID NO: 86411 - DNA, 96 bp, Homo sapiens
gagacttctagcaaagattatttgccttatgttatgggctatttgtgtagcagaagatcactgtgtccactactatgatcttcgtaacactaaaca

SEQ ID NO: 86412 - DNA, 98 bp, Homo sapiens
gcctgagcatcgttgggggttcagacacgctgctgattccgaaatttttaacctctgaagctgtgccttcacatgatctaggacagcgttcagaagat

SEQ ID NO: 86413 - DNA, 100 bp, Homo sapiens
aaaaaaagaggaagagaagatgaatcatacaatatttcagaggtcatgtcaaaagagatccatccttttacaatccctgctattattcgtccattcagcg

SEQ ID NO: 86414 - DNA, 97 bp, Homo sapiens
aaagaacctctggtgttgaaagagcagcccgacggccatggaggctgaagagacgatggaatgccttcaggagttccctgaacatcataaaatgatc

SEQ ID NO: 86415 - DNA, 89 bp, Homo sapiens
gtttgtactatcctcggtgctgtggtgcagagctagttcctctccagctcagccgcgtagggaaatcctcattgacgattcaatttgtt

SEQ ID NO: 86416 - DNA, 101 bp, Homo sapiens
ggccaacttcggcaagatccagatcgggatttacgtggagatcaagcgcagcgatggtccatgaaagacctcctcctccttctccacctccctctacaata

SEQ ID NO: 86417 - DNA, 100 bp, Homo sapiens
cctagaattgatactcagcagctggaccggcaaattaaagcaattatgaaagaagtcattccttttttgaagaaagaatcttcaagagggagacataggg

SEQ ID NO: 86418 - DNA, 95 bp, Homo sapiens
tacagcatcatctgaggacggctcaggagcatgacaagcgagaccctgtggtggcttattactctgagatctgtatctgtggacctgaatgttga

SEQ ID NO: 86419 - DNA, 98 bp, Homo sapiens
ttggcagctctgtcctgggccagtacatctctgacttcagcgtccgggcactcgtggacttgcagtacatcaaggtcttcaaagcttcacctttctcc

SEQ ID NO: 86420 - DNA, 82 bp, Homo sapiens
atcttccctcctgtcactatcagcaagtcacaatcagttggccagctatgtgtatccatggagacaagagtcaaccagaaag

SEQ ID NO: 86421 - DNA, 91 bp, Homo sapiens
agggctctgtctcgcacttcccagctgctgactggagacggtgcacgtctggatacgagagcatttccactatgggactggatacaaacac

SEQ ID NO: 86422 - DNA, 51 bp, Homo sapiens
aaaggccaagatccaggataaggaaggtgaaaggaagcatgtttacaccaa

SEQ ID NO: 86423 - DNA, 83 bp, Homo sapiens
gctgaagccgatgaacagcgccgggatccagcctccagcggcccgtgcaccacgtggtgccccccagtaccgtgaccgaggac

SEQ ID NO: 86424 - DNA, 100 bp, Homo sapiens
gtttacagcattagatcactgtcatgaagccatagaaataacaagcgatgaccacgtgattcaggcagagatcctacaagaatccaggatgatgatccca

SEQ ID NO: 86425 - DNA, 97 bp, Homo sapiens
ggaattcctccatcagggccagctggagaattgaagtttgagccacgtgatctgaaagtagagatgatggcaggggggactcagatcacacccctga

SEQ ID NO: 86426 - DNA, 156 bp, Homo sapiens
ccttccagtggatttccttgcggaaaggatgttggcggtccctgtgacctgtggagacacggccagatctgccctccaattcaccaaggcctgaaaagagggagaccaagtgcccgatccctggatgtgatggcacgggacacgtgacagggctct

SEQ ID NO: 86427 - DNA, 101 bp, Homo sapiens
cgccactgtaacgggaagctgggcagctacaaaatcaatggccggacgaaaaaggagctcaaaaagtgggatgagtttgaagatattttagaagagaggag

SEQ ID NO: 86428 - DNA, 98 bp, Homo sapiens
ggcttaaacacctccaacggggatggctctgaaacagaaaccacctctgccatcctcgcctcagtcaaagaacagctatccagtcagttcgctgctat

SEQ ID NO: 86429 - DNA, 88 bp, Homo sapiens
cgccctggcggctctagggaccccccccgcgcctgcacttagccccgcgcccgagatgccttcaattaagttgcagagttctgatgga

SEQ ID NO: 86430 - DNA, 75 bp, Homo sapiens
aggacagttgtttggtgttttgcttcaggttatagatggagagacctataaagctgcatcttcctcccgtgaggc

SEQ ID NO: 86431 - DNA, 100 bp, Homo sapiens
cctgtgagatgtttcatcccaacagaggctatgatggtcacacgttcctggacagtgtggagtgttacgacccagatacagacacctggagcgaggtgac

SEQ ID NO: 86432 - DNA, 75 bp, Homo sapiens
atttctcctcctaatctgggcctcttgtcatgatctatagcatgatgctgcgattatctgccttatttgaaagtc

SEQ ID NO: 86433 - DNA, 75 bp, Homo sapiens
tggcattgacatttaattttagggtcctttatatagaagggagagtagggagtttgaggacatcaccaatgcgag

SEQ ID NO: 86434 - DNA, 83 bp, Homo sapiens
tgataaaggagagttgggttcttactgcacgacagtgtttcccttctcgtttgccagggtttggatacctgatccagaggaag

SEQ ID NO: 86435 - DNA, 97 bp, Homo sapiens
aaaaaccatctggtgctgtggattgcaaccttgaatgctgcagtactttgcacggggcctgcaagtttatatcagacaacttcgcttagctctccag

SEQ ID NO: 86436 - DNA, 100 bp, Homo sapiens
acacaagaagaggattggaaccagttccgatacagcacaatggaaaggcagactacaagttactgagcacctccctgagaaaattgaaagtagtttacag

SEQ ID NO: 86437 - DNA, 98 bp, Homo sapiens
caccaccaccacagagtctgtggaagaggtggttcgagagtgcctggaagagctgggatgtctggttgagtcctatggcatgaatgtttgccaaccaa

SEQ ID NO: 86438 - DNA, 90 bp, Homo sapiens
caaatcagtctgaaagtacctgctatgaagtggcgctcctgagcaaagccttctagacaagctcagtggaatctgaagggcccaccccat

SEQ ID NO: 86439 - DNA, 82 bp, Homo sapiens
ggtcaggagcagccgcagcgacggcggcgacagcaggagccttcacgtaaatgggtccagtcatgcctcccagtaagaagcc

SEQ ID NO: 86440 - DNA, 75 bp, Homo sapiens
aaccagaacaggtgaagaatatgtctgccagtgaggttgtggcagcactgcctgaaggtatgagaccagattcta

SEQ ID NO: 86441 - DNA, 83 bp, Homo sapiens
ccagcacctggaccttggacattcagacttcagaatgaacccagcttagactagaaagtctagaagacacacacataatgaag

SEQ ID NO: 86442 - DNA, 82 bp, Homo sapiens
acgtgtagccgcgtcccctccagtccgctccgggcaggtatgtgaggagcagcgctgtgaggaggaagtcttccccctggcc

SEQ ID NO: 86443 - DNA, 83 bp, Homo sapiens
atgaggatgctgaggctgtcctgtcctcgtccgtctcatcaaaggtacaggtttgcagattccgccagcagcacagcaagctc

SEQ ID NO: 86444 - DNA, 82 bp, Homo sapiens
ttgggacccaccgctgccctcagctccgagtccagggcgagatgccgacaaaaggatcaaggtggcgaagcccgtggtggag

SEQ ID NO: 86445 - DNA, 99 bp, Homo sapiens
ctcactgcagaggtgctggagctggcaggtcacacgacctacaagtagggagcagggaaagaagagtgagcctgcatgccaattctaagctcttcagga

SEQ ID NO: 86446 - DNA, 111 bp, Homo sapiens
gcgcggcggacgcgcccgggacgcgcggcggcaccgggaggccgggccgagcggaacgaatgatcacacactttgaaaggtccaaaatggagtaaggaatgggaagatttg

SEQ ID NO: 86447 - DNA, 100 bp, Homo sapiens
cgttactgccctgtggggcaaggtgaacgtggatgaagttggtggtgaaggcgtttgggccggggctgcagggaggcagtgcgggctcccccgcccgctt

SEQ ID NO: 86448 - DNA, 50 bp, Homo sapiens
aaaaatttattaaaggaagcacacctaagtgatgtcttggcattgcccat

SEQ ID NO: 86449 - DNA, 90 bp, Homo sapiens
ggagctgctggacaaatattttggaaatggtttccctagccagcagagcttacatcaagacagctggactgcgatctacaatagcgtggg

SEQ ID NO: 86450 - DNA, 50 bp, Homo sapiens
ccgaggcgcagaagtggattgagatactaaaatgtctgatgatgctggtg

SEQ ID NO: 86451 - DNA, 75 bp, Homo sapiens
ctacgcgcggggcgggtgctgcttgctgcaggctctggggagtcgccatggaaaatcatcagcgtgttagcattt

SEQ ID NO: 86452 - DNA, 82 bp, Homo sapiens
gctgcgttgcggctactacaacacggctgtcaagctggcgcgccagagcggcatcgaggccgagacgcatccagagctttcg

SEQ ID NO: 86453 - DNA, 83 bp, Homo sapiens
cacaaccgtctccagccttggtctgagtggactgtcctgcaggtaactaggatttctacctcaaccgcgagacctatgcaagg

SEQ ID NO: 86454 - DNA, 82 bp, Homo sapiens
ccaccatggagacccgctacaacctgaagagtccggcagcacaacggcatgaaactgtccatgaagggctctcacggccaca

SEQ ID NO: 86455 - DNA, 75 bp, Homo sapiens
ttgaagaagaggaagaggaaagaaagacaagtcaggcatggctctcacccagaccaatgatgcgagctcagagtc

SEQ ID NO: 86456 - DNA, 90 bp, Homo sapiens
agcaactcaacgtcaggatcctgcagctgctcaggagggagaggatgagggagcatctgcaggtcaagttgcaggtgtcacaccttggat

SEQ ID NO: 86457 - DNA, 100 bp, Homo sapiens
gggcgacggtggctccagcatgtatcagccgaggtggagctgcggggccctggcatgaaagaaaagttggagaagatgagggatcatgaacgaaaggaag

SEQ ID NO: 86458 - DNA, 101 bp, Homo sapiens
gacctacgacatcgcggcttctctggcgttggccagtcagccacagacacgatgaggcgagtggtacgacagagcaagtttcggcatgtatttgggcaagc

SEQ ID NO: 86459 - DNA, 82 bp, Homo sapiens
gcccgcgcctgttccgcagcccgcgtccgcgccggccccacagctctgcgtccgggtcatcatcagatttgaaatatttaaa

SEQ ID NO: 86460 - DNA, 75 bp, Homo sapiens
agcctcgctggaggcagtttctggcacagttggcgggcagctcccaggtctccatgagtacggcgccgtcggggg

SEQ ID NO: 86461 - DNA, 100 bp, Homo sapiens
gaccgaattcagaaggatatcgacgtcgtgatccagaagtccagagctgaggactgcctgtttgcagatgagctttgatccaaaccttctccacaacaat

SEQ ID NO: 86462 - DNA, 96 bp, Homo sapiens
tggaaagtcgggggctttcgcccgggtcctcctagaaattccccccgaagaagactcccccacatctggggcgccctgcgtccggcagaggaggcg

SEQ ID NO: 86463 - DNA, 82 bp, Homo sapiens
gggatgggggcctcgggcgccccgcagccccccaacatcctgctcctgctcatggacgaccggagctggagtttgttcagat

SEQ ID NO: 86464 - DNA, 75 bp, Homo sapiens
gttcgacctcatcgtggaccgacccgtgaccctcgtgagaggaagtgagtgcttttggtgaggaaggtgaaggtg

SEQ ID NO: 86465 - DNA, 100 bp, Homo sapiens
cttctctgaccccaagaagaccaaaccatcccacggctccaagaattaaacaaccaccatgtcgagcaaaaaggcaaagaccaagaccaccaagaagcgc

SEQ ID NO: 86466 - DNA, 76 bp, Homo sapiens
tgcatgctgatgacgaaaaacgcacgtgtggttctcaaatataggcattctgatgggaacttgtgtgttaaagtaa

SEQ ID NO: 86467 - DNA, 90 bp, Homo sapiens
ttttggaaagcagtttttaagacaaagcgagtttgctgcacgccttaataaagtggaaatggaacgtcagaatttagcagaagcaattac

SEQ ID NO: 86468 - DNA, 98 bp, Homo sapiens
caccttcagagcgtcacggcgtacgccctcatggggaaaatctccccggtgactttcagggctaccacccgatgccccatgaagtggagatcgcacac

SEQ ID NO: 86469 - DNA, 50 bp, Homo sapiens
ggacgcatcacttgcacttctagaacccgaccattttgttcaggaccctg

SEQ ID NO: 86470 - DNA, 74 bp, Homo sapiens
gaaaaatgcaaagatgtagatgagagaaatgagtgaaattaaatggtggcagacatgtccaaggaatattgcgg

SEQ ID NO: 86471 - DNA, 74 bp, Homo sapiens
tgagaccaatagttattgatggcagcaatgtggcaatgagcaggagcgagaacccgagcagcgccatgagcaac

SEQ ID NO: 86472 - DNA, 90 bp, Homo sapiens
gcgtgagccactgcacctggcacaggtagcccgggaccctcgctttgatgatctgtcaggggaatataatcctgaggtgtttgacaaaac

SEQ ID NO: 86473 - DNA, 100 bp, Homo sapiens
taggaattgttttctcacttaccttctttaaaatgaatttaggaggacttttactccaagcactcctggaatattggcctagaacacatgtgaatccaat

SEQ ID NO: 86474 - DNA, 83 bp, Homo sapiens
caagtttgcagatcgggagcgcaaggtcgccctcaaggccatgatcaaaacggttacctgttcgggtgggcccatttccagaa

SEQ ID NO: 86475 - DNA, 100 bp, Homo sapiens
cacacagagtgaacagaaaaagaggatacctctgcgatcccgggtcatctccagatgctagggttatggtgcccacagctcgcctggtggcaggtctgga

SEQ ID NO: 86476 - DNA, 51 bp, Homo sapiens
tcctattcctggtactccatggctgctttgctggctctgcaagaaaatgga

SEQ ID NO: 86477 - DNA, 100 bp, Homo sapiens
tggagtctgcgaaggccgggacccggttccccggcccacagtgggggtgtgcaaacccgagagaactggtccaaaagaaactcttccttcaaaacctgtg

SEQ ID NO: 86478 - DNA, 75 bp, Homo sapiens
gcttttggctgccctgagctggcagtacctgaccactctctcccagtagtcgtgaaaggtgccaaattggcagag

SEQ ID NO: 86479 - DNA, 100 bp, Homo sapiens
taacacttaaaatggtactcggggacctccaaagactaaactgacaagccttcaaggagcccaggggcagcaaatatgaagtctatggaccctgcctcag

SEQ ID NO: 86480 - DNA, 74 bp, Homo sapiens
tggcattccttctaacagaattattttgggagggttttctcagggaagagctgggacagtggaggcgactgggg

SEQ ID NO: 86481 - DNA, 80 bp, Homo sapiens
aggacttcatgatccagggcggagacttcaccaggggagatggcacaggaggctgccccctcggtcactctgttcccgcc

SEQ ID NO: 86482 - DNA, 100 bp, Homo sapiens
tgcatagcccgaggaagctgggattcgggggtcttcgctggtctgcgcgggtcacgcgtccccagtcctcgggcgggggaagacatgtaaggaatttgca

SEQ ID NO: 86483 - DNA, 82 bp, Homo sapiens
gccgggcgccatttgccagtgatggaccgtgctagtgacctgactgatgccttcgtggagcggtttgctgtgtttcaaagaa

SEQ ID NO: 86484 - DNA, 97 bp, Homo sapiens
cgggcccaggaaaaagaggaaagtggactgtccggggccgggctcaggagcagaggtgtcatggagaaactccagctgggcccagagattctgcagc

SEQ ID NO: 86485 - DNA, 90 bp, Homo sapiens
gttgaagctaaacccatatgcaaagaccatgcgccggaacaccattcttcgccaggccaggaatgtgatggctcagtgttccgagacttg

SEQ ID NO: 86486 - DNA, 84 bp, Homo sapiens
cggcgaatcacttataaatggcgccgaagcaggacccgaagcctaaattccaggaggccctgaccctctattctgcaccctgtg

SEQ ID NO: 86487 - DNA, 75 bp, Homo sapiens
gtggaattcaggtccaatttatatatagctgatgttctaatcatgtcagataaagatgatattgagactccactg

SEQ ID NO: 86488 - DNA, 76 bp, Homo sapiens
tgcaactgctggattgctgcaaggctgagggacgagaacgaggacctgagagtcagtatactaagactgcccagga

SEQ ID NO: 86489 - DNA, 75 bp, Homo sapiens
cggggcgggcgccgcgggacctctccgggccatgggttaaacccatccagagtaatggctgcggccttacccagg

SEQ ID NO: 86490 - DNA, 85 bp, Homo sapiens
ttttgccgatttcatgactaaccagtgtagtcaaaccacacactccattaataaggtttcctgacagaagagacaatcctaaacc

SEQ ID NO: 86491 - DNA, 87 bp, Homo sapiens
tggcatcaaggacaaacccaccttcatcaaagggtttttgaatcagagccgacaggcacttgaattgaaaatggaaaaccctactgc

SEQ ID NO: 86492 - DNA, 82 bp, Homo sapiens
ctccttggcatttctttctttgcacttcctgccggtcaacatatttcactggcacctattcacaagcttgaagaagctctgt

SEQ ID NO: 86493 - DNA, 100 bp, Homo sapiens
gatgattcgtatctaagactctgggacactcctgaagtcgggaaatgccagagactgctgctactttgaaacgtacgatagaggccctgatggacagagg

SEQ ID NO: 86494 - DNA, 75 bp, Homo sapiens
ctgaaggccctacgggagaaaaccgggcgcaagttaccggtattgtaagaacaagccgtacccaaagtctcgctt

SEQ ID NO: 86495 - DNA, 100 bp, Homo sapiens
ggcctgcggctctctacgtccctgcggagcagccggaatttcttcacatggctcctggagaagtgaccatcacagttcgcctcatccgttcctttgaaca

SEQ ID NO: 86496 - DNA, 51 bp, Homo sapiens
aatcgtgtgctgggctggtcccccttggtgcagagcagacagagaaagccg

SEQ ID NO: 86497 - DNA, 100 bp, Homo sapiens
cgaaaggaagaagtttcaagagattttggagaggcaaccaatttggaaactctggaggtcccctggttaacctggtgagtgagacatccttccttccaag

SEQ ID NO: 86498 - DNA, 90 bp, Homo sapiens
cccggaccttatccgtgcgccgcttcggtttgcagggaagatggagagttggaagaaggtgaattggaagatgatggggcagaggagacc

SEQ ID NO: 86499 - DNA, 97 bp, Homo sapiens
gccagtagtgaaggcaacagtctgcccacctgtggacaccaggtacttgaagctggtgtgtgtttcctttcagcgtcaagggttccacactgttggg

SEQ ID NO: 86500 - DNA, 88 bp, Homo sapiens
ggaacttgcagaaatcacattggaccctcctcccaactgtagtccagcctcctgagcccagggacctgcagatcagcaccgaccagga

SEQ ID NO: 86501 - DNA, 100 bp, Homo sapiens
gagcagcctgcccaacttctgcgggatcttcaaccacctcgagcggctgctggacgaagggtatttgaagtataccatacaactgttttgaaaatccagc

SEQ ID NO: 86502 - DNA, 103 bp, Homo sapiens
aagaggatggagatgaagatgaggaagctgagtcagctacgggcaagcgggcagctgaagatgatgaggttggacaagaagacgaggctgagagtgacatctt

SEQ ID NO: 86503 - DNA, 49 bp, Homo sapiens
aacagaatcagctgttccctgcgaaaggatggagggtacagagtctgcc

SEQ ID NO: 86504 - DNA, 98 bp, Homo sapiens
gatagcgtccgctaggctgtctgcctcggtacctgttactgctgctacttcctcgtttgacaccttcctggaggtggggctggtgtccgagcacttct

SEQ ID NO: 86505 - DNA, 100 bp, Homo sapiens
caccacctcacctgttgactcctcagagctgcttctcgatgtgaacgaaaacgggaagaggcgaactccagacagtccaatatcagatggaaatgatgcg

SEQ ID NO: 86506 - DNA, 100 bp, Homo sapiens
tccttgcacttattttgggactccgttgtgcctgtgcccagcacagggtgtgctgctggtgatttgagttctgtgaacctgcatttgttgttggtaattg

SEQ ID NO: 86507 - DNA, 90 bp, Homo sapiens
atcctctccaaagacgccacccacgtccgcgacttccggctcttcgtgcccaaccacaggaggtcccaggtgattgaaaagtttgaggcc

SEQ ID NO: 86508 - DNA, 75 bp, Homo sapiens
tacaacccgacgaggaacgaatgggacaagatcccgtccatgaatcagcacttttccagccattaactccaggct

SEQ ID NO: 86509 - DNA, 100 bp, Homo sapiens
ctgagagataatcgagctgaaagaggacacaagaaaaattgttctgtgagaacagccagcagctatcttccagagggccacactgggcatggacaccctt

SEQ ID NO: 86510 - DNA, 82 bp, Homo sapiens
aagccagcagccaagccggggcagtttcagtctccaccccaaatgcaggcctggtctccaagtcctctcctaagaagcctcg

SEQ ID NO: 86511 - DNA, 75 bp, Homo sapiens
tcctgtattaaaaagcttccaagccgaggttggtgttcgaggaagagacattgttgttcttggtgtggagaagaa

SEQ ID NO: 86512 - DNA, 100 bp, Homo sapiens
gaagaaaaggcgaaaaacttggccaaaatcaggaataagcaagaagtgatgatctcagatttagaagactgctgagaaggaagaatttgaacatcaacag

SEQ ID NO: 86513 - DNA, 100 bp, Homo sapiens
tggcctcggccacccagccgtctcctgtgaaggccatatttgataaacaggaacttgaggatgctgacagacagcaccaagaagtaattgcaatttatcg

SEQ ID NO: 86514 - DNA, 75 bp, Homo sapiens
gtacctacggaaatcctaactaccactgtttgtcccgctggctggaagcctggcagtgacacgattaagcccaac

SEQ ID NO: 86515 - DNA, 132 bp, Homo sapiens
tggggaaccccagaggcagtggcaagaggaggtggcggcggtggtagtggtgggctcctgcatgaccgacctggtcagtgaaacaaagagtcctcttcgtggaaaagaaaaaaatacgctccctttaaacgg

SEQ ID NO: 86516 - DNA, 75 bp, Homo sapiens
ggggctccaatggcgctttctacaagaaatgaaagctcattagcatctacactgaagacgctcctgttcttcaca

SEQ ID NO: 86517 - DNA, 75 bp, Homo sapiens
tgaaaacgtacgctctccaactggccaatacaaatcccttgtatccaatccacttggttctggtctagcccttgc

SEQ ID NO: 86518 - DNA, 98 bp, Homo sapiens
attttcccatatctgaagaaactattaaacttctcaaagttcagaaataccacactattaatgggcataattgtgaagtgaaaaaggccctttctaaa

SEQ ID NO: 86519 - DNA, 80 bp, Homo sapiens
tactgcgggccgctccgacggcggtccatcctgtgcctccggagccagcgtggtggccatagacaacaagatcgaacagg

SEQ ID NO: 86520 - DNA, 98 bp, Homo sapiens
gatgcctgggcctcagaccagaaagtgaaggctctaaaaatagtcatccagctctccgaacagcaggatttcccaacggcagcttgggaaaaagaccc

SEQ ID NO: 86521 - DNA, 90 bp, Homo sapiens
ttgagcaacgacttgccctgtgacggccatcctgagacgacagggtcgatacatatgctcaacagtgcctgcgaaggcggaagaggaagc

SEQ ID NO: 86522 - DNA, 75 bp, Homo sapiens
gcccagggcagcggagcacgcgggctgctcatcgtcagcagggagaggctggtgcgcgcggagccatggttatca

SEQ ID NO: 86523 - DNA, 100 bp, Homo sapiens
gttcgagctgtgcgggcgggcggtgagcgcccatatgggggttctggagagcggggtgtggggctgaaggtgatgtggccgccctcaaccgacgcatcca

SEQ ID NO: 86524 - DNA, 74 bp, Homo sapiens
cttactgttgcgtggttcgttattaacaggtgcatcagcgggtaagcgagtgtttacgggtgttgaagatcctg

SEQ ID NO: 86525 - DNA, 51 bp, Homo sapiens
tgaaaaggaagttttctggaatgggtgcttgaagtttctgggaagtcggca

SEQ ID NO: 86526 - DNA, 83 bp, Homo sapiens
gcgggaggtgttcgagaacgaccccgagacgggtctcctatggacagaagtgcgggcaaggagctttgttcctccccgatgtc

SEQ ID NO: 86527 - DNA, 100 bp, Homo sapiens
aggaaggtggagatctcctgtgctgcgaccactgcccggctgccttccacctccagtgctgaacatttgtaaatgggtcatctgtctccagtccaataca

SEQ ID NO: 86528 - DNA, 100 bp, Homo sapiens
tgaagcactgtgtggcttccagaagccaatatctactcttgacaaccgaaccatcgtcatcacctctcatccaggaaacttcgagccacgttagatgaat

SEQ ID NO: 86529 - DNA, 83 bp, Homo sapiens
gttcctgggaggccagttaaatgtctctgggaaatcctcattgacgattcaatttgttgaaggccaatttgtggactcctacg

SEQ ID NO: 86530 - DNA, 97 bp, Homo sapiens
ctgcctttggtgcctcctgcctcctccctgctttgttccaataattttgtgctcggttattcagcttctcaaggctggaaaagcgaaggaagtttcc

SEQ ID NO: 86531 - DNA, 100 bp, Homo sapiens
cagggcagccctggaggcttactgcaagaagtatgagcagctcaagtctcggaagggtgctgacctggaccgggagaagaaggctgccgagtgcaaggtg

SEQ ID NO: 86532 - DNA, 90 bp, Homo sapiens
tctctgtgcactgataataaccctgcaggtggaaccgtcccaaaatgtcccttgctcagaagaaggatcgggtagctcaaaagaaggcaa

SEQ ID NO: 86533 - DNA, 76 bp, Homo sapiens
atcgatctctccatcccttccgaggcccgacttcggtattgttgcagcatctggcagtgagactgaggatgaggac

SEQ ID NO: 86534 - DNA, 100 bp, Homo sapiens
gtgggcggcggcggagggagctggaccccatggacgtccgcggggacctcatgtcttggatcaatggaatacgggggttggtgtcctcagatgagctagc

SEQ ID NO: 86535 - DNA, 75 bp, Homo sapiens
caacggggaagtcacccagcccccaaggattctgggggaggcctcaggtgaatgaaaactttgccattgatttga

SEQ ID NO: 86536 - DNA, 100 bp, Homo sapiens
gagcgcctggccactgccctgcaaaagctggaagaagctgaaaaagctgctgatgagagtgagagggtccaggtgcggaagtatggagagcagaagacgt

SEQ ID NO: 86537 - DNA, 100 bp, Homo sapiens
agcatcacagagcgaagctgcgatggagcagcaggataagtctacttttcttccacgtaacaaccacaggatagatgacattcattttctaagaaacaaa

SEQ ID NO: 86538 - DNA, 100 bp, Homo sapiens
tctcttgccaacatactttgtagatactgcaatctactctgacatatcagggtacccactgatggtaatgctggcctgctggctgaaccccagattgcca

SEQ ID NO: 86539 - DNA, 75 bp, Homo sapiens
caagccagcagctcgctcagtacaagagcgacgagtagaacagcccctctatggtttagatggcagtgctgcaaa

SEQ ID NO: 86540 - DNA, 83 bp, Homo sapiens
cctctctttcgcttttgtggaactactctacggcatctggagcaactggaactgtggctgcaccatctgtcttcatcttcccg

SEQ ID NO: 86541 - DNA, 87 bp, Homo sapiens
agcgcgcccgtggccgctgccgcctccgccccagaacgaagtcggcctactggagttcttccaaaatgtgataaaagaaactagggc

SEQ ID NO: 86542 - DNA, 82 bp, Homo sapiens
gcgcccttcctcggcgggccggactgatttcgatggggtcctctatcatatttcaaatcctaatggagacaaaacaaaagtg

SEQ ID NO: 86543 - DNA, 98 bp, Homo sapiens
agcagtcaactcaaatgcaagtccaagaggaggaggaggcggaggtccaagcggaaagcgtgcaaacgcaaagagcaagaaccaaacaaagacaggaa

SEQ ID NO: 86544 - DNA, 100 bp, Homo sapiens
caaaattattgaaaacactcgaaggcactgccctgggaagaactaggatgaggtattgacttgctgttgccacataacaaaccctgccagaactccctgg

SEQ ID NO: 86545 - DNA, 75 bp, Homo sapiens
cttgactattttattaaactctcacctcccatgttgctcaaagaaccatatagaacttgtaatagctggcatcgt

SEQ ID NO: 86546 - DNA, 75 bp, Homo sapiens
gaggagaagtaccaggaggcgttggccaaggtgttatagttttgccgctggactcttccctcccttcccccaccc

SEQ ID NO: 86547 - DNA, 85 bp, Homo sapiens
cacctgactcagatgccgaggtggatggtgtggatgaagaggaggaggacgaagggggagaagggagaccgaggtgatgcaggac

SEQ ID NO: 86548 - DNA, 100 bp, Homo sapiens
aggagcagcttccaggatcctgagatccggagcagccggggtcggagcggttacagatgtagagctaaaacgactgaaggatgctttcaagaggacctgt

SEQ ID NO: 86549 - DNA, 49 bp, Homo sapiens
gggaggccgagcgcgccgagttacagggagtggacatccgccataacaa

SEQ ID NO: 86550 - DNA, 88 bp, Homo sapiens
taccacgaggaacccgaggcccggcgaggagaacggcaaagcgccggcatcggccgcacaggcaccatcattgtcatcgacatgctca

SEQ ID NO: 86551 - DNA, 104 bp, Homo sapiens
attcccaggagaagagggaacaaccaattcattcctgaaagccaggcctcggaaacgtgaagagggctggtgggtggtgattggagatgccaagtccaatagcc

SEQ ID NO: 86552 - DNA, 51 bp, Homo sapiens
ttcccctggacctttggacccaaggcctgtgctcatcgctggaagaacatc

SEQ ID NO: 86553 - DNA, 97 bp, Homo sapiens
ttcctgaagacaatttcttcttccaaaatcctcggattctctacttctgctggtttcatcaccttaaatggttttgaaccaatgaaggtgtattccc

SEQ ID NO: 86554 - DNA, 90 bp, Homo sapiens
ggagcaggcgcctacatcctaactcgatttgctgagtttgacctggatgtggttgctgtggtgaacgacacagtcggaactatgatgacc

SEQ ID NO: 86555 - DNA, 75 bp, Homo sapiens
tcagatctggagcatcggctgcaggggtcagtgatggagctgcttcagggtaagcttgatgattaccaggaacga

SEQ ID NO: 86556 - DNA, 48 bp, Homo sapiens
ggggctgggcgcctgggaacaaagggtatgcggccccctacctgacag

SEQ ID NO: 86557 - DNA, 75 bp, Homo sapiens
aactacctggcattgccttttgttgagagtatgtatgtaactgctctgtggttggaagcctgaatgtgaatcgct

SEQ ID NO: 86558 - DNA, 100 bp, Homo sapiens
cagaaggcggcgatcctgggctgcgggcaaggcgaggctaagaatattgtacacaaagattcttgatgttcttgaggaaatccctaaaaatgcagcatat

SEQ ID NO: 86559 - DNA, 76 bp, Homo sapiens
ctgcgccatctgtcaggccgagttccgagagcctctgattctcctgtgccagggtgtccgcaatgttgccagtgtc

SEQ ID NO: 86560 - DNA, 90 bp, Homo sapiens
cagaacccttagcacacaggaaatggattactctttggatataacaccaccttcaaaaatttctgaagatattcctcgtcagcttgtcta

SEQ ID NO: 86561 - DNA, 95 bp, Homo sapiens
ttgagcctcaaaatgaagatggcacatggcccaggcagaccttgcagtcaaagtgaggaaaatagcagctgaatactatgacaacctccctcact

SEQ ID NO: 86562 - DNA, 101 bp, Homo sapiens
gagccccatcgtggattccaagacatccctgctgagagagccaaggtccaggtgcaggtacagcagtctccgcaacaggtctcggctcagctctccccaca

SEQ ID NO: 86563 - DNA, 74 bp, Homo sapiens
tatttatggaggtgctcctaaaggtccccagattcgagacttggaaagaggccaaggcagaggcttcctcagga

SEQ ID NO: 86564 - DNA, 98 bp, Homo sapiens
tatcgttctatttctctagctattgccttattttttctcatggatgttcttcttcgagtatttgtagaaggatcctgcagctccaccaaagaaaccgc

SEQ ID NO: 86565 - DNA, 82 bp, Homo sapiens
aaggattcaaatgctagcagacacggtggctactctgcctcggggacgaaagcaggtgtggacactgccagcggctgcagcc

SEQ ID NO: 86566 - DNA, 100 bp, Homo sapiens
gccgacatgacggacaacatcccgctgcagccggtgcgccagaagaagcggatggacagcaggccccgcgccggagttgtctgctggttctcagcttgaa

SEQ ID NO: 86567 - DNA, 100 bp, Homo sapiens
aacgccctgcctatctgtattcattggaggctatggtggtggaggtggtggcagcagaggtagttatggaggaggtgatggtggatataatggatttgga

SEQ ID NO: 86568 - DNA, 75 bp, Homo sapiens
caagcgggcagctgaagatgatgaggtatcgcacaaccaaggacatcatccttcccttccgggtgatcccgctag

SEQ ID NO: 86569 - DNA, 83 bp, Homo sapiens
cgcgcgtgcgcggacatggcctcaaacggtagctacagcaagctgggtagcaggcagatccaaaggatatcatgaagtttcca

SEQ ID NO: 86570 - DNA, 100 bp, Homo sapiens
cacggcactccaactggcttcgcttcgttcatgaggcaccatctcaggagcagaagaacttggctgccattcaatcaagctacaacttcaagcagaagag

SEQ ID NO: 86571 - DNA, 74 bp, Homo sapiens
ctaccctaaagtcaccacctgctgcttttctggagcgcttaccagggatgctgagaacttgctggagtcacagc

SEQ ID NO: 86572 - DNA, 82 bp, Homo sapiens
actgaaaggaaatgacggatttttctccttaaccaaaactgccaagaaaggcttggaattgaaacaaaacctgatagaagag

SEQ ID NO: 86573 - DNA, 83 bp, Homo sapiens
ccttgaaacgcccacgtgatgtagatcataggcttggacttaaggatcagcaggagagagaaatcattcacgttctcatggat

SEQ ID NO: 86574 - DNA, 50 bp, Homo sapiens
gttccaagactatcttctttctcactataaaagcttcgatgatgaagaat

SEQ ID NO: 86575 - DNA, 75 bp, Homo sapiens
tgacatatgatatacagtcatttactgatacaggtactactacaaacgggagatcctggaacgggtggatggccg

SEQ ID NO: 86576 - DNA, 100 bp, Homo sapiens
tccaaggagagcatgtcggaggctgatcgcgcccagaaggaaccagtgaccttccgggatgtggctgtggactttacccaggaggaatgggggcagctgg

SEQ ID NO: 86577 - DNA, 51 bp, Homo sapiens
ccagccctggaccttcttattaaggtggaatgcaagctttaggacttcacc

SEQ ID NO: 86578 - DNA, 100 bp, Homo sapiens
cagccagctgcagccccacagccagcccctgcccaggagccagcggggcaggactgtgatgtcccaattcatgcctgcatcagtaacccatgtaaacatg

SEQ ID NO: 86579 - DNA, 100 bp, Homo sapiens
tttaaactatggacgactccgaggaacattgaggttgacctgacagttcaagaaaaggagaaatatcttaatgtgtctcgctggttttgtcacattcagc

SEQ ID NO: 86580 - DNA, 82 bp, Homo sapiens
cgccgccaccatgcccaagagaaagccgcttacaaacacgcagatggcaagaagattgatggcaggagggtccttgtggacg

SEQ ID NO: 86581 - DNA, 82 bp, Homo sapiens
ggctgaggcggccgcggggcccgagcgcaggttaacacagaaatctgcctcctgggccatgccgcttctaaggcctgtttct

SEQ ID NO: 86582 - DNA, 88 bp, Homo sapiens
aaaatctccaagaaacatcattcacccatactgactagtttcacatctctttgacatggagattaagtagcttgcccaagatcaccca

SEQ ID NO: 86583 - DNA, 80 bp, Homo sapiens
agccgccagttgggatcaaatgtgagcctatggatcaaggaaacctcgacctgtctcccagttggttgcacagcaggtta

SEQ ID NO: 86584 - DNA, 80 bp, Homo sapiens
aagccagaagaaatcaacctgctcaccggggagtctgatacacagacaggggcaagtgtccgagtggtgaatcagctact

SEQ ID NO: 86585 - DNA, 75 bp, Homo sapiens
ctgggcctggggctgcgcgccaggttattcagcttctcaaggctggaaaagcgaaggaagtttcctacaatgcac

SEQ ID NO: 86586 - DNA, 100 bp, Homo sapiens
atgaaggagcttcaaacccaaagaggtaagcattcaggtgtcatggagaaactccagctgggcccagagattctgcagcgggaaaatccaaggcttattt

SEQ ID NO: 86587 - DNA, 100 bp, Homo sapiens
tcaacctcaacctcccagcaccacacatcatgccaggggttggcttaccagaacttgtaaacccagacttcctcttcaaattcctggtgattggcagtgc

SEQ ID NO: 86588 - DNA, 118 bp, Homo sapiens
ttccagttcagacatcataagagatcttttagaagaagaggaagcctgggaagcatcacataaaagggatgctcattccacccactgagatggctttcaaatcgacagtagaatccag

SEQ ID NO: 86589 - DNA, 75 bp, Homo sapiens
ggatgtatctgtggcccttccaaataagcggcataaagcaattgagaattcagaaaaggtactttgtggactatc

SEQ ID NO: 86590 - DNA, 75 bp, Homo sapiens
aaaggaagaactccttaaactaactgaggctgaggatggcattattgcttatgatgactgtggggtgaaactgac

SEQ ID NO: 86591 - DNA, 100 bp, Homo sapiens
tggagaccaatcacccacccagtgtgcgaaggactccatgaaagatgacagaagaagttattgtgatagccaagtgggactacaccgcccagcaggacca

SEQ ID NO: 86592 - DNA, 80 bp, Homo sapiens
atcaggcgtcgttgctacctagtctcactgtcgcccaggctgcagtgcagtggtgccatcacgcgtcactgcaacctctg

SEQ ID NO: 86593 - DNA, 117 bp, Homo sapiens
gtggaggatgagattgatcagtacctcagcaaacaggacgggaagatttacagaagccgagacccacagctgaagatgacgattcagagactgaaaaacctgaggctgatgacccaa

SEQ ID NO: 86594 - DNA, 75 bp, Homo sapiens
ctgagagagtgcaagccgtggggtatgttgagtctaaaaaggacagagtcacagtagtcttcagcacagtgttta

SEQ ID NO: 86595 - DNA, 83 bp, Homo sapiens
gaagaagaggaggaggacgatgacgaggaggaaaaggcccctgtgacctctacgagttccagggagctctgtcctggtgaccg

SEQ ID NO: 86596 - DNA, 96 bp, Homo sapiens
tcatcatctcttgctgtggaaacggaaacatagcagttttcacatttcctgcatctctcagacagacatatctgaagagatggattaagaatgctt

SEQ ID NO: 86597 - DNA, 100 bp, Homo sapiens
gaaattaatgagataattcgtgtgttacaactcacctcttgggatgaagatgcctgggccagcaaggtacaccagaggatcgcttcctggcagaatttgg

SEQ ID NO: 86598 - DNA, 118 bp, Homo sapiens
tggttcctgcatgaagacagtggctggcggtgcctggacgtacaagaggaacccctctcccagatcactgcctactgcaatagttgctgggacaccaaaggcttagaggacagtgtgg

SEQ ID NO: 86599 - DNA, 82 bp, Homo sapiens
aagctgtattccctagagggttacgggacagatgcagttatctacattaagggtgccatgactcccggaatccctatcttta

SEQ ID NO: 86600 - DNA, 100 bp, Homo sapiens
gccagaagcgggcggcgcgggggagatgatggagtgtttggaaggtgccagaaggttccggcaatggacttttaccgctacgaggtgtcgcccgtggccc

SEQ ID NO: 86601 - DNA, 82 bp, Homo sapiens
gcggacgaggggaagtcgtacagcgtgtactaatggtcacttgatgtgcgctggctgttttatccacctactagcagatgcc

SEQ ID NO: 86602 - DNA, 100 bp, Homo sapiens
aaaaatgtctattttccctaagatatctttgagacctgaggttgaaaactatcttaaggaaggctttatgaataaggagtccatctcggtcctcttggtg

SEQ ID NO: 86603 - DNA, 75 bp, Homo sapiens
cagcgccggcctcctcagtgcgaagaagctgcagccgcacctggccaaggcttttcaggctgcctttcgagctca

SEQ ID NO: 86604 - DNA, 89 bp, Homo sapiens
aagacggccaagatcaaggtgaaggagaacattgatgccctggaggtggtgagccggctgggcctggactccctgtgccccttcagccc

SEQ ID NO: 86605 - DNA, 138 bp, Homo sapiens
tgaccctcaaacagcagtatgatgaactggaggctgagtacgacagcctcaaacaggagctggagcagctcaaagagataatgttaattcaagactctcgaagagaagcttcagtgcagatggatttgagatgctaca

SEQ ID NO: 86606 - DNA, 82 bp, Homo sapiens
tcggtcccggggtcacccgctacgggaagcaggcctcgccacagatttctgctcaggaaagtaggagaaagaagaaagaata

SEQ ID NO: 86607 - DNA, 82 bp, Homo sapiens
gccgatccagcctgcggagcctgtggggcaggagggaaaacccctgatcctaaaatgaatgctaggacttacatggatgtaa

SEQ ID NO: 86608 - DNA, 75 bp, Homo sapiens
cgcagtggtcgcttcttctccttggttcactgccagggaaaaactggcagctgctgtaagcactgacgtggccaa

SEQ ID NO: 86609 - DNA, 74 bp, Homo sapiens
ttggatatccaggatccaggggtccccaggctaaagaacatgcactctacacccccaagtgcatatgggtctgt

SEQ ID NO: 86610 - DNA, 100 bp, Homo sapiens
gtcctttcaggaaggagccattatttatgtcatcaagaagaatgacgatggtcagaaagcaacattgaatgcagaagaaatggcggacttctacaaggaa

SEQ ID NO: 86611 - DNA, 75 bp, Homo sapiens
cattttgctgtctcctcctaatacggtgtcagttgtacccgaggcgttctcagcagcagcaagtacctgtggtgg

SEQ ID NO: 86612 - DNA, 100 bp, Homo sapiens
gtaaattatgcaagctccaggaagcactgaaggcaagtgtcgtggacttcgtactgctaggaagctccgtagtcaccgacgagaccagaagtggcatgat

SEQ ID NO: 86613 - DNA, 74 bp, Homo sapiens
gattacacacagcaagttcctgcttctgggacagctctactgacggttaaagctgaagctcaacaaagatatag

SEQ ID NO: 86614 - DNA, 83 bp, Homo sapiens
tggaaatcgtgcctgtgcggcgctcgctcaaggaactgatcccggtgtctgcccaggaggtcaggaaggagaatcccctccag

SEQ ID NO: 86615 - DNA, 75 bp, Homo sapiens
ggaccggggacttcttgattgagtatgacgccgtgcccatccagtccagcgtggtgttatgttcctgcccatccc

SEQ ID NO: 86616 - DNA, 100 bp, Homo sapiens
ttcgtggtgaaggtccggggcttgccctggtcttgctcggccgatgaagtgcagaggtttttttctggttttggcccgaaccgcgacttcaacaaaaaat

SEQ ID NO: 86617 - DNA, 90 bp, Homo sapiens
aagaaggatttgagactaagtttattcctccaaagcaaaccaactgagaatgcaggtgaaacactgctgagtcctttggtgatgtgtggt

SEQ ID NO: 86618 - DNA, 100 bp, Homo sapiens
ggcagatggctcagaacaacagccggccagagcttctggacccggagcccggcggcctcctcaccagccaaggcacaattctgctttcccaggaactgca

SEQ ID NO: 86619 - DNA, 52 bp, Homo sapiens
aaggagctgcttcccaataaggaaacaatcatgagcgtcttgttgttcatcg

SEQ ID NO: 86620 - DNA, 50 bp, Homo sapiens
ttgctcaagtcttcagtcagtctgtggtccagtccaggtgcagcagcaag

SEQ ID NO: 86621 - DNA, 75 bp, Homo sapiens
ggcagcactactcagacatcttcaccaccacagagcccatcaagcccgagcagtgtgggcgaaatgctgaaaact

SEQ ID NO: 86622 - DNA, 49 bp, Homo sapiens
gaaatccaagaaagtcagccccaagccataaaattttgagtagaaaaat

SEQ ID NO: 86623 - DNA, 73 bp, Homo sapiens
ctatggcaaacagtttgaagatgaacttcatccagacttgaaattcacgggaattgacttcaaacagaatccg

SEQ ID NO: 86624 - DNA, 100 bp, Homo sapiens
ggcgggtgttgtgagcgggaaggtcctcgatgggcttcctggaatattggtgtgtttatttgcatcagatgtgctggaattcatagaaatcttggggttc

SEQ ID NO: 86625 - DNA, 100 bp, Homo sapiens
gcggagccgggcacggagccgcccgcgcacttccaggtgcacagcgcgggagccgtcacggtgctcaaggtgttgaaagacagagaagcgaagacagaga

SEQ ID NO: 86626 - DNA, 83 bp, Homo sapiens
aacaaagatttcgcaggtggtgagtctcaaaggcgaagctgaatgatttgtgccaatgtaatggaatattgccagtcactcat

SEQ ID NO: 86627 - DNA, 100 bp, Homo sapiens
cttcaagagttcccacaatctggcagtgcaccggatgattcacactggcgagaagccattacagatcacagtcaccttctatatagcaccatccccagga

SEQ ID NO: 86628 - DNA, 100 bp, Homo sapiens
tgaattagtttctggaggatctgataatcaagtgattcactgggaaatagaggataatcagatgaaccaactagccctagcattgatcatgatattgcac

SEQ ID NO: 86629 - DNA, 100 bp, Homo sapiens
ttttgccaccaatcccttcgatcaggatgttgaagacgtgaacgatcaagagagagggaccatagtagatcacgagaaaagagtcgacgtcataaatccc

SEQ ID NO: 86630 - DNA, 82 bp, Homo sapiens
ggaacccgcacctgtgaacctcggcagtgcgtccccgggactctgttctgtgagctctacgaactcgacggggaccccaaga

SEQ ID NO: 86631 - DNA, 152 bp, Homo sapiens
ccaaacacatttataatcagatgtctccagtggactactgttatagagagaacatttcatgtagatactccagaggaaagaacaacaccgatggacttcaggaacttgcctgtgggggcttaatttattgcttgggagttgtgttcttcaag

SEQ ID NO: 86632 - DNA, 114 bp, Homo sapiens
tttgttaaagagaggatagaaattgaacagaactatgcgaaacaattgaggaggcaagtgaggcctatctggttggcctttttgaagacaccaacctgtgtgctatccatgcca

SEQ ID NO: 86633 - DNA, 100 bp, Homo sapiens
cgtcagcagaggggccactgctgggccctgaggctgcaccaagtggcgaaggagccggctccaaggaagttctccagcagctgattgtaatgaatttgcc

SEQ ID NO: 86634 - DNA, 75 bp, Homo sapiens
gttacatcaaaaattcttcatctggctcagagtcaaggtggctgtgaaaaacaatatcgatgtcttctacttcag

SEQ ID NO: 86635 - DNA, 75 bp, Homo sapiens
tgaaccggcacctgcacacctggatccaggataacggaggctggatcaccgaagtggccttggagtacaacaact

SEQ ID NO: 86636 - DNA, 88 bp, Homo sapiens
tccttaccagctcacctctcaccgcgcatgtttggagagtaaagccaatcccagctgaaggaatcaagtcaaatccttccaagcggca

SEQ ID NO: 86637 - DNA, 96 bp, Homo sapiens
ctaagggcccttcgcgggagagcgtcgtgcacgcgggccagaggcggtaccctcctctgaaatcaaaactctttaattaaagagacatgaaatgac

SEQ ID NO: 86638 - DNA, 100 bp, Homo sapiens
gaaaaatctgctgtgatcaatggtgagaagttgctcattcggatgtccaagagatacaaggaattgcagctcaagaaactgcttatcaataacagctgta

SEQ ID NO: 86639 - DNA, 100 bp, Homo sapiens
gttcctctccagctcagccgcgtagacctgtcatttactccatcctttatagtgatgctacaggacgaagaggaatggataaaaacattggcgagcaact

SEQ ID NO: 86640 - DNA, 97 bp, Homo sapiens
cccggccacccttcgtcatctgcgtgaagctggctactgcagcactggggtgtcagttgttggtccgacccagaacgcttcagttctgctctgcaag

SEQ ID NO: 86641 - DNA, 82 bp, Homo sapiens
agatacagggcagaggaaaatgcaagaagactgatggagcaggcttgcaatattaaaaacccagcttagactagaaagtcta

SEQ ID NO: 86642 - DNA, 100 bp, Homo sapiens
gcccagtcctcggtgcggcgcggccagaacctgcacttgttgccaagtcttccatcttactagatgtgaaaccttgggatgatgagacagatatggcgaa

SEQ ID NO: 86643 - DNA, 51 bp, Homo sapiens
ctgcacggacggtgttggttgggcattactctactgactggcagagacagg

SEQ ID NO: 86644 - DNA, 75 bp, Homo sapiens
ggaacctgggatggttgtgagggaagggacaagaagatactgccctggcctactgaacttgacgcactggtattt

SEQ ID NO: 86645 - DNA, 83 bp, Homo sapiens
tcgacttctcaatcccaagtggccaaaggaggaacatatgcagcagaaaaaagaggaggaagaagttcttaaagaagtaactg

SEQ ID NO: 86646 - DNA, 75 bp, Homo sapiens
cgagagcttcccagggtcgcaggacctctggtcctcaatcgagttcctctacgaagaacacaccagaaatttgtc

SEQ ID NO: 86647 - DNA, 100 bp, Homo sapiens
ggagattctccggggacccttccgtatctgcctaggcattttgctgtctcctcctaatacgaattttgatttggctgctgggctgctaccttgaaatcca

SEQ ID NO: 86648 - DNA, 100 bp, Homo sapiens
actattacaatcgcttgtacaaaggagagtttaaacagccaaaacagttcattcatattcagcggtaattgggatacttctggcagcgaactgagtgaag

SEQ ID NO: 86649 - DNA, 83 bp, Homo sapiens
gacgctgctgctgcccggcctcggggtgaaaggtgtagcagtcactcggcctacacccacagcatcgaccttgtgaacccagc

SEQ ID NO: 86650 - DNA, 97 bp, Homo sapiens
agcaaaaactccaaactcctctccaccagcgccaagagataagctgtcattggaaggaatagtggtacaaagagctgaatgccgaccagctgccagt

SEQ ID NO: 86651 - DNA, 75 bp, Homo sapiens
cagccgctgtacagattcatcaccacgctttaaggatttttatgaactggagccagagaagttccagaataagac

SEQ ID NO: 86652 - DNA, 100 bp, Homo sapiens
cggcaccttctgtgcgtcctggactcctctgagaaacaggccagaggcattgatgtgcagcaggtttctttagtcatcaactatgaccttcccaccaaca

SEQ ID NO: 86653 - DNA, 83 bp, Homo sapiens
cctttgggactctgaaggctgaagagccctaaataagtcacacagcaccctgaaagtgattccctggtctacttgaatttgac

SEQ ID NO: 86654 - DNA, 95 bp, Homo sapiens
gaagctcgggcgctccggctgtaaggagccgcggcggggggaaaatggagcccttcaccaatgcttgtcaaaattcccaaaaatgatcccctcaa

SEQ ID NO: 86655 - DNA, 100 bp, Homo sapiens
ctggttctggtgctggtattggaacagtctttggcagccttatcattggttatgccaggcggtcaagaagcagatcgagacggcggtcacattctaagtc

SEQ ID NO: 86656 - DNA, 109 bp, Homo sapiens
gattctgatcgcaaatacctgaaagattgggcaagagaagaattcagaagaaacaaaagtgccaccgaagaggtaaaacttccttttcctgtagatcaaatcacagatc

SEQ ID NO: 86657 - DNA, 100 bp, Homo sapiens
ttgccggggggcgagcaggacaggacgaagccggagtgtaggcggcagaggattcgctcccagagcagctgcggccagatggtgtcctactcttctgtcc

SEQ ID NO: 86658 - DNA, 51 bp, Homo sapiens
gaactttggatgctttattgtacaaagccctgcctctttcttgtcgcagtc

SEQ ID NO: 86659 - DNA, 100 bp, Homo sapiens
gacagtccctggatcaccgacagcacagacagaatccctgctaccagcttgttagcagtggcacaagatcttacagaggatgaagaaacagtagaagatt

SEQ ID NO: 86660 - DNA, 122 bp, Homo sapiens
aaaagataaagcctaaatgtagcatatatcctaaaggagatggaagtgatgtaccatcatgggtagcctttgataaacagatgtcttatgtctccagaaaattcagatccacaattccactt

SEQ ID NO: 86661 - DNA, 100 bp, Homo sapiens
atcggagcgtgtggatttgagccgccgcattttttaaccctagatctcgacaatctgctgggaatttcttgggttgacagctcttggatccctattttga

SEQ ID NO: 86662 - DNA, 100 bp, Homo sapiens
tggtgatcggctccttaccagctcacctctcaccgcgcatgtttggagtatgccgagattttgctgtcctggaggaccacaccctggctcacagcctgca

SEQ ID NO: 86663 - DNA, 82 bp, Homo sapiens
gagagcgtcatgaacccgagctatagagaaaggagatgagggtgcaaatagctatgggcaacttggcctcggccataaggaa

SEQ ID NO: 86664 - DNA, 98 bp, Homo sapiens
tgctctggaccggacagtgaggaggacgacaagcccattggggccacccacagtgtgggcccatcgctggatggatctgtcagaacacggctttgggc

SEQ ID NO: 86665 - DNA, 100 bp, Homo sapiens
gtgtactttgccctcagcatctcccttcatgtctgggtcatggcgaggcaaacctctctacatttgtaaggaaagatacaaagttcttgagcaacagtgg

SEQ ID NO: 86666 - DNA, 75 bp, Homo sapiens
ttctaaggcaacacttccttgaagaaacaagcttacaggtttttctttggactcagggaaaggtattgtttctaa

SEQ ID NO: 86667 - DNA, 83 bp, Homo sapiens
cacacctggatccaggataacggaggctggacctgcctagagctggaacgttacctccagagcgagccctgctatgtttcagc

SEQ ID NO: 86668 - DNA, 90 bp, Homo sapiens
ccaggagtgggggctacggaggctccagagactactatagcaggtacaggtttgcagattccgccagcagcacagcaagctctacagatg

SEQ ID NO: 86669 - DNA, 100 bp, Homo sapiens
agcagttcagaagagccaaggaataaacatgcaatgaacccaaaagggaatggtctgccgaaaaccgaccgacccggttgattggccaccacttgtcctg

SEQ ID NO: 86670 - DNA, 83 bp, Homo sapiens
gcggcccagggatcccggagggagagtggctacagtttcagaaaagtcacgtataatggaactggagaaagacctagcattga

SEQ ID NO: 86671 - DNA, 96 bp, Homo sapiens
gaggggcctttgtccgtgttcggtgaccgcagcactggggaaacgatccgctcccaaaacggtattctctactgccgctgatggtcaaacgcaagt

SEQ ID NO: 86672 - DNA, 100 bp, Homo sapiens
ggtcaacggtgcccctgcatgtgctcagctctaagtatgcagtcatctccaaatggccagtttgtagcgccaagtgatattcagttgaaatgcaactact

SEQ ID NO: 86673 - DNA, 75 bp, Homo sapiens
aggctgagaaaagcgagaccgcgtgcgaggaccgtaaccggtctccatgatgttgatgagtatatgcaggcccag

SEQ ID NO: 86674 - DNA, 115 bp, Homo sapiens
ggcagcggcggcggttgcgggggggaagtgactgggcggtgccggcgccggagacgatgccgttacaatgcagatcttcgtgaagactctgactggtaagaccatcaccctcgag

SEQ ID NO: 86675 - DNA, 74 bp, Homo sapiens
gggaaggaggcgtcttggcccgggcagcagtggcggcagcgcccgagagaggctgcagagactgcaagtctgga

SEQ ID NO: 86676 - DNA, 83 bp, Homo sapiens
cgaggaggcagccacggggcccctgggaatactcccccagttgcaagaggcgcaggaccgtggaagacttcaacaaattctgc

SEQ ID NO: 86677 - DNA, 100 bp, Homo sapiens
ctccgcagtgaccggactcgggggaggtgcagtagacattgttgcaatcatgatcggcaatctgaaaggcacaaaaattctgcaatctattcaaagaggc

SEQ ID NO: 86678 - DNA, 83 bp, Homo sapiens
cttcgatgttcttctaatactcctcctctaacatgtcagcgttattgtaatgcaagttgcctgcggacacgctgggcctctgt

SEQ ID NO: 86679 - DNA, 100 bp, Homo sapiens
gtctctttcatcttcgcacttgtacagcaccaagaatgtctaatttaatagggatatagacagttggtttaaaccaacatttttggacgaggagaggcta

SEQ ID NO: 86680 - DNA, 121 bp, Homo sapiens
ggactttcttccagcttctgctgtccttctttgtggagagcaaggaatggaagttggatacactttgtgacttgtacgagacactgaccattacacaggctgttatttttctcaatacgag

SEQ ID NO: 86681 - DNA, 74 bp, Homo sapiens
ccaagctctgccacgaaggtgccaccgatatgcacccaatgtccagggagcgtgcaaaatttgtcaaaagtggc

SEQ ID NO: 86682 - DNA, 73 bp, Homo sapiens
ctgtccccagggctgggcctcggacaccaaactccggtattgctataaggtgtgagagggtccagcagaagga

SEQ ID NO: 86683 - DNA, 100 bp, Homo sapiens
ctcgctcctcgatcgaggacgacttcaactatggcagcagcgtggcctccgccaccgtgcacatccgaatgggaggagacatcacagctttcccagatcg

SEQ ID NO: 86684 - DNA, 50 bp, Homo sapiens
aattgaaaggcttcaaagctagcaggacctataaaaggcatcaccaagcc

SEQ ID NO: 86685 - DNA, 76 bp, Homo sapiens
gacgcccctaccttggtctttcaggactctgatgccagtatggactggagatgatgggagccagttggatagcccc

SEQ ID NO: 86686 - DNA, 82 bp, Homo sapiens
ccggcgaaggaggaggcgttgccggcttgcggaaggagctaatgctgcttatttgcagttgttgaacctgtttgcctatggg

SEQ ID NO: 86687 - DNA, 100 bp, Homo sapiens
gggcagcggactaataaaggccatggcgccagcagaaatcctgaacgggaaggagatctccgcctgtaacatcttatgaagatcttggactctttgcatt

SEQ ID NO: 86688 - DNA, 73 bp, Homo sapiens
acaaaacctacacagcttacgtggacctggaaaaggactttgctgctgagatgggaaagggctccttcaagta

SEQ ID NO: 86689 - DNA, 100 bp, Homo sapiens
gagaccacgaacccaccagaaggaagaaactctgaacacatctgaacatcagaagggacagactccagacgcgccaccgatctaagcctttcccacgtta

SEQ ID NO: 86690 - DNA, 50 bp, Homo sapiens
ggaaaaaatcccaaggtctgcaaaggttcatctgcagaagccagcggacg

SEQ ID NO: 86691 - DNA, 51 bp, Homo sapiens
tccagcctgcggagcctgtggggcagattgtaaaccatggctgtgtggata

SEQ ID NO: 86692 - DNA, 101 bp, Homo sapiens
cttttcaacagccttctcaattttctttctcagaaagcagaggctcagagcttggagacagacggttcattgtccccatatcttgtgtgatctgtaatgac

SEQ ID NO: 86693 - DNA, 100 bp, Homo sapiens
cactggctcagagggtcaggaacagagtcaatttcaggttcctgctgcgtttgctggactgatgtacttgtttgtgaggcaaaagtactttgtcggttac

SEQ ID NO: 86694 - DNA, 100 bp, Homo sapiens
agaggcaaacgcagtgctggctcggctgaacagtgagctccagcagcagctcaagaaggacagaataacgggctcccagattcacaagccccaccaagag

SEQ ID NO: 86695 - DNA, 100 bp, Homo sapiens
ttgcaacaagtgttgttaaacacaaaccaccctttaaattttcaagggaaggacaggcctttttgcaaatgtgtaacttgcctatcaaagtagtttgtag

SEQ ID NO: 86696 - DNA, 50 bp, Homo sapiens
cagaacggatagctccctcctggaaaaggcgcacctatgttggcagcatg

SEQ ID NO: 86697 - DNA, 100 bp, Homo sapiens
ggggaagttcaggaaacatccaagaaaaatgtccttaaagcaattgagcaggctgatctactgcaggagaaccagaagagtgtgttaattgcacagatga

SEQ ID NO: 86698 - DNA, 100 bp, Homo sapiens
gtttgctcactgatctattattttcaatagaaacagatatacagatgtggagaagtgagaaagatcagtctaaagaaaaggagaagaaagtgaaaaaaac

SEQ ID NO: 86699 - DNA, 96 bp, Homo sapiens
ccggccacgcgccctgggacaaccacgtctccggccacgtctgcgctcctcagaccaccggcaggtgaacagcctgatgcagaccgaggagtgccc

SEQ ID NO: 86700 - DNA, 75 bp, Homo sapiens
tcccaaaattacctcagaattatcagggccccacaccagtttgtacaccaacatttttggagaggcgaaaatctc

SEQ ID NO: 86701 - DNA, 101 bp, Homo sapiens
cgtctctctcatcgaggcccaaaccgccaagacttaattcagtgcacaaatgagatgaatgtgaacatcccacagttggcagacagtttatttgaaagaac

SEQ ID NO: 86702 - DNA, 98 bp, Homo sapiens
agaaggagaaggggaagcccaagccccgctccccgcagccgccaaggtgggatgtgtgtgggctgaaattccgagctgcggttgtgcatgagaataca

SEQ ID NO: 86703 - DNA, 90 bp, Homo sapiens
attatgcacctgacagcatctattacctttgccttggaatacaggaggaatgtcgttgtctgctgggtcttcccctcttcattcccccaa

SEQ ID NO: 86704 - DNA, 83 bp, Homo sapiens
ggagtctctatactcactcgtatgaggtaccaggacagagcgggatgccaccagcttgtccaaagggaagttccaggagctcc

SEQ ID NO: 86705 - DNA, 100 bp, Homo sapiens
gtacacctgacgagtttcctacggacattccagggaccaaagggaacttcaaattagtcagagcagcccgacggccatggaggctgaagagacgatggaa

SEQ ID NO: 86706 - DNA, 71 bp, Homo sapiens
aaactgcagttcatgtgctaaacttttggtgcttaaatccagctgtggttatgtctagagaagatatttcc

SEQ ID NO: 86707 - DNA, 90 bp, Homo sapiens
ggcttcagcagaagaaacacttcctataaatctcgcccaaacaggaaaggcagaagtcaattcatctggaaagactatctctgagtcaga

SEQ ID NO: 86708 - DNA, 50 bp, Homo sapiens
aagaaatcttggagaagggtctaaaggacaatctctatgggaagcagaag

SEQ ID NO: 86709 - DNA, 100 bp, Homo sapiens
ccgtgcccgctgacattatctcatccacagacaaacttggctacccacctttctgttctgagacccctcaagagacatataagaaggtgatgaactggaa

SEQ ID NO: 86710 - DNA, 100 bp, Homo sapiens
cggggagagacggccaagcagcaccagcgtgcctttgggtgataaggggaacaaaccctatctgttttatttcaacattgtgaaatgtgccagccccctg

SEQ ID NO: 86711 - DNA, 130 bp, Homo sapiens
ttccaccttcagagcgtcacggcgtacgccctcatggggaaaatctccccggtgactttcaggtactggtgtggcatactcggacagagaagcccaagatgaagcaggaggagcagctgcagcggcaggg

SEQ ID NO: 86712 - DNA, 100 bp, Homo sapiens
ctgcaaggaactgatagcttatggttctccattgtgatgaaagcacatggtacagcagataatcaccagaatgggagtgaatgacttgtggcaaattttg

SEQ ID NO: 86713 - DNA, 50 bp, Homo sapiens
caaaaatagtgatagctttgataagagatatgtcagtattgaattctccc

SEQ ID NO: 86714 - DNA, 100 bp, Homo sapiens
agtatttcaaccataaagacatcttaattgggcacgaaagaggaaataatgaagatgtttcattttcaagaccagcagatcttgaccttattcagtcaac

SEQ ID NO: 86715 - DNA, 82 bp, Homo sapiens
ctcaggcgtgcgcggacggtgtgcggactgccaatctggctgaagccaatgcttctgaagaagataaaattaaagcaatgat

SEQ ID NO: 86716 - DNA, 100 bp, Homo sapiens
cctccctgctgcgccaggacctcggtttcttccaggagactaagacagctggagctccgttactctcatggggactttgagaatggtatctgggtgttat

SEQ ID NO: 86717 - DNA, 82 bp, Homo sapiens
tgcgcgggctcgagagctcgccccgaacgggggtcttcctcctccgccgttgacaggtaaaacctgtttcccagcctggtgg

SEQ ID NO: 86718 - DNA, 83 bp, Homo sapiens
ctgcaatccaagccgactgatgactggagaggatggctactatttcaccaatctggtggatgaaaatactaggaaaagtttat

SEQ ID NO: 86719 - DNA, 100 bp, Homo sapiens
gttttctctgccatgttgctattgcaggacggagtaataatatctcactatagacatgttttgggtgttccactggatgaccgaaaagctatcaacaact

SEQ ID NO: 86720 - DNA, 100 bp, Homo sapiens
gtgaaggtccagtcattccaaatgaagagatgcctgtaagcactatcctttgtactccctcaacgtggcctccatgtggttgaagctagggagactctac

SEQ ID NO: 86721 - DNA, 136 bp, Homo sapiens
ttaccgaaaaagctgcttgaatgtctgccgaaatgttcaagtttaccaaaagagaggcaccgctggaacactaatgagattcgacggaggcgccttgcacgacttgctggtggacagacctctcagccaaccaccc

SEQ ID NO: 86722 - DNA, 50 bp, Homo sapiens
gctggatattgatgcgccagtcactggtgcagcagtgaacagcagtgaga

SEQ ID NO: 86723 - DNA, 74 bp, Homo sapiens
ccggcagctgtggccaacagcaacagagagagtccagatctcatcctggccttgggtgtcctggcccaaagccg

SEQ ID NO: 86724 - DNA, 83 bp, Homo sapiens
agaacatttgatgagagttttagagaagaagactgaagtttccaacatggctagatccatcagaaactgaagccgtggagaac

SEQ ID NO: 86725 - DNA, 50 bp, Homo sapiens
cacattttatgttgtgtcatttcgaaggacgttccatcctcagagcagcc

SEQ ID NO: 86726 - DNA, 50 bp, Homo sapiens
gaaaggacactcccctaacatatttggctccagcaggaggaaatggtgca

SEQ ID NO: 86727 - DNA, 98 bp, Homo sapiens
ggagacatggccaacatcgcggtgcagcgaatcaagcgggagttcaaggaggtgctgaagagcgaggagctgcatcttcctcccgtgaggctggccga

SEQ ID NO: 86728 - DNA, 90 bp, Homo sapiens
accaacagtgtcattggccccggctgccacattggcccttttagacaatgaagatgatgaaatgcaacacaatgaagggcaagaacggag

SEQ ID NO: 86729 - DNA, 90 bp, Homo sapiens
agctgtccaattgcatttgtgtcttttggacttctctgagcgctgtccctacctggctcgcaagctgacccttgccatccccatcatcgc

SEQ ID NO: 86730 - DNA, 101 bp, Homo sapiens
gtgtgccagacgttcctgtaaaagaggacaccaacagtgtggtggagaaagcaatggatgaaatcaaatcccaaggaggaatgttattgaagccgtttaca

SEQ ID NO: 86731 - DNA, 82 bp, Homo sapiens
caagcagtgttcatggagttcattgaattatggcatagatcttgggaaaattgcggagctagaaaagctaggccttggcgac

SEQ ID NO: 86732 - DNA, 83 bp, Homo sapiens
ttctcatacgtgacttgactggttcgaggacagcacccgccaacctcctggaaggtaaaccgaagaagacatcttttgatcag

SEQ ID NO: 86733 - DNA, 90 bp, Homo sapiens
atactgtgaattatgcaagcacagatttgcttttacaccaactggaggaaagcaggaatgttcagaggcaaatgaagattctgcagaata

SEQ ID NO: 86734 - DNA, 96 bp, Homo sapiens
gccaggaacaagagttgctttggatatgactacactaactatcatgagaacccagtgacttgattgtaaaaatttacagagcggaatcatatgctg

SEQ ID NO: 86735 - DNA, 95 bp, Homo sapiens
tgattgtcttatatttcaagttaaggtccaaaaaaactccagctgtgaaagcaacataaatggtacaacagaatagctcgggaatggactcagaa

SEQ ID NO: 86736 - DNA, 100 bp, Homo sapiens
tgagaagtgcttagattctggatacattttgaagacaggggcaagtgtccgagtggtgaatcagctacttacagagatggatggtctggaagcacgccag

SEQ ID NO: 86737 - DNA, 83 bp, Homo sapiens
gttcctgatgatgaacagtttgtcccagattttcagtctgataaccgcaaatcctgatcctaactgttgtcttggagtatttg

SEQ ID NO: 86738 - DNA, 80 bp, Homo sapiens
gacccagagcaggacagcggcccggaggacctgcctctcgtcagtgcagagcagagcgggcggaggaccccgggcgcggg

SEQ ID NO: 86739 - DNA, 82 bp, Homo sapiens
gtggagatcgtcccgcgcctgccgaccagagtctcactgtcgcccaggctgcagtgcagtggtgccatcacgcgtcactgca

SEQ ID NO: 86740 - DNA, 96 bp, Homo sapiens
tagacaaggaagaaagcattatttcatcaagtccaatagaaatggtattcaaacaattgggagctgatccatttataaatgcagttttaataaacc

SEQ ID NO: 86741 - DNA, 51 bp, Homo sapiens
cggacgtgtccgcgaagatggcgggccggatgctccacgccctactagtca

SEQ ID NO: 86742 - DNA, 82 bp, Homo sapiens
tggccgagctgctgcgcagctcctgcccgcatcacaggacatggccccctcagccacctagctggggcccatctaggagtgg

SEQ ID NO: 86743 - DNA, 83 bp, Homo sapiens
ctcgatctgggggagccagggatgaacgatatcgatcagatgctgcacttaaaaggatgcttgttttgatgtcctgctcattg

SEQ ID NO: 86744 - DNA, 98 bp, Homo sapiens
aaatttttggagggtatctcagatcacgcggtcgagtctatgctgtcttgtcaaagagagaaggtcgggtacttcaagaagaaatgaaagaagggaca

SEQ ID NO: 86745 - DNA, 97 bp, Homo sapiens
agcgccgctgctgaagagtttccaaggagagagacatcatttcagctttccatccatttttatttatggacatactgctagtggaaagacctatgta

SEQ ID NO: 86746 - DNA, 100 bp, Homo sapiens
cctgcccccaagaaggaagtcatcatgggccggcctggaacagatgccatggacaatattaccaggcagaaccaattctacgatacccaagtcatcaaac

SEQ ID NO: 86747 - DNA, 100 bp, Homo sapiens
gctgacctcagtgagtataacatgctgtggcatgctggaaaggatactgcaatctcttatctgcatctagtagaaagaactgcgtgttactcagtgattg

SEQ ID NO: 86748 - DNA, 100 bp, Homo sapiens
ggctgatttgaactttaaaatctcaaagaatgaaacttctactaactggaactcgaatcatttatgacagaaagtttctgttggatcgtcgcaattctcc

SEQ ID NO: 86749 - DNA, 50 bp, Homo sapiens
agaagggccttactccttcacagatcggctcaagcacggacatcagtgag

SEQ ID NO: 86750 - DNA, 82 bp, Homo sapiens
cggagctgggcgcggattcgccgaggcaccgaggcactcagaggagccggtggctgctggcagcggaatcccccagatcaag

SEQ ID NO: 86751 - DNA, 50 bp, Homo sapiens
gctctcccgctggttcggcaaggctgcagctcggatccgagagggcatgg

SEQ ID NO: 86752 - DNA, 100 bp, Homo sapiens
catgaggacgtggaggtgggaaggtgtgtccggaggtttgcaggggtgcagtgtgtctggtcttatgaggctctccctgcatgtcctatccaggccacct

SEQ ID NO: 86753 - DNA, 82 bp, Homo sapiens
cagagagggaagagattcagccagcacactcctcgcgagcaaggtgtccctggccagtgtccttccacctgtccacaagcat

SEQ ID NO: 86754 - DNA, 101 bp, Homo sapiens
gagaagaccagtctttcctctagaacattgacatcaccaatttcagcagcagctggagcgatggcctggccttctgtgctctgctccacacctacctgcct

SEQ ID NO: 86755 - DNA, 98 bp, Homo sapiens
ccccattgcaggaagagatggcgtctctactgcagcagttggctagagatttactacatccgtccttggaagaggaaaagaaaaaacataaaaagaaa

SEQ ID NO: 86756 - DNA, 83 bp, Homo sapiens
gcccatcctgttcatcgaccagctcagcaaccgcgtgaaggacctgatgaattcagaaggagctggcggacatcactttagac

SEQ ID NO: 86757 - DNA, 75 bp, Homo sapiens
tttaacattccaacacataaaaattatttatccaacagctcctcccaggtgcaatggatgagcttcatagtctgg

SEQ ID NO: 86758 - DNA, 82 bp, Homo sapiens
caaaatcaggactgaaatacattaatgtgggtgatttagctcgagaagaattttccagttcatatgaagaggtgatctctca

SEQ ID NO: 86759 - DNA, 82 bp, Homo sapiens
ccgtgtgaggacagacgtatttgcaatccccttatgccataatttcttactactttgaccgcgatgatgtggctttgaagaa

SEQ ID NO: 86760 - DNA, 75 bp, Homo sapiens
ctcccctctcaggacaacccagatgtgcaacaaagtgcgatggcccgatgagagaaagggaaagttaaggatgct

SEQ ID NO: 86761 - DNA, 83 bp, Homo sapiens
atccctgctctgtcactaacaagctgcgtgatcttcgtaatggaggggaaagttccagtcgcagcgctgagaagcgatcagct

SEQ ID NO: 86762 - DNA, 75 bp, Homo sapiens
tgactgaagtggcctggactaaagatgagttaaaagaagctctggatgtgggctgagggccatgtcagttttctg

SEQ ID NO: 86763 - DNA, 101 bp, Homo sapiens
atctccctaggactcttcgccctctgcctggccgcagcccgctgtctgcagagtgtgtgcagtggcctcagggatccggaaagtctaggactgaacttctc

SEQ ID NO: 86764 - DNA, 74 bp, Homo sapiens
aactctaagttacctgtggatatccttggaagaattcgggaactggagcctctcctctgtcacagtgacaatcc

SEQ ID NO: 86765 - DNA, 100 bp, Homo sapiens
gagaaggagctactggaagtcatcgggaaaggtgtaatcgaatcctggaccggaaaggggaagcagtgccattcaagaataaagacagagatgatatggt

SEQ ID NO: 86766 - DNA, 90 bp, Homo sapiens
gggctcagcagcagccaataggacatgatccaggaagagcagtaagggactgagctgctgatgcctataagaaaatcttagaaaccacaa

SEQ ID NO: 86767 - DNA, 75 bp, Homo sapiens
ccggactgcttaccctccatttgtttctatacatttctcaatgcttaccagaatgtactcaagactgatcttcta

SEQ ID NO: 86768 - DNA, 82 bp, Homo sapiens
cgggtctggagtgcgtgggggaccggctgttggcggaggctgtggccaggccagctgggctcggggagcgccagcctgagag

SEQ ID NO: 86769 - DNA, 98 bp, Homo sapiens
ctcaaagactgggaacacaaccgtatttcttcaataagcactttccaaggaatcccttcaatctgtggatgtcctccgagaggaagtgagtgagatct

SEQ ID NO: 86770 - DNA, 100 bp, Homo sapiens
ccacaagcaagtcctaaaagagggcattgcccagagcaacagcgagctcgccatcctgtccaatgagcatggctcctacaggtacacggagttcctgacg

SEQ ID NO: 86771 - DNA, 98 bp, Homo sapiens
gccgccaagagtgagcgagcggacccgcgatgggtctcagagccactcgaccagctttcatgtgtcaccgaaggcaggccatcaaactccaggtggat

SEQ ID NO: 86772 - DNA, 90 bp, Homo sapiens
ggaaccaaacctgcgcgcgtggccgggccgtgggacaacgaggccgcggagacccaaaccaaacaggaagcttacttttctctacctagc

SEQ ID NO: 86773 - DNA, 75 bp, Homo sapiens
gatgacaaccatagcccagtgccaatgcatcttctgtactctgaatgcctaccgcaggaatgggatggcttttct

SEQ ID NO: 86774 - DNA, 100 bp, Homo sapiens
cttcctcggtggcgggcatggaggcttcgcgctgccggctcagtcccagcggcgacaggatgagctgtgtggcccagacccttccctgtcggacgagctg

SEQ ID NO: 86775 - DNA, 100 bp, Homo sapiens
actcctgaggagattcgcaagaccttcaatatcaaaaatgactttactgaagaggaggaagcccaggttgtggcagcactgcctgaaggtatgagaccag

SEQ ID NO: 86776 - DNA, 100 bp, Homo sapiens
tccctcatcaactccctccggaggcagcacctcaggaaagatagcctgggctggaagctcttctacgtcacaggctgcctgtttgtggctgtgcagaact

SEQ ID NO: 86777 - DNA, 75 bp, Homo sapiens
acgagaagtatatgtccctcacactgtgtacagggttttcagagaaagatgctgatgaggtgaaaggaatttttg

SEQ ID NO: 86778 - DNA, 75 bp, Homo sapiens
ggcggcagcaccaccggggttgactccgggggcgcggcgaggagcaattctgtggtgttcttggtcacacattta

SEQ ID NO: 86779 - DNA, 76 bp, Homo sapiens
gagcattgaagatcagtacaaaaattcttcaagaaatctaagagctatttatgaagaaattgatgctcaccagcac

SEQ ID NO: 86780 - DNA, 83 bp, Homo sapiens
gagtatcccgctgttcacctacgggcctgatcaaacttgccttcctgttctccaagaccagatctgactgcagccatgagcag

SEQ ID NO: 86781 - DNA, 100 bp, Homo sapiens
cacaaatccactacaatggcaaatcacatcaaaagagattaaaacaactcagcaatgggacgctgaaaaatgacaatggcagtactacgagatgctttac

SEQ ID NO: 86782 - DNA, 74 bp, Homo sapiens
ggaccggaggagacatcggcctctgcaggcttgccgaagaagggagaaaattgtacaagctggagataaggacc

SEQ ID NO: 86783 - DNA, 89 bp, Homo sapiens
aacaaatctaggtgaaaggggaaggttacagaccagccaacttcaaagaatgtttcaacgaaccaaacttttaaatggaccgggagatg

SEQ ID NO: 86784 - DNA, 83 bp, Homo sapiens
tttccgaccgttggtgtctggcacgcgccaccccgatgtaccagtgttcctctgaacaacagggagaatatctctgatcccac

SEQ ID NO: 86785 - DNA, 75 bp, Homo sapiens
gattcgcagtggtcgcttcttctccttgactttatattcagagcaccaatcaaattaagcaagcctggggaactt

SEQ ID NO: 86786 - DNA, 82 bp, Homo sapiens
cccggggtgtcccgggctcgcgcaggacgcagaagggcagtggagccaggctcttgtcaggatggtgaagctgttcatcgga

SEQ ID NO: 86787 - DNA, 146 bp, Homo sapiens
ggtatatcaagccaaactttgtgattcaggagaactggtcgccatcaagaaagtattgcaggacaagagatttaagtgtgaagatcggagttgactattttaaagttggacgccatgtggatgctatgaatgaatacaataaagct

SEQ ID NO: 86788 - DNA, 50 bp, Homo sapiens
tcatggcctacccgggatacggaggagggtgattcgcctttgccagtctc

SEQ ID NO: 86789 - DNA, 83 bp, Homo sapiens
ccctatttctacctgagcccgctgcagctctccgtgagcaacctgcaggaactgtggctgcaccatctgtcttcatcttcccg

SEQ ID NO: 86790 - DNA, 82 bp, Homo sapiens
ggctgaggtggcagcggcaggagagtccggccgcgacaggacgattcctggtcgggtggcttccagtggtcttcagtctgtc

SEQ ID NO: 86791 - DNA, 100 bp, Homo sapiens
ccgggacagagtcaccatttgatttggaacagcagtggcaagatctcatgtccatcatggaaatgcagtgcatctgggggaggtgttgtagccattgaca

SEQ ID NO: 86792 - DNA, 80 bp, Homo sapiens
aaggattccaagtaactcttatttgtgttatagttttgccgctggactcttccctcccttcccccaccccatcaggatga

SEQ ID NO: 86793 - DNA, 75 bp, Homo sapiens
ggtatttctttctcttctgcttgcgcattaaagttttaacaggctgaagggtatgtgattggcagctgtattaaa

SEQ ID NO: 86794 - DNA, 82 bp, Homo sapiens
ccaagtcgttcttcgacaacatctcttctgaactcaagaccaggttgtgaccgagattcccgacgagagagactgaggggaa

SEQ ID NO: 86795 - DNA, 75 bp, Homo sapiens
cttaatgagcatgttgacagcatcgatgctagacagacaaaagtgactgagaccgaagatgatagtgatagtgac

SEQ ID NO: 86796 - DNA, 92 bp, Homo sapiens
cgggttgacctcagtctcctggagcttccagccagagggggccgacactactgtgtcggttttgacaacaattcgttcagggcaccgagcaa

SEQ ID NO: 86797 - DNA, 100 bp, Homo sapiens
atcctcaaggccgttgcaggagatgcccgcgagccaccttcgccagcaccacaccggggccccttcacagatgtagtcactacaaatcttaaattgcgaa

SEQ ID NO: 86798 - DNA, 83 bp, Homo sapiens
ccgccgcccgtccacacccgccgccaggttggaagtactccatgacacacactcggagaaagtcccttcccatgctgagttcg

SEQ ID NO: 86799 - DNA, 74 bp, Homo sapiens
acggtgactgtctctccagatggatccctctgtgcttctggaggcaagcatcaactggtatcccagcctgggct

SEQ ID NO: 86800 - DNA, 50 bp, Homo sapiens
tttttgtggaacagaattggagcaggtatcttggagatggccgcttccat

SEQ ID NO: 86801 - DNA, 75 bp, Homo sapiens
ggcgttgccatggagacgcgggcggcagagccagtcttggtgctctgtgttcacctggttcatctgaggagctgc

SEQ ID NO: 86802 - DNA, 74 bp, Homo sapiens
ccttgaaaagcggcacgacaacattaaaccatcagatgagggctcattgtcatccccaagccaggccagttctc

SEQ ID NO: 86803 - DNA, 50 bp, Homo sapiens
catcgagccactgaaaattcaggatcccggctactcaacagaaatgaagg

SEQ ID NO: 86804 - DNA, 100 bp, Homo sapiens
aatcgcttaaaaaattacggagtgttgcatgtgacgtttcccttgctgtttccaacctgtcagttagaggagcttcaacttatctaaaaacagactggtt

SEQ ID NO: 86805 - DNA, 51 bp, Homo sapiens
aggcctcattggacagcattcgagaacccttaggagaaatcttgagagtgg

SEQ ID NO: 86806 - DNA, 100 bp, Homo sapiens
atggaaaaggagttcgagcagatcgacaagtccgggagctgggcggccatttaccaggaatcccagtcagaagttccagcctgccactgttctctgatgc

SEQ ID NO: 86807 - DNA, 97 bp, Homo sapiens
acgcagacgccggccatgtgtgccacctgtgccatccaaactgcacctacggtgttctagaacagatcagacattttgtaatgatgcctgaaataaa

SEQ ID NO: 86808 - DNA, 98 bp, Homo sapiens
ctgtagtcccagctacttgggaggcagaggaggctgaacgtgaggagcggaaacgactcgagtcccagcgcgaagctgagtggaagaaggaggaggag

SEQ ID NO: 86809 - DNA, 87 bp, Homo sapiens
tcttgccaatcggaggatttcccaagcagttgttgcacaggtaacaggagctgtgactaatgagaattaaaggccatggatgaagat

SEQ ID NO: 86810 - DNA, 101 bp, Homo sapiens
agagtgagaacttttcttagaaaagtctgaggttgtaaagaagaaccaaggtgaaatgacaatggatgctctgttggctcgattgaaacttctgaatccag

SEQ ID NO: 86811 - DNA, 100 bp, Homo sapiens
ctgacttccagttccagcgtacgaggtatatttgcttacttaaactaccatgttcctcgaacgagacgagaaatcctggagaccctaatcaaaggccttc

SEQ ID NO: 86812 - DNA, 50 bp, Homo sapiens
ggcctgcatcgggcccacgctcaggctgatcccaaagaactaatcaagat

SEQ ID NO: 86813 - DNA, 75 bp, Homo sapiens
cagaacgcggctcccagccacaccaagttcaggcgcggatcaagaagatcatgcagacggacgaagagattggga

SEQ ID NO: 86814 - DNA, 97 bp, Homo sapiens
ataaaggcttacttactccaatcataaaagatgctgctgctaaaggtatccaggaaattgctgactctgtaaagtctcaggtatgtctttatcagca

SEQ ID NO: 86815 - DNA, 50 bp, Homo sapiens
tctacaggacccgatatggcatccctgggcttgcttctgacatgtctgat

SEQ ID NO: 86816 - DNA, 73 bp, Homo sapiens
acaattgctgcacgaaacactgaaattttggcaggtgatcatggagctcagcttggtctccatggggctggtg

SEQ ID NO: 86817 - DNA, 98 bp, Homo sapiens
caggcgcggcgcggctgcggctgaggttttttattggcacctcagtctcaacattttcttttcggattcatgaggaaagagaaatcctggggttggac

SEQ ID NO: 86818 - DNA, 80 bp, Homo sapiens
ggaaagtcccaggatgactactgtgtcaacttaaagcttttcaagccaggccaagaagctgtgaagtaccagggtcctcg

SEQ ID NO: 86819 - DNA, 76 bp, Homo sapiens
tgaccccaaatttgaaaggcttcgaggcagcgatactgccgtgtgagagtacctgaggggctcctgaaagacctac

SEQ ID NO: 86820 - DNA, 75 bp, Homo sapiens
caatgcccggcagctggagaggtctccaacaagcttccaaaatggcctggtgcatagcgggctgctgcttcatcc

SEQ ID NO: 86821 - DNA, 75 bp, Homo sapiens
gagccgagcgaggcagctctgagccgcgcggctcttgtcaggatggtgaagctgttcatcggaaacctgccccgg

SEQ ID NO: 86822 - DNA, 82 bp, Homo sapiens
aaggcccagccaatgaagatgaagacataggaggagtggttaatgtgttgctaacaactccactctgggtggtaaacaccag

SEQ ID NO: 86823 - DNA, 83 bp, Homo sapiens
aaaaagcaagctgaagacatcaagaagatcttcgagttcaaagagaccctcggaacgaaatctggcattttttaaagtttgcg

SEQ ID NO: 86824 - DNA, 96 bp, Homo sapiens
ggaggagaagctgaggaacttaactttccggaagcaggtctcgtacaggttgattcctcgtgccagaccattattcctaaaattaagctggagcct

SEQ ID NO: 86825 - DNA, 74 bp, Homo sapiens
gctctgtctgggccagaggattcaggcacaggaagcaaaatgatgcttcaacacccaggccaggtctctgcctc

SEQ ID NO: 86826 - DNA, 80 bp, Homo sapiens
aggggcactgcagctgacaagaggtccagggcatgtccttcatagcagcagtgttgatcttgaacttagatactgcagat

SEQ ID NO: 86827 - DNA, 100 bp, Homo sapiens
tgacgcagagccgagtgcagaagatctgggtgcccgtggaccacaggccctcgttgcccagatgtgtcgtgaaaactacccctaaaagccaaaatgggaa

SEQ ID NO: 86828 - DNA, 90 bp, Homo sapiens
gaaagttgactgaaaatggggcggaagaaaatacaaatcacacgcataatggatgaaaggaaccgacagtttcaggcgacctccaagaag

SEQ ID NO: 86829 - DNA, 82 bp, Homo sapiens
ccagctgggcgagtatctggaggaggtgtctgtgacctttgaggatgtggctgtgacattcacccaggaggagtggggacag

SEQ ID NO: 86830 - DNA, 71 bp, Homo sapiens
ctggcggctgctgcagctaagttgtcccagcagattattgccaagcgcctccccccagaccagctcatcag

SEQ ID NO: 86831 - DNA, 98 bp, Homo sapiens
aacaaaggaaggggagcccgggacccccgggggcgcaggatgggaaggccattgtgactatgtggtgattacagttgtcttactactgagtttcctac

SEQ ID NO: 86832 - DNA, 100 bp, Homo sapiens
cgacccggatttccagccagagctgagcggcgcgggctccagactcgccgtggtcaagttcaccatgagaggatagttttgaggcagctgtgccatcaaa

SEQ ID NO: 86833 - DNA, 82 bp, Homo sapiens
aatcttcaatgagtaaacatattcctggcggcaccttcctacttctgcccagccacagccctcccctcacagttgagcacct

SEQ ID NO: 86834 - DNA, 100 bp, Homo sapiens
gattctcgacctgctaacagaactggaccttttcggttttctcttatactgccaacaaagaaattagaacagatgacctttgcttggatgtttccaaact

SEQ ID NO: 86835 - DNA, 101 bp, Homo sapiens
cggcattctcttcaatcatgagagtcccagaagaggtacatctccgttcatggatgcattaacagccaatgggacaaccaacatacagacatctgttacag

SEQ ID NO: 86836 - DNA, 100 bp, Homo sapiens
taccgtcatcgtaaagattatgacaaatcacaacttgtagaggcatcaagcatgatggaaccatgtgtgatacctgccgccagcaaccaatcattggcat

SEQ ID NO: 86837 - DNA, 101 bp, Homo sapiens
atctccatgagctgaaaatgaagggccctgagccagtggtcagtcaaattattgacaaactgaagcacattaaccaggcctctactacgtggacagtgaag

SEQ ID NO: 86838 - DNA, 100 bp, Homo sapiens
aatcgagcaggagctgacggccgccaagaagcacggcaccaaaaacaagcgcgtggttgaaggcctttcactgttggacttgggagtatctccgtattct

SEQ ID NO: 86839 - DNA, 100 bp, Homo sapiens
ttcatctacaacccgcgcttctggccgcgggaaggagagcatctacacgggcgacagcttcgtcaccccttgatggggcagcctcttcccctcatcacag

SEQ ID NO: 86840 - DNA, 98 bp, Homo sapiens
ttcccgccaccctgccctgcccacccgccaggacagggtgtgggccaatgtggggaagagcctgaactgcattattgctatggtggacaaactgattg

SEQ ID NO: 86841 - DNA, 82 bp, Homo sapiens
ccatatgtgaccatggatataaaatcacaggtgatgttgcacctgtaaccatctttttatgggtggagcagagagtcaatcc

SEQ ID NO: 86842 - DNA, 50 bp, Homo sapiens
cacacacctcattatgaccttcaagctcaggtccctgttcaagagcacca

SEQ ID NO: 86843 - DNA, 100 bp, Homo sapiens
ctccgctgaggtggacgtgtacaacccgacgaggaacgaatgggacaagatcccgtccatgaatcagcactttgttgaacgtggtggtgagagcacacgt

SEQ ID NO: 86844 - DNA, 98 bp, Homo sapiens
aggcagcgtacccttccacaagcacaaactgaccaagcacagagtcaccagtttccatatgtaatgcaaggaagttggacggactagcgaagatccgg

SEQ ID NO: 86845 - DNA, 100 bp, Homo sapiens
cacgagtctcgggcaagtagtcctctaaggggatttttgacatcttgtgaagcagaactacaggagctcatgaaacagattgacataatggtggctcata

SEQ ID NO: 86846 - DNA, 98 bp, Homo sapiens
ccgacatcgacgccgcctggcaggccctgcgcaccagatatgagatcctgactccaaactccattcccaagggtttcatggacgggaagcaggcgtgc

SEQ ID NO: 86847 - DNA, 75 bp, Homo sapiens
ggaagcgctaccagcgctcccatgatgataccacaccggtgcagtgctttgaccccaaggaggaccggtggagcc

SEQ ID NO: 86848 - DNA, 96 bp, Homo sapiens
catctactaggcaagcatggagttggcaccccaaaagaaagataacgaaggaggcccaacttcattcaataaggagcctgacggatttatcccaga

SEQ ID NO: 86849 - DNA, 74 bp, Homo sapiens
tagctgtgctcgcgctactctctctttctggcctggaggctatccagcgactgcgagaactacatcactctcct

SEQ ID NO: 86850 - DNA, 75 bp, Homo sapiens
caaggtcgccctcaaggccatgatcaaaaccccgttttacggagaagacttttactgtgaaattcctcggagctt

SEQ ID NO: 86851 - DNA, 80 bp, Homo sapiens
ggaagctgccggcagccctgcggctacggagacaggactacctgtcacaatatgggtacctacagaagcctctagaagga

SEQ ID NO: 86852 - DNA, 83 bp, Homo sapiens
cctcgggatcacacttatgattggtatctgctgtgcgtttcagtcaacaatacagcttgtgttcgacaatattccttgatgac

SEQ ID NO: 86853 - DNA, 75 bp, Homo sapiens
ggagcagcaaattgcctggggtgcaggaaggaaatgatgagtcctgccggcggtgaccatcttccaacataggga

SEQ ID NO: 86854 - DNA, 80 bp, Homo sapiens
gtagcatttgctgaatttcagatgaccaatcatagaagaagatgctgctcttgtagaaataggacctcgttttgtcttaa

SEQ ID NO: 86855 - DNA, 100 bp, Homo sapiens
attgacagatatgactcttttacattatacctgcaaatctggagctcatggtattggatctagtttgaagcactaagaagaataagacatcagtttgaaa

SEQ ID NO: 86856 - DNA, 90 bp, Homo sapiens
gaagctcaagcaggagcttttcgccttcaacaagacttggggacagagagcgtcagtggcaccctcagttcactccagcaatgtaatccc

SEQ ID NO: 86857 - DNA, 90 bp, Homo sapiens
cgggtcttccagaaggctgtagaccagagtatcgagaagagctctctttacgagaaaaggaagatcctggctggtcagcatgaggatgcc

SEQ ID NO: 86858 - DNA, 90 bp, Homo sapiens
tatctcctttaccttgtggaaatgatttcctcaggactccagattatctacaacactgatgaggatcagagccacacacaagtgtcccag

SEQ ID NO: 86859 - DNA, 101 bp, Homo sapiens
atcctgtgtcacccggcaactcagaaacatcaggtccaagctgactttggtgtgtctgccaagaatctgaagactctacagaaacgagattccttcatcgg

SEQ ID NO: 86860 - DNA, 100 bp, Homo sapiens
cttcctatgcatggaaactcattatgagaaggcagggcaagaatcctttcgttccatcacaaggtcgtattacagaggtgcagcaggagctttactagtt

SEQ ID NO: 86861 - DNA, 82 bp, Homo sapiens
tcagctccgagtccagggcgaggttgtggcagcactgcctgaaggtatgagaccagattctaatctttatggttttccatgg

SEQ ID NO: 86862 - DNA, 85 bp, Homo sapiens
cttggctcgacactgccagctggaaccagaccatattgactttgaagatgtgattgcagaaccagaagggacacacagttttgac

SEQ ID NO: 86863 - DNA, 75 bp, Homo sapiens
attaggggtgttacgtataggctcactcaagggcaaatgacacagctttgtgaactgatcaacaagagtggggaa

SEQ ID NO: 86864 - DNA, 87 bp, Homo sapiens
gtaaagccccagatcctgactgggcatccatcaatctctgtgttgtcatctgtaagaagtgtgcagaaatcaatgtggactgaacat

SEQ ID NO: 86865 - DNA, 58 bp, Homo sapiens
ctcctctgaggactacattaaggatgatccgttggtgctgaatgagatcagagaagac

SEQ ID NO: 86866 - DNA, 103 bp, Homo sapiens
agccgtccccagaacgcagatcagaggtagtcggacctttcccgctggcgcgcagcctcagctagtgtaaacaggaacatcgataagtagtgtaaaaacttgc

SEQ ID NO: 86867 - DNA, 119 bp, Homo sapiens
ctggattctgtgcttcaccaatagaggaatcccatggagcattaattagttcttgcaattccagaaccatgactgatggaggaaataatgctggccatacagttgttgtggattctgtg

SEQ ID NO: 86868 - DNA, 100 bp, Homo sapiens
gacaggtttagaaaatggaatcctcctctgcgacagccattgtttgatgtcctgtgactgagaaaccaggctttaaactttatgcctttggagatggagc

SEQ ID NO: 86869 - DNA, 82 bp, Homo sapiens
tggggccacgtggagctgctggaggatgcctgctctgtgcctgtatctgagatcatcgccgttgaggaaacagacgttcacg

SEQ ID NO: 86870 - DNA, 122 bp, Homo sapiens
tcaaagacagctttcacagtttgcgggactcagtcccatcactccaaggagagaagattgaagatggaggcaaggcagctttgtcccagaagatgaggactggtgatgagctggtgaatatc

SEQ ID NO: 86871 - DNA, 100 bp, Homo sapiens
accgcagcctggtgcagatcatctacgacgagaaccgggattactacagcatcccatttcccacacccactactccgctgactgggagggatggtagcct

SEQ ID NO: 86872 - DNA, 100 bp, Homo sapiens
aatagatgaagcaaattttgtcatgcgtggcctggtttgctttcgaccctggctcggcgcactcggacatcatcctctccaatgacaacctgacagtgac

SEQ ID NO: 86873 - DNA, 100 bp, Homo sapiens
cttatgctcagcaccaacaggtccgccaaatccggaagaagatgatggaaatcatgacccgagaggtgtttgagaagtcccccctgcgggtgaagaactt

SEQ ID NO: 86874 - DNA, 100 bp, Homo sapiens
ttggattcagacgccgattcgcccaggtgacagatcagtcagtgaaagcatttgctgaacactgtcctgagcttcaatatgtaggcttcatgggttgttc

SEQ ID NO: 86875 - DNA, 100 bp, Homo sapiens
cacctggataaccttttgctaacaaaaacagaagccgaaccggaagttgacaaccttctggtttcagatgccaccccagacggtttccgtctgtcctgga

SEQ ID NO: 86876 - DNA, 82 bp, Homo sapiens
ttgcacggagcagcaaacgcagagacaaaagaaacgggccccgactggtcaaagagttagtggaagcagagttatttgcccg

SEQ ID NO: 86877 - DNA, 100 bp, Homo sapiens
cctgcacaacgttcaaccatgctcggtcatctgtggcagtatatcaagtaaatggggagcaggagaaccgagtgcagaagggaaatggatattttcaagt

SEQ ID NO: 86878 - DNA, 101 bp, Homo sapiens
tcattgcatgggttaatgacatagtatctttaaactacacaaaagtggaacagctttgttcaggtcgttgaggacttccacatggagattggcacaggacc

SEQ ID NO: 86879 - DNA, 100 bp, Homo sapiens
cagctggctaaccagaccgtgggcagaaactggcgatggaatatgagaggagccctctggaaagaaaaggacagaccctgtgctttcatgaaagtgaaga

SEQ ID NO: 86880 - DNA, 75 bp, Homo sapiens
taaggattccaagtaactcttatttggaagcagtgtggttcctctccaacatcactgcaggaaatcagcagcagg

SEQ ID NO: 86881 - DNA, 96 bp, Homo sapiens
gtggcttccggaagttcctggtccacaacgtcaaggagctggaagtgctgctgatgtgcaacaacatacttccacaggctgcactcgaggagatcc

SEQ ID NO: 86882 - DNA, 75 bp, Homo sapiens
cccggagctgcctggaggcggccgcactcgggtactccaaagattcaggtttactcacgtcatccagcagagaat

SEQ ID NO: 86883 - DNA, 95 bp, Homo sapiens
gggtcagagacactgcccgggcggggagggcatgttccgtggcctcgcccaggccgacgggaacccttctctgaagcaacagctcttctcctacg

SEQ ID NO: 86884 - DNA, 50 bp, Homo sapiens
ggagtaatgggaaatttaggtccaggtgttgctgggcatattggatttta

SEQ ID NO: 86885 - DNA, 100 bp, Homo sapiens
tccagagctgaggactgcctgtttgcaggtgagataccagagagctatagctgattgtgaaaacataaggaggcgaacccagagatgtgtggaagacgcc

SEQ ID NO: 86886 - DNA, 100 bp, Homo sapiens
cgaggatgccatggtgttctggatcaacaagcgtgaagcctctgcgggccttcttttcgtcttatttgaagtcattgccggatgtgaggaaaaaatcgct

SEQ ID NO: 86887 - DNA, 74 bp, Homo sapiens
gatctcctcactctaggatggatccatattgatgtacagctatatattttgtcctttctttcacctcatgatct

SEQ ID NO: 86888 - DNA, 83 bp, Homo sapiens
cagcacactcctcgcgagcaagcttcaggatgagttagagaaaggtgaacgggacaatgcagaactgcaggagtttgccaacg

SEQ ID NO: 86889 - DNA, 80 bp, Homo sapiens
cgtgcgcggggacctgcgctgactaggtccggggaaggtgctggagaatctggtaaaagcaccattgtgaagcagatgag

SEQ ID NO: 86890 - DNA, 100 bp, Homo sapiens
accccagtggtcctaaaggcaacagcaggactacgcttactgccagaacacaaagccaaggctctgctctttgagaccaaccctggaatggtccccagcc

SEQ ID NO: 86891 - DNA, 100 bp, Homo sapiens
ccagtgaattgacttcccatcagatgccagaccagtttgaccaggcggttgtgctgaaccagctgcggtactcagggatgctggagactgtgagaatccg

SEQ ID NO: 86892 - DNA, 75 bp, Homo sapiens
cccggagctgtctcgagctgagccccctaccgggccggatcccgagggaagcagtttaagtgcacggtgtgtgac

SEQ ID NO: 86893 - DNA, 100 bp, Homo sapiens
gtattcaaaaatgaaaagagaatcaagcttcagatttggtgataatatgcagcatgcatactgggaactgaagagagaaatgtctaatttacatctggtg

SEQ ID NO: 86894 - DNA, 89 bp, Homo sapiens
tcatgaagatggcgccaggacgaaggccctactgggcaagattctgaaggaagatttccattaggtaatttgtttaatcagtgcaagcg

SEQ ID NO: 86895 - DNA, 83 bp, Homo sapiens
aggatcatgtctgcgagccaggattcccggtgagcgccgcgagggggtcaacgcctccgtcagctctgatgtgcagtcggtgt

SEQ ID NO: 86896 - DNA, 106 bp, Homo sapiens
aagaccttcgtggaaaaatacgagaaacagatcaagcactttggggacaagcaggccttcgcactatcacgtcctctgggacgacaatcgtttctcctctgatgag

SEQ ID NO: 86897 - DNA, 101 bp, Homo sapiens
tcaaaaaggaaatcaccctgcttgagcaaaggaagaaggagctgactgccgatgcacgggagctgaaaggggagctatactgcctcccatgccatgataaa

SEQ ID NO: 86898 - DNA, 145 bp, Homo sapiens
ccccaatttttggactgtgctctcaaactttactttgcctcatttgaggagtgggaacaggcttcggcgaacacaaagatggactagaggcttttaccagatttcttaaaactgaattcagtgaagaaaatattgaattttggat

SEQ ID NO: 86899 - DNA, 75 bp, Homo sapiens
agacgggctcccccgggatgatctacagggatgggcgtgttttgggcgtgctagaggtgtcacgctccattgggg

SEQ ID NO: 86900 - DNA, 75 bp, Homo sapiens
ggagccaccagcctctccttgacgcaaacatgcagatctttgtgaagaccctcactggcaaaaccatcacccttg

SEQ ID NO: 86901 - DNA, 75 bp, Homo sapiens
tcaactggatatgatccagttaaactttttaccaaggtgtgtgtggtttcagcgcagcatggctgtggtcatccg

SEQ ID NO: 86902 - DNA, 82 bp, Homo sapiens
ccgttcttgcctcaggccagtcgcctccaggccaagagggatccttcacccgtgtctggactatcctattaagtgtaatctc

SEQ ID NO: 86903 - DNA, 74 bp, Homo sapiens
aaccgagaggcacaaatggctgccaaactggaacgtttgcgagagaaggagccagtgtcctgggctaaacacaa

SEQ ID NO: 86904 - DNA, 100 bp, Homo sapiens
tgatgacacctttattttaaaagctgatgttccaaggaggcaaaaccttcaactgaggacttgggggataagaaggaaggtgaatatattaaactcaaag

SEQ ID NO: 86905 - DNA, 82 bp, Homo sapiens
tggtaaatgctggagcaattgttgtgacttcactaataaagctgaagtcgcttgagaaagaaattgctggccaagatgagga

SEQ ID NO: 86906 - DNA, 74 bp, Homo sapiens
gcagcggcgcccgcagccgcagccccctgctccggaggctggtgcagacagtgatgtgtgttctgaaattgtga

SEQ ID NO: 86907 - DNA, 101 bp, Homo sapiens
atcaggtgatggataggagcaaccctgtaaaaccagccttagactatttttcaaacattttgtaccaatggctagaagcagatcgtcatggcaagagccaa

SEQ ID NO: 86908 - DNA, 76 bp, Homo sapiens
aactggcagccagcagtgcccttaatgcacatgctacacctttctggatgaaattctgaaagcagcggtaatgaaa

SEQ ID NO: 86909 - DNA, 100 bp, Homo sapiens
gcctggtcatggcgcagccgggcccggcttcccagcctgacggtgaaaggtgtagcagtcactcggcctacacccacagcatcgaccttgtgaacccagc

SEQ ID NO: 86910 - DNA, 82 bp, Homo sapiens
acaaaagctgctacttatggaagatacaaagggccggagcctcaacagaaagctcctttagttcctcctcctccaccgccac

SEQ ID NO: 86911 - DNA, 50 bp, Homo sapiens
agcgggacagcgcggcggggagcgacgaagcacaatcattgtggagaaga

SEQ ID NO: 86912 - DNA, 101 bp, Homo sapiens
ctgcctttatgatgaatgcaataattctccattgagaagagagaagaacattctcgaatacctagaatggggttttggaactgaaagaacacaaactggat

SEQ ID NO: 86913 - DNA, 82 bp, Homo sapiens
cagattcgcagtggtcgcttcttctccttgtgccttgaaagaaataccatccggctggcatctgtggaggagtgtcagagct

SEQ ID NO: 86914 - DNA, 50 bp, Homo sapiens
aaaaatccagagaccccctgaagattcgggctgtaaagtgagggaccaca

SEQ ID NO: 86915 - DNA, 83 bp, Homo sapiens
caggtcaagagcctctgcgagaagtctctgcgatatgataccagctattttgtggagtattttgccttggatctcctgatgga

SEQ ID NO: 86916 - DNA, 100 bp, Homo sapiens
cgctgaggggcttgcctgaagcgaggggagctgccactccgaaaccagtcccagaacccgagaaacagacagaccatacagttaaaattgctggagtcat

SEQ ID NO: 86917 - DNA, 100 bp, Homo sapiens
agcgatgtccccatccgccgccgagaggaggcctatgagaatcaggacttcctccgtcaggcagctggcaggacctgaaggatcacatgcgagaagctgg

SEQ ID NO: 86918 - DNA, 73 bp, Homo sapiens
agaaacccactgaagctgtttgtgagagcaaccctgcagccgcttacaaacacgcagatggcaagaagattga

SEQ ID NO: 86919 - DNA, 97 bp, Homo sapiens
acaacagcaacttgtgattggcggtgaccggatattcagttgcacatccccacatcaatgcactgccaatgctagaacgagtaaatctgtctgcagc

SEQ ID NO: 86920 - DNA, 100 bp, Homo sapiens
gtgaccgatttaaactgcacataccatatgctggagagacattaaagtgccagaatatcattgtcatagtggctggagcaaatttacttttgaatacgga

SEQ ID NO: 86921 - DNA, 71 bp, Homo sapiens
gacctcggcggagcaggagggccttcaagaaggagaccagattctgaagtttaaactcatatcccaggcat

SEQ ID NO: 86922 - DNA, 83 bp, Homo sapiens
ctctctctttctggcctggaggctatccagcattcttctaacagagaaaatgccattgaggatgaagaggaggaggaggagga

SEQ ID NO: 86923 - DNA, 83 bp, Homo sapiens
cacgcacacccaccccacagtgcccggctcggctgcgggggatatgagactttctactcggaatatcctgagtgttgcgtgga

SEQ ID NO: 86924 - DNA, 90 bp, Homo sapiens
aaattttggaaaatgtgataaaaacaaggtggaagattcttccaaggaaccagtgcgaagcttcaacattgctttatggcatgtgtggtc

SEQ ID NO: 86925 - DNA, 75 bp, Homo sapiens
attcgcgtacacctgttgtttgaaagctctcagcgggacaatgctgacccaggcttttaaagaagcagttttttc

SEQ ID NO: 86926 - DNA, 83 bp, Homo sapiens
tgaggaggcgagctagccgggagttacaccgccaccgccagaggtggcgagaggcgtgctgaccagtctgccaggagacagcg

SEQ ID NO: 86927 - DNA, 82 bp, Homo sapiens
cagaagtcgcgtgtctaggtgagtcgcggtgggtcctcgcttgcagttcagcgaccacgctgagcgggctttggacaccatg

SEQ ID NO: 86928 - DNA, 83 bp, Homo sapiens
tgaacaaccggaacctcaatcttgacatatatgttattgggtcctctccacccggatcctggccatgaaggcctcgctctgca

SEQ ID NO: 86929 - DNA, 83 bp, Homo sapiens
cgagaccctgcctgcctgaggaggcctcggttggatgcgaaggagctgcagcatccagattaactgctgaagtactgatcgag

SEQ ID NO: 86930 - DNA, 82 bp, Homo sapiens
cagaagacgggtgatttctgcatttccatctgagctctaagcgaaagacatgaggcctcagcctgaaatgaggttgttttga

SEQ ID NO: 86931 - DNA, 100 bp, Homo sapiens
gacaacttttaatgagattgacatgaggaaatctgaaatagagtactatgctatgttggctaaaactggtgtccatcactacagtggcaataatattgaa

SEQ ID NO: 86932 - DNA, 75 bp, Homo sapiens
gggaccaccctgggcacagcaggcatcggagaccaggccccgtccccatgcctcggggtgcagtgtgcatttggg

SEQ ID NO: 86933 - DNA, 83 bp, Homo sapiens
gacagggacagtgggcagtgctcccggaacacaagctgtgaaacactagcttaagatctccttcagcgagacagccctggaga

SEQ ID NO: 86934 - DNA, 82 bp, Homo sapiens
tgggcgtggggatggccaccagtttccggacagcttcgtgctggtgagagggtccaagcctggtaagaatgtccagcttcag

SEQ ID NO: 86935 - DNA, 75 bp, Homo sapiens
ctgaagacatcatttgggaccaagctgatgagcccttgaagcacagcagaaagacctgagctgtcttccttggca

SEQ ID NO: 86936 - DNA, 96 bp, Homo sapiens
ccggccactcctgcatctttaccgtctcagggacttccagttgctgccccttcccagaggcctcggcaagacgcgcaggaagaccagcgcgcggga

SEQ ID NO: 86937 - DNA, 88 bp, Homo sapiens
caccgtttacaaggccagagataagaacaccaaccaaattgtcgccattaagaaaattgccataatgcttttgccttgcttgtgaggc

SEQ ID NO: 86938 - DNA, 75 bp, Homo sapiens
ccgggacctcctggaagccaaaaatggattgacttctaaagagtcatgctgtgtgatgaaaaagcccagaagaga

SEQ ID NO: 86939 - DNA, 90 bp, Homo sapiens
ggcgggccagggccgcactccggagactcgcggttgctacgcgcaccatggctggagcaggtggtccattatggctgacatgcaaaatct

SEQ ID NO: 86940 - DNA, 82 bp, Homo sapiens
ggcattgactttttatcaaaaactatgtacttggaggatcgaacagacagtcattttgtttactcattcagccctgttgcag

SEQ ID NO: 86941 - DNA, 83 bp, Homo sapiens
cacttgcaggccgggcagtgcggcaaccaaatcggcgccaagagcactacaaacaccactggtttcccgaaaagccgtccaag

SEQ ID NO: 86942 - DNA, 83 bp, Homo sapiens
gtgaccggaggcggcggcggcgagcggttccttgtgggctagtttggtgccctggttgtcagatgttggaaagcagtaggacg

SEQ ID NO: 86943 - DNA, 100 bp, Homo sapiens
ctgggcgcgtcagaacaggcgctgcggctgatcatctccatcttcctgggcctgaaagcaggagatgagattcttgagatcaataatcgtgctgctgacg

SEQ ID NO: 86944 - DNA, 75 bp, Homo sapiens
accgtcgctagaactcagttgtgcgttgcggccagtcgccactgctattgtgttccggaagatcagcgatgtgaa

SEQ ID NO: 86945 - DNA, 112 bp, Homo sapiens
ggcgacctcaagaagcagctccacgaaaggcagccgcggatcgccgcgctcagcgacaaacaattcctgggcttcccgatggactcgagtttttactatgtgagcatcccgg

SEQ ID NO: 86946 - DNA, 75 bp, Homo sapiens
tttcagtgccagtccatccatcacgaccacatttgtcatgatgacagtgacaagagctgctgcccaaagggagca

SEQ ID NO: 86947 - DNA, 99 bp, Homo sapiens
cacggtccagcggtcacctacccccagcaccacctccagcccctgcgcctcgatctgcctggctcagaattcaccttctacatttcactatgtgctggt

SEQ ID NO: 86948 - DNA, 75 bp, Homo sapiens
gtcatggagggagcaggagctggatccggcttccggaagggaaatgtttcaacgtgcgcaagcgttgcggcggcg

SEQ ID NO: 86949 - DNA, 96 bp, Homo sapiens
gcaaatgatgctacatttgaaattaagtgtcctcagcctgcgggggctgcgtggaggtggactcggagaccgaggccgtgtatgggatgaccttca

SEQ ID NO: 86950 - DNA, 75 bp, Homo sapiens
cttcgccgccgtggcctgcacaggccagcgtctagttagccctggctcagccaacgagacctcatccatcctggt

SEQ ID NO: 86951 - DNA, 100 bp, Homo sapiens
gtcgacatgagtgatgtggaggaaaacaacttcgagggcagagtgaatgaaaactttgccattgatttgatagcagagcagcccgtgagcgaggtggaga

SEQ ID NO: 86952 - DNA, 74 bp, Homo sapiens
ggacctttagagaggacgccagaatacctggaagccaggaaatggaggatgaactctgcgactctgggaggcaa

SEQ ID NO: 86953 - DNA, 83 bp, Homo sapiens
tactctctctttctggcctggaggctatccagcaacacgatgatgaacgcgttaatttccctcaaagaaagaagaaaggccgg

SEQ ID NO: 86954 - DNA, 98 bp, Homo sapiens
gtggcctttgtgaaacaccagactgtcccacagaacactggggagatgcacaggtgattgagctgtaggtgagcagtgacgtgaagaggggttctagc

SEQ ID NO: 86955 - DNA, 75 bp, Homo sapiens
ggcagctcttccagacgctgagtcttcgggaattgttaaatggaaaccacccttgggaactggatgcctgtgtag

SEQ ID NO: 86956 - DNA, 83 bp, Homo sapiens
atcgacgtcgtgatccagaagtccagagctgaggactgcctgtttgcagttaccggtattgtaagaacaagccgtacccaaag

SEQ ID NO: 86957 - DNA, 100 bp, Homo sapiens
agcaaacgtctacactgtacatgctttttattacaagactacggagcataggaggaaaattcatcatctggttcagcagactgtacaggatctttttggc

SEQ ID NO: 86958 - DNA, 75 bp, Homo sapiens
ccttaatgctacaggacaagcaaacctcagcctggaggcacttttccagttctctattcagaaacttgaaccttt

SEQ ID NO: 86959 - DNA, 100 bp, Homo sapiens
tggagagagaccagacctgcaagctctttgacacacagcagttcttgtcagatgcagaggccaggatgtgggcccagccctgtgccaggaggctggctgg

SEQ ID NO: 86960 - DNA, 78 bp, Homo sapiens
gttgaacttctgaaaggagatgcacacagtctgttttggcaggttttacaactgcctacagcatgctttggaaaggga

SEQ ID NO: 86961 - DNA, 50 bp, Homo sapiens
ctgaagacggggtagccacgaggaggaagaaggcacctacgatcaaactc

SEQ ID NO: 86962 - DNA, 108 bp, Homo sapiens
tccctcttgaccttctggaccgagtgatgataatccggaccatgctgtatactccacaggaaatgaaacagcctccaggtcaccatccttgtcacctctactgccaga

SEQ ID NO: 86963 - DNA, 74 bp, Homo sapiens
tccagaagtccagagctgaggactgcctgtttgcaggtggggaagaaaacatgacagaaacagatgccttctat

SEQ ID NO: 86964 - DNA, 82 bp, Homo sapiens
ggcagctcagcgcggcggccgcgctcttcgcgtccctggccgtatcaacaacctgcaggctgagttaaacaagatttttgcc

SEQ ID NO: 86965 - DNA, 74 bp, Homo sapiens
tgatcagttggatcaggagaatgatgatggttgggcaggaatttgctgacacaatatcttccgcctggtgctgg

SEQ ID NO: 86966 - DNA, 75 bp, Homo sapiens
gaaaaaccgcgaagtcatggggctctgtcgggaaggcctccccatggccacccatggaccagtcggcattcactt

SEQ ID NO: 86967 - DNA, 100 bp, Homo sapiens
gaacttttaagtggagtggtggatcagaccaaagatggaaaaatatgtcgtaactgcaagtgtggccaagaagagcatgatgtcctcttgagcaatgaag

SEQ ID NO: 86968 - DNA, 82 bp, Homo sapiens
gcggattcgccgaggcaccgaggcactcagaggagcccgagcgggaagaagttccgcagcaagccgcagctggcgcgctacc

SEQ ID NO: 86969 - DNA, 75 bp, Homo sapiens
ggacggtttctcattgatttcaggcactccacagaaggatgttattatcaagtcagatgcaccggacactttgtt

SEQ ID NO: 86970 - DNA, 90 bp, Homo sapiens
gcactgggggtggtgccagtttggagctcctggaaggtacgacaacaattccacgatgccaaattcatggcagacattgatctggatcca

SEQ ID NO: 86971 - DNA, 83 bp, Homo sapiens
aaggcatagtcgttgtcacgacatggattgaaaaaattctcactgatttgaaggtatctgctgtgcgtttcagtcaacaatac

SEQ ID NO: 86972 - DNA, 82 bp, Homo sapiens
ctgtcccaaaagaccatcctgctctcaactacaacatcgtttcagggcagaagtcaattcatctggaaagactatctctgag

SEQ ID NO: 86973 - DNA, 76 bp, Homo sapiens
agcgtcaaaattatccgaaaccgcctcactggtgccggtggtggtgtgcacattgagccccggtatagacagttcc

SEQ ID NO: 86974 - DNA, 100 bp, Homo sapiens
ctccagtacaagcacctcctgctccagtaattggactccaagccccctgatccttgatcagaactacattaacaccaaaaatcaagttatcaaagcagag

SEQ ID NO: 86975 - DNA, 100 bp, Homo sapiens
caatgctgaagtaagattgtcttggaaatactaagttgggttctaaatgagaagaaacttcaagaggttgatagtttatggaaagaatttgaaactccag

SEQ ID NO: 86976 - DNA, 90 bp, Homo sapiens
gttctatttctctagctattgccttattttttctcatggatgttcttcttcgagtatttgtagaaggctgacaggacttccacacccatg

SEQ ID NO: 86977 - DNA, 100 bp, Homo sapiens
gtggagatctcctgtgctgcgaccactgcccggctgccttccacctccagtgctgatggtgatggaatttcctgataatgtgttaaatctcgatggacat

SEQ ID NO: 86978 - DNA, 100 bp, Homo sapiens
gccacatcaacctcctcacccaacagccaacaaatggaattttcttgagcatgtttctaatcgttttgccattggaatccatggctcatgggctcttcca

SEQ ID NO: 86979 - DNA, 74 bp, Homo sapiens
tgcttccacccaacttcctgttagtaacaatttggacaagacagcaaatgctattgtcgaagttttctaaagaa

SEQ ID NO: 86980 - DNA, 75 bp, Homo sapiens
aatctcaggaatctggtctcattggtgtgccggtccaacaaaagcccttgggtctgtttgacttgttcaagtgtc

SEQ ID NO: 86981 - DNA, 88 bp, Homo sapiens
gcagctcagatggctcgcgagcaaaaccaccatacctgggaccagggcgccaataacaggtatgattatcgggaaatgctgcacaatg

SEQ ID NO: 86982 - DNA, 90 bp, Homo sapiens
cgcgttgctgctgctgccggtcgagcagaaaaagcttgtggtgaaggggggcaaaaaaaagaagcaagttctgaagttcactcttgattg

SEQ ID NO: 86983 - DNA, 82 bp, Homo sapiens
ccggagtcttcctgatccatggacccgatgaacatagacacagattggtgaaagacaacaagtgttagtaacagaagaatct

SEQ ID NO: 86984 - DNA, 100 bp, Homo sapiens
agcgctcggcgcttggcgctggcgctggccaaggcggtcatcttccacgatgttgctgtgctgacggataagctcttccccatcgtggaggccatgcaga

SEQ ID NO: 86985 - DNA, 90 bp, Homo sapiens
gaggactgccagctggcgctgcagactcagatgccactgcatcatcagataacagcgagacggaggggacacccaagttgtctgacacac

SEQ ID NO: 86986 - DNA, 74 bp, Homo sapiens
agtgaagccgtgacatcctgggatattctttgttgagaggatcaaaatggtttcaatcccagaatactatgaag

SEQ ID NO: 86987 - DNA, 51 bp, Homo sapiens
atttgggagaaacacagccagaagctaatcttccagtaccaacaattgcag

SEQ ID NO: 86988 - DNA, 50 bp, Homo sapiens
cggctgcccttcaagtaccaggggcaatggcggcttcctgtgttctactg

SEQ ID NO: 86989 - DNA, 98 bp, Homo sapiens
agaggggcgacagaacatgatgttgacacgggctgggcgcccccagaagcccgggaacaaacaacacttcagttatggaagatcaaaatgaagatgag

SEQ ID NO: 86990 - DNA, 74 bp, Homo sapiens
tatgttggatgtgcctttgctctgaaggtcctgacttccagtccttgttctcaccacagacttatctcagacag

SEQ ID NO: 86991 - DNA, 100 bp, Homo sapiens
gaggaacttaactttccggaagcaggtctcgtacagctctccacacaaggagatgcaagtcaggtgattgggcctcttactgaaggacagagaagaaatg

SEQ ID NO: 86992 - DNA, 98 bp, Homo sapiens
gtccttgtaccctacacctcggagcatgtgcccaggtatcttggagatggccgcttccatctggagtctgtcatgattgccaaccccaatgtccccgc

SEQ ID NO: 86993 - DNA, 90 bp, Homo sapiens
ggaattccagagttctggtttaccatcttcagaaatgtggacatgctgagtgaattagtccaggcatctcgtccccggtgaagaagacag

SEQ ID NO: 86994 - DNA, 50 bp, Homo sapiens
tatccaggcttgggcaagtggggagtccctggagttggaaaagagcaagc

SEQ ID NO: 86995 - DNA, 75 bp, Homo sapiens
ttgagagtaggtgacacggagaagccagagcctgagcatgctggctccccgtcccctgtccaccatgagtcaaag

SEQ ID NO: 86996 - DNA, 101 bp, Homo sapiens
agttgctgtagtcatctacaataataaatccaaagaggagccagttaccatgactcatccagatattgatgatgttaagaagttcaaaccgggttacctgg

SEQ ID NO: 86997 - DNA, 75 bp, Homo sapiens
cagtctccttagtagctgggactacagacactgccctaaccatcatggaggtggccgaggtggaaagtcctctga

SEQ ID NO: 86998 - DNA, 109 bp, Homo sapiens
gagaatttcagggtgcagtatacagaaacagagccgtatcataattaccgagtgatgtgtccaatctagatcccaacttctcatttgaaggcaccaaactggatgtggg

SEQ ID NO: 86999 - DNA, 75 bp, Homo sapiens
ctacaacaggaaaatcatattatagatggagtaaaggtcagttcaaagatcctagaactcgcccggaagcagagg

SEQ ID NO: 87000 - DNA, 80 bp, Homo sapiens
atactgccttatgggacagatcaaaaagggctattgcaagacacgaagtccgagaaattgagcagcgacatacaatggat

SEQ ID NO: 87001 - DNA, 101 bp, Homo sapiens
agcttgggctcacttccacaaatatgttcctcctgctgatcaagagaagctttttatccagaagttacgtcagtgttgcgtcctctttgactttgtttctg

SEQ ID NO: 87002 - DNA, 83 bp, Homo sapiens
catcgtaaaatattttgatgaggaaccacgtgaatgttgagggggcgacacacaagcaggtggtggacctgattcgagcaggc

SEQ ID NO: 87003 - DNA, 95 bp, Homo sapiens
gttaaagtctctcttcaccctgccgtcatgtctaagtcagaggcgttcccgttgcccgctctctcccggaagcagaggacggtgctggtcgtgtg

SEQ ID NO: 87004 - DNA, 100 bp, Homo sapiens
gaggaagagaactactcctttttacctttggttcacaacatcatcaaatgacactaccccaagcagtccttcaccatggtggcggacaccccggaaaacc

SEQ ID NO: 87005 - DNA, 74 bp, Homo sapiens
gtagccaaagagcaactaactgatgctgacaccaaagggaactctaatgatccaggacaaagaagttaccctgg

SEQ ID NO: 87006 - DNA, 82 bp, Homo sapiens
ctggcgctgagcctgcagccggccctgccggacatggatttgattgacatactttggaggcaagatatagatcttggagtaa

SEQ ID NO: 87007 - DNA, 117 bp, Homo sapiens
tgtgatgctggagacctatggtcacctgctctctgtggcaataattcggcatagacctgctcttgttaaagtaattttaatttcgagcgtagccttcagcattgccctgatatgtgg

SEQ ID NO: 87008 - DNA, 83 bp, Homo sapiens
aaggattccaagtaactcttatttggtgtggacactgccagcggctgcagccgacttggaatgacctgggagacaaatacaac

SEQ ID NO: 87009 - DNA, 97 bp, Homo sapiens
cagagaagccacttcttctgggcccacgaggcagctgtcccatgctctgctgagcacggtgacaatgcagatcttcgtgaagactctgactggtaag

SEQ ID NO: 87010 - DNA, 82 bp, Homo sapiens
cgagcggcaacggggctccgggccctaagggcaaaatcaccaggacagccaatacaagtggtttatgtaccatcccatctct

SEQ ID NO: 87011 - DNA, 100 bp, Homo sapiens
tgagcagcgctctggggctcgccttgtatctcaacaccctgagtgcggatttctgctatgatgacaggaagagaatggagactacacatatgtggaaaga

SEQ ID NO: 87012 - DNA, 75 bp, Homo sapiens
gtcagctcagtgctgtgcgggccagtgacaaccatgagtggaaaaaactaattatggttcagcactggcctgaga

SEQ ID NO: 87013 - DNA, 99 bp, Homo sapiens
gttgaaaacaatcggcaaggggaattttgcaaaagtaaaattggcaagacatatccttacaggcagagagatgaggataggaattcactcaggctccgt

SEQ ID NO: 87014 - DNA, 100 bp, Homo sapiens
cctcgggcctcacgctgaagtccgaggcccttcgcaactggcaaggggccctaaccacccaggatgaaaatggccagaccaagcgcaagttgcaggcagg

SEQ ID NO: 87015 - DNA, 83 bp, Homo sapiens
caggagcgcttccgcaccatcacctccacatgcatcactgtaagcgataccgctcccctgaaccagacccgtacctgagctac

SEQ ID NO: 87016 - DNA, 100 bp, Homo sapiens
ccgcaggtcgaggacggtcggactcccgcggcgggaggagcctgttcccctgagttactccacaggatccgctgaacataggatgttgccacaaaatcta

SEQ ID NO: 87017 - DNA, 74 bp, Homo sapiens
aatgaaagaaaccgctgaggcttatttgggaaagaaggatgaagactccgggaaggctgacagcgacgtggctg

SEQ ID NO: 87018 - DNA, 100 bp, Homo sapiens
actaccaaatgggcgagacacacctgcactcttcaacttcaccactcaaggaacttagtgatttggcccgtgaccctccagcacaatgttctgcaggtcc

SEQ ID NO: 87019 - DNA, 99 bp, Homo sapiens
tgtacctgttttatacttgcttttgcttcagcgttctgtggttgtcaacaggctcgtggtcccaagaagcatctgaagcgggtggcagctccaaagcat

SEQ ID NO: 87020 - DNA, 100 bp, Homo sapiens
cacggacaaatgcatacaaatgcatttaagagcccacagaacaaggcgtggaaaagtctcccccacggcaaaaacgtttttcgttggaatatacgttgca

SEQ ID NO: 87021 - DNA, 101 bp, Homo sapiens
gttccagttgcacatttcctgcaaggactccaaagtggtgagaaagtgacttcagtgatgattttagtgatgattttgtagaaactcggcgaaggcggtca

SEQ ID NO: 87022 - DNA, 83 bp, Homo sapiens
cagcgacccgctgctcagcgtcctcatgtggggggtaaaccactcggtgagaagccctaccactgcaactgggacggctgcgg

SEQ ID NO: 87023 - DNA, 87 bp, Homo sapiens
tggctccagcatgtatcagccgaggtggagctgcggggccctggcatgaaaggtggaagcagggaaaggcctggagatgaggaagct

SEQ ID NO: 87024 - DNA, 116 bp, Homo sapiens
cggagaaggatgacaccggagtttgacgaagaggtggtttttgagtgaaaccaatccgtaatctaaatggacattcaattgggcaatatagaatacatgctggaaaaacagtgccg

SEQ ID NO: 87025 - DNA, 60 bp, Homo sapiens
tatcagttttatagagaatacatcaactcctgtggatcgatgtgttcagagcaacattgt

SEQ ID NO: 87026 - DNA, 100 bp, Homo sapiens
gtacgaacactggaaaaagaacaacccgaaacttcgagagttctctgtggacattgactcggagctggtggaggagctgccggccgaaatcgagctgtgg

SEQ ID NO: 87027 - DNA, 50 bp, Homo sapiens
ctgtggaaagaagttgcaaaacactggaatcttgagcagtggacactgag

SEQ ID NO: 87028 - DNA, 99 bp, Homo sapiens
cacggggttgcggatcccgcggccgcggttcggacccgccggcgacatggccagctccggagaggtacattattccatctttgcagaagctcgatgctg

SEQ ID NO: 87029 - DNA, 100 bp, Homo sapiens
ctgaccatggacgacattcgaaggatggaagaagagacgaagagacagctggatgaattcttccctgtggaacagtagagacctagtctgccttctttca

SEQ ID NO: 87030 - DNA, 100 bp, Homo sapiens
ttatgtcttgattggcagtggtctgtatgatgaagcaatacggcatttttcaacaatgcttcagaatcttcctcggtcacccaggatggagtgtagtggc

SEQ ID NO: 87031 - DNA, 110 bp, Homo sapiens
cagaacgacctgatgggcacggccgaggacttcgccgaccaggttgtttgcattcgctccacttggaatgctctctctccaaagctgagttgtgacacaagacctctcat

SEQ ID NO: 87032 - DNA, 75 bp, Homo sapiens
agacaagctaaaaatgattcgggaatatcggcaaatgtggggtgccgaggctcaggcagcatgacgacggagacc

SEQ ID NO: 87033 - DNA, 98 bp, Homo sapiens
attatcgcagaatgcaacgccattcgccaggctcttcaggatctgctttcagagtacatgaacaacgtctctaattaacagaagatggcaaagcccag

SEQ ID NO: 87034 - DNA, 83 bp, Homo sapiens
ctaatatttaagaaagaagatgttaactttcaggaattgaagccattttttatgaaggaagttggcagtcactttgatgattt

SEQ ID NO: 87035 - DNA, 75 bp, Homo sapiens
cattgaattatggcatagatcttgggaaaattgcgcaacggcagcctttaacagttgagcacatgtatgaagaca

SEQ ID NO: 87036 - DNA, 75 bp, Homo sapiens
ccgagcgcctcgacctcggtctgaggagccaaaaacctgtatatcatctccgtgaaggggatcaagggacggctg

SEQ ID NO: 87037 - DNA, 100 bp, Homo sapiens
gacagcgacctggtgggggatgtctgtgatactaatgaagacagccattcgttcctggttaactcggaaacacatccagaggctgcatgcagctgccaca

SEQ ID NO: 87038 - DNA, 95 bp, Homo sapiens
gcttcacccttaaggggggtctggaacactgtgagccgctcacagtgtctaagaatggacagcaaattatggatgaacctatgggagaggaggag

SEQ ID NO: 87039 - DNA, 51 bp, Homo sapiens
cccatctttactggcatcctaaagatcagattgatgaaaatctcaaactgg

SEQ ID NO: 87040 - DNA, 100 bp, Homo sapiens
ggtgcggaagcttcgggagaagcggcagacggagggcacctaccggcccagtagcgaggagcaggcttgcttccggcgtcatggctcaaagggccttccc

SEQ ID NO: 87041 - DNA, 90 bp, Homo sapiens
gaaggagctggaggccgagctggccatggacttgaggtgggacatggaagaacagggacccctcctggtttgtccacccagcccacacct

SEQ ID NO: 87042 - DNA, 74 bp, Homo sapiens
ccatctgaattggctcaatgatgagatatgagaccttggtggggacaattgggaaaaagtttgccagaaagaga

SEQ ID NO: 87043 - DNA, 92 bp, Homo sapiens
atttttttctattttccctacgaaaaacagatctttttaagagtcccctttacttggtaaatcacggcgagagtggaccagtcagatgcaac

SEQ ID NO: 87044 - DNA, 96 bp, Homo sapiens
ccggcggagggtgcatgtttgcgaggaagccgccgggcgccgcgcctttgggtggaatggatccaacagcaagtggtaaaaaagcggacaaagagg

SEQ ID NO: 87045 - DNA, 90 bp, Homo sapiens
aaggctttgtctagacaagaaatgcaggaagttcagagttctaggagtggaagaggagcctcggaaaattgaggaaatcaaggacttcct

SEQ ID NO: 87046 - DNA, 75 bp, Homo sapiens
aatccgaaatgggcatattgccacaagtgacattgatgtttgggtaccagaaccagaccactcagaagttcctgc

SEQ ID NO: 87047 - DNA, 100 bp, Homo sapiens
gctggactctattacctggcagaactgatagaagaatacacagtggccaccagcaggatcataaaatacatgatctggctatatcgagaagtttactgac

SEQ ID NO: 87048 - DNA, 100 bp, Homo sapiens
tgtgggagtcttcgtccccacacagaggacaggctgctcagctccactgtgcaaggggcgagaggtcaatgatcttaaaagaaaatctccttcagatctt

SEQ ID NO: 87049 - DNA, 50 bp, Homo sapiens
ccacagccgggcgttgggggaaagtttcgagaggcccgtgccatgagacc

SEQ ID NO: 87050 - DNA, 75 bp, Homo sapiens
ccgcgcccttcctcggcgggccggactggaacaagcacatcatgattgacttggggactggcaacaacaacaaga

SEQ ID NO: 87051 - DNA, 100 bp, Homo sapiens
cgagatttgaaagagctcagacatctgcattacttagagcctccagtgaagctgaatgaagctctagagagatacggacttaacgctgaagatttttttg

SEQ ID NO: 87052 - DNA, 134 bp, Homo sapiens
cgtgcgtgcgtgcgggcggctgcgtcgggctgcaggagaagatggcggtctccacagatgtttctttctcagcaaaatagaggagaagcttacccctcttccagaagataatagtatgaatgtggatcaagatg

SEQ ID NO: 87053 - DNA, 83 bp, Homo sapiens
ctgagagagaaatttataaaagattgggaatgaaaagaggtgaagaaattgcttcctcagtctctccatttcaaggactaaaa

SEQ ID NO: 87054 - DNA, 100 bp, Homo sapiens
tccaaagtgcccggacccaaaacaggaacatcaacaacagcaacttgtgattggcggtgaccggatattcagttgcacatccccacatcaatgcactgcc

SEQ ID NO: 87055 - DNA, 100 bp, Homo sapiens
ccgccagggacatgtctaacctcggaggccgtaggaacgggcctgtcgaagtgcgcctgacaggtgataactaccccgtacagttcattccatcaacaat

SEQ ID NO: 87056 - DNA, 75 bp, Homo sapiens
ggcctcggcctccccttggattcagacgccgattcgcccaggttgaattgaccaaagcaatggtgatggagaagc

SEQ ID NO: 87057 - DNA, 74 bp, Homo sapiens
ttcaagcgaaaacatgaccgctgagcccatgagatgaagtggaaagggaaggacctctttgatttggtgtgccg

SEQ ID NO: 87058 - DNA, 75 bp, Homo sapiens
gctgaaggagtggagcaactcgctcgaaaagaagtgtttctgaaagatctatccagcactccgatggccagcaac

SEQ ID NO: 87059 - DNA, 82 bp, Homo sapiens
tggaattccattcttttccttattcttctgatgtggatccaggcacgtgtggttctcaaatataggcattctgatgggaact

SEQ ID NO: 87060 - DNA, 82 bp, Homo sapiens
gccagcgtcctctggccatggacaccccggaaaatgtccttcacatcatggcagaacaggatgtggaaaacgatcttttgga

SEQ ID NO: 87061 - DNA, 109 bp, Homo sapiens
tgcagtcaacctcttccccaatttcaatgcggtttttcgttggaatatacgttgcacatttatggcgattctgagtgtgagggcagacttctgccaggctcagcacagc

SEQ ID NO: 87062 - DNA, 50 bp, Homo sapiens
gtgactcctcgatcttcagttgaggaaaaaagggttgctcattttgggta

SEQ ID NO: 87063 - DNA, 82 bp, Homo sapiens
cgcggaccggcgtccccggcgcgaagaggctggactcggattcgttgcctgagaaaggaaggcagaggaagccacggccact

SEQ ID NO: 87064 - DNA, 83 bp, Homo sapiens
aaaagaagaagaagaaaagcaagatactgaaatgtgatgaacatctctagaggacaaaatcccagtccttggcacaaactcag

SEQ ID NO: 87065 - DNA, 82 bp, Homo sapiens
tgacacatattctgtctgtccacgatagtgccaggcctatgttggaggcataatcaccagcaacacccgggacaataatacg

SEQ ID NO: 87066 - DNA, 119 bp, Homo sapiens
ggaaaaccgaagttggaagtgtctcttagcagcgcgcggagaagaacggggagccaggtcaccttccgcaaccctgtcattgagaggattcctcggctccgacggcagaagaaaatttt

SEQ ID NO: 87067 - DNA, 96 bp, Homo sapiens
ctggagcccactcctcctccctctcgttgcctcagcctgccctcaccctcaggactaggcagaggacggtggaaatcaacaacacggatgccgagg

SEQ ID NO: 87068 - DNA, 83 bp, Homo sapiens
ctcctctctccttggcctctcctgggatcggcccaaggccagttctccgcaggttatgatgtgattgctcaagcccaatctgg

SEQ ID NO: 87069 - DNA, 100 bp, Homo sapiens
ctaccaccttggttcgcccactgctgaacaccatccagaagacacagatctgaagttgcagccggagtgaagaagagcggaccgctgcccagtgctgagg

SEQ ID NO: 87070 - DNA, 100 bp, Homo sapiens
cattcttttccttattcttctgatgtggatccagatcttaccaatatatttgagtccttcctgcctcagttattggcctatcctaaccccatagatcctc

SEQ ID NO: 87071 - DNA, 100 bp, Homo sapiens
gatcttccggagctgccgtgcatacctgtgtgaaagcaaccttccacgtgaaaacttttggcccgtttggaagcggcagccaggacaacctgactatgta

SEQ ID NO: 87072 - DNA, 100 bp, Homo sapiens
aaaagctgtggcaaccgaaatgagactccctcagatccagtgataattgacagtattgcggaatgctgcagcactccttactctcttttgggtttggtct

SEQ ID NO: 87073 - DNA, 98 bp, Homo sapiens
catgggccgggatcacattctgattcactgatagccattgggcgatacagcatgacaatagagactgtggatgtcggatggtgtaaagaaatcacaga

SEQ ID NO: 87074 - DNA, 100 bp, Homo sapiens
ctcatcatgaccttccagaattacgggcaagcgctgttcaaacccatgaaggcccatttggaggccagcgctgagaagtggaacaggttgctgatgtcct

SEQ ID NO: 87075 - DNA, 98 bp, Homo sapiens
gacttcattgcactgctgcaactgccttctccagacctcttgccagaacatgaaaggctcccggagcagcgctgactcctccaggaaacactgaggca

SEQ ID NO: 87076 - DNA, 75 bp, Homo sapiens
agttcctgcatatggaatgtatggccaggcatggaaccagcaaggatttaagcccttgatgagcctccctatttg

SEQ ID NO: 87077 - DNA, 76 bp, Homo sapiens
ctgaagagggaagacacgcggaaacaggtctgcaggaaggaaggctgaaaaagcggacgaagattttgacttaagt

SEQ ID NO: 87078 - DNA, 52 bp, Homo sapiens
gtcgtcggcatcctcctggcctacctggcagatcctgaggtgcagaggcaat

SEQ ID NO: 87079 - DNA, 90 bp, Homo sapiens
aatatctgcagttccaatttcccaaaaagaatcaaggatctggattttgcataactggtaaaatagaagctggttatatccaaactggtg

SEQ ID NO: 87080 - DNA, 99 bp, Homo sapiens
cctctccaaggatcagatgataaaccactacgcccgggctggctcctttaccacaaagtttgcagacctgacagacgctgctgcccgcaacgcggagct

SEQ ID NO: 87081 - DNA, 82 bp, Homo sapiens
cgccgggagcggcggcgcccggacgccgactgaaactagaggaccgttctgtggtgccccgagatgtggtccggcacatgcg

SEQ ID NO: 87082 - DNA, 90 bp, Homo sapiens
ccccaaagcgagcgaagctagggtcgccgccactgccgcaggaggcgtgaggatgccggaccagatctctgtctcggagttcatcgccga

SEQ ID NO: 87083 - DNA, 75 bp, Homo sapiens
gcggacaccgaccctgagaacttacctgagatttcgtcacagtttaaggaagaaatctctaaacgttttaaatca

SEQ ID NO: 87084 - DNA, 100 bp, Homo sapiens
ttctgacctcatgatccaccggcctcggcctcccaaagtgctgggattataggcgtgagccaccgtgcctggctgaagggatcgggctccttttgtgctg

SEQ ID NO: 87085 - DNA, 90 bp, Homo sapiens
tgtagtctgaatcaacctaagttttaaacagaaggtgaacctctgaggtggtacatgccagagtcctgctctcccggcccttgtccgtcc

SEQ ID NO: 87086 - DNA, 82 bp, Homo sapiens
cggatggctccgcaagtcccccccggagaaaaagttgaagcgttattttcaggagacaagtattatctttaaatctaaatgg

SEQ ID NO: 87087 - DNA, 50 bp, Homo sapiens
ttatggcatctacgtcatccaccaggctggaaatggaacatttaacaggg

SEQ ID NO: 87088 - DNA, 100 bp, Homo sapiens
agtggcattacacctaaaggattaggtacaccaggggttggaaaaaccacactaggcaaagaacttgcgtcaaaatcaggactgaaatacattaatgtgg

SEQ ID NO: 87089 - DNA, 50 bp, Homo sapiens
cgcccgtccccctgccccgttcacaatatcaatgtccgagttaccaccat

SEQ ID NO: 87090 - DNA, 100 bp, Homo sapiens
cgtgcacgacataggcaagaacatagttggagtagtccttggctgcaataatttccgtgtggcaaaggagcagagaactttgacaagttcttcacacgag

SEQ ID NO: 87091 - DNA, 80 bp, Homo sapiens
caaagacgggcgcaaagattgcttgaagaaatccatgccatgaagttactggctgaccaacaaagttcctatcaaaagac

SEQ ID NO: 87092 - DNA, 125 bp, Homo sapiens
tctccataatgacagaacaagagttgaatcaaatttttggaacactggactctctaattcctctacatgaaggtgctggagaatctggtaaaagcaccattgtgaagcagatgaggatcctgcat

SEQ ID NO: 87093 - DNA, 50 bp, Homo sapiens
gtgcgctctcgtgaggtctcggtggatgggtctcactctgtcacccaggc

SEQ ID NO: 87094 - DNA, 88 bp, Homo sapiens
tgaaaagcctccttcagcatcaacttgatacttctgtctccattgaggaacttaattcagtgcacaaatgagatgaatgtgaacatcc

SEQ ID NO: 87095 - DNA, 100 bp, Homo sapiens
ctggtgtacggccaacgccaagtaggggattgcgttccctccagtcgcaggccaagaataaggagacgggtgctttggctgcggccaaagtcattgaaac

SEQ ID NO: 87096 - DNA, 82 bp, Homo sapiens
agaaggcttatgaggatggctgcaagactgtcgacctaaagcctgactggggcaagatgaggtggaggaccatcctgctaca

SEQ ID NO: 87097 - DNA, 88 bp, Homo sapiens
agaaagtgaagctgtttcgggccagcgacccgctgctcagcgtcctcatgtggggggtaaaccactcggagtggagtcaacatatcaa

SEQ ID NO: 87098 - DNA, 95 bp, Homo sapiens
aagttccaaggttacgtttcagggatgtcccactcttgttcaagcattgccaggccctagcacacaagtcactgcaggcagcaaccatacggcag

SEQ ID NO: 87099 - DNA, 75 bp, Homo sapiens
gtcagcccaggcagacctccaggacacattcagctaacgtattttagcaggtggagtgaggttgaagattcctgt

SEQ ID NO: 87100 - DNA, 72 bp, Homo sapiens
acctttgacctctacccccatgtggtgggcttcctcacatgttggcagataaattgaacatgactccagaag

SEQ ID NO: 87101 - DNA, 74 bp, Homo sapiens
atccgccgcccgtccacacccgccgccagacgttcatcttcactgacggggaagatgaggccctggccaggcac

SEQ ID NO: 87102 - DNA, 100 bp, Homo sapiens
cgagaggatctggtgtaccaggcgaagctggccgagcaggctgagcgatacgacggtggtgatgatgtccagcaactctgtgaagcaggagaagaggagt

SEQ ID NO: 87103 - DNA, 100 bp, Homo sapiens
cttcaaccaggattgtcttttcttaacctgggaagtggaaccggatatttaagtacaatgagacttgaggtttaacagaataagagaaattccagggagc

SEQ ID NO: 87104 - DNA, 73 bp, Homo sapiens
tgtcttttcttaacctgggaagtggaaccggatatttaagtacaatggtggtttgtgatgaaaatggttccaa

SEQ ID NO: 87105 - DNA, 100 bp, Homo sapiens
gaactttttcacttactgcaggattttcagcttcagcaagcagagtctctccgaggcaaagatggagctgagaagaaaagatcaatctctgcgtcagctc

SEQ ID NO: 87106 - DNA, 75 bp, Homo sapiens
tactacctggtgcagggcctgattgaggactgccagctggcgctgcagcttagatggaaaccatttgagattcca

SEQ ID NO: 87107 - DNA, 100 bp, Homo sapiens
gtaattttgctgatgtcatgaagctagactcagaccctctctgaaagtagaggctccaggaacatatgccgagattttgctgtcctggaggaccacaccc

SEQ ID NO: 87108 - DNA, 101 bp, Homo sapiens
tgctgcccgctgtgagggaaaaggattggcttccaggtcctcctcagcattggggaactcagcttggccatcgtgatagctctcacgtctggtctcctgac

SEQ ID NO: 87109 - DNA, 100 bp, Homo sapiens
acaaagaatgacccatttacctcggatccattcacgaaaaacccttccttaccttcgaagagttcccgattttgaaatgctgggctcactcagaagtggc

SEQ ID NO: 87110 - DNA, 75 bp, Homo sapiens
gctaaagcagcgtgcgttcagccctggggagctggtgactgccctcatgtgtgatttgcggcggccagcggcagg

SEQ ID NO: 87111 - DNA, 100 bp, Homo sapiens
cttaaataagggcacacctagtcaggtgtctgctttttcaacgtgggagaaggagttgcacaagatagtttttgatccccggtacttacttctcaatcct

SEQ ID NO: 87112 - DNA, 82 bp, Homo sapiens
gaatttagcgctcgcccagctagccgcaggttattaacacggggatcaaagtctggtgtagaaataacagcggtgaagagtt

SEQ ID NO: 87113 - DNA, 98 bp, Homo sapiens
catgccagcacctaccgagaagctgccacaaaccaggccaagatccacgctgacgcagagcggaaggaggtgatcttagacctgatcccgtatgaaag

SEQ ID NO: 87114 - DNA, 82 bp, Homo sapiens
ttattttcagaccttggaagattcagatagctacaaaaggcaggctgcacctgaggaggcaagtgaggcctatctggttggc

SEQ ID NO: 87115 - DNA, 80 bp, Homo sapiens
gccggtgcagcagccttcagcttttggcagcatgaaagttagcaaagtccattggaatattaagcccaggagttgctttg

SEQ ID NO: 87116 - DNA, 100 bp, Homo sapiens
ctaaactggcgggctccgtggaagcgtggccggcagcgtcccggacgaggaggttatgatgtgattgctcaagcccaatctgggactgggaaaacggcca

SEQ ID NO: 87117 - DNA, 109 bp, Homo sapiens
gttctaacgtgcctgatctactgagaccaaggatgaccaatgactcagaagggaaaatgggatttaaacacccaaagaactctcttgatagagcccaagcagccaagaa

SEQ ID NO: 87118 - DNA, 82 bp, Homo sapiens
aacacctactacgagggcggctacttcaaggattttgacacttcatgacatgtcattatttagagcaataatgaatattgac

SEQ ID NO: 87119 - DNA, 80 bp, Homo sapiens
caagaccctaaagttcgtcgtcgtcatcgtcgcggtcctgctgccaaacggggagaaggtgcttcccaaggatgacattg

SEQ ID NO: 87120 - DNA, 75 bp, Homo sapiens
aacagctccctgctcggaggcggtggcgatggagaaggaggagacaacccgggagctgctgctgcccaactggca

SEQ ID NO: 87121 - DNA, 100 bp, Homo sapiens
ccaagccccacgctggccggacagggccgcctgtcgccgggccagaagcggactcctagaagaggggagcagcaaggatggaatgacagccgtgggccgg

SEQ ID NO: 87122 - DNA, 89 bp, Homo sapiens
gagaatgtgcagtgctacctgccggacgccttcaagatcatgtcacagaggcaccagctggtggtgagcagccctccgagacctgtgag

SEQ ID NO: 87123 - DNA, 75 bp, Homo sapiens
ccctagattggtccactgggaaaactggaagggcccatcaaccgtgagatgcgccacctgattagtagtcttcaa

SEQ ID NO: 87124 - DNA, 83 bp, Homo sapiens
ggaggagtaggtgcgggtgaagatggcggcagccgaggccgcgaactgcatcatggagatgatatcatcaagttgaatcgaaa

SEQ ID NO: 87125 - DNA, 90 bp, Homo sapiens
gctatggtgacagactatggggcctttatcaaaatcccaggctgtcggaagcaagtctggagaggtgttggtgaatgttaaggagcactc

SEQ ID NO: 87126 - DNA, 90 bp, Homo sapiens
ggcggaagaccaagatcatcgagatgatgctgtcttcgcaggtgccatgcctacaatggcaagcgtcaagctgtctacacttcatcccat

SEQ ID NO: 87127 - DNA, 85 bp, Homo sapiens
ggagaggatcctgcatgctgatagtgctgaggcacctgccagctaaggagggcctgaggctatggcaggaggagcaggagaggaa

SEQ ID NO: 87128 - DNA, 74 bp, Homo sapiens
tggtgggcactcagcaccctctgcttaccacagccagattacttctctaacaggatcaccagtttgctccacaa

SEQ ID NO: 87129 - DNA, 83 bp, Homo sapiens
ctgtttgtcgagatttgaaagagctcagacatctgtcagagcaccataacatggtgtgggaagtgaagacaaatcagatgcct

SEQ ID NO: 87130 - DNA, 97 bp, Homo sapiens
gctgaaagagctcaaggcctcccaccccattccggaggacaaaggaaagtgtgctaataaggtcccaacactggtggaggagctgatcgcagtggag

SEQ ID NO: 87131 - DNA, 82 bp, Homo sapiens
gtcgtcacagacgatgatggccaggccccggaggctaaggacggcagcggcaagcctgcacgagctgtgtgctgccagagtg

SEQ ID NO: 87132 - DNA, 100 bp, Homo sapiens
ccggagaattcctggggcgcaccgccaagagctgggttgtcggacaagtaaccgcaagagcttgattgtgacctctagcacatcacctacactaccacgg

SEQ ID NO: 87133 - DNA, 127 bp, Homo sapiens
cttccaccgtgattgtgagtttcctgaggccttccctagccatgcttcctgtatagtctgtggaacgatgacacccccaaccatggttgtgaagatgctagcgacacatcgctgttgggagttcttc

SEQ ID NO: 87134 - DNA, 95 bp, Homo sapiens
gctccagattccatgttcatagtggctttccagttgtttgacaagagtggaaatggagaggtgacatttgcatgaaaagggacaaggagtaatag

SEQ ID NO: 87135 - DNA, 75 bp, Homo sapiens
ctgacgagcgcagcaaagagggctctatctggaaccaccaggccagaacacaaagcgtgaatccggaagaaaagt

SEQ ID NO: 87136 - DNA, 123 bp, Homo sapiens
tggaggtccctgagaaggaggggtatgagccacacatccccgaccacttgcggcctgagtatgggcagctggtggaatttttgaagaaaatggaatctcgaggccccctttcgtgcgacacgg

SEQ ID NO: 87137 - DNA, 96 bp, Homo sapiens
ggactaggccccaatttagtgggggtagccccttccaggatggtgctgctccactggtgcctgctgtggctcctgtttccactcagctcaaggacc

SEQ ID NO: 87138 - DNA, 83 bp, Homo sapiens
ccaaacacaccgtatttcatctgtagcattcaagacttcaaactggtttgaggaagcgatgaaggaggctcatgctgtagatc

SEQ ID NO: 87139 - DNA, 88 bp, Homo sapiens
tgagatgggccttagcttggagtttttatgatgatgtcacagtaccagtacgcaataactgtttggtattttgatgcagatgagagag

SEQ ID NO: 87140 - DNA, 83 bp, Homo sapiens
ggatcccgccccgcccggagccccggcccccacaggttaaacactttaagatgagaaaaattgatctctgtctgagctctgaa

SEQ ID NO: 87141 - DNA, 82 bp, Homo sapiens
ttgcttctcttctctcctccaaggtgacttaagagattaaaattaatttggttgctgttggttctgaacaaataatgagttc

SEQ ID NO: 87142 - DNA, 101 bp, Homo sapiens
agaccaccccacaggctcagcaaggacagcagcagactgtgaaattattcgatgacatgatgtatgaattaaccagtcaagccagaggactgtcaagccaa

SEQ ID NO: 87143 - DNA, 90 bp, Homo sapiens
tcgaggtgaatgggagcaagattggcccagacaacctgccttatgtccagatcttgaaggaatcagagatcattgatttcttcctggggg

SEQ ID NO: 87144 - DNA, 100 bp, Homo sapiens
aaagaaatagcgtctgagatcataggattactgatgctggagggtctactgacattcagggatgtggccatagaattctctcaggaggagtggaaatgcc

SEQ ID NO: 87145 - DNA, 75 bp, Homo sapiens
atgactccgattcgtgaccctcagcgccggtgcatgtcgatggacctggtggccttagtctttcaggtggaacgg

SEQ ID NO: 87146 - DNA, 74 bp, Homo sapiens
tcattttactgtcaagacatttcttcggcattctgcaacagggagtcgtcgcatggtggatgtcatggacgtga

SEQ ID NO: 87147 - DNA, 75 bp, Homo sapiens
ctgcaagcaggcaacctgaatacagatgcaaaatccacaagtattcaagtgattgttaaagagggaggcctgaag

SEQ ID NO: 87148 - DNA, 90 bp, Homo sapiens
aaaagagacctctacttagctcagcaattcttaccttatgtccagctcgccgctgtccaagaaacgtcgcgtgtccgggcctgatccaaa

SEQ ID NO: 87149 - DNA, 75 bp, Homo sapiens
tttaattttagggtcctttatatagaagggagagtagtcttaaaatccttgcacgtttgatgactgccaaattct

SEQ ID NO: 87150 - DNA, 50 bp, Homo sapiens
gtcgtggcggcgggcgcccagcgcgtgcaaaggcgccagcagagggagtt

SEQ ID NO: 87151 - DNA, 100 bp, Homo sapiens
gaggcagcggctggaggagcgcgagcggcggtttccttgcccggggccgcgggaaggccgaccgactgccgcggtgtgaatcatggcaatacagtgaaag

SEQ ID NO: 87152 - DNA, 50 bp, Homo sapiens
ttccagaaatctgaagctcggaagagggagacggtggctcagggagtaaa

SEQ ID NO: 87153 - DNA, 101 bp, Homo sapiens
caccatgtacacagcctgtacccttctgctcctttcctggcagcaggggtttcaatgggaggacatggagcagagtaaccctgcctacaccatcagtgctg

SEQ ID NO: 87154 - DNA, 101 bp, Homo sapiens
agtggatgaacatgtgcttggtgtcgtttttccttgagctgaacgtcttgcaacagtggccgcacgcataggtccttccggccagacttcgtgctcatccg

SEQ ID NO: 87155 - DNA, 82 bp, Homo sapiens
cggcgcggcagcggagggacggcagtctcgcgcggagaactacgatgacccgcacaaaacccctgcctccccagttgtccac

SEQ ID NO: 87156 - DNA, 116 bp, Homo sapiens
agcttcgtggcgtccgcgtacgcgagcggccgcaaaggcgcggaggaagcggagcggcgcgcgcgggacaagcaggatgatttgagacaacatttagataaatctttggaagagaa

SEQ ID NO: 87157 - DNA, 82 bp, Homo sapiens
ctggaagggatgtcgtctcagcagtgctcgggcgcaggctttatcctgtggataaacgcagagtgaacgagtttggggagtc

SEQ ID NO: 87158 - DNA, 82 bp, Homo sapiens
ccgcgcgcagggcctgcagcgggagctggacggcgagcgcgagcggcgcgagaaagcagccagataagctggtggtggtatg

SEQ ID NO: 87159 - DNA, 100 bp, Homo sapiens
ctggccccgacagaacgaaaagaagccctccgagaataaaagccgccctcattctaggggagaatataatgtttacagcacctttcaaagtcatgaaccg

SEQ ID NO: 87160 - DNA, 109 bp, Homo sapiens
caggcaggaggaggacagttacgagatcttcatctgtcacgccaacgtcatccgctacatcgtgtgcagggagtaccctgacttctaccggaagctctacggcctcttg

SEQ ID NO: 87161 - DNA, 82 bp, Homo sapiens
agctggcgtcggacgcgggcatcttcttcacccgggcggtgcagtgggtgggaggacgctactcgctgtggtcggccatcgg

SEQ ID NO: 87162 - DNA, 51 bp, Homo sapiens
ttgcgcgtggaacggctgcttttggaagagccccacagtcttcgttacaac

SEQ ID NO: 87163 - DNA, 100 bp, Homo sapiens
tgccgtctcctggctgctgcttgcatataccatatactccttgacgacagggactaccaccttcaccttcatgcccacaaggtgtcacactgcaaggctg

SEQ ID NO: 87164 - DNA, 95 bp, Homo sapiens
tcattgattacctctcctacaactgaattgcagcatcctgaggttagcattacacttctcccagtggagcccatgacttctgatcaggacgctaa

SEQ ID NO: 87165 - DNA, 101 bp, Homo sapiens
tggaactgagcacctcccggcccccccagcatctaggaggggtgaaaagggagcctggagctgttggtcagatgggcagccctgggcagcagggggctagc

SEQ ID NO: 87166 - DNA, 75 bp, Homo sapiens
agcttcgcagtctggaaagctttaggagttcacagttattgtccttgtgaacttccttgaagatggcagcatgtc

SEQ ID NO: 87167 - DNA, 74 bp, Homo sapiens
gtttcaacaaccctgacagagcagtggagtatcttttaatgaaatcaatgtggactgaacataaatcacctgat

SEQ ID NO: 87168 - DNA, 100 bp, Homo sapiens
gaaatttggacaaatccaaagttctcgtctgcatttgtggaccagtgccatttacagaacaaggagtaagaggtctctttattactatccacgatcgagg

SEQ ID NO: 87169 - DNA, 75 bp, Homo sapiens
gtcgactgcccagagtccgcggccggggcgcgggagggctttgttcgcgggggtcacagctctcatggctgcagc

SEQ ID NO: 87170 - DNA, 75 bp, Homo sapiens
cgggcatcgggcaggaactgggcgccggcgcttacagcatgagacgaagttatacggaagcgtctcctcattgat

SEQ ID NO: 87171 - DNA, 98 bp, Homo sapiens
ataagatcaatgccctcattaaagcagccggtgtaaatgttgagcctttttggcctggcttgtttgcaaaggtcagaaagcaacattgaatgcagaag

SEQ ID NO: 87172 - DNA, 99 bp, Homo sapiens
gagaaagcaatggatgaaatcaaatcccaagattatgtctactttgagaattcctccagcaacccatacctaataagaaggatagaagaactcaacaag

SEQ ID NO: 87173 - DNA, 90 bp, Homo sapiens
atggagcccgactcggtgattgaggacaagaccatcgagctcatggacctttattgggcttgaggtcacttcagggcatgcccagttcct

SEQ ID NO: 87174 - DNA, 98 bp, Homo sapiens
gggacttggatacctttcagagaaaaagaaagctgaatattcgccagtctgtgggtatacagaaggtatatttgcttacttaaactaccatgttcctc

SEQ ID NO: 87175 - DNA, 100 bp, Homo sapiens
ttgctggatatccaagcctctcagcttcggagaatggagtcttccatcaatcatatctcacaggagcagatgtctcaagtattagatgccatgtttgaaa

SEQ ID NO: 87176 - DNA, 50 bp, Homo sapiens
cagattccaacaacttggagaacaagaaaaccagtagattcccagacatc

SEQ ID NO: 87177 - DNA, 100 bp, Homo sapiens
gtgagtccgacaatgaagaccaggatgaggatgaggagaaagggagaggcagtgagaggaaacagacacggacttagaggtggtgttggaaaaaaaaggc

SEQ ID NO: 87178 - DNA, 87 bp, Homo sapiens
cagttatgtggacgagctgttaaaccagtgattcgcctttgccagtctcatctcgtgtctgctttgttaagttccatgatccagact

SEQ ID NO: 87179 - DNA, 100 bp, Homo sapiens
aagatgatcaggaagtcattcgcttccagaagaatcatggcacagcaaacataaatggccgtgtgttagctcagtgtaacattgatgagctgaagaaaga

SEQ ID NO: 87180 - DNA, 83 bp, Homo sapiens
tctccttcccgttctccaggtgtctgcgagcctctccacgcacgtgccctccaggcaccatgactcctgtgaggatgcagcac

SEQ ID NO: 87181 - DNA, 102 bp, Homo sapiens
cgaagagctcatctgaaaacaggaggcaatttcccatacctgtgcagaagtgcagaggtcaatctttatgtacaggctggagtgcagtgacgtgatctcggc

SEQ ID NO: 87182 - DNA, 97 bp, Homo sapiens
ttacgggaacagaaagaaaagtccgaaagagctggaaaatttgagaatggtgttgcagaaggaatggtggatccaagtctcaatcccatttcagcct

SEQ ID NO: 87183 - DNA, 75 bp, Homo sapiens
cggcaccaactattcgcggagctggaatgactggcaacccagggtgtacagcaagctgtgattcctgggaaaact

SEQ ID NO: 87184 - DNA, 105 bp, Homo sapiens
cgtgaccgagagcgcgaatatcgtcatcgttagaaggtcgtggagggcccccaagacccaacagagggatgccgcaaatgaacactcagcaagtgaattaatctg

SEQ ID NO: 87185 - DNA, 83 bp, Homo sapiens
gacaccagctccgaaatcaccaccaagcacggggtcactctggtgcccattgaggagttcagcccggagttcgtggagccccg

SEQ ID NO: 87186 - DNA, 74 bp, Homo sapiens
gtttcgagtgggacaaggattgatagaaagtgagggccccaaggctgttgcagctcctcgacctgatcggttgg

SEQ ID NO: 87187 - DNA, 51 bp, Homo sapiens
gagaggaaccacccagggctgccatccagtagagacggggttttaccgtgt

SEQ ID NO: 87188 - DNA, 100 bp, Homo sapiens
ccagaaggtatccgtggggcaggcagcctagatctgatgggggaagccaccaggattacatcatctgctggtgtctgatgatttgtgagcctcaagtgac

SEQ ID NO: 87189 - DNA, 80 bp, Homo sapiens
tccgctcctgaggcccccacaatgaagcagtcggacgcgtctccccaagaaagtgacatgaagtccgagaggagaccccc

SEQ ID NO: 87190 - DNA, 98 bp, Homo sapiens
ccggccacagcctgcagcggagcccacgagaggcagcgccatggcggagcagacctactcgtggtaaagagtgtgtacaacagttagctgaaaacacc

SEQ ID NO: 87191 - DNA, 50 bp, Homo sapiens
attcgttacagccagagattgcacgagtacacgagacaggattgagaaag

SEQ ID NO: 87192 - DNA, 96 bp, Homo sapiens
atgtttttgaccagaaaaccgacaaccttcccagaaagtccaagctcgtgttttcggctttgtgagaaaccttaccatcaaacacgatggccagca

SEQ ID NO: 87193 - DNA, 51 bp, Homo sapiens
agtagaatcacttgggttcattctattcagatatttggagttcttacaaca

SEQ ID NO: 87194 - DNA, 75 bp, Homo sapiens
cgggaacccaagatgggccaagtggtgtatgtgccggtcaagacgggctcgatctccaacctctatctgtatgac

SEQ ID NO: 87195 - DNA, 115 bp, Homo sapiens
tcaggaacagggacagcacctcatcccctggatgggggaccacaagatcctcatcgacagacagtctagcagtgcttccttggagaccctgttagcacttcttcaggcagaaggg

SEQ ID NO: 87196 - DNA, 83 bp, Homo sapiens
cccgggaggaaggaacgaggcaaggagctaaagcagcgtgcgttcagccctgggggtgatcagcccatgacctaaacctccag

SEQ ID NO: 87197 - DNA, 98 bp, Homo sapiens
ctgcgctcggcggacctgcccgcgatcaacatagataccctggagcgaatagccgggctggaacaggaggacttggtggaggcgcacggcaccttcta

SEQ ID NO: 87198 - DNA, 128 bp, Homo sapiens
gggtgacgctcgctccgctcgtcccgctcgtcatggcctacccgggatacggaggagggagcacagggctccctcttcaacgtggcgaccagtggccctgaccctgctgactttgtgcttggtgctgc

SEQ ID NO: 87199 - DNA, 74 bp, Homo sapiens
ccgacctgaaaccatctctgagcccaagacctaaataactgaagtgaagtgatggactccgatttggagagtag

SEQ ID NO: 87200 - DNA, 75 bp, Homo sapiens
ctcctcgacaccatggtggacacttttcttcagaagctggtcgccgccggcaggactccctggaggaaaagcgga

SEQ ID NO: 87201 - DNA, 87 bp, Homo sapiens
ttacgttgttaaagggaagctggacgagataataaaggatttaccgaggagcattatggatcctgggagaatactgtagtaccaagg

SEQ ID NO: 87202 - DNA, 98 bp, Homo sapiens
tgggaactctttccagcttgtgtctggctttcaacagacctcacatctttcttcttatgaaattataactccttggagattaactagagaaagaagag

SEQ ID NO: 87203 - DNA, 75 bp, Homo sapiens
gtccaggcctgacagctctgcggctcgggccctgagcatcctggtggggaagaagttttaagggaacaagctgga

SEQ ID NO: 87204 - DNA, 90 bp, Homo sapiens
acagttgagttgcctctgattggaaaagcagccagtgaaactgaaattgcattcttctgtgaagaagattataagaactacaaagctaat

SEQ ID NO: 87205 - DNA, 50 bp, Homo sapiens
ggccttactccttcacagatcggttatgaagttcatggaatggaaaaaat

SEQ ID NO: 87206 - DNA, 100 bp, Homo sapiens
ccgcagacacgggacccgcttcgaggccgctttggcgccaaatcctgagccctgggcgctgcctatggcacagccaagagcggtaccggcattgcggcca

SEQ ID NO: 87207 - DNA, 100 bp, Homo sapiens
caactgatgagacaattgcagagatcagcaggtcaaaaggtacaagattgttacttctatcaaatttttatggaaaaaaatgagaaagttggcgttccca

SEQ ID NO: 87208 - DNA, 83 bp, Homo sapiens
ctctacttcaacccgcaccttgtgttccggaagttccagggggatatgagactttctactcggaatatcctgagtgttgcgtg

SEQ ID NO: 87209 - DNA, 101 bp, Homo sapiens
ctcaaaatggccacacgcgtacccccgtagcggaaaaaccattgcagtgtcgagatggctatgaaccctgtgtaaatgaaggaatgtgtgttacctaccac

SEQ ID NO: 87210 - DNA, 100 bp, Homo sapiens
aacaggcttcggcgaacacaaaggaatggcggcgctagatagtaaggcatcagggaagatgggaatgcgagctgtagtctattatatgactaccaccatc

SEQ ID NO: 87211 - DNA, 100 bp, Homo sapiens
ggacgccggcggcagatgagagcatccaacgggcccttctagcccaatccagagctgtaccatggcagagacaagagaagaggagacagtgtcagcagaa

SEQ ID NO: 87212 - DNA, 75 bp, Homo sapiens
ccgggaggaaggaacgaggcaaggagctaaagcagcgtgcgttcagccctgggggacctgatgcccagaaccctg

SEQ ID NO: 87213 - DNA, 78 bp, Homo sapiens
ttggaccctgggaagatgcatgccaaaatctggttaatgaaggtgggagacctacctgatgcagatattaaacctcca

SEQ ID NO: 87214 - DNA, 74 bp, Homo sapiens
gcaggaccctaacgacaggcgcctccggcccatttacgatcctggtgtatagcctggaagcaggacgccgcctc

SEQ ID NO: 87215 - DNA, 100 bp, Homo sapiens
tttgattcagcaaatgggatcaatatttcacctgatgataagaggatttgacagctaaggatattgaagaaattattgatgagctcaaggctggcaaaat

SEQ ID NO: 87216 - DNA, 50 bp, Homo sapiens
cttcagctcatccggttcctaagaaacctccacagctgttgagaaaaagg

SEQ ID NO: 87217 - DNA, 98 bp, Homo sapiens
tccgatggttctcgaaggcccgcggcgccccgtgctgcaggcacttctggatccagctgtgtgatagccgcactaggaaatacctggagtcacagtgt

SEQ ID NO: 87218 - DNA, 74 bp, Homo sapiens
gtgcacacgcttcaagaggtctacattgagctgtttggtccagaggtgtccttctaaagctggtagaggtttca

SEQ ID NO: 87219 - DNA, 116 bp, Homo sapiens
aaaacactatcccagggagtgcaagcttagagcgtctggccaagaatcagaggaagtgggtgatgctgtggagtcttcaaaaagcccgaccactctggattacaaatttacaggag

SEQ ID NO: 87220 - DNA, 95 bp, Homo sapiens
agtgaaccggagaccccgaaaacggaagcgcagggagaaggaagaggtgtttgaaaaggtcaatgagctgaaggagaaaggcaacaaggccctga

SEQ ID NO: 87221 - DNA, 83 bp, Homo sapiens
cgccgaggcaccgaggcactcagaggagatggcagaaacggtggacacaagcgaaatggtcaacggcgctacagaacaaagga

SEQ ID NO: 87222 - DNA, 74 bp, Homo sapiens
gtggaataggtgtatcaagtaatggtgcaaagcctgaagtggggtggaagacaacccgtgagtattacaccttc

SEQ ID NO: 87223 - DNA, 51 bp, Homo sapiens
ctcagttctcgctggcagctttatagatccatcttcggttgtgaatccggc

SEQ ID NO: 87224 - DNA, 95 bp, Homo sapiens
ggggccccatcgagaaatggccgcgtcggcaggagtcagccagcctgaaagagcaggatggatcttgatgtggttaacatgtttgtgattgcggg

SEQ ID NO: 87225 - DNA, 75 bp, Homo sapiens
ttggctttgcctttctggacacagaagtatttgtgacagcgtggtaccatgcgacgacgctatgaagatgatggc

SEQ ID NO: 87226 - DNA, 100 bp, Homo sapiens
caagagtcagcctgacatggccattatggccgtcaacacctttgtgaaggaaggtgtcttgctgcaggtaactaatgaagaagtggtcaaccacagagtc

SEQ ID NO: 87227 - DNA, 82 bp, Homo sapiens
tatcacccccgcccctcgcctctgcccgtgagcgtgcagcttcaaaagatggtccatgatattaaaaacaatgaaggtggaa

SEQ ID NO: 87228 - DNA, 75 bp, Homo sapiens
gtcggagacatgggagacccggggtcggaaaaaaggcgacggcggattgacagaagtatgattggagagcccaca

SEQ ID NO: 87229 - DNA, 88 bp, Homo sapiens
aaatatgtcaccctgtgtgacaatggcgtgctgacctatcatcccagtttacataggcgtagaggctccggtgttttttgtgccaatt

SEQ ID NO: 87230 - DNA, 100 bp, Homo sapiens
tccttgcctgttcgcagtgctctcagtgctatcacccttactgtgtcaacagcaaggtcccaggtgtgacaccttcagcaggtctcagggaagatggcag

SEQ ID NO: 87231 - DNA, 82 bp, Homo sapiens
ccttgaagtatttggctgaggagttttcaatcccagtcgtcaaagtcctacattttagctttcagtgctgaacttccttctc

SEQ ID NO: 87232 - DNA, 100 bp, Homo sapiens
gcgctttgatttacagcagctgcagtatcctagaaggaaaacatcaccatggctacagaaattggttctcctcctcgttttttccatatgccaaggttcc

SEQ ID NO: 87233 - DNA, 98 bp, Homo sapiens
caaagtttccaggcatcagggctgcagcccaggagcctcaaggcggcccggcgggcgactggacggccggacaggttgtgggctgcacactgcagaaa

SEQ ID NO: 87234 - DNA, 82 bp, Homo sapiens
acaaaatggcgccctacagcctactggtgactcggctgcagatctgactgcagccatgagcagcaatgagtgcttcaagtgt

SEQ ID NO: 87235 - DNA, 96 bp, Homo sapiens
ttcttggacaatgagaggcatgaggtgcagctggacatggaaccccagggctgcctggtggctgaggctgaagccgacgtagcttctctgaacaga

SEQ ID NO: 87236 - DNA, 100 bp, Homo sapiens
acctacgctccttcatctaatccatggaaaggttccagcaacagatagaaatgctttaagttcactctggggaaagctggcctctgaaatcttaatgcag

SEQ ID NO: 87237 - DNA, 100 bp, Homo sapiens
aaggacccggtggaccttgggctgtggccgctgcaaacacaatgagccgtgctctccagacacaggcagctgtgagtcctgcgagccgggctggaacggg

SEQ ID NO: 87238 - DNA, 83 bp, Homo sapiens
ccaagttagatgccgattacccacttcgagtcctttattgtggaggtgacctccttgttgcagttggttcattcctgcagtga

SEQ ID NO: 87239 - DNA, 80 bp, Homo sapiens
cttgcactagcagcgaacgattcggtttttagaacttcagccataaaaatgggcagaattttccttgatcatatcggtgg

SEQ ID NO: 87240 - DNA, 99 bp, Homo sapiens
ctattctcgctgggatcttgatgcttgctttattagtgtttatactatggaaggatatcaatgcttacaattgtgaagagcccacagaaaagttacctt

SEQ ID NO: 87241 - DNA, 74 bp, Homo sapiens
attttactttctgacaatgcagcttctcttgcagtgcagattctactctgctactcaagtagtggtcactatga

SEQ ID NO: 87242 - DNA, 100 bp, Homo sapiens
atgaatctctgttccaaatgctttgctgatcgatctctttgggctgcctgacctccttgggtgcttgctattaattaacagactttgtggggaaaaaaag

SEQ ID NO: 87243 - DNA, 100 bp, Homo sapiens
atgcagaagttgactgctgagatgcctgaccagtttgaaatcgcaggagagggctgaacccccctcatcgtgtcaagtcaatctccatgacaactttcac

SEQ ID NO: 87244 - DNA, 82 bp, Homo sapiens
acagcggcctcagggttcaggcaatgcaaataagggaattggctcgggaaaaggtaatgcgagaagttaaagccttagccaa

SEQ ID NO: 87245 - DNA, 100 bp, Homo sapiens
caggcctcaggcccagacttgggtgttacaggaacagtgtggcctctctggaactctgcagaccaactgccgtggctcttgtcaggatggtgaagctgtt

SEQ ID NO: 87246 - DNA, 90 bp, Homo sapiens
tggtccggggacagcgcgccggtcgagctgattctgagcgatggaagtatatattcaagcccaggactgtatagtaaaacaatgaccccc

SEQ ID NO: 87247 - DNA, 100 bp, Homo sapiens
gaagaatcacgttattgaagacatcaagggaaaatggggtgaggaagattttgaagacaatcgtcacttatacaggcttacgagaggccccagaaacatt

SEQ ID NO: 87248 - DNA, 98 bp, Homo sapiens
gcgtctgaataaaatggagagtgaatacatggcgcaaacacagtccacaaatcctcactatggatgggctcattgaggacattaagcatcggcggtat

SEQ ID NO: 87249 - DNA, 115 bp, Homo sapiens
agatgcaaaacttaatttcatccacaaatcaaatctggatggaacaaatcgcatgctacaagtgaaaactgatgagaaactgaatgtgtctgatgagaatacagcaagttgccct

SEQ ID NO: 87250 - DNA, 50 bp, Homo sapiens
gatccacttccacttaatgaatgacgcaaacatgcagatctttgtgaaga

SEQ ID NO: 87251 - DNA, 50 bp, Homo sapiens
ccccgttcaggaattgcagcattcaggatcagttcttaagagcagccccg

SEQ ID NO: 87252 - DNA, 100 bp, Homo sapiens
gtgcagacatctacaaccttcgatctcctgacgagtaaacctagcctttaagcaacctggaaagaggctagaacaccaaggaattagaattgaatttgta

SEQ ID NO: 87253 - DNA, 74 bp, Homo sapiens
aggcctgcacggacggtgttggttgggatgccagcctgaagccaaaagtagaatgtagtgtggtgacagagttc

SEQ ID NO: 87254 - DNA, 100 bp, Homo sapiens
catggctagagactgccgggactggtcagatgaacccatcaaagagtgcgggctgggttacgacccctacaaccctgagctgcccaagccccccgcgcag

SEQ ID NO: 87255 - DNA, 125 bp, Homo sapiens
agacaatgccatcattcggcctctacccaaagtgaaaagactgctgtcagatagcacttgccttccccatattattcagaactcaacagtgacaattgaggaattccactgtaagctccaagaag

SEQ ID NO: 87256 - DNA, 98 bp, Homo sapiens
gggggtgaagcttgtgcagcgactggggctgacattcctgaagccgaaggtggcagcatggaggtgcacattcaggttcccgagcacaaacatcaaga

SEQ ID NO: 87257 - DNA, 83 bp, Homo sapiens
agcgggcgccccgtcaaaatccgaaagattcgggccagagacgacaacccgggcctccgagcttccccgggcgctgcctggac

SEQ ID NO: 87258 - DNA, 87 bp, Homo sapiens
gaaggctatttcgccgctggcgtcaggactattttcacgttttaatgccgagaggtcttgggcgtctttggtactggcttttttagg

SEQ ID NO: 87259 - DNA, 91 bp, Homo sapiens
ccatcttcgaacttagacttccggaaggactttggcgaggactgtgccctgtccacggtgcctcctgcatgtcctgctgccctgagctgtc

SEQ ID NO: 87260 - DNA, 82 bp, Homo sapiens
ctcgctctcgggcggggcggcggcgacgcggacctgcggactagcgaacccggagctgtgagaaacgaccgaaacaagaaga

SEQ ID NO: 87261 - DNA, 100 bp, Homo sapiens
ccgattatgtccattgttctcttggagcagctggtcatcatggcaattaagttggaatatgcaaggttggttaagttggcccaagaagacaccccaccag

SEQ ID NO: 87262 - DNA, 82 bp, Homo sapiens
gccaaggaaaaactggagagcttcatcaaaaatagtgatagctttgataagtatagacacgtgtggccgtttacgctgtagg

SEQ ID NO: 87263 - DNA, 50 bp, Homo sapiens
gttcaccctgaagacacccagcttgcaaactgaaaatatggtccactaac

SEQ ID NO: 87264 - DNA, 101 bp, Homo sapiens
cgagaggcctccaaaaccattcccgcggagaatcaactctgaacggaaagctggcagctgtcagcaagatttgttagcatcagtgacctcctggtaccaaa

SEQ ID NO: 87265 - DNA, 101 bp, Homo sapiens
gccacccaggtgtaccccaagctgtacttgtcacctcgaattgagcacactgctgatggttcttcagaactcaggaatcgtgttgcatgcattgtttctac

SEQ ID NO: 87266 - DNA, 100 bp, Homo sapiens
gctgttttccaaagttactgcatcattttgtatcccaccagcaatgaatgagcgttccagcttctccctttctgcaccagtggagacttcgtgtccccag

SEQ ID NO: 87267 - DNA, 83 bp, Homo sapiens
ctctttcagcgatatgaagttaaaaccagttcaaaagaatgctgaaccgggagctgacacacctctcagagatgagccgatca

SEQ ID NO: 87268 - DNA, 100 bp, Homo sapiens
caccgccaaccccttcgagcaagacgtgggttaatccctatatcctgaagaagaacatgatcctcatgacaaatcatttctatgcagcgatcttgggata

SEQ ID NO: 87269 - DNA, 99 bp, Homo sapiens
tcttgcacgtggccgctacctacgggctcccaggagttctcttgatcacaacaactttccccaaggatccagtttacactttttctatttcgcaaaatc

SEQ ID NO: 87270 - DNA, 97 bp, Homo sapiens
ctctatttcctctgctatatcctccctcagaccgccccgcaagtactcaggatcgacttcaaatcatcccaacaccagagaacactaaatgacagtg

SEQ ID NO: 87271 - DNA, 100 bp, Homo sapiens
acatggccaaggggtccttctactcctaaggaatgtgtgtggttcataactttaaaggaacgcaaggatctccttccaaacccaagcctgaggatccccg

SEQ ID NO: 87272 - DNA, 50 bp, Homo sapiens
gccggagcctagaagtcagctcacgcgaagctgcccccagacagctgtcc

SEQ ID NO: 87273 - DNA, 50 bp, Homo sapiens
agcatcccacattaagtcaacgatggagactggaaggtgaccattgtcac

SEQ ID NO: 87274 - DNA, 88 bp, Homo sapiens
ggcgtctaggggagcgaaggctgaggtggcagcggcaggagagtccggccgcgacaggacggtaaagtcagtgataaatcttttgttt

SEQ ID NO: 87275 - DNA, 100 bp, Homo sapiens
agaagaggaagaagcagaactgggcagggatttcaaggatttggatttggagatggtggcttccagatgtcttttggaattggggcatttccctttggga

SEQ ID NO: 87276 - DNA, 88 bp, Homo sapiens
aggcaggacctacacgcatctttaccagcaatacccacagttctgtggtgttacaggtaagaagcgcaattccacactctacataacc

SEQ ID NO: 87277 - DNA, 75 bp, Homo sapiens
gtctctgcacctcgcgccccagcagagccagtcttggtgctctgtgttcacctggttcatctgaggagctgcatc

SEQ ID NO: 87278 - DNA, 95 bp, Homo sapiens
cccggagcacccaaaacgctggggccaagtcagcgaggcctacgtgagcctcctaggttctaagctggtctatgtccatcaccttcttggagaag

SEQ ID NO: 87279 - DNA, 100 bp, Homo sapiens
gcttgccctggtcttgctcggccgatgaagtgcagaggtttttttctggcggagctaaatgaggtccttggagaggagcagaaggcttcagagaccccac

SEQ ID NO: 87280 - DNA, 100 bp, Homo sapiens
gcggccgagactctggcctgcagtcgccgccgccgccgccaggagcctgtgttggaagagatggtgatgggcctgggcgttttgttgttggtcttcgtgc

SEQ ID NO: 87281 - DNA, 90 bp, Homo sapiens
gtaaagaaaaggcttggcagacattcatcattgacttactattgcactgtcacagcaatgtatgctgatggtagcatatgtttagatatc

SEQ ID NO: 87282 - DNA, 100 bp, Homo sapiens
gataaacgaggggctggaacacctcgccaaagcagagaaatagctgctgagaactagccctagacctctgcgtgagggttcttctgccgaagacatcacc

SEQ ID NO: 87283 - DNA, 49 bp, Homo sapiens
agtgttctgtggccctgggggagggctctgggcattccagccaccgaat

SEQ ID NO: 87284 - DNA, 100 bp, Homo sapiens
caccagtgctgccatgctggccccaggctgtgagttggacccagaccaagaagtggtgaggacaaggcctgaaggcttcgccgtggcccagtgcataaac

SEQ ID NO: 87285 - DNA, 100 bp, Homo sapiens
cagattcgcagtggtcgcttcttctccttggtgcccaacaaccagcatgtgaaggtgcgcttcaaattcttctacctgctggagcccggcgtgcctgcgg

SEQ ID NO: 87286 - DNA, 74 bp, Homo sapiens
cactcctgggccgtccctgaaggagtctactcttcatcttgtgttgagacttcgtggtggtgctaagaaaagga

SEQ ID NO: 87287 - DNA, 100 bp, Homo sapiens
ttctcattatttgccagatctgcagagatcaaaacaagccctccaggaactcacgaaaattgcctaagaattatgacccaaaagttaccccagatccaga

SEQ ID NO: 87288 - DNA, 108 bp, Homo sapiens
gcccggtgcccgaggaggcagccaagctcgtagcctgccactccgtgcggggatatgagactttctactcggaatatcctgagtgttgcgtggatgtaaaacccattt

SEQ ID NO: 87289 - DNA, 90 bp, Homo sapiens
actgcccgatggtcttccgtaacctgcgggagaggtttggaattgatgatcaagatttccagcctcattgatgctactcacagagacgtg

SEQ ID NO: 87290 - DNA, 103 bp, Homo sapiens
cacagatccattacgcacatttaaagataccatctaccttactcaggaacttagtgatttggcccgtgaccctccagcacaatgttctgcaggtccagttggg

SEQ ID NO: 87291 - DNA, 87 bp, Homo sapiens
gaggtcctcaagtccctgctggagcactctctgccttggccagagaagagaacaggtttgacaactattcagccaatgtgatggtgg

SEQ ID NO: 87292 - DNA, 95 bp, Homo sapiens
accctgctccacgatgcggtaatgaatccagcagaaggacccagccgccgcctccatctctgacggagactgtgacgcccgggagggtgagtcag

SEQ ID NO: 87293 - DNA, 75 bp, Homo sapiens
ggctccgggtcttccagagcgtgaagatcaagatcggtgacagagctgaatgaacctctctccaatgaagatcga

SEQ ID NO: 87294 - DNA, 90 bp, Homo sapiens
ccattcttcttatagtctatggtagtttcaggtctcagctgagtctgctctgatcacccaacaagacctagctccccagcagagagcggc

SEQ ID NO: 87295 - DNA, 75 bp, Homo sapiens
tgcgtccgtctgcgacccgaggcctccgctgcgcggtctcctccgggctggggctgagcaagccctcggagtgac

SEQ ID NO: 87296 - DNA, 100 bp, Homo sapiens
ctggggcaccatccccaaactgcccccaccaggacgctcccctttggctcagaggccactcaggcgccaggtggaattcccagaggcccgaatctatgag

SEQ ID NO: 87297 - DNA, 83 bp, Homo sapiens
cttcaacaagaggacccaggagaaattcgccctcaaactgctggagtacttagggaagggcaaaagcatcgtggatgtggggc

SEQ ID NO: 87298 - DNA, 83 bp, Homo sapiens
ctctgccatcagcaggaagcttggagacatgaggcttgggcactgtttaaaggaaagttccgagaaggcatcgacaagccgga

SEQ ID NO: 87299 - DNA, 100 bp, Homo sapiens
cttattcagaatgtcccaacaggtcagagatcagatctcgctgtcatggtctgcggcaagtaggaatgacttcaccctacagctacccaaactgcacctg

SEQ ID NO: 87300 - DNA, 96 bp, Homo sapiens
ccgcgggcaaggccggcctggtcattggcaagggcggggagaccattaagcagctgcaggcactcagaatggtccagcgtttgacataccgacgta

SEQ ID NO: 87301 - DNA, 50 bp, Homo sapiens
ggatcaggcaagaaggaattcagggctggagtgcggtggtgtgatctcgg

SEQ ID NO: 87302 - DNA, 75 bp, Homo sapiens
aaccgccttgaggatctttctgcccgcctgagtgatcttgaaatgaatagggtccccagccccaccccagcccca

SEQ ID NO: 87303 - DNA, 100 bp, Homo sapiens
agaaacttttgcccttatcagtaacacctgaggatggattggatgctttggtatatgatttggattttcctgccttaagaaaaaacaaaaatattgacaa

SEQ ID NO: 87304 - DNA, 74 bp, Homo sapiens
aaaaacgtcaacaacagttttacgaataccctctaccatctgctttggtcagggtgccgctcgaggatttaaaa

SEQ ID NO: 87305 - DNA, 80 bp, Homo sapiens
gcacttcagtcggaaagttggaacctctgacaagaccaagtactaccttcaagggtctggaacagaatctgacagtgatg

SEQ ID NO: 87306 - DNA, 90 bp, Homo sapiens
gacgacgaggagcagggcctgactgcgcaggaagacagtgacccgcccattcatgaaagtctcagcatagaaaatacattgtgggcaagc

SEQ ID NO: 87307 - DNA, 100 bp, Homo sapiens
gaaagaatacatcaagattctgaatctggtgatgaacttagcagcagctccactgaacagataagggttcgagaacttgtcttggacaattgcaaatcaa

SEQ ID NO: 87308 - DNA, 100 bp, Homo sapiens
ctggctgtggtcggtgctggcggcggcgcttgggctctagaagagcaagttagtaccttgtaccaaaacatcaaccttgtggagccaagattaattcagc

SEQ ID NO: 87309 - DNA, 125 bp, Homo sapiens
tttatcctcctggccatcattgtcatcatcctctggaggcagttctggcagaaaatgctggagaagattcgggaactggagcctctcctctgtcacagtgacaatccatctcagctcatctggac

SEQ ID NO: 87310 - DNA, 108 bp, Homo sapiens
gaccaggatgcaggatttctggagcttgttaactttttcatctgatcttgtggatgtaaaggcaccacaccaaccccgtgggcactgagtggcggtggaagatggacc

SEQ ID NO: 87311 - DNA, 90 bp, Homo sapiens
cctctttgggttcgtgagatttcatgaagatggcgccaggacgaaggccctactgggcaagggccagctctcaatgttgcaagaaaaaat

SEQ ID NO: 87312 - DNA, 100 bp, Homo sapiens
acgtcatgtcgggtaagaagagccagccctccatgtacgagcagctccgagacatcgctattgacaacatctgcagtgatggtcctttctgccggatctg

SEQ ID NO: 87313 - DNA, 75 bp, Homo sapiens
tgaactgaaacggattgccagagaattggcagaaggagctggagcagattttgtcatgctgggaggaatgttttc

SEQ ID NO: 87314 - DNA, 96 bp, Homo sapiens
tgtttctggtgtcttgacaaatacctgctccatctcaaccagaaaaatggagtgctggcatacattgggaattttcgcctgcttgcagagctttcc

SEQ ID NO: 87315 - DNA, 86 bp, Homo sapiens
tgccggctcccctctcaggacaacccagatgtgcaacaaagtgcgatgggactggtgattgcagctggaagtgcccatgaccgagc

SEQ ID NO: 87316 - DNA, 100 bp, Homo sapiens
cggcgcaggcccagatgcgcgcgatgctggaccagttgatgggcacctcccgggacggaagggaaaaggccgaggcatcagcgtgtgaagaccgcaaaga

SEQ ID NO: 87317 - DNA, 101 bp, Homo sapiens
tcttttcttggcttttaaaaagattcgtctaaaacgttgtgtgacgtgatcctcatggtccaggaaagaaagatacctgctcatcgtgttgttcttgctgc

SEQ ID NO: 87318 - DNA, 100 bp, Homo sapiens
tttggcagacatcgagaagcataatgacattgtggacagtgacagcgatgctgaggatcgaggaacgttgtctgaacactatggctatgcatcctccaac

SEQ ID NO: 87319 - DNA, 101 bp, Homo sapiens
gaagctaataaagagaaccgagaggcacaaatggctgccaaactggaacgtttgcgagagaaggttatattcccagaggatgtcagtcccaaggaccagta

SEQ ID NO: 87320 - DNA, 74 bp, Homo sapiens
ctgtcttggaggacatcagaaggaagagagaaaagctgctgataacaaaattaaaaaactaaaacttcatgcga

SEQ ID NO: 87321 - DNA, 100 bp, Homo sapiens
cggagggcgagcggacctccctggagaagggaaaggtggcccagacagcgtgtatgtcagcttgcaagcatttagccacatccttgatgcaacttttgtt

SEQ ID NO: 87322 - DNA, 100 bp, Homo sapiens
gaaacaaatcttgaagcacctctccagtactatactggcaattgctggagaagattttgcaattgttgcttctgatactcgattgagtgaagggttttca

SEQ ID NO: 87323 - DNA, 50 bp, Homo sapiens
gatgacctctctggtgctgacatcaaggtttccttaggaaataaagaaag

SEQ ID NO: 87324 - DNA, 75 bp, Homo sapiens
tggaggattggaatctgatgcatcatctgcatcagatgctcccataatactctcagatagtgaagaagaagaaat

SEQ ID NO: 87325 - DNA, 100 bp, Homo sapiens
cttcagccaaagaaacaagccgtggaataggtgtatcaagtaatggtgcaaagcctgaagacccagatgatgtggtaccagttggccaaagaagagcctg

SEQ ID NO: 87326 - DNA, 82 bp, Homo sapiens
ttctcaggacaccatccgttcaattggtacaaagctggctttgccacaaatgtcagtgcagaactctggctggccccaccaa

SEQ ID NO: 87327 - DNA, 107 bp, Homo sapiens
ggagccggagctgggcgcggattcgccgaggcaccgaggcactcagaggaggctgaaggtgatgtggccgccctcaaccgacgcatccagctcgttgaggaggagtt

SEQ ID NO: 87328 - DNA, 98 bp, Homo sapiens
gattggaccctgtaaaagctgtaaaatgataacagagggaactctaatgatccaggacaaagaagttaccctggagtatgtatcaagcctggattttt

SEQ ID NO: 87329 - DNA, 100 bp, Homo sapiens
ccgcagtctgaggcggcgggcaggccccggtggcaaaggagatattgaagcacagattcgagaaattcaaggcaagaaggcagctcttgatgaagctcaa

SEQ ID NO: 87330 - DNA, 48 bp, Homo sapiens
gaacatgccacggccaacaaacaggttatggtggagaattcagacttt

SEQ ID NO: 87331 - DNA, 112 bp, Homo sapiens
agcaacgaaaggaacgcaagaacagaatgaagaaagtcagggggactgcaaaggccaatgttggtgctggcaaaaagaggcatttcatccttcatgaagccattcaggattt

SEQ ID NO: 87332 - DNA, 90 bp, Homo sapiens
gttttccttacatctcaatgaagcaagggactatgaaggtgtggtggacacaggcctattcatcaacatggctgagagagtctactttgg

SEQ ID NO: 87333 - DNA, 83 bp, Homo sapiens
cggagacgggcccgactcctccgacgccgatccggacagcggcacagaggagggagacaatgcagatcttcgtgaagactctg

SEQ ID NO: 87334 - DNA, 83 bp, Homo sapiens
gtgatgatgaagaaccgcagatccaattgacgagatgcctgaggctgccgtgaaatcaacagccaacaaataccaagtctttt

SEQ ID NO: 87335 - DNA, 100 bp, Homo sapiens
gagaggagcgacgaagagtactacgccaaggaggtttacaaaatagacatgccgcccttcttcccctccgaaaaattttccagttcatatgaagaggtga

SEQ ID NO: 87336 - DNA, 100 bp, Homo sapiens
aggccagagcgtggagcgctgcgcggcgcggcggccgggccctcgagacggggacgacgcaaacatgcagatctttgtgaagaccctcactggcaaaacc

SEQ ID NO: 87337 - DNA, 98 bp, Homo sapiens
gcgccgtggctccggatctcttcgtctttgcagcgtagcccgagtcggtcagcgccggaggatatgggccctcacattttccaaacctgtccatctgc

SEQ ID NO: 87338 - DNA, 71 bp, Homo sapiens
gggacctacaagtacctggaggtgcagtacgactgtgtcccctacagggccggtgagcccaacttcgatgg

SEQ ID NO: 87339 - DNA, 83 bp, Homo sapiens
caagaatctgcaggacttggtccgcggcatccgtaaccacaaggaggacgagcttccccgggcgctgcctggacaggcctgcc

SEQ ID NO: 87340 - DNA, 75 bp, Homo sapiens
ctcaagtgtccagaatttccaattacagacgacaaagtagcactggtatgatgcattgtgtattctccttcgtca

SEQ ID NO: 87341 - DNA, 101 bp, Homo sapiens
gtcatttctcttgagtaaatacctaaaagtgggcttgctgggtcagtttacgttgcgagacatgtatgagcaatttcaaaatatcatgaaaatgggcccct

SEQ ID NO: 87342 - DNA, 100 bp, Homo sapiens
caaatgggagcagcggtggaagcgaagtaaatggcatggggaaaatctgattgccacagacagaagaatgaaactggatgcctatttctcacaatacaca

SEQ ID NO: 87343 - DNA, 83 bp, Homo sapiens
tctggcacggaaacacccgtaccttacccaactctactgctgcttccagaccaaggagaagactttgcagttgtgcagcaaga

SEQ ID NO: 87344 - DNA, 98 bp, Homo sapiens
gctgatgaaacttgggactctgcaatagatacatggagcccatcagaatggcagatggcttatgaaccacaggaaaagaccagtgccctcagtctgag

SEQ ID NO: 87345 - DNA, 80 bp, Homo sapiens
ggtgggagccacctgtgtgatgatgcctgagttcagccctcagcaggtgagccaccagctgggcagcatcatggacctct

SEQ ID NO: 87346 - DNA, 98 bp, Homo sapiens
ttttgaaaaataaatggtcaatactctacctcttgctgagcctcagtgaggacccacgcaggcagccaagcaagggatatgggggacaatataacatc

SEQ ID NO: 87347 - DNA, 100 bp, Homo sapiens
tcccgcacctcggcctgcggcctcttctccgtctgctacccccgagtgtccagtgctgtgaaggcggaacttcgacaacatatggaaagttgatcatgtg

SEQ ID NO: 87348 - DNA, 51 bp, Homo sapiens
ttccaccattctgacccatgtcccaaggtcaaccagaatcaagatgtctgg

SEQ ID NO: 87349 - DNA, 88 bp, Homo sapiens
tccgttggccttcgtacccgtcttgattgagcatcctgaggttagcattacacttctcccagtggagcccatgacttctgatcaggac

SEQ ID NO: 87350 - DNA, 96 bp, Homo sapiens
ttggacttctcagcctccagaatgcagctcttcagtgggtcatctgtgtgtcacagcctcagaagaccagcgagatggctgccaacaagagtaagg

SEQ ID NO: 87351 - DNA, 98 bp, Homo sapiens
ctcggccgaccagggacctgcccgcctgcggctgctccggaatgctgcctttttatatggtcttggtttggtctacttccattataatgcatttcagt

SEQ ID NO: 87352 - DNA, 83 bp, Homo sapiens
ggctgcctgacacaggagagggccccagcagggccaccgggcggcaaggctactgcagcactggggtgtcagttgttggtccg

SEQ ID NO: 87353 - DNA, 100 bp, Homo sapiens
ttatgtgctacagtctgcggaacggagcagtatttcaatgtggagtttttacccacctcttgatgaaccatctattggaagtaaaaatgttgatctgtca

SEQ ID NO: 87354 - DNA, 100 bp, Homo sapiens
gacggccaagaccagcgcgagggccctgggcaaggcccgacagagcgtgtggcacccacgatcacaggaaacctggagaatcagacgacaagtattgggg

SEQ ID NO: 87355 - DNA, 100 bp, Homo sapiens
ttttctgttttgcctgaatacatgatttaaacaagagatttccacagaagagttcctcagcagaagggcataccgatgctgtccttgacctttcatggaa

SEQ ID NO: 87356 - DNA, 82 bp, Homo sapiens
gaagaagactcccccacatctggctggagctctcaaacactgctgtcctgcaccagatgcggcgggaccaggtgacagacac

SEQ ID NO: 87357 - DNA, 75 bp, Homo sapiens
gacaagaacccggagatgtgccgtgtgctgctgacccacgagatcatgtgcagggaatgcagagagcaaccaatg

SEQ ID NO: 87358 - DNA, 100 bp, Homo sapiens
acctcgtctgggctcgcggcgtctccggggaaagccgtggccccgagggcggatccgaggctcccctggctccagccctaaggtgctctcccagccgtcc

SEQ ID NO: 87359 - DNA, 72 bp, Homo sapiens
aaattgagaagaactcataaacttggcttcctcgcttctgctcctcaggttcaaaacattatttgtggctgg

SEQ ID NO: 87360 - DNA, 100 bp, Homo sapiens
agacagcagcgactagggctcgggcgccggcgagatgcctttgttcaccgccaaccccttcgagcaagacgtggccaaatgggcggactgttgaagtggc

SEQ ID NO: 87361 - DNA, 75 bp, Homo sapiens
catggcaagactccacctcctggtgaagaaagcaaacaatataatgaagatctggaacttgaagatgccattcat

SEQ ID NO: 87362 - DNA, 75 bp, Homo sapiens
cgcagccgccacctacccagtgaccatgatagggctcgtgcaatccgcttcagacaggatggtaacgaagccgtc

SEQ ID NO: 87363 - DNA, 82 bp, Homo sapiens
ggccagcctgtgggcctgaggcatacaggctacgtcattgagctgcagcatgttgtcaagggtctcggtgactgagctgcag

SEQ ID NO: 87364 - DNA, 100 bp, Homo sapiens
caagtatgtatatgaatgatggctatgcaccacctgatatcaccaactgatcctgctggccactttcatcaagtatggtatgataaccctcagagtattt

SEQ ID NO: 87365 - DNA, 50 bp, Homo sapiens
ttggctgcaggagcagctagcacaggtgtgaaggaattacaagtccagaa

SEQ ID NO: 87366 - DNA, 99 bp, Homo sapiens
gtggttcagagggtccagtcctgctccttctgcatggaggaggtcattctgccctttcttgggctgtgttcacgaagtgataccacaagaagccaagca

SEQ ID NO: 87367 - DNA, 88 bp, Homo sapiens
atttgagaactgtaaataccaagccttgaaagggaccatggtgcggcctgtgagatatggctattttggcaaagagaagcttaaggaa

SEQ ID NO: 87368 - DNA, 100 bp, Homo sapiens
gggagcggccaaccacgacctgacggacaccacccgggcgggagatgagtatgatgtatgtgccatttgtttggatgagtatgaagatggagacaaactc

SEQ ID NO: 87369 - DNA, 82 bp, Homo sapiens
ctcaagcctggagactcgcaacaagatcccctatgagagtcccatcttcagcagagtaatcaagatgattaccaactggttc

SEQ ID NO: 87370 - DNA, 74 bp, Homo sapiens
tctactgcttgttctcacccggttacaaagcatgagtttgaagacaataaagactttagaagacagctttccat

SEQ ID NO: 87371 - DNA, 75 bp, Homo sapiens
ggggaagatttacctagctgccagatccatccttttacaatccctgctattattcgtccattcagcgtattgaac

SEQ ID NO: 87372 - DNA, 99 bp, Homo sapiens
cgtgccgcggcggccgagcgcaggtgtcgactgcaatggccgaggagatcaggcgcctctctgtactggtggacgattaccagatggacttccaccctt

SEQ ID NO: 87373 - DNA, 100 bp, Homo sapiens
cagagttcttctacccagagctggtgaagaatatccgagggaaggtaaaaggccttcagcctggagataaggatcagctcatcaggaactcaggatctgg

SEQ ID NO: 87374 - DNA, 50 bp, Homo sapiens
gcccgtccccctgccccgttcacaatgccaccagcccctcgggttccaag

SEQ ID NO: 87375 - DNA, 75 bp, Homo sapiens
gcagaagctgcttccaggatactacatggatgccccttacctagacctggccccctacatgcccgactactacaa

SEQ ID NO: 87376 - DNA, 75 bp, Homo sapiens
caagtacactgaaattcatcctgagatgagggatggtcttttagtaagaacaaaaactgaagatatggtatctca

SEQ ID NO: 87377 - DNA, 83 bp, Homo sapiens
ctgaaattccgctttgacaagctcagccatgccagctctggtgcggtatcgagaaccttccctgcgaacttcagaggaacttc

SEQ ID NO: 87378 - DNA, 90 bp, Homo sapiens
cacgagcagcgccctgggagccctcacgagtcccgtgtcagagatggctttggattccccgttctgtgtgctgctgtctggctcctgaac

SEQ ID NO: 87379 - DNA, 100 bp, Homo sapiens
gaaggactcctgaaccagctcgtcctggagcacctgcagctggcgcctctgcagtggggactgaaatgcaactgcagaagcaacatgtgaccttttagag

SEQ ID NO: 87380 - DNA, 98 bp, Homo sapiens
catgaaatcctccccacttatgtttgtaaatgtgagtggaagccatgaggccaaaggcagttgtattggtgacttaagagattaaaattaatttggtt

SEQ ID NO: 87381 - DNA, 109 bp, Homo sapiens
ggacccgggcagcacggagagcctgcaggagaagcccatggagatcgacaatgcagatcttcgtgaagactctgactggtaagaccatcaccctcgaggttgagcccag

SEQ ID NO: 87382 - DNA, 99 bp, Homo sapiens
cgcctcagcgggagaggagtctccaccaggactgaccgctgccgcccagcacgtccaggatttgaatttgttgaaatgagcagtcgtaaatcaaagagt

SEQ ID NO: 87383 - DNA, 96 bp, Homo sapiens
cggctgcagcagcaagtcccatcggaggacctccctgccctgtataccgagggaacagctcaccaaagctcatcgacaaggacacatggtgaaagt

SEQ ID NO: 87384 - DNA, 98 bp, Homo sapiens
ggggatgaagcatttcgagaactttctaagatggatccagagggaagcaaattgttggatgatgcatccccacgctcatcatgctggacccgcagggc

SEQ ID NO: 87385 - DNA, 75 bp, Homo sapiens
ggaggagaccggaccgaagacggaccgtgccgggaagaggtcctgatccggttccccatgcagaggaacttggtg

SEQ ID NO: 87386 - DNA, 78 bp, Homo sapiens
agcgctgcagtgaattttccccccaaactgcaataagccgccttccaagtcgtcattgaattttgagaagcattctga

SEQ ID NO: 87387 - DNA, 80 bp, Homo sapiens
gaacagcgtaactccagacatggttgctatcaagatcatagataagacccagctggatgaagaaaacttgaagaagattt

SEQ ID NO: 87388 - DNA, 100 bp, Homo sapiens
aaagtaagaagaataagagatgtcagttgcactccttagatacgcacaagccaaaacctttgggttggactaaatgctcttccttcagaggattatccgg

SEQ ID NO: 87389 - DNA, 75 bp, Homo sapiens
ggcatggtggctcaaattgatgctaactggaacttcctgaattctgcttggtcagaatcgtgatggcattgtgtt

SEQ ID NO: 87390 - DNA, 50 bp, Homo sapiens
gagaaaaccagttaaaaatgttgcctaacctaccgtatgtgaacgggagc

SEQ ID NO: 87391 - DNA, 98 bp, Homo sapiens
cttcattggccacctacagaaacaaaatgtcaacaaattgatggacttatcagatgtagacttcctagatgattcttcaacggagagtttgcttctga

SEQ ID NO: 87392 - DNA, 82 bp, Homo sapiens
gaaagaagatgcagcacaatgttctagtagcggaggtttttcacgactgaaaacaacatagcaaaataagccaagatgtctg

SEQ ID NO: 87393 - DNA, 97 bp, Homo sapiens
ttacttacctggcccaggaggatgggcccgttgtgatatgcacccaatgtccagggagcgtgcaaaatttgtcaaaagtggccttttattgtaaaac

SEQ ID NO: 87394 - DNA, 100 bp, Homo sapiens
aagaaacttcctcagtaaagcgctacaagatcaagctgcagagaccattgaagctctgcatgcagcaggcctgaaagtctgggtgctcactggggacaag

SEQ ID NO: 87395 - DNA, 100 bp, Homo sapiens
cagcaccattcaggatgctggtttataccaaggacaggcttgggtggcaaattttgaaagacctcgaatgaatgcgaattctctgcttgcaagccctact

SEQ ID NO: 87396 - DNA, 100 bp, Homo sapiens
agttcttgggacaaacttcatttgctctggacttattggacaaaatgttgacattcaacccacacaagaggattgaagtagaacaggctctggcccaccc

SEQ ID NO: 87397 - DNA, 134 bp, Homo sapiens
tgccgctgtgctgcctggaagccctgccgctaaagaagggtcccttgctgtgggagacaggatcgttgcggtctgctggagtttgttggagttccactccagaccctgtttgcctgggtatcaccagcagaggc

SEQ ID NO: 87398 - DNA, 82 bp, Homo sapiens
gaatatgccaaggaaaaactggagagcttcatcaaaaatagtgatagctttgataagtaaatgaaattgcctttataaatac

SEQ ID NO: 87399 - DNA, 99 bp, Homo sapiens
cgctgctgggcacccacggagcctccggggctggggtcaactgctacatgccggccaatggcgagacggtgacgctgcccacaagccccagcatccccg

SEQ ID NO: 87400 - DNA, 86 bp, Homo sapiens
gcaccgacgtcatcatgctgaccaccaatcagatccgtaagtaagactttgaccccgacgcaggcttcagtgattgccgcggatca

SEQ ID NO: 87401 - DNA, 100 bp, Homo sapiens
gtccctgaagatgcctacccatgccgtgtgtgtggtgggagtcgaggcacatgtggacattcacaggtctgccatcatggatgttctcgcagaagcaaat

SEQ ID NO: 87402 - DNA, 99 bp, Homo sapiens
aaactcttggatctaaagaaacagttggctgtagctgaggggaaaccccctgaagcccctaaaggtgctggagaatctggtaaaagcaccattgtgaag

SEQ ID NO: 87403 - DNA, 95 bp, Homo sapiens
agagaaattttagcacaactccggacacttgttttccagtgtgatcttacccttaaagctgttctggcctataggaacaagacattttcagtaat

SEQ ID NO: 87404 - DNA, 82 bp, Homo sapiens
atcttcgactccttcccgacctactcgccgaccttcatccgcgaggctgggaggcggcagaatgcagccagaggagggcaca

SEQ ID NO: 87405 - DNA, 100 bp, Homo sapiens
actgctgcataatggagaacctctctacattccagtaacccagcatcaacaaagagagcattgtggatgtagaaggtgttgtgagaaaagtgaatcagaa

SEQ ID NO: 87406 - DNA, 50 bp, Homo sapiens
gaaatgggaaaactcgaaacagattttattgtctccagctttaagaccac

SEQ ID NO: 87407 - DNA, 100 bp, Homo sapiens
gtcatttctaagtactttctcctactccataaagacttcaattggttgaatctggcgatgtggaacccatggatatggagggctgactatatacaccatg

SEQ ID NO: 87408 - DNA, 50 bp, Homo sapiens
ggaattacactgtgatacgactgacttactatactggcaattgctggaga

SEQ ID NO: 87409 - DNA, 100 bp, Homo sapiens
ctcctgtcccaaaagaccatcctgctctcaactacaacatcgtttcagggttgatgataattagaagcatgctttccactgaacttcccgacaacatttg

SEQ ID NO: 87410 - DNA, 83 bp, Homo sapiens
catgaccgaggagagctctgacgttcccagggagttgataggtataatgggtctctcccaaatggcgatagaggaaggaggaa

SEQ ID NO: 87411 - DNA, 50 bp, Homo sapiens
cggggacttggggccgcagggaggtgcctgtgaagcatgtgtaccgtgtg

SEQ ID NO: 87412 - DNA, 100 bp, Homo sapiens
gaagcccgggaccgtttaaaaaactgaggtggagcacagtgaaagaattcaagatgccacctaatataaactggaaagaaataatgaaagttgacccaga

SEQ ID NO: 87413 - DNA, 74 bp, Homo sapiens
cacgctggacagagcccctgaagacctcctgacagtgagtgagactgccaatgagccccctcaagatgaaggta

SEQ ID NO: 87414 - DNA, 101 bp, Homo sapiens
cgccacttctactaccgcacctggcacaagatcaccaagtacatcgactttgatcatggtccagccctgctgggagttttctgccacacagatttgcggaa

SEQ ID NO: 87415 - DNA, 50 bp, Homo sapiens
cagcatcccacattaagtcaacgataaaagaagccaatttctggggtgct

SEQ ID NO: 87416 - DNA, 100 bp, Homo sapiens
gtcaaagagaactatcttgaaacatttatttccagtccaaagacagtcattttgtttactcattcagccctgttgcaggtcccaataaactcttcataag

SEQ ID NO: 87417 - DNA, 75 bp, Homo sapiens
gttcaaagagaccctcggaacgacgtggcccagtggaacatcgggagcctccggaccatcctggacatggtggag

SEQ ID NO: 87418 - DNA, 100 bp, Homo sapiens
ggtgatttccgcatttccaactgagcctttcaaaagcaaattgcttatgataatctctcagaaagatacatttcattccttttttcaacacttcagctac

SEQ ID NO: 87419 - DNA, 75 bp, Homo sapiens
tgttgcccgtggggtgcaaaagatcctgcaggactcatatccaggctcaaatatccagtgtctcaacaaaacaag

SEQ ID NO: 87420 - DNA, 100 bp, Homo sapiens
gtctgggcccttggcactccggtcttgggcgtctttggtactggcttttttaggggtctgcctggggattacccttgctgtggatagaagcaactttaag

SEQ ID NO: 87421 - DNA, 100 bp, Homo sapiens
ccctgcccccagggctggctgtttctgtgcttaaagccatcttccaggaagtgcatgtacagggtgtccgcaatgttgccagtgtctgtctgcagattgg

SEQ ID NO: 87422 - DNA, 100 bp, Homo sapiens
cttctgataactcaggatttacttgaaatgaaaggagattccaacctacttcaggcaagaaattatagagcagcttctatcaaatattttccacaaggag

SEQ ID NO: 87423 - DNA, 100 bp, Homo sapiens
gagctgcagcaagcgggagaccaggagctcctccaccaggccaaagacttcggcagcaccttggctggggtcatcgatctcgccgtggactggatgacgg

SEQ ID NO: 87424 - DNA, 75 bp, Homo sapiens
ccctggcgtcactggtgtccgggatgcgaagtacaaaactgcttcggctcattgacttagatttttcatttactt

SEQ ID NO: 87425 - DNA, 78 bp, Homo sapiens
tgggacccccaggaggtgaccctgcaggttagtggatgacagatgtgtggtgcacccagaggccggggaccttgccaa

SEQ ID NO: 87426 - DNA, 85 bp, Homo sapiens
agctctgtaaagaccccccaggagacgactgtgggaacagcgtgtgcctggggccaggaaggaatactgggagaatcttcggata

SEQ ID NO: 87427 - DNA, 90 bp, Homo sapiens
agctggggaacctgggcgtattgggcatcacagcccctggagtctactcttcatcttgtgttgagacttcgtggtggtgctaagaaaagg

SEQ ID NO: 87428 - DNA, 82 bp, Homo sapiens
tgaagacgttccttgaggaggtttgaaaaaatgtcaagccctccaacatcctagtcaactcccgtggggagatcaagctctg

SEQ ID NO: 87429 - DNA, 98 bp, Homo sapiens
ttgacatctgggaacaagcacaggcctgaaggggagcccaagggtgcacagcccctggctacggacctggcgcaggtggtggacgagctcatccagga

SEQ ID NO: 87430 - DNA, 103 bp, Homo sapiens
gatatttggagttcttacaacatggcagacattgacaagcctaatgggattgtttgaaaaacgtcgcttcaggaaattcctagtgtatgttgccaacttcgat

SEQ ID NO: 87431 - DNA, 82 bp, Homo sapiens
aatgtgttaaatttgaatggtgctggtgacccactcactccaggctatccagcaaaagacagatgcaccatcaggaatggaa

SEQ ID NO: 87432 - DNA, 50 bp, Homo sapiens
ggcggagcagacctactcgtgcatccacccaacccaccagtatcaccagg

SEQ ID NO: 87433 - DNA, 50 bp, Homo sapiens
tgccggcttcaccctcctaatgattgcaacacctgctcggtataccgtga

SEQ ID NO: 87434 - DNA, 100 bp, Homo sapiens
aaacaatccctcgcctccggaggcggcgaggagcggcggaacgtgctggccaaagcgctctatgacaatgtggccgagtccccggatgagctctccttcc

SEQ ID NO: 87435 - DNA, 75 bp, Homo sapiens
tttcaataacaggtcattgccgagaaaagcagaaggcaagattccaccggatgctacattgatttttgagattga

SEQ ID NO: 87436 - DNA, 83 bp, Homo sapiens
ggtggatgctcttcagttcgtgtgtggagacaggggcttttatttcagtgactgggtacctggatatgtgatcgagtattctt

SEQ ID NO: 87437 - DNA, 75 bp, Homo sapiens
tattggcaggccatcgatttagtaaagcagggcagacccttctcaggtgcagccagagagacactagcccactga

SEQ ID NO: 87438 - DNA, 78 bp, Homo sapiens
ctttcgataaaggttcactttttggaggctctgtaaaactggactttgctaccaggacttgctggcccctctggggag

SEQ ID NO: 87439 - DNA, 100 bp, Homo sapiens
agccactggctttgtcaaaaaggaccagttgggcaaggatgaaacaagtgaagatgctaactgtcttgctttgagtggacatgataaaacagaagcaaag

SEQ ID NO: 87440 - DNA, 101 bp, Homo sapiens
ctcaacgacacggtagagttctaccgctggacctggtccatcgcagggcatcttctctgcattcagtttcatccaagtcattccgggatttcttactagaa

SEQ ID NO: 87441 - DNA, 116 bp, Homo sapiens
cttgacggcttggacgaagatggggagaaggaagcgagactcatacgcaacctcaatggttgacatcatggacatatgtgagtccatcctggagaggaagcggcatgacagcgaaa

SEQ ID NO: 87442 - DNA, 98 bp, Homo sapiens
agctgctgatgtcagttaactctgagaagtcgtcctcttcagaaaggtggtttcagacaccctcacaggttttctaccatgcagcaactgaacatgga

SEQ ID NO: 87443 - DNA, 96 bp, Homo sapiens
atatccatagattggaatattggtgggccagcaatcctcagacgcctcacttaggacaagagctctttgttcaatgcctagccacctattcctaca

SEQ ID NO: 87444 - DNA, 82 bp, Homo sapiens
caacgatgaccagtccaggcccagcctctcgaatgggcacacctgtgtagttgctgatgtatattcaagatgagtggattag

SEQ ID NO: 87445 - DNA, 129 bp, Homo sapiens
attgatgtttttctgctgacaggacctacaccttctgatgtcttcaaacagtactcacaccttacaggtctggaggcggctggtggaaatccaattccccgcggagcatggctggaaggagtcgttgct

SEQ ID NO: 87446 - DNA, 75 bp, Homo sapiens
gaaatttttgggaaggtgcaaggggtgtttttccgtaagcatactcagaaaaagcagagagatcttgctaagatg

SEQ ID NO: 87447 - DNA, 100 bp, Homo sapiens
cggggggccacagcaagaggtacacatgctgtggacaccagcacccccagacctgacccttggggaagctctggcaggctgccctgagcacgctcaaccc

SEQ ID NO: 87448 - DNA, 87 bp, Homo sapiens
cagcagccgccggagcccgagtggatcggggacggagagagcacgagcccatcaggtgaatcacaagcctttgagaacagcctgagc

SEQ ID NO: 87449 - DNA, 82 bp, Homo sapiens
cactacccttatcccggagagctgacaatgatgaatctcagtggtaagttttcttcatacagttcttttgtgtgacaaactg

SEQ ID NO: 87450 - DNA, 83 bp, Homo sapiens
ggaccaccctgggcacagcaggcatcggagtgtggacgaatgtggaacctcgctctgtggctgtgttcccttggcactcctta

SEQ ID NO: 87451 - DNA, 98 bp, Homo sapiens
ctgagccttcctcatctgatgcctgttaggctccctttgctgctgaggtcctgggtgccatcccagcacttgggttcaactctgccaccaacgtcgtg

SEQ ID NO: 87452 - DNA, 100 bp, Homo sapiens
cccacctgacttagtggctcctctgcaggaaagggttgaatgcaatgcagttacagaatttggctgcactagctgctgcagctagtgcagctcagaacac

SEQ ID NO: 87453 - DNA, 100 bp, Homo sapiens
ggtgtgcaaacccgagagaactgggaaagaccacagcaagattctttcattcgtctcctcctagcctgggggaccaggctcgaactgaccctggacatca

SEQ ID NO: 87454 - DNA, 50 bp, Homo sapiens
aatgcctttgaccagtatcgagacctgtatacaaaactaggatatgctgg

SEQ ID NO: 87455 - DNA, 82 bp, Homo sapiens
ctctccatcctgctcttcttccacaggtgccaagactggctagaggccctgcactggtacaacactgccctggagatgacgg

SEQ ID NO: 87456 - DNA, 100 bp, Homo sapiens
atagaaggggaggggttacagactgtggtgcctacccccatcactgcttccctcagccataacaggaaacatgccctgaactgtcacagaatgaaaccag

SEQ ID NO: 87457 - DNA, 101 bp, Homo sapiens
agacctgagccgacactgggggcagtccgcgagccccgcactctctcgatgagtcggagaagtcccgtttggtgcacctcgatttggaggaagtagggcag

SEQ ID NO: 87458 - DNA, 83 bp, Homo sapiens
cctccccccggagccaggctggtttcggaaatgcccttacagcagcagactcatctttcaagaggactttagactaattgcag

SEQ ID NO: 87459 - DNA, 128 bp, Homo sapiens
aagacctgcctcctgttccgcttctcagaggacgccttcaacaccaccttcatctccaccatcgggggacttgatctcatcttcatgccaggccttgggtttgacaaacatggcaaccgactggggag

SEQ ID NO: 87460 - DNA, 83 bp, Homo sapiens
gtcctcgtcagcactgactttcagctatggaatcgaatgtcaagctgtcagctgaggtggagccatttattccccagaagaag

SEQ ID NO: 87461 - DNA, 100 bp, Homo sapiens
aagacatttatgaaagcccaaatcacctgtacttggtcatgcagctggagaaacaaaggcagcgctgccctcgggggagcattggccctggcggaacgca

SEQ ID NO: 87462 - DNA, 96 bp, Homo sapiens
ccactctatggccttggagaactgccccaaggatttgcaagagaatcatgaagatccacctcttaaaaggcagaggacggctgaagccttttcaga

SEQ ID NO: 87463 - DNA, 49 bp, Homo sapiens
aggattccaagtaactcttatttggtcttagtggtgcaatggctagtat

SEQ ID NO: 87464 - DNA, 90 bp, Homo sapiens
caaggggtgtttttccgtaagcatactcaggtgtggagagagtatgctctgtgtcgtcccagacatttctgcattccgagaaggttggag

SEQ ID NO: 87465 - DNA, 100 bp, Homo sapiens
ccagtaccagcgtttcacctaccttcccgccaacggtgcaaagttccccatcaagtggacggcccccgaggcagccctgtacgggaggttcacaatcaag

SEQ ID NO: 87466 - DNA, 98 bp, Homo sapiens
cctgcgccgcctcctcccaccctgagcagagccgccgaggatgataaacacccaggacagccagagactgctgctactttgaaacgtacgatagaggc

SEQ ID NO: 87467 - DNA, 100 bp, Homo sapiens
tctactgtgacttcagagacactgccaagcagccttagccctagtgtagagaactgtgggccaccagatgacttcagatgtcccaatccgacaaagcaga

SEQ ID NO: 87468 - DNA, 80 bp, Homo sapiens
gccactgtcttgttccgaggcggccccagaggacatggatttgattgacatactttggaggcaagatatagatcttggag

SEQ ID NO: 87469 - DNA, 96 bp, Homo sapiens
gatcaaggccaagtatccgccagtcaataggaagtacgagtgtcaaagttggaaattgtaatactcctaaaccaagcttctttgattttgaaggaa

SEQ ID NO: 87470 - DNA, 80 bp, Homo sapiens
tccttcggcagtccacccaccgccgccgcctcccagattctacgattaggactgaaaatgagcaggcctgtgaggacatg

SEQ ID NO: 87471 - DNA, 90 bp, Homo sapiens
cgccgagcagcccctcccgcagccggtgtgacctgtcccttcagtttgtgtgtgtggaaagcctggtgaccgccgtggtggacatgtacc

SEQ ID NO: 87472 - DNA, 83 bp, Homo sapiens
ttctagactccatggcaccgggctgagcgggtccctgtgcgttttattgcgacctgccggtgggaactttgtctccgagtcgg

SEQ ID NO: 87473 - DNA, 101 bp, Homo sapiens
ccgaggaggcagccaagctcgtagcctgccactccgtgcattttgagaagagggggaaaaaggaagtttgtcctgtcctggatcagtttctttgtcatgta

SEQ ID NO: 87474 - DNA, 90 bp, Homo sapiens
cgtcagcctcccgccggccgtctccttaacaccgaacaccagtgatcagcagctggactgtgccttggacctaatgaggcgcctgcctcc

SEQ ID NO: 87475 - DNA, 100 bp, Homo sapiens
aaagtccatgtgctggcagcacttccctgagccactctccaggctgctccagtactcaagggaacggttaccttatcccatatcacacaactggtcctca

SEQ ID NO: 87476 - DNA, 100 bp, Homo sapiens
gcatcatctatgtctctgacagtatcacgcctctccttgggcatttaccggaccctggctctcaagctcccacatcctggattagtgagtctcaggtttc

SEQ ID NO: 87477 - DNA, 74 bp, Homo sapiens
atcagatctgcgctgcggcagaggcaggtcttgagtcaccacgtccgaatataattcttgggttagtaatctgc

SEQ ID NO: 87478 - DNA, 83 bp, Homo sapiens
gaggtgttcgagaacgaccccgagacgagtttatgtggccgaggcagacaagtggaattaggccttgctgcaggggacttcat

SEQ ID NO: 87479 - DNA, 101 bp, Homo sapiens
agttcgtcggctgccagcaacaatcaccagcttcataaacaagcagatatgcaagaagagaaaaaccgaatcgaaagagtccttggcgctactcttttgcc

SEQ ID NO: 87480 - DNA, 51 bp, Homo sapiens
aaagttcaccatcctccaaacaagtgaatcatatttgatcagaaattggat

SEQ ID NO: 87481 - DNA, 74 bp, Homo sapiens
gtttacagctctaacaaaatagacggcattgatcaatatgacagagatagcatcataaatgactttaagaatgg

SEQ ID NO: 87482 - DNA, 82 bp, Homo sapiens
gcagatcctggtcctcgatccgcccacagacctcaaattcaaaggttatcaatactctggctgaccatcatcatcgtgggac

SEQ ID NO: 87483 - DNA, 100 bp, Homo sapiens
cggggtttcgcatagacgcctgcccattcggcccggcagtgtgtgaggcgcctttcaaaccggagggattggcaagctgcaattctcattgcaagatcat

SEQ ID NO: 87484 - DNA, 74 bp, Homo sapiens
agcttgaggacacttaccacgaagtgtggcatgcagcattttggaaggaaaattgaagacgtgttcaagaaaac

SEQ ID NO: 87485 - DNA, 100 bp, Homo sapiens
atttggaaaagctatgaggatgcccatgtggagttcatacacagtcccccagttgcaaacagcactgctcagcattttgaacttctgttcagagcttcag

SEQ ID NO: 87486 - DNA, 75 bp, Homo sapiens
tgaagagcgcgccgccctctcgtcccactttccaggagccctctggcacaaatggaagaagaaagaagggagcaa

SEQ ID NO: 87487 - DNA, 100 bp, Homo sapiens
gaaaagttggggaaagggaaaatggaagtcaaagaaatgcaaatattctttcaaatgtgtaaatagtctcaaggagaaggaagccaacatccttttggag

SEQ ID NO: 87488 - DNA, 90 bp, Homo sapiens
cagcctcccaagcagctgggtctacaggtctcattcaggaacgtcgcctgataacactgcaccaccacctccccctccaaggccacagcc

SEQ ID NO: 87489 - DNA, 100 bp, Homo sapiens
gtgagttttgtacagctattcgagagaatgttgtaccatctttgggtaggcagacttccctgacgacatcagtgatacccaaagctgagcagagcgtggc

SEQ ID NO: 87490 - DNA, 100 bp, Homo sapiens
gcaccgtccgcgactgctatgagggagtgttggaggaagcagaattttacaatatcacctcattaataaaacttgtaaaggacaaaattagagaacgaga

SEQ ID NO: 87491 - DNA, 138 bp, Homo sapiens
ggaaagttgactgaaaatggggcggaagaaaatacaaatcacacgcataatggatgaaaggaaccgacagaccaagatcactccatggatgaaatgacagctgtggtgaaaattgaaaaaggagttggtggcaataat

SEQ ID NO: 87492 - DNA, 90 bp, Homo sapiens
gacggtcactcagcctatggagggaacaggcacggtctcctggtacccaacaataccaccgaccaggagctgcaacacattcgcaacagc

SEQ ID NO: 87493 - DNA, 50 bp, Homo sapiens
gcaagctacaataatggggccagatgtcctggaacaggtggaggcctatc

SEQ ID NO: 87494 - DNA, 100 bp, Homo sapiens
ttctgggttccacagaatgggctgagactcgcagggcaatgacattaaagtcactgctgagagcactggtgaacatgcctcctcactaccgctacctttg

SEQ ID NO: 87495 - DNA, 100 bp, Homo sapiens
tgctccgggacaacatgctgcggggcacaggctgttcggctcttgaatcccagcgatgaaaccaggaactcactttcccgggatgccgagtctccattcc

SEQ ID NO: 87496 - DNA, 100 bp, Homo sapiens
cgcgaccagaggacagctctgtgctgatccccaccgacaattcgaccccacacaaggaggatctaagcagcaaggtcttgtggatgagcagcagaaagtt

SEQ ID NO: 87497 - DNA, 121 bp, Homo sapiens
cggcagtggggcgcgctgctgcttggcgccctgctctgcgcacacgcgagtggcatcgtgttccagtgggggactggtttggcatcatgtggacgacggttgtgccctgggcagactcttc

SEQ ID NO: 87498 - DNA, 76 bp, Homo sapiens
tggagaggatcaagcatgcctgtcaactggtgttgggctggatcttgatagcagttgttatcatcattcttctgat

SEQ ID NO: 87499 - DNA, 90 bp, Homo sapiens
aaagaaagcacatttggttatgtgcatggggtctcaggacctggacctagaagaatcccttaggatgaagctgagtcttaccaaggtagt

SEQ ID NO: 87500 - DNA, 100 bp, Homo sapiens
ccgccgctgcaccttcaccgcgtacccgggacccgcccgcccgcgggagaatcttgcctcctggaatccttcaaatcctgaatgtctcttacttgtggtg

SEQ ID NO: 87501 - DNA, 100 bp, Homo sapiens
cagatgactacgatggagaagaatatgatgtggaagcacatggactacgcccaagcaaggtttgatgcctatttccaccagaagaggaagcttggggtgt

SEQ ID NO: 87502 - DNA, 100 bp, Homo sapiens
ccatacggaataagctcattttaattgccagaaacaaagttgctgatcatctgggctgtgatccacaaacccggttctttgtccctcctaatatcaaaca

SEQ ID NO: 87503 - DNA, 100 bp, Homo sapiens
gtagaattccttgtagataagcaactggattttttaactgaagatagtgcctttcagccctaccagtcttcccaagggattgttgaagaaacttctgaag

SEQ ID NO: 87504 - DNA, 96 bp, Homo sapiens
cccgggcaacgacggcgacaggaaacaggtcaccttccgcaaccctgtcattgagaggattcctcggctccgacggcagaagaaaattttctccaa

SEQ ID NO: 87505 - DNA, 100 bp, Homo sapiens
ttccacctgcggccaccgtttctgcgatacctgcctgcaggagttcctcagagccctatgagtttgtctctctggaatggctgcaaaagtggttggatga

SEQ ID NO: 87506 - DNA, 100 bp, Homo sapiens
tgccagccatgaaacagattggcaatgtggcagccctgcctggaattgttcatgtgggaatgatggttagatgctgccgaacatacgaagaagtgtgcga

SEQ ID NO: 87507 - DNA, 74 bp, Homo sapiens
cgtctccttaacaccgaacaccggtcatccgagagttggctgcgagggcgctgcacaacctggcccagcaggca

SEQ ID NO: 87508 - DNA, 99 bp, Homo sapiens
tgctcaactgcttgttgaggctcgagttcagcctaatccatcaaaacatgtttcgggaggcccaggggcgatgccagaccccgcggcgcacctgccctt

SEQ ID NO: 87509 - DNA, 100 bp, Homo sapiens
gttagagaccgatcctgatgtcgtggactatttactcagaagaaaggcttcccaatcatcttggtcgcattatgtttcagctcttctcagacatatgtcc

SEQ ID NO: 87510 - DNA, 99 bp, Homo sapiens
ttctcctcttttcttacatcattcccataaggtgggatagtaacatctttttgagggaagaattggcttcctttcttgaaagtggtgaaggtacagcat

SEQ ID NO: 87511 - DNA, 100 bp, Homo sapiens
ttccagcctgggcgctgacgccgcggacctccctgcgaccgtcgcggaccatgggcgacaaagggacccgacctgcctagagctggaacgttacctccag

SEQ ID NO: 87512 - DNA, 51 bp, Homo sapiens
tttcagcaaatttggagcagggtactcttttcgtttggacagaggtatctg

SEQ ID NO: 87513 - DNA, 75 bp, Homo sapiens
ggccagcccccagccctggagaagctcaaaggcaaaggtgaaatgacaatggatgctctgttggctcgattgaaa

SEQ ID NO: 87514 - DNA, 100 bp, Homo sapiens
gcctgcgtgataacaagggcacacccaggctgcggaccacggttggtgtcgacggatctctttacaagacgcacccacatctatacgagatactccagcc

SEQ ID NO: 87515 - DNA, 75 bp, Homo sapiens
ccgagatctccttggaagcagaacccatagaactcgtggaaactggagttaacagagcagtttcataaagttgaa

SEQ ID NO: 87516 - DNA, 75 bp, Homo sapiens
cagcctcccgagtggctgggactacaggtcctcggcagcctgatcttctgcttcggcatctggatcctcattgac

SEQ ID NO: 87517 - DNA, 98 bp, Homo sapiens
tatttgtggcttaaactcttggcatttggctttgcctttctggacacagaagtatttgtgacaggaaaatacctacaagtctacttggaggaatcccc

SEQ ID NO: 87518 - DNA, 75 bp, Homo sapiens
gcgggtccgggattcccagccatggcagattcctccgggcagcagggtcaaaatgcagatcttcgtgaaaaccct

SEQ ID NO: 87519 - DNA, 75 bp, Homo sapiens
gtgaatacagctagggacgtgaaagccaggcgggcaccacggcaggggctgagctaccctcatggaagggagagg

SEQ ID NO: 87520 - DNA, 75 bp, Homo sapiens
gggacaatggtcaccgtctcttcaggtgtggacactgccagcggctgcagccgacttggaatgacctgggagaca

SEQ ID NO: 87521 - DNA, 89 bp, Homo sapiens
aaggattccaagtaactcttatttgaacccctgaacagtgcccaagtgttgtctctttgttgtcagagagttacaaccctcatgtgcgc

SEQ ID NO: 87522 - DNA, 74 bp, Homo sapiens
tcctgtacagcctgcagaactgtcatgcaagacaagataatctgccttccgaaaagagtgcagcctgctcagaa

SEQ ID NO: 87523 - DNA, 101 bp, Homo sapiens
ctgtttatccaacgctctctcagcagcttccaagagaaccaatggaatggagaagatttggagtccagatacaggaccaatactttatctccagaaaagga

SEQ ID NO: 87524 - DNA, 100 bp, Homo sapiens
tcctcactggtttgcggggaaggctgggcagaaaaaggatgcaaccttgttctcaaccacttgctatctcgtctgaagatgatgagaaactgaaaaagag

SEQ ID NO: 87525 - DNA, 98 bp, Homo sapiens
agagttagagagagggatggtgctggaggaaagcaggaatgttcagaggcaaatgaagattctgcagaataagcaagctcagattgtcaaagagaaag

SEQ ID NO: 87526 - DNA, 100 bp, Homo sapiens
ccggccgagcgccgggggaccccgggcccgcgatgtggcccagtacctgctctcagacagcctcttcgtgtggataccatgtttgtgtggaagtgccccg

SEQ ID NO: 87527 - DNA, 97 bp, Homo sapiens
agaaataaatttcgatggcattaagcttgatctgtctcatgaattttccttagttgctccaaatactgaggtggattttgcaaatcgttttgttgga

SEQ ID NO: 87528 - DNA, 88 bp, Homo sapiens
ccaacatcgcggtgcagcgaatcaagcgggagttcaaggaggtgctgaagagcgaggaggctgcttttgtcagagacgttttattacc

SEQ ID NO: 87529 - DNA, 131 bp, Homo sapiens
aaagttaccaaaattgctgtgctctcactttctgaaatggaacctcaggatcttgagctagagtaccctcttatatatggactgattcttattccctgctggtgttctctagtttgcctaagtagaattta

SEQ ID NO: 87530 - DNA, 80 bp, Homo sapiens
acactgcgactccggagacagcccaaatatcctcggaagagcgctcccaggagaaacaactgcacatcattgactcctgg

SEQ ID NO: 87531 - DNA, 83 bp, Homo sapiens
ctgactcacaagatcactcacctgtccacactgcaggctgcctgctgtttcccggggagatcatgaaacgaggtcgccttccc

SEQ ID NO: 87532 - DNA, 75 bp, Homo sapiens
gtctctggagacatcttcagcagggagcatttcctgaagacgtagtcatgcagcacgtcagcagctcccagagca

SEQ ID NO: 87533 - DNA, 74 bp, Homo sapiens
tgacaagggaggaagtacagaggactcagcccaggagagtgttattactcgagatattcatcgtacatttcccg

SEQ ID NO: 87534 - DNA, 122 bp, Homo sapiens
cagaagaacatggttttatatcacaacaattgaagttccagattcttccattttgaaaaagtcccctgttttcatagcccaagttggccaagacctggtctcccagacggaggagaagctcc

SEQ ID NO: 87535 - DNA, 76 bp, Homo sapiens
gcctgggcagcctgctggaccctgccaagaagtcgcccatcgcagcagctcgggctggtgaattaccatatctccg

SEQ ID NO: 87536 - DNA, 75 bp, Homo sapiens
ggaatttccaaggggattcaaacttcaacagaatgtggcaaccaggatcaagattataggaccggcccaagtgag

SEQ ID NO: 87537 - DNA, 97 bp, Homo sapiens
ttctttctacattaaagcggttaacttcttttcacaagcacaatgatgctatacaatgtgtctcctacaatcctattactcatcaactggcatcttg

SEQ ID NO: 87538 - DNA, 75 bp, Homo sapiens
gaaaaggcattgaggaactcaatcaaaccagtattcttttcacacaggtctcaagattctgccctccaagaaagt

SEQ ID NO: 87539 - DNA, 104 bp, Homo sapiens
agcattatctagtcctttccaccccgaaattcgccccgattaaagactgtgttgcattatcaggagatcatgaatcagacagataaaaatcaacaagaaatccc

SEQ ID NO: 87540 - DNA, 88 bp, Homo sapiens
gcccctcaggctggaacttgccctgtctcctcgcagatgagagctcagagttctacagagtcaccactgaacaatatcagaaagctgc

SEQ ID NO: 87541 - DNA, 97 bp, Homo sapiens
ttcaaaaacaagtgcaaaggccctttatggtatttctgggaaaagccagcttctgtttgcactggtcttcacaactcgttacctggatctttttact

SEQ ID NO: 87542 - DNA, 90 bp, Homo sapiens
atcatgatggacttggagctgccgccgccgggactcccgtcccagcagggacccgggtggaagcaagagcaccattaaaaaaatcaataa

SEQ ID NO: 87543 - DNA, 90 bp, Homo sapiens
gagctctggtctcatggaaatggcagcctgcccaccacccacgcttgcccagcctttcttcacgcaactgtatgaaaacaagggagaggc

SEQ ID NO: 87544 - DNA, 100 bp, Homo sapiens
gtggattctcacttctgtcatctagcatgcaatggccaatgtacatggtggactatgccggcctgaacgtgcagctcccgggacctcttaattactagac

SEQ ID NO: 87545 - DNA, 83 bp, Homo sapiens
gctcagctcttactgcgggccgctccgacggcggtccatcctgggacttaagtcacaacagattatctttcatcaaggcaagt

SEQ ID NO: 87546 - DNA, 75 bp, Homo sapiens
tccacgtgcggtgctcgtcgggagtgatcacctaccctacaggacagaactgtaccgctctctttttggccagct

SEQ ID NO: 87547 - DNA, 90 bp, Homo sapiens
gcctggacctggttctgccttctggacaatctttccgggaagtgttcgccagttactacatgaaaagataagagatgcttatactcaccc

SEQ ID NO: 87548 - DNA, 80 bp, Homo sapiens
agggtaaccgagagatggtatatgactgcactagctcttcctttgatgggaaaaatgccagctgtgggacaaggagtgca

SEQ ID NO: 87549 - DNA, 100 bp, Homo sapiens
tgaccatcattgaccttcccggcatcaccagggtggctgtggacaaccagccccgagacatcggactgcagtctctggcatctctatcccctatgaggca

SEQ ID NO: 87550 - DNA, 80 bp, Homo sapiens
tcccagaaagtccaagctcgtggttcctcaacttaaaagggatgaggagaccttggagacggttctgaggagactcaaaa

SEQ ID NO: 87551 - DNA, 82 bp, Homo sapiens
ctggaagctactactacgtggtgcttggaaagccacagctccggagcaagccccagccccggcccggccataccagggcgtc

SEQ ID NO: 87552 - DNA, 95 bp, Homo sapiens
ctgcgaccgtcgcggaccatgggcgacaaagggacccggttcctcaaggagcaagaagacacagtgagagaggacaccattcaggtcggccaccc

SEQ ID NO: 87553 - DNA, 100 bp, Homo sapiens
gcaatttctgtgtgaagaacatcaagcaggcagaatttggacgccgggagattgagattgcagagcaaggggaaaggccatacaaatgtcagacctgcga

SEQ ID NO: 87554 - DNA, 82 bp, Homo sapiens
agccttgggcctcgcgccggctatggccgtgccctggggctgagccctcagggtttctctccgcaagcgcgcgatgcagcgg

SEQ ID NO: 87555 - DNA, 83 bp, Homo sapiens
ctcggcggctgaggaaagcaggaggaggtggcggcggcgggaagatgtgcgctcgctggaggcccacatgtacccggaaaagc

SEQ ID NO: 87556 - DNA, 83 bp, Homo sapiens
ccagtaaagatcggacgtgatggacagctgcccaaactccaaaatgatggtagagaattgaccaagaaaaataaagaaatctg

SEQ ID NO: 87557 - DNA, 82 bp, Homo sapiens
gctgaaggccctacgggagaaaaccgggcgcaagagaagaagttcgtgccccaattcctcaaaagcaggaaatactggtgga

SEQ ID NO: 87558 - DNA, 100 bp, Homo sapiens
cagcctccccgcgcagcctggcagataatcttgtgccgtggaaatcagaagggcaaaacgaagcagtcatgatgagaagcacacctcagaaatcaggaca

SEQ ID NO: 87559 - DNA, 78 bp, Homo sapiens
gccgctgcggacggacgctcgcctgccggctgaggatcaagtcttccataccagggaccaggccaaaaccagactgcc

SEQ ID NO: 87560 - DNA, 100 bp, Homo sapiens
tcttgtggatattgggcttgacagctgcaaggagttactgaagacaaggtcttgatctgtcaccaggctgaagtgcagtggtacaatcaaagctcactgc

SEQ ID NO: 87561 - DNA, 96 bp, Homo sapiens
catgccccgctacgagctggctttaatcctgaaagccatgcagcggctcctgcccctcctaaagctgaagccaaagcgaaggctttaaaggccaag

SEQ ID NO: 87562 - DNA, 90 bp, Homo sapiens
cttagggcagataatgcctttatgttacttactcaggtgcatccactgtggtgtcgtccacctgaccttggccttgctgaaaagccacat

SEQ ID NO: 87563 - DNA, 129 bp, Homo sapiens
caagaatcgtaggccaggctgatggagagctgaacattactcttccagaagagcacttttcaggattagaagaggctgtgtatagaaacatacaagcttgcaaggagcttgcccaaaccactcgtacag

SEQ ID NO: 87564 - DNA, 100 bp, Homo sapiens
ccaagggaccaaggtggaaatcaaacgttattcagcttctcaaggctggaaaagcgaaggaagtttcctacaatgcactagcctcacacataatctcaga

SEQ ID NO: 87565 - DNA, 100 bp, Homo sapiens
tgtacctttcagctgcgccggccgcgaggccacggagagctcgccttggagagcccaggagcaggggagacatgggttaggcttgctgaggggcaggcac

SEQ ID NO: 87566 - DNA, 96 bp, Homo sapiens
tttgtcttttgcagatgatcgccgggtgtcgatccttttccctccagtcagatatcagttttagagaatgtggcgtggagaaattctcaaggaaag

SEQ ID NO: 87567 - DNA, 75 bp, Homo sapiens
cagcactcaccaactacctgcagccgcagctggactggcaggcccgagggcgagagcaacttgctgagcttcgtc

SEQ ID NO: 87568 - DNA, 75 bp, Homo sapiens
aactggaggctgagtacgacagcctcaaacaggagctggagcagctcaaagagccgggtgggcttggactgggcg

SEQ ID NO: 87569 - DNA, 126 bp, Homo sapiens
ggaaacttgataattccagaacggaaacttgatattactgcaataagcaaggtcagactactccctgtgccatgaacggagatgacacctttgcaaggagacccacggttggtgctcaaataccag

SEQ ID NO: 87570 - DNA, 100 bp, Homo sapiens
gattcctcctccttggtcgccgcgtccttggctggcgttcatacacgtggacctaactgcaccagtagcttttctgagaatacttgctgaaaaggaagtt

SEQ ID NO: 87571 - DNA, 80 bp, Homo sapiens
ccgaacttcagggtttccaccgttcgttcaagttgcctgtgtccctggagtgttacacagtgcctcctgaagacaacctg

SEQ ID NO: 87572 - DNA, 106 bp, Homo sapiens
ccagagtcacacacggtcctaagagctgggcaccaggaagcgaaggctggtgctggagaatctggtaaaagcaccattgtgaagcagatgaggatcctgcatgtta

SEQ ID NO: 87573 - DNA, 82 bp, Homo sapiens
cgcgacccccggcaacccggagaaggtctacagagcggcctgcgccagcgaatgaaggatttgggggcagagcacttggcag

SEQ ID NO: 87574 - DNA, 83 bp, Homo sapiens
tcgtggccggagcggcccgcgcctgggctgccggcacttcgcggcagggagtaccctgacttctaccggaagctctacggcct

SEQ ID NO: 87575 - DNA, 82 bp, Homo sapiens
acggactggaagatcaaaagagggaagccagttgagggaagttctccatgaatgtacgtcacaatgatgatgaccgaccaaa

SEQ ID NO: 87576 - DNA, 76 bp, Homo sapiens
ctcaggacttgagtaacagcaacatgttggttaccacagagaagcgcttcctcaaagacagtttgtacaatgaagg

SEQ ID NO: 87577 - DNA, 83 bp, Homo sapiens
cagaaattctggaacacctatatgattccagctaagaaagagtcttgtccaaacactggaagagacaaagaccacctgttgaa

SEQ ID NO: 87578 - DNA, 75 bp, Homo sapiens
tcatgacagctttgcacactattttgcggcttcgattttcatcttcattggagagaccctcctgtccatgaactg

SEQ ID NO: 87579 - DNA, 100 bp, Homo sapiens
agctttcttaactcagaaagaaacttccaacacagtttcccaaagaaaaatgggcaccaagggcaaagctttaagagtaaagaaggtatcccaaaacttg

SEQ ID NO: 87580 - DNA, 82 bp, Homo sapiens
caagaaccgactggaccccacgtggcaggagatgctgaaccatgctacctgcaaggctgagtcatcactagagagtgggaag

SEQ ID NO: 87581 - DNA, 100 bp, Homo sapiens
gggctgggcgcgcccggccgcgacgcccgggacccagattgcgggttcagaaaacaaattccagtactcctggtaagaaaaacagaggccttttaacaag

SEQ ID NO: 87582 - DNA, 98 bp, Homo sapiens
aaggaatatgagcgcttttccaagtacatgcccagcgtcaaggagacgcaggtgcccgcgctgctggaggccggcttccggagggagaacatccgtac

SEQ ID NO: 87583 - DNA, 98 bp, Homo sapiens
ctccttcaaataaagccacagctgctgattcattgtttgaccgacaggaagctgcacacatacatgtaagagaagcaaaaatgtcagatgatatcagg

SEQ ID NO: 87584 - DNA, 51 bp, Homo sapiens
gttatgggctatttgtgtagcagaaggtaaatcaacagactgggaagatga

SEQ ID NO: 87585 - DNA, 100 bp, Homo sapiens
cagtgacaagccagcaccagtccagaagcctccatccagtattcgccatgaagtcagcgtaaataatgtaacacataaactgtgcagtaaccattgcttt

SEQ ID NO: 87586 - DNA, 80 bp, Homo sapiens
gcaccgattcctctcgggctcttgggcgctgctctgaggtttggtgcacctcgatttggaggaagtagggcagggccctt

SEQ ID NO: 87587 - DNA, 75 bp, Homo sapiens
gaaaaagtctacagggtgatccagcagcagctctgcttgaggaagctgcagtaaaggaagatgaagaagaagttt

SEQ ID NO: 87588 - DNA, 74 bp, Homo sapiens
ccatgaccatctggattctcaaagtcatgaacttcacaattcaatggcaccagcatgatatcattgatcattcc

SEQ ID NO: 87589 - DNA, 82 bp, Homo sapiens
aacatcctgtcacaggccatgctctggcaaaaacttgctgctgatgctagaaggactagtagatgaacggagtcggctcaat

SEQ ID NO: 87590 - DNA, 128 bp, Homo sapiens
caccgggatcgtgaccgagaccgtgaccgagagcgtgaccgagagcgcgaatatcgtcatcgttagaaggagagccggacagggcagcggccggcactaccgcgctgcgatttgcgcagagctgaaga

SEQ ID NO: 87591 - DNA, 100 bp, Homo sapiens
gtctgttagaggaagacgacgagtttgaagagttccctgccgaagggcccttatattctcaagaccgaatccttcaagccatgggaaacatcgcactggc

SEQ ID NO: 87592 - DNA, 100 bp, Homo sapiens
agccgagatgccgggggagcggggccttccacaccccctccgtgggtgtgtggggggcaacaacgccggccacacggtggtggtggatgggaaagagtac

SEQ ID NO: 87593 - DNA, 100 bp, Homo sapiens
gagagtcctggtgactttgaacatgctggtgccgctagccaagctgtcctgcctggggcccggcaggaagatgggctcccgtggacagggactcttgctg

SEQ ID NO: 87594 - DNA, 100 bp, Homo sapiens
aagagaaaactgaagaaggaggaatggctgtggggctttgtaaagccatgtcccagattcatgttacatgtaaagctgtcctcatttgtgactatggacc

SEQ ID NO: 87595 - DNA, 83 bp, Homo sapiens
ggccgcgtcgaagacatggaccagggctacggagaaaccaaggtgtatgttggtaacctgggaactggcgctggcaaaggaga

SEQ ID NO: 87596 - DNA, 100 bp, Homo sapiens
ccagtctctactcagcaccgaccgggaggcctccatcgacatcctccactccatcggttttgcacactagggaccaagaagccctcggggacactgctga

SEQ ID NO: 87597 - DNA, 75 bp, Homo sapiens
agaacattgagacatttctttcggcagttgtgaaaaacttcaggacaaaaatgtttcatttaaggacttgtgctg

SEQ ID NO: 87598 - DNA, 75 bp, Homo sapiens
cgcctgagctttctacaccgggagcaggccgggctctcgccatgggtcactgtcgcctctgccacgggaagtttt

SEQ ID NO: 87599 - DNA, 80 bp, Homo sapiens
ctggggagtgtctgtctgtgcaggtggtcaactgcagccgtgtattcagccttaggaattgaatgatctggcacgggacc

SEQ ID NO: 87600 - DNA, 96 bp, Homo sapiens
atccataatccacaaagcatatttaaaaggctcttggcacgggcagcattggttgagcaggcctggcatgcgtgggcagtgatgaacttcgaagct

SEQ ID NO: 87601 - DNA, 74 bp, Homo sapiens
aagactatgaatctctgttccaaatgctttgctggatggatggcaagcggcggccaggcccagggcccggggtg

SEQ ID NO: 87602 - DNA, 87 bp, Homo sapiens
gatccagagcgccgcgcacttcgtcatgttcttcgcgccctggggacggcaaaacagaacagaaaggcggagataaaaagaggggtg

SEQ ID NO: 87603 - DNA, 89 bp, Homo sapiens
ttttgcctttgttgattaactggacaaattcagggtaatacctgcctggagaatggatctttcttactgaactttacaggctgtgcagt

SEQ ID NO: 87604 - DNA, 85 bp, Homo sapiens
ccatcagggaccaaaacctgcattgataccaaggaaggcatcctgcagtattgccaagaaatgacaagagcacctcaaaggcagc

SEQ ID NO: 87605 - DNA, 74 bp, Homo sapiens
tatgcacacttaacctacgtcacgttgccgctgcatcggattttaacaggtggagatgaagaagagaatgatga

SEQ ID NO: 87606 - DNA, 82 bp, Homo sapiens
ggagagtaaagtcagcatgagcaaaaactccaaactcctctccaccagcgccaagaggttgctccgactgtgtgttccagga

SEQ ID NO: 87607 - DNA, 100 bp, Homo sapiens
aggtctttcaaaccagctccgtgtacagacagaggcagcacgctggctcttctcctgaacttcctcgcctgcctggccagcttctgtgtggaaaccaaca

SEQ ID NO: 87608 - DNA, 90 bp, Homo sapiens
tgcccggcgcctggcggggcctccgcgaggacgagttccacatcagtgtcatcaggtcagaaagcaacattgaatgcagaagaaatggcg

SEQ ID NO: 87609 - DNA, 83 bp, Homo sapiens
aaatgcaaaaaaggaggccaaagactttgtagctacagcaagctgggtagcaggcagatccaaaggatatcatgaagtttcca

SEQ ID NO: 87610 - DNA, 88 bp, Homo sapiens
ccttcgtcgctgttgctgccgccatacgcgctctccctgtttaggcagaggtggaggagacactgaagcgactgcagagccagaaggg

SEQ ID NO: 87611 - DNA, 82 bp, Homo sapiens
gcccttgatcttcgctgtggcatggcggacgaggggaagtcgtacagcggtcagcccaaggccaaccccactgtcactctgt

SEQ ID NO: 87612 - DNA, 83 bp, Homo sapiens
tggctattgtgaaggagggttggctgcacaaacgagcaattctgtggtgttcttggtcacacatttatggagtttctgaaggg

SEQ ID NO: 87613 - DNA, 96 bp, Homo sapiens
gactccaactgtacaagaggagagtgaagaggaagaggaggaaaaggccaaagcgtacaagaaagagaaacagaaggagaagaaaaggagggctga

SEQ ID NO: 87614 - DNA, 96 bp, Homo sapiens
aacgtcagcaacgatcccgatgtcatcaagttgcaagagattccaaccttccagccccttttgaaaggatgaatcctccatgttcttccagtttgg

SEQ ID NO: 87615 - DNA, 82 bp, Homo sapiens
ctcccacctttgccattcctcaagctgcagggacggagctgacttttaactacaacctcgattgtctgggcaatgaaaaaac

SEQ ID NO: 87616 - DNA, 90 bp, Homo sapiens
ctcaagatggcggacaaaacgccaggcggatctcagaaggccagttcaaagttggccacggacagagcgaaggggagaggatggtagtgt

SEQ ID NO: 87617 - DNA, 50 bp, Homo sapiens
caaaattgcaagacctttcatagagatgaccgcacctcgagcaggagtgg

SEQ ID NO: 87618 - DNA, 89 bp, Homo sapiens
agatccacagctaagacgccaggacccactggaagcctagaaatggaagatgagaatgtgcctactgctcctgatcctccaagtcaaca

SEQ ID NO: 87619 - DNA, 100 bp, Homo sapiens
ctcaccccccaagcggatactggtcttctcgtcggattgcccatgcacttgttgcagaaacagccaagcttcacgttacagcatggaagctgttgccaag

SEQ ID NO: 87620 - DNA, 100 bp, Homo sapiens
caggcggcggcggcgcagttgcgagtgcagccattaagaagcctgtgggaaagacaaaggaggaactggctttggagaaaaagcgggaattagaaaagcg

SEQ ID NO: 87621 - DNA, 95 bp, Homo sapiens
accagcacatgctgcgtgtcatcaagaagtactggctccagttccgggaaggcccctgggacagagatttgggattagaatctaccttaatatcg

SEQ ID NO: 87622 - DNA, 75 bp, Homo sapiens
gatgaggtcttaatcatggaacatttgaagtcacgtaaagaagacatgaagaggagcatcggcggcgtgaggaag

SEQ ID NO: 87623 - DNA, 90 bp, Homo sapiens
cgatggaataatgcccagcggcccgccaggtcccgacgcaaacatgcagatctttgtgaagaccctcactggcaaaaccatcacccttga

SEQ ID NO: 87624 - DNA, 83 bp, Homo sapiens
cgaagaggctggactcggattcgttgcctgagtttggtgccctggttgtcagatgttggaaagcagtaggacggaacatactc

SEQ ID NO: 87625 - DNA, 50 bp, Homo sapiens
ggggaaggcgcctgaagaggacgaagagctaaaaaagtccctgtacgcca

SEQ ID NO: 87626 - DNA, 100 bp, Homo sapiens
tttgtaaaaacatggcggatccagaattctgtggctgcctccgggtgatgatggctgtgtgaacgactgccatggcccaccggaagcttgagagcgtggg

SEQ ID NO: 87627 - DNA, 50 bp, Homo sapiens
ccgggagcaactgtgatgaggagccagcagccacccccgcccagccaaca

SEQ ID NO: 87628 - DNA, 83 bp, Homo sapiens
aatgaacttcacgcctcagcgtccagggtgaggtggctttgaccccgggttgcccggccagcacgaccgaggaggtggctgga

SEQ ID NO: 87629 - DNA, 100 bp, Homo sapiens
gcagcaactgcagatggagaaggagaggctgcggctgaaacagcaagaactgcttcggcagcaatggtgaactagacccctggtcaggaggtggagtaac

SEQ ID NO: 87630 - DNA, 101 bp, Homo sapiens
cgactgaatgagatcaaaggtcacctggaaattgccttattggaaaaacatttcttactgccggtggtggtgtgcacattgagccccggtatagacagttc

SEQ ID NO: 87631 - DNA, 100 bp, Homo sapiens
gacaattcgaccccacacaaggaggatctaagcagcaagatatatttcagctggtttcagtgaaactgccaaaatcctcaagccaggaagtagaagccaa

SEQ ID NO: 87632 - DNA, 100 bp, Homo sapiens
ctcagaagacagagggttttcttttgagggtcatgtaggtacaacagcaaccaagaagatcgatgtctacctccctctgcactcgagccaggacagactg

SEQ ID NO: 87633 - DNA, 74 bp, Homo sapiens
agccaggagcaccgccgaggactccagcacaccgagggactgagcagggggaggaacatttaagctgatggaag

SEQ ID NO: 87634 - DNA, 98 bp, Homo sapiens
cggtttactgtacaccaaataaaccaagcaggacatcaatgagcaagatgtttgtgaaggacaaatatacgtgtatgttcacttacgcctctcaagga

SEQ ID NO: 87635 - DNA, 74 bp, Homo sapiens
tgggttgctgataaaactaaaggtcacgagaagagaatgccttctagatgcaaaatcacctccaaaccagacca

SEQ ID NO: 87636 - DNA, 75 bp, Homo sapiens
gtggttgaacaatggacagtcctggaaatgaatgaaccaaatgcctatggaaatacacctcttcatgtagcctgc

SEQ ID NO: 87637 - DNA, 50 bp, Homo sapiens
gggacacccgggagtcaggaaatgggatcagtgtctttcaatgatgtgac

SEQ ID NO: 87638 - DNA, 100 bp, Homo sapiens
atatgccaaggaaaaactggagagcttcatcaaaaatagtgatagctttgataaggtgttagaacaccaaccttacagctctctgcgatgcaagaaggag

SEQ ID NO: 87639 - DNA, 75 bp, Homo sapiens
aaagtgccaaccatacacatggcaccacctcacacagggaaacgcttttctagaatattgcaggaaactgtgaag

SEQ ID NO: 87640 - DNA, 100 bp, Homo sapiens
ccagaggttccctccgagccccttcctgagaagatcccagatccggaacatggtggcggtgctggaagtcatctccagcctggagaaataccctattacc

SEQ ID NO: 87641 - DNA, 74 bp, Homo sapiens
cagcacttcatccagcagtgcacagttctctcagctactggaagagaaaaacaccctttccattcagctctgcg

SEQ ID NO: 87642 - DNA, 101 bp, Homo sapiens
cggccgcgggagcctcgtggctgcgtcaccgccgcccccccagacaagatggacaccgcggaggaagtatgccaccacgggctgttccctgaccctgcacc

SEQ ID NO: 87643 - DNA, 120 bp, Homo sapiens
tcaggaccctacccagggttctagaaatccaggcaggcatctatcttgaaggacatccaggcagaaattgatgcccacaatgacatatttaaaagcattgacggaaacaggcagaagatg

SEQ ID NO: 87644 - DNA, 90 bp, Homo sapiens
gcacaccaccttctgaaagaaatggcacttcatcaacttgtcaagctgggaaaactcttcagatttttaacattgaaatgaaaagtaaaa

SEQ ID NO: 87645 - DNA, 50 bp, Homo sapiens
ctggagtacaatgccattggagggagtgcatccgccccaacccttttccc

SEQ ID NO: 87646 - DNA, 100 bp, Homo sapiens
ctggaattacaggtgtgagccacggcgccgggccccctagggattttcaggtatcagcagatgttgcacacaaacttggtataccttgctacaatagcag

SEQ ID NO: 87647 - DNA, 108 bp, Homo sapiens
aggatattttttgccatggtggattttgatgaaggctctgatgtatttcagatgtgaaagcaagttgaatacattggtgcagaagcttcatgacttccttgcacactc

SEQ ID NO: 87648 - DNA, 96 bp, Homo sapiens
gaacgtcccgctggatctgacccgaggtaagaagagttcctgggtcaagtggtcaccttcataaaaccgaagacggggactgggagtggagtgacg

SEQ ID NO: 87649 - DNA, 50 bp, Homo sapiens
ctttgtcttgttctcagtcttaaaaagaacaaatggttatgatggagaat

SEQ ID NO: 87650 - DNA, 98 bp, Homo sapiens
tgccaacaagaattccagcatcacccacggagctggtggcactaaagcccctcgggggactctgagcaggtggagtgtgttactcttggggctggaat

SEQ ID NO: 87651 - DNA, 95 bp, Homo sapiens
cggcctgcctgccacagccggactccgccactccggaatcaccccaatgctacagctgatccgggccatcctgaaagtccctgaagatccaaccc

SEQ ID NO: 87652 - DNA, 109 bp, Homo sapiens
tgctggtctgattgtcgtttttacccggccaaagtcactgctgttaacaaggatggagctcatgggacacatgtagctagtatagctgctggacactttccagaagaac

SEQ ID NO: 87653 - DNA, 78 bp, Homo sapiens
ggaagcacagatgtggaaagtgaatgtgcggaaaatgccttcaaatcagatcagtacaatggaacatgaattttcaat

SEQ ID NO: 87654 - DNA, 98 bp, Homo sapiens
caaactgtcccaccagcctgtgctgctgttcctcagggatccatatgtcttgcctgcagccagcggtcctaggcctacttacaagcctccagtctcaa

SEQ ID NO: 87655 - DNA, 90 bp, Homo sapiens
cagattcgcagtggtcgcttcttctccttggtcaccttccgcaaccctgtcattgagaggattcctcggctccgacggcagaagaaaatt

SEQ ID NO: 87656 - DNA, 75 bp, Homo sapiens
cggtgcaaaagaaatgcgtggacagcagtgtcaccaccccaataaacttagacaatgataaataacagagtccta

SEQ ID NO: 87657 - DNA, 75 bp, Homo sapiens
gggccctggcggtggacgagcaggaagctgcggctgagtcgggtgaatcgaaacgcatcaccctggtcctccagc

SEQ ID NO: 87658 - DNA, 83 bp, Homo sapiens
gggtaacccagatcgctactaccccgcagttcccggacatgatcctctccgcctctcgaggtcatgcaagacaagataatctg

SEQ ID NO: 87659 - DNA, 100 bp, Homo sapiens
aaataaaacatcgccccttctgcttcagtgtgaaaggccacgtgaagatgctgcggctgggccgttgctccagggagaactgcaaatatcttcatccacc

SEQ ID NO: 87660 - DNA, 98 bp, Homo sapiens
tcagctgaggcctgagacacaggaccagggccaattcctgtccccccagcagcatggcatcgtgtgctgaaccctctgagccctctgccccactgccc

SEQ ID NO: 87661 - DNA, 90 bp, Homo sapiens
ggactcagcctctcaatcccagtctcatgcttccagcctggataatgattgagccacctgtccaggctcttgtcaggatggtgaagctgt

SEQ ID NO: 87662 - DNA, 100 bp, Homo sapiens
gggaacctactacagtgactccatcttcttcctctcggtcgccatgcatcagatcatgcccaaaggtgggctggatgacactttgcacacaattattgat

SEQ ID NO: 87663 - DNA, 99 bp, Homo sapiens
ttcaagctgaacgcacccgctggttgtggaccgtctgccaggcaccacaaatcccaaggactgcagcaaagccaaaaagctggtgtgtaatatcaacaa

SEQ ID NO: 87664 - DNA, 51 bp, Homo sapiens
gaatatgaatggaaagaaactgctagcgagttcctggggaaaaccccaggg

SEQ ID NO: 87665 - DNA, 51 bp, Homo sapiens
caaggcactgctttttcatgacgagtgtgaacatggctacgcctcttcatt

SEQ ID NO: 87666 - DNA, 90 bp, Homo sapiens
aactcttcgtctcatacggggaccttgcgtacgagaggaggaacagatggagcagcatattgtatgggacgtatgaattctgactgttgg

SEQ ID NO: 87667 - DNA, 75 bp, Homo sapiens
cgctgagtggtttttcggatcatgtctggtggctccgcggattataacagcaggaggattctttgtttgcatcta

SEQ ID NO: 87668 - DNA, 90 bp, Homo sapiens
ttcgcgagcgtctgggcgggtggtagaactccaagctggaggccgcggtggcccagtctgagcagcagggtgaggcggccctcagtgatg

SEQ ID NO: 87669 - DNA, 75 bp, Homo sapiens
gggcaaggctctgacaatccgggccagggaacctcaggacctgacccaaccactgtctacgtggacatgagagcc

SEQ ID NO: 87670 - DNA, 75 bp, Homo sapiens
ccagcacggaaaggagcggcagccatcgcctggagaagaatcagatcacagctttgggggcctggctcctggctg

SEQ ID NO: 87671 - DNA, 100 bp, Homo sapiens
ctcccagccacgagctccacgatgagactttcccctgcctccacctccccttgctggggatggcgacgatgcagagggtgctctgggaggtgccttcccg

SEQ ID NO: 87672 - DNA, 98 bp, Homo sapiens
gggaaaatggcggacgggaaggcgggagacgagaagcctgaaaagtcgcagcgagctggagccgccggagggatttgaaactggacaacatccttctg

SEQ ID NO: 87673 - DNA, 90 bp, Homo sapiens
aacggcgagagtgggcgagaacgtccactgcgggccggcgaaagctgggagaagaaatgggtgaccgttggtgacacatccctacgaatc

SEQ ID NO: 87674 - DNA, 83 bp, Homo sapiens
gttcaaaagtagccataagaaggaaggattcaccacctccaggaaaagagcttactcacatagcatattggtatatcaaaatg

SEQ ID NO: 87675 - DNA, 140 bp, Homo sapiens
ttgatttgcagcagccaacttttcacccatctgtacatcctatgtcaactgcttctcaggtagcaagtacatggggaggaaaaacagcactggaggcaatgtttctataaatcaaagaagagacagtgtgagaatgtcag

SEQ ID NO: 87676 - DNA, 97 bp, Homo sapiens
ccgcgcttgctgctggtaacagggccttgcctagtgggccttccttcccaggtggtgatgatgtccagcaactctgtgaagcaggagaagaggagtt

SEQ ID NO: 87677 - DNA, 74 bp, Homo sapiens
accactgttaccagaggagatgctttccttaacaaaaataggtttttggattcaaagcataaaaaccattacaa

SEQ ID NO: 87678 - DNA, 83 bp, Homo sapiens
ttccaaccttccagccccttttgaaaggtggttggaggcaaagtaaagaagcccggtaaacgtggtcggaagccagccaaaat

SEQ ID NO: 87679 - DNA, 97 bp, Homo sapiens
ggcaagggcttattgttcctgtaattattcgaggtggaggacatattttaccctatgaccagcctctgagagcttttgacatgattaatcgattcat

SEQ ID NO: 87680 - DNA, 75 bp, Homo sapiens
cgggacccagggaaggcagcggccggagcgcgcaagaacattaaccaggtggtatttgttggaaatttcttgaga

SEQ ID NO: 87681 - DNA, 75 bp, Homo sapiens
aaagcctctctcttgcccaaaccacgatgggaatgtacggggctgatgttgacgtcaaccaccacctgactcctg

SEQ ID NO: 87682 - DNA, 96 bp, Homo sapiens
gattctcctgcctcagccttccgagtagctgggattacagattccccaggcatcccccccagcgctggggcccatcagctgttccggggcttcagc

SEQ ID NO: 87683 - DNA, 50 bp, Homo sapiens
ctgggacaaccacgtctccggccacgatgtgactccctgcatgtctcctc

SEQ ID NO: 87684 - DNA, 100 bp, Homo sapiens
cgacgcggcctgggaggataaggttcatcatgcctagtggcgtataagaagaccccgccaccggtccctccacgcaccacttcaaagccgttcatctcag

SEQ ID NO: 87685 - DNA, 75 bp, Homo sapiens
gcgtacccactgcagagtgctgaagacggggtagccacgaggtgtggcatgcagcattttggaaggaaaattgaa

SEQ ID NO: 87686 - DNA, 100 bp, Homo sapiens
tcttgaagagacccacccgcgacctcggtacctcggaccagctctgtaaaagccccgcctctgccttcggataggtgatggcatcagctgagaagggaag

SEQ ID NO: 87687 - DNA, 96 bp, Homo sapiens
ctggacccagcacggagggacttctgcagagagagtgcgcagaaggattccgggagcacagttccgccgagacgtggtgggtcctctggtgcgaaa

SEQ ID NO: 87688 - DNA, 100 bp, Homo sapiens
ctaccgacttcgctcagtataacagctatggggatgtcagcgggggagtgcgagtctctgctggatgaaccgaatcctaacagtccagccaatagccagg

SEQ ID NO: 87689 - DNA, 75 bp, Homo sapiens
gggtgtccgagttgccgccggagaggagtggcctcgcccgcttggtgttgccacatctgcaaacttcctgggaga

SEQ ID NO: 87690 - DNA, 99 bp, Homo sapiens
agactttgacgatggagagcatgcaaagcagatgacggtcgaaccaaacccattccaaagaagggtactgtggagggctttgagcccgcagacaacaag

SEQ ID NO: 87691 - DNA, 75 bp, Homo sapiens
tggaacacagcagagggtgtgtaataaaatacaggttcattttccagacactgaaagagcagaatggctaaataa

SEQ ID NO: 87692 - DNA, 100 bp, Homo sapiens
catcccagtgatgttctggcaggatttgctcaaggagccctggtggcctgctgcatagtttggcagttctctaccagtggaccaatcttttcatccccgt

SEQ ID NO: 87693 - DNA, 83 bp, Homo sapiens
agaagtttcactacatctatagttgtgacctggatatcaacgtccagcttaagatgtgatgaccagtggctgggagacggtgg

SEQ ID NO: 87694 - DNA, 100 bp, Homo sapiens
tgccaggcgctacgcgaagctctttgctgatgccgtacaagagctgctgcctcagtacaaggagagggaagccaacagagcacttatggcaaggcatctc

SEQ ID NO: 87695 - DNA, 50 bp, Homo sapiens
gtccagtaatgtcccggcggatatgatggtggttgctatttcaggcccag

SEQ ID NO: 87696 - DNA, 89 bp, Homo sapiens
ccaagcaaaccgggaaaggagaggatcccggagccgtggccatgaatatgcagactgcagggcttgaaatggacatctgtgatgggcat

SEQ ID NO: 87697 - DNA, 100 bp, Homo sapiens
gggccgcttctcgcgggccggggccacgctcagcgccgagggcgagatcgtgcaggaggcaggtggaagtcatcataaagtttctgtttcacccgtcgtc

SEQ ID NO: 87698 - DNA, 88 bp, Homo sapiens
agggacaacaccgggacacccgcgaggccggaaaatggtgagaagccctaccactgcaactgggacggctgcggctggaagtttgcgc

SEQ ID NO: 87699 - DNA, 100 bp, Homo sapiens
gctggtgccccgtggaggtggatgacgacatcccgcgatggcctgcctgcggctgacctgatccccccaccgctgaagcccaggaaggtctggatcatct

SEQ ID NO: 87700 - DNA, 75 bp, Homo sapiens
gcctcaaaaccgtcctgctgcttgctgaccaaatggccatgacgctgatggagtacctcatcaagaccggctcgg

SEQ ID NO: 87701 - DNA, 50 bp, Homo sapiens
accgctgccgcccagcacgtccagaaaacctggaatcagattactttggc

SEQ ID NO: 87702 - DNA, 100 bp, Homo sapiens
ccagaaccgtgatggcttcattgacaaggaggacctgcacgacatgctggcctcgctggaaaccagccctgagcaaaggggttctgaggtccataccaag

SEQ ID NO: 87703 - DNA, 100 bp, Homo sapiens
agatgtcatacattcatatctgtgtaaaggattgcaagagaagttcttcaagaggaaacccaaagtccttggggtatgtcctggatgatgaatacacaag

SEQ ID NO: 87704 - DNA, 75 bp, Homo sapiens
gaaagctttaggagttcacagtttttttgaccaggaaagaattgtcgctgcttcatcaacaggatgtgtaacagt

SEQ ID NO: 87705 - DNA, 84 bp, Homo sapiens
agtcggtgaccgcgcgactcggcgcccgcccgcggtaagaatgattgatgttggctgatattggagtgctcattcacatgaagt

SEQ ID NO: 87706 - DNA, 80 bp, Homo sapiens
cgaagaacaagaagctccggaattctgggtggatcactggaacaatgagaaggagcggctggtgctggtcacggagcagt

SEQ ID NO: 87707 - DNA, 88 bp, Homo sapiens
tcttcaacctgctgtacagattggcaacggaagaacaggagacttgtgtatgcggatacctgcttcagtaccatcaagttaaaagcag

SEQ ID NO: 87708 - DNA, 80 bp, Homo sapiens
tatcgacgtcgtgatccagaagtccagagctgaggactgcctgtttgcagatgaggaaaatgaggcccaaagaagtgatg

SEQ ID NO: 87709 - DNA, 74 bp, Homo sapiens
gaaagaagatgctaattaaagtgaagtgaggagaaggaggaagtgaccatggacacaagtgaaaacagacctga

SEQ ID NO: 87710 - DNA, 80 bp, Homo sapiens
ctacgaagaagtgcttcagcgggccaggaagcgcatccaggaggtttggtgcacctcgatttggaggaagtagggcaggg

SEQ ID NO: 87711 - DNA, 91 bp, Homo sapiens
tgccattaatgtggatgatcctgatgcagccaattataatgcatcagaagagctaacaattgctggaatgacctttacaacttttgatctt

SEQ ID NO: 87712 - DNA, 100 bp, Homo sapiens
gcccagaagaagggaaggcgcgagtgaggaaaggaggtactgtagagcgcttgcatcaaacacccctaactcagaagtgtgcagccacactgggactcag

SEQ ID NO: 87713 - DNA, 76 bp, Homo sapiens
cggaaaaggtgccaagagcttagttgaactccttatttgaagaacccaagtgattcagcagtgcacagccccttta

SEQ ID NO: 87714 - DNA, 90 bp, Homo sapiens
agttggcaacctcactgagttagaatcagagtttgacaacttaaatgctgcgcatgaaacctctaagttggaaattgaagctagccactc

SEQ ID NO: 87715 - DNA, 80 bp, Homo sapiens
ttgaggaatccactaaacaaatacaggttcttcaagtgtgtgataacttggaaaacttcacctcaggcagtcctttcctg

SEQ ID NO: 87716 - DNA, 83 bp, Homo sapiens
agggcctcgggaagagatgcgaggatgacaaggtttggacttctcccactgagcatgacaagcactcgaaaggctaaatcaac

SEQ ID NO: 87717 - DNA, 75 bp, Homo sapiens
ctgggcgctccggtggcggcggagcacggggtcactctggtgcccattgaggagttcagcccggagttcgtggag

SEQ ID NO: 87718 - DNA, 82 bp, Homo sapiens
gcttggatatcttcggggacctgaagaagatgaacaagcgccagcttctcctcttaagaacaatgatgaaggctcactggac

SEQ ID NO: 87719 - DNA, 50 bp, Homo sapiens
cttcaccgccgacttcaagaagatggcccactgcgtgaccttggttcagc

SEQ ID NO: 87720 - DNA, 50 bp, Homo sapiens
gggctagaagagctgcaaaaggctgtcagcctcgaagcggaggatccctg

SEQ ID NO: 87721 - DNA, 88 bp, Homo sapiens
aaatctacacagtaccagaggtggggactgttgttggaggaacactttccaggtgctcttctgcagcgagaaatggcttactcctgct

SEQ ID NO: 87722 - DNA, 98 bp, Homo sapiens
tcgcgcgtcccctgcacagcacagaggggcagccggagagcctgggaaagggttgtgagtcccggcccagcccctccacccccctgcccccccgatgc

SEQ ID NO: 87723 - DNA, 75 bp, Homo sapiens
aacgggcagtttgtcgaacgatgttggactcatagtcactgccagaaaggtgaatacatcaagacctggaggcca

SEQ ID NO: 87724 - DNA, 50 bp, Homo sapiens
agcagccgccctggagaaacagatcgcattgcagtgtcgagatggctatg

SEQ ID NO: 87725 - DNA, 96 bp, Homo sapiens
caaggctcagctcagggagctgaatattacggcagctaaggaaagtggagaatgaggacatgaataaagaccagatcttgctggaaaaagaagctg

SEQ ID NO: 87726 - DNA, 89 bp, Homo sapiens
agactaatgactgtccgaaacatcgcctccatctgtaatatggaagtctgcggtcttgcagttcttcagactgctttaataaagtgatg

SEQ ID NO: 87727 - DNA, 83 bp, Homo sapiens
ccaccaccctcccagccacctctgaagttgccaggcttcccaacattcttgtctgtggaccagtccatgggcaattggcagat

SEQ ID NO: 87728 - DNA, 83 bp, Homo sapiens
gactccttcggcagtccacccaccgccgccgcctcccagatgctggccaagcatgtcatcactctgcacgtgagcgcactgac

SEQ ID NO: 87729 - DNA, 90 bp, Homo sapiens
gcaagatatggcaccgcaagccgtccccggccacgcgggacggcaatcatttggggaagaatctacagttgctgatggacagagtggatg

SEQ ID NO: 87730 - DNA, 104 bp, Homo sapiens
aaagaaatagcgtctgagatcataggattactgatgctggagtgttgtcatgactggatcttacaataatttcttcagaatgtttgacagaaacacaaagcgag

SEQ ID NO: 87731 - DNA, 98 bp, Homo sapiens
tcagagcccgccagaccttcctctgaaggcaaagtgacctgtggtgacagcgggaaggtgaccacagtcgtagccactctaggccaaggcccagagcg

SEQ ID NO: 87732 - DNA, 82 bp, Homo sapiens
tctttgcaacatttcaggaaaacagagaaagaagtgataggagggctctgtaggacggcccacctccatggagacggcccac

SEQ ID NO: 87733 - DNA, 90 bp, Homo sapiens
cccaggggagttctctgtgtctgtgaaaaaacttggaatataacgtggagcctcaagaaatctcacaccctgacgtgggacgctatttct

SEQ ID NO: 87734 - DNA, 75 bp, Homo sapiens
gcggttccaccgctctgaaaccgatttctaacagagaggttgtgggctgcacactgcagaaagatacagctgaaa

SEQ ID NO: 87735 - DNA, 101 bp, Homo sapiens
ggggactctgcctcgtgccgctgagcctggcgcagatcggagtgtgaggaagaggctgtctgtgtcattatgtgtgcgtcggtcaagtataatatccgggg

SEQ ID NO: 87736 - DNA, 74 bp, Homo sapiens
cctggtgcgtcctcgtgtgggcaggtacaattttgtgatgctggccctgtcctcctcattcctggtgttatcct

SEQ ID NO: 87737 - DNA, 97 bp, Homo sapiens
gaaaaaggatcaagtgactgctcaggaaattttccaagacaacaagtctggaaaagtttgaaattccagtaaaaattcgtttgagtcctgaaccgtg

SEQ ID NO: 87738 - DNA, 50 bp, Homo sapiens
gaaccgcgcggccgaaccctccggcagcgtctatcccagactaccggggc

SEQ ID NO: 87739 - DNA, 138 bp, Homo sapiens
gggatcaaagagcagtgggggttgctgacccagaggagagttctccaaacatgatcgtttactgcaaagctaatggaggttggcaggatgctactaccccttcatcagtgacctcccctacagaaggccctggcagtg

SEQ ID NO: 87740 - DNA, 100 bp, Homo sapiens
ctgcctgaagttacatttagagactgaaatcactgcaccttaaaaacaaaagattgagctgcactgtattcctatcatggggaatttcagaggtcatgcc

SEQ ID NO: 87741 - DNA, 75 bp, Homo sapiens
tcatgttctgggacttaggagggcaggaagagctgcagtctttgtgggacaagcgggctgacgcacgaggcacac

SEQ ID NO: 87742 - DNA, 100 bp, Homo sapiens
cctctgtgcttctggaggcaagaacagccctgtggcccccacagcccagcccaaagccccaccctcaagaactccccagtcgggatcagccccaacagcc

SEQ ID NO: 87743 - DNA, 50 bp, Homo sapiens
gggagccgccgcccgggctggactgcggcctccctggagcacgaggaggg

SEQ ID NO: 87744 - DNA, 98 bp, Homo sapiens
ctctcctctggggactgcagagaagcaggacctcgggccatgggttacttgtctgcaagacttttttggtgatgacgatgtttttattgcatgtggac

SEQ ID NO: 87745 - DNA, 100 bp, Homo sapiens
gataataatttacaatgaatggacacagtgatgaagaaagtgttagaaacagtagtggagaatcaagaaaccactcaagaaggttattattgaagaaact

SEQ ID NO: 87746 - DNA, 101 bp, Homo sapiens
cgtgaccgtcgctagaactcagttgtgcgttgcggccagtcgccactgctgttcgagaaatggctgctactaccttaagcggtctgctacagtgtaacttt

SEQ ID NO: 87747 - DNA, 74 bp, Homo sapiens
cgtgttcggtgaccgcagcactggggaaacgatccgctcccaaaacgaatttctctgcaaagaatgtccaaaaa

SEQ ID NO: 87748 - DNA, 83 bp, Homo sapiens
gccgcgaaccgcagtatcatgctggccaagaagatcatcattaaggacggaggcacgaaccgggctgtgggtcggcccaaggg

SEQ ID NO: 87749 - DNA, 99 bp, Homo sapiens
tcaccgcgctggtggacatcgtcaggggggcatgtgctctgtgtacctgaaggacagtgagaaggttgtcagcatttccagtgagcacctggagcctat

SEQ ID NO: 87750 - DNA, 74 bp, Homo sapiens
ggccgcaggcagtcccgcggcagcaggatcacaggagccttcacgtaaatgggtccagtcatgcctcccagtaa

SEQ ID NO: 87751 - DNA, 90 bp, Homo sapiens
gcagaatggaataggcattaatccatactgtgctctcattgaagaagcatatggatccaattgatccagcaagcactgtgattataattc

SEQ ID NO: 87752 - DNA, 111 bp, Homo sapiens
gcggcggccgaggctacagagccggcggcaggggatggcaagatagcggcgcgggagcgtaccgaatggcggcgctagatagtaaggcatcagggaagatgggaatgcgag

SEQ ID NO: 87753 - DNA, 83 bp, Homo sapiens
cctggctcccttctgccccagctccgtctcggcggcggcgggtgaaatgacaatggatgctctgttggctcgattgaaacttc

SEQ ID NO: 87754 - DNA, 100 bp, Homo sapiens
caggacccactcgcaactcacacaggtcatcaacgagcttcggaacacctcctaccgtgctgagcttgcaagacctctgctgccgggcggtcgtgtcctg

SEQ ID NO: 87755 - DNA, 87 bp, Homo sapiens
cttccatcagtcggatacacacatattcatcatcatgggtgcatcgcctgctgatcttaagaagagaatagaatctttaattgaccg

SEQ ID NO: 87756 - DNA, 90 bp, Homo sapiens
gaaaatctcaggaatctggtctcattgggaatagccaggccagaagaaggaaggcctgtggtgagtgggacaggaaatgacatcaccacc

SEQ ID NO: 87757 - DNA, 100 bp, Homo sapiens
gagaaccctacttgcctaaatgaggaatgtctttcctaccatctaaaatacgaaggtttctggctggcgcgagcccagcattgacctgctgcaggccttc

SEQ ID NO: 87758 - DNA, 80 bp, Homo sapiens
ctcccgcaccatggaggaggacgacagctacggccctgggcagtgacggggttcgggtgaccatggagagtgcgctcacc

SEQ ID NO: 87759 - DNA, 100 bp, Homo sapiens
aaggggagacacattttatgttgtgtcatttcgaaggtccaacatgtttaccgtggctgatgtgttgagtcaagatgaactgcgcaaaaagctataccag

SEQ ID NO: 87760 - DNA, 80 bp, Homo sapiens
tcacgacccattcaggagcctccaggagcccagacaccagccccccaccatgataaaagccctggagctcgacagcaatc

SEQ ID NO: 87761 - DNA, 107 bp, Homo sapiens
ttggcaagatttgatgctcttgtgctcagtgacatcattcagttgaggagctcaagcttgggaaaatggtgtgcattccttgtatcgtcattccagttctgctctgg

SEQ ID NO: 87762 - DNA, 117 bp, Homo sapiens
caacgagatgctgggcctcgaggagggggaccttgaagacgacttcgaccctgcccagcacgaccagctcatgcagagacgagttgtactgctgtcacaggaaatggacgctggatt

SEQ ID NO: 87763 - DNA, 100 bp, Homo sapiens
gaagggagccatgagccatgcgctgtgatgctccagtgagtgaactgtccctcgagctgcttctgcttcaggttgtcttgccagcattactcgaacaggg

SEQ ID NO: 87764 - DNA, 88 bp, Homo sapiens
gtaaccagctgaaaacgcatgtaagaactcatacagtttcttgcagaacataaattattaggaaacattaaaaatgtggccaagacag

SEQ ID NO: 87765 - DNA, 75 bp, Homo sapiens
ttatattttgagcgagttttacctgatgtatcggaacagtacaacatctaaagagtaaatttggaaaaggctact

SEQ ID NO: 87766 - DNA, 75 bp, Homo sapiens
ctggctggattgaggagtagaaggctcaaacaacccaagaactgaagatgtgtggctacaatggctctgtccctt

SEQ ID NO: 87767 - DNA, 100 bp, Homo sapiens
gcatgtgcttcactgccagttctccgcgtggtacccgttcttccgaggcgttaccatcaagagccaaaactggacaagccaaggcatctgtagccaaagt

SEQ ID NO: 87768 - DNA, 83 bp, Homo sapiens
ccatctatgagttcaagatcacatggtggttatggaaacaaaggacatgctttacatcgtcactgaatttgctaaaaatggag

SEQ ID NO: 87769 - DNA, 88 bp, Homo sapiens
gcttagagcaggccgcttggttctgacccagctgagggtgtgggccgaagatatgctcatgtggtgttgaggaaagcagacattgacc

SEQ ID NO: 87770 - DNA, 83 bp, Homo sapiens
gttgacattacttttatttgaaggaacgtatattagaggtgccgtgagcgatgtggagatgcaggaacactatgatgagtttt

SEQ ID NO: 87771 - DNA, 100 bp, Homo sapiens
atctcaccaatttcaaatcgggtttctggtcctcataccgtgtggttgagtgaaatcaaaacttccacgatagcaatgctgattggacaaagaatgtgtt

SEQ ID NO: 87772 - DNA, 100 bp, Homo sapiens
tggaatccatgtttctggacgcggatttttggcctcatactctgttatagataaacaagcattaaagggcagtatttaaagtcagttggcaagcagtgga

SEQ ID NO: 87773 - DNA, 82 bp, Homo sapiens
gggcggcttcctggcctgggcgctccggtggcggcggagctgtgagaaacgaccgaaacaagaagaagaaggaggtgcccaa

SEQ ID NO: 87774 - DNA, 75 bp, Homo sapiens
agttcattgaagctatcactgtcagtgctgtctaaagcatcacaaggtagtgaccttgaacaaaatgaagcctca

SEQ ID NO: 87775 - DNA, 83 bp, Homo sapiens
tgcttctctgcgagggcctctttgacccttaccaaacctggcggcgccagcgcagtggtctattgtaggggcagagggcttgt

SEQ ID NO: 87776 - DNA, 80 bp, Homo sapiens
catggagacatccgctaaaacatcaatgaatgtaaatgaaatattcatggcaataggaaaaccgtcttcagatacagtcc

SEQ ID NO: 87777 - DNA, 100 bp, Homo sapiens
tcggcagtcgcgaagcagcaaccatgatagtagtgatcttgaactaaggcttgtaggtggaactaaccgctgtatggggagagtagagctgaaaatccaa

SEQ ID NO: 87778 - DNA, 101 bp, Homo sapiens
ttggaacttagtgttatgccaaaagatgaagacattctccaagtggtgcctttcctgaagactatcttctggtctcgaaatggacatgatagatccaggga

SEQ ID NO: 87779 - DNA, 98 bp, Homo sapiens
gcgcgcgcctcgactcgctcagccgctgcgtggccgcgccgcccggcggcaagtttgacaagtatgcgcccaagctggacagcccctacttccgacat

SEQ ID NO: 87780 - DNA, 100 bp, Homo sapiens
ggacaagcagaacctcttcgccattatccagggtgggctggacgcagatctccgggccacctgccttgaagatcagtcgcatcgaatacattcattcaaa

SEQ ID NO: 87781 - DNA, 100 bp, Homo sapiens
agaatgttggctaccagggtatttagcctagttggcaagcgagcaatttccacctctgtgtgtgtacgagctcatgacaaatcttcctattttcaagctg

SEQ ID NO: 87782 - DNA, 82 bp, Homo sapiens
gagacacggtggaaacgcttatgcttcctgggtctgcaggtccagccggctggcaccctccatgtacccaggggagattcca

SEQ ID NO: 87783 - DNA, 76 bp, Homo sapiens
ctacagtgacgccctcacggagaagcagtggctaaggagttgctacgatggaagttaaagggaaaaagcaattcac

SEQ ID NO: 87784 - DNA, 76 bp, Homo sapiens
cgcatgatccgttctgaggtgctccgcctggtggacgccggttatcaatactctggctgaccatcatcatcgtggg

SEQ ID NO: 87785 - DNA, 83 bp, Homo sapiens
cgaagtgccgcggaaagtggaggttttgcactgattgcaaaaataaagtcctccgagcatacaatatccttattggtgaactt

SEQ ID NO: 87786 - DNA, 100 bp, Homo sapiens
gatctacagctttcactatggggtggagacgtggtactcagcaagctcgagttaaagttggatgtgctggaacagtaccttccactggaagaatctcaaa

SEQ ID NO: 87787 - DNA, 75 bp, Homo sapiens
atttcagtttgaaactgaagttcccgatgcgtacaacatggtgaaagtggggctgatccaacaattgaaactgac

SEQ ID NO: 87788 - DNA, 100 bp, Homo sapiens
tggtgcttatgttgtctaattaacaaagaaccacagaattctggacaatcaaaacttaactcctggatacagagatcctgcatattttgatgaaaattgg

SEQ ID NO: 87789 - DNA, 50 bp, Homo sapiens
gaattaaatgccgagaaggccagtacggttttgagcaaaattttggactg

SEQ ID NO: 87790 - DNA, 98 bp, Homo sapiens
gagaagcctgaaaagtcgcagcgagctggagccgccggagggccgttgctccagggagaactgcaaatatcttcatccacccccacatttaaaaacgc

SEQ ID NO: 87791 - DNA, 83 bp, Homo sapiens
ctggaggctgagtacgacagcctcaaacaggagctggagcagctcaaagaggtataatgggtctctcccaaatggcgatagag

SEQ ID NO: 87792 - DNA, 141 bp, Homo sapiens
cgcagcgcggccaccgccccgggacccgcgccgctgccctccggctccgcgggcggcccacggcgaggaaggcgtggaagtgcgagtggccagaatcttcaacacctttgggccacgcatgcacatgaacgatgggcgagt

SEQ ID NO: 87793 - DNA, 75 bp, Homo sapiens
tacctgtaaattatgtgaaacctccaaatgtggacctgaaggaaaagattatgcccttcattggctagtgctggg

SEQ ID NO: 87794 - DNA, 100 bp, Homo sapiens
gcgagaaattgctcaggactttaaaacagatctgcgcttccagagcgcagctatcggtgctttgcaggagggagtgaggctgctgaggggtccagaaacc

SEQ ID NO: 87795 - DNA, 100 bp, Homo sapiens
acggagttctggtaatttggaagaaggaagagcaacctggaaactgacaggaaaggatgacaagttgggagtcacaggacgacgtggaggcggcgccgga

SEQ ID NO: 87796 - DNA, 75 bp, Homo sapiens
tccttcccagtttgaacttttaaaagtattagggcagggatcatttggaaaggcggcgctggcggcggccctggg

SEQ ID NO: 87797 - DNA, 121 bp, Homo sapiens
gtcggaaccatgccttatggactggagaaaagttccctcaaacagcactgaaactgtaatagaatctggaggtggtataacagacagaaatctacaaaggatccttgagggttcaggtgct

SEQ ID NO: 87798 - DNA, 100 bp, Homo sapiens
atggcttggcacctggcagcaatgggcaagacaaaggctgaagtccctgctgtaaaggacatgctggaagctggtattctagatacttacctgggaaaat

SEQ ID NO: 87799 - DNA, 83 bp, Homo sapiens
accatgcgcgagatcgtgcacatccaggcgggccagtgcggcaaccagatcggcgccaagtgtcaacagcatctccaccctgg

SEQ ID NO: 87800 - DNA, 90 bp, Homo sapiens
ctgccattccgatggcccctgatatgtcaggagagagtgttgaatttcatgaaagaggaaagaatcataaggaaaatgtggcaaaaagga

SEQ ID NO: 87801 - DNA, 90 bp, Homo sapiens
tcacagacaccacctccttccctctcttcacatggatcctcttcaagcttaaacctggatttaatccagagactgacttcactatagaac

SEQ ID NO: 87802 - DNA, 83 bp, Homo sapiens
gaccttgttgctgttgtggttcactgtggaagggccatgaaatgacaagcattggactgctacttggtgtttctgctgcaaaa

SEQ ID NO: 87803 - DNA, 75 bp, Homo sapiens
gtcctttgatgtcagcctggaggtcagccaggtacttttccagaagatgaaagcagctctcggaccctggctcct

SEQ ID NO: 87804 - DNA, 100 bp, Homo sapiens
tatgaaaaagaactacatattgctttagaaaaggttgatactgcctctccaagcccaatggaaacatctggatgtgcccctgcagaagaagacctgtgtc

SEQ ID NO: 87805 - DNA, 141 bp, Homo sapiens
ctgagaaaccttggacagcagattttggtttaatatctgattgggacaacattcagacccatttccagtcatgaaacatgggcctggaattgatatattcacacctggtaaacctggagaatatgacttggaaggtggtat

SEQ ID NO: 87806 - DNA, 75 bp, Homo sapiens
aaagaagtcattccttttttgaagacatgaagagtatttctggagaagaatcatcccatggagtgattatgacaa

SEQ ID NO: 87807 - DNA, 82 bp, Homo sapiens
aagacatttcctgctcggaaccttgtttactaattatccagctatgggacacagcaggacaagaacgattcagaaagagcat

SEQ ID NO: 87808 - DNA, 124 bp, Homo sapiens
gatgtactcagcccacatgcccgctcacctgcgctgtgatgcctgcagagctgtggcttaccaggctgcctgctgtttcccggggagatcatgaaacgaggtcgccttcccagcagcagtgagg

SEQ ID NO: 87809 - DNA, 97 bp, Homo sapiens
atagtctccagcgggcctggactgtgggctggtgtgtggaactgctgtcatataggatgaagaaaaaaattcaccgagctgaagttacagaagaatt

SEQ ID NO: 87810 - DNA, 76 bp, Homo sapiens
tcctgggttcatgatgtacgctaactctcaggagccttctccgcagttggcttcctcggtagcttccacacggagc

SEQ ID NO: 87811 - DNA, 98 bp, Homo sapiens
tggagcaagaagaggacctgtgcagggcagagcaggaggccccccgagatgcggttcatgctattattcagccggcagggaaaactgcggctgcaaaa

SEQ ID NO: 87812 - DNA, 100 bp, Homo sapiens
agatggccagtcacgagaacccaggagcttactccacgggaacagcctctagataatctgagttgttgaaaatacgaagcctgttactcgtgaacagtgg

SEQ ID NO: 87813 - DNA, 100 bp, Homo sapiens
gagtatctactgacaaaagacagggcggcgactggcggcgcgatggacctgaccgggctcctgctggacgaagaaggcaccttctccctcgccggcttcc

SEQ ID NO: 87814 - DNA, 100 bp, Homo sapiens
gatactgattccttcaacactgtagcagagatcactgggagcaaatatccagaacagatcatcaatgctgtggtactgttgattttattgagtgccctgg

SEQ ID NO: 87815 - DNA, 50 bp, Homo sapiens
aaggattccaagtaactcttatttggcaatccaccttccaaagaggtgcc

SEQ ID NO: 87816 - DNA, 74 bp, Homo sapiens
cctcagtcagcatcagcatggggcatgcagagccactccatccccaaattcaagattagaaagatccctgactg

SEQ ID NO: 87817 - DNA, 90 bp, Homo sapiens
ccccatcaagggaatgaacttcacaaagttacagtcccaccccacagtcatgctttttgcacttatcgcactggaaaagtttgcacagac

SEQ ID NO: 87818 - DNA, 100 bp, Homo sapiens
gaatgatcagctttgactgctttatgaccatattaatgcagatgaggcgttctttgagtgggatcctgtctgccttgccgtttgttgttggatgtatctg

SEQ ID NO: 87819 - DNA, 75 bp, Homo sapiens
actggactcccgagacccttggaacccaggtttctgctgatgtactccacggttctgtgcagctattacaattca

SEQ ID NO: 87820 - DNA, 89 bp, Homo sapiens
aggactgctctcctactacacggtttccttcaagcaggatggtacctttccactttcctccatcaaaatgtgcactttggaacccaacg

SEQ ID NO: 87821 - DNA, 76 bp, Homo sapiens
attttatcaaatgtgtggaacagaagacggtcctaaaatctctacacttgccaaaaaacaacagtctttatgtcct

SEQ ID NO: 87822 - DNA, 100 bp, Homo sapiens
gttgttactgatgcagagatacagcaaaagagtctacatagatacgaggaggaaagctcatgatcacttacacccgtaaaagtgacgctggcaaatatgt

SEQ ID NO: 87823 - DNA, 100 bp, Homo sapiens
agatgctgaaaaatcaatgctgtccaaacttaaacatggaatgggtaccacagaccatgtcatcgtcctggcgtccacgaaccgagctgacattttggac

SEQ ID NO: 87824 - DNA, 89 bp, Homo sapiens
aaaaaatggcactatccttcgattaaccacatctccaacggtctggaaaatcccgaagcagaagcccgtattcatctaggcattcaaga

SEQ ID NO: 87825 - DNA, 74 bp, Homo sapiens
atttggccttctactctagtacagtagtatctctattgattggactactagagtgaagcaaattgccaaattgt

SEQ ID NO: 87826 - DNA, 90 bp, Homo sapiens
ctagctcgagcagcaggagcagcccgcaccggacaacttgcgagccatggggctggcggatgcgtcgggctgttccacattgattttggc

SEQ ID NO: 87827 - DNA, 100 bp, Homo sapiens
atgtagttcctgagcatgaggctcccagcagtgagtactttaggatggagctgatgcatgctgaaaaactgaggaaggagaaggaagaatttgaaaaagc

SEQ ID NO: 87828 - DNA, 83 bp, Homo sapiens
caagacggcggtagcgcccatcgagcgggtcaagctgctgctgcaggtttgtgcttctagacttgacccagattattttattt

SEQ ID NO: 87829 - DNA, 101 bp, Homo sapiens
gaaccacactgtttaccggatctcagctccgacgcccgaggagaaggaggagtggattaagtgcattaagagcctcctcaacaagcccaagagtgagatga

SEQ ID NO: 87830 - DNA, 101 bp, Homo sapiens
gagagttaacttctgtttacatggaactcagacatctgcaaatcatgttccctgtattgaacactgatatacaaggaatgaatagaagtcaagaaaaacag

SEQ ID NO: 87831 - DNA, 100 bp, Homo sapiens
tcaccgcaacctccgcctcccagctgtcacgggaagtctttttaggataaacgtaggcctgcgtggcctggtggctggtggcataattggagccttgctg

SEQ ID NO: 87832 - DNA, 88 bp, Homo sapiens
ccttccttaaggagcagagcgggaatccaagcatggctctggcctgctgcatgcccaagaatgcagatgagctgcttcagaaagagca

SEQ ID NO: 87833 - DNA, 80 bp, Homo sapiens
gaacagtaaagttggaacacagcagagggtgtgtaataaaatacaggaactgtggctgcaccatctgtcttcatcttccc

SEQ ID NO: 87834 - DNA, 101 bp, Homo sapiens
aaggaacctctacaacgaaggtgaagccacggaagataagatttccctcgatgatgtgcttctgagtgctctgctgaggaacaatgggaagtctgcccagc

SEQ ID NO: 87835 - DNA, 103 bp, Homo sapiens
aagaactccaagttactggacaccaggacaaaccaggcggtggaatccatccaggccgaggacgagagcgccaagctgtgcaagcgccggatcgagcacctca

SEQ ID NO: 87836 - DNA, 75 bp, Homo sapiens
gagaacccttccggtgggctaggtactgagcgcgcgaggtctatgcctctcagcgaatgagagctggcaaaggca

SEQ ID NO: 87837 - DNA, 100 bp, Homo sapiens
tgaggagaagtatgaggtggtgaaactcaagatccccatggacaacaaggagggaagtcgagacaacatgagtgtgattttgatctgttttccaaatgca

SEQ ID NO: 87838 - DNA, 90 bp, Homo sapiens
ggaaaagaggactggagtggtttgtctgtgatggctggaagttcctctgtaccaggtctttcatggtgctgattcagacatagaatggct

SEQ ID NO: 87839 - DNA, 74 bp, Homo sapiens
ctgggccgcctggcggccatcgtggctaaacagtacatcgcggtgcacgtggtcccggaccagctcatggcctt

SEQ ID NO: 87840 - DNA, 100 bp, Homo sapiens
taaggaagcaaggagggaagtggaagttaaattgactccgctgattctgccaatgttttcagttgcaccaagcttagccaccaatgcatcagcagccgcc

SEQ ID NO: 87841 - DNA, 100 bp, Homo sapiens
tttgctagtgcggatacagcttatgttttggcttattcaattatcatgttgaccacagaccttcacagtccacagggacatgttgtcttaacagattttg

SEQ ID NO: 87842 - DNA, 100 bp, Homo sapiens
tttgatggaacaatcattagttcagtgcagtgtctgacttgtgacaggaaagaaatcgtggtgcttggagtaagtctgaaacccggaaactaatcaaggc

SEQ ID NO: 87843 - DNA, 82 bp, Homo sapiens
tctccatgttcaacagcacccagagcctcatctgcaacccacgtggtctcctgtgagaatcttctcgacagttacttatggg

SEQ ID NO: 87844 - DNA, 90 bp, Homo sapiens
ttcagagggaaaaaggagaaagttaactgaattggtgacacttcgggtctctcacagaggaagctgcagttgtggttggataatccaaag

SEQ ID NO: 87845 - DNA, 100 bp, Homo sapiens
gagacacacaaatctaaaaggcgcgagagaatggatgatagtagtatgctgagctttttataccaccaaagatcaacagaagaacccagtggaagctgag

SEQ ID NO: 87846 - DNA, 98 bp, Homo sapiens
ggcgctgccgctcccgggcggccgcgggcgggtgaggaattttaaattggaacaagagcaagaaaaaaacaaaatcttgtcagaagcactggagacgc

SEQ ID NO: 87847 - DNA, 100 bp, Homo sapiens
ggagctgcacaagctgctggacaaggaccctgacctgcctgtcgtcgtggtggccaacaagcaggaatgtatcctgtcaggtataatgtcagtgaatggc

SEQ ID NO: 87848 - DNA, 83 bp, Homo sapiens
aagattccatttatagacacccttcattgcaagttcttatttgtaaggtcagggaagtcaaagatgcatccctgagttcttcc

SEQ ID NO: 87849 - DNA, 74 bp, Homo sapiens
tgctggaacacagcttcactttgctgctgggatgaaagcagctccatcagtagtggactcagcgatgcctcaga

SEQ ID NO: 87850 - DNA, 100 bp, Homo sapiens
gacccttaataaagtgtttgcatctcagtggttgaatcataggcaagtggtgtgtggcacaaaatgcaacacgtgttcaagaaggaagtgtatcttcata

SEQ ID NO: 87851 - DNA, 89 bp, Homo sapiens
cgactcggtcctgtttcgacagcgaacatgtcgcggcctgtcagtgctacagatgaagcatggcgactattatccacttacctggagag

SEQ ID NO: 87852 - DNA, 55 bp, Homo sapiens
cattatttgagatgagttacatcttggagctttgtgctgatgaacatggtcacct

SEQ ID NO: 87853 - DNA, 100 bp, Homo sapiens
ggaaaacctgtgtgttctccaccatagctttggactctcttgttcttgaaaacttaagtacccaggctcatgctgaagattcggttatggaccatcattt

SEQ ID NO: 87854 - DNA, 100 bp, Homo sapiens
ggcggaacggattccagcatggacgtcttccacctggagggcatgactacatctgtcatgatttctccacccaggtgaactcctccctcacctccccgac

SEQ ID NO: 87855 - DNA, 75 bp, Homo sapiens
caaaaacttgtgccacaactatagcatatccacatggtcttgtagatgatactctccaagctgtaaggaagaagt

SEQ ID NO: 87856 - DNA, 89 bp, Homo sapiens
gggtgttgggcctgacgatcctgacctggtacgagcccggaacattcttcacaagaaaggtactccaaagattcaggtttactcacgtc

SEQ ID NO: 87857 - DNA, 100 bp, Homo sapiens
acgagccggccgtcccgggccgggggacccgcccgccatggccaccaagacctgaaggaaaagattatgcccttcattggctagtgctggggactcatac

SEQ ID NO: 87858 - DNA, 98 bp, Homo sapiens
ggcccaggaggacgactgggaccgggacctgctgctggacccggcctgggagaagcagcagcgcaaggtgaaggacttaactaagtacttggatccca

SEQ ID NO: 87859 - DNA, 82 bp, Homo sapiens
tcccggccaccagcaattgtccgatcacttaggaaaatggctgttggtatgatcctagcatgcctggcatttgcagttgcgg

SEQ ID NO: 87860 - DNA, 75 bp, Homo sapiens
tccagatcgggatttacgtggagatcaagcgcagcgatggtgatctgcaactctttcaccatctgtaatgcggag

SEQ ID NO: 87861 - DNA, 95 bp, Homo sapiens
ctcggctttcctggtcagcagcgacttgggtgagaaggactggcagaaatacgagactgctcggcggctgaaaaaatgtgtggacaagatccgga

SEQ ID NO: 87862 - DNA, 100 bp, Homo sapiens
aggactcagaggccgccatcaaccgccagatcaacctggagctctacgcctcctacgtttacctgtccatgggttaccgtaatttctatgatcgatacag

SEQ ID NO: 87863 - DNA, 114 bp, Homo sapiens
cgagaagctgccgccgaacgacaggacgttggggcggcctggctccctcagggaactctaatgatccaggacaaagaagttaccctggagtatgtatcaagcctggatttttgg

SEQ ID NO: 87864 - DNA, 95 bp, Homo sapiens
aagcatagatatgaatggctgctagttgatcattgaatctggatggtttttcgttggaatatacgttgcacatttatggcgattctgagtgtgag

SEQ ID NO: 87865 - DNA, 72 bp, Homo sapiens
caaggaatgcaagggccacctgttcctcagttccaaccacaggtgctggagaatctggtaaaagcaccattg

SEQ ID NO: 87866 - DNA, 100 bp, Homo sapiens
atctgcggaaaggataggggggaggaagacttaacactgcaacaacaggtgcagattcactttataggaacagcttcagcttcagtgatgaaaaactgaa

SEQ ID NO: 87867 - DNA, 100 bp, Homo sapiens
gttgacaagactgaggatagtttagaaggatgcttggattgtctgcttcaagccctggctcaaaatagcattatattgtacttctagcaagtgcaccaac

SEQ ID NO: 87868 - DNA, 82 bp, Homo sapiens
ggaaaatgccaacgccgtgtctgaagattccttttggttccaagtccaatatggcaactctaaaggatcagctgatttataa

SEQ ID NO: 87869 - DNA, 74 bp, Homo sapiens
taggccttctggagaaacttctgttccacctcctcctgcaggccctcgggaccaaggatcacgtcatgactccg

SEQ ID NO: 87870 - DNA, 96 bp, Homo sapiens
aaggaggcagacaaaggcgggcgcagcccagcagccgtgcgggcaccgggcgaggcaggcccactcctcccggaacccaagacagaccaggatgag

SEQ ID NO: 87871 - DNA, 96 bp, Homo sapiens
aagagcgacgccgccgtgtgcccaacggtcggtgtccccggctgaggcagcgcggccgcagcagccctctccaagaagcccaagaaacatcccaaa

SEQ ID NO: 87872 - DNA, 80 bp, Homo sapiens
cgacgagaagccccaacagcacggcgtggcctctcagcctcgaagctccaccatgaggcgaggtggatggaggaagcgag

SEQ ID NO: 87873 - DNA, 87 bp, Homo sapiens
acgaggacgacaccgatttcctctcgccgagcggcgggcgcagacggggaagcggagccaacatgccagtggcccggagctgggttt

SEQ ID NO: 87874 - DNA, 82 bp, Homo sapiens
tgaaacaagcctttgctgaattggagagctggccaagtcatcaaggcatgggacattggggtggctaccatgaagaaaggag

SEQ ID NO: 87875 - DNA, 98 bp, Homo sapiens
tgattccagagagctaaagccgatggtattgttgcagcatctggcagtgagactgaggatgaggacagcatggacattcccttggacctttcttcatc

SEQ ID NO: 87876 - DNA, 74 bp, Homo sapiens
ttgtcccctcagcgagtggcagcagctgcctcaagaggagcagacccagattgatcactatgttggcatcgccc

SEQ ID NO: 87877 - DNA, 82 bp, Homo sapiens
ccctaccttactggacagtcaaatcaggaagcctggaagcacgcaatccagaaggccaagcacatgcccgacccctgggctg

SEQ ID NO: 87878 - DNA, 81 bp, Homo sapiens
ttatttgtggtgtacttctgggaccttcaggactaaatagtattaaggttgaggaacaggttagcaccactgagagagtgt

SEQ ID NO: 87879 - DNA, 97 bp, Homo sapiens
tcacctaccatgggacctggcaaagtacttcagaacttttattccttccagaagcaggtgtttgatgtacagaggaaagtcacctataggaacctga

SEQ ID NO: 87880 - DNA, 100 bp, Homo sapiens
gggaaaccaggcatctctgggtgggcaacttacccgagaacgtgcgggaagagaagatcatcgagcatttcaaacggaaagcgtctctagcagctgatat

SEQ ID NO: 87881 - DNA, 83 bp, Homo sapiens
ccaaacatctggttggcaatatgatactcagtgttcactggcaggaggctgaactccagtgcacccagttagacttggagcgg

SEQ ID NO: 87882 - DNA, 74 bp, Homo sapiens
atccccttagcagcagcctctgtttaattggttggggtcagataagaagaggagtgacaatcaagccaacagta

SEQ ID NO: 87883 - DNA, 100 bp, Homo sapiens
ggaccaaggaagaagagaccactagaatctggaattgaggatggagctatgacattgaagagaggaaggttccaaaacccaagtccaagtcttatggtgc

SEQ ID NO: 87884 - DNA, 75 bp, Homo sapiens
gaaggactgatcaagaaacacagctagattagtgacaagagctggggttaggatccggttggactctgacatcgg

SEQ ID NO: 87885 - DNA, 100 bp, Homo sapiens
agagacctctacttagctcagcaattcttaccttatccaaaaggaaagtcctcggccgtagagattcagatgatgaccactcccgaaaccattctccctc

SEQ ID NO: 87886 - DNA, 101 bp, Homo sapiens
cagacccagagattctgattgggaatgtatcctgtcaggtataatgtcagtgaatggcaagaaagttcttcatatggatcgaaacccttactacggaggag

SEQ ID NO: 87887 - DNA, 82 bp, Homo sapiens
ccattgcacttcagtatctcaggcggcaccctgtccccgaggaggggaccatgacacaatctgggcggaccccggcaaatac

SEQ ID NO: 87888 - DNA, 89 bp, Homo sapiens
gcccgcgcgacgagcaggtggcggcggctgcagttgtcgacaacagtagcaactgggcagtgtgtgggaaaagctgcggtgtcatctcc

SEQ ID NO: 87889 - DNA, 83 bp, Homo sapiens
gacaacatttcctctcgggaagagatagatcatgcagagtattacctttacaacctcacgattttgatgaatgtcgatttgat

SEQ ID NO: 87890 - DNA, 50 bp, Homo sapiens
atgaagcactgaatcacccatggcttaagaaccagcagacctggataaaa

SEQ ID NO: 87891 - DNA, 90 bp, Homo sapiens
gacacaaaaggaaaaaataaaaagaagaagaagaaaagcaagatactgaaatgtgatgaacatagatcacccctgacctgctacctcggc

SEQ ID NO: 87892 - DNA, 97 bp, Homo sapiens
cacaaaccgctgccagaaaatacaaaactttttaccaacaaaaaaaagcaagtagttatactcaggaagaacttcaagacacttacgggtttcttct

SEQ ID NO: 87893 - DNA, 90 bp, Homo sapiens
gcgccgagcgcggggtcttggtccaccttccagcacaaggagctgatggccgctgacaggggacgcagcttattctaccagattccatga

SEQ ID NO: 87894 - DNA, 100 bp, Homo sapiens
tgctgctgccccggacccgggcggacgagcacgaacacacgcattcccatggtttggcatggacatcggtggaacgctggttaaattggtgtatttcgag

SEQ ID NO: 87895 - DNA, 90 bp, Homo sapiens
ctcgactggcagcgcgggaaacgtcaaactcgagcaaagagctcctgggaaggtgctgctggatgcagtttgcaaccacctcaacctcgt

SEQ ID NO: 87896 - DNA, 98 bp, Homo sapiens
agcctgcacgcgctggctccgggtgacagccgcgcgcctcggccaggagtacgagagggcctccaaagtggaccagtttgtgacgcgcttcctgctgc

SEQ ID NO: 87897 - DNA, 82 bp, Homo sapiens
cgacaagccgctggcagccgcggatctcaccgccgctcagggggtcgggccccggctcagtggtcccaggcagctcgggtgt

SEQ ID NO: 87898 - DNA, 50 bp, Homo sapiens
cccaccagtgagatccactgctccagatgatgattattccccaccttcta

SEQ ID NO: 87899 - DNA, 75 bp, Homo sapiens
aaccagagagtcggagggagtccatctggagcggccaaacccaacatgagtgaagtttcctgcaagaaacgggac

SEQ ID NO: 87900 - DNA, 137 bp, Homo sapiens
aggacccacctgtgggtgtcagtggcgcaccatctgaaaacaacatcatgcagtggaatgcagttatatttggaggctgacccgcggctgattgagtccctctcccagatgctgtccatgggcttctctgatgaagg

SEQ ID NO: 87901 - DNA, 75 bp, Homo sapiens
ttggagctgccgccgccgggactcccgtcccagcagaccaaagagagtctacagtatgcattagaaaccttgact

SEQ ID NO: 87902 - DNA, 50 bp, Homo sapiens
tgaagttcgggactatcttctgatcctctggaccttctccatctacctgg

SEQ ID NO: 87903 - DNA, 97 bp, Homo sapiens
ataaagctgccaatttcagctttagaaatacactggaagctcctgcccctcctaaagctgaagccaaagcgaaggctttaaaggccaagaaggcagt

SEQ ID NO: 87904 - DNA, 49 bp, Homo sapiens
tcctgagaatagtggttcttaactctcccagcgatctgctcacgagctg

SEQ ID NO: 87905 - DNA, 75 bp, Homo sapiens
aaggctttcagagcatcgatgaagctatagcctggctcaggaaggaactggtcggcggaagcagaagtgggctgt

SEQ ID NO: 87906 - DNA, 73 bp, Homo sapiens
ccctgagaggttctgctcccatgtgaaaggtgtagcagtcactcggcctacacccacagcatcgaccttgtga

SEQ ID NO: 87907 - DNA, 76 bp, Homo sapiens
cagttatcagtcccgtgggcaatagagtcactgtatttgaccttaaaaagaattacatgaacgacagccttcgcac

SEQ ID NO: 87908 - DNA, 100 bp, Homo sapiens
ggatcaccggcgtgccccaccatgtcagacgcagccgtagacaccagctccgaaatcaccaccaaggatttttagactctgaggagcagttggagctaat

SEQ ID NO: 87909 - DNA, 100 bp, Homo sapiens
tcagggcatcgctaagctgtaccataaagtgagccaggagcagaggaagctgctggaaaagtgtgccatgaccgctctgagctccaagctgatctcccag

SEQ ID NO: 87910 - DNA, 74 bp, Homo sapiens
gcagctgccatggagccccgtgcagaaggttactaccagaagcctgagaagaaatgtgtggacaagttctgctc

SEQ ID NO: 87911 - DNA, 82 bp, Homo sapiens
tgttgcagcacttgttccccaaacaagtgctcctacattctggtctctaattaacagaagatggcaaagcccagccacagca

SEQ ID NO: 87912 - DNA, 98 bp, Homo sapiens
ggtgacctcacaggaatcaggccaaaatgagaaagatcagtctaaagaaaaggagaagaaagtgaaaaaaacaattccttcctgggctaccctttctg

SEQ ID NO: 87913 - DNA, 104 bp, Homo sapiens
acgagggcctgaggaatcaggagctgaactccacagagtcagtaacaaatgtggcaattattttggatctatcacctgtcatcataactggcttctgcttgtca

SEQ ID NO: 87914 - DNA, 82 bp, Homo sapiens
tattccggcgcctccactccgtcccccgcgggtctgctctgtgtgccatggacgggtaagtaaggaggtctctgtaccatgg

SEQ ID NO: 87915 - DNA, 95 bp, Homo sapiens
ggatttaagccatttaagggtggacctccgcgacgattctgaaaatgagctctctgccaaggctttccttaaagtttcccatgtctcaatggact

SEQ ID NO: 87916 - DNA, 119 bp, Homo sapiens
ggcaagatccagatcgggatttacgtggagatcaagcgcagcgatgcggggatctgacgagcttttctctacttgtgtcactaacggaccgtttatcatgagcagcaactcggcttctg

SEQ ID NO: 87917 - DNA, 50 bp, Homo sapiens
caaaaatggaacaagttccagcacaagtgctgccactgcagagccccgcc

SEQ ID NO: 87918 - DNA, 100 bp, Homo sapiens
actcacacctcccgggaggagctgtgctggcgccgggtcccgcggggaaagagaacgtatttaccgggcagtcaaagatctattcctacatgagcccgaa

SEQ ID NO: 87919 - DNA, 74 bp, Homo sapiens
ctgcctgtacagaaaagaaaatccccgttgtttttcgattgcaagaggccaaagaggtgctgaaaaaatatttg

SEQ ID NO: 87920 - DNA, 75 bp, Homo sapiens
ccgggccgcgcacgccgcctcaggtgagaagccctaccactgcaactgggacggctgcggctggaagtttgcgcg

SEQ ID NO: 87921 - DNA, 75 bp, Homo sapiens
cgacgacgacgtgctgttcgaggatgtgtacgagctgtgcgaggtgatcggaaaatcatcatggtaaactctgtc

SEQ ID NO: 87922 - DNA, 71 bp, Homo sapiens
gccggggagggcccagcgcatccgacagctggtcagtgagaaggtcggaggggccgaggggaccaagctgg

SEQ ID NO: 87923 - DNA, 90 bp, Homo sapiens
aagacatcagctacttaagcgccacgagaaggctgctgagaaactaggtgaaactgagaaacttagtataatgattgaagaatgtggagg

SEQ ID NO: 87924 - DNA, 90 bp, Homo sapiens
gcctgctctccaacttccctgacatcatccatctacaaaaaggcatcaagcatgatggaaccatgtgtgatacctgccgccagcaaccaa

SEQ ID NO: 87925 - DNA, 90 bp, Homo sapiens
atcagatattaggagtgcctcgaaatgccagccagaaagagatcaagaaagcctattatcaggtgaaccagaacagcacctcctcccact

SEQ ID NO: 87926 - DNA, 90 bp, Homo sapiens
cgccgctatgactggtgagggccccgggccctcagcctctctttgtcccagaagcttttgttgacaattccagtttccgaacaaaacatt

SEQ ID NO: 87927 - DNA, 75 bp, Homo sapiens
gccgcagaggaggagcgcagcccggcctcgtacagtgctgtggataccaatccactttctctgtatgtcatgcat

SEQ ID NO: 87928 - DNA, 83 bp, Homo sapiens
ccactgaagacgtctgcgtgagaatagagaccaccgagcagaaaggacccaggagcgataacagtaaatcaaataagatattt

SEQ ID NO: 87929 - DNA, 87 bp, Homo sapiens
accgatcctcatcagctcccaatgtgcatataaacacaatagaacctgtcaatattgatgtgatgatgaacagtctacacagatggc

SEQ ID NO: 87930 - DNA, 75 bp, Homo sapiens
gcagcgggcagtgtcggaggccagcggggccggaagcggcggcgcaggatccagacacattagtcaagctgcagc

SEQ ID NO: 87931 - DNA, 92 bp, Homo sapiens
cgcgcgcagggcctgcagcgggagctggacggcgagcgcgagcggcgcgagaaagcaagagcggtgagcggggcgcctatgcctccttcggg

SEQ ID NO: 87932 - DNA, 82 bp, Homo sapiens
gttcattgaagctatcactgtcagtgctgacatatctgaagagatggattaagaatgctttggattaaggattgtggagcac

SEQ ID NO: 87933 - DNA, 74 bp, Homo sapiens
cggccgaaagcggagagatgctgggcgtggcggccgggatgacccacaggtggcaaactgtggtcatatatcag

SEQ ID NO: 87934 - DNA, 101 bp, Homo sapiens
ttccagacagcaaccacaactatgcaagcagcaccgggggtggacgcggcgctttgcaaaaccaaaaagacacagtgctgccgcgacgcgctattgagagg

SEQ ID NO: 87935 - DNA, 50 bp, Homo sapiens
gagaccgcggccgggaccgagggacacaccagcccctcggataccacttg

SEQ ID NO: 87936 - DNA, 100 bp, Homo sapiens
accgagacaagttcaccccgaagtctgccgcattgcacaggagaagtcggcctgagtggtgcggcgctcgggacccaccagcaatgctgctcttcgtgct

SEQ ID NO: 87937 - DNA, 74 bp, Homo sapiens
ccgagaaccgtcagtttgagccagatggttatgatgtgattgctcaagcccaatctgggactgggaaaacggcc

SEQ ID NO: 87938 - DNA, 96 bp, Homo sapiens
ctgagaaatgctacgaccaacttttcgttcagtgggacttgcttcacggtacctgcacatgttgttctttgtcagtgctgtcaagtgtgtgccagg

SEQ ID NO: 87939 - DNA, 99 bp, Homo sapiens
aagctaccaaagacgtagaaagaaatcttagcaggggacatcacccagaagggctatgaaaagaaaaggtccaaactcctatctccttacagcccgcag

SEQ ID NO: 87940 - DNA, 51 bp, Homo sapiens
acttggagtccggacatctgaaacttgatggaataggaataaatcctgcac

SEQ ID NO: 87941 - DNA, 98 bp, Homo sapiens
ggaagcagcacgggatcccagcctcaggcctgcacggacggtgttggttgggtttcatgatcaacatgggagactcccacgtggacaccagctccacc

SEQ ID NO: 87942 - DNA, 75 bp, Homo sapiens
ccggcacggcctcgtgcccttcgccttcgtgcgcttcgaggacccccggcctatatgaacccaatagcaatggcg

SEQ ID NO: 87943 - DNA, 101 bp, Homo sapiens
atccgggccgtgaacgaaagcagtgacggaggagcttgtaccaccgcttccttggaaatcattgactagcatcattgaatattattacatgtggaaaacta

SEQ ID NO: 87944 - DNA, 51 bp, Homo sapiens
cgcagagctgcagctcggggccgagggcagcctcagtcagagcaccctgaa

SEQ ID NO: 87945 - DNA, 74 bp, Homo sapiens
ccgaggagccctgttccaaagcctcctggaccgtccaagaaattcatgttacatgtaaagctgtcctcatttgt

SEQ ID NO: 87946 - DNA, 100 bp, Homo sapiens
gaagcaagaaggccctggacacagcaatatctctgggctttcacagcggcaaccagttctttttcttctccaaatgtatcctccatggagtccttcccac

SEQ ID NO: 87947 - DNA, 74 bp, Homo sapiens
ttggccccgtccttacctcacagacgaagttatacggaagcgtctcctcattgatggagatggtgctggagatg

SEQ ID NO: 87948 - DNA, 99 bp, Homo sapiens
gttaaggattccaagtaactcttatttgagtttattaaccacttaacctctcagaactgaacaaagacaacattgttcctggaacgccctctttttaaa

SEQ ID NO: 87949 - DNA, 82 bp, Homo sapiens
gtactccaaagagaagaggactcttgctatggttcagggtcctgcagttctgagcttgggttccctttgcctggacaccaac

SEQ ID NO: 87950 - DNA, 82 bp, Homo sapiens
aacttgtgccacagaactacagtgctgaatgtggagtaaatgcagatgttgagaaacatcttgaattgggcaagaaattact

SEQ ID NO: 87951 - DNA, 100 bp, Homo sapiens
tgtgagacgtgcctttgaccttctgccatgattgtgaggcctccccagccacgtgaaactgccctcaacggctttcactttcattccaaatagaatacac

SEQ ID NO: 87952 - DNA, 100 bp, Homo sapiens
cttagtggggcccaggctgacttacacattgaggatggagactccatccgcttcgggcgcttcagggctgaggactatgggcctgtggaggtgatctccc

SEQ ID NO: 87953 - DNA, 80 bp, Homo sapiens
atttttacagtatctcaaagacttcacttgacttcttgatcctgcataaaaccaaggacttggatgttgtgggtgatggt

SEQ ID NO: 87954 - DNA, 51 bp, Homo sapiens
tccgcagggttcggatgagaccaggtgcggtctgcctgcagcctttctgcc

SEQ ID NO: 87955 - DNA, 80 bp, Homo sapiens
ccttgtggccctgggctttaccatctttgtggctgtgcttgccaggcctggctccactatcaagcccagagagagacgtg

SEQ ID NO: 87956 - DNA, 88 bp, Homo sapiens
cccaagcagcagctgccggagcccgagtggatcggggacggagagaacacgagcccatcaggtaagaaagcaaacttaggtaaaaatg

SEQ ID NO: 87957 - DNA, 75 bp, Homo sapiens
tgctggatagataccgaattcttatcacaaagtgatatcagtatcaagataaaagtttggaatgggagaaaaatt

SEQ ID NO: 87958 - DNA, 76 bp, Homo sapiens
gccacctctacctgtggctgttcctcctgctgctgcccctggccctgcacctggttatggccacaccgtgcccttg

SEQ ID NO: 87959 - DNA, 83 bp, Homo sapiens
gtcagcgtcaccgtggggggcaagcagtacctcctaggactctatgacacggccggacaggtttggtgcacctcgatttggag

SEQ ID NO: 87960 - DNA, 87 bp, Homo sapiens
ggaggagctgtgcagccgcgaggaggcgcgggaggtgttcgagaacgaccccgagacggtccgcgggagagctgtggggcttggtga

SEQ ID NO: 87961 - DNA, 100 bp, Homo sapiens
tcccaagtaggtgggattacagcttgccagcaaagcacggacagagaaggaggagaagctgagccaggcctatgcaatcagtgctggtgtctctctagag

SEQ ID NO: 87962 - DNA, 80 bp, Homo sapiens
agctggagcgggtgctgcaggcgccgccgccggacgtcggcaacggagaaggctttgatgaactaggtggacttctcaaa

SEQ ID NO: 87963 - DNA, 100 bp, Homo sapiens
ggccgctccccacggtggtgttagcacctcagcccatcccaggtgctggagaatctggtaaaagcaccattgtgaagcagatgaggatcctgcatgttaa

SEQ ID NO: 87964 - DNA, 82 bp, Homo sapiens
ttgcagtaatttgtttcacaagtggaactacagtattcaatgcagggaacagaccagttcatcatggaggcattccatcaga

SEQ ID NO: 87965 - DNA, 75 bp, Homo sapiens
cgaggacacggagggacagctagagcacgatgtgtactctggcacacccaccaaggtgagacacatggacagtca

SEQ ID NO: 87966 - DNA, 88 bp, Homo sapiens
gatacctttgatccagaacttgcagcaacaataggtcatactccctgtcacaaactccagctgaactaacttggaggaggatcttccc

SEQ ID NO: 87967 - DNA, 86 bp, Homo sapiens
cggttcgttcggacactgttcagtgctgctcagctgacggctgaatgtgccatcgtcaccctggactctcgttggggagatagaga

SEQ ID NO: 87968 - DNA, 82 bp, Homo sapiens
cacggccagttttgaaatcgacacacaaagaatagagttgagcctgtgggacacttcgggctaccggctctctgaccagttc

SEQ ID NO: 87969 - DNA, 75 bp, Homo sapiens
caaagatggtacaaaagagtctttggaggatgcggctttgatggaatagctctccagacccccagctggccatgt

SEQ ID NO: 87970 - DNA, 147 bp, Homo sapiens
atgggagtgattgtggaatgtttacttgtaaatatgcagattatatttctagggacaaacctatcacatttactcagaataatcatgggccagactgggaagaaatctgagaagggaccagtttgttggcggaagcgtgtaaaatca

SEQ ID NO: 87971 - DNA, 132 bp, Homo sapiens
cagcctgcgagcagagctggggaagttgcgagagaggctgcagggggagcacagccagaatggggaggaggagcctgagcctgaaggtgaagagcgcgaggctgcgcaatgccgcggcggtggagctgtggc

SEQ ID NO: 87972 - DNA, 74 bp, Homo sapiens
cagaaccaccccagtgcacctccctggcctggtctgctgatggccaggatgactcactggttgtgtggaaggaa

SEQ ID NO: 87973 - DNA, 83 bp, Homo sapiens
ccagagtctgctggacgcccaggcggacgaggccgtgttaggctcagatccggaacctgaccgtgctgacccccgaaggggag

SEQ ID NO: 87974 - DNA, 100 bp, Homo sapiens
tcgtgcggagacaacagcaggggtcagctgggccgcaggggcgcgcagcgcggggagctgccagaatgacatcttcgagtggtccagggaccaccgagcc

SEQ ID NO: 87975 - DNA, 100 bp, Homo sapiens
tccaggtattaagggagatatcccaaagatccacatgaagaccatgcccgccgccatgttcaggctcctcacgggtcaggagaccccgctgtacatctag

SEQ ID NO: 87976 - DNA, 100 bp, Homo sapiens
tcgactccatggccaactccttcgtgggcacgcgctcctacatggctatcctggttgctaacgacaaagcttgcgggctcctggggtacagcagccagga

SEQ ID NO: 87977 - DNA, 100 bp, Homo sapiens
ggctacctcgtggacaagtttgcagatcgggagcgcaaggtcgccctcaaggccatgatcaaaactgatacccagcgccgcaaccctcatcattgtggtg

SEQ ID NO: 87978 - DNA, 100 bp, Homo sapiens
gctgacgcagccatggcggaggcggctttggaagccgtgcggagcgagttacgagaattcccggccgctgcaagggctggactgtgctgctgccatctcg

SEQ ID NO: 87979 - DNA, 82 bp, Homo sapiens
gcaggcagcgcagccagtgcggatgcggacgcgggtcctgtcactgcaggatcttggcctcactactgtttgggaagaccag

SEQ ID NO: 87980 - DNA, 140 bp, Homo sapiens
tcagtgctgccaagaaaattgctgaggcaggatccaggatggacaagcttggccgcaccattgcagaccatgattttgacattgctgggaactttgatcccatgatccctgatgcagagtgcctgaagatcatgtgcgag

SEQ ID NO: 87981 - DNA, 100 bp, Homo sapiens
gtgcctgcaatttgccatttatttgtaataagaattcctagaggacctgtgcaacaacctcttgaggatcgaatcttcactcccgctgtctcagcagtct

SEQ ID NO: 87982 - DNA, 51 bp, Homo sapiens
catggccaaggtgctggcgtccctcagggaagaaggagaaagggccaaccc

SEQ ID NO: 87983 - DNA, 110 bp, Homo sapiens
ttcatgaccctgcccttgccagaatttcctgcgctgttccacctcattcaacttcaggtgagaagccctaccactgcaactgggacggctgcggctggaagtttgcgcgc

SEQ ID NO: 87984 - DNA, 80 bp, Homo sapiens
gcaagactgtcgacctaaagcctgactggggcaaggttgttcctcaaagtcattcaagctgtactcgccgaaggagcccc

SEQ ID NO: 87985 - DNA, 100 bp, Homo sapiens
ctgcgcttccgacggggcggccgggggctcagagatccaagtgcgcgccctggcgggtccggaccaaggtgggaccagggagattggatctgctctcacc

SEQ ID NO: 87986 - DNA, 83 bp, Homo sapiens
ccgaaattgcagaacaggccaagcattggttggcacttaccatggttccccagaccagtcccatcaagtgactggtaaccacc

SEQ ID NO: 87987 - DNA, 100 bp, Homo sapiens
tttggataaaaagaaagcactgtggtttcctgcattgaatgtagaagcgaggcctggaggtgaagcagccatcttccattcatgccacagctagcatgag

SEQ ID NO: 87988 - DNA, 50 bp, Homo sapiens
ctggtgctgtggattgcaaccttgaatgtttctgctttgggacaaccata

SEQ ID NO: 87989 - DNA, 100 bp, Homo sapiens
cagtaatctcccttttgacgggtttgtcagactcccaggtcagagcttttaggcatacaagtaccctggctgataggtgatcttcagctttgcaaactgg

SEQ ID NO: 87990 - DNA, 100 bp, Homo sapiens
agctccaggaagcgagatgtcgaagccgccacccaaaccagtcaaaccaggattgacttggcctctacttcttgttaaggaaattcatctcttgttttat

SEQ ID NO: 87991 - DNA, 100 bp, Homo sapiens
ggaaaatctgtggcaaatcaaccaagtgcagccgcggagccctgtacacaggcttttccatcctggtgactctgctcctcgctggccaggccaccaccgc

SEQ ID NO: 87992 - DNA, 112 bp, Homo sapiens
agaagaggtcccaatcccccactctttccgccctaatggaggtctccagtttcgatgtccagctcgccgctgtccaagaaacgtcgcgtgtccgggcctgatccaaagccgg

SEQ ID NO: 87993 - DNA, 75 bp, Homo sapiens
atatgatttcccatcttgcagatgtgtaggaactgaagaggagtttggaggtcttgtatcagctaatcttatact

SEQ ID NO: 87994 - DNA, 99 bp, Homo sapiens
ttccttcaaactacgttaagatgacgacagactcagatccaagtcaacagtacatatctgaagagatggattaagaatgctttggattaaggattgtgg

SEQ ID NO: 87995 - DNA, 88 bp, Homo sapiens
cagaaaatagcacacttttactctacgcaactgttgctttttcatgagccgacagttagaatcagaaactgggaccacagaggagcac

SEQ ID NO: 87996 - DNA, 86 bp, Homo sapiens
ggctttggaagccgtgcggagcgagttacgagaattcccggccgctgcaagggatatggaggtaccacatggttctcagagcagcg

SEQ ID NO: 87997 - DNA, 75 bp, Homo sapiens
ccccgccggccggcctcaacatgtttgaagaacctgaagatcccagtaacaggtcatttttttccgaaatcatct

SEQ ID NO: 87998 - DNA, 101 bp, Homo sapiens
gcagaatacactgcctgtcgcttgtcttctattcaccatggcttcttctggaaaagtcttgcacgaggagcatgttgaactcttgatggaggaattcgctt

SEQ ID NO: 87999 - DNA, 100 bp, Homo sapiens
tcggccacctaaggtcaaaatcactgagctattgaacaagacagacaaccgccccctaaagaaactggaggcccaagggttccccactgaaggacttggt

SEQ ID NO: 88000 - DNA, 82 bp, Homo sapiens
ggccgggcagcgccgccaccatgttcctgggcaccggggagccggccttggacacgcgcccgggggctggagaaggccaggc

SEQ ID NO: 88001 - DNA, 98 bp, Homo sapiens
tttggagcagctcctttatggaaatcatactattgaaatctcctgcaaagaagctgagccatgcaattagtaaatctttggggtgtgtacccacgaga

SEQ ID NO: 88002 - DNA, 100 bp, Homo sapiens
gcttccccagccacatggaacttgttctcaggcgctgtggtctcaccttccactggggcaacaatgggccatttccagcagggacggcgcagtgttggcc

SEQ ID NO: 88003 - DNA, 80 bp, Homo sapiens
cttcacttttgagtgcaactgccttccagacctgtcatttactccatcctttatagtgatgctacaggacgaagaggaat

SEQ ID NO: 88004 - DNA, 100 bp, Homo sapiens
tggcagcgaagaagatcgaaaattaaacctcagcagccacctcagcagagaagtgctcctgacatctctttcaccatcgatgcgaataagcagcaaaggc

SEQ ID NO: 88005 - DNA, 75 bp, Homo sapiens
ccagtcctgctctgccgcctgccaccgctgcccgagcccggtgagaagccctaccactgcaactgggacggctgc

SEQ ID NO: 88006 - DNA, 89 bp, Homo sapiens
aggggggagcggcgttggaggccaccgtttccaggtgtccctggccagtgtccttccacctgtccacaagcatggggaacatcttcgcc

SEQ ID NO: 88007 - DNA, 100 bp, Homo sapiens
agctgattaaggactatcgggagaaagtggagtccgagctgagatccatctgcaccacggtgctgggagaagatgtcaaccggacactagaaggtggaag

SEQ ID NO: 88008 - DNA, 75 bp, Homo sapiens
tgcaaggagaagacgcagccgtcaggtttgcccaaaggaccagccaaaacctcacctcaagccacgcatatgata

SEQ ID NO: 88009 - DNA, 75 bp, Homo sapiens
gttggacttgccggcgtcaccgccgcggacttcgctttgggccatgaccagttggagtcattcgttgcccagttt

SEQ ID NO: 88010 - DNA, 75 bp, Homo sapiens
ggagccctggagggcgggcttccagtggggggagagcccctggcaggtgatgacaatgggaagaaggccaacaac

SEQ ID NO: 88011 - DNA, 100 bp, Homo sapiens
gaatgagtgagattaccacttcctctagtgctcccttcacccagccattgtcttccaatgagctggatggaggcctgcctgaaggaggagcttccttccc

SEQ ID NO: 88012 - DNA, 83 bp, Homo sapiens
cttgcctgctgctcctcggctgcggatacctcgcccatgttctggccgagcaattctgtggtgttcttggtcacacatttatg

SEQ ID NO: 88013 - DNA, 90 bp, Homo sapiens
ccaggagagactggcaacctgcaccccttctgacagaacccactgtgctgccacaccctccagtagatggagtctcgctctgtcacccag

SEQ ID NO: 88014 - DNA, 97 bp, Homo sapiens
aggcctatgccaatcagcatttcacattcctcatggttggttcaaaggtatctgaataaccaggtgtttgtgtctctggccaatggagagcttgtgg

SEQ ID NO: 88015 - DNA, 75 bp, Homo sapiens
gcggcggcggcggcggcggcgcaggtatgaaaatgaaagtcttcagaatggaaggaagtcaactgaatttccaag

SEQ ID NO: 88016 - DNA, 75 bp, Homo sapiens
gtcaacaaccgcttcgagctgggcgaccattgacgaggtggagacggacgtggtggagattgaggccaaactgga

SEQ ID NO: 88017 - DNA, 100 bp, Homo sapiens
gtggtgcgcggctccgtgctcctggggaggagccccagccccgcgacgaggaggaagcggagctggagctgctgaggcagtttgacctggcctggcagta

SEQ ID NO: 88018 - DNA, 90 bp, Homo sapiens
acattgaggagatcaaagagattgtcaaaaggttgcaggtacccatatgaaaggatcgacggccgagtaagaggcaacctccgccaggca

SEQ ID NO: 88019 - DNA, 100 bp, Homo sapiens
tgcctgctcgaggagggcctctgcggagcgtccgaggcctgtgtgaacgaaggacagaataacgggctcccagattcacaagccccaccaagaggatcac

SEQ ID NO: 88020 - DNA, 99 bp, Homo sapiens
aaattatttgaacttgatccactcacaggagaatggcattacaagtttgcagaacatatctgaagagatggattaagaatgctttggattaaggattgt

SEQ ID NO: 88021 - DNA, 97 bp, Homo sapiens
accggcaactgaaaatcgtcgtgctgggggacggcgcctccgggaaggactcgctcagcagcagcctgaaaacttgctacaagtatctcaatcagac

SEQ ID NO: 88022 - DNA, 75 bp, Homo sapiens
aacaagatggaagcaggtttaaaattttacataagaagttacctttttcaggtttgatgaacttgtgaaaaaatt

SEQ ID NO: 88023 - DNA, 75 bp, Homo sapiens
ggctgaggactgactggggttctgagactccctgtcccggaccgcagaacccctgaacagtgcccaagtgttgtc

SEQ ID NO: 88024 - DNA, 100 bp, Homo sapiens
cgggtgtctcgtgtgtgaacatcacagggttcatagtggcgtcatgcacgcagactcctgcaagttcccctaagttcttagaggactgctttgccttttg

SEQ ID NO: 88025 - DNA, 118 bp, Homo sapiens
ccttccctcgccctaatcccccaacgaggaaggaaggagcagttggttcaatctctggccctcaacaggaggcgcagaaaatcttcaaagccaaccaccccatggacgcagaagttac

SEQ ID NO: 88026 - DNA, 100 bp, Homo sapiens
ccccttcctggagtataagcacttcgtgacccgcaccttcttccccaagaccttcccctcctccaatgagtcccgccaatgccccaatgcccgttgccag

SEQ ID NO: 88027 - DNA, 100 bp, Homo sapiens
atggaatgtaaccctagccaggtgaatggctcaagatgcgtctgttactagagtggagagtctaccttcgtctcacatgtgccacaaaggatggcatggc

SEQ ID NO: 88028 - DNA, 49 bp, Homo sapiens
tctggatcacggatgtaggaagtggttcttccaggttggaaagagaata

SEQ ID NO: 88029 - DNA, 82 bp, Homo sapiens
cccagagtccgcggccggggcgcgggagagggagcactatgtctgcggaagtccccgaggcagcctccgcggaggagcagaa

SEQ ID NO: 88030 - DNA, 75 bp, Homo sapiens
tttggcattgacatttaattttagggtcctttatatagaagggagagtaggacgcaaagtaccacatgcagcgct

SEQ ID NO: 88031 - DNA, 100 bp, Homo sapiens
aagtcaggaccgcgacggcagcagagcacatatgagctatttgcattcatcagtcacatgggaacatccacaatgagtggtcattacatttgccatatca

SEQ ID NO: 88032 - DNA, 98 bp, Homo sapiens
ttgaatgaaactctcagatcactgtataaccacccagtaccaaaggcaaatactcctgtaaatttgagtgtgcttccaatcagaagactatacaacct

SEQ ID NO: 88033 - DNA, 100 bp, Homo sapiens
ctcagtcctggggaagacgtgctcatcgacattgatgacaaggagcccctcatccccatccagcggtcttgcgagtggctggttccctgcagaagagcac

SEQ ID NO: 88034 - DNA, 100 bp, Homo sapiens
ctggagtctgcgaaggccgggacccggttccccggcccacagtgggggtgtgcaaacccgagagaactggaaatcagggtgaaatggcccacacgtgccg

SEQ ID NO: 88035 - DNA, 83 bp, Homo sapiens
caacgcctggctcggagcagcagcctctgaggtgaaagaacttgtcctggacaacagtcggtcgaatgaaggcaaactcgaag

SEQ ID NO: 88036 - DNA, 51 bp, Homo sapiens
tccagagccttctctctcctggcttgaagaaaatttgcctacacgttgtgg

SEQ ID NO: 88037 - DNA, 100 bp, Homo sapiens
ttgaaagaacccacaggtgcatttcacagcactctgggcgaaaattggatgtgaaaatgaagccagaccgagtgaaagagtttctagccaaagccaaaga

SEQ ID NO: 88038 - DNA, 83 bp, Homo sapiens
ctttgattgagaaacttcatggggaactgcaagacaggaagagaggccgtgcccctcagggcgcactgtgtgaggagaacatg

SEQ ID NO: 88039 - DNA, 76 bp, Homo sapiens
atcttcttcactgcctctggcatggatgagggaacgatcagcgttggagtagatgccaccgacctttttgatcgct

SEQ ID NO: 88040 - DNA, 75 bp, Homo sapiens
ctattatgttggttgggaataagaaagacctgcatatggaaagggtgacagcagtattcgctattttgagatcac

SEQ ID NO: 88041 - DNA, 88 bp, Homo sapiens
taagtcgaaggggaaggcgcctgaagaggacgaagcaaatcagccggcaccaggagcagttcatccagatgctgaacgagccccctgg

SEQ ID NO: 88042 - DNA, 100 bp, Homo sapiens
acaataacagatcctgggaagttctacaattctaattcagaaacagattgtctcagtttacctagctttgaaaatgccatacccatgggagagaagaagg

SEQ ID NO: 88043 - DNA, 50 bp, Homo sapiens
gacatgcccatgcgagtacctgaggaagatcaggagaacctcagtctgac

SEQ ID NO: 88044 - DNA, 117 bp, Homo sapiens
ctctgtgccactttgcatcccacgccggaggaggcattaacgagaccgggtaaggtcgaactggaaggtacacccttatagagaaatggagagatactgaaagacacttagcacctc

SEQ ID NO: 88045 - DNA, 100 bp, Homo sapiens
ctaccatggggatcttagagaagatctcggagatcgagaaggagatcgctcggacacagaagaacaagggtgtaatggataggtaacagagaagacctcg

SEQ ID NO: 88046 - DNA, 87 bp, Homo sapiens
acaggcaggagaattatgggagcgcatttccccagggaccctgatgctcccataagacagaaaatgccccttgatgatctggataga

SEQ ID NO: 88047 - DNA, 95 bp, Homo sapiens
gtggaggtttagccgttggaacagttcttctaattggtgccaatgggtcatgtttggttagaaggtgacaatctacagaattctacagattccag

SEQ ID NO: 88048 - DNA, 100 bp, Homo sapiens
ggagagcgcgcggcggacgcgcccgggacgcgcggcggcaccgggaggccgggccgagcgagcaaatcatggaggaagataaaaaacatggtgcactggt

SEQ ID NO: 88049 - DNA, 60 bp, Homo sapiens
aacttcaggaacctgctgtcagtggtagagacggggtttcaccacgttggccaggctggt

SEQ ID NO: 88050 - DNA, 50 bp, Homo sapiens
gaagtggtgatttcacaacttcatcatgcagacctgttatcctaaactag

SEQ ID NO: 88051 - DNA, 127 bp, Homo sapiens
tgatgaacctcatgcgggatgtggagcgggagggcctggactgggacctcatgctgcaggccaacttcaccatccgggaagatgccaaccccagctcccgacagcgaggactcaagcgcttccaggc

SEQ ID NO: 88052 - DNA, 51 bp, Homo sapiens
ccagatagtaccatgatagctgtatcagtttcccaggcagctgcagacttg

SEQ ID NO: 88053 - DNA, 100 bp, Homo sapiens
cccagaaagaagagcacaaaatcttcttgagcagtttcagaagcaagaagtggaaactgacattgtacacagaagaaagcccatatgaggacacagcaag

SEQ ID NO: 88054 - DNA, 75 bp, Homo sapiens
tgctgaaaatgttgcttcatatgagccctgggaggagcggggacactgaggacctctctccaaattggcctctca

SEQ ID NO: 88055 - DNA, 82 bp, Homo sapiens
tctgagctcagacctgccaatttaccagagataattgataacaccctgtaacagctgaagcctccattatggcatgctgaat

SEQ ID NO: 88056 - DNA, 102 bp, Homo sapiens
caaccgccgcacgcaccagatctgcaaactgcgaaaatgtgaggtgctgaagaaaaaagtagggcttctcaaggaggcccttggactggacagtgccaatga

SEQ ID NO: 88057 - DNA, 90 bp, Homo sapiens
tctgccagcaccttgggaagagaaagaaaatgccgaaggcactcagacaggggtcaactccaccagcagtgctgtgaaaagtggaccctg

SEQ ID NO: 88058 - DNA, 113 bp, Homo sapiens
ggcggctcgcgacccccggcaacccggagaaggtctacagagcggcctgcgccagcgaacaatgcagatcttcgtgaagactctgactggtaagaccatcaccctcgaggttg

SEQ ID NO: 88059 - DNA, 83 bp, Homo sapiens
tggaaaaggggaaaaatgttgtctatggctcctggtcatacagatagactccagggttccttgaaaagaaaacaggtagttaa

SEQ ID NO: 88060 - DNA, 51 bp, Homo sapiens
cagaagcgggcggcgcgggggagatggagagtagttatcttgatggaatta

SEQ ID NO: 88061 - DNA, 75 bp, Homo sapiens
ggagaatcctgggtttagccattgagatgaccgcacctcgagcaggagtggggatgccacgtctgcccccagcgc

SEQ ID NO: 88062 - DNA, 75 bp, Homo sapiens
ccaccgtgatgagcccctgtggaggtgaagacattgtggtccaacctaaggtgactgtatatccttcaaagaccc

SEQ ID NO: 88063 - DNA, 100 bp, Homo sapiens
cgaaagggttgtagacatggcggccatcaggatcagaatgaaggatttcattgccgggaagaatgccggattcttggccactctgacaggtgctggatgc

SEQ ID NO: 88064 - DNA, 75 bp, Homo sapiens
ataaagaacagcgtaactccagacatgaacattgatgatggcacctcagatcgcccctacagccatgctctggtg

SEQ ID NO: 88065 - DNA, 75 bp, Homo sapiens
gaaaaagctgccctgagacggtgtcccgccgaaagctattgacctgaaaagtggttctggaaaagtgtaccaagg

SEQ ID NO: 88066 - DNA, 51 bp, Homo sapiens
gccaagcagccttagccctagtgtagagcaactttcatcctttgaaacgtg

SEQ ID NO: 88067 - DNA, 51 bp, Homo sapiens
agaagaccatctctgtggtcctacaggtccggaccctatttgtcagtggcc

SEQ ID NO: 88068 - DNA, 100 bp, Homo sapiens
ggcatgggcatgtacaacaccgacgaggtatttacatgaggaatttccagagtcctggtcagttcccaggttggctgaaggctttgatgtcagcactgat

SEQ ID NO: 88069 - DNA, 78 bp, Homo sapiens
ggtggtagacaagttcatcaagcaaagggactaccaccagcaggtaggagtcaatcccaccagcattgactcagtcgt

SEQ ID NO: 88070 - DNA, 80 bp, Homo sapiens
cacaagatgaacaatgagaagcaggcagaagattgcatcacacgacggtctggaaaatcccgaagcagaagcccgtattc

SEQ ID NO: 88071 - DNA, 82 bp, Homo sapiens
caggggggcaccgcggagcaagtatggctgtagaatttcctctagtcttatatgactgtaagtttgaaaatgtcaagtggat

SEQ ID NO: 88072 - DNA, 83 bp, Homo sapiens
tggacgggggctgcgagccggcccgcaggggctacctctaccagcagctgtgctgcgtaggaagtgcacggctgtctataacg

SEQ ID NO: 88073 - DNA, 75 bp, Homo sapiens
cagtgttcggcagcgcctgacggagccacagcatggcctgggatctcagaggtcactgcagccagaggggtccag

SEQ ID NO: 88074 - DNA, 90 bp, Homo sapiens
gtgcctgtgatggcatctttcatctaacacatgtgagaagggtgttatgtctctagtgaatgtcaggaactgtattcgcttctaccagac

SEQ ID NO: 88075 - DNA, 85 bp, Homo sapiens
ctcagctgttgcccggcgcgtccgcgggcggctcggcggccggcggggctggggagcctcccggaaagaccacagcaagattctt

SEQ ID NO: 88076 - DNA, 100 bp, Homo sapiens
ttggttttggagttcttaaggcctgatagacaaggtgttacacagcaacaattcaaggacctgagggcactcgctttgctcctgtcagtacacactccca

SEQ ID NO: 88077 - DNA, 75 bp, Homo sapiens
ccaccacagtctctcaaatacttgggactacaggagcctgaacgaactgcgggtgttgctgctggaggccaatcg

SEQ ID NO: 88078 - DNA, 100 bp, Homo sapiens
tctccgtgcagcccaacttccagcaggacaagctgcttgtggcggattcctcaccaagctcaacggctccatcaccagcccgggctggcccaaggagtac

SEQ ID NO: 88079 - DNA, 100 bp, Homo sapiens
ctccggcgggggatgcgcgcccggcccctcagcgcccccagcacgccgccgagtcccgctcgccatggctttcagagtccactgctgaatcccacttaat

SEQ ID NO: 88080 - DNA, 75 bp, Homo sapiens
ggaagagcacagcaagacccctgaggagaggagcccggcctgtttgatgtggtcatcattaacgacagcctggac

SEQ ID NO: 88081 - DNA, 75 bp, Homo sapiens
tcgggacaccccggaagctgggaaatgttgaaaacaccacacactgtgagtttgcctacctgcgggaccttctca

SEQ ID NO: 88082 - DNA, 87 bp, Homo sapiens
aatagctagagaagaacatgggtctgggaaaatcgctgtgatatcagccaaaagaatgcaatggtgtaaagattccagttgatgcca

SEQ ID NO: 88083 - DNA, 97 bp, Homo sapiens
atctcatgaggctgtaggctccttcaacccgtggctgatagctgaaaggcacagtgtggatacaagtccaggatatcatgagtcagattccaagaag

SEQ ID NO: 88084 - DNA, 97 bp, Homo sapiens
gtacttggcaagatttgatgctcttgtgctcagtgacatcattcagcctcaaaataaattcgctgctctggacaatgaagaggaggataaagaagaa

SEQ ID NO: 88085 - DNA, 74 bp, Homo sapiens
actggagcaattgaagctgactactaaggagaataaggtggtgatctttgtgaagtctgtgcagcggtgcattg

SEQ ID NO: 88086 - DNA, 82 bp, Homo sapiens
caaccgcctacgagacactcaagaatgcatacacagccacagctatcaacagcaccaacttctgcacctcagcaaaggatgc

SEQ ID NO: 88087 - DNA, 100 bp, Homo sapiens
gtgaatcccaactgttatgccaaaggtctctaattaacagaagatggcaaagcccagccacagcagctatgtccttcagcagctaaacaaccaaagagaa

SEQ ID NO: 88088 - DNA, 100 bp, Homo sapiens
acccgatggaagattcgatggacatggacatgagccccctgaggccccagaactatcttttcggacaagatcgcagaggaaggtgggcggcgggagtgcc

SEQ ID NO: 88089 - DNA, 87 bp, Homo sapiens
gattcgcagtggtcgcttcttctccttggtgatggggaggaagtacatccggctgtattccccgcaggagtcaggggctctgtaccc

SEQ ID NO: 88090 - DNA, 83 bp, Homo sapiens
ttttcctccgcctggtgggtccctccctgctgcgggacagcagctggttcaaggtgtttgcagactatgaagcctacatgcag

SEQ ID NO: 88091 - DNA, 100 bp, Homo sapiens
accgtccaactacgtggagcggaagaacagcctgaagaagggctccctcgtgaagaacctgaaggacacactaggaaaatgtttataggaggccttagct

SEQ ID NO: 88092 - DNA, 100 bp, Homo sapiens
cttccacgtggattctccagacgagaggccctgtctcagcgggaccctcctcacaacaacttcttcttcttcgatggcatgaaggggaatgggattgtgg

SEQ ID NO: 88093 - DNA, 102 bp, Homo sapiens
cacggtaatggagattgtagtcagattgtcagaagatgcagggccaatgcaggaaaccatctatgacttctggaggatggtgtggcacgaaaacactgcaag

SEQ ID NO: 88094 - DNA, 82 bp, Homo sapiens
aggaccaaaattgtggaaaagtcactctggctccctggggaagggaatgcagggttgctggggctgggcccagaagcagcag

SEQ ID NO: 88095 - DNA, 75 bp, Homo sapiens
cggctgcccagattcctttttgcaccatccgtactaccagggctgtttaacgacccccaactccccatccatgca

SEQ ID NO: 88096 - DNA, 96 bp, Homo sapiens
gaagcttacaagcaaatggccaggtccattttagcttcctatctcctgaaggaaaagctcaacatcttgggcaagttggggtgcctgctaagctgt

SEQ ID NO: 88097 - DNA, 90 bp, Homo sapiens
tttaataatgatagaatgaagaccacaataaaagagacctctacttagctcagcaattcttaccttatcgttaactgaagacaatatgca

SEQ ID NO: 88098 - DNA, 83 bp, Homo sapiens
atgaaagtgaaaatgttagaagaactcgtgagccggattgatgacaatgcagatcttcgtgaagactctgactggtaagacca

SEQ ID NO: 88099 - DNA, 82 bp, Homo sapiens
aagcagcccaaagtcgaatgattcagacttgcaaggaagttggtgaaccatctaaagaagagaaggctgtggccaagtatct

SEQ ID NO: 88100 - DNA, 90 bp, Homo sapiens
cgccgagcacccaggcgactgcctcatcttcaagtttcatgatcaacatgggagactcccacgtggacaccagctccaccgtgtccgagg

SEQ ID NO: 88101 - DNA, 90 bp, Homo sapiens
ttggcctggaagacggatacttggctttggttaagaatcttcctcactgatatgatcatctatcagtcagaagaagaagttgtagaagga

SEQ ID NO: 88102 - DNA, 82 bp, Homo sapiens
gtcttgttgcgggcaccgcagtcgccgtgaagatggcgtctaccagccgctgtatgcaggagctattcttgaagtttgtgga

SEQ ID NO: 88103 - DNA, 98 bp, Homo sapiens
cgtgtggcatgaaacagaagaaggacatatttgacagtgattggtacacttctcgaaatctaattgggggcgctgacatcattgtgatcaaatacaac

SEQ ID NO: 88104 - DNA, 74 bp, Homo sapiens
gaaaaacagccaccttcagtatctcagtcctccagtgtttggatattcaggcaaagcggagcggagatcctcaa

SEQ ID NO: 88105 - DNA, 100 bp, Homo sapiens
gggagagattgttcctgtggagcaaagagctgcatcatgaattcaggagcatccaattctgtggtgttcttggtcacacatttatggagtttctgaaggg

SEQ ID NO: 88106 - DNA, 82 bp, Homo sapiens
ttgaaagatgtgtcatatcatgtgccctctatgaggagttttggattaaggtctagatccagaagaagctcccgaaggcatt

SEQ ID NO: 88107 - DNA, 100 bp, Homo sapiens
tggaatactcctaaccaagaagttgcccaggatctagtgaaaagccatttgatgtatgcggtcagagaagaagtggaggtcctcaaagagcaaatcaaag

SEQ ID NO: 88108 - DNA, 118 bp, Homo sapiens
gccatcatcgtgtccatcgtcatctgcagcgtcctgctgctgctctccgtggtggagctgggggacctccctctggtccgcctggatttctcctgtaaccgcgtctcccgaatcccag

SEQ ID NO: 88109 - DNA, 97 bp, Homo sapiens
gggactgcacgtagcccggcgctcggcatggctctcctggtgctcgaccagttaaagaccctgcagaggaattacggcaggctgcagcaggatgtcc

SEQ ID NO: 88110 - DNA, 82 bp, Homo sapiens
cagagcatcctggaactgggatctctcctggcaaagactggacaagctgcaggtgccgtgagcgatgtggagatgcaggaac

SEQ ID NO: 88111 - DNA, 100 bp, Homo sapiens
ggagatccacagctaagacgccgggactccctggaaacctagaaatgattgagaggatccagaatccagatctctggaatagctaccaggcaaagaaaaa

SEQ ID NO: 88112 - DNA, 79 bp, Homo sapiens
ccgcaccatggaggaggacgacagctacgccttgaaaagatcttttgaggtcgaggaggtcgagacacccaactccacc

SEQ ID NO: 88113 - DNA, 73 bp, Homo sapiens
gaggggagtggaaaggctctcagtgaaaaagatgattcgaaaaggtgtgttcaaagatcagcattttgatcaa

SEQ ID NO: 88114 - DNA, 75 bp, Homo sapiens
agtcagtcgggccgcgccgcgcctcagctctgtagctgctgctggtggtgacaatgtcaaataacggcctagaca

SEQ ID NO: 88115 - DNA, 95 bp, Homo sapiens
agtattgcaggacaagagatttaagaaaattgccatctttttgagccttgtctattgaggaaccaagaacacagaaaaggcagtaaaaagaaaaa

SEQ ID NO: 88116 - DNA, 98 bp, Homo sapiens
gtctggatggaacctgagctgggtctctgactcacttctgactttagggccatgaaatgacaagcattggactgctacttggtgtttctgctgcaaaa

SEQ ID NO: 88117 - DNA, 124 bp, Homo sapiens
ttggtgacgtttcatggtctcgatgtagcaaggaagatttggaaagatttctcaggaggtgacaggaggagcccccgcacaggacctaagaatgctgtgaccagaagatgggatcgcggaacag

SEQ ID NO: 88118 - DNA, 75 bp, Homo sapiens
cgtcaccctgcctcccctgcgtcccgccaccggccgcttctgtcctcgccctccagaatacccatcatatagccc

SEQ ID NO: 88119 - DNA, 50 bp, Homo sapiens
cctcctccattggcatcgtccaggacagagcgggatgccaccagcttgtc

SEQ ID NO: 88120 - DNA, 90 bp, Homo sapiens
tctgatgcctattattgtaaggagtgcaccatccaggagaaggacgcagaagaagagttcaacatagagaaaggtcggcttgtgcaaacc

SEQ ID NO: 88121 - DNA, 75 bp, Homo sapiens
ctccaactggccaatacaaatcccttgtatccgtatcgacttcaatattataaagattctgaacaacccaagagc

SEQ ID NO: 88122 - DNA, 96 bp, Homo sapiens
gggaggaggaggaggattcagggaataggagctggggagcccttctgcgccacagggagatactaacatctccatcatgctggcaatatgctgtcc

SEQ ID NO: 88123 - DNA, 75 bp, Homo sapiens
cctgaatacatgatttaaacaagagatttccacagaagctattcctctacacagccgactagttatgatcagagc

SEQ ID NO: 88124 - DNA, 75 bp, Homo sapiens
cacgacagaaggcgtctcatggcgttggaataccggctctcagcggctggctacaccaagtccattgatatttgg

SEQ ID NO: 88125 - DNA, 83 bp, Homo sapiens
agacccagaaggctgacaagctccatgagctacatcgagaaccagcagcatctgcagcatctggagctccgtgatctgagggg

SEQ ID NO: 88126 - DNA, 96 bp, Homo sapiens
gcggggagaccttgggcatcatcggacttggtgccctacgagacgctgaacaaacgctttcgcgccgctcagaagaacattgaccgggagaccagc

SEQ ID NO: 88127 - DNA, 75 bp, Homo sapiens
atcattggggggcacgattctccctctcctagaggcgagaaagaatcagcatatcccttacagaaatagtaagct

SEQ ID NO: 88128 - DNA, 75 bp, Homo sapiens
tctggagctgacagcgcgcacttcacccgcagttgaaacctgtttccctccaatcttgtggttgcagctttccgt

SEQ ID NO: 88129 - DNA, 98 bp, Homo sapiens
cggcagcatgtcggtggcggggctgaagaagcagttctacaaggcgagccagctgagatctgtatctgtggacctgaatgttgatccctcgcttcaga

SEQ ID NO: 88130 - DNA, 100 bp, Homo sapiens
atgaattcgacctggagaacgcagtgctcttcgaagtggcctgggaggtggctaacaagggttctccccaggatatagcagccgtaagaagccaagcagc

SEQ ID NO: 88131 - DNA, 75 bp, Homo sapiens
gtggcttgtagaattctatgctccatggtccctggggggtgatgttgcctctgatggtgacttcctcatctttga

SEQ ID NO: 88132 - DNA, 75 bp, Homo sapiens
gcaagagaagagagctgcgtgtgcgcagaaggtgaccaagaatatggcccaggtgaccaaagccctggacaaggc

SEQ ID NO: 88133 - DNA, 83 bp, Homo sapiens
gccgccaaagaccccgtccggtagttacagaatgtctgaaggggacagtgtgggagaatccgtccatgggaaaccttcggtgg

SEQ ID NO: 88134 - DNA, 99 bp, Homo sapiens
gacggctcggatgccggcggtctctgctgaagagagaagatggcgcttgacggaccagagcagtagagatggagtttcaccgtgttgcccaggctggtg

SEQ ID NO: 88135 - DNA, 100 bp, Homo sapiens
gggaccagcgtccagtccgtgcgagaggtggcagagcagacagccgctccgaccgctggtcccagatgccagcaagcagcggctgatggagaacacagag

SEQ ID NO: 88136 - DNA, 89 bp, Homo sapiens
gtttgtactatcctcggtgctgtggtgcagagctagttcctctccagctcagccgcgtagcataagcagtactataatggatgtagaca

SEQ ID NO: 88137 - DNA, 100 bp, Homo sapiens
attccaagtaactcttatttgcgggtgcggatgggcccctcttcctctcccatcccctccccttcccctagtcccaccgaccccaagcgctgcttcttcg

SEQ ID NO: 88138 - DNA, 74 bp, Homo sapiens
gatgagccccccgcagacacccaggtgaaagaaaatggcccgaaccaagcagactgctcgtaagtccaccggtg

SEQ ID NO: 88139 - DNA, 50 bp, Homo sapiens
ggccgaggagattcaggatgaagttgaacctgtgtgcagacacattagaa

SEQ ID NO: 88140 - DNA, 90 bp, Homo sapiens
ccaggccggatggtgggcctggggtgcggcgtcagatggatctttgtggagttcacctctgtgtttgactgccagaaagccatgcagggc

SEQ ID NO: 88141 - DNA, 99 bp, Homo sapiens
ttggacaacatgtcccaacattacatcccaggggaattgcagcaggaagcagcggaaaaggacgaggagccaagcgcaaacagcaggatggagggacca

SEQ ID NO: 88142 - DNA, 51 bp, Homo sapiens
ccttctccagctcctacctgcaggcctcagataacgtgaaggactggagca

SEQ ID NO: 88143 - DNA, 98 bp, Homo sapiens
gaaaatgtcacctctatcatgtttctagtagcgcttagtgaatatgatcaagttctcgtggagtcagacaatgaggttcttcctcaagttcttcctca

SEQ ID NO: 88144 - DNA, 50 bp, Homo sapiens
tatcaagaggaggagttgttgaacccccagtcggatcttcaggcccagga

SEQ ID NO: 88145 - DNA, 80 bp, Homo sapiens
gggctggcgtgcgccagaggatccgcaaagtgctgaacaggtaactaggatttctacctcaaccgcgagacctatgcaag

SEQ ID NO: 88146 - DNA, 100 bp, Homo sapiens
tgacaactggtgccggagggacaaaaagcaatgcaagagtcgctttgttacacctttcaagtgtctcgaaagatgtgtcatggcaatgctgagaaggagg

SEQ ID NO: 88147 - DNA, 88 bp, Homo sapiens
gactatccaggcttgggcaagtggctgtcaataccagcaaatatgcagaaagctatcggatccaaacctatgctgaatatatggggag

SEQ ID NO: 88148 - DNA, 76 bp, Homo sapiens
gaaacttaggggccacgtgagccacggccacggccgcatagacatttctcttgggaagttgtgcatctgacaggaa

SEQ ID NO: 88149 - DNA, 48 bp, Homo sapiens
ttctgaactcaggacttggcaactttgtgtccctggtgatgttggaac

SEQ ID NO: 88150 - DNA, 76 bp, Homo sapiens
gtagctgaatccagtaccaaaaacgtcaacaacagttttacgatcttagcaaagcaatgtctcaagatggtgcttc

SEQ ID NO: 88151 - DNA, 100 bp, Homo sapiens
ggacgagtaatcgcctgctttgattcattgaaaatctttaatctcatgaagtacgacagctacagccgcttcttaaagtctgacttgtttttaaaacaca

SEQ ID NO: 88152 - DNA, 83 bp, Homo sapiens
cttaggggcacttctgttttcctgagggctacaccgttttcttttgaaagagattagatcctgtgctgaaagagaaaccaaga

SEQ ID NO: 88153 - DNA, 101 bp, Homo sapiens
agcagctctaccaccaggacaggccccctaaaactaattccaacaagcacctctgaaggtgtttggcaatcaactcattcctcccaatgcacaagtgaaga

SEQ ID NO: 88154 - DNA, 98 bp, Homo sapiens
tttcccacttgattacccgttaagtcccccaaagatgagatttacctgtgagatgtttcatcccaacaactttgaagattatccaatgagaattttat

SEQ ID NO: 88155 - DNA, 75 bp, Homo sapiens
ggttggtgtaaggaacatagaagaacccttattactccaccaggataaagtggccagtgtgtacgaagccccggg

SEQ ID NO: 88156 - DNA, 100 bp, Homo sapiens
gaggtggcgctcatgcatatttgagacaacatctggatggttggggagaacggatgctcgtcagaagttccgctctgttctggttgaagcaacggtgaaa

SEQ ID NO: 88157 - DNA, 75 bp, Homo sapiens
aaattatggggcctcaacacagaatatggttcgatacaagaggctgttttcctagcgtggcttgctgcctttggt

SEQ ID NO: 88158 - DNA, 90 bp, Homo sapiens
aaggtggcggcgctgctgctcgggctgctcttggaggtgctggagaatctggtaaaagcaccattgtgaagcagatgaggatcctgcatg

SEQ ID NO: 88159 - DNA, 75 bp, Homo sapiens
gaagtggatgctttatgtcctcgaagatcagaccgagagaggatgaagtttttgctgctgcagcagaagtaccta

SEQ ID NO: 88160 - DNA, 82 bp, Homo sapiens
ccttcggcagtccacccaccgccgccgcctcccagatgaaatcgttagcaccttaggagaggggaccttcggccgagttgta

SEQ ID NO: 88161 - DNA, 100 bp, Homo sapiens
gatcctgccatgcaggcaggccctgagcacgctgctgtgtgagcagcagattttgcaagaacgaggctcaaggatgtgagggacacagtattgacagctg

SEQ ID NO: 88162 - DNA, 89 bp, Homo sapiens
cctgaggcctccccagccatgcagaactctttaatgttgacctactagcaggaaaatcaaaggatattgctctacacttgaacccacgc

SEQ ID NO: 88163 - DNA, 101 bp, Homo sapiens
ttcaggtcacaatttctacagcagagaccttgagggatatctttcttcactcctcttcacttcttcaaatcctggtaattgatgtccacccgagaaatccc

SEQ ID NO: 88164 - DNA, 98 bp, Homo sapiens
cgccacctccgctgctgctgctgctcttcccgctgctgctcttctccaggctctgtgaggcttcgtgacggagttatcagagacattgagaggcaaat

SEQ ID NO: 88165 - DNA, 75 bp, Homo sapiens
ggtgggcactgtgatctcagacttccagccttcagaactaacaatgagatggtggagctacagagaatacggatg

SEQ ID NO: 88166 - DNA, 50 bp, Homo sapiens
tgcttatgatggacctaggactgctgctttaaggaagcctcctatttcag

SEQ ID NO: 88167 - DNA, 97 bp, Homo sapiens
acagtgttggttaagttgacaaggcaaacaatggctaaatttggagacagacaacttgtcacgcatacagggaaaatgacatttgaagacaaagtca

SEQ ID NO: 88168 - DNA, 50 bp, Homo sapiens
acccgagacccacggagaccgcgagggctctaactccgtgaggaccccag

SEQ ID NO: 88169 - DNA, 97 bp, Homo sapiens
aacgtgttggaccttccggagcttctcagaagacagagggttttcttttgagactggaccaagaggattgagtaccagcctggctccgggagcatgc

SEQ ID NO: 88170 - DNA, 88 bp, Homo sapiens
ctctgcatcatcgctgttctgtgctactgccggctccagactgattcttgctattccaaatcctcttccacgttgacagcccttcaga

SEQ ID NO: 88171 - DNA, 83 bp, Homo sapiens
ctgacagccctgtgtgacaccaagataagtaacgtcaataacttctatccggagtgaactgattccatatttagtgagaaaac

SEQ ID NO: 88172 - DNA, 100 bp, Homo sapiens
cagatgcaggaggaggcccggcggctgcgggaggagatcgaggagctcaatgccaccatcataggagaagcgcatctaccgggtgcctgttttcacagcg

SEQ ID NO: 88173 - DNA, 74 bp, Homo sapiens
gggatggctataatgggtatggaggaggacctggaggttgaatttagtattagtgacaaacagaggcctggaca

SEQ ID NO: 88174 - DNA, 101 bp, Homo sapiens
tgggtcgaggcggacgcgcggctgcgtcaggccaggagtggtggctcacacctgtaatcccagctctgggaggccaaggccagtggattgcttgagcccag

SEQ ID NO: 88175 - DNA, 98 bp, Homo sapiens
caacttcaatttttctgcagtggctctgggtccagccccttacttaaagtatccctacagaaatttcaggaaacagccctgtgtctcctaatactcag

SEQ ID NO: 88176 - DNA, 90 bp, Homo sapiens
caggcgtccccgtcacccaacaacccactcaggcacttccggaattgaatgatctggcacgggaccctccagcacagtgttcagcaggtc

SEQ ID NO: 88177 - DNA, 90 bp, Homo sapiens
ctgcccccccttccccacgcaaccccagatccatttacactttacatgcctccggagccagcgtggtggccatagacaacaagatcgaac

SEQ ID NO: 88178 - DNA, 101 bp, Homo sapiens
aggaatggcatatcccccattattattgataataccaacctccacgcctgggaaatgaagccctatgcagtcatggttccatgcctctgcagcggtgcctc

SEQ ID NO: 88179 - DNA, 78 bp, Homo sapiens
gcctgggctgcatctttgctgagatggtggaacggcacatgtgtgatggggacattgttatcttcaaccggcagccaa

SEQ ID NO: 88180 - DNA, 76 bp, Homo sapiens
cagggaggccccaagtatactctctcacagcagccttgggcacaaccagttgattacagacatagtgaaaccagtg

SEQ ID NO: 88181 - DNA, 100 bp, Homo sapiens
agtctccaccttgatggagaggccaggcgggagaactaccgcagcagggtgtttgtgaaccgaagtttagcaatggaaaagataaagtgttttggttttg

SEQ ID NO: 88182 - DNA, 82 bp, Homo sapiens
ctcaacgaggaactcaaagtggatgaggaaaatcgcaccccctccctccctggcggagcccctgaaggagctgttcaggcag

SEQ ID NO: 88183 - DNA, 101 bp, Homo sapiens
gatgtcagtggctgtgggcttccccatgatgatcctgccatgcaggcaggccctgagcacgctgctgtgtgagcagcagaagtgctggatgaagaagacga

SEQ ID NO: 88184 - DNA, 100 bp, Homo sapiens
cactgtggttcctgcatgaagacagtggctggcggtgcctggacgtacaagtatgagacatctttgttggatttggttcagtctctgagcccaaactctg

SEQ ID NO: 88185 - DNA, 75 bp, Homo sapiens
ctattggacaagtactcactaagatgggtgtgaacctgacacgcagcaacaaggagacggtgaagcacagcgacg

SEQ ID NO: 88186 - DNA, 82 bp, Homo sapiens
tgcactccgcacctcggggacattattgcgcgtggaacggctgcttttggaagcaaattgtggctactaatttgccccctga

SEQ ID NO: 88187 - DNA, 88 bp, Homo sapiens
ggaagctggtaggcacgggcggctccgcagtgaccggactcgggggaggacctcagcagccatgtcgaagccccatagtgaagccggg

SEQ ID NO: 88188 - DNA, 82 bp, Homo sapiens
gccgagttcaacatcctcctggccaccgactcctacaagctactctcggaaccgcacgtttgacacgtacattgggcagggc

SEQ ID NO: 88189 - DNA, 75 bp, Homo sapiens
ccaggacggctacagcctgtgcccgggccgggagctgggcaggttcttcccaggagactctgccggccttttccc

SEQ ID NO: 88190 - DNA, 100 bp, Homo sapiens
atctggaggagcagttgtctgatgaagagaagcttttcctccgcaaccatgtctgacaaacccgatatggctgagatcgagaaattcgataagtcgaaac

SEQ ID NO: 88191 - DNA, 75 bp, Homo sapiens
ggagatatgcccttagttggagctttgtctatcttcttccttaggaaaccagttcgatacaagaggctgttttcc

SEQ ID NO: 88192 - DNA, 73 bp, Homo sapiens
aaaaggagctcaactccaaccacgacggggccgacgagacctcagatcatggaagggaagtggttgctgtgta

SEQ ID NO: 88193 - DNA, 98 bp, Homo sapiens
gtcccgtcttatgggacttgaggccctcaaggttggaagcgaagtggaagcactgaacctccaggtgacatctctgtttaaggagcttcaagaggctc

SEQ ID NO: 88194 - DNA, 51 bp, Homo sapiens
aagaggggtgtgttcaatgttcaaatggagcatagtgtctcagaagaaaag

SEQ ID NO: 88195 - DNA, 82 bp, Homo sapiens
ctggggtttcggcctggaggagttgtacggcctggcactgcgcttcttcaaagtttggtgccctggttgtcagatgttggaa

SEQ ID NO: 88196 - DNA, 101 bp, Homo sapiens
aagatgagctgtcctttcaggaaggagccattatttatgtcatcaagaagaatgacgatgacttaattcagtgcacaaatgagatgaatgtgaacatccca

SEQ ID NO: 88197 - DNA, 82 bp, Homo sapiens
atccggcagaagtgccggctgcgccagtgccagctgcgggcccgggagatgcagaaactaccagaggccgttcagctaattg

SEQ ID NO: 88198 - DNA, 99 bp, Homo sapiens
ggggaaaccccgtaaagtggttggttgcagttgtgtagtagttaagcatgacgacagagatgatggtgtggattattgggccaaaagaggaagaggtcg

SEQ ID NO: 88199 - DNA, 100 bp, Homo sapiens
gaagccattcagtcctcaatctccttttccttggctaccctactatactggcaattgctggagaagattttgcaattgttgcttctgatactcgattgag

SEQ ID NO: 88200 - DNA, 98 bp, Homo sapiens
ggagcctcaggcggcagcgcttctaggcatgttatttgaaagcaattgagacgcaaccgaactttgcagtagcttggagtaatcttggctgtgttttc

SEQ ID NO: 88201 - DNA, 100 bp, Homo sapiens
tgctgactgatgatgaagcctggaatggattcgtggctgctgctgaactgcccagagccctgcagaccccacaatgcagtcctggtggcctgactgtaac

SEQ ID NO: 88202 - DNA, 75 bp, Homo sapiens
aaaagaagaattgcggcaagattacagacgttatcttactcaggtatggagagtcggcttgactacactgtgtgg

SEQ ID NO: 88203 - DNA, 90 bp, Homo sapiens
acccctgtatttcacttggctctccaaattgactcaactccaggttgaaatcacaaagattagacacctttttagataggtgttcttcag

SEQ ID NO: 88204 - DNA, 98 bp, Homo sapiens
cagctcgccgctccctagcaccttctccagtcgacactctcgcgcccggagttggccacggacagagcgaaggggagaggatggtagtgtctgacttc

SEQ ID NO: 88205 - DNA, 83 bp, Homo sapiens
tgcgacctgcacgccccgccgcgcagattgtctcaaagcttgccaggagcagattgaggcggtgctcctcaatagcctgcagc

SEQ ID NO: 88206 - DNA, 137 bp, Homo sapiens
gaaagatcctacaggaatggatcctgatgatatttggcagctgtcctccagtcttaaaagaggtcatggaagaagtgacaacatgctccttcaacagccctctgttccggcaggaagatgacagagggattacctac

SEQ ID NO: 88207 - DNA, 100 bp, Homo sapiens
tttgtgcaaaaggggagctggctacttctcgctctgcttcatcccactattattttggcacaacaggaagatgtgattcagcactgccagcgagtcaaac

SEQ ID NO: 88208 - DNA, 95 bp, Homo sapiens
ggccggcgggaccataagggcttaactcatatatttaacccccctccaaaaaatgttgaaatgcttcaggccagtacatctaacccaatccctgg

SEQ ID NO: 88209 - DNA, 83 bp, Homo sapiens
cagcatggctacttcatattttggaaagcagtttttaagacaagaacagcttgagaactatgacttcaccaaattccactcgc

SEQ ID NO: 88210 - DNA, 83 bp, Homo sapiens
ggagactataaactattctgtactctgaatggtttagcaactcagtgtattcaacaatgcagatcttcgtgaagactctgact

SEQ ID NO: 88211 - DNA, 76 bp, Homo sapiens
ccggcgggcggcctcgcgggtcagcttccttcaaaatgtctactgttcacgaaatcctgtgcaagctcagcttgga

SEQ ID NO: 88212 - DNA, 75 bp, Homo sapiens
aagatgaaagccaaggaggagaggcgagtgacagaactgaaggtggagagtctggctcagcaggcaacagtgaca

SEQ ID NO: 88213 - DNA, 98 bp, Homo sapiens
tgctgcacaggtggcctccgaacccgggaaaagaggaactaaggcggaggaactgagacgtttcgaattccagtgatgatgatgatgattttgatgat

SEQ ID NO: 88214 - DNA, 74 bp, Homo sapiens
atgtcatccagcgagtgattagggtttccaggcctgaggtgcccgccctggccccaggagaatgaaccagccgc

SEQ ID NO: 88215 - DNA, 95 bp, Homo sapiens
aaggctgacaaggcgtcggcgtcggcccctgcgccggcctcggccaccgagatcctgctgacgccggctagggttgtggcagcactgcctgaagg

SEQ ID NO: 88216 - DNA, 82 bp, Homo sapiens
ttggcccttgttcccccaaatgtctgactctgactctcggactgagaaacgcaaggttgatgccggcccaggatggatcaga

SEQ ID NO: 88217 - DNA, 100 bp, Homo sapiens
gtcatcacagaccgaggaggtggatcacagatggagtggtttaataattataaaagatctcttgctacttatatgaggtcactgggaggagatgaaggtt

SEQ ID NO: 88218 - DNA, 100 bp, Homo sapiens
gtgggagtgacccgattttccagattttaccaaatgttgcaagaactctggagttcttatggtagtaaaatgccggaaagaaaattctgcattgaaagaa

SEQ ID NO: 88219 - DNA, 75 bp, Homo sapiens
cttgggttttttgtggcttccttcgttattggagccaggcctacaccccagcatcaagatggtgctcatgtggac

SEQ ID NO: 88220 - DNA, 75 bp, Homo sapiens
gctctggttcctgttgcggccggtggatggaagcatgcctaggggaagatctgcctcccaccacagaactggagg

SEQ ID NO: 88221 - DNA, 100 bp, Homo sapiens
agaaatggaagtgagatctgaatccacaaacggagacggcagacagtcacaggcagctaaattttcaggagtgaaaagaaaaagaggaaggaagaaaccc

SEQ ID NO: 88222 - DNA, 90 bp, Homo sapiens
cgagagagcgaacgccagggaccctgtgcaggcctgctcctccgtttgcaaggatgaaacaggcgcctatttaatcgacagagaccccac

SEQ ID NO: 88223 - DNA, 75 bp, Homo sapiens
cgaacatggagaacccccagcttggagcgcaaggctggagtgcagtggcgagatctcgactcactgcaggctccg

SEQ ID NO: 88224 - DNA, 100 bp, Homo sapiens
agccgcgaggaggcgcgggaggtgttcgagaacgaccccgagacgactcagaagtcaaaaacctcctttcagatgataactcagaaggccttactttatt

SEQ ID NO: 88225 - DNA, 82 bp, Homo sapiens
acgggctccgtggctggttcccggcgagctacgtgcagttgctggaggtcaaaatgcagatcttcgtgaaaacccttaccgg

SEQ ID NO: 88226 - DNA, 75 bp, Homo sapiens
aaatttcttgggtgaaaaatatatccgcagggttcggatgagaccaggaattaaggataacctagacgacataaa

SEQ ID NO: 88227 - DNA, 100 bp, Homo sapiens
cgtgcaccttcgcaagaagcaccagttcaagtggccctcagggcatccccgttttcggtcacagagatgcggcggaccctgacgcctgccagctccccag

SEQ ID NO: 88228 - DNA, 122 bp, Homo sapiens
gcatttaaacttccctcttagaactgcttttgtggcatcccataagttttggcatttatgtttgaatcatctttaagtctggcggtcacaaagtggggactcaaggcctccaggtgtttgga

SEQ ID NO: 88229 - DNA, 104 bp, Homo sapiens
caagaggattacctgctttacaagcaaatgaagcaactgaaaaaccccttggaaatagtcagcatacctggaaataatgaagatgtttcattttcaagaccagc

SEQ ID NO: 88230 - DNA, 100 bp, Homo sapiens
tgttacaggaatcacagctctcaatagcatagagggtgtttataggttgtggagcatggcctgtttgtcaagcactgcaaagtcgaggtgtatttgctgg

SEQ ID NO: 88231 - DNA, 80 bp, Homo sapiens
gagagtgagcgagccttcacctacagcatcgtgggcgccggctcccagtttgggtcccgcgcggccccgggtgaggcacg

SEQ ID NO: 88232 - DNA, 114 bp, Homo sapiens
tccagaatgaaatccatgctcagagatgccaagaagaatctagacagacaggcctttctaggtgtgatgaatgcagactctgctaccattttggctgtttggatcctcctttga

SEQ ID NO: 88233 - DNA, 90 bp, Homo sapiens
agcctgtgtaggacacgatcagacaggtgacttggcagcatgcacacccctgaaaatgcactgcagggactgtgccctggtgaccagctc

SEQ ID NO: 88234 - DNA, 100 bp, Homo sapiens
taactccagaatcccccattgatgccagagacgcggaacaattgagcaagaacaaggtgacacatattctgtctgtccacgatagtgccaggcctatgtt

SEQ ID NO: 88235 - DNA, 97 bp, Homo sapiens
gagaacgccaagcgcttcgccatcgacatagctccaccgggggacggctacgtgcaggcggacgcccggggccccccggaccacgaggagcacctgt

SEQ ID NO: 88236 - DNA, 74 bp, Homo sapiens
gcccaagaaaaagcacctggactgttgctccgactgtgtgttccaggagtggtggctctgaggtgtgaccctgc

SEQ ID NO: 88237 - DNA, 101 bp, Homo sapiens
aaagaagagaccaaatacaagcagaactggattccaaagttgaagttttgacctataaaaaggcagatactgatctggaatcggtgacatttaaggatgtg

SEQ ID NO: 88238 - DNA, 100 bp, Homo sapiens
gaatgaagaaggagctttctccagcaggtgcagctgaatgccggccagctgcagtatatccgcttagcccagcctgtatcaggcactcaagttgtgcagg

SEQ ID NO: 88239 - DNA, 100 bp, Homo sapiens
gttaagtcccccaaagatgagatttacctgtgagatgtttcatcccaacaccagcaatacaggaatgcacaggaggcaaatcactgaccttttagaccaa

SEQ ID NO: 88240 - DNA, 98 bp, Homo sapiens
ggaggacaattcaccatagttttctttaagccaagagtcgaagctaaaccagaagttcaatctcagccacctcgtgtgcgtgaacaacgacctagaga

SEQ ID NO: 88241 - DNA, 100 bp, Homo sapiens
agtttatcttggagcctctttataagatcctcgcccaggatgacatcattgatgatgttgacagctttcttgctgcagcagagaccctgaaggaaagagg

SEQ ID NO: 88242 - DNA, 98 bp, Homo sapiens
agcagagcaagaagttacatgtatcgatggaggcaagaccctccccaaacagaaagtgactgagaccgaagatgatagtgatagtgacagcgatgatg

SEQ ID NO: 88243 - DNA, 82 bp, Homo sapiens
cggggggccaccgaatcgctgtcacgccggcaggcccgcgatgctcccagcccggtgagacctgcctgaatggcgggaagtg

SEQ ID NO: 88244 - DNA, 100 bp, Homo sapiens
ccccgggtgaagccaccgtcatcatgtctgaccagctttgaccgccattgaaggcacagcacatggggagccctgccacttcccttttcttttcctagat

SEQ ID NO: 88245 - DNA, 95 bp, Homo sapiens
aactgtacccggacagcgaccgtcaagaccgtccatcatcagggctcggcctcagcaccctccacctccaggtcctacacaactggttcggcttc

SEQ ID NO: 88246 - DNA, 98 bp, Homo sapiens
agaagatgccgcagcccgagtcccagaaggcggcgatcctgggctgcgggcaaggcggtaagaatgattgatgttggctgatattggagtgctcattc

SEQ ID NO: 88247 - DNA, 101 bp, Homo sapiens
cagtcggcctgcagggctgccaggcctgggctctagtacccaaaaggtcacccaccgggtgctgggccccgtcagagtgtaccgtatccacagcgtcctcc

SEQ ID NO: 88248 - DNA, 75 bp, Homo sapiens
gaccgtctagtataagacagagcacgaaaggcatttttactgctggtgctgtaaactgcaaaccataatcctgtc

SEQ ID NO: 88249 - DNA, 75 bp, Homo sapiens
ctgcctcttgatctccgccaccgtcttcaggccagttcgatcctttggtacagaagacagaccgacagatcgtcc

SEQ ID NO: 88250 - DNA, 100 bp, Homo sapiens
caaatgctaaactctactgtaatcggggtacggttaattccaaggttgatggaaatcacaatcttctgacaaagctttctctggaagaggaaaactgtct

SEQ ID NO: 88251 - DNA, 101 bp, Homo sapiens
aaaagtgagaggtcagactcctaaggtggccaagcaagaggagttcttcaacctgtcccactgccaactggtgaccctcatcagccgggacgacctgaacg

SEQ ID NO: 88252 - DNA, 90 bp, Homo sapiens
taccccatgggtcgacctatcagatgcgccggccgggcggagagctgccactggccctgggctgcatcttgtacctgctgtgcttccggc

SEQ ID NO: 88253 - DNA, 98 bp, Homo sapiens
tgaagtttatgccatcaacagacagaggctgcagaatctggagtttgctctgaatctcctcagacagattgagcacacggagacagatactgtggacc

SEQ ID NO: 88254 - DNA, 80 bp, Homo sapiens
ctcttgtcctggcattgcatccacaggaggggcaggaaattctttgaagatcccaaggtccccttcagttggtcacaaga

SEQ ID NO: 88255 - DNA, 75 bp, Homo sapiens
cgttaagtcccccaaagatgagatttacctgtgagatgtttcatcccaacagtggttatcactaggctaaaactg

SEQ ID NO: 88256 - DNA, 122 bp, Homo sapiens
ctttcctcaggagtcatttctgttccgcacaggcctgctgaactgggtgctttatatagggtttatgaaggcgagcgtgccatgacaaaggataacaacctgcttggcaagtttgaactcac

SEQ ID NO: 88257 - DNA, 83 bp, Homo sapiens
ctctctcatctcgctcggctgcgggaaatcgggctgaagcgactgagtccgcgatggagattctttccaccatggccagacgc

SEQ ID NO: 88258 - DNA, 100 bp, Homo sapiens
caggaactgaccctgctctctcctttccctgttagacatggcagggcaagaatcctttcgttccatcacaaggtcgtattacagaggtgcagcaggagct

SEQ ID NO: 88259 - DNA, 89 bp, Homo sapiens
cgcagcggcgcagctgatagcaggaacagattctccgggcccaaagccgaagtgcaagtggaaggaagatctctgaaaacagctattct

SEQ ID NO: 88260 - DNA, 49 bp, Homo sapiens
cctcctgagtagttgggattacagagctgctggtgacagaggcggccca

SEQ ID NO: 88261 - DNA, 82 bp, Homo sapiens
agaccctggagcctcagttggaagcagccgatccagcctgcggagcctgtggggcaggaactagccagctgtggatggagta

SEQ ID NO: 88262 - DNA, 100 bp, Homo sapiens
gtcccccggtggcctcaccagcctccagcagcagaagcagcgcctgatcgagtccctccggaactcacactccagaccagtattaaagagggacagctat

SEQ ID NO: 88263 - DNA, 100 bp, Homo sapiens
agtttgatacagcatgtgttaccaagctgtttcctaccaggtcacacactgttgcagcgcagacgcccactattgcttggttctacttcctttatcccga

SEQ ID NO: 88264 - DNA, 100 bp, Homo sapiens
cagctctgcctggagcactcgctggccgactgcgccgagctgcacgtcctcgaacgcgaggccaacagccccggggccacactgtgaaggcagtgtgtga

SEQ ID NO: 88265 - DNA, 74 bp, Homo sapiens
ctcgttttcgagatcaggcctgaccgggataagctccagtgccgagcactgtctaaaagactggccttggctga

SEQ ID NO: 88266 - DNA, 74 bp, Homo sapiens
acgagatctaccgcaacggctccagcgccaacatcccgcccctcaaggtccaatggctccttgagcctcacgac

SEQ ID NO: 88267 - DNA, 100 bp, Homo sapiens
tcaacaagtatgggtctccgtacaccaaaaactcaggcttcgccacctgcgtgcaaatgccctctggtggtcagaagatgctgtgctgtctcgttaggat

SEQ ID NO: 88268 - DNA, 100 bp, Homo sapiens
gacaaaccccacaagcactgcatacggctttaccgccagcacctgttcagaatcacacaaataagcatcaggtattcaatgcatctcttcaagaccatat

SEQ ID NO: 88269 - DNA, 89 bp, Homo sapiens
agggaggtgcgtctgcagctggcgcggaagagtatcaatggagtgagcccaaaggttcgaaaggtgttgcagcttcttcgccttcgtca

SEQ ID NO: 88270 - DNA, 126 bp, Homo sapiens
cgtcacctgtccttctacattttcgatagagacgttttccggagggattccatcatagaaggaagaatcctgctcaaaaatgaggtgaattaatacttgggcgctcaggaaccctggacagctaca

SEQ ID NO: 88271 - DNA, 90 bp, Homo sapiens
cagcacgctggccaaggtcttcctcgatttcaaggaaagtgaagaactgaatgtcatcatgtctggaatcaagcgaaccatcaaagaaac

SEQ ID NO: 88272 - DNA, 75 bp, Homo sapiens
agaaggcaacatcgtcattggctactccatttcccagcaatatcacaggtatattgaaattgctataaagcagtg

SEQ ID NO: 88273 - DNA, 82 bp, Homo sapiens
tgatgtggctggcgcgagagggcatcgtggccccactgcctggagagtggaaaccatggtcttgggcgtctttggtactggc

SEQ ID NO: 88274 - DNA, 87 bp, Homo sapiens
ggaaagttttgtgaagggtaaagatggaggtgccttgtccacattttgcgagagacaacagtaaaatactccaaaatacgttctttt

SEQ ID NO: 88275 - DNA, 95 bp, Homo sapiens
cttgtgaaaggctccatggtcttgcctccttgcagccttgcagtctcatcctactcaagtgtggctctgtatccaacaacagtcttggagatctc

SEQ ID NO: 88276 - DNA, 51 bp, Homo sapiens
gccaaagcaggtgtggaagccatgagcaattaatagaagatgaaattgcaa

SEQ ID NO: 88277 - DNA, 98 bp, Homo sapiens
tgcgatagctgcaaggaaggtggagatctcctgtgctgcgaccactgcccggctgccttccacctccagtgctgacagagtctcgctctgttgcccag

SEQ ID NO: 88278 - DNA, 51 bp, Homo sapiens
ctggcacaagggctggaactggacttcagtgcagtccctggaagaagaatg

SEQ ID NO: 88279 - DNA, 100 bp, Homo sapiens
ttccaccaggccgggaagcccatcggcttcctcatcgtcctggtctgcctcatcttcagcgtgctgtccaccatcgagcagtatgccgccctggccacgg

SEQ ID NO: 88280 - DNA, 99 bp, Homo sapiens
tctttcagttcaagtgacaaacgtacctgtggtccctggatccagtgctactgctacaaataagggggtccactggacggggcctgagctacaacttca

SEQ ID NO: 88281 - DNA, 100 bp, Homo sapiens
tgcggaggtacttcattctggacacccaggctaactgcctcctctggtatatggacaacccccagggttcatagtggcgtcatgcacgcagactcctgca

SEQ ID NO: 88282 - DNA, 75 bp, Homo sapiens
caacctcaaacccgttctccgggtttcaaaggactgtggctattgcggactcaaattacaactggttttatggtc

SEQ ID NO: 88283 - DNA, 100 bp, Homo sapiens
ccagccaaatacaactggaaaacagctttttgatcaggtggtcttccgggatccgtatcggtttaagaagcggacggagctgttcattgccgccgagggc

SEQ ID NO: 88284 - DNA, 100 bp, Homo sapiens
cacgcccaagaatcttgattacaagagagacttgttttgcctcagtgttgaagccattgaaagagttacatccatatgggagaatagtctccagatcact

SEQ ID NO: 88285 - DNA, 100 bp, Homo sapiens
agttctcgccctcttgccgtcgccgcgggtcctggagaagcggccgcggccagggaacggggcatcgcggttccaacggcttgggcctggaacaggacag

SEQ ID NO: 88286 - DNA, 90 bp, Homo sapiens
attattttggaccttcagattagcattacaacacctccttgcttgccgctgcagcagcagcagtttcagatgatcaagacctcctacact

SEQ ID NO: 88287 - DNA, 99 bp, Homo sapiens
gtacagtaagcatgacatgaacaaagttctggacctggagttgaaaggtgacattgagaaatgcctcacagctatcgaggccagtaatagtagccatga

SEQ ID NO: 88288 - DNA, 83 bp, Homo sapiens
ctgttacattctctatctgcgcaccttggagtccaagcttgtgctctttggccatgcggaccctcagttggaagcacaccctg

SEQ ID NO: 88289 - DNA, 100 bp, Homo sapiens
gtacctgttaccactttcaaaagtgaggatacaactagaagccagcagtctacaggctggaagaaggccctcaccagaacccaacccttggacttcagcc

SEQ ID NO: 88290 - DNA, 76 bp, Homo sapiens
ataagcacaagagaaagaaggttaagctggctgtcctgaaatattataagggctatgcaccaccgcctaaaaatgg

SEQ ID NO: 88291 - DNA, 96 bp, Homo sapiens
tttttcacttggaggatggtgaaccctactgtgagactgaaaacctcggatcaattctcagctggtggcacaacaagtggcacaacagtatgccac

SEQ ID NO: 88292 - DNA, 100 bp, Homo sapiens
catcaagaccatcttccaaggcattgctgcaaaagtgggaactggagaaccctgctgtgactgggccatgagcatccgggagcagatcgggcaccctgac

SEQ ID NO: 88293 - DNA, 100 bp, Homo sapiens
gcaggattttgcctccgctgtcgcccccgcagcaccgctactcggagggcgagcggacctccctggagaagttgcaaatcaaacatgcagttacagaagc

SEQ ID NO: 88294 - DNA, 83 bp, Homo sapiens
gttggaagcagccgatccagcctgcggagcctgtggggcaggtacaaggaaatggtagaactagtgatctcacccagcctcac

SEQ ID NO: 88295 - DNA, 100 bp, Homo sapiens
tttgcttgatggcttagaactctccacagccatcactcatgtccataaggagcacccttacatctatcgggttacctttgccacagctaatgaatcctca

SEQ ID NO: 88296 - DNA, 90 bp, Homo sapiens
gcaagacaagggtccatatcgcggcatccggctcccgcccgtcttcaggtcgtcaaagtcctacattttagctttcagtgctgaacttcc

SEQ ID NO: 88297 - DNA, 100 bp, Homo sapiens
gaggacgagtccacgggcctgaagaaggttgctccttgagggcaggacagttcttatggctttatccgttgcgtaagcacagagaggtctgcgaggtcaa

SEQ ID NO: 88298 - DNA, 75 bp, Homo sapiens
attgcccctgtggtgccaagagaatattggaattccaggcaagaagctaccggatgtttcacgacgacagcatga

SEQ ID NO: 88299 - DNA, 82 bp, Homo sapiens
cttcagcggtggcaccgggatcggttgccttgagcctgggttggggtgctggaggactgcttcaccttcctgggcatcttcc

SEQ ID NO: 88300 - DNA, 82 bp, Homo sapiens
cgaaatgtccatgagaaaaagcttggagataaagttgctttttactgcattgtcttcagtgttaagaaatgtggactcctgt

SEQ ID NO: 88301 - DNA, 75 bp, Homo sapiens
cgcgacgggtccgatgaggatgcggcgtttgcaggatgctgggctgaggaagctgccctcgaaaccctccagaag

SEQ ID NO: 88302 - DNA, 75 bp, Homo sapiens
cagaaggctgtagaccagagtatcgagaagatttaatccagagactgacttcactatagaacccacagttgtatc

SEQ ID NO: 88303 - DNA, 90 bp, Homo sapiens
tatgaaaagcaataaaggcatcaagctggatttcaaaagaaatttctgaataaattggcagaagaacgcagacagaagaaggaaacttaa

SEQ ID NO: 88304 - DNA, 90 bp, Homo sapiens
gccctggtcttgctcggccgatgaagtgcagaggtttttttctgcccctgaagaagatggccgaccggatcaggaagtatcagatcttga

SEQ ID NO: 88305 - DNA, 83 bp, Homo sapiens
cccaaagacccctggagacatggcggaaggtgctctaccagcgtgcacccaggaatatccaccgccatgtgatcctctctgag

SEQ ID NO: 88306 - DNA, 100 bp, Homo sapiens
gttcagaaagaaggacagggatcacaaacactcagagtggaaaaagtaccatcatttgaaacagaatcttcagctacttggagcaacagccattgaggat

SEQ ID NO: 88307 - DNA, 83 bp, Homo sapiens
atcgggcctacagcagcttcggcggcggcagaggagtggaatcgatggaagccctgcccatactgagccgtaacccaagcagg

SEQ ID NO: 88308 - DNA, 83 bp, Homo sapiens
ctccgggaaaactacactggccagggactttgaacatgtcggggatcgccctcagcagactcgcccaggagaggaaagcatgg

SEQ ID NO: 88309 - DNA, 97 bp, Homo sapiens
gacagtgagcaggagctgaaggggtacgcctgccgccactgcttcaccaccagcacaggaggggagtgccaaggctgagcggccaggcctccagaac

SEQ ID NO: 88310 - DNA, 75 bp, Homo sapiens
cgtgtaccagtgtgtgttgatcttggcttgattcagtctgccttgtaacaggttggtcaaagaaaaagtgatgta

SEQ ID NO: 88311 - DNA, 83 bp, Homo sapiens
cctgcagaaggtctctggagacatcttcagcaggcgccatgtcagaaccggctggggatgtccgtcagaacccatgcggcagc

SEQ ID NO: 88312 - DNA, 75 bp, Homo sapiens
ctctcaactaactacaattgtattggcagctagagagattggcacttctctgtttgatgaagagggagccaagat

SEQ ID NO: 88313 - DNA, 98 bp, Homo sapiens
atgcagatcattcatcaaaaatagtccagcacagaagagatccccttgaagattttagctcataataactttgttggacgtcttattggtaaagaagg

SEQ ID NO: 88314 - DNA, 75 bp, Homo sapiens
gtcgctacaacctgcccgagagcgccccgggcgccctgcgtccggcagaggaggcgagcatcccgctcaggtgat

SEQ ID NO: 88315 - DNA, 100 bp, Homo sapiens
ctgatttagatgaagaaatgattgtgttattaaaacggcgagatgtagctgaaaatctgaacaaaaaattgcagttttgtagagacagggtttcgccatc

SEQ ID NO: 88316 - DNA, 50 bp, Homo sapiens
tcatatcaaggaccagaaaggaggatacagacgtccctcaccagtgccag

SEQ ID NO: 88317 - DNA, 99 bp, Homo sapiens
ggcaaggtggttttggaccagacaggcgtgtctaagttctagattctgagaaggacttgaaagtactcatgaaggagatggcccctttgggagcaacca

SEQ ID NO: 88318 - DNA, 90 bp, Homo sapiens
accagaccaacacagcagacacagagagcagtatctttattgaggattaccttaagtatttccaggaccaagtgagcagagagaatctgc

SEQ ID NO: 88319 - DNA, 51 bp, Homo sapiens
tacgcctacttctataaagtcatccagggcttcgtgggacacatatgcaac

SEQ ID NO: 88320 - DNA, 75 bp, Homo sapiens
ttcctgccaggagttgtcggtgcgagggaaatcctcattgacgattcaatttgttgaaggccaatttgtggactc

SEQ ID NO: 88321 - DNA, 49 bp, Homo sapiens
gagtgaagctgcagaccttcgcaaaccccgagatgcccctgtccttcac

SEQ ID NO: 88322 - DNA, 83 bp, Homo sapiens
gacgcggcacagagagggcctgggagcttgctgcagcttcagatgtgaagttcatttccaatccgccctccatggtggcagcg

SEQ ID NO: 88323 - DNA, 100 bp, Homo sapiens
gggagcccaggagcctgccccgccctggggacgaagagctgcagctcctcctgtgcggattgccaacactcctgatagctgaatgtgtgctggtttacat

SEQ ID NO: 88324 - DNA, 99 bp, Homo sapiens
ccagcctactgatcagctgggatgctcctgctgtcacagtgagatattacaggatcacttacggagagacagactctgaagaagaagctatggagacta

SEQ ID NO: 88325 - DNA, 82 bp, Homo sapiens
atcagattatatggccgcatcttcacaactccgtcttacagagacttatcagatgtagacttcctagatgattcttcaacgg

SEQ ID NO: 88326 - DNA, 82 bp, Homo sapiens
aaattacagcagtctgaatcgagctcagctaacctttgaatatctgcacacaaattcttaacaagcacaagccctggctgga

SEQ ID NO: 88327 - DNA, 75 bp, Homo sapiens
gtcctttatatagaagggagagtgccacacctccctggatgatccaagatgaagaatacattgctgggaaccaag

SEQ ID NO: 88328 - DNA, 100 bp, Homo sapiens
tcaaggtgaacgggcggcccctggagatgattgagccgcgcacgctacagtacaagaccttgatgaaggttgcggcccaaaacttgattcagaacactaa

SEQ ID NO: 88329 - DNA, 90 bp, Homo sapiens
gaggttaaatgagaagaattatgaactcttgaactccctgtgctgtcaggaatctacaggacttggctcgtatttacattcgacgcacac

SEQ ID NO: 88330 - DNA, 100 bp, Homo sapiens
gctccttggggtttccggctgcagggcggtaaggatttcaacatgcctctgacaatctctagtacacgagacgacttcctgggccaggtggacgtgcccc

SEQ ID NO: 88331 - DNA, 113 bp, Homo sapiens
aggtcattcctcacgtctaccccgtggctgctaagacacagcttggccggtgcttccaggaaaccattgggtcacaggtgaaagaagaacgtccagaaaaaataccagattta

SEQ ID NO: 88332 - DNA, 100 bp, Homo sapiens
gcctcagcctcccgagtggctgggattacaggcagagtggctcctcacagcctgaagctcatccttctgcacgggccagccaggccagcacagaggcacc

SEQ ID NO: 88333 - DNA, 74 bp, Homo sapiens
cttgccgcacaaaaagctagagagagcggcactgcagaggtggagctgaagaagggagccactctcaaaatcac

SEQ ID NO: 88334 - DNA, 106 bp, Homo sapiens
aacacaacctgttcaagcaacgactagataaagatggcatccccgtgagctcagaggctgagcggcatgccccgtcgcagaatttagtctcaaaggaaacttcaac

SEQ ID NO: 88335 - DNA, 101 bp, Homo sapiens
gcgcggcacgcagccgggaggccgaggactcggagttcacctgcagctatgaagtcttacactccatatttcattctcctgtggagtgctgttgggatagc

SEQ ID NO: 88336 - DNA, 75 bp, Homo sapiens
atttccctcctggaaccaaaggaaatacatttgtacacgatcccaagtggccaatccgccatggtatagttgaag

SEQ ID NO: 88337 - DNA, 90 bp, Homo sapiens
ctggctcccttctgccccagctccgtctcggcggcggcgggatggggacccagacacgccaaagcctgtgagcttcacagtgaaggagac

SEQ ID NO: 88338 - DNA, 100 bp, Homo sapiens
agcagcgctgccgccgcgtcctcagccaccgctccctcttcccacggctactttgacgcacacgctcttgccatggacttcatgagcataggattccgag

SEQ ID NO: 88339 - DNA, 82 bp, Homo sapiens
ccaggcccgcgaccgtccgccagtcgtcccgaggctctgggcgtggggaggctgagacacgggagtgcatctactacaacgc

SEQ ID NO: 88340 - DNA, 82 bp, Homo sapiens
agaccctggagcctcagttggaagcagccgatccagcctgcggagcctgtggggcaggcgaaacctaaccaaactgtccctc

SEQ ID NO: 88341 - DNA, 105 bp, Homo sapiens
agggatatctttcttcactcctcttcacttcttcagaattacatgaatgacagtcttcgaaccaatgtgtttgttcgatttcaaccagagactatagcatgtgct

SEQ ID NO: 88342 - DNA, 82 bp, Homo sapiens
cagaaagctaaatcaaggtgtacagaacctgtctgagaaactctctgaacaagaattacaatttcgtcgtctcagtcaagag

SEQ ID NO: 88343 - DNA, 100 bp, Homo sapiens
ctcatgagaccagtgcccatgaaggtcagactgaggtgtggaatatcaaacaaatgattaagttgacacaggaacatatagaggccctattggacaaatt

SEQ ID NO: 88344 - DNA, 100 bp, Homo sapiens
ctcgggctccattagctacacagagctgcagcaagtgatgatgatgtagaagaaacacatccaatggatgggaatgatagtgattatgatcccaaaaaag

SEQ ID NO: 88345 - DNA, 82 bp, Homo sapiens
tgacctgccacctgcgtgggaccagtgaatgcacgcagctggtctaggcgttttacactgagattctccactgccacccttt

SEQ ID NO: 88346 - DNA, 80 bp, Homo sapiens
gagcggcgctggccccaaggcgctgccctgcgcaggccgcttacaaacacgcagatggcaagaagattgatggcaggagg

SEQ ID NO: 88347 - DNA, 90 bp, Homo sapiens
gaactgttgatatagccagagcccgaaaagaagattactctgcaacagctaaagattttaggtgatgggcaagtcagaaagtcagatgga

SEQ ID NO: 88348 - DNA, 74 bp, Homo sapiens
aagaataactgggtgttgctgtccaccgtggccgcggtggtgctagaccgagacatgggtgcccggcaccgcgc

SEQ ID NO: 88349 - DNA, 48 bp, Homo sapiens
caactctttgatgatgcatccagttcaaacttctcatggaacatctgg

SEQ ID NO: 88350 - DNA, 83 bp, Homo sapiens
gactgtgcgagtggtcgccctggacaagaacttccacatgaagtgttacaagtgtgaggttcaagcgattctcctgcttcagc

SEQ ID NO: 88351 - DNA, 97 bp, Homo sapiens
cacttcccctagtacaaatggtgcttctccagtgatggataaaccaccagagatccctggccgttggattacacggtccacacccccagagggctcg

SEQ ID NO: 88352 - DNA, 87 bp, Homo sapiens
acagactcagcgaagaattcctcacagcccatcccagataccagttcctctgcctgatctatccagaagttaaaggagagattgctc

SEQ ID NO: 88353 - DNA, 82 bp, Homo sapiens
tggagtatctggtgaaatggagaggctggtcgcccaaaggtggggctggtgtccgagcacttctcgcaggccccgcagaggc

SEQ ID NO: 88354 - DNA, 95 bp, Homo sapiens
ctgggccctgctcagagagacttgtacagagatgtcatgttggagaactacagcaactttgtgtcaccggatgtttctttctcagcaaaatagag

SEQ ID NO: 88355 - DNA, 51 bp, Homo sapiens
ctttcatgatgacccacttccacgtaatatattttctgttaccaacaacac

SEQ ID NO: 88356 - DNA, 100 bp, Homo sapiens
atactgggcacaatccatctggtggcaggccagtgaagaagcaaaggaagacatgaaaattgacgctcattcttcttcctattgttccctgacatccagc

SEQ ID NO: 88357 - DNA, 74 bp, Homo sapiens
gtccgaggaggaggcagtggctcgccacgggcaggagcatgttgagagacttggaggaggccttggagatgggg

SEQ ID NO: 88358 - DNA, 100 bp, Homo sapiens
ggcgggtgaagatcggccactacattctgggtgacacgctgggggtcggcaccttcggcaaagtgaagggaaccttttgaggatggctttgcaaatgggg

SEQ ID NO: 88359 - DNA, 96 bp, Homo sapiens
gcggtgggcgccgagcaaccgccctctcctgcatccaccagcagccaggaatccaaggctcaatctcaaaatatccttccaacaataggattcagc

SEQ ID NO: 88360 - DNA, 98 bp, Homo sapiens
ccctctctggagccgagagaggccggtttcccccaccgctcttgcagccaatgccggaacaggatttgctgttgctgagcctcaaatcgcaatgtttt

SEQ ID NO: 88361 - DNA, 98 bp, Homo sapiens
ttaagttccacttgtaccttgtccccagcgacgccttgctaacaaagattaaactcccatcggtcacatccttcatcctggacaccgaagccgtggct

SEQ ID NO: 88362 - DNA, 100 bp, Homo sapiens
taggagtgtgtgcagaaaaacaggatggatatgactctctgcagcgggatcaagctgtgtgcattagtacaaatggtgctggagaatctggtaaaagcac

SEQ ID NO: 88363 - DNA, 50 bp, Homo sapiens
cgttacaaggccttctacattaccgggattaatgaaaatcaagttccatc

SEQ ID NO: 88364 - DNA, 88 bp, Homo sapiens
gccggcctgcagcacccgccaccgtcgccggccgcccgcacgtccgtccgggttcttgaagcttttgagattaacaatggcaggaaaa

SEQ ID NO: 88365 - DNA, 75 bp, Homo sapiens
caactctccaccctagacgaagcctttgaagaattaagagtatggcctcacaagtcttggtctacccaccatatg

SEQ ID NO: 88366 - DNA, 75 bp, Homo sapiens
aagaacaacactgatcatctgtccgctttctgtgttaagcaactggattaagataccatcccacgaacacagata

SEQ ID NO: 88367 - DNA, 100 bp, Homo sapiens
aggacaaagggaaaaatgctgaagtgctgtactcgatcgagtcagtgcctgagattgtgagggagacccaggacctaattgaacaaggggcactcctgca

SEQ ID NO: 88368 - DNA, 105 bp, Homo sapiens
tgggagattccacgatccgccagtggatggaatacttcaaagccagtatcaacagtccaaagtgggagttgaaatgatgaaggatcgtaaacacattgatgtcac

SEQ ID NO: 88369 - DNA, 80 bp, Homo sapiens
caagtggaggcgccgctctagcggccgggactctgaactatggcggtgatgctgggaggttcctggttacagacactgga

SEQ ID NO: 88370 - DNA, 100 bp, Homo sapiens
ctacagcttctgataatcaaccaactgttacaatcaaggtctatgaaggggttgctgtggcactgaagcaagctatgactctggaatttaaagtttatca

SEQ ID NO: 88371 - DNA, 100 bp, Homo sapiens
atttaagagtgttgatttcaactggcttcaagcaatggtaaaaaaggaaaccctgacacatcaccttcactttgggatatggaatttgataagcagttag

SEQ ID NO: 88372 - DNA, 100 bp, Homo sapiens
tgccagtgtttcctctccacaggatccaggatgggggccccgtttgtctgggccttgggccttttgatgctgcagatgctgctctttgtggctggggaac

SEQ ID NO: 88373 - DNA, 100 bp, Homo sapiens
cagaaagataaaaatttcagtgaagaagaaagtaaagttggaagttaagggagacaaagttgaaaacaaagtgctggctaggcagctggaagagaaagac

SEQ ID NO: 88374 - DNA, 75 bp, Homo sapiens
cacagctgccctcttctctaaaaatgatggtgaacccagcgggtgccgcttctccacccgaggcttccacctcca

SEQ ID NO: 88375 - DNA, 74 bp, Homo sapiens
cgggaggtgaatttccatgtcaacatagtcctgaggcagtcaaatgcttctcagactctctgtgacatagttag

SEQ ID NO: 88376 - DNA, 100 bp, Homo sapiens
ttcatacaaaagggtctacagaagggatttgtggaactgactatatttcccacagttgcaaacttgaatagaatcaagttgaacagcaaacagtgtagaa

SEQ ID NO: 88377 - DNA, 101 bp, Homo sapiens
gagggacagaggcctactgtacatggcacatgaattccttgtgtggatatcagatccggatggaatctcgagcttgtgaatctaccaggttactctattgt

SEQ ID NO: 88378 - DNA, 118 bp, Homo sapiens
aggacgcctggttccggaagctcattggctttgtggtcctgcctgcctttgcgtttgatgaacttgtgaaaaaattcaaagtcgaatatcatgctggtggctctacccagaattcaat

SEQ ID NO: 88379 - DNA, 74 bp, Homo sapiens
tacagatttggatcaatttttacaccactgggatgtaacagagatcagacctattgtgaccgcctggtgcagga

SEQ ID NO: 88380 - DNA, 96 bp, Homo sapiens
gaggagccgcaccaatggcttccgtgctgtcctacgaaagcctggtccacgccgtggccggagccgtgaagcctggctacagataagggaccaaaa

SEQ ID NO: 88381 - DNA, 100 bp, Homo sapiens
tggtgtgtggggccggaggagtcagctgtgtgtccagaacgtgccatggagacgcttaacgatttgcctgaagacctggataatctccatttttgtcatg

SEQ ID NO: 88382 - DNA, 82 bp, Homo sapiens
catgatttaaacaagagatttccacagaagccagaagatcagctgccatgttacttgactcacaccaaccctagagtggatg

SEQ ID NO: 88383 - DNA, 82 bp, Homo sapiens
ttgacaaccaagggcctccgtctggatttccaaggaagaatttcctctgaagcaccgcttgctatggcatcgttcaggtgcc

SEQ ID NO: 88384 - DNA, 75 bp, Homo sapiens
gttttctactgtaaagtcaccaacgagatcttccgccactacgactgggagtgtccactcgccttccaccagcat

SEQ ID NO: 88385 - DNA, 100 bp, Homo sapiens
tgaagacagcgccccagcatttgccatcttcaagtttgttcaggttgacttccccagaaatctggccaagtctgtaactgtggaatgaggctgagaccgt

SEQ ID NO: 88386 - DNA, 59 bp, Homo sapiens
cacgtggaaagaatcaatttgggatgatgataattccgaagaaggcttccacactattc

SEQ ID NO: 88387 - DNA, 74 bp, Homo sapiens
tgggaccttctccctgcctggacccctactattgcaacaagtcacccacaaaagctgtatataatgccagacat

SEQ ID NO: 88388 - DNA, 100 bp, Homo sapiens
gagaaggaagattatcatccctccattcctggcctatggcgagaaaggctatggtggacctgggctcctcgaaggaggtgacaggcatcatcacccaggg

SEQ ID NO: 88389 - DNA, 108 bp, Homo sapiens
ggagcctcagttggaagcagccgatccagcctgcggagcctgtggggcagacctgcttttttaaaggctgcagaaaacttcactcttttggttaagaacaacatctgg

SEQ ID NO: 88390 - DNA, 88 bp, Homo sapiens
aacaagttcttggcaagagaggcatcctccttgaagtatttggctgaggagttttcaatcccagacaaggacacactcagcattcact

SEQ ID NO: 88391 - DNA, 95 bp, Homo sapiens
ccgaggccgcggagctcgcggaggcaaggccgaggataaggagtgtatgcagagaatatttccaaaatggtgggaagagaaaagcacttgagaaa

SEQ ID NO: 88392 - DNA, 117 bp, Homo sapiens
agagaagagggcagagccgtgcatggggctgctccccaggacctgagcaggaacctggagttttcagtctgcgctcctcagaccaccggcaggtgaacagcctgatgcagaccgagg

SEQ ID NO: 88393 - DNA, 100 bp, Homo sapiens
gggatttcccaggtccaccacctgctccatttgcaaatggaatggggcgagtccttgctcaagatgtatatgcaaaagacaatttaccccccttcccagc

SEQ ID NO: 88394 - DNA, 100 bp, Homo sapiens
tgcagttatgggctctgtcgccgtgggaaatgcttccagactgcacacttttacttagaggacagtacatcccctagagttatatccacacctccaacac

SEQ ID NO: 88395 - DNA, 90 bp, Homo sapiens
ctctcctaggcgacgagacccagtggctagtgtgaagattgctcctggagcagttgtatgtgtagaaagtgaaatcagaggagatgtaac

SEQ ID NO: 88396 - DNA, 100 bp, Homo sapiens
ggaggattgtaagatactgtgcctttgctccagggcatttgtggagttactataacaacagtaccaaggtggctgtgaaaaccctgaagccaggaactat

SEQ ID NO: 88397 - DNA, 75 bp, Homo sapiens
tggctcggagcagcagcctctgagatctgaagaagacacttgaatcatgggtgacgttaaaaattttctgtatgc

SEQ ID NO: 88398 - DNA, 82 bp, Homo sapiens
ccaccatgtcagacgcagccgtagacaccagctccgaaatcaccaccaaggtctctaattaacagaagatggcaaagcccag

SEQ ID NO: 88399 - DNA, 99 bp, Homo sapiens
cccaatgctgaccaaggaggagcctgttccagaactgctggaagctgaggtgaccaagaatatggcccaggtgaccaaagccctggacaaggccctgag

SEQ ID NO: 88400 - DNA, 75 bp, Homo sapiens
tggaggcacagaaactgttattcgggcattctacggagggagatattcttgagattgaaaatattgaacttccca

SEQ ID NO: 88401 - DNA, 78 bp, Homo sapiens
gttaaggattccaagtaactcttatttgagcattggggagtcagcaatgtccgttgtgttaaatcagctgctgcccat

SEQ ID NO: 88402 - DNA, 75 bp, Homo sapiens
cccggacccccggccccgccgtggtacgaattggagcaatgttggcttatacacctctggatgagaagagccttg

SEQ ID NO: 88403 - DNA, 100 bp, Homo sapiens
cccgggtccccgcgttcacagccccagcgcaggacctcagcagccatgtcgaagccccatagtgaagccgggactgccttcattcagacccagcagctgc

SEQ ID NO: 88404 - DNA, 75 bp, Homo sapiens
gttcaacctcagcgctctgaaattatggattggatatgtctacttctggatgcaaattttactgttgttgtaatg

SEQ ID NO: 88405 - DNA, 90 bp, Homo sapiens
tcaacctcatcaatggcacctgcttctacaccaagaatggccacagccttgccattatttggaaagcaggtctataaatgagaaagatta

SEQ ID NO: 88406 - DNA, 100 bp, Homo sapiens
ggagcacctgctgcacggcaacatgaccagcagtgacatcctcctgtgctacaccacgggtgcagagcctccagctccaccatgagctgcacgccgccca

SEQ ID NO: 88407 - DNA, 100 bp, Homo sapiens
tgtggaagtcatgcctgcacagtcacctcgagaagatgaagaaagcagcattcaggttttgctgggcctgcgtgatactagcgattccattgtggcaatt

SEQ ID NO: 88408 - DNA, 82 bp, Homo sapiens
actgcatcggaatctggagctggagcacaaggagctcggggagaggaagtgggaaaactcttgcctttgccatcccaatgat

SEQ ID NO: 88409 - DNA, 51 bp, Homo sapiens
tcttcttcgagtatttgtagaagggtgagcgagtgctgtgctttcatgggc

SEQ ID NO: 88410 - DNA, 100 bp, Homo sapiens
aggcccagcaggtcccctagtcccccgcagtcccccgagactcgccgagcgccgttgctgagccctgcaaatagcagagttcagatcattcaggatcaac

SEQ ID NO: 88411 - DNA, 75 bp, Homo sapiens
ctgagcagtatgatcacagcattaatgaaatgctctccacacaagcccactttcatttggacccgtggataccca

SEQ ID NO: 88412 - DNA, 75 bp, Homo sapiens
ccctcagcctccggccttgtgtgtccgactcggcagcagtgggttacacatcattttggaatgactgtatatcat

SEQ ID NO: 88413 - DNA, 90 bp, Homo sapiens
gtttctgcatcaactttccttaccgttcaaggtgctaaagagattgatatcgcagcgaccctggagcacttgagggaccagagacccggc

SEQ ID NO: 88414 - DNA, 100 bp, Homo sapiens
gtggaaccggggtttggagggcagaaattcatggaagatatgatgccaaagggaggagatatcaccaaacatgatggaacaggcggacagtccatttatg

SEQ ID NO: 88415 - DNA, 80 bp, Homo sapiens
agaaggaggttcaggctacggtgagccgaaggactgcaagatggaggaaggcgggaacctaggaggcctgattaagatgg

SEQ ID NO: 88416 - DNA, 82 bp, Homo sapiens
cggccgcgtttcccgggtaaagggtaagactttgaccccgacgcaggcttcagtgattgccgcggatcagaagcctgagcac

SEQ ID NO: 88417 - DNA, 100 bp, Homo sapiens
ctccactgccactacagggaagtgcatcacatgtcagcgtttgctgccaattgatggggcaaatgatctcttttttcagccacctccactgactcctacc

SEQ ID NO: 88418 - DNA, 101 bp, Homo sapiens
aaagcagtgccattccagaatgccatcttgaatgtaaaagaacttggagactatctgttatagtccctgggtcaagacaacaatttttataccttcgtcgt

SEQ ID NO: 88419 - DNA, 100 bp, Homo sapiens
cagaatttcctgtgttccctttgccgctcctggagttcactgggcaagtgtccagagaatggctgggatgaaagtacacttgaactctttttacatgaac

SEQ ID NO: 88420 - DNA, 82 bp, Homo sapiens
ctgattagcaatttaaagatcctctccaagatgctctacccatggtaccccaggaccagaaggcaaccatatttcagattta

SEQ ID NO: 88421 - DNA, 100 bp, Homo sapiens
tgttgttctttgccatttggccaatcatgtgcgacctcgatctgtcccaagcattcatgttccctcaccagctgtacctgattacatcaaccccagagcc

SEQ ID NO: 88422 - DNA, 100 bp, Homo sapiens
gaagaaatgtcaccccccttaatgaactcagtgtcccccccgcaagcattgttgcaagaaagaggatgtggagaactttgacgtgaccaacttgtctcaa

SEQ ID NO: 88423 - DNA, 100 bp, Homo sapiens
gcaccaacgtgaaacactggaatgtccagatgaaccggctgatgcatccaattgagcctggaggcggagacagcagccaatcgcatctgcaaggtgttgg

SEQ ID NO: 88424 - DNA, 82 bp, Homo sapiens
gaggggctccgggtcttccagagcgtgaagatcaagatcggtgcgcgcggagccatggttatcatgtcggagttcagcgcgg

SEQ ID NO: 88425 - DNA, 100 bp, Homo sapiens
gctttttctggtgtcctgaacctggaagttgtgctttttaaggtcacatgcatcggacgttacggattactcttacccggctactcccaaccattctctg

SEQ ID NO: 88426 - DNA, 100 bp, Homo sapiens
atctcccaaaatattctagaaggggaaaagctacttcaaggctgcctgctgtttcccggggagatcatgaaacgaggtcgccttcccagcagcagtgagg

SEQ ID NO: 88427 - DNA, 75 bp, Homo sapiens
ggcacttggagtccggacatctgaaacttgatgaagattatggaagagattcgggccctcccactaagaaaattc

SEQ ID NO: 88428 - DNA, 90 bp, Homo sapiens
cacttgccctgacatggtgtgcctaaaccacgggaccctgcaggaagctgagccattgccgaaatctaaaaaaacttgtagcaaaggcag

SEQ ID NO: 88429 - DNA, 100 bp, Homo sapiens
ggaatatgccaaggaaaaactggagagcttcatcaaaaatagtgatagctttgataaatcctgataacttaagtgactctctcttttccggtgatgaaga

SEQ ID NO: 88430 - DNA, 101 bp, Homo sapiens
gtccagcccagcgattctcagtcagctaaaccatttacttctaaagtgaaacaaatgcgattacatagagaagactttgaaatattaaaggtgattggtcg

SEQ ID NO: 88431 - DNA, 82 bp, Homo sapiens
gagatcaaaggtcacctggaaattgccttattggaaaaacatttcttacgtgacagagctgaatgaacctctctccaatgaa

SEQ ID NO: 88432 - DNA, 74 bp, Homo sapiens
tcctgaggagctgggattacagactcacaaggcaatgtcaattggaagacaaggtcgagtacaagttgaagata

SEQ ID NO: 88433 - DNA, 96 bp, Homo sapiens
aaccttttgaccagaccacaattagtctgcagatgggcactaataaaggagccagccagggaggagtgagatgtggatgttgcttttgcacctacg

SEQ ID NO: 88434 - DNA, 75 bp, Homo sapiens
gaacaggaactggatgccaactctgcccttatggaattggacaaaggtgaaaggtgtagcagtcactcggcctac

SEQ ID NO: 88435 - DNA, 98 bp, Homo sapiens
tgacagatgccagcgtagctgaatccagtaccaaaaacgtcaacaacagttttacggactctgtgtgggggatgaaccacagtacactccattcagta

SEQ ID NO: 88436 - DNA, 100 bp, Homo sapiens
agaggttgggattcgtgtctggctctggaattgctactgctgcctctgtcactcctggtgaccagcattcaaggtcctaggcctacttacaagcctccag

SEQ ID NO: 88437 - DNA, 101 bp, Homo sapiens
gttggcctttctcgtatgttcacagtgatgggtcagttgctagtgaagccaacagtcgagtctatgctgtcttgtcaaagagagaaggtcgggtacttcaa

SEQ ID NO: 88438 - DNA, 85 bp, Homo sapiens
cccgtgggcaacccagccaggccctgcctccagctgggctgagccctctgtttacagggtctcctatggacagaagtgcgggcaa

SEQ ID NO: 88439 - DNA, 90 bp, Homo sapiens
ctggcccttctgtgcatacctgtttcctaggttctgttgaagataccactggctctcagtctctggctgccttgctgaataagtgtaaaa

SEQ ID NO: 88440 - DNA, 98 bp, Homo sapiens
tgcaggtcaccctgaagaccctccagcagcagaccttcaagatagacattgaccccgaggagacggctgcaaagttggctttcacagtgcaagccttt

SEQ ID NO: 88441 - DNA, 83 bp, Homo sapiens
cggcgagcgcgagcggcgcgagaaagtcctgaacgaggctgtgggggccctgatgtaccacaccatcactctcaccagggagg

SEQ ID NO: 88442 - DNA, 100 bp, Homo sapiens
aacatggggaggaatgaagatggtgaaagaagagctatgataactcctgctctccgagaagcccttactaaacaagggaccattgacatttatggatgtg

SEQ ID NO: 88443 - DNA, 106 bp, Homo sapiens
gatgatgcacagtttgatgcttcccattgtgacagtgacaagggtggagacgcaggtcagaatggaaatgggctgcagaccgggcagctattgtcagccgctggaa

SEQ ID NO: 88444 - DNA, 74 bp, Homo sapiens
ctgaggctgttgggccaggccagtcatgctagaacggggcctctgggcctggaaagcggggacaggagcccaga

SEQ ID NO: 88445 - DNA, 127 bp, Homo sapiens
ctctgccgagtctcaatatctgtcttcggtggactccttcggcagtccacccaccgccgccgcctcccagatcagtcgcatcgaatacattcattcaaagaacttcatccaccgggatgtgaagcca

SEQ ID NO: 88446 - DNA, 100 bp, Homo sapiens
ttcgtctttgcagcgtagcccgagtcggtcagcgccggaggtgataagaagtacatcatggggcccaagctttccactcttgacgccactgtctttggac

SEQ ID NO: 88447 - DNA, 82 bp, Homo sapiens
gcgtgctttccacgacggtgacacgcttccctggattggtttccctgaaacctgggctcttgaagacgcatcactggagcag

SEQ ID NO: 88448 - DNA, 90 bp, Homo sapiens
tggacagtgaagagaggcctctcccaaagcacctgcgcagactattgcccagaagaaaagatgtttggttttcacaagccaaagatgtac

SEQ ID NO: 88449 - DNA, 82 bp, Homo sapiens
tgggcacccacggagcctccggggctgacctgacccgcatgatccacatcctggacacggagcacccctgggacctgcactc

SEQ ID NO: 88450 - DNA, 88 bp, Homo sapiens
ggagctgcccgcgccatgtccgcgcacaatcggggcaccgagctcggcatcatgaccggaagatgtgtataataggactgagtatcct

SEQ ID NO: 88451 - DNA, 75 bp, Homo sapiens
gaagttcaggatgaccacataaagggcccactaaaggcaaccaagttgttaaaagccttgaaaggctacattaaa

SEQ ID NO: 88452 - DNA, 100 bp, Homo sapiens
ggctcattatagcctcaaactcccaggctcaagcaatcctaccatgtcagccttcccagtagctggaactacagaacaatgtctcccttttgcagagctg

SEQ ID NO: 88453 - DNA, 83 bp, Homo sapiens
gcttctcagaagacagagggttttcttttgaggctgtgtggttccggtgctggtgccgtggaagtggcaatggcagaagccct

SEQ ID NO: 88454 - DNA, 100 bp, Homo sapiens
caggaacgggcactgctgccaccgggccgacggaatgattacggacctgaagccaaagaacaagatgcgctagtggacagattgctgaccaggggcttga

SEQ ID NO: 88455 - DNA, 100 bp, Homo sapiens
ggcttccggctccccccatctggctggaacacacatcagtcacgagaaggatatcacgcccgacccaaagctgctggagaaggtgagtgagtgtgacaag

SEQ ID NO: 88456 - DNA, 75 bp, Homo sapiens
tacaatagatcgagcctgcagacaagaaacattcgtttatgagatggtcatgatgatgggcagcgcccgagtggc

SEQ ID NO: 88457 - DNA, 75 bp, Homo sapiens
ccgcctgctccaaactccaccagccccgtgtccttcattgccacgtacagctttccgggccctcctgcagatccg

SEQ ID NO: 88458 - DNA, 100 bp, Homo sapiens
caatgcagaagtggtattacaaagatcctcagggagaaattcaagggctcctgtatcaggaataccgagataaatcgactctccaagaaatcgaaaccag

SEQ ID NO: 88459 - DNA, 75 bp, Homo sapiens
ctgaaaaccaagccgaggactgcggggtccggtgtccacgcagactggcctgctgctgtgggtctgcaggctgct

SEQ ID NO: 88460 - DNA, 75 bp, Homo sapiens
ataagttttgtaacacagaagatgaggagactatgtatctgcggagtgtcactactccatccagaagggagctgc

SEQ ID NO: 88461 - DNA, 100 bp, Homo sapiens
ttctactggaccctcaccaacaatgacacccacacgcaggagccctctgcccagcagacaggagcccagcacccatgagttgtgacaaatcaacacaaac

SEQ ID NO: 88462 - DNA, 87 bp, Homo sapiens
aaaagattttgctgtcaaagttgtgtcagtgaatacaaacaggtgcacttacagagtgctacgatgaactggggaacagatatcagc

SEQ ID NO: 88463 - DNA, 74 bp, Homo sapiens
ggagattatagctctgtatgagaaggacaacacctacttagaggtggtttgtgctccccctactgcctatatcg

SEQ ID NO: 88464 - DNA, 75 bp, Homo sapiens
gttagatgccgattacccacttcgagtcctttattgtggagttctgcttgagatttcaagaattttgaatactgg

SEQ ID NO: 88465 - DNA, 80 bp, Homo sapiens
cctgtacagcctgcagaactaccatcccaatctggcaaaacaagccacatggggctgctcgaagtgtagtaagaagaatt

SEQ ID NO: 88466 - DNA, 100 bp, Homo sapiens
tcttcgtgaggctgctcttcgagcgaattggcagagggggtcgatttgggaggaaaggtgtggctataaactttgttactgaagaagacaagaggattct

SEQ ID NO: 88467 - DNA, 92 bp, Homo sapiens
cttgggacccaccgctgccctcagctccgagtccagggcgagcttccccgggcgctgcctggacaggcctgcctgcgtgctgggacatgtct

SEQ ID NO: 88468 - DNA, 90 bp, Homo sapiens
tgcttttgccaaagggaacctgactttcacagctcagtacctaagaccctctttcccagctgcccgctcctcagcacccgaagattcgcc

SEQ ID NO: 88469 - DNA, 90 bp, Homo sapiens
cacaagttcacgaaagcctacaaaagtgtggagaggttccttcaggaggatcaggtccagacatcatctggtctccctgaacctgaaatc

SEQ ID NO: 88470 - DNA, 75 bp, Homo sapiens
aagccattgacgtgtaccaggcgtctgtgggctgcttaccgcaatctcggtcagaatttgtgggggccccacaga

SEQ ID NO: 88471 - DNA, 83 bp, Homo sapiens
ttggtgcagaagctggagctggacgtgaggagtgtcacttccgtcaggagaggcctgtttaaagaagaaaacccgtatgctag

SEQ ID NO: 88472 - DNA, 76 bp, Homo sapiens
ctcccggggcccttcccgggcaagagcaaatcatggaggaagataaaaaacatggtgcactggtctcccttcgtca

SEQ ID NO: 88473 - DNA, 75 bp, Homo sapiens
attttctgtacaccaatggaaagtgcgtcatcctaaggaacatcgacgaacaagatcactcaaggtgaaggataa

SEQ ID NO: 88474 - DNA, 130 bp, Homo sapiens
cacagttacatgtatggagaatggctggtctcctactcccagatgcatccgtgtcaacttaattcagtgcacaaatgagatgaatgtgaacatcccacagttggcagacagtttatttgaaagaactact

SEQ ID NO: 88475 - DNA, 100 bp, Homo sapiens
gcactcttgtccagtggcttaatttatcttggactggcaatagaggcttcatctctgttgcaggatttagcagcataagctgtggccatgactactgaag

SEQ ID NO: 88476 - DNA, 100 bp, Homo sapiens
gcgacgccaaatacgtctgggcagccacggccgggggcgtctttcagagcattacgggcaagctgcctgtcctgctgcttggccgctcctcagagctgcg

SEQ ID NO: 88477 - DNA, 83 bp, Homo sapiens
cccgccgaaggccctgctgtaaaagttacagaatgtctgaaggggacagtgtgggagaatccgtccatgggaaaccttcggtg

SEQ ID NO: 88478 - DNA, 100 bp, Homo sapiens
ccacgcagctggcccggagtcttggatacactgggtgagcccattggcaggggtaccaaagtgatcctccatcttaaagaagatcagacagagtacctag

SEQ ID NO: 88479 - DNA, 80 bp, Homo sapiens
atatcttcctgtcatggttccccttctactacatgctgaaggttgaactcccaccacctgatcttggaccaagttctgca

SEQ ID NO: 88480 - DNA, 95 bp, Homo sapiens
gctgcgccgcccgccgctgagggaccgcggggttagccactgctggctgcttccagtgttcgccgagagcgtttgcctcagcatggagggcgggg

SEQ ID NO: 88481 - DNA, 76 bp, Homo sapiens
aaagccttatatgatttccgaggggagaatgaagatgaactttccttcaagggttgatccattttctaagaaagat

SEQ ID NO: 88482 - DNA, 98 bp, Homo sapiens
tcgagaggaccttccacgtggattctccagacgagagattggccatctgcaagcttcccttctccgtggagagcaggaagacagtcatgggacctcag

SEQ ID NO: 88483 - DNA, 75 bp, Homo sapiens
cgacacccccgggatcctgtctggagagaagcagcggatcagcagagtcctcctgcaaggagaatccttttaacc

SEQ ID NO: 88484 - DNA, 100 bp, Homo sapiens
ggataaccttttgctaacaaaaacaggttctaagaattttagatccagttacctgcaaagagagttcacctgataatccattttttgagtcttcaccaac

SEQ ID NO: 88485 - DNA, 96 bp, Homo sapiens
agatgatgagaaataaggacaaaagccaagaggaggacagttcgctacacagcaatgcatcgaggccatggatcatctgcagtcattcattgcaga

SEQ ID NO: 88486 - DNA, 82 bp, Homo sapiens
aggacggagataacaccatcttcaagggccacgactgcttcccggtgctgttcacctatgacgccgccgcggggatgctgag

SEQ ID NO: 88487 - DNA, 127 bp, Homo sapiens
cgcatctcggcctcctctgccaccagggagctggacgagctgatggcttcgctgtcggatttcaagcttgagcaggaggtggagcggcggcagcggctggggcaggagtcagcagctaggaaagccc

SEQ ID NO: 88488 - DNA, 82 bp, Homo sapiens
tatatcttcacagaaatggcctcggtcgcaatggaagaagagatcgccgcgctggtcattgacaatggctccggcatgtgca

SEQ ID NO: 88489 - DNA, 75 bp, Homo sapiens
cacagaatcaggggaggcatgcttcaggttgtttacattcagagctctatcaataagaggaatacatattacagt

SEQ ID NO: 88490 - DNA, 75 bp, Homo sapiens
tatctatggagaaaatcattcaagtggccaagacctctgctgcacaggtgtgagcggggcctggaccacgccatc

SEQ ID NO: 88491 - DNA, 50 bp, Homo sapiens
tgaaatgggggcgaccattcttaggaaaatcctgccttgcttcgttgggc

SEQ ID NO: 88492 - DNA, 100 bp, Homo sapiens
ggcagtgagctcggccggcaaccgagggacccgcgtccaggaacccaagacagaccaggatgaggagcattgccggaaagtcaacgagtatctgaacaac

SEQ ID NO: 88493 - DNA, 82 bp, Homo sapiens
ccaatggaaagtgcgtcatcctaaggaacatcgacaggccacaagaggaagctgaatgaagaggacgccgccagcgagtcca

SEQ ID NO: 88494 - DNA, 82 bp, Homo sapiens
gcggccgaacgatgtgcgagaactgcgcagacctggtggaggtgttaaatgaaacatttgacattgtgcagcaaagaaatgg

SEQ ID NO: 88495 - DNA, 75 bp, Homo sapiens
cgatcctcagcttcttcagcagccagtggccagtgaggaggcagcctggaaggtgacagatgaatgcatccaaat

SEQ ID NO: 88496 - DNA, 111 bp, Homo sapiens
atcggatcctcaatttaggtcatttctacttcatatgatcattttaattgtatttacctcatcttaccaaaaagatcatgcagtagacattgaaaccagagattgtcttca

SEQ ID NO: 88497 - DNA, 100 bp, Homo sapiens
ccgcgttcacagccccagcgcaggcaaaaatagacatcttattagttggagatgtcactgtgggctacctggctgatactgtacagaaactatttgcaaa

SEQ ID NO: 88498 - DNA, 87 bp, Homo sapiens
atcatgtgggccctgcacgagctcaaaggacactatgcaatcacccgaaagtgtaaacaggaacatcgataagtagtgtaaaaactt

SEQ ID NO: 88499 - DNA, 100 bp, Homo sapiens
ttgtgctgccttggccaaaagaggagctgccgttatactgttctggggggttgcggtttttctgggacaacaagtttgaccatgcaatggtggctttcct

SEQ ID NO: 88500 - DNA, 80 bp, Homo sapiens
cccgcgggctcgccgtccggcgcagggcagagatccagagcttcgcgggcgccgagaaggacgcgcgcgtggtgggcgag

SEQ ID NO: 88501 - DNA, 90 bp, Homo sapiens
gaaggcactggaagagcttgtcagccggattgatggtgactgtaggacgaggatttggtgtcacataccaactggtatcaaaaatctgcc

SEQ ID NO: 88502 - DNA, 100 bp, Homo sapiens
gtttgagaggcagcactactcagacatcttcaccaccacagagcccatcaagcccgagcaggtcaaaatgcagatcttcgtgaaaacccttaccggcaag

SEQ ID NO: 88503 - DNA, 100 bp, Homo sapiens
cgtgcactccgcacctcggggacattattgcgcgtggaacggctgcttttggaaggtctgccatcatggatgttctcgcagaagcaaatggcacctttgc

SEQ ID NO: 88504 - DNA, 75 bp, Homo sapiens
aaagttggaacacagcagagggtgtgtaataaaatacagggaggagtctgctactagtcttatcagctcttaaaa

SEQ ID NO: 88505 - DNA, 49 bp, Homo sapiens
cgcgaatatcgtcatcgttagaagtgtgttttagaaccctgtgaaatgc

SEQ ID NO: 88506 - DNA, 75 bp, Homo sapiens
agaaccagcggagaaaagaaaaagcaacgtttaattctagaagtcaaatctacctgatgacatctttgaaaatgg

SEQ ID NO: 88507 - DNA, 99 bp, Homo sapiens
acatccccaccccacaggatctgccccagagaaagtcctcgctcgtcaccagcaagcttgcggggatttttttcccaggaagccatcccgtcagagggg

SEQ ID NO: 88508 - DNA, 98 bp, Homo sapiens
ttgagtccaaagtaccctccttctactaccggcccacgccctccgactgccagtgtcgtgaaaactacccctaaaagccaaaatgggaaaggaaaaga

SEQ ID NO: 88509 - DNA, 93 bp, Homo sapiens
cttcgagtgacccgggtgccgaggagcgggaagagttgctgggcaaccatgtccaagggacctgcagttggtattgatcttggcaccacctac

SEQ ID NO: 88510 - DNA, 71 bp, Homo sapiens
cgcttgatgagaaggacccacggcgtctgttcgaagctatcagttgagggatttgcagttgataaaatggc

SEQ ID NO: 88511 - DNA, 75 bp, Homo sapiens
gcaacgatcggaactcggacacggaatcaacagtgagacaattatgaaaccagcttcaatttcagaggaagaatt

SEQ ID NO: 88512 - DNA, 100 bp, Homo sapiens
aagccatcggatgaggagatgctgttcatctatggccactacaaacaagcaactgtgggcgacataaatacaggacatgacctttggctctaaaaagaag

SEQ ID NO: 88513 - DNA, 75 bp, Homo sapiens
aaaagggacgtaggaagaagggcaggacctgggcggaggccgccaagacggtcaatgagtggtcattgaagataa

SEQ ID NO: 88514 - DNA, 75 bp, Homo sapiens
gtgacagagctccacagaaaagagtccgatcaagaggtgccgtgagcgatgtggagatgcaggaacactatgatg

SEQ ID NO: 88515 - DNA, 100 bp, Homo sapiens
gcggaccggccgccatgtccacgttcaggcaggaggacgtggaggaccattatgagatgggggaggagctgggcaggccatcatctgtgcgatctctgcg

SEQ ID NO: 88516 - DNA, 75 bp, Homo sapiens
gtttgacgggggcgttgtgatgggttctgattcccgagtgtctgcaggatgtccagaccaagatagaacctgtct

SEQ ID NO: 88517 - DNA, 100 bp, Homo sapiens
cacctcccagggtgactcaactccaggtttacccaaggtccagcctagcccctaggcaccatgtcggacagtgatctaggtgaggacgaaggcctcctct

SEQ ID NO: 88518 - DNA, 100 bp, Homo sapiens
gctagacaggcgcgtggttaagggacaagtggaatatctactgaagtggaaaggcttttctgaatgttcaggcggttgcttatgaggaaccaaaacactg

SEQ ID NO: 88519 - DNA, 100 bp, Homo sapiens
aggtcttcaccaccatggcctccgtctgccacacgctgatggtgcagcaccgcatgatggtacccaaagtcagttttagaaagagcgttttcgctacgta

SEQ ID NO: 88520 - DNA, 50 bp, Homo sapiens
gcaatgcttgaggctccttacaagaagggggccgaaggccagagaccagg

SEQ ID NO: 88521 - DNA, 80 bp, Homo sapiens
ctgcttaactctcccgaaactaaacttgcggagcgtgctttggacaccatgaattttgatgttataaagggcaagccagt

SEQ ID NO: 88522 - DNA, 77 bp, Homo sapiens
ataaaggagctcttcacagcacctgctatgaactctccaaagtggaagggaaaacagggacccctgagaagcccctc

SEQ ID NO: 88523 - DNA, 83 bp, Homo sapiens
gtgcaccggggcggtccgttgccaaagccagtagaccaaattttggtacaattgaatcacactgcagcagaattcaccctgtg

SEQ ID NO: 88524 - DNA, 75 bp, Homo sapiens
aagagtatcaggaatttgaagagatgctggaacatgcagagtctgcacaacaagttaaggtgaactgcacagctg

SEQ ID NO: 88525 - DNA, 82 bp, Homo sapiens
ctgtgcactgcacaagttccagcacctccatggccggccaccccagccctgggatcctgatcatccagcagctcgtcaacgg

SEQ ID NO: 88526 - DNA, 100 bp, Homo sapiens
gccctggatgccttcctgaggaatattccaacccgggaccggctagagggcatggcagccttcagggagaagcggactcccaaatttgttggcaaatgac

SEQ ID NO: 88527 - DNA, 100 bp, Homo sapiens
gctgcgttgaggatctttgctcttccatccgcctttgatcgtcttcctcttcagccatccagagagcctatctctggcagaagtagccaacgagctggac

SEQ ID NO: 88528 - DNA, 78 bp, Homo sapiens
acaatataaaagaacatattacatgacgaagatgggggttgacgtagtatctgacatggaggatgaaaaggaagatag

SEQ ID NO: 88529 - DNA, 90 bp, Homo sapiens
cttctcttcaccagctcttcagatcaatatgcctccacaaatgggaagtgttcctgtaatgacgcaaccaaccttaatatacagccagcc

SEQ ID NO: 88530 - DNA, 100 bp, Homo sapiens
gcgagaacaagtttaacgacaagcacatcaccactctgcaggagatcatgaatcagacagataaaaatcaacaagaaatcccatcataccttaatgatga

SEQ ID NO: 88531 - DNA, 76 bp, Homo sapiens
gcaaggagctaaagcagcgtgcgttcagccctgggatgtcatccgtgggtctttaagcctcaccaacctttcgtct

SEQ ID NO: 88532 - DNA, 98 bp, Homo sapiens
aggaaagttttaaaagccatctccagtatccattctttatggcagggctacaccaagtccattgatatttggtctgtaggctgcattctggcagaaat

SEQ ID NO: 88533 - DNA, 100 bp, Homo sapiens
cacagtcaagatgttgccaacattcgtaaggtccattcctgatggctctgaagaagacgtaaagcaggctaccagcaattttgagaacttgcaaaaacag

SEQ ID NO: 88534 - DNA, 83 bp, Homo sapiens
caagcttagagcgtctggccaagaatcagaggaagtggaaggggcaggatggggctgggaagtccaaccccacgcatttgggc

SEQ ID NO: 88535 - DNA, 100 bp, Homo sapiens
gcagcaccatggcgaccaccgtcagcactcagcgcgggccgtttgaacgccatgaccctgtggatgggagaattactgagaggcagtttggtggcatgct

SEQ ID NO: 88536 - DNA, 100 bp, Homo sapiens
cggggcctggccgcgcgctgctgtgttctggaagggctcattgtacagtcaaggcggcagaattataagagaccatggattaatcaaccttagaaagttt

SEQ ID NO: 88537 - DNA, 90 bp, Homo sapiens
cagaggccgccatcaaccgccagatcaacctggagctctacgcctcctacgtttacctgtccatgagtgcgatgacatggatcctgcgga

SEQ ID NO: 88538 - DNA, 80 bp, Homo sapiens
tttggcattgacatttaattttagggtcctttatatagaagggagagtagttcctctgtgacgagggtgcaggtatctct

SEQ ID NO: 88539 - DNA, 100 bp, Homo sapiens
tagaaccaagtgaagccacaaacagatcagtgagaagaagctcattacagatgcccttaataaaaatcagtttctgaaaagactggatcctcagcagatc

SEQ ID NO: 88540 - DNA, 100 bp, Homo sapiens
ctggagatgattaaaacggaatttacactgacagaagcagtggtcgaatccagtagaaaactggtcaaggaagcttggaatgcagtagccctctgggcct

SEQ ID NO: 88541 - DNA, 112 bp, Homo sapiens
cgctgcttcaggaggacctgcaggaggacgcagacggataatgatatggaacctagcaaagctgttccactgaatgcatctaagcaagatggacctatgccaaaaccacaca

SEQ ID NO: 88542 - DNA, 83 bp, Homo sapiens
aggatatcgacgtcgtgatccagaagtccagagctgaggactgcctgtttgcagaactcccccactggaaaggattctgaaag

SEQ ID NO: 88543 - DNA, 89 bp, Homo sapiens
ataagagcctggtgagacggagctatcggcgccgcggcaagagccaggcatctccttggaaacaatgccatctttgaatgtgagagata

SEQ ID NO: 88544 - DNA, 74 bp, Homo sapiens
tcgactgctagagccgagcgaagcgtggaaatgagttctcaacagtttcctcggttaggagccccttctaccgg

SEQ ID NO: 88545 - DNA, 100 bp, Homo sapiens
ctcgatcctccttcaggggagacaccaatttctatggcaaacagtgggatgaagctctcttgactatgagtaaaggagaaaaggctcgactggagattga

SEQ ID NO: 88546 - DNA, 82 bp, Homo sapiens
cttcgatgttcttctaatactcctcctctaacatgtcagcgttattgtaatgcaagtaacttacgacctatttctccgtggc

SEQ ID NO: 88547 - DNA, 100 bp, Homo sapiens
ctccgctaccaccaccacaccagaaactagcaccagccccaaatttcggtgttttgaatgctgtatcaaatgcctggggggcattccctatgcctctctg

SEQ ID NO: 88548 - DNA, 75 bp, Homo sapiens
cagacaagatggacaccgcggaggaagggcatccgcttcgatcctgaaattccgcaaacactacgactagagttt

SEQ ID NO: 88549 - DNA, 90 bp, Homo sapiens
gtgtggattcttcagaaagtgaacttggcattttagatctaattcaagtaaagagaaatgtgtatgaccttacaagtatccccgttcgcc

SEQ ID NO: 88550 - DNA, 90 bp, Homo sapiens
gagacacagtatagcttctgacagtggagacactggcattggaacttcctgttctgatagcgtggaagaggagaggagacgccgtgagcg

SEQ ID NO: 88551 - DNA, 100 bp, Homo sapiens
cagccaggggcggacgaaaccatcggtagactccacaagttacgccccatggtgtccatcctgccagcagactgattcagaatgggaggcttttgcaaag

SEQ ID NO: 88552 - DNA, 90 bp, Homo sapiens
agctgcagagctggtgccaggcagctggcgagggggtcaccctagagtttgctcaggctaaagaattacctccaaagccattgtcaagac

SEQ ID NO: 88553 - DNA, 128 bp, Homo sapiens
cccacgtggagaagccgtatgagtcctacacagggcagaatgtgaagctacgggaactgggaacagccaggtgccccaaagcaaatacgcggagctgctggccatcattgaagagctggggaaggaga

SEQ ID NO: 88554 - DNA, 73 bp, Homo sapiens
tctcaggagagagcagccagagtgactgggcatttagctatggagacattattatcccttacttctaaacgag

SEQ ID NO: 88555 - DNA, 98 bp, Homo sapiens
ttctcctcccagcttctccccacctgcacctacctctgtgttggatgggccccctgcacctgtcctgcctggggggctcaggaggtgaaagagagccc

SEQ ID NO: 88556 - DNA, 95 bp, Homo sapiens
tttggaaagaacttgggaattctccctggggggctcgctgtatttactgggaactagtcttgcaggaagaaattccgggtagatatgcctggctc

SEQ ID NO: 88557 - DNA, 82 bp, Homo sapiens
ccaccatgataatccagtttttgaaatggagtttttgccagctgggaaggcagaatccaaaatcctgtttgaccaaactcag

SEQ ID NO: 88558 - DNA, 75 bp, Homo sapiens
ccgcgctccaaccgcctcctcctcctcagtaacgcgggaactcttggtgtaataacagaagctacaataaaaatc

SEQ ID NO: 88559 - DNA, 89 bp, Homo sapiens
gaaatcctccagccagagttctttgaggctgtaaacgaggccattttgctgttcgccatcggtggtgtgaactcattgttaagcacaag

SEQ ID NO: 88560 - DNA, 87 bp, Homo sapiens
ttgatgattcaggagtgtttgaccagacagcccttgcaattgagcatgtcaggtgacaaaaggtgagacactcacctagaacagtgc

SEQ ID NO: 88561 - DNA, 90 bp, Homo sapiens
ccaatcatagcagtggctgatgaagggtggcacattttacagaataagtcagatgactttctgtttacagcaagctgctgaagtttctca

SEQ ID NO: 88562 - DNA, 50 bp, Homo sapiens
cggacgccagcggacacgcgggcgaggttattcagcttctcaaggctgga

SEQ ID NO: 88563 - DNA, 100 bp, Homo sapiens
aaaatttgtctgcaaacctggagccagaaacattaccgtcatattccacccattactaaggtatctgatgtgtagccatgcagaagacctacgtgcaaaa

SEQ ID NO: 88564 - DNA, 100 bp, Homo sapiens
ggatctgaatcatctcttgaaagatgtgtcttgctgaatcagggctctcttatccctgccatcgacttacagtgggaagaagatcttcacctgcacagac

SEQ ID NO: 88565 - DNA, 100 bp, Homo sapiens
ttttggagcattaaggtctggtcggatggggcaggatggctgcgttgacacgtcttatttaatccacatcataggggaaggaagatctatgaacctccac

SEQ ID NO: 88566 - DNA, 74 bp, Homo sapiens
atctttgctgaagatgactttatgacccaagaaggtaaatatgcagaggacatttttggagagctctttactca

SEQ ID NO: 88567 - DNA, 97 bp, Homo sapiens
acaaatatcatgagagcatggctcttccagcatctcacaagcacagcaatggaggaaacagctatatgggaacaacatacagtgacgcttcacaggg

SEQ ID NO: 88568 - DNA, 83 bp, Homo sapiens
ctcgggtctcgggggccgctctgggatcccggccaccagcaattgtccgattctgccgtttcaccaaggagccctggtttctt

SEQ ID NO: 88569 - DNA, 126 bp, Homo sapiens
gtggccttcgcgtctgcccggccaagaggcaaaggggaggttacgcagcaaaccatccagaaggttatgaagacagtatggagtttccagaccatagtagacatttgctacagtgtctgagcgagc

SEQ ID NO: 88570 - DNA, 75 bp, Homo sapiens
cacaaatggttcccagtttttcatctgcactgccaagactgagtgaaactgttcaggttccattatcaaaacgag

SEQ ID NO: 88571 - DNA, 76 bp, Homo sapiens
ttttcttggttccttcagtggtgttggtagtaaaatggcaggaattgatggcgagaaggagcacgccaatgccaag

SEQ ID NO: 88572 - DNA, 51 bp, Homo sapiens
cggcgtctttctaaagagagatgacagattatcagttaagcaggtacgaaa

SEQ ID NO: 88573 - DNA, 75 bp, Homo sapiens
cgaggatgcaccttcccctgccttggaaaggcactactgcagtcttcagttaagcaacaagtagaagctattgaa

SEQ ID NO: 88574 - DNA, 98 bp, Homo sapiens
ttctgcccaacatccaggctgtactgctccccaagaagactgagagtcaccacaaggccaagggagaggagtcactcacaatttttgtggacaagcgg

SEQ ID NO: 88575 - DNA, 98 bp, Homo sapiens
aggaagaagcaacacattgtcttctccaagttgctccttgagggcaggacagttcttatggctttatccgttgcgtaagcacagagaggtctgcgagg

SEQ ID NO: 88576 - DNA, 97 bp, Homo sapiens
tcggcagctccagagcgacgggaaacgaaagacatccagctctgtcacccaagctgcagtgtggtggcatgattgtagctcactgtaactttgaact

SEQ ID NO: 88577 - DNA, 100 bp, Homo sapiens
gtagaaaatacagcattttcacaggcctgtaggagctgtccaggccatctccaaccatgggagtgaggcacccgccctgctcccaccggctcctggccgt

SEQ ID NO: 88578 - DNA, 100 bp, Homo sapiens
agccttttggatgaaatcgagtgaacgtctgaatttcctgctgctgttcacaaagatgctttttatctttaactttttgttttccccacttccgaccccg

SEQ ID NO: 88579 - DNA, 80 bp, Homo sapiens
gggagaacggaaaactcccaacttcctgagtgatcagcagctggactgtgccttggacctaatgaggcgcctgcctcccc

SEQ ID NO: 88580 - DNA, 82 bp, Homo sapiens
gcttgacggcttggacgaagatggggagaaggaagcgagactcatacgcaacctcaatggagccctctggcacaaatggaag

SEQ ID NO: 88581 - DNA, 147 bp, Homo sapiens
cagccatgtttctgtacaacttaaccttgcagagagccactggcatcagctttgccattcatggaaacttttctggtggcttcccacacttctgactcggacgttccttccggtgtcactgaggtggtcgtgaagctctttgactct

SEQ ID NO: 88582 - DNA, 96 bp, Homo sapiens
agaatatgaattcgaaaagcagttcaacgagaatgaagccatccaatggatgcaggaaaactgtagccggatcgagctgggagatgtgacaccaca

SEQ ID NO: 88583 - DNA, 87 bp, Homo sapiens
ggcgcgcccggcgtgccgagcggcaacggggctccgggccctaagggttccagggtctccctccactgctgtagtaacccgggtccg

SEQ ID NO: 88584 - DNA, 100 bp, Homo sapiens
ccggcgctcggagcccgagtccgcgggaagatggcggcgccgctcatccccctctcccagcagggccaattcctgtccccccagcagcatggcatcgtgt

SEQ ID NO: 88585 - DNA, 75 bp, Homo sapiens
ctggtggctccgcggattataacaggcagctctgtggccatggatatgttccagaaggtagagaagatcggagag

SEQ ID NO: 88586 - DNA, 75 bp, Homo sapiens
tccataagcgtggcaagaaaaatgggaagttctcgatagggatgaggaagaaatgaccaaacgagatgacaaaag

SEQ ID NO: 88587 - DNA, 82 bp, Homo sapiens
tttaaatgatacctatcactcaagagactcttcatttagattggattctgaatatcagggaatgcagtggtgtcttttgaaa

SEQ ID NO: 88588 - DNA, 100 bp, Homo sapiens
cccggaaccgcgattcggcgtgtcaggtgtttgaggaactgtggaagagggaaggcaagactccagggcagattgtttcagaaaagcagcttgaactgat

SEQ ID NO: 88589 - DNA, 90 bp, Homo sapiens
ttgcaggggtgcagtgtgtctggtcttatgagattgatgaactcccagagggcgctgtgaagcctccagcaaacaagtatcctatcttct

SEQ ID NO: 88590 - DNA, 50 bp, Homo sapiens
ctggcacagcgcctcatcatgtcgactcaaccccgagtctcacctcccgc

SEQ ID NO: 88591 - DNA, 100 bp, Homo sapiens
tcccaccttctttcttcagccgaggccgccgccgcctctccttgctgcagccatggagacaatggcgtctcttggccacatcttggttttctgtgtgggt

SEQ ID NO: 88592 - DNA, 83 bp, Homo sapiens
gccctctccttttcgtttccggaaacatggtcatcatcagatttgaaatatttaaagtggatacaaaactatttcagcaatgc

SEQ ID NO: 88593 - DNA, 90 bp, Homo sapiens
atcgaacttgtcaatgaaggaagagttactggaggtgaactgtttgaagacatagtggcaagagaatactacagtgaagctgatgccagg

SEQ ID NO: 88594 - DNA, 90 bp, Homo sapiens
gacccgcaccttcttccccaagggcggcgactggcggcgcgatggacctgaccgggctcctgctggacgaagaaggcaccttctccctcg

SEQ ID NO: 88595 - DNA, 97 bp, Homo sapiens
gatgaactccctgagcttttgtcagagaaagtatcactccttcatttttgtagaccaacttttctggcagcctgagggaactggcatgatagatgaa

SEQ ID NO: 88596 - DNA, 75 bp, Homo sapiens
aagcaacttgcccagctatgagagacagagccaggatttgaaaccaggcctatgaaaggaggttccctacatgtc

SEQ ID NO: 88597 - DNA, 100 bp, Homo sapiens
gctttgaattggtagaacttagtccagaggagttgcctgaggaggatggtcttatcgaatgttacttagcctccaacagtattcgagaagcaatggtaat

SEQ ID NO: 88598 - DNA, 74 bp, Homo sapiens
cagaagaggcagcatgcggaaggcattgctgggagcctgaaaactgtgaatgttggcgagctttagcccctctc

SEQ ID NO: 88599 - DNA, 97 bp, Homo sapiens
gagcattttaagaaaggacagcattcctgtgacctctgcctaccatccataaaatactcattcccctctcagggggaacgtcatccagacagaaagg

SEQ ID NO: 88600 - DNA, 82 bp, Homo sapiens
agagccaccagccaatgatcttttcaatgctgcgaaagctgccaaaagtgacatgcagatttaatccagagactgacttcac

SEQ ID NO: 88601 - DNA, 100 bp, Homo sapiens
ggtacattttattcaactctttatctgccaattaactcacctcttcgagcctccattgttgtctgccacctcttccttccatgcctccccgaaacttacc

SEQ ID NO: 88602 - DNA, 83 bp, Homo sapiens
ggaagagaaagatgacagcccacagacgagccaaactcaggctgtaccttgagcagctcaagcaactggtgcccctgggcccc

SEQ ID NO: 88603 - DNA, 101 bp, Homo sapiens
gggggtggtgctggctcagtacatattcaccttgaagaggaagacggggcggaagaccaagatcatcgagatggcctgctgggaacgggacttctaaaagg

SEQ ID NO: 88604 - DNA, 75 bp, Homo sapiens
catggcaagggcgagtgaagcagtgtcacgcattttagaagaatggggaccttaaaccggaaaacattttgttaa

SEQ ID NO: 88605 - DNA, 100 bp, Homo sapiens
agtgaaccggagaccccgaaaacggaagcgcagggagaaggaagaggtgtttgaaaaggaattgcattttgtgaaaaaagaacaagaattttctgcaagg

SEQ ID NO: 88606 - DNA, 50 bp, Homo sapiens
gctgtccctgcggcttctggggatgggcttaggtcacgagcaaggatttg

SEQ ID NO: 88607 - DNA, 118 bp, Homo sapiens
cgcgagatctctgtctgtggagatgtgtacaccttgcgagaaaccaggtcggcccagcaacgaggaaagctggtcttagtggtgcaatggctagtataagcgtgcgttcgagtacccc

SEQ ID NO: 88608 - DNA, 82 bp, Homo sapiens
agaagtgcttaaggaagagtgatgaagtaccctgatgggaggatgaaaacagcagaaaggagcagcaccagatgatcttttc

SEQ ID NO: 88609 - DNA, 83 bp, Homo sapiens
attaatcagatactgcatttaaggatttttagactctgaggagcagttggagctaatccacattatggaaatggaaaccaccg

SEQ ID NO: 88610 - DNA, 74 bp, Homo sapiens
aggatctcttctaacatccagaagatcacacagtgttgaattgtggtgcttggaataaacagagcttatggcaa

SEQ ID NO: 88611 - DNA, 90 bp, Homo sapiens
ccgcgatggagctgggggagccgggcgggtttccaggcctgaggtgcccgccctggccccaggagaatgaaccagccgcagaggatggcg

SEQ ID NO: 88612 - DNA, 134 bp, Homo sapiens
gagcgacttctaggagcctggggttcggcgctatggaggagctcgatggcgagccaacagtcactgtcttgggcgtctttggtactggcttttttaggggtctgcctggggattacccttgctgtggatagaag

SEQ ID NO: 88613 - DNA, 50 bp, Homo sapiens
gcagatcttcgacaaccccgtcgactggaaggagaagtacatccaccaga

SEQ ID NO: 88614 - DNA, 82 bp, Homo sapiens
gtctcgggggccgctctgggatcccggccaccagcaattgtccgatgatgatgtgcctgcagatatggttgcagaagaatca

SEQ ID NO: 88615 - DNA, 90 bp, Homo sapiens
gacggacttgagaactgtccttacgtgacctaaagctggagtattttgagattggagaattaaggttggtgaaaaccctgtgtccttgga

SEQ ID NO: 88616 - DNA, 51 bp, Homo sapiens
acggatgtggccaagaaaatacaggatcttgctacattgcccaggctggcc

SEQ ID NO: 88617 - DNA, 82 bp, Homo sapiens
caagaacaaggtgacacatattctgtctgtccacgatagtgccaggcctatgttggagagccaacacagatctatagatttc

SEQ ID NO: 88618 - DNA, 100 bp, Homo sapiens
taaaggaacagtttctccaacaaaagagcctggctagccgtctcaaggaaaacatggagaagctgactgaggagcgggatcagcgcattgcagccgagaa

SEQ ID NO: 88619 - DNA, 101 bp, Homo sapiens
cgcgcgaggtcaagctgctgctgctcgattgactttgaagatgtgattgcagaaccagaagggacacacagttttgacggcatttggaaggccagcttcac

SEQ ID NO: 88620 - DNA, 75 bp, Homo sapiens
gcccacggacaccacctcaacgataatcaaatgggctactgatgacatcaaatctcaacttcatttactttggat

SEQ ID NO: 88621 - DNA, 127 bp, Homo sapiens
gaactacaggaacctgctttctctcgatgaggataacatccctccagaagatgaaaactgaatatcctgatgttgcttggccattgagatttcgcatcctgcatgaaattgcccttggtgtaaatta

SEQ ID NO: 88622 - DNA, 73 bp, Homo sapiens
gccgaggggcagtaaaagcatctactgggggacatcctgttgtgaagctctctgatgtaaaggatggagtaaa

SEQ ID NO: 88623 - DNA, 101 bp, Homo sapiens
ccagatcaacgtcctccgggaccggagtcagaaccctccgcagagtaaagctcttttggtacaccagaaggccagaatggaacgacttcaaagagaacttg

SEQ ID NO: 88624 - DNA, 100 bp, Homo sapiens
ttagtttctggaggatctgataatcaagtgattcactgggaaatagaggataatcagccgattccacgactcttctttgcgggagaacatacgatccgta

SEQ ID NO: 88625 - DNA, 100 bp, Homo sapiens
aaatggcaggtgtgagtgcctgtataaaatattctatgtttaccttcaacttcttgttctgggagaatttgcagccttcaagtagccaccatcatggcag

SEQ ID NO: 88626 - DNA, 50 bp, Homo sapiens
gaaacaccactgaagcattgccaagatttggagcaagaggtggtggtggc

SEQ ID NO: 88627 - DNA, 100 bp, Homo sapiens
aatggagttgtggaactgatgtttaaaatcattggaccatttagtaagaagaattccagtcttataaatatccggagtgtgatgcagaagtaccttgcag

SEQ ID NO: 88628 - DNA, 75 bp, Homo sapiens
aggcccagaaggccaagaacccccaggagcagaagtccttcttcgccaaatacagacggggtttcaccatcttgg

SEQ ID NO: 88629 - DNA, 100 bp, Homo sapiens
cccgaaccctcctcctgctgttctcgggagccgtggccctgatccagacctgggcagattgagaaaatcatgagttctattggagaagggattgactttt

SEQ ID NO: 88630 - DNA, 80 bp, Homo sapiens
atccccccgaaaggaccccccagataagatgctcccaagtcccttgcagctctcttcagaagaaaaatcactagtgctct

SEQ ID NO: 88631 - DNA, 112 bp, Homo sapiens
tgcagcattcaattcgtctttctggagtggaagaccacgtgaaaaactttaggatattgctgcatatcgagctaaaggaaagcctgatgcagcaaaaaagggagttgtcaag

SEQ ID NO: 88632 - DNA, 100 bp, Homo sapiens
ctgagggagcagctagaactcttccagaacatcagacctctcttcatcaacaaggcctgggaaagactggaaaaagcggaacacgaaagagaactggctt

SEQ ID NO: 88633 - DNA, 74 bp, Homo sapiens
agcacagaggctcagaagcaagtccagacagtacctgtaatgagaaacagtaaagaaaacagactaagaggaaa

SEQ ID NO: 88634 - DNA, 100 bp, Homo sapiens
gccggacggggatctgagctggcagagggagacgatggactgagctgatccgcaccatggagtctcgggtcttactgagaacattctgtttgatcttcgg

SEQ ID NO: 88635 - DNA, 100 bp, Homo sapiens
catcactaaaaattatccctactacaggactgcggacaagggctggcagacactcttgcactcctgtaatgagcctggcactgtgatgaaacacttttcc

SEQ ID NO: 88636 - DNA, 106 bp, Homo sapiens
ctctgctccgtgctgccctcgcactggcgctgcaacaagacgctgcccgtcgccttcaagacaatgcagatcttcgtgaagactctgactggtaagaccatcaccc

SEQ ID NO: 88637 - DNA, 74 bp, Homo sapiens
agaaagcaagtgaatacgagtcagaagattagtgatgatgaaccaggttatgaccttgatttattttgcatacc

SEQ ID NO: 88638 - DNA, 83 bp, Homo sapiens
ctgcgaggaggaggaggaggaggagggctccttgatcgtctgtgagttcctgctgcaaaacggagcggacgtgaaccaaagag

SEQ ID NO: 88639 - DNA, 83 bp, Homo sapiens
gactgggggcgagctgagcacctgtagtcaatcacacgcagaacatccagtcatggataaaaatgagctggttcagaaggcca

SEQ ID NO: 88640 - DNA, 98 bp, Homo sapiens
aagaagagcagaaaatagcagccaggaaccaagaaaacttggcttttctgatgtggatcacacctatgctcaaagaactcagctctttgacaccttag

SEQ ID NO: 88641 - DNA, 82 bp, Homo sapiens
cctcttcctgctgtctgctgtctacctggttggccagtcagtgctgaaagatgtaagcaaagtgaagaagctgaagcaatct

SEQ ID NO: 88642 - DNA, 73 bp, Homo sapiens
ggctccttttccgtcggactcttcgtcaaccgctttggcaggttcccgtgtggccggtggttagggaagggca

SEQ ID NO: 88643 - DNA, 75 bp, Homo sapiens
tttgtagatcttctgcaaggagaacggcattgttaactacctacaggaagtggctgtacaggaagcatggctggg

SEQ ID NO: 88644 - DNA, 90 bp, Homo sapiens
ggctggcaaacctcacgcaaggcgaagaccagtactatctgcgggtcaccacgataccccagaatcttccatgctccgtcacactgcagc

SEQ ID NO: 88645 - DNA, 98 bp, Homo sapiens
agctcctcggcgcttcctcggtggcttccccgggtcgagcaaacaggctgactgtgctgtcctgattgttgctgctggtgttggtgaatttgaagctg

SEQ ID NO: 88646 - DNA, 75 bp, Homo sapiens
cgcgaaccaacggttagcggtggcaggggctgactgagagcgtctgcttgatctctggaaacaccaagtcatgaa

SEQ ID NO: 88647 - DNA, 75 bp, Homo sapiens
gaaagaaaccctctctgagttcttgggcacgttcatcttgatttgttcaagaaggaagtgtatcttcatacatca

SEQ ID NO: 88648 - DNA, 75 bp, Homo sapiens
cacggatcatggccgcagccgctctggggcagggctagggcgagcaggtgccacggcggccgccagcgagatcaa

SEQ ID NO: 88649 - DNA, 90 bp, Homo sapiens
ctggtctaacctccttaaagggactccgctaacagagaagtgattcagccagacgtgatggaggaaatggtggtatcttgtgttattaag

SEQ ID NO: 88650 - DNA, 90 bp, Homo sapiens
cctttctgaggcagatacccaggaactaacccaggttcttctgaggacaacctgagtttagtatgcctaccacgaagtgaagatgatgac

SEQ ID NO: 88651 - DNA, 90 bp, Homo sapiens
gtgtgtaacgactgtaatcaggttgtcaaaccgcaggcatttcaatcacattatgacttaattcagtgcacaaatgagatgaatgtgaac

SEQ ID NO: 88652 - DNA, 99 bp, Homo sapiens
ttcaaatcctacttataaagaagtctgctcagaacgactagtggtcgtggctgaacattgtgaacgtagtctggaagacttgcttcgagaaaggaaacc

SEQ ID NO: 88653 - DNA, 100 bp, Homo sapiens
tgaagaccatgttgcaggcccacagctgcctacagaaccgtcccaaaatatggcaaagaaacctattctgaggtaatagcctgcagctggtgttttgaga

SEQ ID NO: 88654 - DNA, 100 bp, Homo sapiens
ttcgaagagttggatactcagcgtcgctggcagccgctgtacttgcctggaagctccgaccccaggagccagcccatcaacctgaaccattacgccacca

SEQ ID NO: 88655 - DNA, 78 bp, Homo sapiens
tcatcccctggatgggggaccacaagatcctcatcgacaggttatgaagacagtatggagtttccagaccatagtaga

SEQ ID NO: 88656 - DNA, 75 bp, Homo sapiens
tgtcaccgccggaacctggcgcagtcgtgcattgaggcccatgagaaggacatggagctctcatttgccgtgcag

SEQ ID NO: 88657 - DNA, 51 bp, Homo sapiens
tttggtatagtcagaggcatgtttacggatctgaagacagcatgtacacag

SEQ ID NO: 88658 - DNA, 75 bp, Homo sapiens
cttatggcggcgctggagagggggcgctgagctgttggggattttttatcaagcagaaatgcatcgaacaacgag

SEQ ID NO: 88659 - DNA, 71 bp, Homo sapiens
ttgtttctccaaggtttgaaaagcagctggcctgcaaggaggatggactcagacaagttctggaggagatg

SEQ ID NO: 88660 - DNA, 50 bp, Homo sapiens
gtcgtcggctggcggagcggcttcttaaaggagctgctcctttgaagata

SEQ ID NO: 88661 - DNA, 75 bp, Homo sapiens
taaatggaattcttttaccatcttattaattcactctggtgaccaagaatatggcccaggtgaccaaagccctgg

SEQ ID NO: 88662 - DNA, 98 bp, Homo sapiens
ttaaaggctatgcagctatcgtggacgtcactggccctggtggggattgacagccacgggaagggattcgcagaggcatttttggaacatctttggaa

SEQ ID NO: 88663 - DNA, 101 bp, Homo sapiens
cttgcccttcctggagcagaggagccattatttatgcagaattgtattcccattggagagcagcttcagtcggtgttgggcaattctggatacaagcatat

SEQ ID NO: 88664 - DNA, 89 bp, Homo sapiens
cctggagcttgacgcgctggagcttgagaggaaaaattccggaactgttggcttcgggcatggttgataacatgaccaaacttgtgcta

SEQ ID NO: 88665 - DNA, 101 bp, Homo sapiens
aaatgtcaagaatatgaaatgagtctggaaaactgggccaaagcagtgaaacgctccatgaattggtgtggggatattcagctttgccaggtatggcagtg

SEQ ID NO: 88666 - DNA, 75 bp, Homo sapiens
atcaagaaattatctttcctccaataaagacagtactatactggcaattgctggagaagattttgcaattgttgc

SEQ ID NO: 88667 - DNA, 98 bp, Homo sapiens
cattctctcctgactcttctatgctgtgttcagtcggagccagtaaagcaggccagggtccagagaggctggtgtctggctccgacgacttcacctta

SEQ ID NO: 88668 - DNA, 101 bp, Homo sapiens
cttcttgatcgtccaaaagctagaaatgagaggatgtccggcttccagatcaacctcaacccgctcaaggagccactcggcttcatcaaggtcctcgagtg

SEQ ID NO: 88669 - DNA, 81 bp, Homo sapiens
ggacgtggtcaagtacgagagtggccctgacggaggggaggaagtattgttgcagcatctggcagtgagactgaggatgag

SEQ ID NO: 88670 - DNA, 100 bp, Homo sapiens
agtgaagaaggcgcatcactcccagctgcgcaaagcttgcgaggtggcgttagattgcagagggaatggcatacatcgagcggaagaactacattcaccg

SEQ ID NO: 88671 - DNA, 130 bp, Homo sapiens
gagctgctccacatcaccgacatgaagggaacaggcatcatggactgtgcgcccaaggtactccaaagattcaggtttactcacgtcatccagcagagaatggaaagtcaaatttcctgaattgctatgt

SEQ ID NO: 88672 - DNA, 100 bp, Homo sapiens
gagcagttaccaaggttcgactccagctgcaggagggggtggcaccgagagccgaccagtccttcgctacagcaaggaacagaggccaaccacactgccc

SEQ ID NO: 88673 - DNA, 82 bp, Homo sapiens
gaaactgaccacagtgctcaccacccaccaccactggagcaggccgggctctcgccatgggtcactgtcgcctctgccacgg

SEQ ID NO: 88674 - DNA, 101 bp, Homo sapiens
ctcaaagccaaacagttgcttcaaacttcatctacaaatagagcatctggcgaggccccaatgtgaactgcacagacagttcgggttacactgctttacac

SEQ ID NO: 88675 - DNA, 50 bp, Homo sapiens
caaaaagttaatcactttcccagttcaatcccctgtctcccctttactcc

SEQ ID NO: 88676 - DNA, 74 bp, Homo sapiens
gagaatgagaacatcaccgtggtgaagggcatccgggttgcacagagcattgaggatcaccatcaggaagtgat

SEQ ID NO: 88677 - DNA, 83 bp, Homo sapiens
aagcaagctgaatggaggccagatagtaccatgatagctgtatcagtgcctcgagtctttattggtaaagattgtataggcgg

SEQ ID NO: 88678 - DNA, 100 bp, Homo sapiens
gagcttaggaccgcctgcccggggcaaccccgaaccaagctttagccgccgaggccgcgtgtcccaaaggccagggtgatgtgagcagagcccaggaatg

SEQ ID NO: 88679 - DNA, 82 bp, Homo sapiens
caagattcgcattgaagatgacgggagctacttccaaattaaccaagtagatgatgagctggagatcaaggcctactatgca

SEQ ID NO: 88680 - DNA, 75 bp, Homo sapiens
gaaactcaactggtgtcgagaagtccggaagcttgtggcgctgaaaacgaacgcttgattgcacattgatccaac

SEQ ID NO: 88681 - DNA, 129 bp, Homo sapiens
cgcctgacgtcaagcccgtgcagaatggcagccagctcttcatcaaggagctgcggagccggacctttcccaggcattgatggccttccgggatgtggctgtggccttcacccagaaggagtggaagct

SEQ ID NO: 88682 - DNA, 100 bp, Homo sapiens
gaattgttagtaaacaacggggcagatgttaacattcagatgtgttcagagcaacattgttttgttgacacaagcatttagaagaaagtttgtgattcct

SEQ ID NO: 88683 - DNA, 74 bp, Homo sapiens
ttttttctcatggatgttcttcttcgagtatttgtagaaggggccaattcctgtccccccagcagcatggcatc

SEQ ID NO: 88684 - DNA, 75 bp, Homo sapiens
ctgaagtacaaaatattttccaggtcagggatgttggaagctggagtagacaggattatttctcaggtggtggat

SEQ ID NO: 88685 - DNA, 97 bp, Homo sapiens
agcagctgcgagctctgggtgcctccctggactgggatcgagagtgttttaccatggatgttctcccgattctcctgaaggggacgtccgatgatga

SEQ ID NO: 88686 - DNA, 100 bp, Homo sapiens
tgaaggaaaggctttgaagcaaaagtttgatgagattttttcagcaacaaggtcggagctcttaggcctgctgaaaacctacaactgctaccatgagggc

SEQ ID NO: 88687 - DNA, 100 bp, Homo sapiens
ggagagtgtgcagccgagtcactactgcctgcctgcctgcctgctacggtaccatcacacaatccccgtcatcagcctgtacagcctgagagagagcctg

SEQ ID NO: 88688 - DNA, 101 bp, Homo sapiens
ccatggagaagtccttctccgacctcttcaagcgttttgagaaacagaaagaggtgatcgagggctaccgcaagacaaaaaacttggactttcgccgaaag

SEQ ID NO: 88689 - DNA, 75 bp, Homo sapiens
agcagtgagcaccttttggcccaatgaatatcagctatttgaactgctgggacctgaaggacttgaacttattga

SEQ ID NO: 88690 - DNA, 82 bp, Homo sapiens
ctgtactgctccccaagaagactgagagtcaccacaaggccaagggttaaaaatctgtaagagcctgattttagaattcacc

SEQ ID NO: 88691 - DNA, 100 bp, Homo sapiens
atagaagctccgcggacgggaaggtaaactgaggccacgtgcgagcgagggtttgcagcaatggaagaaacgcaccagaagaagattgaagatctccaga

SEQ ID NO: 88692 - DNA, 83 bp, Homo sapiens
gtgagaaaggcccacctgtgtcctggttgagggtctccagggttctttggggcccgaggacgtgatgcctgggccacggcagg

SEQ ID NO: 88693 - DNA, 100 bp, Homo sapiens
cctgaaccccttacttcgaaggatcataagattcacagcggacaaggcaaaatctcagcaagttcggacctctagtacaataaggcgaacctcctctttg

SEQ ID NO: 88694 - DNA, 50 bp, Homo sapiens
tcaaaacaagccctccaggaactcacgatcaaaatacttgctggatggtg

SEQ ID NO: 88695 - DNA, 83 bp, Homo sapiens
cattttttcagcagatgccattcaatgttgtttatgccgtatccaactgatgctgagccccaagacctcgagagtacgaacct

SEQ ID NO: 88696 - DNA, 82 bp, Homo sapiens
gccccctacccgcttctcgtagtcctgggagcacagcagaagtaactgaaggcagaagctagtctaatggaccagatgagta

SEQ ID NO: 88697 - DNA, 83 bp, Homo sapiens
ctcgcgcagccatgtccgaggagaagcccaagatgcctgaggaaacccagacccaagaccaaccgatggaggaggaggaggtt

SEQ ID NO: 88698 - DNA, 100 bp, Homo sapiens
gaatctatgggattttcagctcgatacaatttcacacctgagtgtgaacatggctacgcctcttcattcccgtccatgccgagcccccgactgcagcatt

SEQ ID NO: 88699 - DNA, 51 bp, Homo sapiens
ctcctacacctacctctctctgaatcctcactatggatgggctcattgagg

SEQ ID NO: 88700 - DNA, 98 bp, Homo sapiens
gaagatctaaagagaacgtctctgaaatcaagtccggatgaaggagaacgaaggacttatcctgaggagcgaatgcctctgccagctccttcactgag

SEQ ID NO: 88701 - DNA, 100 bp, Homo sapiens
gtgtatcaagtaatggtgcaaagcctgaatattcacaggcctccactgggctctcagtaggtgggatttgtcagcagttctcattgcctgagaacatcca

SEQ ID NO: 88702 - DNA, 75 bp, Homo sapiens
aatgctcctaaatgatcgcaaagtgctgacaacaagaatgatatccagatctttgcactggcactcttactgagc

SEQ ID NO: 88703 - DNA, 98 bp, Homo sapiens
cttgtcgctgcagtggaactattggaaaggccttcactgcacagggaattacttttaaacgtgtaggtgttccttctacaatggatttagttaaatct

SEQ ID NO: 88704 - DNA, 75 bp, Homo sapiens
ttgctcctccttctgcccttccttctgtatatggctgcgccccaaatcaggatgaaaactttcggaagagaaagt

SEQ ID NO: 88705 - DNA, 50 bp, Homo sapiens
cacagttgtggagaagcctcagtgaaagattgttaaaggaaatgggctgg

SEQ ID NO: 88706 - DNA, 76 bp, Homo sapiens
attttggctgctgcaggagccattttaggttatttggaaatagcggtgcttgcagcgcttgcggacagtcgattcc

SEQ ID NO: 88707 - DNA, 80 bp, Homo sapiens
tggactgttcatcattctgttgaagaaacgcttaacccaagaatgtgatcaatgggcaggactacgaagtgatgatgcag

SEQ ID NO: 88708 - DNA, 83 bp, Homo sapiens
ctggcatcagggaggctttcagccggagaagcgagtttcagctggccaccagcccctcgggttccaagatgcagctactggag

SEQ ID NO: 88709 - DNA, 74 bp, Homo sapiens
atcttgtacttcaagaggaggaatcacgctcggaaacaatgggtgcccgtggttgacacgagctgtgtccccag

SEQ ID NO: 88710 - DNA, 74 bp, Homo sapiens
cgcgatgagtggtctcggcaggctcttcgggaaggatgatgaggagtctgatgaggaagctgtgaagaaaacca

SEQ ID NO: 88711 - DNA, 51 bp, Homo sapiens
ggccctcgggggatattcactaaagaatatgcagcagccacgcacatgctg

SEQ ID NO: 88712 - DNA, 100 bp, Homo sapiens
ggctcccggagtgtatgtctttggagaacttctggagctggccaacgtgcaggaggtactccaaagattcaggtttactcacgtcatccagcagagaatg

SEQ ID NO: 88713 - DNA, 83 bp, Homo sapiens
gtgcttggaggagcgcgccctgcctgagaaggagcccctcgtcagacaatgcagatcttcgtgaagactctgactggtaagac

SEQ ID NO: 88714 - DNA, 90 bp, Homo sapiens
tgcgctgctcaaggacacggtctacaccgacttcgacgcaattctgtggtgttcttggtcacacatttatggagtttctgaagggcagtg

SEQ ID NO: 88715 - DNA, 100 bp, Homo sapiens
gctgtgggattaatttcaacgagaaggcgatccataaggagagcttcatctttatgacggttgtgtattttggtcccctgacctgctccatcatcactac

SEQ ID NO: 88716 - DNA, 100 bp, Homo sapiens
tagaactggcgattggacgatttgaaagtgaagatttgacctccatagttgccccctcttctctcctggaggtcagccggccccttgtggctctcaggcc

SEQ ID NO: 88717 - DNA, 98 bp, Homo sapiens
gacagcagactattgaactgggacatcacatcctcaaagcacacatttttaaggatcaagcagtgcaccaccgtgaacttggaggacctggtggtggc

SEQ ID NO: 88718 - DNA, 75 bp, Homo sapiens
ctgagggcacgtgtttgcggttcagccctttgatgaccgcagcaggcaccatgagccaggacaccgaggtggata

SEQ ID NO: 88719 - DNA, 75 bp, Homo sapiens
gttgttttttcctgtatgaagcggttggcaccactgaagtgaccgaatgagggtctcttgcaacgtgtgagctgc

SEQ ID NO: 88720 - DNA, 101 bp, Homo sapiens
ggccatcttgagtctactctgtcgctcttgtgccctagcaccccgagaaccgtcagtttgagccagatggaagtgtttggattgtgagctatttcagaact

SEQ ID NO: 88721 - DNA, 98 bp, Homo sapiens
atctacgtcagtgataaaatctccttgaatcgctctctcccagatatccggcacccaaagttggtcaaagaaaaagtgatgtatgaaaaagaggcaaa

SEQ ID NO: 88722 - DNA, 100 bp, Homo sapiens
aggagagatgaagaaaatctgcttctcttgcaaagtaattccttcatgagacttcattaaaagggtcttcagcacttctctatgccaccatcttcgggaa

SEQ ID NO: 88723 - DNA, 75 bp, Homo sapiens
caggcggtgacagagtggagccatggctagagccgaggcctgcctggagccccagatcaccccttcctactacac

SEQ ID NO: 88724 - DNA, 90 bp, Homo sapiens
cagattcgcagtggtcgcttcttctccttgagtccagtgtcgtgctgctgcaggagcacccctgcctggtggagctgctgtcccatgtgc

SEQ ID NO: 88725 - DNA, 50 bp, Homo sapiens
aaaatgagtcgcatcttcaacccccatctaaatgagccgtcagactgcta

SEQ ID NO: 88726 - DNA, 85 bp, Homo sapiens
ctgtgccggcagggtccctgcgctgctgctctgcctgggagtaccagtaagtagccgggtgtcagcaaaaatccagcagcttgtc

SEQ ID NO: 88727 - DNA, 100 bp, Homo sapiens
agaatgaaggagaatgcaaagcatcggaaccagtacactgtgctcaagtacatgggcgactacccgtccaagaggacacgctccgtcaacgagctcaccg

SEQ ID NO: 88728 - DNA, 100 bp, Homo sapiens
atgggacaaggaacctctctctagcctcaggggcttctttcctgccaccgtgcagccccacaaggaagttaaatgaagttcgaaagagattgaatgagct

SEQ ID NO: 88729 - DNA, 90 bp, Homo sapiens
gttagccccgcgcagccgccggcgtcgccgccatggacctaggatcataaaaggattcctctgtactagcacactcccctaaaaaaaaaa

SEQ ID NO: 88730 - DNA, 75 bp, Homo sapiens
ccgcgccgagggctggaggatgcgttccctggggtccggggttacacatcattttggaatgactgtatatcatct

SEQ ID NO: 88731 - DNA, 100 bp, Homo sapiens
attttggaagagggagtcaccactggacctccaaggaagccacgtgcagacatctacaaccttcgatctcctgacgagtggccaccgagtactaaattca

SEQ ID NO: 88732 - DNA, 82 bp, Homo sapiens
aaacagcagatgtaccctcagtacgccacctactattacccccagtatctgcaagccaagtttggtgccctggttgtcagat

SEQ ID NO: 88733 - DNA, 138 bp, Homo sapiens
cacggccgagcagattctacaacacatggtggaatgtatccgggaggtcaacgaggtcatccagacaacagtgattgactacgtgaagccctcggatctcaagaaggacatgaacgagaccttcaaggagaagtttcc

SEQ ID NO: 88734 - DNA, 100 bp, Homo sapiens
ctcttgacaaccaagggcctccgtctggatttccaaggaagaatttcctctgaagcaccggtctccacctctgggcaggagagttgccgaccacctcggg

SEQ ID NO: 88735 - DNA, 100 bp, Homo sapiens
ccacaattccactctctgccttctctgaccccaagaagaccaaaccatcccacggctccaagaaccacaccttcatcaagcggtccgaggtggaagaagt

SEQ ID NO: 88736 - DNA, 82 bp, Homo sapiens
gacctgtcacgagtgaacttagttccctcctatactccttcactctaccctaaggtctcctctgagcctccggcctccataa

SEQ ID NO: 88737 - DNA, 100 bp, Homo sapiens
gcacggacctgggacgcggagtcctgaagccggcggacggttttcgtacgggcggccgtgcgcgaggcgagggaaacagtgcttcttagtcctacgtcag

SEQ ID NO: 88738 - DNA, 75 bp, Homo sapiens
cctggaacgccctctttttaaaaaagaaacctgatgtgagactctctcgaggcagtattgacagggaggatggaa

SEQ ID NO: 88739 - DNA, 82 bp, Homo sapiens
ttccccatgatgatcctgccatgcaggcaggccctgagcacgctgctgtgtgagcagcagattattttcgaaataccagtat

SEQ ID NO: 88740 - DNA, 115 bp, Homo sapiens
agaccgcgcgcagggcctgcagcgggagctggacggcgagcgcgagcggcgcgagaaagggcactatggcagacaaagttaggaggcagaggccgaggaggcgagtctgttgggc

SEQ ID NO: 88741 - DNA, 83 bp, Homo sapiens
ctgactacctgctgtacaccctcaacaaacaccagcgctttggactagacgcttgaagcaaagctgccatcccagaagacgac

SEQ ID NO: 88742 - DNA, 98 bp, Homo sapiens
ctggcctcgccggtcttggggggatggttccatcatggcgtcaatgcagaagaagctcattcacacagaagacccatttaatgatgaacatcaggaga

SEQ ID NO: 88743 - DNA, 90 bp, Homo sapiens
tctggccgcggctactacctggagatgctgatcgggacccccccgcagaaggttgcagtgcacgaggggattaactcaggaacagccatg

SEQ ID NO: 88744 - DNA, 95 bp, Homo sapiens
gtcttgtccacagctggcaaattcagtgcagatcaggagcaatttacagcaatgagggatttatacatgaaaaatggacaaggatttgcattagt

SEQ ID NO: 88745 - DNA, 100 bp, Homo sapiens
ccgcggtccccaccgtgcagcggggcatcatcaagatggtattcaaaacctttgaccacatggcccgtcaggatgatgagaagagaaggcaggaacttga

SEQ ID NO: 88746 - DNA, 100 bp, Homo sapiens
gaatccactgctccgaaaggagagtgcgccccccagcctccggcggcggcccgcagagaccctcggagctgctacaggagctgagagaccctaccctcac

SEQ ID NO: 88747 - DNA, 98 bp, Homo sapiens
cgctgggctgagcggccggcggcgcgggcccggcggcggcggcagcggggtccgggtccggagcgccacagggcggagaaactcatcatccacctgcg

SEQ ID NO: 88748 - DNA, 76 bp, Homo sapiens
aaggaaaaactggagagcttcatcaaaaatagtgatagctttgataaagctgtccgtggcacagtgcacgcagcgg

SEQ ID NO: 88749 - DNA, 83 bp, Homo sapiens
tggcgtctccccgactccacctgagggactggctcctggggagggtgtgaagacagagaatgaccacatcaacctgaaggtgg

SEQ ID NO: 88750 - DNA, 82 bp, Homo sapiens
cccaagctgtacttgtcacctcgaattgagcacacccaggctgaactctgtaccatttggaagaatggaagctgatgcatct

SEQ ID NO: 88751 - DNA, 75 bp, Homo sapiens
gtgattggggaattccagtttaaagctcataggaatgtgctggcctcctttaaaaactcttctacagaaattact

SEQ ID NO: 88752 - DNA, 100 bp, Homo sapiens
ttgaagcacatcgaccggcgacagcagccaggagtcatgagcgacagcggcgagcagaactacggcgagcgggatcctggtgatgcggcccaacaggaag

SEQ ID NO: 88753 - DNA, 100 bp, Homo sapiens
ccaggcccagccgccggttctggatgatggccatcgtctatactgagactatgtcttcagcagtggtgcagttatatgcagcagatcggaactgtatgtg

SEQ ID NO: 88754 - DNA, 83 bp, Homo sapiens
aggtcgtcggctggcggagcggcgtgctaagcttgccctggataatttgctggaagagcaagcagagtttacaggcattggag

SEQ ID NO: 88755 - DNA, 50 bp, Homo sapiens
ggaagccccagcccgcagccctcggggtaatctatgccagcaattatgac

SEQ ID NO: 88756 - DNA, 100 bp, Homo sapiens
ttccgtatcacagtggtgcaagaggtggacacagtagagatctgtggagccttaaaggtggtgaaggcatttgtggtcctggcctcgcagttcctgtccc

SEQ ID NO: 88757 - DNA, 114 bp, Homo sapiens
ggcttggaataagctataagggaattggccaatatgatatacaagacaaggtgaagcctcggaagatggactagaggcttttaccagatttcttaaaactgaattcagtgaaga

SEQ ID NO: 88758 - DNA, 106 bp, Homo sapiens
tggagttcaaggccaaatttttcaccagctccagatactgaaaggagtactttttcttcattcatagtcaaggtgaccaagaatatggcccaggtgaccaaagccc

SEQ ID NO: 88759 - DNA, 100 bp, Homo sapiens
cacagggcaaggcggcggacggctgcgtcgcccgaggcgaggaggagcgctggcgttggatgaaaaatctgacaaacagtatgctgaaaattatacaaga

SEQ ID NO: 88760 - DNA, 83 bp, Homo sapiens
gaagaaggtctggttagaccccaatgagaccaatgaaatcgccaatgccaactcccctgaaccttcacctagccccaggatta

SEQ ID NO: 88761 - DNA, 116 bp, Homo sapiens
ggcgacctgggcaccagcaggacccgaggccaggagccaggggcccagaagacaatgcagatcttcgtgaagactctgactggtaagaccatcaccctcgaggttgagcccagtga

SEQ ID NO: 88762 - DNA, 100 bp, Homo sapiens
gcggtattgcagaggagtcaatgctattgtagatgctgttcagttaaatgtgattgcaacgcgacagcttattctccttgcacaacaaatgaagaatctg

SEQ ID NO: 88763 - DNA, 129 bp, Homo sapiens
ctctaccccttgggctgggacagtgaggaagtccggcagacttgtggctacacttctggccagtttgacctgggtgaatgcagaacattgacacaagaatcatgtgacgtatctccagtattgacacag

SEQ ID NO: 88764 - DNA, 75 bp, Homo sapiens
cccagcgctttgggaggccgagataaatttccgctgtaagccgtccttccgtgaatcaggctccaggaatgtccg

SEQ ID NO: 88765 - DNA, 82 bp, Homo sapiens
gaaatcaacttggaaagtcaaattacgtgtggcatatggactcctgacgaccaacagagctggactggccattatggaggag

SEQ ID NO: 88766 - DNA, 101 bp, Homo sapiens
aagaagccatccactctcccagagtgctccaacgggactgaaccacatgggctggccagagcacacaccaggcactggaatatgctgaatttcagtatcgg

SEQ ID NO: 88767 - DNA, 82 bp, Homo sapiens
gtctggcggggtccgcagtttcagcagagccgctgcagccatggccccaatcaagatcacaagatttctgttgtgaaggatg

SEQ ID NO: 88768 - DNA, 90 bp, Homo sapiens
ccactactttgtgatgacagccaagaagcagtgcctgctgcggctgggggtgctgcgccagagccccacagtcttcgttacaacctcatg

SEQ ID NO: 88769 - DNA, 100 bp, Homo sapiens
catgtggtttgaacaccaaggggcaactgggccatgagagggaaggaaacaagccagggtgctgataagactgtgaaaggcccagatggactgaccgcct

SEQ ID NO: 88770 - DNA, 83 bp, Homo sapiens
gtcgtcttccacttgcacgaaagctttcctaggccaaaaagaggaagttcacaaatgggtgctaccatagtagatgctttgga

SEQ ID NO: 88771 - DNA, 50 bp, Homo sapiens
caacaccacaataatccacagccaaggttaaaaagatcaagtggcatgag

SEQ ID NO: 88772 - DNA, 75 bp, Homo sapiens
gctcctgctgctcatcccggtggccgccgcgcaggagcctcccggagctgcttttgtctggtcctctgagcccca

SEQ ID NO: 88773 - DNA, 74 bp, Homo sapiens
gcagaatatgctaaacttttggccaagagaatgaagaagactgacaaacaacccctgcagaagccctcacattg

SEQ ID NO: 88774 - DNA, 50 bp, Homo sapiens
cttcatcgcgataacgaagaaacctgagggaaaaggacttggaggccaag

SEQ ID NO: 88775 - DNA, 75 bp, Homo sapiens
tagcaaggatgaagaagtcaaggttgcccccaggcggtccttcctggctgcatggctacttggagaatgagccgc

SEQ ID NO: 88776 - DNA, 51 bp, Homo sapiens
cagtttcaggaatctgatgatgcaggtaactataactacccaatattgcag

SEQ ID NO: 88777 - DNA, 75 bp, Homo sapiens
cgccgggagccttgctgcaagcggagtataacatgtatggctggtgggtgggagaactgaacagcctcgttggga

SEQ ID NO: 88778 - DNA, 82 bp, Homo sapiens
tggtgtaccaggcgaagctggccgagcaggctgagcgatacgacggcttgggcactgtttaaaggaaagttccgagaaggca

SEQ ID NO: 88779 - DNA, 75 bp, Homo sapiens
gaactacagaaacctcgtctccctggaaagcagaagccactggagaaaaacggccaagaggcagacctaggaaat

SEQ ID NO: 88780 - DNA, 90 bp, Homo sapiens
cgacacgtcctcgctgctccagttctgcaacgatgttcctcctgctgatcaagagaagctttttatccagaagttacgtcagtgttgcgt

SEQ ID NO: 88781 - DNA, 98 bp, Homo sapiens
gaacaactagtggaccagggcatcatgccacacatgcacatgatggtgtccaagccagaacagtgggtaaagccaatggctgtagcaggagccaatca

SEQ ID NO: 88782 - DNA, 80 bp, Homo sapiens
ttccagtcggccggccctcaaacgctacgagcgcctcagctacaacttcctgcagggtcctgggcccagtctgtgctgac

SEQ ID NO: 88783 - DNA, 100 bp, Homo sapiens
cgcagacaaaagacctcggggccggcctcgcaaggcgcttcccctttccagagagccagaaagaattggtgcttcccgtgctgctgttgatgctggcttt

SEQ ID NO: 88784 - DNA, 97 bp, Homo sapiens
gcgccgccgggacccccaggacgacgtgtacctggacatcaccggtgtacatcggtgagctcccgcaggacttcctccgcatcacgcccacacagca

SEQ ID NO: 88785 - DNA, 75 bp, Homo sapiens
gcgcctgtagctcgcgggcctcgcagcagagagagatcatcattgcctgaatttagctttgtgactgcaagagca

SEQ ID NO: 88786 - DNA, 89 bp, Homo sapiens
gatggatgcctccattaagaaaatgaaacaagcctttgctgaattggagagctggtaagaatgattgatgttggctgatattggagtgc

SEQ ID NO: 88787 - DNA, 90 bp, Homo sapiens
ctccagggatctgtaggcaccacagtgaatcaggtaacctgggccgggtggaccaggtctctgagtttgagtatgatctgttcattaggc

SEQ ID NO: 88788 - DNA, 75 bp, Homo sapiens
gaggaaaacaacttcgagggcagaacattaccagaaacatctttaccaaattatgccacaaatttgaaagacaag

SEQ ID NO: 88789 - DNA, 98 bp, Homo sapiens
tatgtcctcgtccagtacctcgtgaaccccggggtgctccgcacggaccccaggtatgaagaccacaccaccccagagccaagtgcaccgaggccttg

SEQ ID NO: 88790 - DNA, 98 bp, Homo sapiens
tgtggcttaaactcttggcatttggctttgcctttctggacacagaagtatttgtgacaggatcaaaatacttgctggatggtggactcagagaccaa

SEQ ID NO: 88791 - DNA, 75 bp, Homo sapiens
cctggtgtttcatcatatatacgactaagatatcaatgtaaagaacctatatccatcatcatctccttatacaag

SEQ ID NO: 88792 - DNA, 50 bp, Homo sapiens
cggagcggccggtccacggaggagatgccttcaattaagttgcagagttc

SEQ ID NO: 88793 - DNA, 98 bp, Homo sapiens
ggctgaccagatagttacagtgtgtgccaccttggatgaaaatcccggagtaagatataaaagtgttggctgcaccaattctagaagtaagctctcca

SEQ ID NO: 88794 - DNA, 100 bp, Homo sapiens
caagctgaagacatcaagaagatcttcgagttcaaagagaccctcggaacgcttaagcaggtaaagcagtcactgtgaagaaaataacattttaagaaac

SEQ ID NO: 88795 - DNA, 76 bp, Homo sapiens
accgtgtcttacatcagttcagagaggaacggaaaacagttcttccttcaaagcatgcagtacctgaagtaataga

SEQ ID NO: 88796 - DNA, 75 bp, Homo sapiens
ctagcaccccgagaaccgtcagtttgagccagatggtgtggagccggagccttttgaagttggagaccacctgac

SEQ ID NO: 88797 - DNA, 90 bp, Homo sapiens
aggcgggctccagggcctcatcctcaaccccattttccgccagaacctccgcattgcccttctgggtggcttcccaagctcttccttcag

SEQ ID NO: 88798 - DNA, 100 bp, Homo sapiens
gtgaattctctggatctttgtcaggttgggcccatgagatgtgtgctctgtatattccggaggtacaatttgccagtgtttccacaatggaaccaattgt

SEQ ID NO: 88799 - DNA, 75 bp, Homo sapiens
cttgctcggccgatgaagtgcagaggtttttttctgtctcggaagggtgctgacctggaccgggagaagaaggct

SEQ ID NO: 88800 - DNA, 95 bp, Homo sapiens
gttctccagagaatacaatagcaggtggcctgatgaactcttggaaacgccgctggtgcgtcctcaaggatgaaaccttcttgtggttccgctcc

SEQ ID NO: 88801 - DNA, 103 bp, Homo sapiens
agcttggagaaccaccgcatcaagagcttcaagaacaagggccgcgatgtggaagcgatgcaaaaactttctggatggagctagaagatgatggaaaagtgga

SEQ ID NO: 88802 - DNA, 95 bp, Homo sapiens
tgggtttctttcttaaaggactgatttttagaactccacatttgaggtgacgcatccaaagaagacattgacactgctatgaaattaggagccgg

SEQ ID NO: 88803 - DNA, 100 bp, Homo sapiens
cactaccccggctatcaggacagctgccagatcgcaccgtttccagaagctgcgttgccaacgtcacatcccaaaatagatggagtctcgctctgtcgcc

SEQ ID NO: 88804 - DNA, 100 bp, Homo sapiens
aattttcaggatggctgtattctgcggtcagaatgagagagtcaagctgggcagaatctctcgccaagagttcaggatggcaccaagcattatgaaaagc

SEQ ID NO: 88805 - DNA, 50 bp, Homo sapiens
ggccgctgctcaagttccagatttgaacttaaggcatacagaacgatgga

SEQ ID NO: 88806 - DNA, 120 bp, Homo sapiens
gacgtcacatgtcattataccttcacccagcatttcatccctcgtcgaaaggattggattggcatctttagaattcgggaactggagcctctcctctgtcacagtgacaatccatctcag

SEQ ID NO: 88807 - DNA, 83 bp, Homo sapiens
gagtgaccgagaccgcggccgggaccgagggcaagataacccctgtgacagaaggctactgttgctgtaacaaagggcataca

SEQ ID NO: 88808 - DNA, 89 bp, Homo sapiens
gaaggatccctcacagcccagctcgggaagtggacagactgggcgtcatgacccttatcatatctgaagatattagtgagctacaaaag

SEQ ID NO: 88809 - DNA, 75 bp, Homo sapiens
gtttgccatcaacttcaaccccaccaaccccttctgctcaggacgactgggtttggattcagaagaggattatta

SEQ ID NO: 88810 - DNA, 75 bp, Homo sapiens
gcgatatggctcaaggactgccgtgctgggcctaaaggagataacatttatgaatggagatcaactatacttggt

SEQ ID NO: 88811 - DNA, 100 bp, Homo sapiens
aactaggatgtcccgacatgaaggtaggcgaaaaccaagagtacatcggcctcgttctcctatattggaagaaaaagacatcccgccccttgaatttccc

SEQ ID NO: 88812 - DNA, 100 bp, Homo sapiens
agcagtgattcggatagtgaatacagcaaagtgaatggagaagctgatgccatgagcttggatggagggtttgtctacatagcgggcaagtgtggtctgg

SEQ ID NO: 88813 - DNA, 100 bp, Homo sapiens
aactgctcaggcagctccgtagcatgaggaagagtcaggggcacagagagatggagagagacctagttagatcttcctcagaagaataggcttgttgttt

SEQ ID NO: 88814 - DNA, 100 bp, Homo sapiens
acgactagaaggacgactgcctggcgcgatacaaaaatgtctcctctgagcctccggcctccataagacccaaaacagatgacacctcttcccagtcccc

SEQ ID NO: 88815 - DNA, 98 bp, Homo sapiens
tgaatcggaacctgcaatttaccaagacctgtacacacattacatgtgatcgtgcagtccggccgccaccccacagtgctgcagaagctctgccagtt

SEQ ID NO: 88816 - DNA, 83 bp, Homo sapiens
gtggtccagaagcagatatcggtgagacaatgcagatcttcgtgaagactctgactggtaagaccatcaccctcgaggttgag

SEQ ID NO: 88817 - DNA, 76 bp, Homo sapiens
gggagcagaagggaggctccaagacctcatcaacaattaagaggcggggtttcaccatgttgcccagactggtctt

SEQ ID NO: 88818 - DNA, 75 bp, Homo sapiens
ggaagacagtgatataaatgatcctgaccctgaaaacacgagatttttctcctatttcagcagttggccacaact

SEQ ID NO: 88819 - DNA, 100 bp, Homo sapiens
aaaaaagagaggatttgcttttgtaacttttgatgatcatgatacagttgataaaattgttgaccctgctctctattccagaggtggtgaggggatgcaa

SEQ ID NO: 88820 - DNA, 74 bp, Homo sapiens
cacccgctttgtgaaatggccccgctatatcaggttgcagtgagagcagatgctggcaagaagcacttaccaga

SEQ ID NO: 88821 - DNA, 82 bp, Homo sapiens
tctcgctctgcccaggacgcacagatgagagcgctccgaagactgctcaccatggatgatgatatcgccgcgctcgtcgtcg

SEQ ID NO: 88822 - DNA, 90 bp, Homo sapiens
atcttcagcctaccccctgaaatcattcacaatccaaatttcacagtcagagacaaccgaggttgtctgcattcaaaagagcattctatt

SEQ ID NO: 88823 - DNA, 80 bp, Homo sapiens
tggcaacaggaaagtctaagggatatggctttgtctcctttttcaacaaatgggatttggtgctatggagaaatttttgg

SEQ ID NO: 88824 - DNA, 51 bp, Homo sapiens
gcactgctggaggcaaactccaccccgctcctgacccctgaggattaccag

SEQ ID NO: 88825 - DNA, 114 bp, Homo sapiens
agcaggtgcagaagaagtttagcagggcccaggagaagcaacccaaggagatctgtgcgctggttgggttctgtgatgaggtgaaagagatgcccatgcagactctggtccccg

SEQ ID NO: 88826 - DNA, 88 bp, Homo sapiens
aggaacagtgtgtccagcatgggagagtacatgagacgatgaagcaaaggattctaacattttcagagaaccttttggaaagaacaag

SEQ ID NO: 88827 - DNA, 75 bp, Homo sapiens
gaacgaggcaaggagctaaagcagcgtgcgttcagccctgggggccggagttaagatgagtccagcgaagtgcct

SEQ ID NO: 88828 - DNA, 111 bp, Homo sapiens
atgaaacttatcccagagctttgctacattggaacagggccgcctctcaagaggagcccaaggtgggcatcaagaccatcaaggtgtactgccagcgcatgcaggaggaga

SEQ ID NO: 88829 - DNA, 74 bp, Homo sapiens
gcctcctgagaagctgggactacaggttcatgcatgggagatctcagaccagttgttacagatccggcaggatg

SEQ ID NO: 88830 - DNA, 100 bp, Homo sapiens
ttccaagtctggggatggccaggttggtcaaagaaaaagtgatgtatgaaaaagaggcaaaacaacaagaagaaaagattgaaaaaatgagagctgaaga

SEQ ID NO: 88831 - DNA, 73 bp, Homo sapiens
gcccctctctgtcttctctgcagtgggagcagtctatggggtggagctgttcctgaaggttgccggcctgggc

SEQ ID NO: 88832 - DNA, 75 bp, Homo sapiens
tgccaagaggaacagcagtgtaaatgactcagttggtgcttcccgtgctgctgttgatgctggctttgttcccaa

SEQ ID NO: 88833 - DNA, 98 bp, Homo sapiens
cctcaagctgctgttcctgttaggtctctgtgctattgccttctgcattcctgatgagcatctcttcccaggaactccctcggccacagtctccctcc

SEQ ID NO: 88834 - DNA, 100 bp, Homo sapiens
ctcaaaaacaggtcataactcctggagaagggattgcccagtcagcaaaggttcagccctccaagtactatactggcaattgctggagaagattttgcaa

SEQ ID NO: 88835 - DNA, 127 bp, Homo sapiens
cagctcttcagcatctacgggaggcaaacttgtaaaacctggaacagcagcatcattgtcaaagatgtccaacatcacagtcacatacagagatggccgagtggcacagctggagcaggtatacatc

SEQ ID NO: 88836 - DNA, 82 bp, Homo sapiens
ccgagagatgaggccggagcccaccaagttctgggaagagccggacctacgacatgatccagtactatcagaatgacatccc

SEQ ID NO: 88837 - DNA, 82 bp, Homo sapiens
tcctgtttcacatgttggacctctctcgtggtgacccttgccaggacaagaggaccctgccttggtgtgagagtgagggaag

SEQ ID NO: 88838 - DNA, 101 bp, Homo sapiens
ctctggagcttcttcatttaccttctgcggaggcagatccgcacgcatcctaatgtcctatgatcacgtggaactcacattcaatgacatgaagaacgtgc

SEQ ID NO: 88839 - DNA, 99 bp, Homo sapiens
ccgctatattctcgtctgtggcttctgggataaaagtttcagagtctattctacagacacaggatcttacacatttgttccatggcttctcagctttaa

SEQ ID NO: 88840 - DNA, 82 bp, Homo sapiens
gacaagccgctggcagccgcggatctcaccgccgctcaggccctgactgccgccgcaggaagagggaagctggaggtctgtg

SEQ ID NO: 88841 - DNA, 97 bp, Homo sapiens
ggaacaggccgagcagtggctgaaggtactttagattgattgccgagcggggcagttttgtgagccttcatctgaagccttcagttcacccctctgc

SEQ ID NO: 88842 - DNA, 101 bp, Homo sapiens
ccgccctggcccgtcatggagatggaaaaggagttcgagcagatcgacaagtccgggagctgggcggccatttaccagatcggtcgcttggttatcggaca

SEQ ID NO: 88843 - DNA, 75 bp, Homo sapiens
cgcagagggccacgtggtgtgtgaggccattcacagcaaatgtcctgaacaggctgaccaactgactgaagagca

SEQ ID NO: 88844 - DNA, 75 bp, Homo sapiens
ccttgtcttacaaaacatttacaaggcagttgtgaaaaacttcaggacaaaaatgtttcatttaaggacttgtgc

SEQ ID NO: 88845 - DNA, 100 bp, Homo sapiens
aatcaaataacacagttggaatccttggaatgtatcctgtcaggtataatgtcagtgaatggcaagaaagttcttcatatggatcgaaacccttactacg

SEQ ID NO: 88846 - DNA, 82 bp, Homo sapiens
ccggtgcccgaggaggcagccaagctcgtggcctgcctctgcgtgcggcgtgatggtgggcatgggtcagaaggattcctat

SEQ ID NO: 88847 - DNA, 98 bp, Homo sapiens
aagaaatctgccaggagggtgcctcccgccagtatctgatgaaggtaagagactgattcttgctattccaaatcctcttccacgttgacagcccttca

SEQ ID NO: 88848 - DNA, 97 bp, Homo sapiens
gcacaagaccctgagaaatcgggcaagtgtccagagaatggctgggatgaaagtacacttgaactctttttacatgaacttgcaatcatggacagca

SEQ ID NO: 88849 - DNA, 50 bp, Homo sapiens
gttccttcttcgagaaaccaagctccaccagcccattggagaaaagttac

SEQ ID NO: 88850 - DNA, 98 bp, Homo sapiens
ttgagaaacctggatctgcgatctgtttgtggagtgtgaggaagaggctgtctgtgtcattatgtgtgcgtcggtcaagtataatatccggggtcctg

SEQ ID NO: 88851 - DNA, 88 bp, Homo sapiens
gctcaccccgcggccgcaccttcccgccttctcaggtgtcgtgaaaactacccctaaaagccaaaatgggaaaggaaaagactcatat

SEQ ID NO: 88852 - DNA, 90 bp, Homo sapiens
cactgaccccgggggagcggcagcagtgtggcaaaggagcagagaactttgacaagttcttcacacgaggacagcccgtcttaacaccac

SEQ ID NO: 88853 - DNA, 75 bp, Homo sapiens
gggagtttgacagctattaaaaccagggctccacagttaggagtttgtcctaagtgggtaaaacttaggaagaac

SEQ ID NO: 88854 - DNA, 78 bp, Homo sapiens
ctccggagtagctgggactacagaaatctcccagcaaaaccagctgaagaagctcagaagcacagacagcagtatgaa

SEQ ID NO: 88855 - DNA, 75 bp, Homo sapiens
ccaaacagcggcgtttcacggtggcacatacatgatttcctccttcttcacccctgaaaccatatccaaagaagc

SEQ ID NO: 88856 - DNA, 101 bp, Homo sapiens
cagcgacgccggcctctcgagaggcgcgcgccccgccgagatgtacgacacgatgaggcgagtggtacgacagagcaagtttcggcatgtatttgggcaag

SEQ ID NO: 88857 - DNA, 88 bp, Homo sapiens
ttggtacccctttttatccactcattggcagagaagctgctaaatttggccgaagatggaccaaaatttcaaagctaattggaagccg

SEQ ID NO: 88858 - DNA, 83 bp, Homo sapiens
tgtgttcatggtaggataagactttgattcaaccagtacttctggagtgtatgattcagaatggacagtttagaagaacctca

SEQ ID NO: 88859 - DNA, 100 bp, Homo sapiens
tgtgtgagcgggcctgcatgcacctggggcacctcaagggcctggaggcgcacaaataccggaacacgtgggactgcggcttgcagatcctgaagaagga

SEQ ID NO: 88860 - DNA, 90 bp, Homo sapiens
gttggaccttccggagcttctcagaagacagagggttttcttttgagacagcccacctgaggatattgaccataaggactcatatctcat

SEQ ID NO: 88861 - DNA, 100 bp, Homo sapiens
gtttcccaagcaaggttccttggaagaagatgtctgcagaggtttgtaaaagaatggacttggtctgccagagaatgttgaatcagggatttctgaaagt

SEQ ID NO: 88862 - DNA, 76 bp, Homo sapiens
cacggaggaccggagcggcctgtccgaggcttcaacggaccacaccaaaatgccatctcaaatggaacacgccatg

SEQ ID NO: 88863 - DNA, 51 bp, Homo sapiens
cgtgtactttaccaacgagctgaagcagtgacgagtagcacagcccctcta

SEQ ID NO: 88864 - DNA, 100 bp, Homo sapiens
gtgacctgtacaggtcgcgggagtcgtagggaggacgccgggacacctggaagccgagaaatggccctggccaacgtcaacattgggagcctcatctgca

SEQ ID NO: 88865 - DNA, 90 bp, Homo sapiens
tcagcactatcccaagactgctggcaacagagcaatggtggaacaaagcggcaaaagatatcccatcaaaattatatagcctatcaaaag

SEQ ID NO: 88866 - DNA, 75 bp, Homo sapiens
tcaacacctcttcacgtagctgagaggcggggtttcaccatgttgcccagactggtcttgaactcctgagcttaa

SEQ ID NO: 88867 - DNA, 100 bp, Homo sapiens
atgcctgaggttgtggaaaaggaagattactcagagattatagggagcatggccctggcctcccacgactacatcctgaagattgtgcccacggtttatg

SEQ ID NO: 88868 - DNA, 98 bp, Homo sapiens
agtgaagacgtccacgtgcactccctgcactgctactttgttcgggcaggtaacctgtgtatggtgactggaggtgctaacctaggaagaattggtgt

SEQ ID NO: 88869 - DNA, 104 bp, Homo sapiens
gaaaacacgaggtgcagaagatgaccttaacacagtagcagctggaaccatgacaggcatgttgtataaatgtacagaggctgacccgcggctgattgagtccc

SEQ ID NO: 88870 - DNA, 100 bp, Homo sapiens
gtcttcagagatcctgctcttaaacgcaaggcccgacgggaggccaaggtcaagtttgaagagagcggagaccctgttaactactacgttgacactgctg

SEQ ID NO: 88871 - DNA, 118 bp, Homo sapiens
gccgctccgaggcctcgcgaccgccgagcctgcagcctgccccgcggccaacatgagcttcttgttggccggtgcataaacttctcccgagttccatctcagtaaaagggaagcagga

SEQ ID NO: 88872 - DNA, 96 bp, Homo sapiens
acacaggatatgaataatattcttctggaggtaaccaggagccgacaacaactcctgacgcaatggttcagccttttactaccatcccatttccac

SEQ ID NO: 88873 - DNA, 97 bp, Homo sapiens
gtgccgactggttctccctgggctgcatgcttttcaaacttctgagaggaatggagatgtatgcatttcgattcttcatccgcctgtagatgaccca

SEQ ID NO: 88874 - DNA, 74 bp, Homo sapiens
gagggttctgtggaggacataagggagatagtgcagagactgaaggtacatggaaaacttggggatttcacaat

SEQ ID NO: 88875 - DNA, 75 bp, Homo sapiens
cgttttcgaagatgccttggaaaccatctcaattgccaggtggagctcaacaggaaagtcctagcggatctggcc

SEQ ID NO: 88876 - DNA, 100 bp, Homo sapiens
cccggggtggctggacccaagtgtgggcagtgtccagacggccgtgccctgggccccgcgggctgtgaagctgatcgtcaacacctgcagtggcccagac

SEQ ID NO: 88877 - DNA, 83 bp, Homo sapiens
gtgcgaaccccgggcagcccgggaaatctccaagtcagaaagagtccgtgcgtcctggtgcctcctacaaacggcagaatgaa

SEQ ID NO: 88878 - DNA, 80 bp, Homo sapiens
aatcaaaccagtattcttttcacacagagttttccgtctgatgaaggttggccatttgcaaagtatcttggagcttgtgg

SEQ ID NO: 88879 - DNA, 100 bp, Homo sapiens
gctgctggctgcgctctgcccggcgagtcgggctctggaggaaaagaaaggcacaaaacagcgttctcacggctcaccagccccaagcaccagctccacg

SEQ ID NO: 88880 - DNA, 73 bp, Homo sapiens
tggttgaaaactgtaattgaacaggctggcgcccatgcggctctacacgctctccaagcgccactttgtcctc

SEQ ID NO: 88881 - DNA, 73 bp, Homo sapiens
agcgttatcccaccttggagacaagggtttgcttctcctgctgagagagaatagtaatctgcatcaccaagtg

SEQ ID NO: 88882 - DNA, 75 bp, Homo sapiens
cagagtttgtagcctattggaggaaaacacaccaaggccggaaggtggtggtcgtacgctgtgaaggcatcaaca

SEQ ID NO: 88883 - DNA, 100 bp, Homo sapiens
tggccccggcgggttcggcatccgagcctggcaggggccaataggtatggacctgtctgccaatcaggacgaggagaccgaccaggagaccttccagctg

SEQ ID NO: 88884 - DNA, 98 bp, Homo sapiens
ccgtgacgtggactacagtgacgccctcacggagaagcagtggctaagggtatggaattggcaattggacaaatgtatctttctacgaggccatcagg

SEQ ID NO: 88885 - DNA, 90 bp, Homo sapiens
ggcccgcgggggagccccgggagccgcacggtgattgcccacagtgagtatcaaaagtccaaaagaatttccatctttctgagcatgcaa

SEQ ID NO: 88886 - DNA, 98 bp, Homo sapiens
tgggaaccagtctttcaaaatatgtctttggtggacttgggaaagaggttgctagaagcagcaagaaaaggccaagatgatgaagtgagaacgttgat

SEQ ID NO: 88887 - DNA, 51 bp, Homo sapiens
taagagatatctgcaatgatgtactgattagtgatgatgaaccaggttatg

SEQ ID NO: 88888 - DNA, 80 bp, Homo sapiens
ctgggacgctgcctgccacacattgttcccaatgtgctattggcaaagagagagcaacttgagttggtggaaccaagtgg

SEQ ID NO: 88889 - DNA, 100 bp, Homo sapiens
ggcgctggggcccccagaagtgatcgctcagctggagaacgcggctaaagttctgatgctccctgtgctgtcaggaatctacaggacttggctcgtattt

SEQ ID NO: 88890 - DNA, 74 bp, Homo sapiens
ccatcctgaacgtctctccctgtcctagctctgtaactgtttacagtgctcagcagggagaccccctttcccgc

SEQ ID NO: 88891 - DNA, 83 bp, Homo sapiens
accttgattttggacttcatagcctctagaactgctgcatgttaaatggccaagaggtgaggcttactattcactatgaaaat

SEQ ID NO: 88892 - DNA, 83 bp, Homo sapiens
tgctccggggaggtcacctgacgaggagaaggagaggacttgggtgaggagctgctgccacccgggctgggccaggacctgag

SEQ ID NO: 88893 - DNA, 83 bp, Homo sapiens
gggttatctgcgaacacagtagtggaagatgtaaagcaatatttcgagcagtttggcaaggccataaagaatgctgatgggag

SEQ ID NO: 88894 - DNA, 82 bp, Homo sapiens
ggatatggaacttggaactctgggacaaatagagaaacgccgagtctaatgctaagcacacgtgacccgcacactagctgga

SEQ ID NO: 88895 - DNA, 90 bp, Homo sapiens
gcagaggaaagcgggctggcaggcgagggagcccgcgtcggctgagagcccacaggcccccacaggggccttcctgctgtgctggacgcc

SEQ ID NO: 88896 - DNA, 152 bp, Homo sapiens
tggctgacagcaaagataaggaacccgaagtcgtcttcatcggggactccttggtccagctcatgcaccagtgcgagctttaactgagactccgaccagctcagactggcagtcgaccgatgccacacctaccctcactaactcctcctgag

SEQ ID NO: 88897 - DNA, 100 bp, Homo sapiens
gcctcagccctgggcgctggggctcctgctctttctccttcctgggagcctgggcgcaggagggcatcctggctgtttcacccgtggacttgaacttgcc

SEQ ID NO: 88898 - DNA, 100 bp, Homo sapiens
cagaacctcaattctgttgatcttcaaaatgctgcagaaatgctcactgcaaaagtgaaagggagctgtgatacacaagttgggcatcaccttggtgtct

SEQ ID NO: 88899 - DNA, 83 bp, Homo sapiens
cagaagatctgggtgcccgtggaccacaggccctcgttgcccagatgtacaccaggggttggaaaaaccacactaggcaaaga

SEQ ID NO: 88900 - DNA, 100 bp, Homo sapiens
gtgcgtaacgagctgccggggcgcatcgcggtgcaggacgacctggacaacaccgagctgcccttcttcaccctggtggggacgccctactacatgtcac

SEQ ID NO: 88901 - DNA, 100 bp, Homo sapiens
tgggcacggacgcacgccactttttctctgctgatccagattgaaactctcttcaagtctaaggactatgagttcatgtggaaccctcacctgggctaca

SEQ ID NO: 88902 - DNA, 82 bp, Homo sapiens
ttgaaacaaaaatgggtggagtacagatctctgcagttacaggaacatcgtctgcttcatgtactatactggcaattgctgg

SEQ ID NO: 88903 - DNA, 100 bp, Homo sapiens
cggcacgacgacggtccctcagcccagccaccatgagcaccaagcagatcacttgcaggtacgaaggtggatcaagagcccaatggtcagtgtggacaag

SEQ ID NO: 88904 - DNA, 80 bp, Homo sapiens
agagattcagccagcacactcctcgcgagcaagcagggcatatacttctcttgtcttggttggatgcacaaatctgtgtg

SEQ ID NO: 88905 - DNA, 90 bp, Homo sapiens
gcgcttccgacggggcggccgggggctcagagatccaagtgcgcgccctggcgggtccggaccaagacaattgtggcaattaataaagac

SEQ ID NO: 88906 - DNA, 74 bp, Homo sapiens
gaggcagcagatcccctagcatctaaacttaacaagctttgtgtccctggtgatgttggaacattaatgatgga

SEQ ID NO: 88907 - DNA, 89 bp, Homo sapiens
agaaagtgaaagccaaaaaggagaattctctctttcagatggcgttcaggaagtggcttatattcactcaaaccagaatgtaattggat

SEQ ID NO: 88908 - DNA, 80 bp, Homo sapiens
gccaaagaaacaagccgtggaataggtgtatcaagtaatggtgcaaagcctgaaagaagaagagctgtcttgccacagac

SEQ ID NO: 88909 - DNA, 97 bp, Homo sapiens
aggacccctgctctttgatgacctccctccggccagcagtactgactcaggtttgttaagaagttggagcactcttggaaagccctggtacatgacg

SEQ ID NO: 88910 - DNA, 75 bp, Homo sapiens
ggatcctttctggaatggaggtcttatgagctgctattgaacacggcagtctgaagatgatgagaaactgaaaaa

SEQ ID NO: 88911 - DNA, 100 bp, Homo sapiens
ctcatctcgctcggctgcgggaaatcgggctgaagcgactgagtccgcgatggaggtcgcaatggaagaagagatcgccgcgctggtcattgacaatggc

SEQ ID NO: 88912 - DNA, 90 bp, Homo sapiens
cgccaatcgcccgtactgagcgccggcgggagcgtcccccgggggagaccaggactcgcacagtgttgcattgatgaatcatagctgttg

SEQ ID NO: 88913 - DNA, 50 bp, Homo sapiens
ccggaagctgagtttttatccgaatcctgcaatatggcgaacataagaga

SEQ ID NO: 88914 - DNA, 98 bp, Homo sapiens
aacaagtgcatccctgagtgtccctccgggtacacgatgaattccagcaaacaaatttacatgtattggagaccagaccagaagcccttctgaattaa

SEQ ID NO: 88915 - DNA, 100 bp, Homo sapiens
ttgtctcttatttagttctggggagcgcctcgtcgacatgagtgatgtggaggaaaacaacttcgagggcagaatgtagccgcctgtcccgggagcctgg

SEQ ID NO: 88916 - DNA, 50 bp, Homo sapiens
tgtggccaaggtcaacaccctgattcgcctattgaagagatgcgacacac

SEQ ID NO: 88917 - DNA, 75 bp, Homo sapiens
cgcgccttcggcattggccgccgcgatgtcagctcagtgctgtgcgggccagatagaaaatgctgctgaagaacc

SEQ ID NO: 88918 - DNA, 100 bp, Homo sapiens
acctacggtcacgtctacaaggcgaggcggaaagatggcttattcagctgattctgaatcatcttacactaccagacctgtgtagattagcacagacttg

SEQ ID NO: 88919 - DNA, 100 bp, Homo sapiens
ggctgctgtggttcatgccacagccaaagacatacaatctttgccagcaacacttcctccttgcagattacaagcatagctaatgccaccaccagacaag

SEQ ID NO: 88920 - DNA, 75 bp, Homo sapiens
atttcatctcgaaacctggcgtcttctgagttgacagagcagaagcttcgtgcctgtttagagggtagtataaat

SEQ ID NO: 88921 - DNA, 83 bp, Homo sapiens
ccggctgtggtttggctgcgggcggcttgggcagcccgcgggcgcctcagacaatgcagatcttcgtgaagactctgactggt

SEQ ID NO: 88922 - DNA, 82 bp, Homo sapiens
gtccgttctctcaggctcccgttcagactctgctaacaccagatagtggaaagaaaccatgtgctgaaatgtttgacgacac

SEQ ID NO: 88923 - DNA, 100 bp, Homo sapiens
cgcggaggccgacaggattcgttggctgccgtccccgctgctgtgcattggctgctgtaagtaaagatgattccattatttcaagtcttgatgtcactga

SEQ ID NO: 88924 - DNA, 89 bp, Homo sapiens
gaaagcgacaagtggaggcgccgctctagcggccgggactctgaactatggcgatatttggagttcttacaacatggcagacattgaca

SEQ ID NO: 88925 - DNA, 100 bp, Homo sapiens
cggagctcgcccaagccgcgtccccagagagcgccctgagagaacagggtggccgcttggtccaggtgcgtatagcagcaaaattcatcattcatgcccc

SEQ ID NO: 88926 - DNA, 75 bp, Homo sapiens
gggggattctcgacctgctaacagaactggaccttttcgtggagacctttggcgacttggcctttggcgacatct

SEQ ID NO: 88927 - DNA, 96 bp, Homo sapiens
ttaatcctactcagaagaacttgtacagagatgtgatgttggagaactatagcaatctggttttcttgggcgttggagagaagttttcaacttggg

SEQ ID NO: 88928 - DNA, 100 bp, Homo sapiens
tccaaaggcagggcaaggaaactggccacaaagagtattatgagggaggccgaggacttcatgctccggacagagaaacggcgctgggattagggattgc

SEQ ID NO: 88929 - DNA, 100 bp, Homo sapiens
aagtacatcataatcggcgacacaggtggatggagagagaaagaaaaagccagagaggagagctggggtccacctcgagaatcaaggccatcagaagaac

SEQ ID NO: 88930 - DNA, 100 bp, Homo sapiens
gggaaaatggcggtgtctacagtgttctcgacttcgtcgctggtatgagggtgctggttgatgctcgagagaagcttcatattccctggggagacaactc

SEQ ID NO: 88931 - DNA, 99 bp, Homo sapiens
tggcgatttctgagtgttccggagaccccatcttcagaaccaatggaggaagaggaagatgacgacttggagctgtttggtggctatgatagtttccgg

SEQ ID NO: 88932 - DNA, 130 bp, Homo sapiens
gggctatgagacccagtggtgggatgccccgagcattgtgggcctcatcatcttcctcctgtgcaccctcttcatcagcaaagtacccatgtttggcctggaggccatctggaggaacggccaagtggtg

SEQ ID NO: 88933 - DNA, 100 bp, Homo sapiens
acgttgtgaacagagttagctggtcaaaatgcagatcttcgtgaaaacccttaccggcaagaccatcacccttgaggtggagcccagtgacaccatcgaa

SEQ ID NO: 88934 - DNA, 75 bp, Homo sapiens
ggccgatcctcgcgtgagacagatcaagatcaagaccggcgtggtgaagcgggaggttttacataaatggagtcc

SEQ ID NO: 88935 - DNA, 100 bp, Homo sapiens
gaatcgacagtttcttttccggccctgggatgtcacgggttggattgagattgttggatgtgctgatcgttcctgttatgacctctcctgtcatgcacga

SEQ ID NO: 88936 - DNA, 100 bp, Homo sapiens
cgcggaagccgccggttgccaggccaaggagtggactagggtcgccggggaagcgggtaaaataccatgaagattttgaaaaaacaaaggggagaggctt

SEQ ID NO: 88937 - DNA, 97 bp, Homo sapiens
ctcagctttacaaaccctgaatttataactgactctagaggacaaaatcccagtccttggcacaaactcaggaaatggaagccggagtctgtttttt

SEQ ID NO: 88938 - DNA, 82 bp, Homo sapiens
gctggacggcgagcgcgagcggcgcgagaaaggtatttgtggtgcagcagattcccaacagtaacctcctcctcctggtgac

SEQ ID NO: 88939 - DNA, 83 bp, Homo sapiens
gggcctgggagcttgctgcagcttcagggagtgaggattctttggacaccagcctgagagctcacggggtccatgccactaag

SEQ ID NO: 88940 - DNA, 100 bp, Homo sapiens
ttccgatttaaagctgagctgcgaggaaaatggcggcgggagctccaaaaccttggaattaatccagctaacattggattcagcacactgaccatggaat

SEQ ID NO: 88941 - DNA, 83 bp, Homo sapiens
aaccttagggacaacaccgggacacccgcgaggccggaaaatggtctctcggctgctgggggcattccacaacccaaaacagg

SEQ ID NO: 88942 - DNA, 80 bp, Homo sapiens
ggctgtgcttgccaggcctggctccaaggcggggtttcaccatgttgcccagactggtcttgaactcctgagcttaagca

SEQ ID NO: 88943 - DNA, 75 bp, Homo sapiens
ggggcaatggcatcgtgggagcgcaggtgatggaggcctttgagcaggccgagcggaagcccaaacccaacccca

SEQ ID NO: 88944 - DNA, 82 bp, Homo sapiens
tgccgttggtcctgtgcggtcacttagccaaggctgtattcatcaccaaagaaaaaacttacaccaatgcagaaatcggtta

SEQ ID NO: 88945 - DNA, 100 bp, Homo sapiens
gcttcagccaagtgaaaggcactatcgagattggaaccacagaaggtcaccatcagaaaagctaagtttgctgtatagtgaggatcaggagatctgatcc

SEQ ID NO: 88946 - DNA, 132 bp, Homo sapiens
gcgtgagaagttgctctgtgtgctgagcgttctaaaggaaggcgtccgttggccttcgtacccgtcttgattgagcgtccgtctccaagagagtatgaagagagtgcgtctgtagggcagggaagatggcgg

SEQ ID NO: 88947 - DNA, 90 bp, Homo sapiens
cgcagcccacgctcatgatcgacttcctcacccgcgcctgcgacctcgggaaattcaactactgaggaggttacggcacaaaaatgtcat

SEQ ID NO: 88948 - DNA, 83 bp, Homo sapiens
acagagccgggagttcaagaagaacactccagagtttaatggatcgagaagtggcgttgcttgctgaaatggacaaagtgaaa

SEQ ID NO: 88949 - DNA, 83 bp, Homo sapiens
caagaacgtgagcaagcccaggcacagccgacgccgcgggaccacctcctccaccctgaagggtgccatccagctgggcatcg

SEQ ID NO: 88950 - DNA, 96 bp, Homo sapiens
ggaaagtgctcctgcggctgtatggagcgattttgcagatggggaatacggagagaacggtctggcaataccactttcggacctggccggaccacg

SEQ ID NO: 88951 - DNA, 75 bp, Homo sapiens
ctcgggctcggaacgagactgcacgaattaaatgtgagggagtctgacgtaagagtttgtgatgagtcatcatgt

SEQ ID NO: 88952 - DNA, 75 bp, Homo sapiens
aaaaccttgtatgaggtcaaatccgagaacctgggccaaggcgacaaggtcaagggggtcaattttgaggcagtt

SEQ ID NO: 88953 - DNA, 103 bp, Homo sapiens
tgtttgcaagtatggactggagacccacatggagacccattcagataacccactaagccgctgttgtgacaagaaaagctgtggcaaccgaaatgagactccc

SEQ ID NO: 88954 - DNA, 74 bp, Homo sapiens
accgacccccaggactggcttacccaaaagcagaccttggagaacagtcaggttggctggatatttacagacct

SEQ ID NO: 88955 - DNA, 82 bp, Homo sapiens
acagagtcgtaatcgctctacccagtcccaggacgtggcgcgggtctccagtgcttcagagatgccctgtatccaagcccaa

SEQ ID NO: 88956 - DNA, 90 bp, Homo sapiens
cgcagtgtggggagatgtagtccagacaaagactgaatcaggcccaccgtggtgcacgcaaaccacttcctggccatgcgctccctcctg

SEQ ID NO: 88957 - DNA, 98 bp, Homo sapiens
ggggacccaggagtttcctgtgtccagcgctgccggagccgcctgaggtctcctctgagcctccggcctccataagacccaaaacagatgacacctct

SEQ ID NO: 88958 - DNA, 98 bp, Homo sapiens
ctccctggcctggtctgctgatggccaggcaagtactcaaacagatgccctgaaactgccaccttcccaacctccaaggcttttgaagaacaaagctt

SEQ ID NO: 88959 - DNA, 73 bp, Homo sapiens
aagaaacaagcccgctgtcagggagtagtttgtgccatgaaggagccagtgcatcaatcagatgaaggaggtg

SEQ ID NO: 88960 - DNA, 100 bp, Homo sapiens
gggcggagctggcgcggcccctagctttctccttctggtgtggggcccgagctagtgtcagcagtgggatacctgcgcttgaaggacatcatccaccgtg

SEQ ID NO: 88961 - DNA, 101 bp, Homo sapiens
atttatttctcttgacaaccaagggcctccgtctggatttccaaggaagaatttcctctgaagcaccgggccaattcctgtccccccagcagcatggcatc

SEQ ID NO: 88962 - DNA, 83 bp, Homo sapiens
cgggagaggctcaagcgggacctgttccagtttaacaaggtcaaaatgcagatcttcgtgaaaacccttaccggcaagaccat

SEQ ID NO: 88963 - DNA, 90 bp, Homo sapiens
ctcagggccgggggtacccgagtacgtagagaaatcgacactcttaatgaacgtttagctgctgaaggacaagcgattgatggagcagag

SEQ ID NO: 88964 - DNA, 74 bp, Homo sapiens
cgggccatggccgccgccgatgccgagacctgcaggctgggacaatgaaaagaaaatagctattttacatgaaa

SEQ ID NO: 88965 - DNA, 82 bp, Homo sapiens
tccagcagaagaaagggaaggaacacgctgcattactgcgtgctcaaggagaaattgaagccatagtcgtgcctgtttgctt

SEQ ID NO: 88966 - DNA, 87 bp, Homo sapiens
tctggatagcaccttatggacagtgacaatgtcagtgcctactgcctgcatattgctgaggatgatggggaggtggacaccgatttc

SEQ ID NO: 88967 - DNA, 88 bp, Homo sapiens
ctctgtcgctcttgtgccctagcaccccgagaaccgtcagtttgagccagatggtgagctgcatcggctcaacatccccaaccctgcc

SEQ ID NO: 88968 - DNA, 74 bp, Homo sapiens
cggctcacggaaaatgtctataaggcagcgtctatcccagactaccggggccctaatggagtgtggacactgct

SEQ ID NO: 88969 - DNA, 82 bp, Homo sapiens
tggtgcatgcgtcgtcggcctctgggcagcagagcattggggagtcagcaatgtccgttgtgttaaatcagctgctgcccat

SEQ ID NO: 88970 - DNA, 75 bp, Homo sapiens
gccacaagacatttcctgctcggaaccttgtttactaattggaaatcctcattgacgattcaatttgttgaaggc

SEQ ID NO: 88971 - DNA, 98 bp, Homo sapiens
aactttcatggagaatggctggaagttcttggctgcggggtgatggaacaacaactggtcaattcagaagagaagctgaatttggacgacagccagtg

SEQ ID NO: 88972 - DNA, 83 bp, Homo sapiens
gatcttcgctgtggcatggcggacgaggggaagtcgtacagcgtgttctaagaacggaagcatctgggctggatggaatttag

SEQ ID NO: 88973 - DNA, 75 bp, Homo sapiens
gcagccagctgggtccggggagcgccgccgccgcctcgatgggttttctttttaaaagcggaaggagagttttac

SEQ ID NO: 88974 - DNA, 75 bp, Homo sapiens
agtccagtcactgctctttgagccttctctggaagactttctgacatctttccaggaacagcgtgaggaggacag

SEQ ID NO: 88975 - DNA, 100 bp, Homo sapiens
aaaaggtgaccacaagattcaaggtggatgaaaatactaggaaaagtttatttaagttacgttctacatgggatgaaatattccctttgaagaaacttta

SEQ ID NO: 88976 - DNA, 98 bp, Homo sapiens
tcaaaggatgctgagtccggagcgcctagccctaccggactacgagtatctggggaactctaatgatccaggacaaagaagttaccctggagtatgta

SEQ ID NO: 88977 - DNA, 82 bp, Homo sapiens
ctgtattggtctcctgctcctagagaccatggtgaatccgggcagcagctcgcagccgcccccggtgacggccggctccctc

SEQ ID NO: 88978 - DNA, 76 bp, Homo sapiens
ccaaggcaattgatcccaagttgtcgacgaccgacagggtggtgaaaggtgagaattatgaagatgatgacctagt

SEQ ID NO: 88979 - DNA, 83 bp, Homo sapiens
gacatactacctctggccccgagatcagaatgccgcggatctgaaaagaacaattgctgtccttctggatgacattttgcaac

SEQ ID NO: 88980 - DNA, 90 bp, Homo sapiens
atttttttgtggagtggtttgaatatcgtaagcgcacgtttaaacatctcaaggtgaaaattagttctgctgtgcttaaagctgcggccc

SEQ ID NO: 88981 - DNA, 75 bp, Homo sapiens
cgggcactgttgctgctgcgggagacccttgacctttctggctccagagagacgccctcctccattctcttaggc

SEQ ID NO: 88982 - DNA, 100 bp, Homo sapiens
tgcaactagggtggagatcaagctggaacaggagttccgatcgacccggtaccaagaaggggagtgcccgcggcagattgtggatttcttaaagaagaag

SEQ ID NO: 88983 - DNA, 82 bp, Homo sapiens
agaggcttaaggtcttcagcggggcgctccaggaggcactcacaggtggccagcatcgaaatgttcagccttttagtgatga

SEQ ID NO: 88984 - DNA, 101 bp, Homo sapiens
tcatctcgctcggagcttcgctcggaagggtctttgttccctgcagccctcccacggtcacaaggcacttaaagcattgttgaggtcattggtaggtcttc

SEQ ID NO: 88985 - DNA, 90 bp, Homo sapiens
tgtgcccttcatcccagtcacccaggcctccgcttctccggcctccctgctcttaccgggaggcagactgccagattcacttacagcccc

SEQ ID NO: 88986 - DNA, 82 bp, Homo sapiens
gtcagtgcacaaaatggcgccctacagcctactggtgactcggctgcaggaacgtcaaggtcgtgggaaataaaaggcagtt

SEQ ID NO: 88987 - DNA, 83 bp, Homo sapiens
ccagacctacggagggagctggaaattcctgacgttcattgatctggagatgcctcataaatttgtgatagccgtgctgatgg

SEQ ID NO: 88988 - DNA, 100 bp, Homo sapiens
tcagagtaaaagttgtttctggaattgatctcgccaaaaaggacatctttggagccaggtctatgctccatcagcaagcactgccgactacaatagggac

SEQ ID NO: 88989 - DNA, 98 bp, Homo sapiens
cggctctgcgctggccgggggcgcgggcggcggcgccggcaggaagacggatgtttccagtcctaaagattagtgtcacagggttggaccccaatgcc

SEQ ID NO: 88990 - DNA, 88 bp, Homo sapiens
atggcagacgatctcggagacgagtggtgggagaaccagccgactggagcaggcagcagcccagaactgataaatttcaaacggaaga

SEQ ID NO: 88991 - DNA, 98 bp, Homo sapiens
gagcgtcgccgccgccgccgccatgaacaactcgggcgccgacgagatcggaataccctctaccatctgctttggtcagggtgccgctcgaggattta

SEQ ID NO: 88992 - DNA, 75 bp, Homo sapiens
tgaggactgactggggttctgagactccctgtcccggaccgcagattttaggtgatgggcaagtcagaaagtcag

SEQ ID NO: 88993 - DNA, 110 bp, Homo sapiens
ctatgaacccagaggtcgtggaggtggccgtggaggcagaggtggcatgggtattgaatttgaccgggattgtgactattttgcgattgctggagttacaaagaagatta

SEQ ID NO: 88994 - DNA, 98 bp, Homo sapiens
ggaagatggcgccgccggtggcagagagggggctaaagagcgtcgtgtggcagagtgaggtcgcaggagctggtgcagccagtgtcatgtccgccctg

SEQ ID NO: 88995 - DNA, 83 bp, Homo sapiens
gcgacaagccagcccagatccgcttcagcaacatttccgccgccaaagttaccggtattgtaagaacaagccgtacccaaagt

SEQ ID NO: 88996 - DNA, 82 bp, Homo sapiens
ttatgctgcagcatattgtactggcctgctgctggcccgcagggatcttctcttagaaatctacagaagtataggggagcca

SEQ ID NO: 88997 - DNA, 82 bp, Homo sapiens
ctttagagaagttaagagaagaattagctatcaaatccggccagacaatgcagatcttcgtgaagactctgactggtaagac

SEQ ID NO: 88998 - DNA, 100 bp, Homo sapiens
gtcatctgggcgtgcgggtcccgggttttgatcgcgcgtttgtgtagaccttcacggcatggtgcaactcccacctgcggaaggcaggcacacagatcga

SEQ ID NO: 88999 - DNA, 90 bp, Homo sapiens
cccctccccacgcatccagataatctccaccgactctgctgtagcctcacctcagcgcattcagagaacacctgttcccagcgctgaagc

SEQ ID NO: 89000 - DNA, 100 bp, Homo sapiens
cagtgatgtgcgacaaggagttcatgtgggccctgaaaaacggagacttggatgaggtgaaagactatgtggccaaggcggtgggagcaaggaaaaggag

SEQ ID NO: 89001 - DNA, 134 bp, Homo sapiens
gctttgcctcctgctgctgctgctctgccagttcatggaggaccgcagtgcccagggttgggtttatcagcctcgtccagggaagcgaaaacgattccctctaagtgtttccaatgtattttctggtaccacac

SEQ ID NO: 89002 - DNA, 100 bp, Homo sapiens
aggcacacaagtgtgaggagttgctaaatgctcaggaaagaccacagcaagattctttcattcgtctcctcctagcctgggggaccaggctcgaactgac

SEQ ID NO: 89003 - DNA, 75 bp, Homo sapiens
cgacaccatggtggacacttttcttcagaagctggtcgccgccggcaggttggaagtgtatcctcccttcttatt

SEQ ID NO: 89004 - DNA, 83 bp, Homo sapiens
ctcggcgctgccgtctctggaggagtactggcaacagttacagttacatgatcgacaacgtgatcctgctcatcacaggcacg

SEQ ID NO: 89005 - DNA, 98 bp, Homo sapiens
acgcagaggacgccggaacaccctggaagccgagaaatggtcaaccaaatatgctgcaagtcttccagccctgctgcttgccagacacacagaaggca

SEQ ID NO: 89006 - DNA, 75 bp, Homo sapiens
gaggaactggcccggaaacaggaggacatgggcaccaacaaatgcgccagccagtcgggcatgactgcctacggc

SEQ ID NO: 89007 - DNA, 91 bp, Homo sapiens
tgtgggatccggttccttggtgtcatccagccttagcaaaccagaggttctcatcccaggccttgtggagggatctaccaaaaggaagcgg

SEQ ID NO: 89008 - DNA, 100 bp, Homo sapiens
ctccagactccacccttctccaagggggacataatctactctcatcagccagttttcaggaagagagaagggcacagttacctaagtatcaacgtaatct

SEQ ID NO: 89009 - DNA, 82 bp, Homo sapiens
cgccgcccggggcgaggcagggccagcagcaggcgggagggactttgaacatgtcggggatcgccctcagcagactcgccca

SEQ ID NO: 89010 - DNA, 50 bp, Homo sapiens
gtcacaggggatgatattcagacacagcctttgccattttcatgtcgccc

SEQ ID NO: 89011 - DNA, 74 bp, Homo sapiens
tttgagctaagtgatgatggccgctttgaggtgtggaatgcgatgactcgttacagaatgtctgaaggggacag

SEQ ID NO: 89012 - DNA, 95 bp, Homo sapiens
gcctgtcccctggctctcagagggtaaaggagctggaagtgcgaaaattgatgcatgtgagaggagatggaccctggtattactatgagacaatt

SEQ ID NO: 89013 - DNA, 98 bp, Homo sapiens
ggacttgggcgcttacctgcgacagcgggtagcacaggcctttcgggagggagagaatacccagatctgggttacttagcactttggttggagagaag

SEQ ID NO: 89014 - DNA, 100 bp, Homo sapiens
gtggaatgtttacttgtaaatatgcagattatatttctagggacaaacctatcacatttactcaggccagaggacgtgcgcatttctaggtatggagtgt

SEQ ID NO: 89015 - DNA, 98 bp, Homo sapiens
tcccctacgcgctacacaagtggagctccttttcctccacctaccttcccgagtgggatgtgtgtgggctgaaattccgagctgcggttgtgcatgag

SEQ ID NO: 89016 - DNA, 90 bp, Homo sapiens
gtccttgctgaagagactttccgttacatgagtatgcataagatgactccaccaattaaagatctgctgcctagactcacccccatctta

SEQ ID NO: 89017 - DNA, 122 bp, Homo sapiens
ccccagccacctgtcagtgcgggagatgagggaagatgagaagcccctggtgctggagatgctgaagacctttactacccaggagaccatcacgaatgcagagacggcgaaggagtggtttc

SEQ ID NO: 89018 - DNA, 81 bp, Homo sapiens
gattccaagtaactcttatttgattgaccgactcatcagtcacggggccgacatcctgaagcctgtaatgctcaggcaggg

SEQ ID NO: 89019 - DNA, 82 bp, Homo sapiens
ccaacttcgccaccctgcggtggattgactacggcaaagtggccactcaggacgccaacaaggagagcagcaagacctccaa

SEQ ID NO: 89020 - DNA, 100 bp, Homo sapiens
aatgcccggtcccagagaggagagcgaggaggaagaggacgaggacgacgaggaggaggaggaggaggaaaaaggcaaaatgtcgtgactttgagaatat

SEQ ID NO: 89021 - DNA, 75 bp, Homo sapiens
caagggattgctggctacagcttcagaagaccgaagcgttcgtatctggaaggtcagcccaaggctgccccctcg

SEQ ID NO: 89022 - DNA, 97 bp, Homo sapiens
agtttgagaaacctggatctgcgatctgtttgtggattttaaactgtctacggttcttaacctcatctgttaagttcccatgcctggagaagctaat

SEQ ID NO: 89023 - DNA, 75 bp, Homo sapiens
cggctgaggaccttacattgacattcagaggcagttggtgtcaccagccagcgaccagtgttttgtccttttcat

SEQ ID NO: 89024 - DNA, 100 bp, Homo sapiens
cgtccgcgagatggcttgctccattgtcgaccagaagtttgcagttaacatgtttcgaacattaccaccttcctccaatcctacgggagcggaatttgac

SEQ ID NO: 89025 - DNA, 96 bp, Homo sapiens
ccgggggctcagagatccaagtgcgcgccctggcgggtccggaccaagaaactggcgatggaatatgagaggagccctctggaaagaaaaggacag

SEQ ID NO: 89026 - DNA, 75 bp, Homo sapiens
ggcctcggagcaacgagcgcagcgccgggatggagcctatagaggtgcctcttgaggaaaatagtgaacggactc

SEQ ID NO: 89027 - DNA, 80 bp, Homo sapiens
cgccagatcaacctggagctctacgcctcctacgtttacctgtccatggtcagcagcggactaaagccacaaccccagcc

SEQ ID NO: 89028 - DNA, 107 bp, Homo sapiens
agcgaggagaagaagaagcagctggtcagacaggtgcgggagtatgagttaagaaaaaacaacttctcagatactggaaactttggttttgggatccaggaacacat

SEQ ID NO: 89029 - DNA, 90 bp, Homo sapiens
aaacagctacaactatatgaaattcatggagctcagaaaattgctgatggagtggctttcaaggatatgctgtattcagctcaggaccag

SEQ ID NO: 89030 - DNA, 90 bp, Homo sapiens
gcagcgaggggctcggagaggtgctcggattctcgtagctgtgccgggaaaaatatattcagggggaagagatgtaatagatttcacatt

SEQ ID NO: 89031 - DNA, 82 bp, Homo sapiens
cggcaccatcctgctcggcgtctggtatctgggggatatgagactttctactcggaatatcctgagtgttgcgtggatgtaa

SEQ ID NO: 89032 - DNA, 75 bp, Homo sapiens
actacagctgttcccagcttggttgcacttgagaaaattaatgtggcaggccaagatgctgaattatcagggaca

SEQ ID NO: 89033 - DNA, 74 bp, Homo sapiens
agcggctgccgcgcctgtctgcccgagggaggactcgctcagcagcagcctgaaaacttgctacaagtatctca

SEQ ID NO: 89034 - DNA, 90 bp, Homo sapiens
atctcggttagctctgaggaatgagccagatgaccaagatgctccagatgaacatgagtcgcctccacctgaagatgccccattgtaccc

SEQ ID NO: 89035 - DNA, 90 bp, Homo sapiens
atgacccagacccggacgacccccattgctgagccagcggagctgcttgttatgtcacgcatctgatgaagcgaattcagagaggcccag

SEQ ID NO: 89036 - DNA, 75 bp, Homo sapiens
ttgagccacgtgcatgaaccaaacccacttcgttcaagacaggtgtttaagcctttgacaattattctgccaatg

SEQ ID NO: 89037 - DNA, 90 bp, Homo sapiens
aagctggacgctgtcctggaggaattcaagcgagcggacttggctgccctgcttcccgacctctccggccgcctcctcatcaactctgtc

SEQ ID NO: 89038 - DNA, 90 bp, Homo sapiens
cgaggagagccggagtcggggacccaggagtttcctgtgtccagcgctgccggagccgcctgaggtatctcagcgtttgagtcagccagg

SEQ ID NO: 89039 - DNA, 75 bp, Homo sapiens
gaaagctactgaacttcatgcttgacaatctcgcagctgacctcaagagaatttgcaagacaatagttgaggctg

SEQ ID NO: 89040 - DNA, 50 bp, Homo sapiens
atggcctacccgggatacggaggagggttacagaatgtctgaaggggaca

SEQ ID NO: 89041 - DNA, 82 bp, Homo sapiens
gctgtgctacaaccggggctgcggtcagcgcttcgatcctgagaccaattccgacgctctctccttcctgcttcctccttgc

SEQ ID NO: 89042 - DNA, 101 bp, Homo sapiens
gcaaaaccagaggatgtccatgttcaatcaccactgtccaaattcagaagctcagaacgctggactctccctttgcagtgtttcctgaggttataggcggg

SEQ ID NO: 89043 - DNA, 100 bp, Homo sapiens
gggcgggaggaacatgacatcgcggagcccgtggaacacagagcattcctaatgacagtcctgcccggggtgagggcacccattctgaagaggaaggctt

SEQ ID NO: 89044 - DNA, 100 bp, Homo sapiens
gaagtcatgctcgcttcacggaggcaatagctagccggtctggctctgggagaggagtggacagcagctggttgagatacatccccatctggagacagga

SEQ ID NO: 89045 - DNA, 83 bp, Homo sapiens
cctgatccgggagagtgagagctccccaggggagttctctgtgtctgtgaattacagaatgtctgaaggggacagtgtgggag

SEQ ID NO: 89046 - DNA, 100 bp, Homo sapiens
cagggcgggggcgtccccaggagccggacagatggacgtgcacatcctccggcagcagccctcagtacaacatctgcgagcagatgatccagatccgcga

SEQ ID NO: 89047 - DNA, 100 bp, Homo sapiens
tcccgaaatatttaggcctgaaggaattctcagtcaaagaggtgctggagaatctggtaaaagcaccattgtgaagcagatgaggatcctgcatgttaat

SEQ ID NO: 89048 - DNA, 98 bp, Homo sapiens
tcgaagcgggaagatggctgcagacaagcctgcagagcatcataagggttgtattccatgacagacggctacaatacacagagcatcagcaacttgaa

SEQ ID NO: 89049 - DNA, 74 bp, Homo sapiens
agctcatcaaggacgggaagtcactcataagcgcgctcaagagtactaggttttgacaagcttgcatcatgcgt

SEQ ID NO: 89050 - DNA, 100 bp, Homo sapiens
cttggaacgccgacctgaaaccatctctgagcccaagacctagttatgggtgctacatgtgtgctttcagagcagtagtgtgaggaagcttggagtggga

SEQ ID NO: 89051 - DNA, 83 bp, Homo sapiens
gctgtggctgcagtttgaggctctgaacaaggccttcctggatgctctgcagaaccaggctgaggccagcagcaagatcatcg

SEQ ID NO: 89052 - DNA, 80 bp, Homo sapiens
ttgagacactctgctcagagctgaccaggatgtgaagttcatttccaatccgccctccatggtggcagcggggagcgtgg

SEQ ID NO: 89053 - DNA, 100 bp, Homo sapiens
tagagaccatacagacctaccggtctgtcagtgagatggcttctaacaagcccggaagttatgagatccgacactatggaccagccaagtgggtcagcac

SEQ ID NO: 89054 - DNA, 101 bp, Homo sapiens
gactatgatgttgtaaaagttattggaagaggtgcttttggtgaagtgcagttgcaaagaacagtctgaacttgatcaagatttggatgatgttgaagaag

SEQ ID NO: 89055 - DNA, 100 bp, Homo sapiens
gaggcgtttctgtacatggattatctggaaagatatggatgaagttgaagagaaatctaaagatgttataaactttactgccgagaaactttcagtagat

SEQ ID NO: 89056 - DNA, 100 bp, Homo sapiens
atttgattctcagtgttctacagcgagatgaagaggtccggaaagcagatgagaaaaggattaggtcaccttcttgactcctttgcccgttcagctttat

SEQ ID NO: 89057 - DNA, 50 bp, Homo sapiens
tttccacagtgattgatgctgcctcagtccacctaaacccactgtgttca

SEQ ID NO: 89058 - DNA, 82 bp, Homo sapiens
gcgagcacagagcctcgcctttgccgatccgccgcccgtccacacccgccgccaggccctgggctgcatcttgtacctgctg

SEQ ID NO: 89059 - DNA, 101 bp, Homo sapiens
ggctttttgatactgattcgcgtacacctgttgtttgaaagctctcagcgggacaatgctgacccagcttctttgtgatattggccacagtgaagaaaaac

SEQ ID NO: 89060 - DNA, 75 bp, Homo sapiens
cgtgaccgagagcgtgaccgagagcgcgaatatcgtcatcgttagaagggttgctcctggacgccaccaacaact

SEQ ID NO: 89061 - DNA, 100 bp, Homo sapiens
gtgaagatctatccaagatcattaggacaagtagtggcaccagccgggagaagaccgcatgtgccattaataagagatcattgaagatcctattcaagag

SEQ ID NO: 89062 - DNA, 90 bp, Homo sapiens
gccggttgcaagcagatactggtgcctagagatcaatgtcttattgtgatgagtctcgactgtcaaatcttcttcagaggatcacccggg

SEQ ID NO: 89063 - DNA, 101 bp, Homo sapiens
caatccttctgctttggccttccagagtgctgaaattacagtggcaccactgcaagtggaggtgagaacgagcgtgaggacctggagcaggagtggaagcc

SEQ ID NO: 89064 - DNA, 50 bp, Homo sapiens
agaagacaaagtcaattccatagctcagccggtctatcagtgtcgattta

SEQ ID NO: 89065 - DNA, 100 bp, Homo sapiens
gccctggatcggcctggagccagtgcccaagtacggtttgattgccatgcaatcactgtggaatatcaaggtggcagtgctggtcaagccagagcacgag

SEQ ID NO: 89066 - DNA, 100 bp, Homo sapiens
ggacccggacccaaagtgccatgtctttaatacaccattcgcttttcacccaagatgatttgatgtcttataaaactctgatgaaccatgatggctacac

SEQ ID NO: 89067 - DNA, 82 bp, Homo sapiens
aaaaagccgagtagagaagttatcagctggagaagcgactggaggagtggttggggaggacattgcctggcagtgactggac

SEQ ID NO: 89068 - DNA, 100 bp, Homo sapiens
ttgaacttcccagggaacctcggcctaatgaagaatgtctacagatacttgggaatgcagagaggaagctggcgcgtatggcagccgaggagcacactct

SEQ ID NO: 89069 - DNA, 100 bp, Homo sapiens
cgttcttggagttgctggtgttctatactggaagaggcatgccagaggtagagcagttgttgacctcctgtactggagagacattaagaagactggagtg

SEQ ID NO: 89070 - DNA, 100 bp, Homo sapiens
gcgtcttgccaccgggcctgtcagttgacctaccccttgcacacctaccctaagcattgcagtgtcgagatggctatgaaccctgtgtaaatgaaggaat

SEQ ID NO: 89071 - DNA, 117 bp, Homo sapiens
gaccgcgcgcagggcctgcagcgggagctggacggcgagcgcgagcggcgcgagaaacagcccctgtcaaagggaacaggaagcagtccacggagggtgacgccctagacccacctg

SEQ ID NO: 89072 - DNA, 151 bp, Homo sapiens
ggcggcaatagggaaagtgaggcagctgcaaggagggcggcgggactgcactcgagtgtccagacctgctcgatggtgtggccgacgacgatgccctcgctgaggagcgcatgcggagaggccagaacgccctgccagcccagcctgccgg

SEQ ID NO: 89073 - DNA, 98 bp, Homo sapiens
tacagacgacaaagtagcactggggctatctgatgggttagagtgcctttgagaagaaatcagtggatactggatttgctcctgtcaatgaagtttta

SEQ ID NO: 89074 - DNA, 49 bp, Homo sapiens
cttcccagaaagtccaagctcgtggaagatgagaatgtgcctactgctc

SEQ ID NO: 89075 - DNA, 87 bp, Homo sapiens
ctgagggaacaaacacttctggatgcatcctatttgattttcatcaagcagctgatggtatccaggaacaacagagacaagaacaag

SEQ ID NO: 89076 - DNA, 50 bp, Homo sapiens
caaagagccatacgaccttcggattcccgtcgtaacttaaagggaaattt

SEQ ID NO: 89077 - DNA, 98 bp, Homo sapiens
tgcccgccgctcgcgccgggcccgtggccggctatgtgatgatgatgccatttaaacgacaggctctagtggaatttgaaaacatagatagtgccaaa

SEQ ID NO: 89078 - DNA, 74 bp, Homo sapiens
ccaaggaaaaactggagagcttcatcaaaaatagtgatagctttgataagcagtttgctggatttcctgaagag

SEQ ID NO: 89079 - DNA, 100 bp, Homo sapiens
aagagattcagccagcacactcctcgcgagcaagaactaaaattccagatggcaaactcaatgaatggcagaaaccctggtggtcgaggaggaaatcccc

SEQ ID NO: 89080 - DNA, 82 bp, Homo sapiens
attcatttagagctgcggaacaggacgccctctgatgtcccgctggaggaaggtttaaacaaagcaattcactacttccgta

SEQ ID NO: 89081 - DNA, 100 bp, Homo sapiens
gctgtgcagccgcgaggaggcgcgggaggtgttcgagaacgaccccgagacggtcagtccgagggacaattctgcactggatcctattatccacgggttg

SEQ ID NO: 89082 - DNA, 74 bp, Homo sapiens
agaattcatgattgaagaaatgcagggaaagcaggcaggatgggagagtcgccgatagaaccacctcttccctg

SEQ ID NO: 89083 - DNA, 130 bp, Homo sapiens
tcacacaaagcctgtttggtggtctcttcccacggacgcgcgagacaatgaggagtttttccagaaaggaggagtcaaggaagcccttagtgaacgagaactcttcaatgctgtttcaggcttaaacatc

SEQ ID NO: 89084 - DNA, 100 bp, Homo sapiens
cccgggatgacaaagcctcctatgttgcctggggacacagcaccgtggtgaacccttggaagcaagaggctactatgagcagactggagttggacctctg

SEQ ID NO: 89085 - DNA, 98 bp, Homo sapiens
tcgcggagtcccaatgaaacgggcagccatggccctccacagcccgcagtttgcttcagtgtccccaacagttcctgaattcttgaaaactcctccaa

SEQ ID NO: 89086 - DNA, 74 bp, Homo sapiens
gacactcactgtcccacagggagctcaaagagtgggccagccctgggcgctgcctatggcacagccaagagcgg

SEQ ID NO: 89087 - DNA, 50 bp, Homo sapiens
ctcggctatggagtccccatgttggccgaatacatcaagcaatggtaaca

SEQ ID NO: 89088 - DNA, 98 bp, Homo sapiens
agaacagaaaatcgtcttatagttgagaatttatcctcaagagtcagctggcagaatgcaagttctagccggtttttcctacaaggaatccagttgaa

SEQ ID NO: 89089 - DNA, 90 bp, Homo sapiens
aacagtgccacccaatcttcgaaaactggatccagaactccattgcctgtagtggtggagacacgcccagtggatgatcctactgctccc

SEQ ID NO: 89090 - DNA, 100 bp, Homo sapiens
tgggcggaggccgccaagacgaccaagccaccctggtagaacaagtaaaaagagtaaaagaaattgaagctattgaaagtgattcttttgttcagcagac

SEQ ID NO: 89091 - DNA, 96 bp, Homo sapiens
gtaccctagagttggcatcttgtttaccagaggggagcggattgatttccagagacttatgttacttgaggaagacaccaagaaggcaaagaaaag

SEQ ID NO: 89092 - DNA, 100 bp, Homo sapiens
gagggggcgctgagctgttgggattgatatcagtaaatgccattatttagtggatttggacaccatgagagaaacaccccgggagccaaaatattcatcc

SEQ ID NO: 89093 - DNA, 75 bp, Homo sapiens
ctggaaatgttatgcagctcagcaaggtgaaggaaaatatatgcagatgatgaacattcttaagccaattgcctt

SEQ ID NO: 89094 - DNA, 50 bp, Homo sapiens
gtgtgcgttcagctgtgtcagctaatgagtgcctggaagagctgggatgt

SEQ ID NO: 89095 - DNA, 98 bp, Homo sapiens
gaatggacaccttgaagcagaggagcagcaggaccaggaattgaatgatctggcacgggaccctccagcacagtgttcagcaggtcctgttggagatg

SEQ ID NO: 89096 - DNA, 82 bp, Homo sapiens
ccgggtacctgggctgggatccggagcaagcgggcgagggcagcgccctaagcagctctgtgacacccaggatgaagtttct

SEQ ID NO: 89097 - DNA, 100 bp, Homo sapiens
gtcactccccaggattatgcgcgaaaatattttcagaacctggaagcttatccatggccaccgtcgccaagctccgcgagagctgcagggcccggctgct

SEQ ID NO: 89098 - DNA, 96 bp, Homo sapiens
cctgagacggtgtcccgccgaaagaggtcctgctgtactagccaccaaagcagctgctggtactaagaaatatgatcttagtaaatggaaatatgc

SEQ ID NO: 89099 - DNA, 75 bp, Homo sapiens
agattaaaagagcgaataaagtttatcacgccggggctttatcctgtggataaacgcagagtgaacgagtttggg

SEQ ID NO: 89100 - DNA, 80 bp, Homo sapiens
ttcctgcaagaggaggcaattgacaggaactacgtcccggggaaggtatgcagtggaactgatgaagaccctgatgataa

SEQ ID NO: 89101 - DNA, 75 bp, Homo sapiens
gtttcacgctagaaggtggctcaggggaaggaaagatacaacttccccaacccaaacccgtttgtggaggacgac

SEQ ID NO: 89102 - DNA, 100 bp, Homo sapiens
ccggatccgatcccgctctgcacattccaaagggttcaggataagtttgaggtgctgaattacacaagcattcctatctttctcccggaagtcaccattg

SEQ ID NO: 89103 - DNA, 124 bp, Homo sapiens
cgaggcgggaggatgaagttgattgactatggtctctccggctaccaggccaagtcctgtatctgccatgtctgtggcgtccacctcaacaggctgcattcctgcctctactgtgtcttcttcg

SEQ ID NO: 89104 - DNA, 100 bp, Homo sapiens
gaaccattccaacatcccattcagcagggtgaaccacagcaagttcatggtcacggagaaggcagcctacataggaactgtggctgcaccatctgtcttc

SEQ ID NO: 89105 - DNA, 76 bp, Homo sapiens
cctgggagctggaggaaccgcggctttatgaaggcaaagaacagatggagtttgaagaatccatgagacggctctt

SEQ ID NO: 89106 - DNA, 75 bp, Homo sapiens
ccgcgcgctgcccgaggcgccaaagtggaagatgctttctacaaaggtgaactcaggctgaatgaggaaaaatta

SEQ ID NO: 89107 - DNA, 75 bp, Homo sapiens
agctgctgttgcagcacttgttccccaaacaagtgctcctacattctggatgtacagttacccagcacgtgtacc

SEQ ID NO: 89108 - DNA, 83 bp, Homo sapiens
caaagaactggctaggcaaataagctttaaggcagagaagaggcgatggcggcgatggcatctctcggcgccctggcgctgct

SEQ ID NO: 89109 - DNA, 99 bp, Homo sapiens
gtacgactacttcacacgccagtacggggatgagtccactctggccttccagcaggttacccatgcagttgttactgtaccagcctattttaatgatgc

SEQ ID NO: 89110 - DNA, 100 bp, Homo sapiens
ggcgccgtgtggctgctcagctcgggccacggagaggagcagcccccggagacagcggcacagaggtgcttctgccagtgaacagcagagaatttcaaag

SEQ ID NO: 89111 - DNA, 98 bp, Homo sapiens
accacctaaatatgaaagattcatcaggccaatgctcctggatctcccaggtatcattgaaggtgccaaggatgggaaaggtagaggtcgtcaagtca

SEQ ID NO: 89112 - DNA, 95 bp, Homo sapiens
gtactcatagattgtgtaggcgttggtcttctgatagcaactttaatgtgactcagctagattggaagagaggatgggaagacaatggatgacct

SEQ ID NO: 89113 - DNA, 74 bp, Homo sapiens
attcaaggaaataagtttcacacctaaggaatgggtactgttcaaaaaggaatgccccacaagtgttaccatgg

SEQ ID NO: 89114 - DNA, 90 bp, Homo sapiens
agcctctgcttggcatccccttgctggacagtggctgtggcattgatctggagaacattgtgtactacaaggacgacacccactactttg

SEQ ID NO: 89115 - DNA, 75 bp, Homo sapiens
ggcggcggagggcaccccgggcgggcggcggctgctggcagatgattctggaccagatgaagcctgaggagcctt

SEQ ID NO: 89116 - DNA, 89 bp, Homo sapiens
gctgaagtacatgcttcatagtccttgcgtctctctgtggatccataaagaacccagccaacccgcagagggaggggaggggctgagct

SEQ ID NO: 89117 - DNA, 100 bp, Homo sapiens
ggcaaatatatcttcaaggaaagagaatcatttgatggccgaaatattttaaaggtccattttagcttcctatctcctgaaggaaaagctcaacatcttg

SEQ ID NO: 89118 - DNA, 82 bp, Homo sapiens
cggcgagcgcgagcggcgcgagaaaggctcctcgcacctaccccagcaactcaaattcaccacctcggactcctgcgaccgc

SEQ ID NO: 89119 - DNA, 100 bp, Homo sapiens
gcggagagaccgtccgaggtaattgtctgccacgagtgcacattctgaaaacaggctatgtatgtcaaaaaggatgttcctttgtggcaaaaacatggac

SEQ ID NO: 89120 - DNA, 100 bp, Homo sapiens
ctgggcgatgtgcaagcactttcactgtggcaaaaatttcgggacttgagcattgaagagtacattcgggtttacaagtgaacagcagagaatttcaaag

SEQ ID NO: 89121 - DNA, 96 bp, Homo sapiens
gcgcgaccgcggatccgcagttcccgggccagcctggggcggccggccaggaaccacccgttaaggcagagggtaccagacttcagcgagaactcc

SEQ ID NO: 89122 - DNA, 74 bp, Homo sapiens
cagacttggacaacatgtcccaacattacatcccagttccatcttagcccacatccagaagcaaaagcacttca

SEQ ID NO: 89123 - DNA, 100 bp, Homo sapiens
ctgtagtcacaggaggtgtagagaggaccccgggacatctgaaagccaggaaatggatgaggatgggacagaagaggataacagtcgtgttgaacctgtt

SEQ ID NO: 89124 - DNA, 80 bp, Homo sapiens
tgttgttaaacacaaaccaccctttaaattttcaagggaaggacagtgacaaaaatgctgagtttcttccgtagaacact

SEQ ID NO: 89125 - DNA, 100 bp, Homo sapiens
cagcggctgaggaggggccccagcagcccccgaaggccctatcaggacatggagtatgaaagacgggcgaccattgacgaggtggagacggacgtggtgg

SEQ ID NO: 89126 - DNA, 74 bp, Homo sapiens
cgtgcccatttccccagggcatggagaattatatccagatcgagagacagaagattctgaaagggttcaatgaa

SEQ ID NO: 89127 - DNA, 100 bp, Homo sapiens
cctagcgccgctgggcctgcaggtctctgtcgagcagcggacgccggtctctgttccgcaggatgatggcctgatatgaaggagtcacgcctcccgcctc

SEQ ID NO: 89128 - DNA, 75 bp, Homo sapiens
acaagaagtaggcattgaccccttgtccagttactctaacaagtctggagctttcccatggtttggcatggacat

SEQ ID NO: 89129 - DNA, 116 bp, Homo sapiens
cagagatggcgagcgcccggattggggatgagtatgcggaggacagctctgatgaggaggtgagaagccctaccactgcaactgggacggctgcggctggaagtttgcgcgctcag

SEQ ID NO: 89130 - DNA, 74 bp, Homo sapiens
ctacctggatacacaggtggtgggacagacaggtgtcatccgcagtgtcacgctcgtccgtagattggaatcgc

SEQ ID NO: 89131 - DNA, 78 bp, Homo sapiens
ggacatacagaccaatgtctacatcaagcacccagtgtccctggagcaacaagccctggatgaaaacatggacctctt

SEQ ID NO: 89132 - DNA, 99 bp, Homo sapiens
gcttcttccatgccgtcctggggcaccggaaaatccgccgccaggcgctgtccccgacacggggtttggtgcacctcgatttggaggaagtagggcagg

SEQ ID NO: 89133 - DNA, 75 bp, Homo sapiens
ctggtcaacaagaagaacgctctcatccggaggcaggaccagctgcagctgctgagttcatgatcaagtgttgcc

SEQ ID NO: 89134 - DNA, 100 bp, Homo sapiens
tcgctccagctcggggagggggtggagttcgatgtgctgcctgcctttgatgccctgggcatggagtcctgtggcatccacgaaactaccttcaactcca

SEQ ID NO: 89135 - DNA, 98 bp, Homo sapiens
ggcgcccgcggtctggacaagcgaggaagtttctttaagttggctagagatttactacatccgtccttggaagaggaaaagaaaaaacataaaaagaa

SEQ ID NO: 89136 - DNA, 100 bp, Homo sapiens
caggtgcgaagtgacccgcaggccctttacttcaacgaccccatttggtccaacatgtggtacctgacttcgacccccaccacttctggcagtggagcag

SEQ ID NO: 89137 - DNA, 100 bp, Homo sapiens
ggcagctggagcctcaggcggcagcgcttctagataacgaaggaggcccaacttcattcaataaggagcctgacggatttatcccagacggtagaacaaa

SEQ ID NO: 89138 - DNA, 73 bp, Homo sapiens
tatcagaatacaactgtttccttttctccgagtatgcccagctttttgcagcactgattgcacgaacagcaaa

SEQ ID NO: 89139 - DNA, 138 bp, Homo sapiens
ctctgctgaagtacaggcagtcaaccctaaacagtggactcaacttcaaagacgttctcaaggagaaggcagacctggcgcgcgggcggcccgagcctcggcggcggcggtagcggcggcggcgacgctgacacctcc

SEQ ID NO: 89140 - DNA, 90 bp, Homo sapiens
agcaggcatttatctttctttgagtctaaagaatcccttgaagaaagtattggcaagctatgtgatgatgatgccatttaaacgacaggc

SEQ ID NO: 89141 - DNA, 49 bp, Homo sapiens
tcgtattacacctgaggaggccaaggacccagatgatgtggtaccagtt

SEQ ID NO: 89142 - DNA, 73 bp, Homo sapiens
atcaggtacaacctcgaggagctctaccagatgggatggaggtggataccacaccaacagttgctggacagtt

SEQ ID NO: 89143 - DNA, 100 bp, Homo sapiens
agccgggcaggatggatcaccaccagccggggactgggcgctaccaggtgaatatcctccgaatcctaaatctagagctccaaggatgctggtcattaag

SEQ ID NO: 89144 - DNA, 99 bp, Homo sapiens
ctgtcatataactcctgagaatagtggttcttaactctactccccatccccaggatgtcaacctcagtccctcaaggccatacctggacccaacgggtg

SEQ ID NO: 89145 - DNA, 75 bp, Homo sapiens
ttcatttttacctggtgtcttgaaatccgagcaattcctaaaaagattgggaaaatgaggtacgttagtgttcgc

SEQ ID NO: 89146 - DNA, 95 bp, Homo sapiens
cattaataatatacctctttcatttcctaattgactatgctgaattggtgtttatgattccagatgatggtgacccctctctgcctcagtggctc

SEQ ID NO: 89147 - DNA, 100 bp, Homo sapiens
acagttactttatcccttcatctgtggatgggcagtaatctatgccagcaattatgacaatgttagcagaccatgcagctcgtcagctgcttgatttcag

SEQ ID NO: 89148 - DNA, 73 bp, Homo sapiens
gacccaccaatggaagcagctggcttcactgctcaggatgactatcctccctccagtggagaagctgaaaacg

SEQ ID NO: 89149 - DNA, 88 bp, Homo sapiens
gcgagtgggagcaccaggatctcgggctcggaacgagactgcacggaattgaatgatctggcacgggaccctccagcacagtgttcag

SEQ ID NO: 89150 - DNA, 83 bp, Homo sapiens
ccggagcccggccccggggaactagggagcgtctccggctgcacagcgctcaggtgtggacactgccagcggctgcagccgac

SEQ ID NO: 89151 - DNA, 87 bp, Homo sapiens
gtcaacattcagtatgaagtcatcggtaattactattcgtctgagagaatggctggttacttttcacatagaaccatatagcaatcg

SEQ ID NO: 89152 - DNA, 76 bp, Homo sapiens
agattagcaactctttaaaacagtattgccaagagaaacagccaaggaagtatcgcctggggatgctggaggagag

SEQ ID NO: 89153 - DNA, 100 bp, Homo sapiens
atcgaaagcgttggagaggtgttaccggaacggcggcgacaagggtgttcccgaactagagtggcaaagatgtcaaggaagttaagcttacctactgacc

SEQ ID NO: 89154 - DNA, 50 bp, Homo sapiens
ctggcccagctcaacacctgatttcggatgcactgcgcaactctggtggc

SEQ ID NO: 89155 - DNA, 49 bp, Homo sapiens
tggattcagcaaggaaccttccgattgtagaaggcatgaaacaaaaaat

SEQ ID NO: 89156 - DNA, 75 bp, Homo sapiens
cccgcccggatcgtggcctctcgagagcaaggtatccgcccccagatcatgaacggccccctgcacccccgcccc

SEQ ID NO: 89157 - DNA, 100 bp, Homo sapiens
ccaacaaagattatctatctgtatatctctcttttggctgccagacccaaatactattttgcatggacgctagaattggtgatatgggactaaagcaatt

SEQ ID NO: 89158 - DNA, 51 bp, Homo sapiens
ggcaaaatcgagcgggccattgggcccaccagctctgagcagatcatgaag

SEQ ID NO: 89159 - DNA, 98 bp, Homo sapiens
ggagcccaactgataatccttgaacatggctgaagccgacgtagcttctctgaacagacgcatccagctggttgaggaagagttggatcgtgcccagg

SEQ ID NO: 89160 - DNA, 100 bp, Homo sapiens
acttggcagacaaaaagcagagaataattctttgaggtggtttgtgatgaaaatggttccaagggctatggatttgtacactttgagacgcaggaagcag

SEQ ID NO: 89161 - DNA, 50 bp, Homo sapiens
gaccacgggctcctgtgctagtaccagatgtgtggtttttaacaacagag

SEQ ID NO: 89162 - DNA, 75 bp, Homo sapiens
tggtgcgcccggaggattctgcagcacgtgcaggaggactcggaggagagtgaaattgacatggaagatgatgat

SEQ ID NO: 89163 - DNA, 87 bp, Homo sapiens
gcctacgagcagctgaagcttccgtggtggatgactggattgaatcatataaacaagacagggacatcgcacttctggatttaatca

SEQ ID NO: 89164 - DNA, 74 bp, Homo sapiens
ctccaaaatcttctgttctctgccccaaactaccagttccagcgaggtgcatgtgagggaaccctggcttgttc

SEQ ID NO: 89165 - DNA, 82 bp, Homo sapiens
atcgacatcagtgaagaagatcagccgaggtgctcggtggagtcatggcagtgccctttgtggaagactgggacttggtgca

SEQ ID NO: 89166 - DNA, 90 bp, Homo sapiens
ctatgttcgatttattgaagatgagcttcaaattccaggtgaccaagaatatggcccaggtgaccaaagccctggacaaggccctgagca

SEQ ID NO: 89167 - DNA, 50 bp, Homo sapiens
cagaatgccaatacaagcagttggagcaagatcttgtgcaaaccctgagt

SEQ ID NO: 89168 - DNA, 75 bp, Homo sapiens
aatatgcatagctagagaaggcctctagataaagagtcaactaattcatgaccgaaaatgtattagaaaattgtc

SEQ ID NO: 89169 - DNA, 75 bp, Homo sapiens
aaaggtttcaggtggagcagatcggagagaataaataccgggtaaatcagaagactgaagcacggcatatactca

SEQ ID NO: 89170 - DNA, 100 bp, Homo sapiens
gaacctgaggagagaatggcatgccagtgtatgggtttcgacagaccatgatgaaattgagaatgtggccaaacaatttggtgcacaagttcatcgaaga

SEQ ID NO: 89171 - DNA, 100 bp, Homo sapiens
cttgggcgtcgttgtcaccatcgtctccgccttccagttcggagaggaggactggaatgaaattgaccccattaaaaagaaagaccttcatcacagcaat

SEQ ID NO: 89172 - DNA, 78 bp, Homo sapiens
tatggcaacatcaggtgactgtcccagaagtgaatcgcaggagtgagctgagtcgacagaaacttcatacccaagagc

SEQ ID NO: 89173 - DNA, 75 bp, Homo sapiens
tctactctgatgtcaatcttgagggctagcatcaacaacagcaacttgtgattggcggtgaccggatattcagtt

SEQ ID NO: 89174 - DNA, 82 bp, Homo sapiens
ccggctctggaaaatccgcaagaccatcatgcaggaggctactcacagtcgaactacaactccccggggtccggccagaact

SEQ ID NO: 89175 - DNA, 100 bp, Homo sapiens
tgctgggatttttgagctggtggaagtggttggaaatggcacctatggacaagtctataagccttatgccagcctggaccatcttggaggcagtgtagga

SEQ ID NO: 89176 - DNA, 90 bp, Homo sapiens
gtgcaatgatctcttagctagagtggagccaccacttcgtagtgttttggaacaaaccagaggagatgttaaagtaacccatcttgcagg

SEQ ID NO: 89177 - DNA, 97 bp, Homo sapiens
tatccacactggagaaaaacccctgcagagacgaaaccagacagagggtcaagtttacagatgaccgtgtctgcaagagtcaccttctggactgctg

SEQ ID NO: 89178 - DNA, 100 bp, Homo sapiens
cagcggctccttggccctaggacttcctcatctgccatcccccaagcagcgggccaagttcaagagggtcagaaaggggctccaggacccaaaggtttca

SEQ ID NO: 89179 - DNA, 74 bp, Homo sapiens
ctaacaactgcccagctttgagtgttgtcatgactggatcttacaataatttcttcagaatgtttgacagaaac

SEQ ID NO: 89180 - DNA, 74 bp, Homo sapiens
cgctatcaactgcagagattgatatgaccacacgaggccctctgctgcagctggaggtgctgtgggcaccatgg

SEQ ID NO: 89181 - DNA, 74 bp, Homo sapiens
cgggctgaagcgactgagtccgcgatggagggtggtgacttcacacgccataatggcactggtggcaagtccat

SEQ ID NO: 89182 - DNA, 100 bp, Homo sapiens
gctactcgggacgctgcacctcccgcgccgcacggtggacgaggactcacaccacccggcaagaactgctcactacggctccctgccccagaagtcacac

SEQ ID NO: 89183 - DNA, 51 bp, Homo sapiens
actgttgaactcagctgcctgtagatgatctatctggtggtgaaagcagcc

SEQ ID NO: 89184 - DNA, 50 bp, Homo sapiens
ggccgagcaggctgagcgatacgacgcgtgagtgcatctccatccacgtt

SEQ ID NO: 89185 - DNA, 90 bp, Homo sapiens
ttctctagcatgctctctgaggaggaaaaggaagagttaaaagcagagttagttcagagcagcccgacggccatggaggctgaagagacg

SEQ ID NO: 89186 - DNA, 51 bp, Homo sapiens
catcggacagccagcagcatcccaggtctcagagccactcgaccagctttc

SEQ ID NO: 89187 - DNA, 100 bp, Homo sapiens
accttcgactatgcagagacatgagatggtagccaacccctcagattgagaggatccagaatccagatctctggaatagctaccaggcaaagaaaaaaac

SEQ ID NO: 89188 - DNA, 75 bp, Homo sapiens
gatggactgactactttgcgcaatgggacattagttgcattccgaggactatacaggctccaacccaagttccag

SEQ ID NO: 89189 - DNA, 73 bp, Homo sapiens
gactttatcccaaatgtacactcacacaggccccgcagggtggagcccgtctgctcagggttgcaggcccaga

SEQ ID NO: 89190 - DNA, 142 bp, Homo sapiens
tcctcctgcctcactgccagaagctctttgtgtatgaccttcacgcagtcaagaacgacttccaggaatgaatctgaagtctgctgcagtaaaacacagaaggctttaaaatgttttcttgcataaaattcaaaacttttaa

SEQ ID NO: 89191 - DNA, 98 bp, Homo sapiens
tactttgaaacggtcaccatcaaaattgcaccgaacacacctcagctggctgacattattgcaacaggggccgacagctgcagaaggacctggagagc

SEQ ID NO: 89192 - DNA, 75 bp, Homo sapiens
atctgtctaaataccccatggacacacagacatgcaagttgcagctggaaagctatggagtctcactctgttgcc

SEQ ID NO: 89193 - DNA, 74 bp, Homo sapiens
agaagcattgctagaagcagcaggaaatggaggatcaacactttgtgcccttcaatgtttggaaaagctatatg

SEQ ID NO: 89194 - DNA, 82 bp, Homo sapiens
gaaaagaaatgaaccagtattcttaaattgatttcaagtttgaacaagccgccaccggcacggccaggccagcatggtggac

SEQ ID NO: 89195 - DNA, 50 bp, Homo sapiens
ccttctccgacagcagcacacccgctgtacatccttttgaaatcccagag

SEQ ID NO: 89196 - DNA, 75 bp, Homo sapiens
atgcaacttgtgattttgatttatcacatttctggagcaagtacagtaagaatgattgatgttggctgatattgg

SEQ ID NO: 89197 - DNA, 111 bp, Homo sapiens
ggtggcggggctgaagaagcagttctacaaggcgagccagattggtgctgaagacatggacggcttccaggcagacacggaggaggaggaagaggaggagggcgactgtat

SEQ ID NO: 89198 - DNA, 95 bp, Homo sapiens
gtccagccggaagccctgagggcagctgttcccactggctctgctgaccttgtgccttggtgctgcagggtgcacagctgatcgccgtggcctcc

SEQ ID NO: 89199 - DNA, 100 bp, Homo sapiens
gcacccagccacccagcagagcccgttcatggttgatctccacgagcagttgcggagcaggagctggccaacctggagaagtggaaggagcagaacagag

SEQ ID NO: 89200 - DNA, 101 bp, Homo sapiens
tgttagaagatacagtgactttgatttgcttaacaacagcttacaggaagccagttgagggaagttctccatgaatgtacgtcacaatgatgatgaccgac

SEQ ID NO: 89201 - DNA, 100 bp, Homo sapiens
tgcacttgctacgaaacagaaatttcatgttgcaccctagttttgcggcctccaggtggtggatccaatttttcattaggttttgatgaaccaacagaac

SEQ ID NO: 89202 - DNA, 82 bp, Homo sapiens
gtctgtctgagggagatggtgacaagctcaaggcctgcgagcttcagaatggcagaagatgatccatatttgggaaggcctg

SEQ ID NO: 89203 - DNA, 83 bp, Homo sapiens
ctggttttcaggccacaaatgctttcacagggggatatgagactttctactcggaatatcctgagtgttgcgtggatgtaaaa

SEQ ID NO: 89204 - DNA, 100 bp, Homo sapiens
ggatcagccccctctttggccatctggacatgcatagtggcgcccagtcaggacccatgcacggacttgcctcctcatgcggcagcagcacgaggccgcg

SEQ ID NO: 89205 - DNA, 82 bp, Homo sapiens
cagaggttcaccgccatcattggacccaatggctctgtcaggatggctaaaggtgaccccaagaaaccaaagggcaagatgt

SEQ ID NO: 89206 - DNA, 100 bp, Homo sapiens
gctgtgctcatcgcatctgaggagcagttcaaggttgaaggcattcaaggtggccctcttggatgtgttccgggaagctcatgcgcagtcaatcggcatg

SEQ ID NO: 89207 - DNA, 83 bp, Homo sapiens
cagcaagctgtggacgcttgtggaggaaacccacactaacgagttcatcacctggagccagacaatgcagatcttcgtgaaga

SEQ ID NO: 89208 - DNA, 80 bp, Homo sapiens
ggacatcactttagaccctccacctaattgcaggttgaaatcacaaagattagacacctttttagataggtgttcttcag

SEQ ID NO: 89209 - DNA, 100 bp, Homo sapiens
attggaaaaacatttcttacgccctccctatcctgaagacattagctgagagtctggcaccttttaaaggtctgatcatcaattgtctctctgggcggcc

SEQ ID NO: 89210 - DNA, 75 bp, Homo sapiens
gtatgcatgggcaaactctgagatttcccaggattggcctaatgaagaagttcaacctggagagatggaaaatca

SEQ ID NO: 89211 - DNA, 98 bp, Homo sapiens
aaggtgaaggtcggagtcaacggccccgaggcagagcgcacgcggccccggcaggctcggcccgcagcccccatggagggagccgtgcagctgctgag

SEQ ID NO: 89212 - DNA, 95 bp, Homo sapiens
gcgacgcagaagacgggtgatttctgcatttccatctgaggggaggcgccacctgctgcagaagtttcctcatcttttgtgatcctgtgtgtgtg

SEQ ID NO: 89213 - DNA, 100 bp, Homo sapiens
aagggcgacagaggtttgcctggcagagatggtgttgcaggagtgccagtttcagaaggatcccacttggtcagagactggagaccgttatctgttgaaa

SEQ ID NO: 89214 - DNA, 75 bp, Homo sapiens
ttagaagtggtgatgcaagaagtttctaggaaaggccggacaccagatgaaggatttgggggcagagcacttggc

SEQ ID NO: 89215 - DNA, 100 bp, Homo sapiens
aaatgtcagaagatgaagaagatgatagcagtggagaagaggatctcacttgcttatctgaagaagattgtccaggctcatattgggaatgcttatgagg

SEQ ID NO: 89216 - DNA, 98 bp, Homo sapiens
gaatatgaagagacacagtatggtagccacacccccagttcaggacctcaaggggctcggctatgagaaggggaagcctgtgggtctagtgggcgtca

SEQ ID NO: 89217 - DNA, 75 bp, Homo sapiens
acccctcgcctggctcggacccacggagccggcagcccagcactccggcacccagattggctgaaaacttctgtg

SEQ ID NO: 89218 - DNA, 100 bp, Homo sapiens
cctgaaccctgcacagagggctttatacagggctgtgatgttggagaactacaggaacctggagtttgtgggattgatttccaaaaactcctgttacatg

SEQ ID NO: 89219 - DNA, 98 bp, Homo sapiens
tgtgagtctctttcctgtttacctccagtgtcccttcttccacatgaaaaggataagggctctctcctccacgtcccatggcgaggcggtggccagct

SEQ ID NO: 89220 - DNA, 83 bp, Homo sapiens
aaagagaagaggagctgcactgactctgcagccaggacgaagtccaggaaggccagggtgagaaggactggcagaaatacgag

SEQ ID NO: 89221 - DNA, 100 bp, Homo sapiens
agagacagaagcagatggattcgtccttttaggtctcaccaacggctttgggggtgcgaggagcgagcaggagccgggcggcggcctggggaggaaggcc

SEQ ID NO: 89222 - DNA, 100 bp, Homo sapiens
accccggcccggaggaggctcatgcgggatttcaagcggaggatttgacagctaaggatattgaagaaattattgatgagctcaaggctggcaaaatccc

SEQ ID NO: 89223 - DNA, 82 bp, Homo sapiens
cgggaagatggcggaacaggctaccaagtccgtgctgtttgtgtgtctgggtcaaaatgcagatcttcgtgaaaacccttac

SEQ ID NO: 89224 - DNA, 100 bp, Homo sapiens
gtagtctgcttccggaagcacaaaggaaaagaattccatggcaacatcattaaagtgtcctttgccactagaagacctgaattcatgagaggaggtggaa

SEQ ID NO: 89225 - DNA, 83 bp, Homo sapiens
ctcctgaatagctgggattgcagctgtgagttctttggaattgtgaacattcttttgaaatatggagcccagataaatgaact

SEQ ID NO: 89226 - DNA, 74 bp, Homo sapiens
tccccgagatgcagctgatgcagtccgagagctagatggaagaccatgtctgcaaaggagaagtcgaagtttga

SEQ ID NO: 89227 - DNA, 100 bp, Homo sapiens
ttcaaaaaggataaggagatcatagcagagtacgatactcaggtcaaaggatgttggttcctgcaaacaagaactgaccctatcacctctgcctcacagt

SEQ ID NO: 89228 - DNA, 50 bp, Homo sapiens
tagcagttcacaaaactttacacatgcagaatgcactgaaggcccaattg

SEQ ID NO: 89229 - DNA, 100 bp, Homo sapiens
attctgaagacagcgccccagcatttgccatcttcaagtttgttcagggacggccgttgtcctacaagacattcttaatatgggttttgattagcatcta

SEQ ID NO: 89230 - DNA, 83 bp, Homo sapiens
attgcagaaggaataaccttcatcaagttttatgctccatgttcctcagcactttgtttgcccccttaaactttgtcatggag

SEQ ID NO: 89231 - DNA, 83 bp, Homo sapiens
ctgcaggaactggtgaacgcaggatgcgaccagatgtgttcagagcaacattgttttgttgacacaagcatttagaagaaagt

SEQ ID NO: 89232 - DNA, 51 bp, Homo sapiens
caacagttcaccaccattaccgaatttcgctaaggagtttgtgatcagtga

SEQ ID NO: 89233 - DNA, 82 bp, Homo sapiens
cagcatccttgatgataaaccagtaaatgctctaagggatggaaataagctggcacagatggaagaggctccacttttccca

SEQ ID NO: 89234 - DNA, 83 bp, Homo sapiens
ccggagccgggccggcgtggcccgagttccggtgagcggacggcggcgcgcgcagtttaaggaagaaatctctaaacgtttta

SEQ ID NO: 89235 - DNA, 100 bp, Homo sapiens
aggtgaagcccaacgatcagcacttcagtcggaaagttggaacctctgacaagaccaagtactaccttcaaggtttagctgacagatttgaagaatatcc

SEQ ID NO: 89236 - DNA, 100 bp, Homo sapiens
aagaagggagacctactaaatgcccattatgacggctacctggctaaagacggctcgaaattctactgcagtgtctttggtgcaacactaacaaggcttg

SEQ ID NO: 89237 - DNA, 82 bp, Homo sapiens
caaataccaagcaaaatagtgtgcctccttcacagacccaagaagatgaaaggattgttcttgttgacaacaaatgtaagtg

SEQ ID NO: 89238 - DNA, 83 bp, Homo sapiens
gtgaagctcaccgagacggcgatccgggcgctcgagacttaccagagccacaagggggtctgccacatgtagaaagatatctt

SEQ ID NO: 89239 - DNA, 73 bp, Homo sapiens
aagaacaagatgatcaagatggctcttcatggaaatgcattgtcaggagaatgatccatctgtgagactgaaa

SEQ ID NO: 89240 - DNA, 96 bp, Homo sapiens
acaaagtgagaatttacagagatcatcctcttcagaaacaacatctgaagagctgccatgtctggggcatcttcctcagaacagaacaacaacagc

SEQ ID NO: 89241 - DNA, 100 bp, Homo sapiens
cgccagacccaaggcccccgagtgagcgcgggcgccgaggtttgctgtggactttcagacgggcttcagtggaaacgacattgccttccacttcaaccct

SEQ ID NO: 89242 - DNA, 102 bp, Homo sapiens
gagccgctctgtcagcacctgggtttggtgaagccaggcacttatcccgaggtgcctcctgagaaggatgaccggaaagaagggatgaccgcgtttgtggaa

SEQ ID NO: 89243 - DNA, 87 bp, Homo sapiens
ggaaatcgatgatgcattgtatagatattgatgatgttaagaagttcaaaccgggttacctggaagctactcttaattggtttagat

SEQ ID NO: 89244 - DNA, 101 bp, Homo sapiens
acaaagaactcaagaaaatcttcgaagacttttcagaaatgagtggcttatactctcctgtcagtgaggatagcacagtgcctcaatttgaagctccttct

SEQ ID NO: 89245 - DNA, 98 bp, Homo sapiens
ggaaggcgcgggcaggagcctggcgaggatgcaccttcccctgccttggaaaggtgctggagaatctggtaaaagcaccattgtgaagcagatgagga

SEQ ID NO: 89246 - DNA, 75 bp, Homo sapiens
gagacaggaggcagcagacggacatccaggtgttgctggaagaagccaaggatttgctctctgactggctggatt

SEQ ID NO: 89247 - DNA, 75 bp, Homo sapiens
tagggtcctttatatagaagggagagtagttggagtgcctcaagcttattgcctctcaaaaatttacagacaaac

SEQ ID NO: 89248 - DNA, 100 bp, Homo sapiens
atccggaggcgccagctcaaccttggtgcttcccgtgctgctgttgatgctggctttgttcccaatgacatgcaagttggacagacgggaaaaatagtag

SEQ ID NO: 89249 - DNA, 85 bp, Homo sapiens
gatcagtattttcatcgacaaagtgtgagagcattgtggaggaatacgaggatgaactcattgaattcttttcccgagaggctga

SEQ ID NO: 89250 - DNA, 74 bp, Homo sapiens
ggtggcaggggctgactgagagcgtctgcttgatgttgctaaatttgcataagaagagttggatggaaggtttg

SEQ ID NO: 89251 - DNA, 100 bp, Homo sapiens
cccgactgtaagcaatctacgaagaccgaggaaaagctgcggactgtatgaaaacaagggagaggctgacttcgtggaatctttgctgcagctcttcagg

SEQ ID NO: 89252 - DNA, 100 bp, Homo sapiens
cgtctcctctgccaaaacccagggctggaagatgtggcagccggccacggagcgcctgcaggataatttcttgagaggagataactcccgtaaagttcag

SEQ ID NO: 89253 - DNA, 100 bp, Homo sapiens
ctcaacgagtctgaagtgaaccgcggcgacaagtacatcgccaagtttcagggagaagacacggtcgtgatcgcggtcgatggccaggtggtcttcataa

SEQ ID NO: 89254 - DNA, 75 bp, Homo sapiens
acaagactggggctgctcccatcattgatgtggtgcgatcggcttccaactgaatatgagaggaacgggagatat

SEQ ID NO: 89255 - DNA, 100 bp, Homo sapiens
gaaatcctaatgacagtctccaaattcgcctccatctgtaccatggcaacatcagatgctgacctgaaagaacatatggttggaatcatattcagcagga

SEQ ID NO: 89256 - DNA, 74 bp, Homo sapiens
aaattctgaactcaggacttggcaactgaaagagaagatagtgctaacgcacaatcgcttaaaatcactaatga

SEQ ID NO: 89257 - DNA, 75 bp, Homo sapiens
cgtccaaatagtatcaggattccaagctaaacctattcgtcccgggcaacatccagcagcttctccaactcaccc

SEQ ID NO: 89258 - DNA, 82 bp, Homo sapiens
ggaattctaatttgaaccatgtttggattgaagccgcctctgtattacttaccaggtgctgccttcacctgcctggagactg

SEQ ID NO: 89259 - DNA, 87 bp, Homo sapiens
ccctcggcctcggagcaacgagcgcagcgccggtttggaaggcgctttgagtccccgctgctgtggcagagcgccatcatgatcctg

SEQ ID NO: 89260 - DNA, 100 bp, Homo sapiens
ttcatagtatgctgagtagctcatggattgagattggcacttctctgtttgatgaagagggagccaagattgtcaaagacctaatgtccaaagctgagaa

SEQ ID NO: 89261 - DNA, 75 bp, Homo sapiens
tgtaaccacagatcttcctcctcagttagcaaatcttacagttggtttctacgataaagacagttcagggtggag

SEQ ID NO: 89262 - DNA, 75 bp, Homo sapiens
gatgaacaagtgctggttctctttgaacagatgctgggtggctgtgccagtgtcattgtgtcattaactactcag

SEQ ID NO: 89263 - DNA, 102 bp, Homo sapiens
caggaatggagacgccattggatgttttgtccagggcagcatctctggtgcatgctgatgacgaaaaacgtttaagaattgtttaagctgcatcaatggagc

SEQ ID NO: 89264 - DNA, 98 bp, Homo sapiens
gggagacgaccatcatcatcactgtcatggacaaggacaagctcagccgcaatgacgtcatcggcaagagcccgtgttctggtactacgtgaaggagg

SEQ ID NO: 89265 - DNA, 48 bp, Homo sapiens
tggcgcagaggggcagtaaacagtatgaccctcaatttggcgatgcct

SEQ ID NO: 89266 - DNA, 80 bp, Homo sapiens
cacgccatgaaggcctcgggcacggtaaagtcagtgataaatcttttgtttgctgcatatactggagatgtgtctgcact

SEQ ID NO: 89267 - DNA, 75 bp, Homo sapiens
atgggcagacggattcatttagagctgcggaacaggacgccctctgatgctgcctgctgtttcccggggagatca

SEQ ID NO: 89268 - DNA, 87 bp, Homo sapiens
tgacgtgaactcattttatctgccacgacccagaaggcctggaagaaacgctggtttatcctgcggagtggccggatgagcggtgac

SEQ ID NO: 89269 - DNA, 80 bp, Homo sapiens
cttttcagaagcggctgcgcacggactgctggagatggtggagtccgtcagtctttggtagaagagtttagaaagacact

SEQ ID NO: 89270 - DNA, 124 bp, Homo sapiens
ggctctagaagtagatcctccagtagtgattcaatcagcagcagcagtagtaccagcagtgacaggcatacttccgacagggtgttgccctccagtaccttggacgtcatgccgatgccctggc

SEQ ID NO: 89271 - DNA, 87 bp, Homo sapiens
gaatctgagcaccaactgcacctcaccagtgatggaatggggagaagatattaaagcagtttcaaaagatgaagcagtgatgttggt

SEQ ID NO: 89272 - DNA, 82 bp, Homo sapiens
ctgaacctaagccacaacccgaggtatgatctcgtgaaatcttgagagaaactgaatgacgaatgaaactattgttcctgtt

SEQ ID NO: 89273 - DNA, 73 bp, Homo sapiens
aacccactgtgctgccacaccctccagtagttaatacactgttaaatgtgaaattaagtgagacagaaaatgg

SEQ ID NO: 89274 - DNA, 95 bp, Homo sapiens
cgggcggaggccggcccccgagagccgccgacatgaagaaagacgtgcggatcctgctggtgggagaacatggcccactgcgtgaccttggttca

SEQ ID NO: 89275 - DNA, 89 bp, Homo sapiens
gctacatcaggtgctcatcctgagggcgactggcctccactttagacacactgataatgtgattcagtggttgaatgccatggatgaga

SEQ ID NO: 89276 - DNA, 100 bp, Homo sapiens
tccacaacagggatatccaccccagcagcagcagtacccagggcagcaaggttacccaggacagcagcagggctacggatgagaacaagttgagcagtgc

SEQ ID NO: 89277 - DNA, 98 bp, Homo sapiens
ggtactttagcaggacggccatcgagatcgtggtgcagatggccgcggccaacgggatcatgtttcactccttcggcaacaagcaagggccccagcac

SEQ ID NO: 89278 - DNA, 101 bp, Homo sapiens
ggaaaagattttgcatctagaggaattgaaaacatctttccaggaacagcgtgaggaggacagaagcacccaacaggactgctcaagccacctgcgaacac

SEQ ID NO: 89279 - DNA, 100 bp, Homo sapiens
tctacgggttcagttgataaaaataagaacaaagtgacaccactgcagagacatatctgaagagatggattaagaatgctttggattaaggattgtggag

SEQ ID NO: 89280 - DNA, 83 bp, Homo sapiens
catgatgcaatcttcaggaaagtaagagggtcaaaatgtgggtacagctcctgattcccaggatagaagatggaaacaacttt

SEQ ID NO: 89281 - DNA, 96 bp, Homo sapiens
tggcggagctaacggactccgcgcgggaggagccgaggaaggtctgcttcacctacgacctgttcctgaacctggaaggcaacccgcccgtgaacc

SEQ ID NO: 89282 - DNA, 87 bp, Homo sapiens
ctggaggagaggccggacggcgcgggcgccggcgaggagagcccgcggctgcagtctgcgctcctcagaccaccggcaggtgaacag

SEQ ID NO: 89283 - DNA, 100 bp, Homo sapiens
acaaatttgatttccggagtcagtcattttactgtcaagacatttcttcggcattctgcaacagctttctaaaaccaatttttccaacaacaacgatttc

SEQ ID NO: 89284 - DNA, 100 bp, Homo sapiens
gtgtgtaagatgctgtaccagctcaaggttgtcaacccccaggagtattccagcaactgcaccgagcccttgaagaaagctgttaggatgatgggagcac

SEQ ID NO: 89285 - DNA, 97 bp, Homo sapiens
cgactgcaactgctggattgctgcaaggctgagggacgagaacgaggattcatgcttaacaagtctagcatcatcatcacttaaacaaattcttgga

SEQ ID NO: 89286 - DNA, 97 bp, Homo sapiens
ggagctgaacgtggacagcctcatcacccggctgctggaggctaaaccaggtggacaggtgaaatgtcagtatatctctgctgtggataaagttata

SEQ ID NO: 89287 - DNA, 100 bp, Homo sapiens
actcagggatcaaagagcaaacagattcagtggcctgcattgacctcctcctcagagaaagcactggccaaccagttcctggcccctggccgtgtgccaa

SEQ ID NO: 89288 - DNA, 50 bp, Homo sapiens
gtgtatgataccttacttaatactacaaagggtggaggatatgaaagtga

SEQ ID NO: 89289 - DNA, 90 bp, Homo sapiens
cagcaagtttaaaaatttggaatgcaaattacttcctactgtgtacagtgccctgggcctgagggatgcctgccgctccctgccgcagtc

SEQ ID NO: 89290 - DNA, 98 bp, Homo sapiens
tccttgaaagaagaagatggagaagaaatagttacctatgatcgagatacaactcgtcaacgaatcaaattcagtgatgacagagtatgcaagagtca

SEQ ID NO: 89291 - DNA, 75 bp, Homo sapiens
cctcggtgctgtggtgcagagctagttcctctccagctcagccgcgtagatgtggttgccctgcttggctttcct

SEQ ID NO: 89292 - DNA, 98 bp, Homo sapiens
ctgtaatggcggagcgtggcggggacgggggcgagagtgaacgattcaacccgggggagctcagaaatatcgacagtatatggcaggacttctggctc

SEQ ID NO: 89293 - DNA, 82 bp, Homo sapiens
aaggagcacggcctgaagccggtggtgggcgaagtgtacgatcaagggtcactcagctgccgcaaggagcaaggcaagttct

SEQ ID NO: 89294 - DNA, 75 bp, Homo sapiens
agtttgagttgctcaaggttcttggtcaggggtcatttggaaagatgatgaataaggtatttggaggtactgtgc

SEQ ID NO: 89295 - DNA, 90 bp, Homo sapiens
agcggctgctggaaacgcaagacggtgccgagaagcagctgcgaggagctctttgttcaatgcctagccacctattcctacagacacggc

SEQ ID NO: 89296 - DNA, 80 bp, Homo sapiens
gcctttctggacacagaagtatttgtgacagctccagggcccacaacggcagtgtcctacatgtcggtgaaatgtgtgga

SEQ ID NO: 89297 - DNA, 75 bp, Homo sapiens
attccaagtaactcttatttggtcaattggcatgattttgctttttttgatcctgtaatgtatgagagtttgcgg

SEQ ID NO: 89298 - DNA, 97 bp, Homo sapiens
cggttcttcaatgaagatggagttatcagaccgtacaggttgagggatgggactggaaatcaaatgttacagatatgtcacagatctaagcagcagg

SEQ ID NO: 89299 - DNA, 75 bp, Homo sapiens
acaaaatgtggccacagcttttggcatgtgggcacattccatgacagtacaggattatcaggatctcatagaccg

SEQ ID NO: 89300 - DNA, 100 bp, Homo sapiens
ctggcactgaagaggagggagaggctctctcttccccccagcctgccagcagggccccctcagaagaaggagagtatctagtcctcagactattgtggag

SEQ ID NO: 89301 - DNA, 75 bp, Homo sapiens
caaccttcgatctcctgacgatcagatatgtacagcttgggtgtggtcctgctagagctctttcagccgtttgga

SEQ ID NO: 89302 - DNA, 75 bp, Homo sapiens
cggtgaagcgattcctgcaggcgttggttcccctctttgacctggcggcatcactgtccacatctccctaccaag

SEQ ID NO: 89303 - DNA, 97 bp, Homo sapiens
cagccccaggacctctgcggaacaagaacgattccctgatgaggcagatgcgggaattggaggaccgatttgccagtgaggccagtggctaccagga

SEQ ID NO: 89304 - DNA, 74 bp, Homo sapiens
aggacctgggtcaactggaatacaagtttcaggtgcagtagacattgttgcaatcatgatcggcaatctgaaag

SEQ ID NO: 89305 - DNA, 88 bp, Homo sapiens
aagcaggaagctggaaaggaaggtactgcaccatctgaaaatggtgaaactaaagctgaagaggccaacaatggcatctgttttctgc

SEQ ID NO: 89306 - DNA, 73 bp, Homo sapiens
ccacagactgcgattcacaaccgacgtacagctagcccaccttgggacaccttgactccaagcccagcagtaa

SEQ ID NO: 89307 - DNA, 100 bp, Homo sapiens
ggagtttctgagttgagtttttctcccaagccattcacagctattacagtgaccacggatcaagatggtgaccaagaatatggcccaggtgaccaaagcc

SEQ ID NO: 89308 - DNA, 51 bp, Homo sapiens
cagccatcaaagttatggatgtcactgaggccacgtgctgctgggtctcag

SEQ ID NO: 89309 - DNA, 100 bp, Homo sapiens
agacttttggggggaaactaggtcgatggtcggcggcgcccggatgggcagctgaggatcaactcactatcctgaaggtccattctcccaagaagagggg

SEQ ID NO: 89310 - DNA, 101 bp, Homo sapiens
aagactgcagataagaagctccttttggaacaagcagcaaatgaggtatttgatgagagggcagctaactttgaaaaccattcaggaaagcttggtgctac

SEQ ID NO: 89311 - DNA, 100 bp, Homo sapiens
ccagaggctggagctgcgggagagctttgaaggtacaatcgtgtgggagagccaagacctccacggccttgtgtcaagaaatctccacaaagtgacagtg

SEQ ID NO: 89312 - DNA, 80 bp, Homo sapiens
tgtcttgtttgctgctagaacccaggatcgctggaaaatcacctagcagcaggagccttcacgtaaatgggtccagtcat

SEQ ID NO: 89313 - DNA, 98 bp, Homo sapiens
taacgagaggccactcatgcagactgagcttcatcagcttgttcctgaggctgagccggaggggaaggtgtggctcattgactttaatccatttggtg

SEQ ID NO: 89314 - DNA, 100 bp, Homo sapiens
gggacctgaagaagatgaacaagcgccagctcatgatggagcagtccaagaagtcctccctcatggtggcccgcagtattctcaacaacaagctcatcag

SEQ ID NO: 89315 - DNA, 101 bp, Homo sapiens
agggtcccggacggcagccacagcgtccgactcgactcggagggtttctgtgagagacaaattgcttgttaaaggagatgtaatcagtgtagagaaaaccg

SEQ ID NO: 89316 - DNA, 81 bp, Homo sapiens
gtgatccagaagtccagagctgaggactgcctgtttgcaggatggccgggctggtgtggttgcaaatgatgccggtgaccg

SEQ ID NO: 89317 - DNA, 100 bp, Homo sapiens
cctggtgcacccccagtgggtgctcacagctgcccattgcctaaagaaggacacggccaacacggtgaaggaaaagttcgggaggaagctttatgaatcc

SEQ ID NO: 89318 - DNA, 74 bp, Homo sapiens
gaaaccagccgaacttcagggtttccaccgttcgttcaagaaagaaatgaccgcccggatgtgccactgagagc

SEQ ID NO: 89319 - DNA, 99 bp, Homo sapiens
gatatgcagaacaaatgaatgtaagaatgcctttcagattatggtgacaagctgaacatggagctgagtgagaaatacaagctggacaaagagagctac

SEQ ID NO: 89320 - DNA, 50 bp, Homo sapiens
gagacgccggcctgcgccctgttttaaaatcaaagatgggaaaatcggag

SEQ ID NO: 89321 - DNA, 94 bp, Homo sapiens
cgtggccttagctgtgctcgcgctactctctctttctggcctggaggctatccagccacatggattaattgatgtatgttgagtttatggagct

SEQ ID NO: 89322 - DNA, 100 bp, Homo sapiens
cgggacagggatgtctacctggtaatagaggacttgaagcagaaagcaagtgaatacgagtcagaagggaagctatgcgaaattatttaaaagagcgagg

SEQ ID NO: 89323 - DNA, 82 bp, Homo sapiens
cgagcctccggacagacgccagagcgaggagggcgctacgcgatgatgataattccgaagaaggcttccacactattcattc

SEQ ID NO: 89324 - DNA, 75 bp, Homo sapiens
ttctcctctaccagatgactataattggtgacagattgactgggatcccctcgcacatcctcaacagctccccat

SEQ ID NO: 89325 - DNA, 103 bp, Homo sapiens
gcgagtttccgatttaaagctgagctgcgaggaaaatggcggcgggagaagtcacctgcaccggtgcccgtgacgtacgagctgcccacactgtataggacgg

SEQ ID NO: 89326 - DNA, 51 bp, Homo sapiens
ctcttaagagcgcggccggaaagcagaggtatgaaggttattgaaaaccgg

SEQ ID NO: 89327 - DNA, 92 bp, Homo sapiens
ctgggggattcgcagggaggatgtcgggacaccccggaagctgggaaatggctgagtcatcactagagagtgggaagggcagcagcagcaga

SEQ ID NO: 89328 - DNA, 87 bp, Homo sapiens
gacggctggcatcatcattgttggagatgagatccttaagtggatcctctatccttcagagactctggaacccctgtggtcttctct

SEQ ID NO: 89329 - DNA, 101 bp, Homo sapiens
ctgaagaagagcaaaaggcggagctgtagccactgtagcagcaaggatgactcactggttgtgtggaaggaagtcgatttgacccggctgtctgagaagga

SEQ ID NO: 89330 - DNA, 104 bp, Homo sapiens
attgtagcctcaaactcccaggctcaagcagtcctaccatgtcagccttcccagtagctgggaccacagcctggagatgcccaaagatgagctgcccaaccata

SEQ ID NO: 89331 - DNA, 97 bp, Homo sapiens
tttggaataaaaagattcccaggatgtgagcaacacgggaccgtgggaatgtaagacggacttagatattgcatacaaatttggaaaaactgtggtg

SEQ ID NO: 89332 - DNA, 98 bp, Homo sapiens
gtagctgtctgggatttgagatcctatcttccctgcaaattaccaggttgcatcttcactgataggaatacatatgccgatagacaagattccattaa

SEQ ID NO: 89333 - DNA, 75 bp, Homo sapiens
gcgggcggcgcggcccagctcgttccaggtgaagaccaagccctcctgcgggggctggagagccgtgagcctgct

SEQ ID NO: 89334 - DNA, 82 bp, Homo sapiens
cctcagtttaaccggatggaagaaatggccgtggtggtggaggcagtggaggttactatgggcaaggcggcatgagtggagg

SEQ ID NO: 89335 - DNA, 90 bp, Homo sapiens
agccactctgcatctttccaacattcccctcttcccgagaagtttgtggtaaaaggtgttgtggatcgtttttcagaagagtttgtggag

SEQ ID NO: 89336 - DNA, 100 bp, Homo sapiens
cagaagtccagagctgaggactgcctgtttgcagtgctgggagctattaataataggagaggcctcgtggtgatgaagaaatgaggggagagtttcacag

SEQ ID NO: 89337 - DNA, 75 bp, Homo sapiens
ggaacagcctatgtgggcttccacggagtgaaacccagggccccaggaaacctgacagttcacaccaatgtctcc

SEQ ID NO: 89338 - DNA, 90 bp, Homo sapiens
ctccctttaatccagtgactgtcaggtcgatcatatgtgactctcctattccatctgtttcttcgggatcatcttcacctctttcagcca

SEQ ID NO: 89339 - DNA, 75 bp, Homo sapiens
actgtggccttctgcgacgcgcagtccacgcaggagatccatgagaaggtacatcgagtacatgtgtgacatggt

SEQ ID NO: 89340 - DNA, 75 bp, Homo sapiens
cgcccagatcttcttcaccaaaaatgggaagcggaacttccgagaagtcaccaccaatcaagagctgattcagaa

SEQ ID NO: 89341 - DNA, 100 bp, Homo sapiens
cagtcagaagaaggctgctattgaaagagagtatgcacagatatgctgtgatagcatttggatgtgccagctgtccaaaattaacttgtgggcgagaggg

SEQ ID NO: 89342 - DNA, 100 bp, Homo sapiens
ctacagaaccgtcccaaaatatggcaaagaaacctattctgaggtctttgggaggagccagtcgctacctggagcagactctctcctcgccaagcccatt

SEQ ID NO: 89343 - DNA, 74 bp, Homo sapiens
cttagcgcacccatcccaccttcccgcaccctgggaccgctctgtggctgtgggctgctgggagtgggcatctg

SEQ ID NO: 89344 - DNA, 83 bp, Homo sapiens
gcttggcaaagactgaagggaagccatggtgaatgcacagcaacttctgatcagtttgacaacttagaaaaacacacacagtg

SEQ ID NO: 89345 - DNA, 82 bp, Homo sapiens
agaaagagtggatttcagcctgcacggatggtcttgaaacacaaatggtttttggatttgtactgtgttcgcagtgacctgg

SEQ ID NO: 89346 - DNA, 75 bp, Homo sapiens
gtgattctacatctcaagctcatattttgaagtgtttacgggaataatgtatttgtggccttggacatgaggcag

SEQ ID NO: 89347 - DNA, 50 bp, Homo sapiens
ctgaactactcagtaaggcagcagccagaggagacacaccttgaagaaac

SEQ ID NO: 89348 - DNA, 74 bp, Homo sapiens
ttggattctgttgcctgggtaccaccagagggaaagctggggcgagagacaagagagacacctccaacttcgac

SEQ ID NO: 89349 - DNA, 100 bp, Homo sapiens
gacgagaagcctgaaaagtcgcagcgagctggagccgccggaggcggcttcaatgatccatcctaaagaggtgccccctgaggccatcttgctggcagtc

SEQ ID NO: 89350 - DNA, 83 bp, Homo sapiens
aaagcagtacctgaaacagaagatgtgcaggagagaagacacggttcaatgtgtagaccttctccctctccagtgtctccagc

SEQ ID NO: 89351 - DNA, 101 bp, Homo sapiens
gtaaaatgcaaagtataaatgaagacttaaaagatatattacatgctgcaaagcagatagcttccattgaagattgacatcattaaacatccaaatgaaac

SEQ ID NO: 89352 - DNA, 100 bp, Homo sapiens
gcacggcgtcacctccttctgccccaccctggtcacttccccaccggaggtttatcacaaggctggctacagcaaacatcattcaagatgtccagcaaag

SEQ ID NO: 89353 - DNA, 80 bp, Homo sapiens
ctaatatttaagaaagaagatgttaactttcagccgttggacataccagatggtcgaagagctccacttcctgctcatta

SEQ ID NO: 89354 - DNA, 100 bp, Homo sapiens
tgaggaggaggcatctacccctggccttgacgctatctcccatcacctctgctatccagacaggactcaccgaggtgttggagcgggccggagagaagta

SEQ ID NO: 89355 - DNA, 75 bp, Homo sapiens
gtgcgcacagacggcgagggcgaggatccggagtgtctgggagaaggctggtggtccaggccgtggtgcctgcca

SEQ ID NO: 89356 - DNA, 75 bp, Homo sapiens
ttgaattgctcaacagcatcttggaagtccttagctaccaggatgcggaaattgacaatggcccttcagctatgc

SEQ ID NO: 89357 - DNA, 90 bp, Homo sapiens
gcacccaggagaaggagcagatcaagaccctcaacaacaagtttgcctccttcatagacaaggacctgaaggagaagaaggagaaggtgg

SEQ ID NO: 89358 - DNA, 87 bp, Homo sapiens
tccctggcacgggctgtctgattctccttcgctgtggcgggaagatggccggatttgaaggcagaagctcctcctggggtagagaca

SEQ ID NO: 89359 - DNA, 51 bp, Homo sapiens
taaagaacttcttcccaaaatggctgtccctttccccccaacacatcgctt

SEQ ID NO: 89360 - DNA, 96 bp, Homo sapiens
ctggagctggccttcaaggtggctgcaggagagctcaagtttcagaaagtgctttctctctgtggacatgaggattggattagaggagtggaatgg

SEQ ID NO: 89361 - DNA, 75 bp, Homo sapiens
tcagctggaggaggccagctctacaggcgactgggactcttcaattaatctgacatttcacaaatccaaaattgc

SEQ ID NO: 89362 - DNA, 100 bp, Homo sapiens
gacatgagatggtagccaaacccccaggaactgtggctgcaccatctgtcttcatcttcccgccatctgatgagcagttgaaatctggaactgcctctgt

SEQ ID NO: 89363 - DNA, 100 bp, Homo sapiens
ttctacctggtcctgttctacatcaccctgcttacactctccagacagattgacgcccccggtctttgcctctgagcgggagagtctgtgtgtatgtgtc

SEQ ID NO: 89364 - DNA, 90 bp, Homo sapiens
ggtccttgtggacgtggagaggggccgaaccgtgaagggctggaggccccggcggctagcttccacagcgcggcacctgtacctccgggg

SEQ ID NO: 89365 - DNA, 75 bp, Homo sapiens
tcctccttggtcgccgcgtccttggctggcgtgtgtggatgtggaagcagccaagcgggcagaagaggaattgct

SEQ ID NO: 89366 - DNA, 49 bp, Homo sapiens
gaacgagtatgatgataatggagagatgcacaggaacaaacgagggaat

SEQ ID NO: 89367 - DNA, 75 bp, Homo sapiens
gtctctccagaaaatcttgtggacaaatccaggggaagcaatatgttaaggatacctgtaagaaaggccttagta

SEQ ID NO: 89368 - DNA, 138 bp, Homo sapiens
gtttaaaaatgggtgaagaacggtgggtctccctcactccagaagaatttgaccaactccagaaatattcagaatgtatttaccttgctgtggattgctgactggatggtccatcacttctggaggaaaggaaaggac

SEQ ID NO: 89369 - DNA, 100 bp, Homo sapiens
agagctgtttactgatatctcatgcaatagaagccctgattttggatccagaatcagcaagatgcttcaggactgccccaaggcccgcagggaggtggag

SEQ ID NO: 89370 - DNA, 74 bp, Homo sapiens
gggactttgcagaaatgtgtgcagactacatggcatctaccataggggttggtttcagtgctgatgaaacttgg

SEQ ID NO: 89371 - DNA, 75 bp, Homo sapiens
tacagaactcatacgaagaattgaaattcagcccaaacatggctgaaggcctttcggcagcagctgaggaagacc

SEQ ID NO: 89372 - DNA, 96 bp, Homo sapiens
gttcttgctcttcgagggcgagaagaaattgactaccactacatctcctcccagggcttccctatcgaaggctgggctgttgtgtactacataact

SEQ ID NO: 89373 - DNA, 75 bp, Homo sapiens
cagtttctttgtcatgtagccaagactggagaaacaattgaggtgctggcggaggagtccatagtatgtctgcag

SEQ ID NO: 89374 - DNA, 98 bp, Homo sapiens
gcatggaaaatggctggggtgaagaggagactagggctcttgtcaggatggtgaagctgttcatcggaaacctgccccgggaggctacagagcaggag

SEQ ID NO: 89375 - DNA, 90 bp, Homo sapiens
ccaaggacagcttttttcctgcaaggtattgttgcagcatctggcagtgagactgaggatgaggacagcatggacattcccttggacctt

SEQ ID NO: 89376 - DNA, 90 bp, Homo sapiens
gcgctgcgcggcgcggcggccgggccctcgagacggggacggtaatgagagatccaaacaccaagcgctccaggggctttgggtttgtca

SEQ ID NO: 89377 - DNA, 100 bp, Homo sapiens
cagcggcggctgtcccctgccggggccgccctactctggggcttcctgctccagctgggagtacctgacaggcttccacaagcggaaggtcgagcgaaag

SEQ ID NO: 89378 - DNA, 83 bp, Homo sapiens
cttgccctggtcttgctcggccgatgaagtgcagaggtttttttctgctggcagagaggctgatgacatcgtgaactggctga

SEQ ID NO: 89379 - DNA, 96 bp, Homo sapiens
ccccctccctcagcttccgccccaaaaggagtgtgaggaagaggctgtctgtgtcattatgtgtgcgtcggtcaagtataatatccggggtcctgc

SEQ ID NO: 89380 - DNA, 90 bp, Homo sapiens
ggacgccgccgaagaagcatcgttaaagtctctcttcaccctgccgtcatgtctaagtcagaggaagagagaagggcacagttacctaag

SEQ ID NO: 89381 - DNA, 75 bp, Homo sapiens
ttccattggccagtatgaagtggtgaaggagtgtgtgcagcggtttttcgttggaatatacgttgcacatttatg

SEQ ID NO: 89382 - DNA, 82 bp, Homo sapiens
ctcagccattttccacagatcagttacagaatgtctgaaggggacagtgtgggagaatccgtccatgggaaaccttcggtgg

SEQ ID NO: 89383 - DNA, 80 bp, Homo sapiens
caaaggcaagaaggcaacgacgttccatctgtggaaggacctaccaaccaggtcaacaacggttccagcctcagggatga

SEQ ID NO: 89384 - DNA, 98 bp, Homo sapiens
agctggctggctttgataagtacaagctggggtatggccgtcaatgtgtactccacatctgtgaccagtgaaaatctgagtcgccatgatatgcttgc

SEQ ID NO: 89385 - DNA, 99 bp, Homo sapiens
agagtggtaggagtgacccagcctcgaagagtggctgctgttacagcataaatgaaatctcggaagatgtctatacggccgtagagcacagcgattcgg

SEQ ID NO: 89386 - DNA, 76 bp, Homo sapiens
aattgttcctgaggaagagcaaaaatgtgctggagaatctggtaaaagcaccattgtgaagcagatgaggatcctg

SEQ ID NO: 89387 - DNA, 82 bp, Homo sapiens
gaaggacaagcaggtctaccgggccacgcaccgcctgctgctgctgggagccttcacgtaaatgggtccagtcatgcctccc

SEQ ID NO: 89388 - DNA, 100 bp, Homo sapiens
gttgagggaagactggtctaggtgctgctcctgaacttggtctctgagccatggcttcccatagacactcaggattcactccttctccagttgcacagcc

SEQ ID NO: 89389 - DNA, 85 bp, Homo sapiens
gaagtgatgctggagaactacaggaacctggtctcagtggggcagccagggccaaatccatatccccccaatattgggtgccctg

SEQ ID NO: 89390 - DNA, 75 bp, Homo sapiens
caccatacaggaacagggcagacgttagcgtgagtgatcactctcaatcccggaacaacatagacgtttgtcctg

SEQ ID NO: 89391 - DNA, 74 bp, Homo sapiens
ccaagcaaaccgggaaaggagaggatcccggagccgacaaagctctgatggcaccaaatcttgactcctttgga

SEQ ID NO: 89392 - DNA, 75 bp, Homo sapiens
gctgcggggatgtatttggaacattatctggacatgtctcctttcctcttgggccgggcactttgggctgccagt

SEQ ID NO: 89393 - DNA, 97 bp, Homo sapiens
taaagacaaagatgtcaggcctgcggcccggcactcaagtggaccctgagattgagctttttgtaaagatggacggggagtccgaggaggagcagga

SEQ ID NO: 89394 - DNA, 80 bp, Homo sapiens
gtcatcttatctacgaaatgattcaggtcatagcaaatgacagaagtcccttggtgggcaaaattcactgggagaaaatg

SEQ ID NO: 89395 - DNA, 75 bp, Homo sapiens
atgcacaacagagggacaacaaaagcctcctacaagagtcctaccaaaacaggggaacaggaacctgataaagaa

SEQ ID NO: 89396 - DNA, 75 bp, Homo sapiens
cccgacctcagatgctcccttctgctcctggtggtttgtgatgaaaatggttccaagggctatggatttgtacac

SEQ ID NO: 89397 - DNA, 83 bp, Homo sapiens
cgagttgtggctgctctactacgcgcaggttcgagaacttgtcttggacaattgcaaatcaaatgatggaaaaattgagggct

SEQ ID NO: 89398 - DNA, 138 bp, Homo sapiens
tctgtttctctgctgcaccgacctcgacgtcttgcctgtgtcccacttgttcgcggcctatagacctgatggccaaaagaaaggaagaaaatttttcctctcctaaaaatgccaaaaggccaagacaagaagaattgg

SEQ ID NO: 89399 - DNA, 82 bp, Homo sapiens
ttcgggacaagattcgcttctatgaggtgggcgctctacctgttcctggttaaatgcacgatcagcatttccaccttcttac

SEQ ID NO: 89400 - DNA, 90 bp, Homo sapiens
cgacaagctggggacgcgtcctcagacgcagcgtctagtccctggccatagctccgccgctgcccggttatgaagacagtatggagtttc

SEQ ID NO: 89401 - DNA, 100 bp, Homo sapiens
tgtatctacggtggtgctcctaagggaccacaaatacgtgatttggagagaggtgtgtgtcctggagtggggagcagaaggcgtggctggcaagagtggc

SEQ ID NO: 89402 - DNA, 90 bp, Homo sapiens
gactacagttttcaagtatttaaggaccatttatttcaaaagagctatccatcacactcctcagcagacatcaattccagtcttcctccg

SEQ ID NO: 89403 - DNA, 100 bp, Homo sapiens
ctggtgccagccccatgcagggggactctctgaagctgtgcaggctgcctgtatgatgtccagctcgccgctgtccaagaaacgtcgcgtgtccgggcct

SEQ ID NO: 89404 - DNA, 100 bp, Homo sapiens
aaccaggccaagatccacgctgacgcagagcggaaggagccagcttaccaaaacctgaggcagaaagtggataattttgtgtcaacacatctggacaagc

SEQ ID NO: 89405 - DNA, 75 bp, Homo sapiens
tcgcattttatgtttctggcgagaagggaacggagttttcatcaggtgggaaagcagtgccactctccgcttcac

SEQ ID NO: 89406 - DNA, 98 bp, Homo sapiens
aggggaaaccccctgaagcccctaaagagttgaagtattgataacaccaaggaactctatcacaatttgaaaagataagcaaaagtttgatttccaga

SEQ ID NO: 89407 - DNA, 101 bp, Homo sapiens
ctgggctggagtgttacattcagttcctggactccgtggtattgggagagttgctgctacatctttaggaaatttgactaaccatggttctgaagatttac

SEQ ID NO: 89408 - DNA, 75 bp, Homo sapiens
aagaattgcccatcttgttaaggtcaaagattctaaactgcctgcatataaggatctcggtaaaaatctaccatt

SEQ ID NO: 89409 - DNA, 100 bp, Homo sapiens
tgtccttccagcgctgcgcccggacagacaagcccccattcactggggagaatagaaagaaaacaattgacaaaatcctcaaatgtaaactcaatttgcc

SEQ ID NO: 89410 - DNA, 76 bp, Homo sapiens
tggaccctcgcattgtccggagatacctactcaggcggcagctcgggcaggggattcttggtgccaccattgagaa

SEQ ID NO: 89411 - DNA, 100 bp, Homo sapiens
tatccaccactcccagatatattcttagacaggttgatatccctgaaagtacttaatagcatcgtgctgttggggaaatcgtgccagtatgtgaaggaag

SEQ ID NO: 89412 - DNA, 99 bp, Homo sapiens
gctcgatccagcaccatggggaagcgggacaatcgggtggtgtatgcaacagcgttattgcaacaggctaacgaaaacagacaaaattcaactggaaaa

SEQ ID NO: 89413 - DNA, 49 bp, Homo sapiens
aacagcagtattatttgaacaaagtactgccaaatctgtcgaaagggag

SEQ ID NO: 89414 - DNA, 100 bp, Homo sapiens
agctaggccatctgaataactttactaagattgggaaaatgaggtacgttagtgttcgcgattttaaaggcaaagtgctaattgatattagagaatattg

SEQ ID NO: 89415 - DNA, 75 bp, Homo sapiens
gaacccaagatggctgcgctgttgctgagaccatgtctgcaaaggagaagtcgaagtttgaagatatggcaaaaa

SEQ ID NO: 89416 - DNA, 99 bp, Homo sapiens
tcatggagaaatgtacattaccattgactggaaagcaatgtgtcaaccgcattattactgaaaagccttgtcagacccaagcagtagactttcaacttc

SEQ ID NO: 89417 - DNA, 100 bp, Homo sapiens
ggaccctcagggagagcgggcagccttccaggtggacaggtagtaaacctattgatggcaattttgctgactgtggaagtgactcatccaaactccatgc

SEQ ID NO: 89418 - DNA, 96 bp, Homo sapiens
aggctgccctcaaactcctggactgaaacgatcctctcatctcagcctccaaaagtgctggcattacaggttgggtgctgattgaccggagcggcc

SEQ ID NO: 89419 - DNA, 75 bp, Homo sapiens
agctgctgcggttcctgagccggagcttgtagattttcagtggaaactgggtatggctgtgagctcagacacttg

SEQ ID NO: 89420 - DNA, 83 bp, Homo sapiens
cttggggacggagcagcgcgtcgtggggcgagcggcagttacagaatgtctgaaggggacagtgtgggagaatccgtccatgg

SEQ ID NO: 89421 - DNA, 74 bp, Homo sapiens
caacttaaaaaacagttttgcctcagcccttcgtgtcaccagactctgaacatgctacatcctgcccaagactg

SEQ ID NO: 89422 - DNA, 100 bp, Homo sapiens
cggcgccgttgggataatgatgatatgacagggagtggaggaagaggtgaagatgtggaaagcccagagagttggagagttgagagaaggaagaaagcag

SEQ ID NO: 89423 - DNA, 75 bp, Homo sapiens
cacgcgtctatcgccggctgccgcatcatcgggcgcatgtgtgtgggtgtgagcctcagcagcgatttcattgct

SEQ ID NO: 89424 - DNA, 50 bp, Homo sapiens
cctgccccgccggagcagcatcatcaaggaaccctgcctacgccatgagg

SEQ ID NO: 89425 - DNA, 100 bp, Homo sapiens
gacagcgtgcggtctgggccttttgggcagcttttccggcctgacaacttcatctttggatgaatttcacccattcatcgaggcacttcttccacatgtc

SEQ ID NO: 89426 - DNA, 75 bp, Homo sapiens
gttccacagtcttttcagaaactcatatttaagggctttcgggtcacctccagcagctcccagttcagctcacgt

SEQ ID NO: 89427 - DNA, 75 bp, Homo sapiens
taaccaccattttgtgacttacagaaaggaagatgatccctatgatcttgaagatgtttctgcacagaaatgagg

SEQ ID NO: 89428 - DNA, 102 bp, Homo sapiens
ttcttccttcccctcctcgccgccaccgcccaggaccgccggccgggggacgagctcggagcagcagccagatcctggctctgcagagagaacagcccagaa

SEQ ID NO: 89429 - DNA, 82 bp, Homo sapiens
ccccgcgagtcgcatctgctcaacgacgaggacctgacgcagacaagagtgagaatggtgaggcatatcagagaaagaaggc

SEQ ID NO: 89430 - DNA, 82 bp, Homo sapiens
gccgtgttcgacatcctggccgtgctgcaggaatccagcactacgccctgccctctactgactggaggcaggcctctgccta

SEQ ID NO: 89431 - DNA, 80 bp, Homo sapiens
cctcaggtttgtcggtcgaagtggaagagagagaactcgatgccaccgcaacggtattggcgaaccggcaggatgaaagt

SEQ ID NO: 89432 - DNA, 128 bp, Homo sapiens
tgcgccgcccgccgctgagggaccgcggggttagccactgctggctgcttccagtgttcgccgagaggaccatggccaacctggagcgcaccttcatcgccatcaagccggacggcgtgcagcgcggc

SEQ ID NO: 89433 - DNA, 100 bp, Homo sapiens
atcactaacaacttcccattcaggtatttagagaattacctggccaacctctttgcaggagcctgggagcctcagcccgagggaccgctgcccctggaca

SEQ ID NO: 89434 - DNA, 115 bp, Homo sapiens
cacctccttcttccccctgcttctgcctccatgagtaactacctatatgacgtgctgctgctgagaccaaggaatgaattggttttcacagaattccatggactttaactgctga

SEQ ID NO: 89435 - DNA, 50 bp, Homo sapiens
acccatacaaacaacctggaggtgaggtggtgtgtggttgactctgtttc

SEQ ID NO: 89436 - DNA, 100 bp, Homo sapiens
ggatttctgaagactattgtggaagaagcatccattaaggatctcatagatcagaacatactggagcctgtaacccgtgcacagagggtgtggattacac

SEQ ID NO: 89437 - DNA, 75 bp, Homo sapiens
atcagacctgctcacacttcagaatagagaagctggtcctggactcccagaagcgagtcttctcctggggctttg

SEQ ID NO: 89438 - DNA, 75 bp, Homo sapiens
gaactggttcagcggagaataacatatcttcagggacacttagtcggtctggatgaaccagcttcgggagctggg

SEQ ID NO: 89439 - DNA, 100 bp, Homo sapiens
actgaaacctctgcctttctggttcaagcaattctcatgtttcagcctcccagcctgtactgcgagaagcggatcctggaggctgtgggctgcacagggc

SEQ ID NO: 89440 - DNA, 74 bp, Homo sapiens
tctgtccaggcagcattaaaacttaagcagtggatatcaaagtattgcagagtgccttagcagccatccgacat

SEQ ID NO: 89441 - DNA, 75 bp, Homo sapiens
cggggaccggcggcgctggaggagcgaggcagctgtactaggactgggaacggaacattccagcatggaaacccc

SEQ ID NO: 89442 - DNA, 101 bp, Homo sapiens
aggatggttcctacctggctgagttcctgctggagaaaggctatgaggaattcgaatttagagtttaatttctcagagcattctctccaggaagaattttt

SEQ ID NO: 89443 - DNA, 90 bp, Homo sapiens
caactacaagctacaagctcctctaagtgaacccacgctgagccagcatactcatgctcacctccgcctccaggaagaccagactcccac

SEQ ID NO: 89444 - DNA, 100 bp, Homo sapiens
ataaaaacatccccgtcatcgagtatgagcagttcatcgcaggctgcctggtgcgggcagagaggtttcagttgatcgtagagagggacgtgagaagcag

SEQ ID NO: 89445 - DNA, 83 bp, Homo sapiens
caagaaggaagtgtatcttcatacatcaccacacctgaaagcagacgccaaggacttattgttgtgctaacactgaagacttg

SEQ ID NO: 89446 - DNA, 101 bp, Homo sapiens
gtcatacttggaaatggctgcaggttcagaaaaaaatgtgagcgctattggcctttgtatggagaagaccccataacgtttgcaccatttaaaatttcttg

SEQ ID NO: 89447 - DNA, 98 bp, Homo sapiens
gccaagtatccgccagtcaataggaagtacgagtgtgaattgcagcaggagagaagattcctttgagccaggaagaaataactctgcagggccatgcc

SEQ ID NO: 89448 - DNA, 99 bp, Homo sapiens
gactaatgatggtggctttcctgggagcatctgcagtaactgcaagtactggtcttttgtggaagaggaaaggcaccaatgcccagacctggctacaag

SEQ ID NO: 89449 - DNA, 98 bp, Homo sapiens
cggatttccagccagagctgagcggcgcgggctccagactcgccgtggtcaagttcaccatgagagggtgttcgatgccggagactattccttgttgt

SEQ ID NO: 89450 - DNA, 100 bp, Homo sapiens
cgccgctgctgggagatgggcctactcgcccgccaccctgcgctgccgccgctctgaggagttaaagtgtctttggtgcaacactaacaaggcttgtctg

SEQ ID NO: 89451 - DNA, 100 bp, Homo sapiens
agcgtgtccagaattggtgggtctcactgacttcaagaatgaagccgcggaccctcctggtgacggccacccacggactctgtcacttgctgggattcac

SEQ ID NO: 89452 - DNA, 75 bp, Homo sapiens
aggaagctgcctgcccggtgtctgcccctgaggaggtctctggacctctgactgacactgtgcctgcccaggtcc

SEQ ID NO: 89453 - DNA, 82 bp, Homo sapiens
tcgcgctgctgggcacccacggagcctccggggctgtattctaccttgtaaatactgttatttgtatatactgtaaatgatg

SEQ ID NO: 89454 - DNA, 50 bp, Homo sapiens
tgcgggtccggccgctcagcaagagctgtgttggggtggaagaggaggag

SEQ ID NO: 89455 - DNA, 71 bp, Homo sapiens
ggggctgtaagtgccaacatgactgtgaagccatttccccaaaggaatgtcttgcatattactgacatttg

SEQ ID NO: 89456 - DNA, 103 bp, Homo sapiens
gtaaaaacggagcccactgcacagatgcagtgaacggctatacgtgcatatgccccgaaggttacaggtagagtctgggtatgtctgtgaaggtgatcacaag

SEQ ID NO: 89457 - DNA, 80 bp, Homo sapiens
atcatgaagctactaaccagagccggctctttctcggcagaagctcctcctggggtagagacagatcttattgatgttgg

SEQ ID NO: 89458 - DNA, 90 bp, Homo sapiens
tggatgtgtctggtgtgggtttcccaagcaaggttccttggaagaagatgtctgcagaggtccgatacctggaaattagcttagtacaca

SEQ ID NO: 89459 - DNA, 90 bp, Homo sapiens
ggactgaagagatggccttggaagaaatggtgcagagattaaatgcggtttccaagcacacgggtgctggagaatctggtaaaagcacca

SEQ ID NO: 89460 - DNA, 141 bp, Homo sapiens
tgaaacgctgcaccggctgctgcaacacgagcagtgtcaagtgccagccctcccgcgtccaccaccgcagcgtcaagtccagggagctcccagggaagtggtcgacccctccggtggctgggccactctgctagagtccat

SEQ ID NO: 89461 - DNA, 98 bp, Homo sapiens
gaccaacttacctttgggagaagttagacaataccctcaaactacctccaacagctactcaggatgtgccgtttgggggtgctaaagctggtgttaag

SEQ ID NO: 89462 - DNA, 111 bp, Homo sapiens
ccgcaggctgaggacctctatctcgcttttcccctggccttctgtatcttcatggtgcggctcatcttcgagaggtgaaaggtgtagcagtcactcggcctacacccacag

SEQ ID NO: 89463 - DNA, 90 bp, Homo sapiens
acagctgcctggactcatccgtgctggacagctccttcctcacgttctcaggcctccacgctgagactatcttcccatctcaaaatggac

SEQ ID NO: 89464 - DNA, 82 bp, Homo sapiens
agggtttgaaaaccttgtaccttatacttcaactgttaggtatttaccttgctgtggattgctgactggatggtccatcact

SEQ ID NO: 89465 - DNA, 75 bp, Homo sapiens
gctggaaccatcatatgcaccagcacgcctggctaagccaagaagacgctggagggaggctgttaggagggactc

SEQ ID NO: 89466 - DNA, 100 bp, Homo sapiens
ggatgtagatacgttagccagtttacttagttatgatgtgattgctcaagcccaatctgggactgggaaaacggccacatttgccatatcgattctgcag

SEQ ID NO: 89467 - DNA, 100 bp, Homo sapiens
tcttaacattggataataagcttttacaaactgatgctactgcagcactggggtgtcagttgttggtccgacccagaacgcttcagttctgctctgcaag

SEQ ID NO: 89468 - DNA, 78 bp, Homo sapiens
gctcgaggcccggctggcgcacctgggcgtgcaggccccgcagggtggagcccgtctgctcagggttgcaggcccaga

SEQ ID NO: 89469 - DNA, 82 bp, Homo sapiens
ctgcgcggcggggctgaggcggccgcggggcccgagcgcaggttcgagaacttgtcttggacaattgcaaatcaaatgatgg

SEQ ID NO: 89470 - DNA, 90 bp, Homo sapiens
ttcccttaaaaagacggacagcccatcgtgtgaactatagagtttgtggacagatttatattggctcctgggtagaactgcacttcagca

SEQ ID NO: 89471 - DNA, 82 bp, Homo sapiens
ttcaaagagccggatcgcaggctccctgcctactcccccaccggggatttcaggttgacatcatggacatatgtgagtccat

SEQ ID NO: 89472 - DNA, 88 bp, Homo sapiens
agagctcaatgggggaccacagcatgcacttccttccagcagctacacaggtcatgctaaatgtgtagaagttgtaaaaacttttaac

SEQ ID NO: 89473 - DNA, 100 bp, Homo sapiens
aaagtggctgatgataagcatgtaactcaaaggctctctaaatacgtacagattctgcgataatgtgtggacttttgtactgaatgatgttgaattcaga

SEQ ID NO: 89474 - DNA, 75 bp, Homo sapiens
gccatgccccttccgattgggagggacaaggcatgttatttgaaagcaattgagacgcaaccgaactttgcagta

SEQ ID NO: 89475 - DNA, 71 bp, Homo sapiens
agtggacttgattgatatatatgctgacgaggagttcaaccagaacttcagaggacgaggaaacaatcgtg

SEQ ID NO: 89476 - DNA, 83 bp, Homo sapiens
ctcctgcctcagcctcctaagtagctgggactacagttggattggatgctgctggcaagacaaccattctgtataaactgaag

SEQ ID NO: 89477 - DNA, 90 bp, Homo sapiens
gcgggaacgtccactcccgcgcgcccctctcggggaccagggcggcctcccaggaggagcttgccatctgcagccagggacaaggatgaa

SEQ ID NO: 89478 - DNA, 101 bp, Homo sapiens
tttccctcccggggcccctggtgaccaacttgctgcggtttttgttcctggggctgagtgccctcgaacaagttgaaatcatcgcagaaggataaagttcg

SEQ ID NO: 89479 - DNA, 100 bp, Homo sapiens
ggacaggcttgtccatctgtaacttcattaaggctgatgaattcatccgagcaaatgccaccaacaagctgacagtcatagctgagcaaatccaacattt

SEQ ID NO: 89480 - DNA, 50 bp, Homo sapiens
acttttggtgcttaaatccagctgtgttgcaaagcctcattccttttgtt

SEQ ID NO: 89481 - DNA, 82 bp, Homo sapiens
aaggtggaggtgaagaagtttgtgaagatcggccgcccgggctacaaagatgtttggtcagctggctgtgtactggcagagc

SEQ ID NO: 89482 - DNA, 75 bp, Homo sapiens
cagcgtcctcatgtggggggtaaaccactcgcatcctgaggttagcattacacttctcccagtggagcccatgac

SEQ ID NO: 89483 - DNA, 100 bp, Homo sapiens
gaagtcgcagcgccagacccaaggcccccgagtgagcgcgggcgccgagaaatggtggagtcaatgaagaaagtagcagggatggatgtggagctgacag

SEQ ID NO: 89484 - DNA, 82 bp, Homo sapiens
cgggagtgttcgttgtgccagcgactaaaaagaggaagtgggaaaactcttgcctttgccatcccaatgattcatgcggtgt

SEQ ID NO: 89485 - DNA, 82 bp, Homo sapiens
agagtccccgtacgcctacagtaacgggtttccaggcctgaggtgcccgccctggccccaggagaatgaaccagccgcagag

SEQ ID NO: 89486 - DNA, 98 bp, Homo sapiens
cgcctaacggcgctgggctagtgctaggccacttcatagcttcggggatggtcaatcaggcccaaaacatgctgaagaaggtggaaggcttggaggat

SEQ ID NO: 89487 - DNA, 82 bp, Homo sapiens
ctgtcgtacgtgggacaggccacgctgtccgtccgcagtaccgacgcctgcaggtgcgcgcggagccatggttatcatgtcg

SEQ ID NO: 89488 - DNA, 75 bp, Homo sapiens
ggagttcctcttccacctaccaccgccagcgcaggcatagcgatttctccctgtgtactgtgttgcatctgacag

SEQ ID NO: 89489 - DNA, 80 bp, Homo sapiens
acggaaaagagcaaatgcagcatttttgataggtgcctatgcaggagactcatgcatctgtatgccgtgtgcgtggactg

SEQ ID NO: 89490 - DNA, 74 bp, Homo sapiens
cgggaatcccactgttgaggttgatctcttcacctcaaaagcctttgacgacccctatgccctggtggtgctgg

SEQ ID NO: 89491 - DNA, 75 bp, Homo sapiens
tgctttgcctcaaactcagctttctaccagcagacaggcccgtttcctcctttcaaaagtcaacccttcacagac

SEQ ID NO: 89492 - DNA, 101 bp, Homo sapiens
gctactctctctttctggcctggaggctatccagcatcctgtgcgcaggtggcagtgagtacccttttcctctctattcttgtgttgttcgctactgcccc

SEQ ID NO: 89493 - DNA, 101 bp, Homo sapiens
gggacattggggttgatgaaacttacctctttgaatctgaaggtttagcctgactggctcatggagaaagcctacctaagaatgaagccgggacccggcag

SEQ ID NO: 89494 - DNA, 75 bp, Homo sapiens
agccactcagtgaccttggctagaaaccaatggctgtgcggcgtgagacaatgcagatcttcgtgaagactctga

SEQ ID NO: 89495 - DNA, 90 bp, Homo sapiens
cagtccaaagcctcttacagcctggggagtgcgagagaaacccagccgaagcatttaaaagagcaagttgcaaacatcagttcatttcac

SEQ ID NO: 89496 - DNA, 74 bp, Homo sapiens
ggagtcgtagggaggacgccgggacacctggaagccgagaaatgaacgctgtccaactgggcgtacgagtttga

SEQ ID NO: 89497 - DNA, 90 bp, Homo sapiens
ctgttggaggaactggcccggaaacaggaggacgtgaacttcacggtagaccagatccgcgccatcatggacaagaaggccaacatccgc

SEQ ID NO: 89498 - DNA, 73 bp, Homo sapiens
tatgcagagacatgagatggtagccaacccctcagattgtctgagtttccacattttcgaaataatcataaaa

SEQ ID NO: 89499 - DNA, 100 bp, Homo sapiens
aacttttgcaaaaatactgaaagagaaaggctatgccactggactcattggaatctctgaaggaagaagatgaatcagatgatgataatatgtaacattt

SEQ ID NO: 89500 - DNA, 100 bp, Homo sapiens
agaagcgaagtggagagcgccagagtaatggattttcagctgaactctcatctctcaacactggcaaatattcataagatctaccacacccttaataagc

SEQ ID NO: 89501 - DNA, 105 bp, Homo sapiens
ggagattatgtctggaggtggcagcagaaatcctactccacccataggaagacccacgtccacacctactcctcctcagggtggacaagtccttcacttctcgcc

SEQ ID NO: 89502 - DNA, 75 bp, Homo sapiens
cacctttcacagctatcagggaaggttactcactataaacaatatccacccaacacaagcaaagtttattcctac

SEQ ID NO: 89503 - DNA, 83 bp, Homo sapiens
aacctgggcttgggatctgacaaaggactccaacagagcaagggtgaagccacttcattatatatcctggctggttggacatg

SEQ ID NO: 89504 - DNA, 82 bp, Homo sapiens
cgagcagcgccagcggccgagcgggcggcttcctggcctgggcgctccggtggcggcggagtttgtttcgacgccggaccgc

SEQ ID NO: 89505 - DNA, 96 bp, Homo sapiens
cagcaacttaacaataagtggcagaaaagatcaggttgaaaatctttctaaacgatacgaagaaatttatcttaaaaataaagatctagatgcaag

SEQ ID NO: 89506 - DNA, 51 bp, Homo sapiens
tcggaggctgcagcaggaacggagtttcgccatgttccacaaggtcagagt

SEQ ID NO: 89507 - DNA, 100 bp, Homo sapiens
cgcgcagcatgtgttccagcacgccgtgccccaggagggcaagccaatcaccaaccagaagagctcaggtgctggagaatctggtaaaagcaccattgtg

SEQ ID NO: 89508 - DNA, 90 bp, Homo sapiens
cgcaagtcccgtcttatgggacttgaggccctcaaggtcagccatgtcatctgagcctcccccaccaccacagccccccacccatcaagc

SEQ ID NO: 89509 - DNA, 101 bp, Homo sapiens
tagacagtctttcacgggacatgtctcagatatcaatgctgtcagtggtaaaggagctggaagtgcgaaaattgatgcatgtgagaggagatggaccctgg

SEQ ID NO: 89510 - DNA, 100 bp, Homo sapiens
gactgacgtcatccttgaagccgaccagaatgatagccagtccctggagctggtgcacaggttccaggatatgttgggcctgaccaagccagccatgccc

SEQ ID NO: 89511 - DNA, 74 bp, Homo sapiens
ctcaaccgagttctaggcttcaaacctaaggactcagcccaggagagtgttattactcgagatattcatcgtac

SEQ ID NO: 89512 - DNA, 100 bp, Homo sapiens
agcagcccccggggcaagagcaggagcccggcaccccccgccgacaaggaggaatacatccagcctgtgtgcctcccagctgccggccaggccctggtgg

SEQ ID NO: 89513 - DNA, 90 bp, Homo sapiens
cccggagccggacctccggagcatggtcagccccgtcccctccccgacgggcaccatcaggtgaaaggtgtagcagtcactcggcctaca

SEQ ID NO: 89514 - DNA, 83 bp, Homo sapiens
ccgcctgcgatggggcgagaaaggtcccactgcagccctccaagcagagatgccctgtatccaagcccaatatgggacaccag

SEQ ID NO: 89515 - DNA, 100 bp, Homo sapiens
ttccaagacatccctgctgagagagccaaggtgagctacatggaaatttactgtgaaagagtacgagatttgctgaatccaaaaaacaagggtaatttgc

SEQ ID NO: 89516 - DNA, 80 bp, Homo sapiens
caatccagggttcagctctttttctgagatcatcaccaccccgacggagacttgtgacgcccaagaagatgaaaggattg

SEQ ID NO: 89517 - DNA, 50 bp, Homo sapiens
acacctaaaacccacagtcctccagcacggggtcactctggtgcccattg

SEQ ID NO: 89518 - DNA, 80 bp, Homo sapiens
gagtccaacttgcctggaccagcttaatggttctgagccctgcctggctcccagcctggagcagcaagagcaggagctga

SEQ ID NO: 89519 - DNA, 122 bp, Homo sapiens
gtcgagggcaaggactctgcgtgcattctccactgccgtctactcggccactccggtcccgacacctagcctgcgtctaacttcaaacttgtggctgttaattcaaaactctatgccatcgg

SEQ ID NO: 89520 - DNA, 98 bp, Homo sapiens
gggcaggctttgaggtgcttgtcggtctggactgatgaaaatccatatggtaaagtcagtgataaatcttttgtttgctgcatatactggagatgtgt

SEQ ID NO: 89521 - DNA, 49 bp, Homo sapiens
tgcgctccgtgcacctcttgcgggatgtacagattatagtgtttccaga

SEQ ID NO: 89522 - DNA, 100 bp, Homo sapiens
aactagccccagtggaccaggctatcatatcatgttgcctttcattactacgttcagatctgtgcagttttttgctccactcaagcctgttagaatcacc

SEQ ID NO: 89523 - DNA, 50 bp, Homo sapiens
gagaccgcggccgggaccgaggatggcccactgcgtgaccttggttcagc

SEQ ID NO: 89524 - DNA, 100 bp, Homo sapiens
tggagaagggacgccggctgcgacagttacagcagctacagcagctgcgagacagtggcgagaagctccctggaattcccatgccaccaccacctttggg

SEQ ID NO: 89525 - DNA, 83 bp, Homo sapiens
ctggtgatcggctggtgcatattcggcctcttactactgacttgaaactgcatctgcagagcactgattatggtaacttcctg

SEQ ID NO: 89526 - DNA, 75 bp, Homo sapiens
caagacacttttcagaaagacaggtgctggagaatctggtaaaagcaccattgtgaagcagatgaggatcctgca

SEQ ID NO: 89527 - DNA, 100 bp, Homo sapiens
ttaccagggggtgatgcagcagattcagagacattgccagtcagtcagagatccagctatcaaaggcaaatggcaacagacagcagtgaagaccgtttgg

SEQ ID NO: 89528 - DNA, 101 bp, Homo sapiens
aaatttacgccatgaaagtggtgaagaaagagctggtgcatgatgacgaggaccaagaatcgccttcagccctgtctggtgcatccttggcagaaagtgag

SEQ ID NO: 89529 - DNA, 74 bp, Homo sapiens
gtgagttctcatcaagggttctcgggaatcttaaaagaaaggtgtgagcgacgtctcctcaccacagtgctgtg

SEQ ID NO: 89530 - DNA, 90 bp, Homo sapiens
aagacactccccagggcagaaatagcgaccatggcgagctgattggggccctggtcctgtctgtgggcatctatgcagaggttgagcggc

SEQ ID NO: 89531 - DNA, 98 bp, Homo sapiens
taaccctcactggagaatccagaggtgatgttctgcaccctgaacacccacaaagtggacatggacaagctcctggggggccagatcgggctggagga

SEQ ID NO: 89532 - DNA, 87 bp, Homo sapiens
aggagccgccttctgcctcagaacggcgtgactcggagatgtccggtctgtgctacgacagcaaaatgttccaggtgcatcaggtgc

SEQ ID NO: 89533 - DNA, 95 bp, Homo sapiens
gaagctgagctggactctctgccacatcgttcggttcccacaacagcctggactctgtctactagtgacgatgtcgaagacagggaaaatgaaaa

SEQ ID NO: 89534 - DNA, 100 bp, Homo sapiens
aggattggaggtgtcagtgttaaaggaacctctacaacgaaggtgaagccacggaagataaggacaatcatctatctctccttggtgtatgtgcttggcc

SEQ ID NO: 89535 - DNA, 100 bp, Homo sapiens
gaagcagccgatcatggcggatggcccccggtgcaagaggcgcaaacaagccaatcccaggaggaaaaacggaacgattccaggtgaagaatcctcccca

SEQ ID NO: 89536 - DNA, 96 bp, Homo sapiens
ccaaagaggagccagttaccatgactcatccagagaccatggcgagcccagggaaagacaattatcgaatgaagagctataagaacaatgctctaa

SEQ ID NO: 89537 - DNA, 90 bp, Homo sapiens
gctgttgcaagggaccttctccggcccctccagctgccccctgtgtggcaaacctttcttgagctcagttgttgacctcctgtactggag

SEQ ID NO: 89538 - DNA, 98 bp, Homo sapiens
ggacagggaacggagttatctgtgaaacccaatcttagcaaagcaatgtctcaagatggtgcttctcagttccaagaagtcattcggcaagagctaga

SEQ ID NO: 89539 - DNA, 100 bp, Homo sapiens
aggagcagtacaaagtgatgctgcagcaaccaaccagtggttcatcccagccgtgaggggggacattccccctgggtgtgcagcctatggcttcgtgtgt

SEQ ID NO: 89540 - DNA, 54 bp, Homo sapiens
ccgtcatccgtgccttggacacaccgagtggtgctcatcggggactcaggcgtg

SEQ ID NO: 89541 - DNA, 100 bp, Homo sapiens
tcagattctcatggcctctgggtccaccaccttcaccaagacctgcgaccgcatcaagcagtccgccagcggaaccaagcggcgcgtgttcatcatcgag

SEQ ID NO: 89542 - DNA, 100 bp, Homo sapiens
agtgacctgcacctggatctcagcagctgcgagtgtgcagtcaaagccctctttgactacaaggcccagagggaggacgagctgaccttcatcaagagcg

SEQ ID NO: 89543 - DNA, 138 bp, Homo sapiens
acatagaagctggggccttgacaatttgcacttagtgaaagactggagaactgtgaatgaaggaaattatgatgtgatgaccccaatggttgatatacttatgaaactttttcgaaatatggtgaatgtgaagatgcc

SEQ ID NO: 89544 - DNA, 74 bp, Homo sapiens
ggtagccctggacggcattcagtgttttggcaaggcatctttacatatgtgattatcataaaaacttaattcag

SEQ ID NO: 89545 - DNA, 87 bp, Homo sapiens
aaggtcgccctcaaggccatgatcaaaacagatgaccaagcgagacgtgcctggcttcgccatcgggggcctgagcgggggtgagag

SEQ ID NO: 89546 - DNA, 73 bp, Homo sapiens
cgcggccacttttgccttcccgggggaaagctctggcaatttaaatgacccaaataaggaggcactggctaag

SEQ ID NO: 89547 - DNA, 90 bp, Homo sapiens
aacagcctgaagaagggctccctcgtgaagaacctgaaggacacactagtactatactggcaattgctggagaagattttgcaattgttg

SEQ ID NO: 89548 - DNA, 75 bp, Homo sapiens
agaatgcatcagtgcccttgtggcgaatggggctcacgtcgattttctggatatgccgcagaaggatccgtgcca

SEQ ID NO: 89549 - DNA, 95 bp, Homo sapiens
gaacttcttcagaattagaaaggagctgcttcccaataaggaaacatgcaaagcagctggtccgaggagaacccaatgtttcgtatatctgttct

SEQ ID NO: 89550 - DNA, 75 bp, Homo sapiens
gttgattgaattccttcaatctttgtaaaattctctgtggaggctttcagtccagtgtaaagctgttggagcgcg

SEQ ID NO: 89551 - DNA, 75 bp, Homo sapiens
gttccccttctactacatgctgaagttgtggacatcggatacccaaggagacgaagctgaagcaggagaaggagg

SEQ ID NO: 89552 - DNA, 108 bp, Homo sapiens
tctcaatatctgtcttcggtggactccttcggcagtccacccaccgccgccgcctcccaggctgaaggtgatgtggccgccctcaaccgacgcatccagctcgttgag

SEQ ID NO: 89553 - DNA, 88 bp, Homo sapiens
gaagcagccgatccagcctgcggagcctgtggggcaggccagaagcggactcctagaagaggggagcagcaaggatggaatgacagcc

SEQ ID NO: 89554 - DNA, 100 bp, Homo sapiens
gtggatgatgtgcttggtggagcagctgcctgggagaatgttgactctactgcagaatttctagaaggaggagttggccatgttgaaatgttatttcgct

SEQ ID NO: 89555 - DNA, 75 bp, Homo sapiens
ccaggctgacaatccccttggcagatctgtccttaggaaagatatttaccaatatgctgtgatagcatttggatg

SEQ ID NO: 89556 - DNA, 151 bp, Homo sapiens
gagcggcctcgctgcctactttttcatgggccggctcccattgctccggcgcgttctcaagggcttgcagctggtcaccctgctgattgccttcatctgtgtgcggagctccctgtggaccaactacagcgcctacagctactttgaagtg

SEQ ID NO: 89557 - DNA, 101 bp, Homo sapiens
aatgtgtatatattataccaagttccaaggaccctcacagatataaagatgaagcgcagctgtataaagaagagcacctgaggaatcggcagcaccctcac

SEQ ID NO: 89558 - DNA, 90 bp, Homo sapiens
tcgcgggcactccagggcgtgtttttggtcagaatggcggcagtggagcatcgtcattcttcaggattgccctactggccctacctcaca

SEQ ID NO: 89559 - DNA, 82 bp, Homo sapiens
cagagagggcctcgggaagagatgcgaggatgacaaggtcgaggtcaaggagacattctcatagacgttacactcgatccag

SEQ ID NO: 89560 - DNA, 91 bp, Homo sapiens
cagatcgggagcgcaaggtcgccctcaaggccatgatcaaaactgcctccggagccagcgtggtggccatagacaacaagatcgaacaggc

SEQ ID NO: 89561 - DNA, 100 bp, Homo sapiens
tctaccctggaggagattctggggcagtatcaacggagtctccggggaagaaatgcagagtaacgtggaagtggtccacacctaccgccagcacattgtg

SEQ ID NO: 89562 - DNA, 100 bp, Homo sapiens
atgcgtatctttaagaaattttatcttttgaaacacgttctgattaaccaagggtgaatcccagaccttgctggcagcagcagttgagagagaacgtgca

SEQ ID NO: 89563 - DNA, 75 bp, Homo sapiens
cgaagcttccggacgacgaggaaccgcccaacatggcctcggaggccctgtctcagcgggaccctcctcacaaca

SEQ ID NO: 89564 - DNA, 100 bp, Homo sapiens
ccccgctattgcgcagcgatttgttgtaagaaccgccggggacgaaacaataaagaccggaagctgagtttttatccggttttggccaaattgggcgagg

SEQ ID NO: 89565 - DNA, 75 bp, Homo sapiens
attgggccgagcctatgccctggcttttgcagaaagaggagcgttagttgttgaacactctgctccagccaaggt

SEQ ID NO: 89566 - DNA, 96 bp, Homo sapiens
gatggcctggcgacccattcaggcacttatggccatttcagccaccttatgattctgcagatgactggtctgagcatattagctcttctgggaaaa

SEQ ID NO: 89567 - DNA, 100 bp, Homo sapiens
tttccagtcagagctcattcccactggcagctgagcaaactataatttcagctctaaagggttcagtttggcaaagacttggtgcagatgtgacagcagt

SEQ ID NO: 89568 - DNA, 98 bp, Homo sapiens
atgcatgcatatggaacttgctgcatgccagcaccatggctggagcggctctgggctccggaatcgcccgcagccggtactgcgggacccactgcgga

SEQ ID NO: 89569 - DNA, 83 bp, Homo sapiens
ccctgccgctgctgatcccaccgcggatttccatcaccagggccgagaacgacaggtttggctcagaagaaggcggccccaac

SEQ ID NO: 89570 - DNA, 98 bp, Homo sapiens
ggagctgcctgatggaaagaagagaagaaaggtcctggcgctcccctcacaccgaggccccaaaatcaggtactgaacgacacctgggtctccttccc

SEQ ID NO: 89571 - DNA, 100 bp, Homo sapiens
cagatgatgagatgcgcaggctcaacatacccgtactacaggatgatggctttctcttcctctgggtcacaggcaggactttgccaataccattcctggc

SEQ ID NO: 89572 - DNA, 83 bp, Homo sapiens
aaaacattggaccacacaaagtcttactgcatcaacgacaactttctttgccacttacacaatctaagtcatctcccaaaaga

SEQ ID NO: 89573 - DNA, 75 bp, Homo sapiens
tagtcgggaagaggagcttcagcagcgctgttgtcccacaccacgtactaaatgaactgatacagactgagagag

SEQ ID NO: 89574 - DNA, 100 bp, Homo sapiens
cccagccgggaactccccatcgcgttttgccagcgataatacgcctcagatatggacatttctggaattacagagccccctctacattgagcacaagaca

SEQ ID NO: 89575 - DNA, 100 bp, Homo sapiens
tgatactgacctgtaaatcatcctttaggtacaccaggggttggaaaaaccacactaggcaaagaacttgcgtcaaaatcaggactgaaatacattaatg

SEQ ID NO: 89576 - DNA, 90 bp, Homo sapiens
gtgctgcagaggacacgaggcggcgggctggagacatggaccgcggcgagcaagggaggaggtacaggagaactgtgtgcggtggcgaaa

SEQ ID NO: 89577 - DNA, 82 bp, Homo sapiens
gtgaggagctgggtggtcccagcctggagctgtgccagcctgacatggatcatcccgatgatcggcttaatctgcctgggca

SEQ ID NO: 89578 - DNA, 75 bp, Homo sapiens
aaaggctttgatgaatacatgaaggagctaggtgcagcagtaccgcgtcgccatgactgccaaggactgctccat

SEQ ID NO: 89579 - DNA, 75 bp, Homo sapiens
cagttataagccacagaaaattagtcccaaatcaactactttggacaaagtttaccaaatgaaaagcaaacctcg

SEQ ID NO: 89580 - DNA, 75 bp, Homo sapiens
cagaaattcggagggtggccctggactcgttggtgctgcaggattccagtggaatgacactggtgatgcttgccg

SEQ ID NO: 89581 - DNA, 100 bp, Homo sapiens
tggccactgcgctgcggaacatggccttggacgtcagaaataaggagctcatcggactgaaagaggtgtccccactgcctctaaatctcaaacgtttata

SEQ ID NO: 89582 - DNA, 100 bp, Homo sapiens
aaagtatcagccgtcctatgataccacaatcctcacagagcttcttaatgaagaggataactcagaatcatcggctatagagcagccacctacttcaaac

SEQ ID NO: 89583 - DNA, 133 bp, Homo sapiens
gcaatggccgctgagaacagcaagcagttttggaagaggagcgctaagctgccggggagagtctaaatggtgtttggctgaacagagcgcgtctggaacctttaagggtctattccattcatcagggagacta

SEQ ID NO: 89584 - DNA, 75 bp, Homo sapiens
gtacaacatcacttcttctgtttgcagtgttgtcacaggtagtactgatggaattggaaaatcatatgcagaaga

SEQ ID NO: 89585 - DNA, 82 bp, Homo sapiens
gcacgcgggtctgtcatcatgtcgcgttacgggcggtacggaggaggttgacatcatggacatatgtgagtccatcctggag

SEQ ID NO: 89586 - DNA, 90 bp, Homo sapiens
ctggaataatgttacttttgagaagcattcgactggatttttagactctgaggagcagttggagctaatccacattatggaaatggaaac

SEQ ID NO: 89587 - DNA, 80 bp, Homo sapiens
cttcgaaatcgcctgctacaaaaacaaggtcgtcggctggcggagcggcgtgtggtcgtgtgatggtaacagatgctgac

SEQ ID NO: 89588 - DNA, 75 bp, Homo sapiens
tcaaatcaaaagggacactgaaaagtcacaaactccttcacactgcagatgtgaggtcctttggcactgaagacc

SEQ ID NO: 89589 - DNA, 100 bp, Homo sapiens
gcgggattggtatgacttcgtgtggaaccgcacgcgtggcatacggaaggtccttgaatgggcaagagggcacatgaagtacggcgtcctccacattcac

SEQ ID NO: 89590 - DNA, 98 bp, Homo sapiens
tcctgtgagcagtgggaaaaatggaccaacttctttggcaagtggacattttactggctcaaagtgatcagcagctggactgtgccttggacctaatg

SEQ ID NO: 89591 - DNA, 100 bp, Homo sapiens
ccttaaagcaattgagcaggctgatctactgcaggaggatatgggccctcacattttccaaacctgtccatctgctaactattttgactgcagagccatg

SEQ ID NO: 89592 - DNA, 100 bp, Homo sapiens
ctcaggtgctgaaccagatgatgaagagtatcaggaatttgaagagatgctggaacatgcagagtctgcacaagtgaatccaagtcgacttcctgtagtt

SEQ ID NO: 89593 - DNA, 82 bp, Homo sapiens
ctggatgaactgataaaacccaccagtctagtggtggatctgaaccttctaacagaggaggtaagattatacagctgcacac

SEQ ID NO: 89594 - DNA, 74 bp, Homo sapiens
aggactctatgacacggccggacagctgcagaaccttggcctgaaaatgctacattatatcagcaattgaaagg

SEQ ID NO: 89595 - DNA, 76 bp, Homo sapiens
gaaactggcctcccaagccctgataagccatcgaagacggcaatttggaggaaatggaagaggaagtacggcttaa

SEQ ID NO: 89596 - DNA, 82 bp, Homo sapiens
cgccctgttccccgcgctgcggcctggcggcttccaggcgcactaccgcggtgacctgagcatctctgcagaccgcctgagt

SEQ ID NO: 89597 - DNA, 83 bp, Homo sapiens
tttcccagctgctaaaggaagaggaagactcggtgaaatacctggagtgctcagctctcacccagagaggcctgaaaaccgtg

SEQ ID NO: 89598 - DNA, 146 bp, Homo sapiens
aaaacaccacttttaagtatcttacaggagaacagactgaaaaaatgtggcagcgcctgaaaggaattgctgggcctaaaggagataacatttatgaatggagatcaactatacttggtccaccgggttctgtatatgaaggtggt

SEQ ID NO: 89599 - DNA, 100 bp, Homo sapiens
tgaccatcttcgttgggatcagagatcaatgtccgagttaccaccatggatgcagagctggagtttgcaatccagccaaatacaactggaaaacagcttt

SEQ ID NO: 89600 - DNA, 80 bp, Homo sapiens
gaagctggttttcaggccacaaatgctttcacaggacttaaccaccaccatgtcgagcaaaagaacaaagaccaagacca

SEQ ID NO: 89601 - DNA, 100 bp, Homo sapiens
agtgcattgggtacttcaggaatccaggtgcacccaattcaaggcctgccgttggctatagcaaatgccccagagccctaatttgtttagaactgtaata

SEQ ID NO: 89602 - DNA, 90 bp, Homo sapiens
gtgtgtttcctcgccacaggtgggagcctgccccgctggaggctgcctggtggccctgacctgtgactaccgcatcctggcggacaaccc

SEQ ID NO: 89603 - DNA, 50 bp, Homo sapiens
gatgaagatgaaaccaagcccttggtcgagcctcttaggcagagtttaac

SEQ ID NO: 89604 - DNA, 100 bp, Homo sapiens
gctgcccagggatgaagggcccccgaccccaagctctgccacgaaggtgccaccgacagtactactggtatgacgagcgggggaagaaggtcaagtgcac

SEQ ID NO: 89605 - DNA, 124 bp, Homo sapiens
atggagtgctgtatgcctctgtgaacccggagtacttcagcgctgctgatgttccacttattcaggaaatggaatccagaatcatgatcccactgaagacctcgcccctccagtaaagctgtag

SEQ ID NO: 89606 - DNA, 83 bp, Homo sapiens
tcacagtggaggagctaacagagatagagcgtttggaagatctggatacctgtatgaacccttaggagaaatcttgagagtgg

SEQ ID NO: 89607 - DNA, 90 bp, Homo sapiens
tccttgcagatcggtgacacagttcacatcctggagatgtacgaggatataattgaccctgcaatcctgcgcccgggccgcctggacaaa

SEQ ID NO: 89608 - DNA, 80 bp, Homo sapiens
ctgcatggagcaagtctgtcagcaccatctttctaacagaatacaaacaagtgatcctaatgctgtggtcatgggattgg

SEQ ID NO: 89609 - DNA, 82 bp, Homo sapiens
gccctcaaggccatgatcaaaacccagctgaggtgggtgtcctggttggcaaagaccggtcaagtttttacgtgaatgggct

SEQ ID NO: 89610 - DNA, 90 bp, Homo sapiens
cggtgtggcagctgctctgaaccaggacctggacccggacccaaagtgccatgtctttaatgccgcattgacaggaagattgagttcccc

SEQ ID NO: 89611 - DNA, 83 bp, Homo sapiens
aaagtggactgcacggcccactccgacgtgtgctccgcccagggggtgcgaggataccccaccaataggagtgaaacatccac

SEQ ID NO: 89612 - DNA, 82 bp, Homo sapiens
aactatgtgttcgtgttcctgggcctcatcctgtactgtgttcctcctgcatatgcccaagaggattgggagtggaatggac

SEQ ID NO: 89613 - DNA, 90 bp, Homo sapiens
gttctcactaaaatgaaagaaaccgctgaggcttatttgggaaagaagaccataaagcagatgcagcagcggatgctggagctccggaag

SEQ ID NO: 89614 - DNA, 100 bp, Homo sapiens
agggaacatgctgagaaactgatgaagctgcagaaccaacgaggtggccgaatcttccttcaggatatcaagaacaaaatccagtctcatagcagaggag

SEQ ID NO: 89615 - DNA, 83 bp, Homo sapiens
gcaaattgaagactttcgacaaggaagtgaaacaccaatgcagcttggctttgaattggtggagacgccgaaaagctcggaca

SEQ ID NO: 89616 - DNA, 82 bp, Homo sapiens
ctctcgctttccctctcgcgtctctggctgcaggttaatttggagtggcccctggagtcagtttcctacaccatccgaggcc

SEQ ID NO: 89617 - DNA, 80 bp, Homo sapiens
gaaggcaacgacgttccatctgtggaaggacctaccaaccagccgcttacaaacacgcagatggcaagaagattgatggc

SEQ ID NO: 89618 - DNA, 74 bp, Homo sapiens
tgcccaccttgtgaaggccaatagcattcaaggaatacggttggacagaatgaactgaagattacaagtgatca

SEQ ID NO: 89619 - DNA, 98 bp, Homo sapiens
atccaccgagacctcaactcccacaactgcctggtccgcgaggttggatggcaagcatgtggtgtttggcaaagtgaaagaaggcatgaatattgtgg

SEQ ID NO: 89620 - DNA, 83 bp, Homo sapiens
caagaacatcggtctgggcttcaagacacccaaggaggtcacgcatgaagggagcaccgtggagaagacagtggcccctacag

SEQ ID NO: 89621 - DNA, 75 bp, Homo sapiens
ggtcgcagactgtctccgagacgcttcctgtccgcttggctttgaattggtggagacgccgaaaagctcggacaa

SEQ ID NO: 89622 - DNA, 100 bp, Homo sapiens
caagggggccagttcctgccgtctgctcttctgcctcttgatctccgccaccgtcttcaggccagcgttgacagaaggctacgttggggccctgcacgag

SEQ ID NO: 89623 - DNA, 102 bp, Homo sapiens
caaaacttcaagccaaacatcaagcagaatgtgatttgcttgaagatatgagaacagctttgctgagccatcaaggtctaatggaagcatggttcggcattc

SEQ ID NO: 89624 - DNA, 98 bp, Homo sapiens
tccgacctcctaaaatgaaattcattacagaaatctggcacccaaatgaaataggaaggttgttgattactcacagtttcaggaatctgatgatgcag

SEQ ID NO: 89625 - DNA, 75 bp, Homo sapiens
cgaacatcttctggacctttgtccagaaagctgacttcatgagaccgaggatctcgttcgttgatcgatgctaca

SEQ ID NO: 89626 - DNA, 100 bp, Homo sapiens
agagactgctgagcccgtccgtccgccgccaccacccactccggacacagcccgcggcgccatggctcacgtcggctcccgcaagcgctcgaggagtcgc

SEQ ID NO: 89627 - DNA, 75 bp, Homo sapiens
gaggatgacgggacagtggccttcgcgctaacgaaggttgtaggtgacgtggacaccagcctcccacggacccta

SEQ ID NO: 89628 - DNA, 100 bp, Homo sapiens
gaggcggaagaccgcgcgcagggcctgcagcgggagctggacggcgagcgcgagcggcgcgagaaagccaagtcctgtatctgccatgtctgtggcgtcc

SEQ ID NO: 89629 - DNA, 101 bp, Homo sapiens
gatctaaagtcacccggcggccaaaggccagtgactaccaacgtttggaccagaagcatatcaatgaattgtccatgaaaattgatgtggaagatatactc

SEQ ID NO: 89630 - DNA, 83 bp, Homo sapiens
cgtgcgtctgccgcccgcgcttcaccggttgatgccggcccaggatggatcagacctgtgaactacccagaagaaattgtctg

SEQ ID NO: 89631 - DNA, 100 bp, Homo sapiens
cgcgagtgggagcaccaggatctcgggctcggaacgagactgcacgtttgtcagaggaatggctgtgaatggatgcctggaaggaccatcctctaatttt

SEQ ID NO: 89632 - DNA, 100 bp, Homo sapiens
acgcctctacccatctcgggaagagttcagagagcatctggagctaattgtgaaaaatagtgcaacctacaatgagctaaagttgcagacaagatccagc

SEQ ID NO: 89633 - DNA, 82 bp, Homo sapiens
gctcactgatctattattttcaatagaaacagatatacagatgtggagaagggttgtgtctgaagagaaatccctcatgttc

SEQ ID NO: 89634 - DNA, 50 bp, Homo sapiens
gcaactattcgcagtccgagcggcagttgtgaaaaacttcaggacaaaaa

SEQ ID NO: 89635 - DNA, 100 bp, Homo sapiens
aaaagttctaggaaaagcactttccttaatccggttcccactgatgacaattgaggaatttgcagcagttcccatggagaatgttgcaacaattgctgat

SEQ ID NO: 89636 - DNA, 73 bp, Homo sapiens
aacagcagcatcattgtcaaagctgctggagccagttctgcttctcggcaaggagcgatttgctggtgtagac

SEQ ID NO: 89637 - DNA, 75 bp, Homo sapiens
ctgcgtgagtgtggtctacgagctgtttctcatctttatactcttccaggttaatttggagtggcccctggagtc

SEQ ID NO: 89638 - DNA, 100 bp, Homo sapiens
agccagggccgagtcctcgccatgccggcccggcggctgctgctgctgctgacgctgctgctgcccggcctcgggagttttgcggcctccaggtggtgga

SEQ ID NO: 89639 - DNA, 75 bp, Homo sapiens
tgctgcggctggtgcgtcgtcgctctagaaagaatcttcaagagggagacatagggaaaaggaagacataaaaat

SEQ ID NO: 89640 - DNA, 75 bp, Homo sapiens
gttaaagtctctcttcaccctgccgtcatgtctaagtcagaggctttatctgagtgtgcagtgacactgaaaaca

SEQ ID NO: 89641 - DNA, 75 bp, Homo sapiens
ctgaaatggaacctcaggatcttgagctagaggatgcagaaaatgcgattgtgcatatgggcggtcagtggttgg

SEQ ID NO: 89642 - DNA, 82 bp, Homo sapiens
agaaaagggctatgaacgattaaaagaagaactcgcaaaagctcagaggacaatgcagatcttcgtgaagactctgactggt

SEQ ID NO: 89643 - DNA, 107 bp, Homo sapiens
tctcatattacatgggccagcactgcttcatccgggaagtgcttggggatggagtgcctccaaaggttgctgagttgattcgatgtcatcagtcccgtggtggagcc

SEQ ID NO: 89644 - DNA, 75 bp, Homo sapiens
atttgaagaacagggagattttgaatcagagaacctgcctagggtagttaaaagacgagtgaatgctctcaaaaa

SEQ ID NO: 89645 - DNA, 100 bp, Homo sapiens
ggaaccctggggactacgacgtccctcaaaccttgcttctaggagataaaaagaaagttcaggagccctggaaaggagaaggaataagacggcaggagga

SEQ ID NO: 89646 - DNA, 50 bp, Homo sapiens
ggttgggccggtgtactttcccgagaggaacgaagggcatcctacgacta

SEQ ID NO: 89647 - DNA, 90 bp, Homo sapiens
gagcctggcgcatagtgtggacttcacgaggcctgggacgtcccggacatgatggcacatggaatgacaatcagctacaagaaatggccc

SEQ ID NO: 89648 - DNA, 96 bp, Homo sapiens
ggcgacgaaccttggagagaggagaacgaacatcttctggacctttgtccagggtatgttagagcccaccaaggaaccactgaaaccactttctgc

SEQ ID NO: 89649 - DNA, 100 bp, Homo sapiens
cgggagccgggctaggacgccgagcggtgactccccgccgctcccgggggccgtgacgggttgaaaggaggagcaggaggtactgatggacaaggaggta

SEQ ID NO: 89650 - DNA, 75 bp, Homo sapiens
gacttggccttcttcaggttcccgcgggaccctgccaggtgaccctggcagcaaccccaacaaacgccagaggca

SEQ ID NO: 89651 - DNA, 82 bp, Homo sapiens
ctgatgctgcactcagaccccagcatcctggagcactgcagtttcctcctgaaggctggctccggctctccctcaataatgg

SEQ ID NO: 89652 - DNA, 74 bp, Homo sapiens
aaagattcgggccagagacgacaacccgggcctccgagggggctagagagctgaaggagagccagtttccccaa

SEQ ID NO: 89653 - DNA, 75 bp, Homo sapiens
agcgggtgagaggcccttcagggccgcggcggattgaaaatattgaacttcccatggatacaaaaacaaatgaaa

SEQ ID NO: 89654 - DNA, 100 bp, Homo sapiens
tggggggcggcggcactgccggcggggaccgctgggaaggcgaggacgaggacgaggacgtcaaggatacctgggatgaactcctaattggtagtgtaga

SEQ ID NO: 89655 - DNA, 100 bp, Homo sapiens
cgcagtttgactctggagccactcaggtttttcctaagctcaactctagccagctaggttcctggtgctttggggagtggagactgctgcacggactctg

SEQ ID NO: 89656 - DNA, 50 bp, Homo sapiens
cagcattattgtggatgaatataaggaactgcagacactgcagataaaac

SEQ ID NO: 89657 - DNA, 100 bp, Homo sapiens
gctgtgtcttggggccctttgggacgagtgctgtgactgtgttgccctggactttgtctcacaagatgaaatgttgacgcccctggggagattggacaag

SEQ ID NO: 89658 - DNA, 100 bp, Homo sapiens
ccagaagtccagagctgaggactgcctgtttgcagatgttcagcctgttgcctatgaagagcctaaacattggtgttcaatagtctactatgaattaaac

SEQ ID NO: 89659 - DNA, 75 bp, Homo sapiens
ggaaggactgctctgcacgcacctgtttgttgataagccggggcccttcgtgggaccctgcggtcactggatcag

SEQ ID NO: 89660 - DNA, 82 bp, Homo sapiens
gcggatgccctgcagtacctgcagaaggtctctggagacatcttcagcaggttgggttaacggcatggagaacagtcacccc

SEQ ID NO: 89661 - DNA, 98 bp, Homo sapiens
tgaaagcctcagcacccggggagctgactccattgcatgtgggaccttcagccgtgaactggacatgggcaagttttgcctcacatacgaggcctcca

SEQ ID NO: 89662 - DNA, 75 bp, Homo sapiens
cgtgccctacttcaaggataagggtgacagcaacagctcggcgggctggaagggaaaagcttcactctgaccatc

SEQ ID NO: 89663 - DNA, 100 bp, Homo sapiens
agaagtcattccggagaatactgacctggtgactttgggcccgagcagttcagtgatgaagtggaaccagcaacacctgaagaaggggaaccagcaactc

SEQ ID NO: 89664 - DNA, 98 bp, Homo sapiens
gagcacatgaccagcttagcttctgtcctaaagtgtaaactggagttgctggtgggcagccctgcttcctgcatggaactggagctgtatggagttga

SEQ ID NO: 89665 - DNA, 100 bp, Homo sapiens
tgggaggtcatcgaaggctaccgggcccagcacagccagcaccgcacgccctgcaagggagatgatgattattccccaccttctaagagacaaagaccaa

SEQ ID NO: 89666 - DNA, 100 bp, Homo sapiens
cttgccctgtctcctcgcagatgagaaacctctgtagaggagcaggatgcaaccgacaggctgtggccggacagctgctgcccagcacatggagcctgca

SEQ ID NO: 89667 - DNA, 100 bp, Homo sapiens
atggaaggaccatccttgtggacagaggtgttccaggccttgcagcggctccatatgaccatcttctcccagagcgtctcaccatgtgggaagtttctgg

SEQ ID NO: 89668 - DNA, 83 bp, Homo sapiens
aatgaagccagagagggcttggtggatgacaaggaggcctgagtagaccgcagactcggagccgtgggtcccgactgaacatc

SEQ ID NO: 89669 - DNA, 100 bp, Homo sapiens
aacgaggcaaggagctaaagcagcgtgcgttcagccctggggcaagaagctcttctggctgccattagtgaaaaagacgccaatatagctctcttggagc

SEQ ID NO: 89670 - DNA, 95 bp, Homo sapiens
gtaacgtttttatccatggatgacttgcttggagtccggcagcgtcttctcttgagggagcaatttggagaagagctggaacccagactcgcgcc

SEQ ID NO: 89671 - DNA, 75 bp, Homo sapiens
tagcaatgaagccttctaacaagcttggtcgggaggaacctgccatgtccatggatgccaatggaaagataattt

SEQ ID NO: 89672 - DNA, 102 bp, Homo sapiens
aacgtgcctttgaagctgccgatgccagagccaggtgaactggaggagcgatttgccatcgtgctgagcacaaagttatcattgttgggctggataatgcag

SEQ ID NO: 89673 - DNA, 75 bp, Homo sapiens
ccgccgccaagagtgagcgagcggacccgcgatgggctgcgtcatcaccatctcgggacgcatgaccttcacgag

SEQ ID NO: 89674 - DNA, 83 bp, Homo sapiens
caaacagcccgcccgaccccgtcccgaccctggccgccccgagcggagcctggagtgcctacaccaactaatgttacaattga

SEQ ID NO: 89675 - DNA, 74 bp, Homo sapiens
ccggtcctggtggtggttctgtcgatcgtcttggaagataagtttataccatggatagcacaaaggagaagtgt

SEQ ID NO: 89676 - DNA, 83 bp, Homo sapiens
ccgacctcgacgtcttgcctgtgtcccacttgttcgcggcctatagtggacagtttgcggttgtgaagaaatgccgtgagaaa

SEQ ID NO: 89677 - DNA, 100 bp, Homo sapiens
agaacccgggagtaggagactcagaatcgaatctcttctccctccccttcttggtcctggactcggagcaggaccctgcggagcacatccccgaggcaga

SEQ ID NO: 89678 - DNA, 100 bp, Homo sapiens
tgatgggagagattgttcctgtggagcaaagagctgcatcatgaattcaggagcatcgcctccccatggccacccatggaccagtcggcattcacttcct

SEQ ID NO: 89679 - DNA, 75 bp, Homo sapiens
ggaaagcaagcttcttggtacattcacaaatacgtacagaaaccgaagctgaaagactggcatcctcctgggggc

SEQ ID NO: 89680 - DNA, 150 bp, Homo sapiens
ccagctggcctccgaccagaccatcaaagagctcatacggagcgtccttggccagaactacgacattacaatggaatgcaaacggttagagcaggagcttcatcatgtgaaagagcagaaccagacttcagcaaacaacatgagacatct

SEQ ID NO: 89681 - DNA, 75 bp, Homo sapiens
aagttatggcagagttagctaaagaactccctcaagtttcatttgtgaagctttccccagacatggccaacaagg

SEQ ID NO: 89682 - DNA, 82 bp, Homo sapiens
tgctggttaccccggagacaagctctgtccgcggagaggagtgggacaactcctaaagcgtccgtctccaagagagtatgaa

SEQ ID NO: 89683 - DNA, 82 bp, Homo sapiens
gaagagccggggccgtggctgacatggagcagaattcagaaggagctggcggacatcactttagaccctccacctaattgca

SEQ ID NO: 89684 - DNA, 121 bp, Homo sapiens
gatactctaacgccaaggtcagctgctggtacaagtacctccttttcagctacaacatcatcttctgggtgtgagttcttgatacgaatgaaaggccaagagtttgttgatgagattcaag

SEQ ID NO: 89685 - DNA, 99 bp, Homo sapiens
gaggtgatggcaacggccaacttcggcaagatccagatcgggatttacgtggagatcaagcgcagcgatggggacatcacccagaagggctatgaaaag

SEQ ID NO: 89686 - DNA, 100 bp, Homo sapiens
gatctcccagttcgtatctgagggttcattagaccagtcattaaaggatacactgaagaaattttccatcgagaaacgctttgcctactggtcagggtat

SEQ ID NO: 89687 - DNA, 74 bp, Homo sapiens
gttggagatgaaccttgttcatgcaccccagcttaattggcttagtgtcgacttcaataattggaaagactggg

SEQ ID NO: 89688 - DNA, 100 bp, Homo sapiens
cacagaaatagtccagaatgtcacaggtccagggcagaggaccaacatgggcattttgtttatgagcaaggagctgctgaaggagacgcggaaggagcac

SEQ ID NO: 89689 - DNA, 96 bp, Homo sapiens
ctgcccggacgtggaagcagcaagaggcgcttggtcaagacacactgacgggcgcggatggcgtcggggcgccccgaggagctgtgggaggccgtg

SEQ ID NO: 89690 - DNA, 100 bp, Homo sapiens
gaccgggaatgggctacctacacctgtgtgctgggctttcacgtctacgaacacaccacagccatcagcactggaatgcaaagaccagaacaaacagaag

SEQ ID NO: 89691 - DNA, 90 bp, Homo sapiens
ttctggaggctgcggggccatcgctccaggtgacgatgcctggggagcctgtggacgtggcatgtggcgtggaccacatggtgaccctgg

SEQ ID NO: 89692 - DNA, 101 bp, Homo sapiens
ttcgttcaagacaggtgtttaagccatcaagcattgcacagttctctccaataacatagatcatctcttactgaatttaacactgtctgatatcatggtct

SEQ ID NO: 89693 - DNA, 100 bp, Homo sapiens
gccgccgggttgctgtgcgactattctccgggagccgtccgtgtcaccgccggaacctggcgcaggagttggcatcctttggaagagttcgtgaaagctt

SEQ ID NO: 89694 - DNA, 50 bp, Homo sapiens
cccacggagcctccggggctgaactaaaattccagatggcaaactcaatg

SEQ ID NO: 89695 - DNA, 50 bp, Homo sapiens
gccggccgcgggcgcgaccggaggcagcatcctccaggacaaatagcaag

SEQ ID NO: 89696 - DNA, 74 bp, Homo sapiens
caagtatcatcctgggctccaaggagagggctcaggggagagagaaagcccagaaagaaagctactccagggtc

SEQ ID NO: 89697 - DNA, 87 bp, Homo sapiens
cacctgctttgctctcgatgtagcctgtactccaaagattcaggtttactcacgtcatccagcagagaatggaaagtcaaatttcct

SEQ ID NO: 89698 - DNA, 100 bp, Homo sapiens
tctgagtccaactctagggcgctgctgcacagcgacgagcaccagctcctgaccaaccccaaggaagctcataaaatggtgagagaagcaaatatcaagc

SEQ ID NO: 89699 - DNA, 80 bp, Homo sapiens
tcatcctggatgaagccaccagcgctttggatgccgagagcgagtatctgaacatccagtcatggataaaaatgagctgg

SEQ ID NO: 89700 - DNA, 98 bp, Homo sapiens
gggggactctgtgtgagggaaagaaaacaatttctcctgctctgcagcttctgttcagatgagttttgatcatcctgagaaaaatgggccttggcctg

SEQ ID NO: 89701 - DNA, 90 bp, Homo sapiens
gggagcacttcctggacccaggaagggagagtcttcttccaagattgttgccaatgccaaaggcgctgtgactggggcaaaagatgctgt

SEQ ID NO: 89702 - DNA, 100 bp, Homo sapiens
caaagagcgtttggatcaggacggacgcttggttcgatacaagaggctgttttcctagcgtggcttgctgcctttggtaagaacatgtcgtccatcttgc

SEQ ID NO: 89703 - DNA, 98 bp, Homo sapiens
gtagtgtcgacttggtcccgtcagccggaccccacctggacggctggggccacttgtggtcgccgggaggctgtttctccatccaaggcccagagtct

SEQ ID NO: 89704 - DNA, 100 bp, Homo sapiens
ctagacgctggcactatggtcatggcggaggggacggcagtgctgaggcggaacaggccgggcaccaaggcgcaggttctaaatgagaagaaacttcaag

SEQ ID NO: 89705 - DNA, 95 bp, Homo sapiens
atcagtcactgggatttgggaagttccttcttctttgctggcactgttattacaaccatagatttagtacctcaagacaaactcttatgtggatt

SEQ ID NO: 89706 - DNA, 76 bp, Homo sapiens
aacctaccccagagcctcccgcggcccacagagcacagttcctaaggacggtctgaagagccaagagctatttgat

SEQ ID NO: 89707 - DNA, 50 bp, Homo sapiens
caaggaccagagctccgcgcggcgaaatgccatccagtccaatggatcag

SEQ ID NO: 89708 - DNA, 83 bp, Homo sapiens
gttgagcctgtgggacacttcggcgggctgacgcacgaggcacacaggaaggaggtggagcaggtgtatctgcgctgtgcggc

SEQ ID NO: 89709 - DNA, 100 bp, Homo sapiens
gcaacggcggcctccaggcctcaggccccctcaccatcctagaggtcaagatcagctctggctaggccttgtgaaaaagggtaaagaacaaaacacacag

SEQ ID NO: 89710 - DNA, 74 bp, Homo sapiens
caacatggggcttgagaaaggactctgatgccagtatggactggagatgatgggagccagttggatagccccat

SEQ ID NO: 89711 - DNA, 98 bp, Homo sapiens
aaacttttttatataagcttagtaacaaagcagataaagtggagaattttcatgaagaacatgaaaagaatagtcaccatattcacaaaaatgctgat

SEQ ID NO: 89712 - DNA, 100 bp, Homo sapiens
agaggtcccaatcccccactctttccgccctaatggaggtctccagtttcgatccgaattcgagatccaaaccaaggaggaaaggatatcacagaggaga

SEQ ID NO: 89713 - DNA, 75 bp, Homo sapiens
gcgaccccagtcggtgctccggggaggtcacctgacgaggagatgcaggcctggggtagtctcctttctggactg

SEQ ID NO: 89714 - DNA, 96 bp, Homo sapiens
attgataccaatggagctggagatgcatttgttggaggtcgtgacatggcgagcaccactctgcctggttacccccctcacgtgccccccactggc

SEQ ID NO: 89715 - DNA, 75 bp, Homo sapiens
ctagtatcggacatgatcctcatcttttatacactcttagtgctgtccaggtgctgggtaggccaggtttcagca

SEQ ID NO: 89716 - DNA, 75 bp, Homo sapiens
tgaactacaaaccattggcttccagatgatatgaagttgtcagaaatagattttcctatggctagaagcaagctg

SEQ ID NO: 89717 - DNA, 100 bp, Homo sapiens
tgggaacccactgaggcacccggacctcgtcaggccgctgcagatgaccattccaggcatatggctacccattctccccagaaatctcaccagtgtgctc

SEQ ID NO: 89718 - DNA, 76 bp, Homo sapiens
gtaccggataaaaatctctttccggaggcaccttccactagcaacagtctccccaggcacaacacagctaacacaa

SEQ ID NO: 89719 - DNA, 50 bp, Homo sapiens
cacccagacatggatggagacggggctggagtgcaatggcgtgatctcag

SEQ ID NO: 89720 - DNA, 97 bp, Homo sapiens
aacctgtggatttccagcaaactccttagccatgatcttccatgaggaggaggaggaggagaacctagatgatcaggatgagcaaggcaacttgaaa

SEQ ID NO: 89721 - DNA, 100 bp, Homo sapiens
gatctggaggagcagttgtctgatgaagagaagatcacacaaaccctgaactggctggtgaggatgacatcagaaatagagaccaacattgtggctgttg

SEQ ID NO: 89722 - DNA, 100 bp, Homo sapiens
gagtggagttccccaaggcgcacatctcggtgccgacgccaccgccgagcccatgatcctggaacagtacgtggtggtgtccaactataagaagcaggag

SEQ ID NO: 89723 - DNA, 90 bp, Homo sapiens
gcgggcgcggagatgtggcccctggtagcggcgctgttgctgggctcggcgtgctgcggtgcagtagacattgttgcaatcatgatcggc

SEQ ID NO: 89724 - DNA, 80 bp, Homo sapiens
cgtcaaggccaacatcacgcccttcggcgccgaccagggggaagacgttttcatcccgctaatcttgggaataagaggag

SEQ ID NO: 89725 - DNA, 82 bp, Homo sapiens
gggggacctgaagcttaggaagttcgtcttctccacggaggagagtgtgaagtgagggggtctctctccctccttctccttc

SEQ ID NO: 89726 - DNA, 75 bp, Homo sapiens
ccgccaccaggtcaccctggaagagtcgctggccgaagtttatgtcgtagaattggattggtatccggatgcccc

SEQ ID NO: 89727 - DNA, 100 bp, Homo sapiens
gcagaccatcgagctcctctccttccagctcaacctcaagaccaacaccgtcatcaactggttccacaactacaggtgccttcaaatctcttgacaaaga

SEQ ID NO: 89728 - DNA, 99 bp, Homo sapiens
actggattcacgggtagagattggcttcgggctgagctagcagtgagcaccttttggcccaatgaatatcaggtacatcgaggaggccattgagaaact

SEQ ID NO: 89729 - DNA, 100 bp, Homo sapiens
cgctcattgatgtctacggcatcaccgacgaggtgcagcttctggtcattgagtgggagatagagcggagcctgctgagctcagaggaccgggaacaggg

SEQ ID NO: 89730 - DNA, 100 bp, Homo sapiens
cagtggcagaaacgtcaggccgtagccgaagcctcggaaggagcggcccacggcaaaggtcttcgccttgatcgtgttctcctgcatctatggtgagggc

SEQ ID NO: 89731 - DNA, 76 bp, Homo sapiens
gctactggccgcaataattccatagtcaagagcatcacagtctctgagatgaccaagcgagacgtgcctggcttcg

SEQ ID NO: 89732 - DNA, 75 bp, Homo sapiens
atccaaaagattgggttggtatattcaagtttcagctcctggcatcagctctattcaaatctggttcagatttta

SEQ ID NO: 89733 - DNA, 90 bp, Homo sapiens
ttcatgcccgtattgggatttggcacctatgcacctccagagtatggtttgaagtggtgaacatggatttttctcggcttcacatgtaca

SEQ ID NO: 89734 - DNA, 80 bp, Homo sapiens
cgcctggctcctccgaaaagcgcacgagacagatagcctgggctggaagctcttctacgtcacaggctgcctgtttgtgg

SEQ ID NO: 89735 - DNA, 100 bp, Homo sapiens
ctacgagccgcggcggcagcggggcggcggggaagcgtatgaaacctggacaagcatgaagaactagaggagcttgtagcaaggttcttaggagtagaag

SEQ ID NO: 89736 - DNA, 82 bp, Homo sapiens
ccgggcttctgtgaaacatggcggtaggctgggaccataacacaaggatgcctaaatcaaaggaacttgtttcttcaagctc

SEQ ID NO: 89737 - DNA, 100 bp, Homo sapiens
aggaggttcaggctacggtgagccgaaggttccttttttgccaggagattcagaccttgatcagctaacaagaatatttgaaactttgggcacaccaact

SEQ ID NO: 89738 - DNA, 83 bp, Homo sapiens
cgacggcagggtctgaggtcatcggggatgtggacgaaggggccgacctcctagcagcccctgtcaaagggaacaggaagcag

SEQ ID NO: 89739 - DNA, 83 bp, Homo sapiens
gcagccaagccggggcagtttcagtctccaccccaaatgcaggcatcacgttgggtggtttccatttagaccgaggccggttc

SEQ ID NO: 89740 - DNA, 100 bp, Homo sapiens
ggacacagagtacatgactccctcttccaggcctctacggcctttggatacatcccagagttcacggacctgaaggagaagaaggagaaggtggaggaga

SEQ ID NO: 89741 - DNA, 98 bp, Homo sapiens
cgcgacgggtccgatgaggatgcggcgtttgcaggatgcttgagtctaattttcacaattacaccttggtctcattgaatgaagaatttaatcgtgga

SEQ ID NO: 89742 - DNA, 100 bp, Homo sapiens
cggctgtaaagtcatcacctcctgggatcagatgtgcattgagtgaaagctggtggaatgcgaattgtgcagaaacacccacatacaggagacaccaaag

SEQ ID NO: 89743 - DNA, 100 bp, Homo sapiens
aaaatcacctcctctgggacgccttcctctacttctcacagttcagctttagcgtcacctccctcactgggcagcatgggggagaagtcagagaactgtg

SEQ ID NO: 89744 - DNA, 74 bp, Homo sapiens
ccttttgcctcccaccgtgattctgaggcctccccaaccatgtgcaattgtaattggtacgcctcagagaccgg

SEQ ID NO: 89745 - DNA, 75 bp, Homo sapiens
gtggagagaagcagtcctttttgcaggcattgaagttgatatcgatgtggagcacggagggaaaagaagccgcct

SEQ ID NO: 89746 - DNA, 98 bp, Homo sapiens
catgtcacaagagtcggacaagcatcacggaggaaaacctgaacaaactgatccagcacgcccagatacccccggaggatagtgagatcatcaccaac

SEQ ID NO: 89747 - DNA, 75 bp, Homo sapiens
ggcaattgtttatttctgcaccattgtccaaggtcaaggtctgtcagtttgtcgtctctgtcaacgggctcaatg

SEQ ID NO: 89748 - DNA, 110 bp, Homo sapiens
gcacaggcaccaagatgtccaaccgagtggtctgccgagaagccagtcacgccgggagctggtacacagcctcagtggccataaaatgcagtaaaaacaaatccagttcc

SEQ ID NO: 89749 - DNA, 100 bp, Homo sapiens
agaaacttcagcaggcgatagcaatgcacagccaatttcatgctccactataggtattgataggcatgtatggcctcctttatcaggacttcctcctctt

SEQ ID NO: 89750 - DNA, 100 bp, Homo sapiens
gtgacttcccggacgctgggaaatgctgcatatctatgtgagactgaattttcctcttagacttcagctaaaactgtgtattgcatcaggctgagagcag

SEQ ID NO: 89751 - DNA, 100 bp, Homo sapiens
tgttccgttgcgagctgcagctgcgatctctgtggtaggcccaggtctgcgcaggcatggcactaagtgtcccatggcacatttggccctcatggaggcc

SEQ ID NO: 89752 - DNA, 75 bp, Homo sapiens
agaggccccacattggaactaagacagaaaacaaccctttttgctgcacatgtaagtggagctgtgcttaccttt

SEQ ID NO: 89753 - DNA, 100 bp, Homo sapiens
agaacctgctgaaggccccaaccatcgttgggaaatcatctctaaatcccatcctctttcgaggtgttggtgagggccccaaggctgttgcagctcctcg

SEQ ID NO: 89754 - DNA, 97 bp, Homo sapiens
caaaggtgaatcttttggttggtgattttgatgatagccacaaagcaagcagggaaggaagcagccaccctcgccatggcctccccgcccgcctgcc

SEQ ID NO: 89755 - DNA, 100 bp, Homo sapiens
aaatggggaagtgagtgcttggcaactgatgttccacttgacacactggaccaaagcagtatccttacaataatctgtacctggaacgaggcggtgatcc

SEQ ID NO: 89756 - DNA, 50 bp, Homo sapiens
cacccacggagcctccggggctgggcagagcggcttgggtaaatccacct

SEQ ID NO: 89757 - DNA, 80 bp, Homo sapiens
aatgcatctttatgtcagaaacacaaagcagcccaaccaaagggttcaactactcaatttcatgctggcatgagaagata

SEQ ID NO: 89758 - DNA, 100 bp, Homo sapiens
tatgaactacattatccaaaggaagaaagaatttcggaaccctagagtctgctttggatgacctggacctgaatgagtttggcgtggccgccctggagaa

SEQ ID NO: 89759 - DNA, 100 bp, Homo sapiens
aagcgacccgggcgcggcgcggggaggctgaagggacgctcgggtaggcaagatcctggccaatgtgatcattttcatctgtgggaacctggcgggagcc

SEQ ID NO: 89760 - DNA, 100 bp, Homo sapiens
ctccatcgcgcgcacggcagcctagcgcaatgaggcgggcagcactgcgcgcgagcccagcattgacctgctgcaggccttcgtggagcactggaagggc

SEQ ID NO: 89761 - DNA, 83 bp, Homo sapiens
ggaatcaatgcaagttcggttcccactgatggctcagggctgtcacatggtgactgaagaacttcattccataacgtttgaaa

SEQ ID NO: 89762 - DNA, 83 bp, Homo sapiens
cccaatcccactgatgaggatcagcccatggaaagcgtctctagcagctgatatccccagacttggatatagttcctcatccc

SEQ ID NO: 89763 - DNA, 100 bp, Homo sapiens
aagagcaagcccgcacgtgtgaaggcatccactgtgtcaagatatgccataatactgagaatggaggagtctgaggccctggtccatcaactgacagcat

SEQ ID NO: 89764 - DNA, 82 bp, Homo sapiens
gaggaggtgatgatggacatcggctccacccgggtttggtgcacctcgatttggaggaagtagggcagggcccttatctgga

SEQ ID NO: 89765 - DNA, 75 bp, Homo sapiens
gagcagggctgagatgggcaccgcggatctggggccgtcctcagccaagcaaccgacataatggaaacatcaggg

SEQ ID NO: 89766 - DNA, 82 bp, Homo sapiens
ccgggatttgggtcgcagttcttgtttgtggatcgctgtgatcgtcacttgatccagagacaatggccccgatgggatggag

SEQ ID NO: 89767 - DNA, 50 bp, Homo sapiens
cggacagagcccgtggtcgcgcaggtactccaaagattcaggtttactca

SEQ ID NO: 89768 - DNA, 75 bp, Homo sapiens
gtgcagccgagtcactactgcctgcctgcctgcctgctacggcatctggtgtcgaaggctcagatattcctgatg

SEQ ID NO: 89769 - DNA, 98 bp, Homo sapiens
taagtttaagacttcgcgagaacagaatttcttttggcacctcctctccgcgcgttcttggggtgctggagaatctggtaaaagcaccattgtgaagc

SEQ ID NO: 89770 - DNA, 90 bp, Homo sapiens
cggaagccggggccggggctgcggggcgagggtgaccatcgggatgaggaggaagagacccacatgaagaagtcagagtcggaggtggag

SEQ ID NO: 89771 - DNA, 98 bp, Homo sapiens
ataacatcttaactaaaagcactcccacgtctacaatggagtcgagtctagaattcacacagagccacctagggcaattgaaggaacagactaaaaat

SEQ ID NO: 89772 - DNA, 75 bp, Homo sapiens
tcgttggctgccgtccccgctgctgtgcattggttttccaagagataacttcaccaagatgtccagtgataggca

SEQ ID NO: 89773 - DNA, 75 bp, Homo sapiens
ttccagcctacttacaagtatgatacgggctctgacgactgggataccagctattatttcatcaaacatgtcccg

SEQ ID NO: 89774 - DNA, 80 bp, Homo sapiens
cgaggcaaggagctaaagcagcgtgcgttcagccctggggtgtctggaaatgaagtatggaaatgaaatcatgaataaag

SEQ ID NO: 89775 - DNA, 75 bp, Homo sapiens
aaaaaggcagatactgatctggtcgaatttacaagcactctcagcaacctttgattacctatgaaaaatatgatg

SEQ ID NO: 89776 - DNA, 88 bp, Homo sapiens
cacctacaaaaagatgaatccttctgatgtctcttttacaggtattccactgaactgaagaaactctactgccaaattgcaaagacat

SEQ ID NO: 89777 - DNA, 101 bp, Homo sapiens
gggtggctctttgctaagtgctgctgttgcttcccgtgtagaggtgctggagaatctggtaaaagcaccattgtgaagcagatgaggatcctgcatgttaa

SEQ ID NO: 89778 - DNA, 82 bp, Homo sapiens
tatttaagaaagaagatgttaactttcaggtggccatcaagtcaatccggaaggacaaaatcaaagatgagcaagatctgat

SEQ ID NO: 89779 - DNA, 56 bp, Homo sapiens
tatctggcttactttgtccacactccgggcctgaccgccgctgcctacagagtcac

SEQ ID NO: 89780 - DNA, 96 bp, Homo sapiens
cctcagcctccggagtagctgggattacaggtatcattggaacatttcaagatcatcaaatcaaattccacagggattggtgaccaaccagaaggc

SEQ ID NO: 89781 - DNA, 100 bp, Homo sapiens
gccattcttagtcaaaaagctcatcttgccttatcaaatgcctctttgacaaggccacttcatcatcaagcttctgcctgcccgcattctcatggaaacc

SEQ ID NO: 89782 - DNA, 82 bp, Homo sapiens
gattcgccgaggcaccgaggcactcagaggaggcgcagttgtgtagcagttgagtaatgctggttagctgttaaggtggcgt

SEQ ID NO: 89783 - DNA, 82 bp, Homo sapiens
aaaatcccatctaccgcaactctcagttcgagagtaaaggatgtctcagtggtacgaacttcagcagcttgactcaaaattc

SEQ ID NO: 89784 - DNA, 75 bp, Homo sapiens
gaaggacaaatgaacttcaatgcagattctagccaacataaagattattgctcagttgtaactattgtggaccag

SEQ ID NO: 89785 - DNA, 83 bp, Homo sapiens
aggtggctttagtgaagtgtataaggtacttgaagtttattgagttgcccttgactcagagaaagttttgtcaaacatgtcag

SEQ ID NO: 89786 - DNA, 78 bp, Homo sapiens
cttgtcagatctgctacttgaactaccctaactcgagtcaatgcatgtgttgatgtggtgctctcaggggtgaagctc

SEQ ID NO: 89787 - DNA, 100 bp, Homo sapiens
cccgggacccagattgcgggttcagggcagtggcaggtgtttgggccagacaagcctgtccaggccttggtgggggaggacgcagcattctcctgtttcc

SEQ ID NO: 89788 - DNA, 100 bp, Homo sapiens
aaaatggagcccttcaccaatgtttgaagaaaacaggtctgaaacaaggtcttacccccagctgcttctgaacacagtgactgccagatctccaaacatc

SEQ ID NO: 89789 - DNA, 75 bp, Homo sapiens
aaacctgtcgggtagaaacctcagtgaagccgttcctgagcatgctgcccgcctgcagcgcttggcccagatcca

SEQ ID NO: 89790 - DNA, 90 bp, Homo sapiens
gatgaagccaatgtccaatcgtgaaagggatcactgagattctgatgaacagaccttctgcccgcaatgccttggggaatgtcttcgtca

SEQ ID NO: 89791 - DNA, 100 bp, Homo sapiens
tatcctctgcagcatccttgatgataaaccagtaaatataacagcgacttgattgcatgtacagtgatcaccaaggatggcggcatggtccagcgattcc

SEQ ID NO: 89792 - DNA, 96 bp, Homo sapiens
cggggccgacgggatgcggtgccttcgccttcggattgcgttgcagaaatgcactcggtgatggaaagagagccactattctgaagaacacttggc

SEQ ID NO: 89793 - DNA, 96 bp, Homo sapiens
acatttcttttgtgcaagatgagcctcaagtgcttctgcattacagtgcatagcgggctgctgcttcatccccttctgcgtggatgccctgcagga

SEQ ID NO: 89794 - DNA, 73 bp, Homo sapiens
taccaagtatgccctggaaaggaaaactttcggaaagctacttgtagaggctgtccggagtacacatggctta

SEQ ID NO: 89795 - DNA, 108 bp, Homo sapiens
cggagacgagtggtgggagaaccagccgactggagcaggcagcagcccagggccgttgctccagggagaactgcaaatatcttcatccacccccacatttaaaaacgc

SEQ ID NO: 89796 - DNA, 100 bp, Homo sapiens
attttattgcattgattgtgcgttctcgattttacagagggttttgactctgggaggagggctgccttatttggagcaccttaatctctctggttgtctt

SEQ ID NO: 89797 - DNA, 90 bp, Homo sapiens
gagagtaaaaccatgttacagccttctgtgggaagccatttggatgtcggggtttgggatgtacattccgttcctgcagctgaattgcga

SEQ ID NO: 89798 - DNA, 100 bp, Homo sapiens
atgactggcctactgggttttggacgttcatgtatcctctgccgcagcgggaaccgcaagagcttggtggtaggaacgccctccccgaccctctcccggc

SEQ ID NO: 89799 - DNA, 75 bp, Homo sapiens
gaaaaaggctgaaattgaacatcatgaaatggctaagtcaagtcttcgaatgagcttgaagtacatctggattcc

SEQ ID NO: 89800 - DNA, 100 bp, Homo sapiens
cccctgacctggcctgcaacttcagcctttctcaaaatcggggtcttgcctcacccaagctagagtgcagtggcctttgaagcttactacagcctcaaac

SEQ ID NO: 89801 - DNA, 100 bp, Homo sapiens
ggcgctcctgctcctccaggcgctgcccagccccttgtcagccagggctgaacccccgcaggcatacgatggcttaagctccacaatgtcccgccttgcc

SEQ ID NO: 89802 - DNA, 96 bp, Homo sapiens
tgggaacttggtttaatgaacacacacattccagagaactgtgaggccagtaatagtagccatgagtctcgtattggtctagctgaggggttggaa

SEQ ID NO: 89803 - DNA, 50 bp, Homo sapiens
ccaggaccccctagaagtctagaaatgtgaaatcccattctctggctgga

SEQ ID NO: 89804 - DNA, 90 bp, Homo sapiens
gcagcaggagtgtgggattgctgtcctggagcagatggagaaccacgcttgtgctgcaggcctggaacgtgcctgacctctcagctggcg

SEQ ID NO: 89805 - DNA, 90 bp, Homo sapiens
cgcgcgctcgcggaaccccgtggcttccccgacgcagcccagcggcacggagaaaggtcccttcaccgatgttgtcaccaccaacctaaa

SEQ ID NO: 89806 - DNA, 76 bp, Homo sapiens
gcatgactcggtggtcatggtcacccaggagagtgacagcagctttctggtcaagaattcagagcaagccctgcag

SEQ ID NO: 89807 - DNA, 82 bp, Homo sapiens
ggtgattctctgctagatgttgtggttgaaaataatctagatattgatggctttggccaaagctgtcttgaaatttatcgag

SEQ ID NO: 89808 - DNA, 101 bp, Homo sapiens
atcccattgtacccagagtgcagagccgcctttccagcatgcaggggctgctcagacaatgcagatcttcgtgaagactctgactggtaagaccatcaccc

SEQ ID NO: 89809 - DNA, 80 bp, Homo sapiens
gctgcttcaatgtccgcatcgcaaccaccgccctggccatctaccatgtgtcttctcaagtcttaggattgcagcaacac

SEQ ID NO: 89810 - DNA, 83 bp, Homo sapiens
ctgaaattggcagatacccatttaaggtgcacacatcttgaccaactcagcagcaaggtggattttctttgtgtttaaagaaa

SEQ ID NO: 89811 - DNA, 90 bp, Homo sapiens
caccgacatggaacagggactcactggggtatcgatcaggatgggatcctcatagaggggcagataatgtttctactaaatcttcggaca

SEQ ID NO: 89812 - DNA, 86 bp, Homo sapiens
gggacacagcggggcaggagcgcttccgcaccatcacctccacccctgggcgctgcctatggcacagccaagagcggtaccggcat

SEQ ID NO: 89813 - DNA, 96 bp, Homo sapiens
gaatggcccaagaggaaggtgcttcaggacctggtacctgatgatcgaaaggggcagccattttggggggtgctgatggatacctgcggggtcggc

SEQ ID NO: 89814 - DNA, 100 bp, Homo sapiens
gtgcggcatcacctcctccaagaccgtgctggtctttctcaacctcatcttctggagacagggaagaacgattggcagcactcacagctgctcaacaaga

SEQ ID NO: 89815 - DNA, 100 bp, Homo sapiens
cagagccccagaaagcagagaactgaagtgcagccatcaggtggaaggaaccacctctagcagcaatacagtggttgctggccaggaaaatttcccagat

SEQ ID NO: 89816 - DNA, 74 bp, Homo sapiens
aggagataaaggtggtagagttgtcatctttcaacaggagcaggaggttggtacagaggatataccctccaaaa

SEQ ID NO: 89817 - DNA, 82 bp, Homo sapiens
aaacagaacaggaggtggtagagggcatggatatctctactcgctccaaaggtcagcccaaggccaaccccactgtcactct

SEQ ID NO: 89818 - DNA, 80 bp, Homo sapiens
gtagagaggaagagagaagacttggcgatagttccctttctagaaagaataactgaagtgaagtgatggactccgatttg

SEQ ID NO: 89819 - DNA, 100 bp, Homo sapiens
tagaattcaacaaatataagtatacagcatctgtcctcatagcagggccatgctatgatagtggaagcttatccaaaataatagatccagaagaagtgac

SEQ ID NO: 89820 - DNA, 100 bp, Homo sapiens
tggggaccgccctggacatcaagattaaaagagcgaataaagtttatcacgccgggcgccgtgccgtccctgcagtgacaccgaggtgctcctagccgtc

SEQ ID NO: 89821 - DNA, 87 bp, Homo sapiens
gcgcgcgccagcaagaagatcctgctgcccgagcccagggggggccctcagcctcttggccttgaacgggctgttcatcttgattca

SEQ ID NO: 89822 - DNA, 79 bp, Homo sapiens
cagtcagagagccttgggccagagttccaggggctctgggagtggctgccagatgtacagatcagctctcaaaatgtct

SEQ ID NO: 89823 - DNA, 75 bp, Homo sapiens
ttcgggtgggagtgacccgattttccagaatcttttagctgaaaaagtagagcagctgatggaatggagttccag

SEQ ID NO: 89824 - DNA, 100 bp, Homo sapiens
cctgggcgcgtcagaacaggcgctgcggctgatcatctccatcttcctgggtgtttcccattaaacactaccaggacaaaatcaggccttacatccagct

SEQ ID NO: 89825 - DNA, 75 bp, Homo sapiens
accctgggatccgcccttggagggtttggaacagcagaaaggcctaaagaatgtatttgacgaagcaatattggc

SEQ ID NO: 89826 - DNA, 80 bp, Homo sapiens
cttcatctgcccggcgctgatctacaagaaaatccacaagaacgcactttcctcccaggctgaccaactgactgaagagc

SEQ ID NO: 89827 - DNA, 74 bp, Homo sapiens
aaagatgttctgaagactttagtcctctctcacctgatgtgcctatggttttggagattttaggtaagaagttt

SEQ ID NO: 89828 - DNA, 100 bp, Homo sapiens
cactgactttcagctatggaatcgttggaatcgaagcctcttaaaatggcagatgacttggacttcgagacaggagatgcaggggcctcagccaccttcc

SEQ ID NO: 89829 - DNA, 100 bp, Homo sapiens
tttcaaaattcaacaagatctatgaatttgattatcatctgtatggccagggaactgctcgcagaaagaagaaggtggttcatagaacagccacagcaga

SEQ ID NO: 89830 - DNA, 100 bp, Homo sapiens
acagatgatacctttgatccagaacttgcagcaacaatagagctggagataagatgggtagactgctacttcccttttacacatccttcctttgagatgg

SEQ ID NO: 89831 - DNA, 89 bp, Homo sapiens
cttcagagttctttgtggatggacttgattctgatgagagttgtattccctgaatgactataaaccacccatttcgaaagcgaaaatga

SEQ ID NO: 89832 - DNA, 99 bp, Homo sapiens
ccatacatggtacagccagagtaccgaatctatgagatgaacaagagactgcagtctcgcacagagatgccttcaattaagttgcagagttctgatgga

SEQ ID NO: 89833 - DNA, 83 bp, Homo sapiens
ccactttcgccagcccgtgccgcgagcgcggcctgcaggagggtcccctggaagtgacgctgactcagccagtgaggagcggg

SEQ ID NO: 89834 - DNA, 74 bp, Homo sapiens
cctcgtcgaaaggattggattggcatctttagaggctcgtgcaatccgcttcagacaggatggtaacgaagccg

SEQ ID NO: 89835 - DNA, 50 bp, Homo sapiens
cttccccctccttcagcgctttgacagggccccttcgtcctccttttcca

SEQ ID NO: 89836 - DNA, 98 bp, Homo sapiens
gagatcgtctctctcatcgaggcccaaaccgccaagggtctcttgcaacgtgtgagctgcctcttgccaagagtgagtggcaaaagaaactaaccccg

SEQ ID NO: 89837 - DNA, 100 bp, Homo sapiens
ttcattggcaagccacaattatgggacctacctttgcattgcagctgtaattaaagaatgccatctcgtcatactgtcgctgaagagccaaaccttagat

SEQ ID NO: 89838 - DNA, 100 bp, Homo sapiens
cgggatcgtgaccgagaccgtgaccgagagcgtgaccgagagcgcgaatatcgtcatcgttagaagggctgaccagtttgagtatgtaatgtatggaaaa

SEQ ID NO: 89839 - DNA, 100 bp, Homo sapiens
ggagtgacacaaggtgatagacttcgggccttgaaaagcagaagacaatccaaaacaaacgctattcctctcacgccatgtgtttatactgtgggatctc

SEQ ID NO: 89840 - DNA, 83 bp, Homo sapiens
acatggaggccgtgaagaccttcaatagcgagggcaccattcccaaactcacagctaaatccaactgccgctatgaaattgag

SEQ ID NO: 89841 - DNA, 50 bp, Homo sapiens
cttcgccaaggctggcgcagtcggatatccatcaaatattgagaagaaag

SEQ ID NO: 89842 - DNA, 82 bp, Homo sapiens
gccgccgctgctacctgcagcgccgtgtggcacgacacaaaaatcaggtgtcgtgaaaactacccctaaaagccaaaatggg

SEQ ID NO: 89843 - DNA, 74 bp, Homo sapiens
gaggaagccctcctgctcctcctcatcagcgaatccatggaccctgatgctcccataagacagaaaatgcccct

SEQ ID NO: 89844 - DNA, 75 bp, Homo sapiens
aaggagctaaagcagcgtgcgttcagccctgggtcccaggggcagccactggcctcccagcccccggtcgtcgac

SEQ ID NO: 89845 - DNA, 75 bp, Homo sapiens
ggacggttttcgtacgggcggccgtgcgcgaggcgagattgtagaaggcatgaaacaaaaaatgtggagtattga

SEQ ID NO: 89846 - DNA, 100 bp, Homo sapiens
gacgatctgcacttcgcattttggcattgacatttaattttagggtcctttatatagaagggagagtaggattcttacagaagcagagattgatgctcac

SEQ ID NO: 89847 - DNA, 83 bp, Homo sapiens
gcgctttggatgccgagagcgagtatctgacagacagtctagcagtgcttccttggagaccctgttagcacttcttcaggcag

SEQ ID NO: 89848 - DNA, 84 bp, Homo sapiens
atgatgatatccttctcaaccttgtgggatgtgaaaactctgttactgaagggagtgagttttccgggagtccctacagccacc

SEQ ID NO: 89849 - DNA, 100 bp, Homo sapiens
gggttgcggtgcgagtgcggttcgctcccagccccacagggttatcgtgtgagcttcggtttccttgtttaccctgccactagctgacatggttgatgca

SEQ ID NO: 89850 - DNA, 90 bp, Homo sapiens
gccaatatggaattgccaggttcttcactgaataagcctgatgctggatgaccaaccccctatggaggcccagtatgcagaggagggccc

SEQ ID NO: 89851 - DNA, 100 bp, Homo sapiens
atcatcacaccatcagcttcagagaatggcagccatttatttgtcccgtgaggagaaggcagagcccccccaggctatgaatgccctgatgcggttgaac

SEQ ID NO: 89852 - DNA, 100 bp, Homo sapiens
tctacaacgaaggtgaagccacggaagataagccccgcagcgcctccaccccagagacccggaccaagttcacacaggacaatctgtgccacgcccagcg

SEQ ID NO: 89853 - DNA, 83 bp, Homo sapiens
cccgaacgggttgcttcccccgctgcgagtcaacgaaatggagatacagggtattacaaaaggtgccttgtacctcgtccaag

SEQ ID NO: 89854 - DNA, 100 bp, Homo sapiens
ggggagagggacctcatctttcacaaaggccttcacaacgatgggactgaggaagacccacaggcagaactggccatcattcatggtcagatggcttata

SEQ ID NO: 89855 - DNA, 73 bp, Homo sapiens
aggatttggcttcattaacagtgagaacgtgttcaagagatgctgttgtcggggccctgatgccggccgccat

SEQ ID NO: 89856 - DNA, 90 bp, Homo sapiens
ctggaggatgtgcggggtgcgccggcagaggatccagtgttcaccatcctggccccggaaggtatcacctcttctgggctcaagatggac

SEQ ID NO: 89857 - DNA, 112 bp, Homo sapiens
cagcgcgacgtcgtgtcgagttcccaaaaagctccgcaggggctgtagggaggaacgaatgcaggaatttgggaactgagctgtgcaagtgctgaagaaggagatttgtttg

SEQ ID NO: 89858 - DNA, 76 bp, Homo sapiens
gcgcggatgggatccagctgttagtcggccaggcccagacatgtccgtccttgtaagttaaaagcttccatgggag

SEQ ID NO: 89859 - DNA, 102 bp, Homo sapiens
agtggcctgggccggagcaggcgaggtggccggagccgtgtggaccaggaggagcgctgttcaagaagacgtggaagctgcgggctctgaaggaaggcaaga

SEQ ID NO: 89860 - DNA, 75 bp, Homo sapiens
ttcaacatggaggcggaggtcgataagctggaactgatggtgatggcatcagctgagaagggaaggaagcccatg

SEQ ID NO: 89861 - DNA, 100 bp, Homo sapiens
ccagctgtgaggactacctaatgatttcgtgaagcatatgtgcctcttttcttacccaaagttaccaattgccagttcttgatacaatgtttctaagaaa

SEQ ID NO: 89862 - DNA, 51 bp, Homo sapiens
atgtcgcttgagaccctgaaaaggtctgaagaaaaccctgcgggatgagat

SEQ ID NO: 89863 - DNA, 88 bp, Homo sapiens
gctggctctggctgtggcaaatgtgactgccatggagtgaagggacaaaagctcttcagagaagtaagaataatgaagattttaaatc

SEQ ID NO: 89864 - DNA, 73 bp, Homo sapiens
agtgggcacctgtatgctatgaaggtgctgaagaaggcaacgctgaaagggctggagcggctctgggctccgg

SEQ ID NO: 89865 - DNA, 98 bp, Homo sapiens
agtgaagtgctccactcgaacagatgtgagcgagaaagccgttgcctccagcaccacttctaatgggtatttgaagtataccatacaactgttttgaa

SEQ ID NO: 89866 - DNA, 90 bp, Homo sapiens
cttaaaccagttataggggtaaacactgatccagaacgcacaagcagcaggagacccagaatatctagagcagccatcaagaagtgattt

SEQ ID NO: 89867 - DNA, 90 bp, Homo sapiens
gactgcaggaagaacgtgctgggtcacatgcagcagacagccattgatatcctgacaacagtagtacgaaatacaaagcctcccctttcc

SEQ ID NO: 89868 - DNA, 100 bp, Homo sapiens
gctcacagctttaactggagtggcagtgagaagcgccactgctttgatgtcaactataattcaagttacatgtatgagaaagagagtgagctcatacaga

SEQ ID NO: 89869 - DNA, 82 bp, Homo sapiens
tactttaccaacgagctgaagcaggtcctcctcgactggattaatgacgtgctggtggaggagaggatcattgtgaagcagc

SEQ ID NO: 89870 - DNA, 100 bp, Homo sapiens
gccagatagtaccatgatagctgtatcagataaaagtcttcatgttggcactcaatgtgccttaacaagaagatgcccacaagaagggtttgatcatcgg

SEQ ID NO: 89871 - DNA, 99 bp, Homo sapiens
aaagaagcagcaccttatctcagctccctggggataagtccaaagcctttgatttccttagtgaagaacacgaatgcagagtttgagtccagatcccaa

SEQ ID NO: 89872 - DNA, 98 bp, Homo sapiens
aaataaatagggaagatggagacaccctctgggggtcctctctgagtcaaatccagtgtgacttctgacagctctctccatggaaggaggcggcggcc

SEQ ID NO: 89873 - DNA, 101 bp, Homo sapiens
ggcagaacattgcttatgaatatctgtgccacttagaggaagccaaaagcagcagccgctcttctaaaacattcaaaccaaagaagaatatccctgaagga

SEQ ID NO: 89874 - DNA, 100 bp, Homo sapiens
actggggccagggaaccctggtcaccgtctcctcagaaagaagcttccggttctgaggtcctggaggtgccatttccctctctgttgaagcaaaggccgg

SEQ ID NO: 89875 - DNA, 100 bp, Homo sapiens
caagaggcaaaggggaggttacgcagcaaaccatccagaaggaatactcccccagttgcaagaggcgcaggaccgtggaagacttcaacaaattctgcac

SEQ ID NO: 89876 - DNA, 74 bp, Homo sapiens
gaagaattttccaaatgaatttgcaaaacttactgtaggtcatacttacctggttgcttgcgcatctagtaatg

SEQ ID NO: 89877 - DNA, 132 bp, Homo sapiens
aagaaatgaattttaatgtctggaatatcaaagagatgctcagtattccttcaggctctgggtcttgggcgtctttggtactggcttttttaggggtctgcctggggattacccttgctgtggatagaagca

SEQ ID NO: 89878 - DNA, 49 bp, Homo sapiens
tgcaaagacggaaatagagaagcttcagaacctgcaaccatggtcgtgc

SEQ ID NO: 89879 - DNA, 90 bp, Homo sapiens
aaaatgcaagaaaaaaatatccaaagcttaatggattgttggcagatatagttcattgtatgctgatggtagcatatgtttagatatcct

SEQ ID NO: 89880 - DNA, 96 bp, Homo sapiens
gcctggacctcccaaagtactgagattgttatggaggttttgatgactatggtggctataataattacggctatgggaatgatggctttgatgaca

SEQ ID NO: 89881 - DNA, 90 bp, Homo sapiens
cgagaatgaagccatccaatggatgcaggaaaactggtgtatgcgccgctgcctggccgcccggacgccttccaccgctgcatcttcctc

SEQ ID NO: 89882 - DNA, 97 bp, Homo sapiens
atgagaagcagtgtaagcagtgtgcaaacaaggttcaacatgcactgaaaaaatcagagaaggctttggataccctaaacaaagccattgtcattga

SEQ ID NO: 89883 - DNA, 100 bp, Homo sapiens
tcacagcaaccagcaccagatgaaggagcattcctcttggagttggaagctgtgaaatgtttcagcatggtgctattcactaatggtgtgaactcaaaag

SEQ ID NO: 89884 - DNA, 83 bp, Homo sapiens
tgcggagcccgcagaacctccacagtcaagaggacggcctgccttgctctgccaggaaccatgagtgaggcccgcagggacag

SEQ ID NO: 89885 - DNA, 83 bp, Homo sapiens
gtctacgataacgcgcttttgctcctcctgaagtgtctttggtccaacgttgttccaggacaaacagcatattctatggccta

SEQ ID NO: 89886 - DNA, 90 bp, Homo sapiens
cggcgcacgacgagtactggcatgcgcacgtggacaagatactaatggaccatactaccaaggaccagtccacctgaaccacacactcta

SEQ ID NO: 89887 - DNA, 75 bp, Homo sapiens
ctgagcttgtggcagaagggagaaaaggcgacggcggattgacagaagtatgattggagagcccacaaactttgt

SEQ ID NO: 89888 - DNA, 73 bp, Homo sapiens
gataatgtaatggctttatacaagaagattatggtatcataactattgtggattcaaaatatggattaaaagt

SEQ ID NO: 89889 - DNA, 87 bp, Homo sapiens
accgtcgccagcggagcgaacccgagagcgtggagcgggctgggccagggatttcagtcataatcggttgtctaactggaacatcag

SEQ ID NO: 89890 - DNA, 101 bp, Homo sapiens
agctggagagcgtcaacaagctgtaccaggacgaaaagataacgtggttagaaggccattcactggcacagacagtatttacgtgcctttacattcataat

SEQ ID NO: 89891 - DNA, 82 bp, Homo sapiens
ggcgcttcgagaggaagggcttcaagttggtggcgctgaagctggtgcaggtggatcagtacaagggaaagcgggatttgga

SEQ ID NO: 89892 - DNA, 99 bp, Homo sapiens
agatgatacaaatgaatttgttagtgctgtgtgctggagggcactaccagatggggctatttttatgattcccacaaatccaccaccaacattcagaaa

SEQ ID NO: 89893 - DNA, 101 bp, Homo sapiens
aacaagccagaaaaacatttgagagagccatgaaactggaacaggagtttactgaacatttcacaggaattataggaccgcctataatcttgtacacgaat

SEQ ID NO: 89894 - DNA, 100 bp, Homo sapiens
caaagctctcatcggagagatggggatgactttttccagtgctacacccccaaaggatggatttgtaatcgctgacgttcaactagttacaagcaattct

SEQ ID NO: 89895 - DNA, 83 bp, Homo sapiens
aagatcgtcgccacctggatgctggaggtttggggaaaggtgctgctgaagcaatggaagaaaaattaagtattggctgtcct

SEQ ID NO: 89896 - DNA, 100 bp, Homo sapiens
agaaaatacaaatcacacgcataatggatgaaaggaaccgacaggtgaactactgagttcttcattatgtctgatggagattatgattacctcatcaagt

SEQ ID NO: 89897 - DNA, 100 bp, Homo sapiens
agatacctgctttcttcagcctatgtagacagccacaaatgggaagcaagagaaaaagaacattactgtcttgaatagcctaacatggcagaccagagac

SEQ ID NO: 89898 - DNA, 83 bp, Homo sapiens
gcctccctgctctgctgctcattcgcctgccctacacagccaggctgccccccggtgtggaccccacccaagtttcctcctcc

SEQ ID NO: 89899 - DNA, 51 bp, Homo sapiens
gtgcggccctacatgcctcagaagagcaaacgaggcccctgagagctccac

SEQ ID NO: 89900 - DNA, 101 bp, Homo sapiens
tggtgtcaggtgctggctgtgccctggagcccagctatgtggaggccctacacagttgcctgcagatcctgatcgcggatgggtgcagccctcgaggaccc

SEQ ID NO: 89901 - DNA, 50 bp, Homo sapiens
ggatgatgccaaagttttattagatcaacaacccctccccgtcgtaaacg

SEQ ID NO: 89902 - DNA, 101 bp, Homo sapiens
atatccggaaactctggtgagggtggtgcaggtcgttccaggggtagaggaggcatgaaggatgaccgtcgggacagatactctgcgggcaaaaggggtgg

SEQ ID NO: 89903 - DNA, 82 bp, Homo sapiens
gctcccccgcctcggggagggcaccaggacatgaacagagaagtggtgaagactgactctgctgccacaaggattcctgagc

SEQ ID NO: 89904 - DNA, 100 bp, Homo sapiens
acaagaagttgcagctgattaaggactatcgggagaaagtggagtccgagctgagatccatctgcaccacggtgctggatggtgattgctcacaccaaag

SEQ ID NO: 89905 - DNA, 83 bp, Homo sapiens
ccgacctcgacgtcttgcctgtgtcccacttgttcgcggcctatagaattcggttccctcaaaattataaaggcaggaaagct

SEQ ID NO: 89906 - DNA, 98 bp, Homo sapiens
gatggcggagaacagcggtcgcgccggcaagagcagcgggagcggcgcggggaagggggcggtgtccgcagagcaggctgaagccgacgtagcttctc

SEQ ID NO: 89907 - DNA, 82 bp, Homo sapiens
tggaccaagagaacaatgggaaccagtctttcaaaatactttgtgtggacagtaatgacctcacgtttccgattgcctgctg

SEQ ID NO: 89908 - DNA, 50 bp, Homo sapiens
gtccgctttggagaactacatcaaccgaaacatgacagctgccctacagg

SEQ ID NO: 89909 - DNA, 75 bp, Homo sapiens
gttcaccccagagcattttagatgatgttgccatgatgtcctcctcgcactttcttaccagccctttgcaaaatt

SEQ ID NO: 89910 - DNA, 75 bp, Homo sapiens
gccataaccactgaggccacagcacagtgcataccaggttatatgtcaccacacccatctccattaggagcccca

SEQ ID NO: 89911 - DNA, 90 bp, Homo sapiens
actcgagctttgaggcttcctccaactaccacttgccagcaacaaaggcatgaaggcagggctggaatggcagccctagttctgcgtccc

SEQ ID NO: 89912 - DNA, 75 bp, Homo sapiens
agttcatgcttatgaatgctcgacttcagggctgatcccttatccaacatggttctaaccttcagtactaaagaa

SEQ ID NO: 89913 - DNA, 75 bp, Homo sapiens
tcttcctcaactatctcgctgacacgcagatagggccagatttgagtgtgtgaatttttgagtgaaacctggaac

SEQ ID NO: 89914 - DNA, 75 bp, Homo sapiens
gtagaaaaggcttttccagtttgcataatatgaggaaactgaggcttggtgaagttacgaaacttgtccaaaatc

SEQ ID NO: 89915 - DNA, 100 bp, Homo sapiens
ctcggagctaatccacaatctccgcaggacgactggagtgagcactggcctgggagtctgaagattgtgccttcagacctacttcgtcacttactagctg

SEQ ID NO: 89916 - DNA, 98 bp, Homo sapiens
gacgaggactacgtgccctatgtgccgttacggcagcgccggcagctactgatgttccggaagctacacaactcctacacagacgtgatgtgcaaccc

SEQ ID NO: 89917 - DNA, 90 bp, Homo sapiens
ccgcgcggcctccgcggagccaggttggatttggtctagggagtcccagaaagaagtagaaaaagagagagaagcctaccgtcggagaac

SEQ ID NO: 89918 - DNA, 75 bp, Homo sapiens
cgccttcgcctcctaatccctagccactatggatcagtttgacaacttagaaaaacacacacagtggggaattga

SEQ ID NO: 89919 - DNA, 87 bp, Homo sapiens
ttctgttggagtgcgttcggtgtgccgtgggtccgcgctgcttccacccaacttcctgttaggtgcaaaaacttcaagctattctaa

SEQ ID NO: 89920 - DNA, 74 bp, Homo sapiens
gctcttgtgccctagcaccccgagaaccgtcagtttgagccagatggcgggggcacgaacagcatcaccgtgag

SEQ ID NO: 89921 - DNA, 97 bp, Homo sapiens
ccttctaccaactgcagttttagatacgttttgaaaatttcatcacctgagctttttgcactgactcctcttctctcagactaagcactctccagct

SEQ ID NO: 89922 - DNA, 100 bp, Homo sapiens
cccgctcgctgggagagaggtacctctccttttccctctccctttccctaagagtggagactgctgcacggactctggaaccatgaacatatttgatcga

SEQ ID NO: 89923 - DNA, 50 bp, Homo sapiens
gccgtccggagccagccaacgagcggctgggctaagcagttccaagcttt

SEQ ID NO: 89924 - DNA, 94 bp, Homo sapiens
tcagagagggaagagattcagccagcacactcctcgcgagcaagcaattctgtggtgttcttggtcacacatttatggagtttctgaagggcag

SEQ ID NO: 89925 - DNA, 83 bp, Homo sapiens
gaggaccagtcagaccagcgcgtcatcatcaaggtttggtgcacctcgatttggaggaagtagggcagggcccttatctggaa

SEQ ID NO: 89926 - DNA, 83 bp, Homo sapiens
ctcccaagtagctgggattgcagctaccagagattcactgactgctataagtgcttctaccagttgcagcctgcgatgacaca

SEQ ID NO: 89927 - DNA, 80 bp, Homo sapiens
aaagctactgaacttcatgcttgacaatctcgcaggtatcagtgcttcaaatcggcctggatgtttgaggtgtttcatag

SEQ ID NO: 89928 - DNA, 100 bp, Homo sapiens
tatcaagtaatggtgcaaagcctgaatctctagtgatccctgaaaagttccagcatattttgcgagtactcaacaccaacatcgatgggcggcggaaaat

SEQ ID NO: 89929 - DNA, 100 bp, Homo sapiens
cagttccgagggcagatctccaaggggcggaggcagagccgcggatggcttaccaaataactttagagctcacccacttcagttggagcaatccagtgac

SEQ ID NO: 89930 - DNA, 96 bp, Homo sapiens
cttcatcgccctggagatcgtggacgagcaggtgcagctcaccttctctgcaggacactttgccaccatcaccttgaccttcatcgacaagaacgg

SEQ ID NO: 89931 - DNA, 98 bp, Homo sapiens
gtgggcgtggagccggcagccgacggcaaaggtgtcgtggtggtcattaagcggagatccgaacatcgggtcagaagttgagatttccactatcgaga

SEQ ID NO: 89932 - DNA, 51 bp, Homo sapiens
taggtttaattgcaggtgccagatttgatggtcctcgaagatttgaggatt

SEQ ID NO: 89933 - DNA, 83 bp, Homo sapiens
ccatgtcgggttattcgagtgaccgagaccgcggccgggaccgagggagccttcacgtaaatgggtccagtcatgcctcccag

SEQ ID NO: 89934 - DNA, 100 bp, Homo sapiens
atgttttccgagaaggcctgggagcggctgtaaataatacccgagaggaaataggcccggcaggtctgccatcatggatgttctcgcagaagcaaatggc

SEQ ID NO: 89935 - DNA, 90 bp, Homo sapiens
cagaatgaagacttgaggcgaatggccgaatctctccggcagaaatggtgcacagtgctttccaggcccagcgggctttccttctgatgg

SEQ ID NO: 89936 - DNA, 101 bp, Homo sapiens
caatgatgagaggatgtggtggtctactctgatgtcaatcttgagggctagcttcaaggttactgactttttatgatgtttggtggctatgagactataga

SEQ ID NO: 89937 - DNA, 97 bp, Homo sapiens
gacagagtttgacagggagatagaccggggatccctcaaccctggaaaacagctgacacagagtctgggatctaataattcagtcattttggatgga

SEQ ID NO: 89938 - DNA, 75 bp, Homo sapiens
acaaccctgaagagaacagccaggcctggtggatccaaagcagttgctggaagatggaataaggaaagagcttgt

SEQ ID NO: 89939 - DNA, 90 bp, Homo sapiens
aaaatggcctcatcaaggagccctgtgggacccccgagtatctgggtacgacaacatggcagagctgtttgcggtggtgaagacaatgca

SEQ ID NO: 89940 - DNA, 100 bp, Homo sapiens
gaactattccacttgtgttatgtgcagatcttaattctttgccagactctgtgcctggatcaaagtggaacagctgaagccatatcatgctcataaagag

SEQ ID NO: 89941 - DNA, 82 bp, Homo sapiens
tgtactttccatttgccttcctggaaaggtgactcttttgatggtgggacttgataatgctggtaaaaccgcaacagcaaag

SEQ ID NO: 89942 - DNA, 101 bp, Homo sapiens
cagccgtagacaccagctccgaaatcaccaccaagattttatcatgtgggcaacctgctgcaactggttctgcctggatggacagcctgaggaggtcccac

SEQ ID NO: 89943 - DNA, 80 bp, Homo sapiens
cgggtggcttacagacgctgccagcatcgccgccgccagattcttcgctgctgctgccttaccgccgagaaccaccaccc

SEQ ID NO: 89944 - DNA, 98 bp, Homo sapiens
tctcattcgtcatcccgtgtccagaccggccggcgtcacagcgaatgtggaggatagactacagtgccgctggaagtgaaagtacttagcattgatca

SEQ ID NO: 89945 - DNA, 98 bp, Homo sapiens
cctcagtctcccaaagtgctggaattacaggggcgtggtgaccaagatgaagatgcagaggaccattgtcatccgccgagactatctgcactacatcc

SEQ ID NO: 89946 - DNA, 81 bp, Homo sapiens
gcggccctgggagctggaggaaccgcgcaaagccttctagacaagctcagtggaatctgaagggcccaccccatggaggaa

SEQ ID NO: 89947 - DNA, 75 bp, Homo sapiens
cttcaggtttaccccccgaatccagaggctgaatgagctagagaacattgatgatggcacctcagatcgccccta

SEQ ID NO: 89948 - DNA, 100 bp, Homo sapiens
tagtagtccctgggatccgtatgtccattaaacttcatcagagcagactctgcaggtcctctcagatcttgtgcggaaggccaggagtcggaacattggc

SEQ ID NO: 89949 - DNA, 98 bp, Homo sapiens
gctttagctatcaaagtactaaataagaccatggatgttagtaaactctctgctgaaaaagggctccacgctggccaggaggatgaaaggccccagct

SEQ ID NO: 89950 - DNA, 90 bp, Homo sapiens
agagatcaggccaagtttggaatcactggcaaaagtactttgactcaggagactacaacatggccaaagccaagatgaagaataagcagc

SEQ ID NO: 89951 - DNA, 100 bp, Homo sapiens
acaagatacatagaaagtgaattttgtagaaggagaagagtaagccatatcaaagacttcattgaaaaataccaaggatctcaaagaagtcctccgtttt

SEQ ID NO: 89952 - DNA, 75 bp, Homo sapiens
ggaaaaagacatcaacaacaatgtggagaaagccccctgtgccacctccagttgcatccttaatgtccagtcaag

SEQ ID NO: 89953 - DNA, 100 bp, Homo sapiens
gaaacgtgtgctgaaaaagaagaatcagcaaatactactgaaagtgcaatatttgagtatcactgcgagcctatgtgcttcccaagctgtatgtgaagct

SEQ ID NO: 89954 - DNA, 100 bp, Homo sapiens
tatgggaatgaattacagctctcagatgtcccaaggacctattgctatgcagctccttcgagaactcatagaacggaagaccagctccttggatcccaac

SEQ ID NO: 89955 - DNA, 83 bp, Homo sapiens
tacacggccagttttgaaatcgacacacaaagaatagagttgagcctgtgggacacttcggtcaggatggctaaaggtgaccc

SEQ ID NO: 89956 - DNA, 75 bp, Homo sapiens
cagccttggtctgagtggactgtcctgcagtgctgtgctgtggctttcattgagaagctagacgcccagtctttg

SEQ ID NO: 89957 - DNA, 74 bp, Homo sapiens
atcttactttggttccaggatatactggtaatatagctaaggtggataattactgtaccttcctcatggaaaaa

SEQ ID NO: 89958 - DNA, 98 bp, Homo sapiens
ggcggcgccagcagttccagtccgttgctttactttttgcttcaccgacatagtcattatgccgaagagaaagctatttgaactgctgggacctgaag

SEQ ID NO: 89959 - DNA, 95 bp, Homo sapiens
ggccaggctctattataggaccccagcagcacttcctggaagagaagtgcacggctgtctataacgtgctgccgggtctcaggatggaggagtga

SEQ ID NO: 89960 - DNA, 100 bp, Homo sapiens
gcggaagaagtgcccgtccacgcacagcgaggaggggaagatggtgaaaggaatgggaggtgctatggatttagtgtccagtgcgaaaaccaaagtggtg

SEQ ID NO: 89961 - DNA, 50 bp, Homo sapiens
ggcctcactcaaacagtaaacgagaaatgcactcggtgatggaaagagag

SEQ ID NO: 89962 - DNA, 73 bp, Homo sapiens
cacagcagagacgcgaaggagaggccctagaaccgtttacaggaacagatggacctagtggttttggctttga

SEQ ID NO: 89963 - DNA, 100 bp, Homo sapiens
gtgttcctctctagtcacaagagccttggggaagacagttggaagctcagacatggggagacaatccagggtctgagggcgaatctcaccagtgccatag

SEQ ID NO: 89964 - DNA, 96 bp, Homo sapiens
ggaaaatggcggacgggaaggcgggagacgagaagcctgaaaagtcgcagcgagctggagccgccggaggatctgtgccagttcagaagcaggcga

SEQ ID NO: 89965 - DNA, 95 bp, Homo sapiens
cactgaaattcagagaggggaagtgatttgcctcagcttgtactggcttctggttgggactcttgattcagtcttggactctactgctaaagtag

SEQ ID NO: 89966 - DNA, 100 bp, Homo sapiens
cccagatctatgctggttacacctgctcctttgctgtcagtgaagtggtggccacaagtaatcatcctgagactgactacaagaacaaagactgggtctt

SEQ ID NO: 89967 - DNA, 103 bp, Homo sapiens
cgcccgctggccgggctggctgcggccgccctgggccgggccccaccggacggtttggtgcacctcgatttggaggaagtagggcagggcccttatctggaaa

SEQ ID NO: 89968 - DNA, 100 bp, Homo sapiens
atggctcattgtagcctcaaactcccaggctcaagcagtcctaccatgtcagccttcccagtagctgggaccacaggaacttcatgcccacttgaatgga

SEQ ID NO: 89969 - DNA, 82 bp, Homo sapiens
gccgtgttatccagaaagctcttgagtttattccttcagaccagcaggtaattcctcccctggtgaagacacaaactgtcac

SEQ ID NO: 89970 - DNA, 101 bp, Homo sapiens
ctgttctgccctggctgcctcagccctaccagcactggtcatgtctaaagcccatcatgttcagaggtgaggtccgtctgaatgtcgaagagaagaagact

SEQ ID NO: 89971 - DNA, 90 bp, Homo sapiens
ggagagtttaaacagccaaaacagttcattcatattcagcaaccatccgggtatggctgaaaagagacagtggtcaatactggcccagca

SEQ ID NO: 89972 - DNA, 149 bp, Homo sapiens
gagactccaaggacaactgcaagggggaagtagagagataacaaaagctgctcagagtctcaatgaacttgctatgacttcacacctatggattcttctgcagtttatgtgttaagtagtatggctcgccagcgtcgtgcatctttgtc

SEQ ID NO: 89973 - DNA, 96 bp, Homo sapiens
ggaatggaccccgatggtgtcatcgaggtaagaaacggttgtggatcttgaagctttggaaagggacaggccttcagtatttggcatcacctttac

SEQ ID NO: 89974 - DNA, 75 bp, Homo sapiens
tttttttgtggagtggtttgaatatcgtaagcgcacgtttaaacatctcaagaaattacagaagacatccccgtg

SEQ ID NO: 89975 - DNA, 113 bp, Homo sapiens
acacaccctgcgctgccctgtcctgcgcgagtggagctctgaagaagctctgagcggagttgtgttcttccccagcactgactcatatattgaagtccttgatggttcccgtg

SEQ ID NO: 89976 - DNA, 90 bp, Homo sapiens
aagcaatcctcccatctcagcctcctgagtagctaaggactacagggtcggcactcttcaccctcccgagccctgcccgtctcggcccca

SEQ ID NO: 89977 - DNA, 75 bp, Homo sapiens
ccgcgagctgcgctggttcaccccgtggtcgaggagtcggatgacacagcaagaaggccctcaccagatgctgag

SEQ ID NO: 89978 - DNA, 50 bp, Homo sapiens
caacaagacgctgcccgtcgccttcaagggcgtgatggtgggcatgggtc

SEQ ID NO: 89979 - DNA, 88 bp, Homo sapiens
accggctggctgggcacacagacactgtcactggagtggccttcaacccatcagcgccccagaacccttaggagaaatcttgagagtg

SEQ ID NO: 89980 - DNA, 101 bp, Homo sapiens
aggagggcaggaagcccacggcccacaggggtgtagcccgagacccacctgcagcccccagcccttgccaggaaaggtgtcccgcatgagatgtctgcaga

SEQ ID NO: 89981 - DNA, 80 bp, Homo sapiens
gcaagctgaagacatcaagaagatcttcgagttcaaagagaccctcggaaccctcccctggtgaagacacaaactgtcac

SEQ ID NO: 89982 - DNA, 82 bp, Homo sapiens
gagtcttctggcaaacagtgtttgcctctggttcagctcatacaacagcttcttagctcagtaaacgctctgccactgacct

SEQ ID NO: 89983 - DNA, 74 bp, Homo sapiens
aggacgccgggcactgctgatgctgctttcgctggggaacttgggaatcagtgaaacgtacaaccaggaaagag

SEQ ID NO: 89984 - DNA, 75 bp, Homo sapiens
cagctattcttcttatggccagagccagaacagccttggacaagattcgctatgagagcctgacagacccttcga

SEQ ID NO: 89985 - DNA, 100 bp, Homo sapiens
gatcttcaagaagaagacctgcacgacgttcatagttgactccacagatccgggtcattggagaaatcgatgaagaaacagattctgcgcttgatttggg

SEQ ID NO: 89986 - DNA, 75 bp, Homo sapiens
attgaagctttgataaatgaaatcttcctaagtataggtaatgggaaacccaggaactttcaaaagaggcctttt

SEQ ID NO: 89987 - DNA, 90 bp, Homo sapiens
cagcctcaagacggtgctgctcttggccgaccagatgtctctcatcacttttgtgaacaagcacctgaacaagctgaatttggaggtgac

SEQ ID NO: 89988 - DNA, 101 bp, Homo sapiens
ggaaggagaactaaatgggagaagaggaatgttccctgacaatttcgttaagatgggcagccagatatatcaaggccttttggatctcagccttggcatag

SEQ ID NO: 89989 - DNA, 88 bp, Homo sapiens
taaaataattgggcagaagagaagcagtgaaggagtgcagaggcatcacctgaaagtcaactgtcccggcccccaactttgccatgcc

SEQ ID NO: 89990 - DNA, 76 bp, Homo sapiens
aactgtaatacttctggaatccagacagaatggtaacgatgactcggacatagacatccaggaggacgatgaatcc

SEQ ID NO: 89991 - DNA, 50 bp, Homo sapiens
cgcagtccacgcaggagatccatgagaagccccaccagcatgggcagcct

SEQ ID NO: 89992 - DNA, 98 bp, Homo sapiens
agatggcggacgagaaggacagggaaggactcgctcagcagcagcctgaaaacttgctacaagtatctcaatcagaccagtcgcagtttcgcagctgt

SEQ ID NO: 89993 - DNA, 75 bp, Homo sapiens
tttggacagtccaatgtcaacattgcccagcaagtgatgattaaacttcaggaagtatttaaggcattttatctt

SEQ ID NO: 89994 - DNA, 100 bp, Homo sapiens
acgtggagcaggcgttccagacgattgcacggaatgcacttaagcagaaaaagcggatggtggttcctgctgccctcaaggtcgtgcgtctgaagcctac

SEQ ID NO: 89995 - DNA, 101 bp, Homo sapiens
ctcaggcggatcttgacagccttgtccgcgaggtgtgatgaatgcagactctgctaccattttggctgtttggatcctcctttgaaaaagtctcctaaaca

SEQ ID NO: 89996 - DNA, 100 bp, Homo sapiens
ctttaactataatcttcatagtagtgtatttatttggcgctgtgttacaggggctcttggctttgggcctcagtgcaagtccattggaaaaggcagctgc

SEQ ID NO: 89997 - DNA, 98 bp, Homo sapiens
tataatcttaaggacttggtggacatcacaaagcaacctgtgcatatagcactttctacattgtgggtttaatattatcaatgcagataccttttgtg

SEQ ID NO: 89998 - DNA, 100 bp, Homo sapiens
cctgaacggagtgtgcgacggattgggagattttgaagatgtaactgagtttctggaagaggtcattgaagccttgatattggatgaggaagttagaaca

SEQ ID NO: 89999 - DNA, 75 bp, Homo sapiens
cgccgctgagccgtcgcggagccgcgcagccctcggagcacggtacgagaagttctttgggcgcctgtcccacct

SEQ ID NO: 90000 - DNA, 75 bp, Homo sapiens
tgtggatcgctgtgatcgtcacttgataaccagatgcaacgtgaagatctagactggaccctggtttgatgaacc

SEQ ID NO: 90001 - DNA, 97 bp, Homo sapiens
aagagcattgaagaattcttaaagtttcaaaattgggactcagcccaaaaccatgtttgcccaagttgaatctgatgatgaggaagcaaagaatgag

SEQ ID NO: 90002 - DNA, 100 bp, Homo sapiens
cagacttcagattcgtttctgagatttccttcgtccctgacatcatctctgtgcactgataataaccctgcagcattccaagaatcaagcactacaaagt

SEQ ID NO: 90003 - DNA, 83 bp, Homo sapiens
cagatcggccgtccagctggaatcaaccgatggaggctccgctgcaaactggaatgacctcctgccccccgaggtctgcagtc

SEQ ID NO: 90004 - DNA, 75 bp, Homo sapiens
agttacaccaaccaggacagaaatcattatcttagccaccagaacaccagcctcatccacaccaagaagaagctg

SEQ ID NO: 90005 - DNA, 101 bp, Homo sapiens
tcttcgatgtgcgagactttggaaagattgtcactgctgttccaagggcacacgcagagggatttggaattcctggagagttgcctttgtgagaagctgga

SEQ ID NO: 90006 - DNA, 100 bp, Homo sapiens
tatatgaaatacgtgactgtttataatcttatcaaaaaaagacctgatttcaagcaacagcaggctctggctccgctactgcatcgtgtgcttctgtcca

SEQ ID NO: 90007 - DNA, 100 bp, Homo sapiens
aacacgtctacaaaagaagatgggaaaggaatctgagctgaccagtgctttggtgcatctaaaactgcatctttttattcagatctttactcttgcattc

SEQ ID NO: 90008 - DNA, 78 bp, Homo sapiens
gcctgggaatcggtcgcctggaggaccagtatttcccatggagggtgctggagaatctggtaaaagcaccattgtgaa

SEQ ID NO: 90009 - DNA, 75 bp, Homo sapiens
tgtgaaaaatctgttacttgatgaacttcagaaggtgttagtaaaatggcctttcgccatttaattgagttcaca

SEQ ID NO: 90010 - DNA, 99 bp, Homo sapiens
tggcacgcatgcgtcctatggacccttctacctggaatactctcttcttgcagaattggatgccaaggcctgcgtagtacacggcagtgatctaaagga

SEQ ID NO: 90011 - DNA, 73 bp, Homo sapiens
agcagcacagaccttccacaggcacccactcacggcgccaggaactccgagagcttcggctgctccagaaaga

SEQ ID NO: 90012 - DNA, 51 bp, Homo sapiens
agaaccggtacctggatggcatgatgactttcacacgacctgccaatcaca

SEQ ID NO: 90013 - DNA, 100 bp, Homo sapiens
ctgctgtggccttcctggatgccttccagaaagtggctgacatggctaccaacacccgagaataaaagccgccctcattctaggggagaatataatgttt

SEQ ID NO: 90014 - DNA, 75 bp, Homo sapiens
atgccctttctttatcaaagacaaccaaaagttacaacagttcagagtaaaaaatccagttacactcttaaagga

SEQ ID NO: 90015 - DNA, 100 bp, Homo sapiens
ctggcgctgctgctgcacgggcggctgctggcgcatctgtccgatctttcctgtttcccccactccattcccttcctatccatcccacagccagaggaag

SEQ ID NO: 90016 - DNA, 100 bp, Homo sapiens
ctggcagtgccctccccactcgcttggtccaaggcccggattgggggacacagccctatcttcaggtacctaaaacagatccaggacctgcccccaactg

SEQ ID NO: 90017 - DNA, 96 bp, Homo sapiens
gttgctccgcagagtcttccactgtgggaagacacgatgaggcgagtggtacgacagagcaagtttcggcatgtatttgggcaagcggtgaaaaat

SEQ ID NO: 90018 - DNA, 75 bp, Homo sapiens
attcaggactcagggagtacacacttaccagtgaaattggagcgatttgaaattccaatcaaggttcgattaagc

SEQ ID NO: 90019 - DNA, 96 bp, Homo sapiens
acgtgcgcatgatgcaggcccaggaagccgtaagcaggatcaaggatcgctacggttcctactgatccgagctctgtgactcaggcttacgatggt

SEQ ID NO: 90020 - DNA, 98 bp, Homo sapiens
tggtatcgggatgacacaggaagagctggtgtccaacctggggacgattgccagatcggggtcaaaggttttccagcttgcagctcatctggtgtact

SEQ ID NO: 90021 - DNA, 50 bp, Homo sapiens
atgggatccagctgttagtcggtattggtaaaggttttcaaggtgtcatg

SEQ ID NO: 90022 - DNA, 100 bp, Homo sapiens
ggaagtgctgcgcacctacttggagctggtgctttgcgtgctggtcagcatccggaacaacagaataagaccacagcttgccaaagagaagattgaagga

SEQ ID NO: 90023 - DNA, 87 bp, Homo sapiens
caataacatcaacacactgttcaaaatcatgcgagtggggacagcttcttcctaggaagaggagttgtacgcatgtcagagaggttg

SEQ ID NO: 90024 - DNA, 100 bp, Homo sapiens
tgctcctactatccatttcaactacagatactttgaagtagaagaagctgatggctccccagaattccctgcccaagagacccccaccacattcccagaa

SEQ ID NO: 90025 - DNA, 99 bp, Homo sapiens
aaatagagctgatcaccgttccagccccaacgtagcaaggaagaaggagaaagggccaacccctgaagaagcaatacagaaactgaaggagacagagaa

SEQ ID NO: 90026 - DNA, 50 bp, Homo sapiens
aagcacaaaaagttaatcactttcccagcattagtgccagcagtagttcc

SEQ ID NO: 90027 - DNA, 82 bp, Homo sapiens
tcgagaaggagctgcagggccaggtggccagcatcgaaatgttcagccttttagtgatgaagatgcatcaattgaaacaatg

SEQ ID NO: 90028 - DNA, 100 bp, Homo sapiens
cctgtcccattccgtgtccttcttctgaagcacgcagccgggttttggagactcgaagggctccgtggtgcccgggaggactatcctattaagtgtaatc

SEQ ID NO: 90029 - DNA, 101 bp, Homo sapiens
tgcaccgccgcgcccccgcctagcccttccggatcctgcgcgcagaagggagaaccgaagattacaggaggccagcatgaggttggaacaagagaatgatg

SEQ ID NO: 90030 - DNA, 75 bp, Homo sapiens
ttacttgacattctctcaaaaggagctcagcctaaacaggaggagatgttaaagtaacccatcttgcaggacgac

SEQ ID NO: 90031 - DNA, 74 bp, Homo sapiens
ccaggcctgaactgggaacagccccaggcagcgaggctgtccaggacagccaaggccacctttgatgccatttc

SEQ ID NO: 90032 - DNA, 100 bp, Homo sapiens
cagatgctatagtctggtatcaaaagaaggtgtatgcaacagcgttattgcaacaggctaacgaaaacagacaaaattcaactggaaaagcatgttttgg

SEQ ID NO: 90033 - DNA, 75 bp, Homo sapiens
gaggcctacgcagagctcatcgtccttgggttctatggcctggatgagtctgacctcgacaaggtcttccacttg

SEQ ID NO: 90034 - DNA, 73 bp, Homo sapiens
tagaggccagattgtcttggaagttccaaagttgcaacgatttctcagaagatggctgtgccacccacgtatg

SEQ ID NO: 90035 - DNA, 75 bp, Homo sapiens
tgctgggggttcggggagcgcttggaccccggcttctgggacgcgtcagtcttactactttgaccgcgatgatgt

SEQ ID NO: 90036 - DNA, 83 bp, Homo sapiens
cggttctctaagtatttgcttgcagggtgaaggttgccgaactgtccccctggctggacatgtggggtttgacagcttgcctg

SEQ ID NO: 90037 - DNA, 75 bp, Homo sapiens
atcactaaatactactctgaggggcttagaaattaacagggaacaggaaatatagtggtcattatgattagctat

SEQ ID NO: 90038 - DNA, 87 bp, Homo sapiens
gaaaatctccctgctccgcagcgacatcaccaagctggaggtggacgccatcgtcaacgccgtttcagtggcgattctccagagaag

SEQ ID NO: 90039 - DNA, 98 bp, Homo sapiens
gggggaagcagcgtgagcagccggaggatcgcggagtcccaatgaaacgggcagccatggccctccacagcccgcagaaccttctgataacttaagag

SEQ ID NO: 90040 - DNA, 100 bp, Homo sapiens
ccgcatcgtgctgcctttcagtttcgcctggccggagatggcagcagaaaaggccaaagcagcagccggggaggccaaagtgaaaaagcagctggtggcc

SEQ ID NO: 90041 - DNA, 75 bp, Homo sapiens
gagaaacccaaactcttcttcattcaggtatcctccatgaaatgtgggatccttccaatttctcaagagtctctt

SEQ ID NO: 90042 - DNA, 100 bp, Homo sapiens
aagtatctgtctgagaaatgggtcttaggcggctatgagaggttttcctccgagtacccagaattctgttctaaaaccaaggccctggcagccatcccac

SEQ ID NO: 90043 - DNA, 90 bp, Homo sapiens
cgcaactttcatgttttcctggaatatgatcaggatatgaagggcgccctaatggagatcatccagctcgccagcctcgactcggacccc

SEQ ID NO: 90044 - DNA, 50 bp, Homo sapiens
cgctgccatggagcccagcagcaagagttttgcggcctccaggtggtgga

SEQ ID NO: 90045 - DNA, 100 bp, Homo sapiens
acacaattggaacatattttgctccgcccagacacctacattggttctgtggaattagtgacccaggaagagagaagggcacagttacctaagtatcaac

SEQ ID NO: 90046 - DNA, 96 bp, Homo sapiens
gactactggggccagggaaccctggtcaccgtctcctcaggccataaaattttgagtagaaaaatccagaaatttgaaaatcagtatcgtggtaga

SEQ ID NO: 90047 - DNA, 75 bp, Homo sapiens
ggagcagcaccaaatccaagatggcggccagcaggaggctgatgaaggagtaagtccatgagtgatgtcagcgca

SEQ ID NO: 90048 - DNA, 100 bp, Homo sapiens
cgcgggcgtccgccgagcagctggcccggctgggcccggggcgcgcagctgcccgccggggcggggcgaccatggccttgctgggtaagcgctgtgacgt

SEQ ID NO: 90049 - DNA, 98 bp, Homo sapiens
cgattcacaaattatgtgcttttactgatagtgtgtctaagaaacatggaacagttttcttggaatccagttatctaaatgatctggatagaatatcc

SEQ ID NO: 90050 - DNA, 74 bp, Homo sapiens
caggccgttgttggtcgagctggcgggtcccgcgggccaggccgtggagaaatgagccgtcagactgctacagc

SEQ ID NO: 90051 - DNA, 75 bp, Homo sapiens
gtcactactgtgtggggagttggcaacgcgacacagagccaggctctgcagaacattgctgccatcagcctggcc

SEQ ID NO: 90052 - DNA, 82 bp, Homo sapiens
atgaactcagggccggttgtggccatgaactggaagaagttcgggaactcagagtttgacccccccggacccaatgtggcca

SEQ ID NO: 90053 - DNA, 100 bp, Homo sapiens
gcaacatttcccacaggacacgaagtttgtcggcccttgccttggcagagctgaggtactatggatatagaggagagaaatcgccaaatgaaaattaaca

SEQ ID NO: 90054 - DNA, 100 bp, Homo sapiens
gccttggtagcagcgggtgacatggaaggggcagtacaagcttacgtctctgctcttcagtacaatcctccaaaagaatgcaatggtgtaaagattccag

SEQ ID NO: 90055 - DNA, 76 bp, Homo sapiens
cctgctgaaagtggcgcaaatgaatttggaggttttggttcagttagtggaaaaattgaaatagaaatcaagatca

SEQ ID NO: 90056 - DNA, 97 bp, Homo sapiens
gacatggagctcgagaacatcgtggccaactcgctgctgctgaaagcgcgtcaagatgatgtctttctacctaaagatattgacctagacagtgtgg

SEQ ID NO: 90057 - DNA, 74 bp, Homo sapiens
cgcggggagctgaagctgctgcttttggattctgaaagtcaagaagacatcatccggaatattgccaggcacct

SEQ ID NO: 90058 - DNA, 101 bp, Homo sapiens
aagatgatccttactattttctccagtttaacaaggagcagcaccctgaggaggaactgatcaagactaagcaggatgaagtcaatgcagcctggcagcgg

SEQ ID NO: 90059 - DNA, 74 bp, Homo sapiens
cagagttcacatattcaaacctgtatctgtgcaggcaatgtggcaaaccacagggaagctggaaaagaagcggc

SEQ ID NO: 90060 - DNA, 75 bp, Homo sapiens
gagaccaaggagttcatcatcaatgatatcctcaaacatttccaggaggaacgaatgatcacacactttgaaagg

SEQ ID NO: 90061 - DNA, 100 bp, Homo sapiens
ccactgtggaacttgtgacaggctggttaaagcagcaaagatcccaactgggccagtttgaacttgggagccctcatgtgcatcgaatgctcagggatcc

SEQ ID NO: 90062 - DNA, 82 bp, Homo sapiens
cttcaagaatgtttttgaccagaaaaccgacaaccttcccagaaagtccaagctcgtgcagcatctggaatcaagagaccca

SEQ ID NO: 90063 - DNA, 75 bp, Homo sapiens
gtgaagagacaggaggcagtagccaaacacccagtatgcttcagaagatgcagagcttctcttagttggaaataa

SEQ ID NO: 90064 - DNA, 100 bp, Homo sapiens
ctttctaaagtgcagatttctgagctttcatttcctgcctgtaacacgatctcaatcatttaccacaatgataagaaaatgatcttggtagttgacagaa

SEQ ID NO: 90065 - DNA, 82 bp, Homo sapiens
ctggatgcagcaaggaaataggatttaaccgctctctgcctcccaggtttggtgcacctcgatttggaggaagtagggcagg

SEQ ID NO: 90066 - DNA, 88 bp, Homo sapiens
cgacaagccgctggcagccgcggatctcaccgccgctcagggtctggtgagctgtaccttctttctggcagtgaatggtctgtattcc

SEQ ID NO: 90067 - DNA, 90 bp, Homo sapiens
atgggtcaagaaacagttgaaaagttccggcagagaattctggctccctgtaagtgctctctcagaggaggagaaaactactctgcgtgc

SEQ ID NO: 90068 - DNA, 100 bp, Homo sapiens
gaagcattgggggaaccagtgggccccacgtgggtaaaaagacttcagattttcctgtccttgatcccagctggactgctcaagaagaaatggccctttt

SEQ ID NO: 90069 - DNA, 90 bp, Homo sapiens
aaagatttcttaatgaaaatgaaagaaagtccacatttccaaaagtccaagggttgggcccatgagatgtgtgctctgtatattccggag

SEQ ID NO: 90070 - DNA, 51 bp, Homo sapiens
tcctgatttctgcagctctgtgtgaagcatgaatatgatatatggccacca

SEQ ID NO: 90071 - DNA, 83 bp, Homo sapiens
ggcctcgccacctggtacctggaagctgtgtgcccaggtatcttggagatggccgcttccatctggagtctgtcatgattgcc

SEQ ID NO: 90072 - DNA, 82 bp, Homo sapiens
ttgcagccatagtatcattgggcctttctttttatcagcctccagaaggggataatgcacaacaaaatccagtctcatagca

SEQ ID NO: 90073 - DNA, 100 bp, Homo sapiens
ctcctgagtagctgggattacagaaaccaatagagccatggcgactccctctgctgccttcgaggcccttatgaatggtgtgacaagctgggatgtaccc

SEQ ID NO: 90074 - DNA, 100 bp, Homo sapiens
ggcgaccgagacggtggagctccataagctaaagcaaagtgtgggatgctgtctcaggagatgaattgatgaccctggctcataaacacattgtcaagac

SEQ ID NO: 90075 - DNA, 100 bp, Homo sapiens
cctggacacagcaatatctctgggctttcacagtgtgcagcaaacaacttcctccttgtaacctgagtaaagaggacctgttacagaacccatacttcag

SEQ ID NO: 90076 - DNA, 100 bp, Homo sapiens
agttttgtgtttctttggtggctttttgatagaccgagtatttggaatacgagtaaatattatcagtgtcactaacaagggactactgcactccttcgac

SEQ ID NO: 90077 - DNA, 75 bp, Homo sapiens
gaccaggtgctggggcccggagtcacctacgtggtcaaggttgcacagagcattgaggatcaccatcaggaagtg

SEQ ID NO: 90078 - DNA, 83 bp, Homo sapiens
ccgctctccagcccgcttgaacgccctgggcgctgcctatggcacagccaagagcggtaccggcattgcggccatgtctgtca

SEQ ID NO: 90079 - DNA, 100 bp, Homo sapiens
ggggccggaggagcttcgcagcctgctaaccacgatattccaatggagacagttggaaaacctgtacttcagagaaaagaagttttccgtggaagttcat

SEQ ID NO: 90080 - DNA, 100 bp, Homo sapiens
ctcgaagggctctcctgatactaacagttttacgatttaaaacttcgccagaatttgaatctacttgaaaatggatcggtttatgttggattaaatgctg

SEQ ID NO: 90081 - DNA, 97 bp, Homo sapiens
tcatccgcatcaacaagatgttgtcctgtgctggggctgacaggactgatgggcggcgctggtctttggcctctttgccctcttcaggatatggaac

SEQ ID NO: 90082 - DNA, 100 bp, Homo sapiens
gtatggagaatggctggtctcctactcccagatgcatccgtgtcactgaagtgagtagtgaatatagtatggacaaggcaatggttgaatttgctacatt

SEQ ID NO: 90083 - DNA, 101 bp, Homo sapiens
agaccgcgggccgcggagctcgggcggccggcgcggagtcgcagatatggccagtacactatgaaccaggaaagcaccaccatcaaagttatggagaagcc

SEQ ID NO: 90084 - DNA, 82 bp, Homo sapiens
cccgagtgagcgcgggcgccgaggtgacttaagagattaaaattaatttggttgctgttggttctgaacaaataatgagttc

SEQ ID NO: 90085 - DNA, 51 bp, Homo sapiens
ctcatgttgacgggcagccagctagctgggatggagtctcattctgtcgct

SEQ ID NO: 90086 - DNA, 75 bp, Homo sapiens
ccgtgggcatctcctacattagcgtctacgaccaccaagatagttttgaggcagctgtgccatcaaatagccaca

SEQ ID NO: 90087 - DNA, 100 bp, Homo sapiens
tcaggtcatggcggtcgcggggcccgcgcccggagctggcgccagggatagctgggagtatggccaccctgctccacgatgcggtaatgaatccagcaga

SEQ ID NO: 90088 - DNA, 73 bp, Homo sapiens
agattacgtgcactccagtgagaggagggtctcctgggcaaagaaaggtggtcttcaagctgacagagaagct

SEQ ID NO: 90089 - DNA, 75 bp, Homo sapiens
gaaaatctctccttgaaccactgcgaacagctcatcctgtttgggctcagtaatcagctggctgtgacattccgg

SEQ ID NO: 90090 - DNA, 83 bp, Homo sapiens
caggaactcctgctgcaaaaatggaacaagttccagcacaagtggtgacttaagagattaaaattaatttggttgctgttggt

SEQ ID NO: 90091 - DNA, 95 bp, Homo sapiens
gtggctgcgggaaagcctctctcttgcccaaaccacgatgggaatcttcttccagaccagctggtcttgcttctggagcatctcttggagcagaa

SEQ ID NO: 90092 - DNA, 80 bp, Homo sapiens
gcgccgtgtggcacgacacaaaaatcagtgagaaagatcagtctaaagaaaaggagaagaaagtgaaaaaaacaattcct

SEQ ID NO: 90093 - DNA, 100 bp, Homo sapiens
agcatggtcttggacagcagcaagacagctagaacaacagaggcagcagttgcttactgaacgccaaaacttccacatggaacagctgaagtatgctgaa

SEQ ID NO: 90094 - DNA, 100 bp, Homo sapiens
ccggctgctgctggccgggctgctgtgcggcggcggggtctgggccgcgcgagcagctgcacggtatgaatgtgctccggtgaaaccttttttctgcagg

SEQ ID NO: 90095 - DNA, 96 bp, Homo sapiens
gcagaagggaggctccaagacctcatcaacaattaaggctgtggatctttccattgatgagtccagcttgacaggtgagacaacgccttgttctaa

SEQ ID NO: 90096 - DNA, 100 bp, Homo sapiens
ctgcaagcaggcaacctgaatacagggagactcatgcatctgtatgccgtgtgcgtggactgcctggaaggggttcacaagatcatctgcatcaagtgta

SEQ ID NO: 90097 - DNA, 100 bp, Homo sapiens
cgcagaggcatcagggctacacttaaatgaagggtctaaaattcccaggactccacagctttgcaccagataagcctggaggaatactaatgatggatct

SEQ ID NO: 90098 - DNA, 74 bp, Homo sapiens
cacctttcggcttctgagacggcggcagcagcggcattcagcttcaccagcctccaccaagacgggacaagcag

SEQ ID NO: 90099 - DNA, 90 bp, Homo sapiens
tgcggaacctgcgcggctactacaaccagagcgaggccgaaagctgatgcagccgcgggcccagggtgctgttggtgtcctcagaagtgc

SEQ ID NO: 90100 - DNA, 83 bp, Homo sapiens
tcagcggatttggggattaggctcttttaggttacttcttgctgcagattctgcgcaggatcggagctgtgggccaggctgtg

SEQ ID NO: 90101 - DNA, 83 bp, Homo sapiens
cgaccctggccgccccgagcggagcctggaggtattaatctctggagaagacacatccacagttagcactttcttcagatgct

SEQ ID NO: 90102 - DNA, 103 bp, Homo sapiens
atgaagcacgagctcgcttctatgctgcagaaatcatttcggctctcatgttcctccatgataaaggaatcatctatagtaggataagttctgaacgtcgaaa

SEQ ID NO: 90103 - DNA, 105 bp, Homo sapiens
cgtcgctgtcgctgagagcctcacgagtcgaggtcctgcaggtggagctccggcagccgccctgggagttctgggaaatcgttcattcatttacagatgaacaga

SEQ ID NO: 90104 - DNA, 75 bp, Homo sapiens
cctgaaaagtcgcagcgagctggagccgccggagcatgctacaagtgaaaactgatgagaaactgaatgtgtctg

SEQ ID NO: 90105 - DNA, 90 bp, Homo sapiens
ggcaatggtcgtggaggccgagggcgaggaggtccgcataaagatcctggccagcctggtgacacagttcaactcgggcctgaaggcgga

SEQ ID NO: 90106 - DNA, 82 bp, Homo sapiens
cgggcggcttcctggcctgggcgctccggtggcggcggagatggaaatcatattatgtagaatacttgggtgacatctgcct

SEQ ID NO: 90107 - DNA, 100 bp, Homo sapiens
gcatatcatgaaatcctccccacttatgtttgtaaatgtgagtggaagccatgaggccaaaggcagttgtattggctggagatataataacagagctgga

SEQ ID NO: 90108 - DNA, 98 bp, Homo sapiens
aatatttctggcttctagtccaatgccaagtgtgtgacctgtggtcaaggatgcattccaggaaagttctataaaaatataccatcaactccaacctg

SEQ ID NO: 90109 - DNA, 100 bp, Homo sapiens
ccggagaagacaagggcatcgccgcctcagccgccgccgccgccgttttcgcctgcagctgctcaccgcccaccttgggacaccttgactccaagcccag

SEQ ID NO: 90110 - DNA, 83 bp, Homo sapiens
atcctttcctgcttttggtttccctggcaggggttgaactgtggagtgtgtgggagtccaatgtgctgattgctgctaacagt

SEQ ID NO: 90111 - DNA, 90 bp, Homo sapiens
aaaaccgatgaacttagaaatctacacaaactgctttacaacaggccaggcactggaggagatatcaccaaacatgatggaacaggcgga

SEQ ID NO: 90112 - DNA, 102 bp, Homo sapiens
gagagtgaggatgaagaagatgactaccagattgcagattgagtacccagcacgaggaatcagcagatgagcagaaaggttctgaagcagaggggctcaaag

SEQ ID NO: 90113 - DNA, 101 bp, Homo sapiens
acactgaaagcagagaccatggagcttcttggtcaagagcaatctgaatccaaatgcaaaggagtttgttcctggggtgaagtacggaaatatttgagtag

SEQ ID NO: 90114 - DNA, 100 bp, Homo sapiens
aattcgaccaactcaccccagaggaaagccaggcccgtctggggtctctggacctctgactgacactgtgcctgcccaggtccctgtatgcactgccaca

SEQ ID NO: 90115 - DNA, 98 bp, Homo sapiens
ataaaaagagatgtggggggattctcgacctgctaacagaactggaccttttcgtgagtctaattttcacaattacaccttggtctcattgaatgaag

SEQ ID NO: 90116 - DNA, 90 bp, Homo sapiens
gaaatacgaaaggattagcgagaagaaaatgtccacccccatcgaagtgttgtgtaaaggctaccctttcttaaaatccttgcacgtttg

SEQ ID NO: 90117 - DNA, 83 bp, Homo sapiens
caacagcagtgctcttgttaatacagtactgccaaatctgtcgaaagggagataatgaagaactgcttcttctttgtgatggc

SEQ ID NO: 90118 - DNA, 89 bp, Homo sapiens
gtctccagttcagggcaagaagagtccgcgactcctttacgttatgatgatgaagtgaagcgggtggtggcagagccggtggagttggc

SEQ ID NO: 90119 - DNA, 98 bp, Homo sapiens
actgctgacatgctgggttctgctgagttagctgaggaggtcaatttaaatggttctggcaaactgctcaaggtggggaacgccaagcacaacgtgca

SEQ ID NO: 90120 - DNA, 98 bp, Homo sapiens
gacaaggaggtgaagcggccccagcactcccagctgcgcagggcctgccaggtggcgctcggtcctaggcctacttacaagcctccagtctcaaatta

SEQ ID NO: 90121 - DNA, 123 bp, Homo sapiens
cgcggagaagctgcatcccagaggagcgcgtccaggagcggacccggtgaggcggaaccaaccctcctggccatgggaggggccgtggtggacgagggccccacaggcgtcaaggcccctgac

SEQ ID NO: 90122 - DNA, 82 bp, Homo sapiens
cgtggtgaccatcgctccaaccaaaaccgtgaatggtgtctggaggagtgagagccggcagtcctcatcaccgggggcatcg

SEQ ID NO: 90123 - DNA, 74 bp, Homo sapiens
acggggttggcgcccggcagcacgtgttcctggtttcagggaagaaacccttttttcttggagccagcaataat

SEQ ID NO: 90124 - DNA, 95 bp, Homo sapiens
gctgcaacccgcgcccgcttcggagagagaaatgctgggcttgaccacatattatcccctccacccatgccgtttcggaaatgcagcaacccaga

SEQ ID NO: 90125 - DNA, 50 bp, Homo sapiens
ccgccatccgggaggcccagggaagtgtaaacaggaacatcgataagtag

SEQ ID NO: 90126 - DNA, 75 bp, Homo sapiens
aatacattgtgggcaagcaccattgttgcatcagaaaccaaggtgtatgttggtaacctgggaactggcgctggc

SEQ ID NO: 90127 - DNA, 82 bp, Homo sapiens
atgtctgcgagccaggattcccggctttatcctgtggataaacgcagagtgaacgagtttggggagtcctacgaggagaagg

SEQ ID NO: 90128 - DNA, 100 bp, Homo sapiens
ccaaactcagctcgcccggtttctcggcgaatgacagcacagggcagctttggaagaagtagaaggtgatgtggcagaattggaactaaaacttgataag

SEQ ID NO: 90129 - DNA, 90 bp, Homo sapiens
agtttgctggcctagacctgaactcttcagataatcagagtggaggaagtacagccagcagttttgtacagtgttagaatactgtgaagg

SEQ ID NO: 90130 - DNA, 88 bp, Homo sapiens
gttccccggcccacagtgggggtgtgcaaacccgagagaactggatttatttaattgcccaactaccactgatgaagatatattggag

SEQ ID NO: 90131 - DNA, 100 bp, Homo sapiens
atttcatggagaagaaggccttgactacggaggggttgccaggatgaaaactttgacctgtcaaaaagactgagtgagaacgaaattatatgtaatgctc

SEQ ID NO: 90132 - DNA, 100 bp, Homo sapiens
catcaaggaaggcaagcctgcctgcttctgcatcgacagatagccgtcttcagcttgagccccatcactagggagtgaaatattagggccaacactctca

SEQ ID NO: 90133 - DNA, 50 bp, Homo sapiens
gttatttgcctcagtaaaagaaataatccagaatggctactctgatctat

SEQ ID NO: 90134 - DNA, 82 bp, Homo sapiens
gtctacgagctgtttctcatctttatactcttccaggtcaaaatgcagatcttcgtgaaaacccttaccggcaagaccatca

SEQ ID NO: 90135 - DNA, 75 bp, Homo sapiens
gcgttgtctgtgtcggttttcaataacaagaacagtgctcatggaaacaacctcattgctgttctagccaaatac

SEQ ID NO: 90136 - DNA, 82 bp, Homo sapiens
gggatggtcgcgcgtcccctgcacagcacagaggggcagccggagagcctgggaaaggcccgatgagagaaagggaaagtta

SEQ ID NO: 90137 - DNA, 90 bp, Homo sapiens
ggaaaattttgactcagcttacactgagctgaatgaaattggaaggagagcgacttgcagttgtggaggtacagtgtgaacggctgagga

SEQ ID NO: 90138 - DNA, 75 bp, Homo sapiens
aaggacaccgattatggattggcaacctggaccccaaaattaccgatggtcctttggcgtgctcctctgggagct

SEQ ID NO: 90139 - DNA, 100 bp, Homo sapiens
gcattgtccagcatcaggtatacgagggacagtgtatccagttgtttatgctggttttccaagaattgatataaagcgggaagaacagaaaacagcagtc

SEQ ID NO: 90140 - DNA, 93 bp, Homo sapiens
ctcttcatctccgtgagaaaggtgcccccgaagtgaaagagatggcctggtggaaagcctgggaagacaccagcggcgactacaagaacgccc

SEQ ID NO: 90141 - DNA, 100 bp, Homo sapiens
gagcaaccccaagtcaccacaaaaacctatcgttagagtcttcctgcccaacaaacagaggacagtgggtgaaaaggaacagcctgtatttgcaatgacc

SEQ ID NO: 90142 - DNA, 97 bp, Homo sapiens
ctggggtcccttttgcctcagatactattttgaagggaccattgcaatttagagatgtggccatagaattctctctggaggagtggcattgcctgga

SEQ ID NO: 90143 - DNA, 88 bp, Homo sapiens
agcgcgggggaccgcggcccccagcagagcccgcctgcccggctgtgttgaaaagtctcctctagagctttggaaggctgaatgcact

SEQ ID NO: 90144 - DNA, 75 bp, Homo sapiens
cacgcggatttggctggcgtcccgcctttggagtttaacccttctgccaatccagaggcaagcacaatattccag

SEQ ID NO: 90145 - DNA, 100 bp, Homo sapiens
ccgtgacccgaggggcgacagcgcgcggcaggcggcgagctcgggggccgcagcaaaccagtccagctacgggggcccagccagccagcagctgagtggg

SEQ ID NO: 90146 - DNA, 73 bp, Homo sapiens
gcaaatgggcaacaggccagcagccaaaatacccctttggccctagagagtacaaacactgaaaaggagacaa

SEQ ID NO: 90147 - DNA, 75 bp, Homo sapiens
gagaggagaacgaacatcttctggacctttgtccagaagaaattttggaatccataagagccaaaaagggagaca

SEQ ID NO: 90148 - DNA, 95 bp, Homo sapiens
accagacagggcagcacgccgtcattgacatcaatgccttcccaggcaaactgtccttggaagaattcatcagaggtgccaagagcgacccctcc

SEQ ID NO: 90149 - DNA, 98 bp, Homo sapiens
tcgtggtagaatccattggctctgaagtggggtctctggggaagtgctcagcggctgcactggacgtcctcgccaatgtcttccgggaggaactgctg

SEQ ID NO: 90150 - DNA, 88 bp, Homo sapiens
ttggttatagacttccagctgaaggtttaaagaaattatggatccggatgagcaattggaaacccttcatgaagcactgaaactactg

SEQ ID NO: 90151 - DNA, 100 bp, Homo sapiens
gtctttacctccacgattccagcggcagcaggcttcccagctggcgtgtatgttgtaaagagagttcttcagcttcagcgtcatcatattactctcaaga

SEQ ID NO: 90152 - DNA, 98 bp, Homo sapiens
caagcgcggccagacctgcgtggtgcactacaccggagaggagaggcagcagcatggcgagtgtcctgtcccgacgccttggaaagcggtccctcctg

SEQ ID NO: 90153 - DNA, 99 bp, Homo sapiens
ccgatgcctggcatactgcataaatggaagcagggtaccgcaatttcgctaaggagtttgtgatcagtgatcggaaggagctggaggaagatttcatca

SEQ ID NO: 90154 - DNA, 131 bp, Homo sapiens
cagaagttcagcctggcccactccatgttggccatcagtggtcacctagacagcgacgatgatagaagtggatgcacccccaagtgacacctactgatgactcaaacccttggtgggcagcttttagccgg

SEQ ID NO: 90155 - DNA, 75 bp, Homo sapiens
gccttgggtttctttcttaaaggactgatttttagaactccacatttgagttccaggaatggatggaggtgcttt

SEQ ID NO: 90156 - DNA, 97 bp, Homo sapiens
cagtatgcatccatgaaggaagagtctgtcttccgggaaagtatggaaaacccaaattgcaagtcaaaaccgtgagatttcagaattacagccctcc

SEQ ID NO: 90157 - DNA, 100 bp, Homo sapiens
aaaccatctatggagagtggagatggcaacacaggttaatgttgaagaaggaaaatgcggaagtcgtcatttgacaagttttataaatgagtatttgaag

SEQ ID NO: 90158 - DNA, 112 bp, Homo sapiens
tgaatgggctgaaggaggaggacaaagagcccctcatcgagctcttcgtcaaggttttaaaatcaaagatgggaaaatcggagaaaattgcccttccccatggccagcttgt

SEQ ID NO: 90159 - DNA, 76 bp, Homo sapiens
ccgcttccccggcggtagcagcctgcagccacgtggaggcaatgttcactgcaatgtgcgaatgccaggccttgca

SEQ ID NO: 90160 - DNA, 100 bp, Homo sapiens
ggaggagcgcagcccggcctcgggcgccctgcgtccggcagaggaggcgagcatcccgctcaggtgatgaggaacccctcgcgcacccagcgcagaaggc

SEQ ID NO: 90161 - DNA, 50 bp, Homo sapiens
ttttgcttccaaatacaagctgtatagttgcacctggacttgatatgaaa

SEQ ID NO: 90162 - DNA, 74 bp, Homo sapiens
acaagggcgcatatcttcaaagcacctagtacctcctaccattgtcaactgagtgacgtcagaatcaagttcga

SEQ ID NO: 90163 - DNA, 75 bp, Homo sapiens
ttgccgcaaagcaaatgccattccagatggtccccgagggggcaagattcttgccaagagaattaatgtgcgtat

SEQ ID NO: 90164 - DNA, 98 bp, Homo sapiens
ggaggctgcgagcgagccgcgaaccgagcgggcggcgggcgcgcgcaccatgggggagaaacccgggaccagagggtcctccgcggaagggcagctga

SEQ ID NO: 90165 - DNA, 75 bp, Homo sapiens
atcaggtggaacagattcagaaggagcaggattaccaaagggtgtaccttccggtttcccagcacggccatcaag

SEQ ID NO: 90166 - DNA, 83 bp, Homo sapiens
cgtgccctggggctgagccctcaggggcctagaagacagttcccaggaggccgaggacgaggcatcggggctggggctatctg

SEQ ID NO: 90167 - DNA, 90 bp, Homo sapiens
acatcctgtgcaacctgcccagctacaaggccaagaatctacctgttactcgtattttggacaatcttatggagatgaagtcaaaccccg

SEQ ID NO: 90168 - DNA, 100 bp, Homo sapiens
ccacgcttgatccccggccgcggggccaggaagtcggagtttgagccccggaggcagagcggctgccatggtttggatgcatctgctcagactacttctc

SEQ ID NO: 90169 - DNA, 100 bp, Homo sapiens
cccggacgacgaggctgccatggattcctggcaagtttgcagagattgaatgtcaccatcacacgagccaagtacagcctcttcatcctcggacatttga

SEQ ID NO: 90170 - DNA, 100 bp, Homo sapiens
acaccgaagatgatttctactgccccgtctgtcaggaggtgctcaaaacgcccgtgcggaccacggcctgtcagcacgttgtttctgaaagatctatcca

SEQ ID NO: 90171 - DNA, 83 bp, Homo sapiens
aaaggttgaagttcaagagctcagaccctaaagtaattttttctgcaggatgaattaagagaagagacacttgctcatcaggc

SEQ ID NO: 90172 - DNA, 50 bp, Homo sapiens
acagacccagtctctgccaagagatatctgaagagattataggatcaccc

SEQ ID NO: 90173 - DNA, 49 bp, Homo sapiens
gggagacacgccaaagctcccaagatctacgactctggctccactgatt

SEQ ID NO: 90174 - DNA, 75 bp, Homo sapiens
ggtggaggagagtcataagcaacacctggccaggcagtttaagagcctggatcttacaaccagaaaaatgatcca

SEQ ID NO: 90175 - DNA, 100 bp, Homo sapiens
gacacaacccggccatcgaggccctgctgcacgacctcagctcccagaggatcaccagcgtgggatgttaaagtctttagtgaagatgggacaagcaaag

SEQ ID NO: 90176 - DNA, 83 bp, Homo sapiens
acacgaattggccttattaatgatatggaaacctcgacctgtctcccagttggttgcacagcaggttactcagcagtttgtgc

SEQ ID NO: 90177 - DNA, 88 bp, Homo sapiens
cttgtttaatgactttggtgccctcaacatctctcagagacgaaagatcctgtttgaccaaactcagagatcaattaaggcacagctt

SEQ ID NO: 90178 - DNA, 75 bp, Homo sapiens
agggaagagattcagccagcacactcctcgcgagcaagatgcagagagaacttgtttatgcaagaggagatggcc

SEQ ID NO: 90179 - DNA, 83 bp, Homo sapiens
ctgggcatcaccaacatagccatcgacttcggggagcagatccatctgtgtgtgctgtggaattcaggatacttgggcattgc

SEQ ID NO: 90180 - DNA, 97 bp, Homo sapiens
tcggatgtggagaaggccaagaagcagctcctgcatctggcggaggagaagctgccactgcagagccccgccatggaagacacgccgttggtgatat

SEQ ID NO: 90181 - DNA, 100 bp, Homo sapiens
ggcggccgtcgatctcaagccgactctcaccatcatcaagacggaaaaagtcgatctggagcttttcccctccccggatggcaacagtctgtttgactcc

SEQ ID NO: 90182 - DNA, 51 bp, Homo sapiens
cgcgaccgcggcgcgagtcaccatgagtaaacatcagtctccaaagataac

SEQ ID NO: 90183 - DNA, 75 bp, Homo sapiens
gtctgcagacagaaaaggagactctgtttaatgacagcaggtacaagcacgaaatcctgaggctgaggaagctgg

SEQ ID NO: 90184 - DNA, 100 bp, Homo sapiens
tgggagcagaagggaggctccaagacctcatcaacaattaaggctaccaagcagtttctcgaagagattaacaagtggacagttcagtacaatgtttccc

SEQ ID NO: 90185 - DNA, 51 bp, Homo sapiens
ggcggacacttaactccagtttcacaggtaccgtacagagtggatttgcag

SEQ ID NO: 90186 - DNA, 100 bp, Homo sapiens
agagccgcccagccctgccagctgcgccgggacggctgtcatttccttgaagacatggatcccataacatttattctagtgctttatgacaagttggaat

SEQ ID NO: 90187 - DNA, 75 bp, Homo sapiens
gcaggacttcatccaggcctacgaggaggtgcgcgagaagtacaaagggtttccaggcctgaggtgcccgccctg

SEQ ID NO: 90188 - DNA, 152 bp, Homo sapiens
ggtctgggagctactgatgcttcttcctacatgtcctaatatgttgatggcattccagaatatctcagatgagcagttcctgaatgttccaatgtttcgaaatgtctctctgaagtgcctcactgagattgctggtgtgagtgtaagccaat

SEQ ID NO: 90189 - DNA, 100 bp, Homo sapiens
gaaatacagatgacttcaccacagaaactttagaatggaggctcggttcttctgacattcttaattacaggggcggcgaagaggacccgcaggctgcaag

SEQ ID NO: 90190 - DNA, 76 bp, Homo sapiens
agtgtaccccaagcccgaggaatgggaatggcttgtgttggtcgtacgagagaatgtactattgtcccttctaatc

SEQ ID NO: 90191 - DNA, 84 bp, Homo sapiens
gactccggagacagcccaaatatcctcggaagagcgctcccaggagaaacaagatgatcacggacgtgcagctcgccatcttcg

SEQ ID NO: 90192 - DNA, 100 bp, Homo sapiens
ttactgtgacagaagccatcagacgtgggaggctggatcttttccaatccagatggagtgtgcacagcaggaaactccaattaccagtatgccgctcctc

SEQ ID NO: 90193 - DNA, 82 bp, Homo sapiens
tcgccgtggtcaagttcaccatgagagggctttagaaaagaactcaggaatttggaagcaggctataaatctcatgaattcc

SEQ ID NO: 90194 - DNA, 88 bp, Homo sapiens
cctgcagggcaccaagctacctgtggagccgaggaaaagtctgcgctcctcagaccaccggcaggtgaacagcctgatgcagaccgag

SEQ ID NO: 90195 - DNA, 100 bp, Homo sapiens
gaagtccttcctctcatttcttctgtgttgccaagaactatttttccaacaagtaccatatctttcgaacattttgtgcacagccagagaacaacacatc

SEQ ID NO: 90196 - DNA, 75 bp, Homo sapiens
gtttattgcagcactgttgtgccctctgatggttaaatgggccagggaaaactatcaccataacattggctcacc

SEQ ID NO: 90197 - DNA, 100 bp, Homo sapiens
gcggccggagccgggccgggcagctagcagggcgcttcggctttgtgctgatgaacatggtcaccttgaaaggtgtgttgaatatggcagagccagaaaa

SEQ ID NO: 90198 - DNA, 87 bp, Homo sapiens
gctcggtcctccacctgtccgctacgctcgccggggctgcggccgcccgagacaatgcagatcttcgtgaagactctgactggtaag

SEQ ID NO: 90199 - DNA, 98 bp, Homo sapiens
gcaaaagcagctggaggaggctgaggaggagaggacagaggtgcctggggcaacctccaccttgacggttccaggagtttccctgcacaagttctctt

SEQ ID NO: 90200 - DNA, 75 bp, Homo sapiens
aagcagaagaatgcttacattggcacacaagagctccacacagaacatcatcaaagaactgatggacacttcatc

SEQ ID NO: 90201 - DNA, 102 bp, Homo sapiens
gaagtgcttgatatcacagaggaaactctgcattctcgcttcctggagtgatgttgcacctgtaaccatctttttatgggtggagcagagagtcaatccctg

SEQ ID NO: 90202 - DNA, 90 bp, Homo sapiens
ctgatttagaaggaggttcaggctacggctgtaggttccatgaggacaggccttgagtctgtcctggtctctggaatcacggtgtctagt

SEQ ID NO: 90203 - DNA, 101 bp, Homo sapiens
gatgagaaagaaagtaaaagatgtcattgtctctgctggatgaaccgaatcctaacagtccagccaatagccaggcagcacagctttatcaggaaaacaaa

SEQ ID NO: 90204 - DNA, 75 bp, Homo sapiens
cgggcccgggcatggtggtctggggcaacgcggaagcggggatctgatgagcttctttcttctggcatcattaac

SEQ ID NO: 90205 - DNA, 95 bp, Homo sapiens
aaggccgtcaccttaccttaaaccttttaagcaaggaaattgaactaagaaatggagagctggaggagagcaggagtgttcagaagcaaatgaag

SEQ ID NO: 90206 - DNA, 75 bp, Homo sapiens
tggagacagacctggccctgaccttctccttgcaggccatccacggcttccgagagacagagaagtcgcgctggt

SEQ ID NO: 90207 - DNA, 74 bp, Homo sapiens
aaagaatatttagaatgcaggatggagaggactccagaagacctttccagattcgtggttgagctgcagcagag

SEQ ID NO: 90208 - DNA, 91 bp, Homo sapiens
ggttctactgcaggaagaaggcacccggaagagagaatatgaaaatgagctggcaaagaccaattttaacactgttttaacaagagagaaa

SEQ ID NO: 90209 - DNA, 75 bp, Homo sapiens
gcgcaggagcctcccggagctggcccctcctcaagtgtctggctgaaagatgccacccagggaagggaactcggg

SEQ ID NO: 90210 - DNA, 100 bp, Homo sapiens
gttggaggttatgaaagaccctttgcacaaatcaaggaacggaaaacagttcttccttcaaagcatgcagtacctgaagtaatagaagactttctctgca

SEQ ID NO: 90211 - DNA, 83 bp, Homo sapiens
taggctgggtgtgcagggaccgatgcctccaacacagctatgcaggggtagaagataaggagtcttggcatgggaagcccctc

SEQ ID NO: 90212 - DNA, 98 bp, Homo sapiens
aggaagttcttctaaatcaggaatggattgaaatctaatgaaccgaaactttgggaaaatgtttataggaggccttagctgggacactacaaagaaag

SEQ ID NO: 90213 - DNA, 100 bp, Homo sapiens
ctgattgcgctcaccctcttggggatgggactggcactcttcaggaaccaccagtcttcttaccagttttctgtgaagaccctgattgatcggtcttgct

SEQ ID NO: 90214 - DNA, 98 bp, Homo sapiens
aaaaaagagcagagaaggagcgaatcatgaatgaggaagatcctgagaaacagcgcaggctggagccctgggtcaccttcctgcagcccctctcgtgg

SEQ ID NO: 90215 - DNA, 82 bp, Homo sapiens
gagtgcgtggagctcttcagaaccgcctacttctgcagagacttcccaagtaagaagcggaagaggagccgctggaaccaag

SEQ ID NO: 90216 - DNA, 100 bp, Homo sapiens
cccctctggccagcctgcaagatagccatttcctcaccgacgccgacatggtcatgagcttcgtcaacctcgatacaaactggactctcaggacaaaacg

SEQ ID NO: 90217 - DNA, 125 bp, Homo sapiens
ctgcgctatgccctgctgtagtcacaggagctgtagagaggaccccggtacatctgaaagccgggaaatggacctcagcagccatgtcgaagccccatagtgaagccgggactgccttcattcag

SEQ ID NO: 90218 - DNA, 100 bp, Homo sapiens
cctatggaaatccaggcagccaaggctatggacaagcatcacaagtttgttttctgccctagacagtcattcaaatttgggtgtcatttcttatggtgtt

SEQ ID NO: 90219 - DNA, 100 bp, Homo sapiens
cgcgtggaagccatcaaagaggccctgatggcacatggacttggcaacagggtattggcaagcttgccagtgtacctgctggtggggctgtagccgtctc

SEQ ID NO: 90220 - DNA, 98 bp, Homo sapiens
gagaaggactgttgggagaatttaggatcttgttgaatccagtccagtatgaagtgaaggctcctgttccttctgcctgtttcaggaatatttgtaag

SEQ ID NO: 90221 - DNA, 75 bp, Homo sapiens
cgagttccgcgcattggaaagaagcgaccgcggcggctgggcacgaccaggagttgacgcactgctgcacacacc

SEQ ID NO: 90222 - DNA, 100 bp, Homo sapiens
ccatgtaactgaggaatggcgtgacctgcaaagtgctgagaaggaagaggtccatggctaatgaaacacagaaggttggtgccatccattttccttttcc

SEQ ID NO: 90223 - DNA, 78 bp, Homo sapiens
gctaacctagggctactgttgattttgactatcttcttagtggccgcctacaacacagcagtcccctcaggatgagca

SEQ ID NO: 90224 - DNA, 100 bp, Homo sapiens
ctagaagaacacagagacaagttcccagcattgcatagtgctttagatgaattctttgatataatggtatgacttcgtggagctcctggatggcagcagg

SEQ ID NO: 90225 - DNA, 50 bp, Homo sapiens
ctggacaccatccagctggctttcaaggaatactcccccagttgcaagag

SEQ ID NO: 90226 - DNA, 101 bp, Homo sapiens
tacaagatccgggagatcgcggacgggttgtgcctggaggtggaggggaagatatggagtttggacctccaacagttaatgataaactaatgagatttttt

SEQ ID NO: 90227 - DNA, 100 bp, Homo sapiens
gtagatactaacggttctgaagcggattctgtcccctctgggacgaattaatgaagcagtgaatgacctcactaaagctatccaactgcagccctcagca

SEQ ID NO: 90228 - DNA, 100 bp, Homo sapiens
gtagacttccatcttcatgagtactccaagaagatggttcagttgactattgcaaaggttattgaagcaaacctagatggagaattgaatttgaaaatag

SEQ ID NO: 90229 - DNA, 75 bp, Homo sapiens
cagggacagcacctcatcccctggatgggggaccacaagatcctcatcgacagatttggagcaagaggtggtggt

SEQ ID NO: 90230 - DNA, 75 bp, Homo sapiens
cccccgcaggcgcccgcggcagcgaacggggccctcctcgccaaagacagcctagagaggacggcaatgaagaag

SEQ ID NO: 90231 - DNA, 49 bp, Homo sapiens
agcgctttgatttacagcagctgcagggtcctccaggaggtggagggcc

SEQ ID NO: 90232 - DNA, 97 bp, Homo sapiens
ggcttgtccctgtttcgccacagttcctaccttatgagctcggttttcttatgcttataagagtggaacaggggcatggtctagtggcccagtcagg

SEQ ID NO: 90233 - DNA, 100 bp, Homo sapiens
tgatgcagcaaacagtactgaattatcacttctggcagatgaggtcaagaaagatcttaagactggtcattcaaaggggtttggctttgttcgttttacg

SEQ ID NO: 90234 - DNA, 100 bp, Homo sapiens
cccgggtggcgcctccctgcgactcctggaccaccgggcgctggtctgctcccagccgcatcaagatggtgctcatgtggaccagtggtgacgccttcaa

SEQ ID NO: 90235 - DNA, 75 bp, Homo sapiens
tttttagtccattgactatgcagcctaatggccctggccaacgtcaacattgggagcctcatctgcaatgtaggg

SEQ ID NO: 90236 - DNA, 51 bp, Homo sapiens
gtgcaaacccgagagaactggtttctgatgaagaattgaaaagaagagtag

SEQ ID NO: 90237 - DNA, 98 bp, Homo sapiens
aattgaaaagctgcaggccggtgctcttgcaactgacgcagtcactgcagcactggtggaacttgaggttgtggaaaatgcccttaaagtgaacccaa

SEQ ID NO: 90238 - DNA, 98 bp, Homo sapiens
ctaaccacactatttatatcaacaacctcaatgagaagatcaagaaggatgggctgtaatccccttgcacaaaccggccggagtaaattgcagaatca

SEQ ID NO: 90239 - DNA, 101 bp, Homo sapiens
caccagccggggactgggcgctaccaggtggtgtacgaagccatcgacagcagagatggagcatcttgtgcagagttggtgtcttttaaacatcctcatgt

SEQ ID NO: 90240 - DNA, 98 bp, Homo sapiens
tctggaaatagtatattcctatttacatggtatggaagccttatcaaacttgagggagcatcaacttaggtatcctttgtgtggctgatcagtgtcac

SEQ ID NO: 90241 - DNA, 106 bp, Homo sapiens
aaccgcaacatcgaccagaccatgctctccatcctgctcttcttccacagtcattgaaagaaaatcttgcaaggtgttggacacttactgaagcagagaagatgtc

SEQ ID NO: 90242 - DNA, 90 bp, Homo sapiens
ccgccgcctcggccgaccagggacctgcccgcctgcggctgctccggatgtggacgagtgtgcaacagattcccaccagtgcaaccccac

SEQ ID NO: 90243 - DNA, 51 bp, Homo sapiens
gatatacagcagcgaggaggggaagagagtgagaaagatcagtctaaagaa

SEQ ID NO: 90244 - DNA, 80 bp, Homo sapiens
agccgcggcggagccggaggaagctgatggtcatcttttccaaggggtgatcgctgagctgaaggtgcgcagggaccccc

SEQ ID NO: 90245 - DNA, 83 bp, Homo sapiens
ttccaggtgaatccaacaagatcccccgtctgaggactgacctttttcctgtcccgagcaagagaagcagtcctggatgccca

SEQ ID NO: 90246 - DNA, 97 bp, Homo sapiens
tggtacaggactgtcaacgaaacctggcacggctcttgcttccggcattttctgcattggataaagaggatacaggatttgtaaaggctacagaatt

SEQ ID NO: 90247 - DNA, 83 bp, Homo sapiens
gctggattctgaggaccagcagatggccagtcacgagaacccaggaccaagaatcgccttcagccctgtctggtgcatccttg

SEQ ID NO: 90248 - DNA, 100 bp, Homo sapiens
ccagcctaaagagagcccggagccagcgtgggaggccgctgccgtcgcgcgccttggaccgggactttgtagccaagcagaaggaggacctggagctggc

SEQ ID NO: 90249 - DNA, 82 bp, Homo sapiens
gggcgctcgagacttaccagagccacaaggtggcagtagagaagagcatcacagaagttgctcaggagctgacagagctggt

SEQ ID NO: 90250 - DNA, 100 bp, Homo sapiens
tgcgctgctggcctttgtgagcctcagcctgcagttctgtgacatttagtgatgtggctatagacttctctcatgaagagtgggcatgcctagattctgc

SEQ ID NO: 90251 - DNA, 98 bp, Homo sapiens
catgggggcctcagggcagcctgcctggagttttgacagtgtttcctgccttgctgactcttcttccctctcggacatcacctttgatggcaatccca

SEQ ID NO: 90252 - DNA, 97 bp, Homo sapiens
gcggaggagaccggaccgaagacggaccgtgccgggaagaggaatagctattcagtcagacagaaccacttatcacgttttgcagtatctcctgagg

SEQ ID NO: 90253 - DNA, 90 bp, Homo sapiens
gtggaagcagacctcgtggaagcgctggaaaaatttgggacaatatgaaatgagccgtcagactgctacagcattacctaccggtacctc

SEQ ID NO: 90254 - DNA, 82 bp, Homo sapiens
tgttgatcactgaaaatgatttatgcaagtttaagatgcaggacagctggagcacacattgatgaatcattgttccctgcag

SEQ ID NO: 90255 - DNA, 74 bp, Homo sapiens
gatgtcttggagtgggagacaatgcattaaggctcccagccaacctctgataaaccctcccagcggccatcaga

SEQ ID NO: 90256 - DNA, 74 bp, Homo sapiens
aaattcagaagaaattagaagctgcagaagaaagacgcaaggaaaccacccctactcctaatcccccgactaca

SEQ ID NO: 90257 - DNA, 101 bp, Homo sapiens
ggcgaaaggaacggctgaaggccctacgggagaaaaccgggcgcaagaatataagtatgtccgtggaaggagattatacttacttgcgaatcaacttttat

SEQ ID NO: 90258 - DNA, 110 bp, Homo sapiens
cccagctgcccggtgcccgaggaggcagccaagctcatggcctgccactgcgtgcgaacttgctactaccagcaccatgccctaccaatatccagcactgaccccggagc

SEQ ID NO: 90259 - DNA, 75 bp, Homo sapiens
agtggatagtagaacttatctactggatttccgtagtattgatggttccttcaatggtgccttagctgctgttcc

SEQ ID NO: 90260 - DNA, 100 bp, Homo sapiens
atcaggagaccattgaccagatagaggtgccttatgcccgctcagaggcccacctcacagagctgctggaggagatatgtgaccggatgaaggagtatgg

SEQ ID NO: 90261 - DNA, 82 bp, Homo sapiens
ccgcaacgccgagcgcaccgacatctgcctgctcaaaggtcccagagggtggaaggagccaggacgcacccccactgctgct

SEQ ID NO: 90262 - DNA, 101 bp, Homo sapiens
ccgggagtatcagctcaacgactctgccaaataatcaagtcccagcagagcgaggtgacccgaatcctggatgggaagcgcatccaataccagctagtgga

SEQ ID NO: 90263 - DNA, 75 bp, Homo sapiens
tccagggaactcaccagtcaccaaggttatgagaagacagatgatgtttcagagaagacctcactggctgaccag

SEQ ID NO: 90264 - DNA, 50 bp, Homo sapiens
ccgacagcgaagctgagcgtaaagtgatgaatcaccaacaccagcagcag

SEQ ID NO: 90265 - DNA, 74 bp, Homo sapiens
aatcaatgaatgccttttttcaggggcacctgtgacgtttgaagatatggccatgtatctcacccgggaagaat

SEQ ID NO: 90266 - DNA, 83 bp, Homo sapiens
gaatctggaatgaaatcttccaagtccaaggatgttttagcagccactgctgcatcaggggcttttgttccaccaccaagtgc

SEQ ID NO: 90267 - DNA, 95 bp, Homo sapiens
ttttgattcatgatgtgcctcttctagcaatggaatactgttctggaggagatctccgaaagaccttgttcccatcaggatacctaatccctctc

SEQ ID NO: 90268 - DNA, 100 bp, Homo sapiens
ccgtggcgcctagagtagcgacccggggggagcgcggggcgacgctggctgcagggacccggtgacagcgtgagaggccaaacgtaccaagaaagtcggg

SEQ ID NO: 90269 - DNA, 90 bp, Homo sapiens
aaaaagaagaccagcgacaaatttagagaaacctcggcaggatctttcgaagatggtttggctgccttggagatttggagatctgatgcc

SEQ ID NO: 90270 - DNA, 82 bp, Homo sapiens
attggaccatttagtaagaagaattccagtcttataaagtaacttgggtttttactcctgtaacaactgaaataacaagtct

SEQ ID NO: 90271 - DNA, 51 bp, Homo sapiens
cgtggaacggctgcttttggaagatccagcacacggaagacatggagaacg

SEQ ID NO: 90272 - DNA, 98 bp, Homo sapiens
gccgctgttcccaggatggtgatccgtgtatatattgcatcttcctctggctctacagcgatcgtaaagctgaaaattgaaatcatgaaagtagacag

SEQ ID NO: 90273 - DNA, 100 bp, Homo sapiens
ttggcagcctctggcttcccgagaagcccctttcggctgcttgggattgatgtggacatcttcgagccccaggggatcagcaagctggatgcccaggcct

SEQ ID NO: 90274 - DNA, 100 bp, Homo sapiens
aagaaactgaagcaaaagatcagcgaggagcagcagcagctccagcaggcgctggctcctgctcagtaaatggggagcaggagaaccgagtgcagaaggg

SEQ ID NO: 90275 - DNA, 75 bp, Homo sapiens
ccgcctggctccccatactagtcgccggatttttcaagccacattcaattgataggatgaaaaaatttaagagaa

SEQ ID NO: 90276 - DNA, 90 bp, Homo sapiens
ttgggttgataatctaaatggatgtagccgactcattattgcggttcgtattcaagagacccaagctgagcttcctcgagggagtatccc

SEQ ID NO: 90277 - DNA, 99 bp, Homo sapiens
ctgctgcccggcgagctggccaagcacgccgtgtccgagggcaccaaggcggtcaccaagtacaccagctcgaaagaggatctgacgaactactctcag

SEQ ID NO: 90278 - DNA, 51 bp, Homo sapiens
gttttatgcagtcacaggcagctggttgggggccgtcccgctcctaaggca

SEQ ID NO: 90279 - DNA, 75 bp, Homo sapiens
ggacccggtgacagcgtgagagaccgaagccaggacagcacagccgtagcactctcagactctagctcaacgcag

SEQ ID NO: 90280 - DNA, 98 bp, Homo sapiens
acacgcttcgccgcgccatcctgctgctcagcccacagggagcccactccttcatcaacgaggttgctgcagcaactggtcacacagtagtgttggta

SEQ ID NO: 90281 - DNA, 100 bp, Homo sapiens
ggatgcagcactggaagaaaatggtttggctgtgataggagtatttttaaaggttggaaaagagactgttcaaaccactgaggatcagattttgaagaga

SEQ ID NO: 90282 - DNA, 76 bp, Homo sapiens
tcttgatctgtttactcttgataaggatgagaacaagttgagcagtgccaacggccatgaagaacgtagcaaaaag

SEQ ID NO: 90283 - DNA, 80 bp, Homo sapiens
gaaagtgaagatggccaccaaatcatgccccgagtgcgaccaacagcctacaacacagcagtcccctcaggatgagcagg

SEQ ID NO: 90284 - DNA, 75 bp, Homo sapiens
ataaaacaccagccaatctgaaaggatattttcagaaaccccgagactcttcagttgaagttcgtagtgattggg

SEQ ID NO: 90285 - DNA, 85 bp, Homo sapiens
gtgaaatttaccaaatcctttgaattgatgtccccaaagtgcagtgctgatgctgagaacaggtgtcatggagaaactccagctg

SEQ ID NO: 90286 - DNA, 83 bp, Homo sapiens
cgggcagattagcgacatccgagtgcagaacctgcaagggggatatgagactttctactcggaatatcctgagtgttgcgtgg

SEQ ID NO: 90287 - DNA, 96 bp, Homo sapiens
cagacctggctgtggtcaaacccacccggcccaactcactgctcaagaacagctccaagcagaggtgctaaggtataaagccaaaattgaagacct

SEQ ID NO: 90288 - DNA, 100 bp, Homo sapiens
ctttgtttttcctgggaactgcagccacataaagaagatccctaatagtcatttctcaacaattatatagtcaactgatgtaacaatggtactaatattg

SEQ ID NO: 90289 - DNA, 75 bp, Homo sapiens
cggatcgtggcctctcgagagcaaggtgctggagaatctggtaaaagcaccattgtgaagcagatgaggatcctg

SEQ ID NO: 90290 - DNA, 100 bp, Homo sapiens
caccgtctaccctccacttggagaaatccagctgtctgtggaagcccgtaaagagatgactagaaaggctattaagacagtcaaacattttattgagaag

SEQ ID NO: 90291 - DNA, 90 bp, Homo sapiens
caacccgcgcccgcttcggagagagaaatgctgggatttcagagcaggacttcagaagctgccaaacttgaggctgaagtaagcaaggca

SEQ ID NO: 90292 - DNA, 115 bp, Homo sapiens
ggaaaaccgagaccattacggcaggaagattcttttgctgtttgcagccaattgggatcagagtagtcattaacagctgaagagaagacgattacagaaaagcaccttgaattat

SEQ ID NO: 90293 - DNA, 100 bp, Homo sapiens
gaattatataaacgacttaaggaatttttgaagaattacttgacaaatcttcttaagacatcgggctggggagtgactccgtgtgtgcccggccctcgtc

SEQ ID NO: 90294 - DNA, 75 bp, Homo sapiens
gcccacagacctcaaattcaaagcacaagtggaagtgctgtccgctgcactacgtgcttccagcctggatgcaca

SEQ ID NO: 90295 - DNA, 76 bp, Homo sapiens
caccaggttccaaatcatcaatgaagcaagtaaggaactggcccaaataaggaaggaggaaaaagagaagaaaaga

SEQ ID NO: 90296 - DNA, 95 bp, Homo sapiens
atttggagtgtgcgtgcgcgccgagcgggactttgaacatgtcggggatcgccctcagcagactcgcccaggagaggaaagcatggaggaaagac

SEQ ID NO: 90297 - DNA, 50 bp, Homo sapiens
caagtacccgctcctccttaagataatctgcaaaatggcttcaatgctga

SEQ ID NO: 90298 - DNA, 75 bp, Homo sapiens
cgccctccccgccaaggcccgtgcgagtataccaacagatgttttaaagattgtgtattctgtgggtgctcagac

SEQ ID NO: 90299 - DNA, 101 bp, Homo sapiens
cttaccctccgggggtaaaagagatcaccgacaagatcaccacggacgagatgatcaaacgcctgaaggccatcgaggagggcacgctggaggagatcgaa

SEQ ID NO: 90300 - DNA, 98 bp, Homo sapiens
ctgaggcagagggtggcccatgagccggttgcgccacccgaggacaagggttccccactgaaggacttggtccagctgtctggcagggaggagagaca

SEQ ID NO: 90301 - DNA, 83 bp, Homo sapiens
cttggactgagtcctgcaggacacagatataaagatgaagcgcagctgtataaagaagagcacctgaggaatcggcagcaccc

SEQ ID NO: 90302 - DNA, 50 bp, Homo sapiens
ggatttgatcttccatatggataagttctgtgatatgagcaacaatggac

SEQ ID NO: 90303 - DNA, 110 bp, Homo sapiens
ggggggagcctcagcaggattgctgtgtgaaaaccgagctgctgggagaagcagttggaattgatcacaccttttcagttgtacttcaatcctgaattaatctttaaaca

SEQ ID NO: 90304 - DNA, 74 bp, Homo sapiens
ggaaggcggcgccccggccgaggtggcggcggctcctcagagcgggaacagcttccacgtgttcgaccagggcc

SEQ ID NO: 90305 - DNA, 75 bp, Homo sapiens
cgcagtggtcgcttcttctccttggtatgcatcttctattgatgatattttggaagatgaagaacattatgcaga

SEQ ID NO: 90306 - DNA, 98 bp, Homo sapiens
cggggccctctcagcaagaacgggaacaaaactctggtatgggctacgtgagttcgtggtgattgcccctgctgcacacagtgacgctgttctcagcg

SEQ ID NO: 90307 - DNA, 97 bp, Homo sapiens
gaaaaggaagatgcactgactagaactgaacttgaaacacttcaaagaaatatattcttccctctctcctgcctttatgaggaaactgatcatcaaa

SEQ ID NO: 90308 - DNA, 82 bp, Homo sapiens
accaaatccaagatggcggccagcaggaggctgatgaagataacatccctgaggacctcagagaccctttctacgttgacca

SEQ ID NO: 90309 - DNA, 96 bp, Homo sapiens
gtcagccatggtctgcggctcagatggccactcctacacatccaaggtgaacctatgggtcgtggaacaaaagttatcctacacctgaaagaagac

SEQ ID NO: 90310 - DNA, 104 bp, Homo sapiens
aggacacgaggcggcgggctggagacatggaccgcggcgagcaaggtgatgatgaacagtctacacagatggctgcaagttgggaagatgataaagttacagaa

SEQ ID NO: 90311 - DNA, 97 bp, Homo sapiens
agctctctcttgagccgctgccttgttaccagctggagcttgacgcagggatctaccgaacagaaagggacaaagggacattgtatgagctcacctt

SEQ ID NO: 90312 - DNA, 101 bp, Homo sapiens
gatttgcatgatatgcttgcttcattggaccattaaaaatctcaagtgacgactttgggaaactctggttatccttcgcaaatgatgtgaaacaaaatgta

SEQ ID NO: 90313 - DNA, 90 bp, Homo sapiens
aaacggaggaaaaaaagagttgcgggaggctgtcggctaataacggaattgaatgatctggcacgggaccctccagcacagtgttcagca

SEQ ID NO: 90314 - DNA, 50 bp, Homo sapiens
gtcgaataatacagtggatgtgaggttgggagccacgtgtaccagtgtgt

SEQ ID NO: 90315 - DNA, 82 bp, Homo sapiens
ttaatagaatgtacagtgatcggaaaggataccatgtttgtgtggaagtgccccgtgtttgctatgccgatgctgtcctagt

SEQ ID NO: 90316 - DNA, 96 bp, Homo sapiens
gagcaggctgatctactgcaggaggtgtcatggagaaactccagctgggcccagagattctgcagcgggaaaatccaaggcttatttatgccaggc

SEQ ID NO: 90317 - DNA, 132 bp, Homo sapiens
tgtgacctgcatgtactgggggattcgcagggaggatgtcgggacaccccggaagctgggaaatggatgcttctggctggcacacctggcttcccctccatgctcagaactgcttcctactctacatccagg

SEQ ID NO: 90318 - DNA, 75 bp, Homo sapiens
gttttccagagctttgccaagttcagcaaatttggagatggactccatccccgtgtctacctccctccttggaga

SEQ ID NO: 90319 - DNA, 100 bp, Homo sapiens
acgagccctaacatccagccgtccccagctcacgcagccagacccggtccgtttggaatgcctgggatggtgccgccgcatgttcctcctcagatgctca

SEQ ID NO: 90320 - DNA, 96 bp, Homo sapiens
acttgcagctcatctctattgatgacacagggctgggtgactccgtatgctccagccccagtatctccagcaccaccagccccaagctcgacccgc

SEQ ID NO: 90321 - DNA, 137 bp, Homo sapiens
ggggaagacctgcgtcctttttcgtttttcggatgatgccttcaatactacctttatttccaccataggagatacaactcgtcaacgaatcaaattcagtgatgacagagtatgcaagagtcaccttctcaactgtt

SEQ ID NO: 90322 - DNA, 75 bp, Homo sapiens
ccggaaaccacaatagcgggattgatctccttaggacctgcttggaaagagacaagtttgacaacaagactgtca

SEQ ID NO: 90323 - DNA, 75 bp, Homo sapiens
gcttcagagaccccgctgaggggatacaccaacatcagctggaccaaactccttcaataaaggaaagcatgggtt

SEQ ID NO: 90324 - DNA, 83 bp, Homo sapiens
tctcacctgaggtgaaccttcgaccttggacttctcagcctccagaatggaagcagttcaggtacttttgaagcattctgcag

SEQ ID NO: 90325 - DNA, 88 bp, Homo sapiens
ttaaaaaggaagctattcaccattgagattagcctgaggcctgctcagtcgttcctaatgaataaaaatcaagtgccaaagcttcagc

SEQ ID NO: 90326 - DNA, 95 bp, Homo sapiens
gtgtagcgaaaatgctactatgactcttcctggaatacacccacctaccttgaaccaggaaaaccctttcctgtatgccatctgttttctgtggg

SEQ ID NO: 90327 - DNA, 100 bp, Homo sapiens
cccctcctcccccctcccctcagcggtggctcccaagaagtccgagacacgcggtgaggcggcgacgggctccgggatcctcagtcttccacaatgaacc

SEQ ID NO: 90328 - DNA, 97 bp, Homo sapiens
cgcgtctcgcgggaagacttcgagtgggtctacaccgaccagccgcacgccgaccggcgccgggagatcctgggttttagctaaagaagatactgag

SEQ ID NO: 90329 - DNA, 95 bp, Homo sapiens
aattctggagttggtacatgaccacctgaaggatctctggaatgatgggtggacccaagtggagagattgtggaactggcgaaaggtgcatgtcc

SEQ ID NO: 90330 - DNA, 90 bp, Homo sapiens
tagccactttgcattgactggaaacaatggcatttacagaaagagtcaacagcagtggcaacagtttgtcactcaagccctatcagaagg

SEQ ID NO: 90331 - DNA, 98 bp, Homo sapiens
gcggaagtgcagctgcctcagttcttagcgcaggcgggcattaatgaaaatgatttttatgacggagcgtggtgcgcgggaagaaatgacctccagca

SEQ ID NO: 90332 - DNA, 90 bp, Homo sapiens
aagactgcgaggtggccgcagctgtggccggagagacagtcagtcggatgcggagactgcagccgccgcgggcgaagtgctagacctcac

SEQ ID NO: 90333 - DNA, 76 bp, Homo sapiens
tcacaggaatgacagcatctatgaggagttacgccccatggtgtccatcctgccagcagactgattcagaatggga

SEQ ID NO: 90334 - DNA, 82 bp, Homo sapiens
gataatgaaggaagaaaacacaggagccggagcagaagcaaagaggttaattaccatgctcagcattaccatctcactccat

SEQ ID NO: 90335 - DNA, 83 bp, Homo sapiens
gaggatgagtctgtcaacaagctgcatcccctgtgggatgctatggaatatgatgagaagctggcccgtttccggcaggccca

SEQ ID NO: 90336 - DNA, 75 bp, Homo sapiens
cggcagggtcccgcatggcggcgcacaggaagcacgggttcgggggtgattaaagctggctttgcaggagaccag

SEQ ID NO: 90337 - DNA, 100 bp, Homo sapiens
aaaaactgctttcccatgatgcaaatactgaagcactggacaaggtgttggaaatcaatagctcttctagcctttgcattgtttaaatataatagtgtca

SEQ ID NO: 90338 - DNA, 51 bp, Homo sapiens
tcaggaatggagttcagtctgaaaggagccctctggcacaaatggaagaag

SEQ ID NO: 90339 - DNA, 73 bp, Homo sapiens
aagtaaactgaagttgcaaagcaacagtaatagttatggaggttttgatgactatggtggctataataattac

SEQ ID NO: 90340 - DNA, 80 bp, Homo sapiens
ctggtgcagtgcgagacgctagagggtgaatgactggcaggaggactgggtcgtgttctatgcccggcagcgcattcagc

SEQ ID NO: 90341 - DNA, 90 bp, Homo sapiens
caaatggaggcgcctggtgccccgcccaggaccctgacgtgggaagccatggagcagatacgacctacgtctaccagtggccctggacgc

SEQ ID NO: 90342 - DNA, 100 bp, Homo sapiens
cctggccctcatgtacgagtccgagaaggttggggtcgcctcttccgaggtgacagagttagtccttgataattgcctgtgtgtcaatggggaaattgaa

SEQ ID NO: 90343 - DNA, 100 bp, Homo sapiens
ttccttgcggaaaggatgttggcggtccctgtgacctgtggagacacggccagatctgccctccagcgggcgtctaaaattctgggaagcagaacctggc

SEQ ID NO: 90344 - DNA, 100 bp, Homo sapiens
taggcagatctctccctcatataacggatgtttcttggcgcttggaatatcagataaaggggatgttcgtctaaccccagaagactttgctagagctcag

SEQ ID NO: 90345 - DNA, 83 bp, Homo sapiens
gctcaccgacagtgccctgagggccttcgagagctaccgcgccagacaggtctcggcgcggaagatggccggcggcgtggacg

SEQ ID NO: 90346 - DNA, 100 bp, Homo sapiens
agatgactgcccaccagctcatactaatcggaaatgtcctgtctcatggaagcactggaggataagcgggtgaggttacagcccgagtgcaaaaagcgcc

SEQ ID NO: 90347 - DNA, 134 bp, Homo sapiens
tggaaataagtttcaagaccggtattttgttttacgagatgggtttctctttctttacaaggatgtgaagaatcgggaccagtattcacatctgctaagtgatcattttctgccataccaaggtcataattcct

SEQ ID NO: 90348 - DNA, 51 bp, Homo sapiens
ggcggcgaccggcggcgtccgaggagcctcggaatgctgctcgaataagtg

SEQ ID NO: 90349 - DNA, 75 bp, Homo sapiens
aagaacttcacaatcaagaaatgcagaaacgtaaagaaatgcaattgagcatgcaagagctctgcgaggggatga

SEQ ID NO: 90350 - DNA, 82 bp, Homo sapiens
agattgacgcggtgaactctgtccagttttcaaaccacacagggagccggctgctggcatgggtgctgtggctgcaggcctg

SEQ ID NO: 90351 - DNA, 50 bp, Homo sapiens
acggaggaccggagcggcctgtccgaggcatacttttttgatgcaccaga

SEQ ID NO: 90352 - DNA, 100 bp, Homo sapiens
atcgccacaactcccagcagacaagttctctgcagagtttgttgactttacctcacagtggtggtcctgacaaccaagtccactttgaagggtaccaggt

SEQ ID NO: 90353 - DNA, 82 bp, Homo sapiens
cccaccgctgccctcagctccgagtccagggcgagaaagaagcttccggttctgaggtcctggaggtgccatttccctctct

SEQ ID NO: 90354 - DNA, 51 bp, Homo sapiens
tggcagtgctcaaactcaccgaccaggcttttgacctttatgaacaaagat

SEQ ID NO: 90355 - DNA, 75 bp, Homo sapiens
cagcctttgctgattttggaaggcagacacctggtggaagaggcgtacctctgaagaaatcaggggagaaacccc

SEQ ID NO: 90356 - DNA, 75 bp, Homo sapiens
gcctgaggaggcgagctagccgggagttacaccgccaccgccagacaatgcagatcttcgtgaagactctgactg

SEQ ID NO: 90357 - DNA, 98 bp, Homo sapiens
tgtatgacatggaaaatccacctgctgacgaatactttgatacactgcctctaggactgggacagatagccactgagtacctgcttcaaatcaccctg

SEQ ID NO: 90358 - DNA, 98 bp, Homo sapiens
ccgcagccgcctccgaagatgggggatttctacgacccggagcacccgacccctgacacctggctgcagtggaagaaagaaagatcaagtccctggta

SEQ ID NO: 90359 - DNA, 74 bp, Homo sapiens
taagcgcagaaagcaggcgaacccgcggcgcaataacgcacatgattaagtaccggtacatcccgttcacacat

SEQ ID NO: 90360 - DNA, 75 bp, Homo sapiens
ttcattgctggttggcaatgatgtatcgcagtcagtggaagagcatctgcaatgtcaaacactcctacccacagt

SEQ ID NO: 90361 - DNA, 82 bp, Homo sapiens
tgacatctgtgggtttaatccaacagaagaaggctctgaagagcggccattcctcagattcgaagctgaacacatctccaac

SEQ ID NO: 90362 - DNA, 75 bp, Homo sapiens
catcccggaggtctccgccggctcccgggaaaccactggactttgggaaaaccatgtggcagagtcgggaccaca

SEQ ID NO: 90363 - DNA, 50 bp, Homo sapiens
gggctcgagcctgcacatgaagtgggctcgggatgagtttgaaggcctct

SEQ ID NO: 90364 - DNA, 75 bp, Homo sapiens
ccgtaacccaccgccatggccgaggaaggccccgagcctggagatgagggggagccggggcggtcgggactggag

SEQ ID NO: 90365 - DNA, 101 bp, Homo sapiens
aagttgctttgtggaaaaaactcactggggatactacacctggccaaagtgatttgaagatattaaagctagaaattggaactagaaaatcaaaagaattc

SEQ ID NO: 90366 - DNA, 100 bp, Homo sapiens
aaaatgccgtctgaacgctgcctcagaaaccgaaacttcattgccccttcaatgtgggaatccagccagaccctattcttggacagcatcagtgaaaggg

SEQ ID NO: 90367 - DNA, 52 bp, Homo sapiens
acttaactgcgctggggccgcggtggcttcaacggaccacaccaaaatgcca

SEQ ID NO: 90368 - DNA, 50 bp, Homo sapiens
tttatatttacaggaaaccctcgaagactatgaccgtctgaggcctttat

SEQ ID NO: 90369 - DNA, 102 bp, Homo sapiens
agaggacacgaggcggcgggctggagacatggaccgcggcgagcaagataacgaaggaggcccaacttcattcaataaggagcctgacggatttatcccaga

SEQ ID NO: 90370 - DNA, 50 bp, Homo sapiens
agaaatttcatgttgcaccctgttcccccgcctgcacagcgcggtgatca

SEQ ID NO: 90371 - DNA, 74 bp, Homo sapiens
ccagggtccctgaagagggaagacacgcggaaacagggccaattcctgtccccccagcagcatggcatcgtgtg

SEQ ID NO: 90372 - DNA, 75 bp, Homo sapiens
ttatgtcagaaacacaaagcagcccaaccaaagggtctatgaaaattatcctacttatgatttaactgaaagaaa

SEQ ID NO: 90373 - DNA, 83 bp, Homo sapiens
ttcggtggactccttcggcagtccacccaccgccgccgcctcccaggtgtacaagggagaagaagccacattccaaatctcag

SEQ ID NO: 90374 - DNA, 135 bp, Homo sapiens
gcgacggggacgtggatcagggcttccgggaacagctgatgaccgtgctgcaggctgggaaggtggtgggcgccaaggttgtgacaaatgcccggagtcctggagctcgctgttacggttttgtcacgatgtcca

SEQ ID NO: 90375 - DNA, 116 bp, Homo sapiens
cagcaaggcagaaccaccccagtgcacctccctggcctggtctgctgatggccaggttcaaaccttgtactactcagctgatcacaagctgcttgatgggaacctactagatggac

SEQ ID NO: 90376 - DNA, 102 bp, Homo sapiens
gaagttctcccagctggcagaagcctatgagaaacatcttgaggagcagattgctaaagttgatagagaatatgaagaatgcatgtcagaagatctctcgga

SEQ ID NO: 90377 - DNA, 100 bp, Homo sapiens
cggccacagcatgaccgctcgcggcctggcccttggcctcctcctgctgctactgtgtccagcgcaggtttctacagaagaaggcttgagtcttgcccaa

SEQ ID NO: 90378 - DNA, 74 bp, Homo sapiens
aattgaagaaaaactaagactcacatctacaagcaatgaactggtgctgttggcagcagcggtctgcacaaaag

SEQ ID NO: 90379 - DNA, 100 bp, Homo sapiens
gcagatgtaccctcagtacgccacctactattacccccagtatctgcaagccaagatcaatgtccgagttaccaccatggatgcagagctggagtttgca

SEQ ID NO: 90380 - DNA, 87 bp, Homo sapiens
cgtgcgcgccctcaatgacaagctgtacgaaaagcggaaggtggcagcgctggagatcgagaaaaactatccaactctggccaatat

SEQ ID NO: 90381 - DNA, 100 bp, Homo sapiens
gcgtgaagcaggaggagaagctcagcgcagccctgcaggccaagcgcagcctccaccagggacccagacatggagctgcgggaagaagcctggtctccgg

SEQ ID NO: 90382 - DNA, 100 bp, Homo sapiens
ctccttcgccaaggagccccacgtagagcaggtaatctttggtaaatctagctgttcagaattttcaaaggaagcctatacagccgtagtatatcataac

SEQ ID NO: 90383 - DNA, 92 bp, Homo sapiens
tggatgtgggatccggttccttggtgtcatccagccttagcaaaccagaggctcttaaagactctgaccaagtagcacagagtgatggggag

SEQ ID NO: 90384 - DNA, 100 bp, Homo sapiens
ctttcagccaaatgccagactgattgtcatgctcagggaccctgtggagagaacccccagtcggatcttcaggcccaggatagatgtcatagaattggtc

SEQ ID NO: 90385 - DNA, 100 bp, Homo sapiens
tgccccttggtgtggacagtccatcgctgccagggcagaaattgagcaagcagcaagtcggctttcagatcagctcatcgacaggaccgagtccctaaac

SEQ ID NO: 90386 - DNA, 97 bp, Homo sapiens
ctggcaagcaagattataatcaggaagtggatgcctccatttttaagattgccatcacgaaagccaaagtggatttctccagtgtggtgtgcctgcc

SEQ ID NO: 90387 - DNA, 98 bp, Homo sapiens
gccaggccgactttgctgagaaactcaagatgattgtgaagattttgctaacagatatgcacctgccgtgacctgagcatctctgcagaccgcctgag

SEQ ID NO: 90388 - DNA, 100 bp, Homo sapiens
tgtgtgcctcatcccaagaagccagaacacaccctagttctgctcgacactgagggcctgggagatatagagaaggaacatcatttacagcgagcaattt

SEQ ID NO: 90389 - DNA, 100 bp, Homo sapiens
tgatgaactggatgccttagcagttgaaaggggcaggtgatgacacaatgactggtgatgggggagaataccttaggcctgaggacctaaaagaactggg

SEQ ID NO: 90390 - DNA, 82 bp, Homo sapiens
ccggcgcctcctcggagtccttggggacggagcagcgcgtcgtggggcgagcggcaggttttgggatttgagattgacgcgg

SEQ ID NO: 90391 - DNA, 100 bp, Homo sapiens
gtttacagtgcagtcttatcgaaggatgtgcatgaaggacagcctcttctcaatggacaggaagatgtcacccaagcgcatagctaaaagaaggtccccc

SEQ ID NO: 90392 - DNA, 82 bp, Homo sapiens
ctctaaaccatctgaattggctcaatgatgagcgccaacttgcaagtttgctctttgagttgggatgtaccagttcagccct

SEQ ID NO: 90393 - DNA, 96 bp, Homo sapiens
gcgacagcggcgagcagaactacggcgagcggacccgctacgacttcacctcatgcatgggcgtgctcctggtgagcatggtggtgctcttcatct

SEQ ID NO: 90394 - DNA, 80 bp, Homo sapiens
ctggagcctcagttggaagcagccgatccagcctgcggagcctgtggggcagcacgtggtgaggtgtgtatggcttcccg

SEQ ID NO: 90395 - DNA, 98 bp, Homo sapiens
agaaagtacttcattgaagccagtcccttgcccagcagttatccgggaaaaacaaattacagaggatcatgtgattcagcatgggctggtagtggatg

SEQ ID NO: 90396 - DNA, 90 bp, Homo sapiens
atgaatgcatatgtagcctacaaagttacaacacagggcgccagcctcccagtgatggacctgactgaactccccaagtgcacggtgtgt

SEQ ID NO: 90397 - DNA, 98 bp, Homo sapiens
ggagtgcgtgggggaccggctgttggcggttcctgagctggtgccaggcaggtgacacctcctgcagcccccagcatgcgggcaggcccaggccccac

SEQ ID NO: 90398 - DNA, 90 bp, Homo sapiens
aagccgcggccatggacctggcggatccggcctgccctggcccagctcaacacctgatttcgagatgccctgtatccaagcccaatatgg

SEQ ID NO: 90399 - DNA, 51 bp, Homo sapiens
agacaatggactccatcccactgaggaccaagctgcacacatacatgtaag

SEQ ID NO: 90400 - DNA, 75 bp, Homo sapiens
aggagagcagctcctcactgtcaagcacgagctgcggactggatgttgagaaagagaaggaaacccacagttacc

SEQ ID NO: 90401 - DNA, 98 bp, Homo sapiens
cctttgcaccctgcttggagacggacttgcttccgatctcccttgagtttagaaatctggctgagaaataccaaacagtgattgccgacatttgccgg

SEQ ID NO: 90402 - DNA, 100 bp, Homo sapiens
ggctgtcctctggtgagaaggtggtgaggcttcccgtcatattccagttccagctcaaccaagataaaatgaatttttccacactgagaaacattcaggg

SEQ ID NO: 90403 - DNA, 100 bp, Homo sapiens
ggaagaagaggacgacgacgacgaggaagaggaggtttctgaggcaagaaaactgatcagtgattttgccattatcttgtccattctcatcttttgtgta

SEQ ID NO: 90404 - DNA, 75 bp, Homo sapiens
ttcagagcgtttgggtcctctgaggccccttgaccagggctcagcgcctatcctggtggtcatggtgatcttgct

SEQ ID NO: 90405 - DNA, 100 bp, Homo sapiens
gagaggtgttctgaacaagttcaaggaagccagttgagggaagttctccatgaatgtacgtcacaatgatgatgaccgaccaaatccctctggaactgcc

SEQ ID NO: 90406 - DNA, 83 bp, Homo sapiens
catggacacttgtcttcttccttactgtaatgggactatttctactccacataatctgctgaataccactagaaacatacctg

SEQ ID NO: 90407 - DNA, 75 bp, Homo sapiens
ggaggtggagcaggccctgactccagccacttctgccccaccaacgttgggccaaccaaaaggagtcagtgccag

SEQ ID NO: 90408 - DNA, 75 bp, Homo sapiens
tgaatgatgatggctatctggagatgtcagttgcaaatgagtctggaaaaaaaggagaagaagaaaaagaaggag

SEQ ID NO: 90409 - DNA, 101 bp, Homo sapiens
gagaggacctgttcaccagcactgtctccaccctagaggaacgaatgcaggaatttgggaactgagctgtgcaagtgctgaagaaggagatttgtttggag

SEQ ID NO: 90410 - DNA, 101 bp, Homo sapiens
ccgggcgcctcttgcaatggagacgtgatgtccttgcattgcccatttttaagcaagaagagtcgagtttgcctcctgataatgagaataaaatcctgcct

SEQ ID NO: 90411 - DNA, 100 bp, Homo sapiens
gaaactatggctaaattacatattccagtaatggtggatgaagttgttcattgtttgtcaccacaaaaaggacaggaactccaggatggcattgggcagc

SEQ ID NO: 90412 - DNA, 98 bp, Homo sapiens
gacaaacagcccgcccgaccccgtcccgaccctggccgccccgagcggagcctggagtacctggagtagaacagaaaaattattatgtctgtgttccc

SEQ ID NO: 90413 - DNA, 51 bp, Homo sapiens
atttggcagaataaatgaaccaggccctcgggaccaaggatcacgtcatga

SEQ ID NO: 90414 - DNA, 74 bp, Homo sapiens
taaaggaacctgttgataaatgcaaaacagtggctgttgcagtggatgattttagggtggtttctctcaaattg

SEQ ID NO: 90415 - DNA, 74 bp, Homo sapiens
tggccagcgagagccagggctccaaagaactcgcccaggatccggttgtggccgtggctgaggatggccgggag

SEQ ID NO: 90416 - DNA, 75 bp, Homo sapiens
agattctgccgctgattgctatcacttctgcagaatccagtggcaaccatgtccaagggacctgcagttggtatt

SEQ ID NO: 90417 - DNA, 97 bp, Homo sapiens
ggcaccgggatcgtgaccgagaccgtgaccgagagcgtgaccgagagcgcgaatatcgtcatcgttagaaggtaggcgaaaaccaagagtacatcgg

SEQ ID NO: 90418 - DNA, 90 bp, Homo sapiens
attcagaaggatatcgacgtcgtgatccagaagtccagagctgaggactgcctgtttgcaggaagtgcacggctgtctataacgtgctgc

SEQ ID NO: 90419 - DNA, 75 bp, Homo sapiens
cgcgagcgaggcgccctagacatcttctccctcccttgcctcagaaataaacggtgactggcaaagagctgatgc

SEQ ID NO: 90420 - DNA, 116 bp, Homo sapiens
aatatctgtcttcggtggactccttcggcagtccacccaccgccgccgcctcccagccttatgccagcctggaccatcttggaggcagtgtaggatcatggaagaactttgaatta

SEQ ID NO: 90421 - DNA, 74 bp, Homo sapiens
gaggcctgtcgtctggaggaggagacacttaccctttacccagagaggtggagaagagcgagtacttgagaaag

SEQ ID NO: 90422 - DNA, 50 bp, Homo sapiens
cacaaaccgctgccagaaaagagcagacaagatggagacaaattcctctc

SEQ ID NO: 90423 - DNA, 50 bp, Homo sapiens
gcagatggcttatgaaccacagggaaacactactatgaagtatcctgtca

SEQ ID NO: 90424 - DNA, 51 bp, Homo sapiens
aggcccacgacggtgggatttacgcaatgcaaccttaaaatcagtgacaag

SEQ ID NO: 90425 - DNA, 50 bp, Homo sapiens
cccggcgcagcagcatcatcaagcggttaagaagattgtctaccaaatat

SEQ ID NO: 90426 - DNA, 51 bp, Homo sapiens
gaattaaatgccgagaaggccagtacgggggacagccgcgccgctgctgct

SEQ ID NO: 90427 - DNA, 100 bp, Homo sapiens
actattttgttcgtgataaactggatcctgatatggctctttgccgaaatgctagagaaatgctcaaagttatgaagtttcaggatgaattggaatctgg

SEQ ID NO: 90428 - DNA, 127 bp, Homo sapiens
caactgtaaaagatttgggaggccggacgcgatggttcacgcctataatcccagcaccgggaggctgagccaccaaaaccctcaacaggggcatctctgagttcatcgtgatggctgcagacgccga

SEQ ID NO: 90429 - DNA, 101 bp, Homo sapiens
gaggggcaaagctcaagatggcggacaaaacgccaggcggatctcagaaggccagttcaaagtggtgcttcatgccccacctccaaccaagatcaaacggg

SEQ ID NO: 90430 - DNA, 98 bp, Homo sapiens
tgattcccgtgattgcgttacaagctttgtctccttcgacttggagtctttgtccaggacggtcccttcaataatcaggagatggcagaatggtttca

SEQ ID NO: 90431 - DNA, 100 bp, Homo sapiens
tgcatccttggcagaaagtgaggaggaaaacacccccattgaatgtgttccagaagatctagaactgaagaagaagatttttgctcagttagattccatc

SEQ ID NO: 90432 - DNA, 82 bp, Homo sapiens
cagcgccttcctcaacgacgcggacatggtcatgagctttgtgaacctggctgtccccgccctactccggaccgccccaaag

SEQ ID NO: 90433 - DNA, 100 bp, Homo sapiens
ctcctccatctccagatcggatcacggtgagggaaagatgagcgaggagacggcgacttctgacaacgagtctaacttcaaacttgtggctgttaattca

SEQ ID NO: 90434 - DNA, 100 bp, Homo sapiens
atctgcgggccggggacctgcatgtgtgtgcgcgcgaaggagcggaagaatggcagtgctcaaactcaccgaccaggttttgctgttactgctcagtgta

SEQ ID NO: 90435 - DNA, 100 bp, Homo sapiens
gccgtggtgtctctacctgttcaactcgccattttgcagactctgatcacagtgaaacgttccatgggaacttgggccatgagaaacatccttcctaacc

SEQ ID NO: 90436 - DNA, 82 bp, Homo sapiens
caaggggcttacgcagaaggacctggccacgccgaacgaccctgtcaccaacatttgccaagcagccgacaaacagcttttc

SEQ ID NO: 90437 - DNA, 82 bp, Homo sapiens
tcagctctttccccgtcagcatcccagccgtgctcacgagactgggtgtgttgctgtattgcccaggctggtgtggaactcc

SEQ ID NO: 90438 - DNA, 98 bp, Homo sapiens
cgacggctgtaatgttccaggacacctgccatcatggagggttatccagcacctggaggatacctgctacctaacccttaggagaaatcttgagagtg

SEQ ID NO: 90439 - DNA, 100 bp, Homo sapiens
caattttggagtgggaacccaaacccgtcaatcaagtctacactgttcaaataaggtatacatccccagatttcctctatattcgttcttggctcccttg

SEQ ID NO: 90440 - DNA, 82 bp, Homo sapiens
acaataagagcagaggatggaacacttcagtgcattcaagagcgtttcccaaagtgtattctgcggaactagcacctactgt

SEQ ID NO: 90441 - DNA, 82 bp, Homo sapiens
ggccgtggcccctgcagcggaaccggacccagtccctgagccgcccctacacccacagcccgagcgggaagaagttccgcag

SEQ ID NO: 90442 - DNA, 100 bp, Homo sapiens
gagctcaagaaggacgtcttgatggtgctggtgaattacatttacttcaaaggtgctacatgaacccctgatcgatgaggatcctgtattcattgccacg

SEQ ID NO: 90443 - DNA, 100 bp, Homo sapiens
cttgaacttaatacagcaagaaagaccatcaagtttaccaaacaagttgaaatcatcgcagaaggataaagttcgtcagtttatgatcttcacacaatct

SEQ ID NO: 90444 - DNA, 74 bp, Homo sapiens
cgacatatttcctgtcaccaacaaagatttcagtctctgctggatgaaccgaatcctaacagtccagccaatag

SEQ ID NO: 90445 - DNA, 75 bp, Homo sapiens
cacaaatgctccttctcctggagacgcaactcaagggtagaagagcagaggatggctctgtcattgattatgaac

SEQ ID NO: 90446 - DNA, 82 bp, Homo sapiens
ggacggccagtgggagagcgaggcctgagcctctgcgtctaggaagaggctctgcgtcgccagcgggagcaagaaattgcat

SEQ ID NO: 90447 - DNA, 75 bp, Homo sapiens
gtcgtggtccagacagtttagcagaacagcctccgcggctccggggagaaggttggatggcaagcatgtggtgtt

SEQ ID NO: 90448 - DNA, 83 bp, Homo sapiens
agattcagattacgaggattatggatgaacgtaacagacagcatgtagagcgcatgaagtacaggacaataaagcttcctaca

SEQ ID NO: 90449 - DNA, 100 bp, Homo sapiens
atcacctgctgccccgcagacccctgtcccttcctcccggaccagcagctagagaacatacatatgatagttgagaaagacacatattctgatcatgaag

SEQ ID NO: 90450 - DNA, 101 bp, Homo sapiens
agcctggggcggccggccaggaaccacccgttaagaggcacatttgatatttatgtgaaatgtgatggtgttggaagatgtgttggtaactatgataatcg

SEQ ID NO: 90451 - DNA, 95 bp, Homo sapiens
agttatgctggcagattcgccaagagaagaatctaacaaacggcaaagaacttactgattcttgagactttgagaatcactacaagaaaaactcc

SEQ ID NO: 90452 - DNA, 75 bp, Homo sapiens
ctcttggagcagctggggatcatggaaagaacagcagtgtttcaggaattttcacattccagaagaggcgtcctt

SEQ ID NO: 90453 - DNA, 76 bp, Homo sapiens
aagagccaaggaataaacatgcaatgaacccaaaaggggagattcttcaagcaatcactatgtcaacagacacagg

SEQ ID NO: 90454 - DNA, 97 bp, Homo sapiens
gtcagagagcataatagaagtactgcgttttgatgatggagggctactacaggcctcggcaagacgcgcaggaagaccagcgcgcgggatgcgtccc

SEQ ID NO: 90455 - DNA, 82 bp, Homo sapiens
tggagaaactgaggcctcttatgtgtaatgtactctttttgatcagaacaatgctgcaaaaaaagaagagtcagaaactgcc

SEQ ID NO: 90456 - DNA, 80 bp, Homo sapiens
ccggtggccgcgctcggacccgcaaaagctggcaggctgacagaggcggcctcaggacggaccttctggctactgaccgt

SEQ ID NO: 90457 - DNA, 101 bp, Homo sapiens
ggcgactgaggcacagagtgaaggggaggtgccagcccgcgaatccggccggagatttcagaagaaagtggtagcttcctttccaagaacagttctgagca

SEQ ID NO: 90458 - DNA, 90 bp, Homo sapiens
tgctggtgttcctgctggaggccaccatcgccatcctcttcttcgcctacacggacaaggttgacaggcgctgccctcgatgtggtcatg

SEQ ID NO: 90459 - DNA, 90 bp, Homo sapiens
cggagatgcagctcaaggggaagaaaggtggtgatctttgtgaagtctgtgcagcggtgcattgccttggcccagctactagtggagcag

SEQ ID NO: 90460 - DNA, 100 bp, Homo sapiens
ggcagacccgtagctaagacgccaggatttcctggaagcagagaaatgctactgatctacttcttgcctggaatcccatttgtttggggttggtagaagg

SEQ ID NO: 90461 - DNA, 82 bp, Homo sapiens
gtggcctggccaggaggtcggccagcggggggatatgagactttctactcggaatatcctgagtgttgcgtggatgtaaaac

SEQ ID NO: 90462 - DNA, 100 bp, Homo sapiens
tgggctacgcgtatgtgaacttccagcagccggcggacggactacgcccaagcaaggtttgatgcctatttccaccagaagaggaagcttggggtgtgac

SEQ ID NO: 90463 - DNA, 100 bp, Homo sapiens
aaagtttcattgtgtatgtagaagaccagaagtggatggagatacaaaactttttaccaacaaaaaaaagcaagtagttatactcaggaagaacttcaag

SEQ ID NO: 90464 - DNA, 100 bp, Homo sapiens
actccgcgtctgaggaggtgcgggagctcgagggcaagaccggctatacgatccccgcttcaacacctggatacacctggccagcatgaaccagaagcgc

SEQ ID NO: 90465 - DNA, 83 bp, Homo sapiens
ccgggggcgcgggcggcggcgccggcaggaaggaattgaatgatctggcacgggaccctccagcacagtgttcagcaggtcct

SEQ ID NO: 90466 - DNA, 100 bp, Homo sapiens
ctgaaactgtattccatggaaggagtgggtactgatgctgtcatttatttgaagattgtgccttgccagtacatgctgcagacaatgaaggatgagcaag

SEQ ID NO: 90467 - DNA, 87 bp, Homo sapiens
tgatacagcaggcgctcaccatgttccctggagaacaggccgcccgcctgaagaaactacaagagcaagagaaacaacagaaagtgg

SEQ ID NO: 90468 - DNA, 100 bp, Homo sapiens
tcagattactttgctagatgaaccatctacaggtatggatcccaaagccaaacagcacatgtgataaagatggccatggggattctccattatttttcct

SEQ ID NO: 90469 - DNA, 100 bp, Homo sapiens
aaagcttttgagcgccacaggggaaagtgaaaaacaattccaggaagccataattgtgtttcaagaagagtttaatgcgctgaaggttcccgtgccagag

SEQ ID NO: 90470 - DNA, 101 bp, Homo sapiens
gtctccgcggtggaggtctgcgttgctcttgcttttcctcgctggggtgtacggaggcaggtggaagtcatcataaagtttctgtttcacccgtcgtccat

SEQ ID NO: 90471 - DNA, 96 bp, Homo sapiens
gctccctcggtcgcgagtatctccgtttcctggatgtgaactgttctaagaacggaagcatctgggctggatggaatttagcatcaagcagagtcc

SEQ ID NO: 90472 - DNA, 75 bp, Homo sapiens
tcagctgccaaagtgtcacaggttacccacagatatgaattgagaattcgttatttgccaaaaggatttctaaac

SEQ ID NO: 90473 - DNA, 100 bp, Homo sapiens
ggccccgctccgcttcgaatgggtcctgggaactccaacaagggagcaaatcagagaaatgaacccaaactacacagaatttaaattccctcaaattaag

SEQ ID NO: 90474 - DNA, 83 bp, Homo sapiens
gagcagaacgtgagggtgtaacttacaaaaagggactggtgattgcagctggaagtgcccatgaccgagctggcgtcctccgg

SEQ ID NO: 90475 - DNA, 75 bp, Homo sapiens
gaggagaactactccgtgacctggtacatcgccgagttctgaaaatatatgcagatgatgaacattcttaagcca

SEQ ID NO: 90476 - DNA, 97 bp, Homo sapiens
gcggctgctgctgctgctgcccgcgtccgaggctcgcgggcggcgggcccgggtgtcatggagaaactccagctgggcccagagattctgcagcggg

SEQ ID NO: 90477 - DNA, 75 bp, Homo sapiens
gtgtatcaagtaatggtgcaaagcctgaagaactctattttaagaacctctcaaaacgaaacaagcaaatcatgg

SEQ ID NO: 90478 - DNA, 75 bp, Homo sapiens
tcctccctcagctccgagtcatcgcgtctctccacagagccatccagcgaggtgccgtgagcgatgtggagatgc

SEQ ID NO: 90479 - DNA, 100 bp, Homo sapiens
agaagccttttccgttgccggtgccggcctagcgtcctggaattacttcaatcaaatgatggacctagccaaagtgagtctgctactgagactgccatga

SEQ ID NO: 90480 - DNA, 100 bp, Homo sapiens
cccatgtcacctgggccaggccggctaccccgtgagcgccggtgaccagaggccagggggggccctcagcctcttggccttgaacgggctgttcatcttg

SEQ ID NO: 90481 - DNA, 96 bp, Homo sapiens
gcctccccagccacgtggaactggtttgtgtttagtgaatcagagggatctgcattagaacagtttgaaggtggcccctgtgctgttattgcacct

SEQ ID NO: 90482 - DNA, 117 bp, Homo sapiens
aacctgttacgagttctaccttttgagctgggaaaactgtttcagttgcagactttaggcctgaaaggttcttcccgcaaagagatcacaaaacactgggaatggctggaaaataac

SEQ ID NO: 90483 - DNA, 100 bp, Homo sapiens
ccaagaggaggacagttcgctacacagcaatgcatcgagatcctaattatctcatggctaatgaacgcatgaacctcatgaacatggccaagctgagtat

SEQ ID NO: 90484 - DNA, 98 bp, Homo sapiens
tgatgtggtaggaaaaatccgcagagaaattcagaacctcaagcttttcaggcatcctcatataattaaactatacacctatgagcgaattgatgggc

SEQ ID NO: 90485 - DNA, 90 bp, Homo sapiens
tgaggcgctgggagccgcaccacctaacgctggccgacaacagcctggcgtccgccacgagtcctgtgtatggaaactcacatgagtcag

SEQ ID NO: 90486 - DNA, 100 bp, Homo sapiens
gcaaaaccaacgcctggctcggagcagcagcctctgagctctaagcgaaagacatgaggcctcagcctgaaatgaggttgttttgaggtcatctgatttc

SEQ ID NO: 90487 - DNA, 74 bp, Homo sapiens
gtaagccctatgtcagggtaactatggaagaagccagcagaggaactccttgtgggtggagccgctgactgccg

SEQ ID NO: 90488 - DNA, 100 bp, Homo sapiens
cccacctgagcccccgctgagcagcccagccagtcagcacaaaggaggacgtgatggttgccaccctggggaccacaacatgctgctcctttgacaatct

SEQ ID NO: 90489 - DNA, 114 bp, Homo sapiens
gcctgggctggaggacagagaagccttttccgttgccggtgccggcctagcgtcctggaattacttcaatcaagtgctggagaatctggtaaaagcaccattgtgaagcagatg

SEQ ID NO: 90490 - DNA, 82 bp, Homo sapiens
tacagactgtggtgcctacccccatcactgcttccctcagccataacaggaacatgcttaccctgctgatgaactcatgcct

SEQ ID NO: 90491 - DNA, 75 bp, Homo sapiens
cccaacatgcctcaccctcatctatatcctttggcagctcacaggtgtgggatttgatggaggcaatgataaaga

SEQ ID NO: 90492 - DNA, 98 bp, Homo sapiens
ccaaacttcttaacccctagaccggtttttagtccattgactatgcagcctaatgatcaatgtccgagttaccaccatggatgcagagctggagtttg

SEQ ID NO: 90493 - DNA, 97 bp, Homo sapiens
gagcctcggaggttcctgatctgtacaccagggtcttccgggctgcagggctccctcaggcagaggctatgacctgcagataggccacaccattctt

SEQ ID NO: 90494 - DNA, 95 bp, Homo sapiens
cggaaagtttggctgcgcgggttcccccgaagttcaggtctagaggagtcccaggagcagccaggacaggcggaagcagtggctgccatggagga

SEQ ID NO: 90495 - DNA, 99 bp, Homo sapiens
cagtgatttcttccaaggtcaaaggacgaaggatgacagtgatgggattccgtggtcagaagaacgggtggtacgtaaagtcctttatttgtctctgaa

SEQ ID NO: 90496 - DNA, 75 bp, Homo sapiens
gtacctcatcagcaagcgactcaagagcaggctcggatgaggtgcaggttggacagcagcgcacgttcatcagcc

SEQ ID NO: 90497 - DNA, 50 bp, Homo sapiens
cagctcgatacaatttcacacctgctgtccaatgtgaaagaaaacccatt

SEQ ID NO: 90498 - DNA, 83 bp, Homo sapiens
aaaacacaataccaggcatacatttggcagaataaatgaaccagacatcttcatttgattgtacaccatctcccagcaagaca

SEQ ID NO: 90499 - DNA, 100 bp, Homo sapiens
cctggccgacatcgcggccttcttccgatccggtgtcatggagaaactccagctgggcccagagattctgcagcgggaaaatccaaggcttatttatgcc

SEQ ID NO: 90500 - DNA, 82 bp, Homo sapiens
tgccaggcccagctgctggtctatgagaatgaggaagaagatttctctccccatgtcagctgtagtctgcctctggcttcgg

SEQ ID NO: 90501 - DNA, 100 bp, Homo sapiens
atgctgtggaacttgcaaatcgaagagctcacaatgtctctctgcaccaagctccatgactcaggatttgcctggagttcctgggaaagaccagttgttt

SEQ ID NO: 90502 - DNA, 98 bp, Homo sapiens
ccggtacctctggtcataattggaagtaaatatgatgtttttcaggttggctgatcaagatgacactgagtaacccttcagaactagatgaacttatg

SEQ ID NO: 90503 - DNA, 101 bp, Homo sapiens
atgcaggccccaatggcagccagtttggattttcactggacttccacaaggacagccatgggagtgagagtagcatgtttgtctccaagagacgtttcatt

SEQ ID NO: 90504 - DNA, 96 bp, Homo sapiens
aagacgcggctgccgtacgtggccctcgatgtgctctgcgtgttgctggacttaattcagtgcacaaatgagatgaatgtgaacatcccacagttg

SEQ ID NO: 90505 - DNA, 100 bp, Homo sapiens
gtactcctcgccatggctcagctccaaacacgcttctacactgataacaagaatcagcagataagcagagagccctagaagaaaccaaagcctacaccac

SEQ ID NO: 90506 - DNA, 98 bp, Homo sapiens
aggaggagcagcagactcggacgtggacgcctttttccggacagccatgtcggacttccacgtgcatccccaggccaccgtgggtgaggagggtggtg

SEQ ID NO: 90507 - DNA, 100 bp, Homo sapiens
gtgtgcaatgccccgggctgtggacagtgaccccagttttgcccgtctgggtcagatggtcttggagtatgaccaccctctgaagaagctgacagaagag

SEQ ID NO: 90508 - DNA, 90 bp, Homo sapiens
cacgctcactgccgaggaggccgaggaggagtgggagaggtgccctctgccctcctgaccttctcgtgggacatggctgtgctggaggac

SEQ ID NO: 90509 - DNA, 100 bp, Homo sapiens
tgtgaactaaggccccctgcccccttttcctggtgcatgtgaagttatcaaaaacagagttcaggatggtcaacggcagcagcagctgtgagggccgcgt

SEQ ID NO: 90510 - DNA, 101 bp, Homo sapiens
gcggggcgacgctggctgcagggacccggtgacagcgtgagagggatgcttgaagatggaaagaaatttgattcctcccgggacagaaacaagccctttaa

SEQ ID NO: 90511 - DNA, 100 bp, Homo sapiens
tggagtgaaccggagaccccgaaaacggaagcgcagggagaaggaagaggtgtttgaaaaggaagtgcacggctgtctataacgtgctgccgggtctcag

SEQ ID NO: 90512 - DNA, 50 bp, Homo sapiens
ggccactgcgaggccgttttagataactgttcccaggaaaaaaaggagga

SEQ ID NO: 90513 - DNA, 82 bp, Homo sapiens
ggggcggaagaaaatacaaatcacacgcataatggatgaaaggaaccgacaggctgatcagctgaccgaagaacagattgct

SEQ ID NO: 90514 - DNA, 74 bp, Homo sapiens
aaaggcctaagaattttggcattggcttgtgacatcacgggaggactgtacctgaaggtgcctcagatgccttc

SEQ ID NO: 90515 - DNA, 100 bp, Homo sapiens
gctacacagagacagatcaaagcagctcgctaaaataaatgaagctgtagaatgcttactgtccctgaaggctcagtataaagaaaaaactgggaaggag

SEQ ID NO: 90516 - DNA, 88 bp, Homo sapiens
tccgcgaggtggcggtgctgaggcacctggagaccttcgagcaccccaacgtggtcaggtgactattatatggttaaaaagattttgg

SEQ ID NO: 90517 - DNA, 75 bp, Homo sapiens
aagtccttgcggggcacagacagaaaacacatcaaggatctggattttgcataactggtaaaatagaagctggtt

SEQ ID NO: 90518 - DNA, 90 bp, Homo sapiens
atcaggctgaggccgagaagcagtacgaagactcctgccgcgtataccaggcatccagccccgatgagagaggaggttcagatgagcccc

SEQ ID NO: 90519 - DNA, 99 bp, Homo sapiens
ccagcgccgccccgtcgtcgtctgccttcgcttcacggcgccgagccgcggtccgaagcctgtacagcaggaccatggaggcgctggacttcatgctgc

SEQ ID NO: 90520 - DNA, 73 bp, Homo sapiens
cggcggcagcgggtcttgggtcctccgagagcagcagcgtctttgagtgattgcagtatgactccatttccct

SEQ ID NO: 90521 - DNA, 83 bp, Homo sapiens
atgacagcacaagaaatgtgtataggataatcagtttagatggctcaaaggaaatggctaattctgtctacctggttatggag

SEQ ID NO: 90522 - DNA, 80 bp, Homo sapiens
ccgtccccagccctgcctctccctgggctctggaaatggagaagcatcatgtgccaagtgacttcaatgtcaatgtgaag

SEQ ID NO: 90523 - DNA, 74 bp, Homo sapiens
acatggggacttctgcaaatacagagactcggattaaaggatgtacgaagtaggtccaaagttgttgaccgtat

SEQ ID NO: 90524 - DNA, 75 bp, Homo sapiens
gcactgtgggcagcaatattcaggttcagaagctgctgaatgccttttttgggaatcatcatccagggacgtgcc

SEQ ID NO: 90525 - DNA, 74 bp, Homo sapiens
ctccacgctgggccgggtgttgcgcctggcctacagcgaggctgcacctggctgcagtggaagaaagaaagatc

SEQ ID NO: 90526 - DNA, 90 bp, Homo sapiens
tgtttgctgcagaagagacaggggaggcactgtctgaggagactacagcagctaaaccaggtggacaggtgaaatgtcagtatatctctg

SEQ ID NO: 90527 - DNA, 100 bp, Homo sapiens
tgtggacgttggcactgggaaggttacagtatagccaggatatacccagtcacttggccgatgagcatgcgctgatagcctcctatgtggcccgtctgca

SEQ ID NO: 90528 - DNA, 74 bp, Homo sapiens
ccgcagtcgcccgcaaccggggcgaatcatggcggccgccaaggtgatgcaggttctgaatgctgatgccattg

SEQ ID NO: 90529 - DNA, 100 bp, Homo sapiens
tgatgagaccaaggaggctgccattgtggatccggtgcagccccagaagacttgcctcctcatgcggcagcagcacgaggccgcggccctgaacgccgtg

SEQ ID NO: 90530 - DNA, 99 bp, Homo sapiens
actttctgactgtgaaggagttcttggacctcgagcagagtgggactcttctggaagtcggcacctatgaagtaatgggtcaggcacctcagaagatct

SEQ ID NO: 90531 - DNA, 98 bp, Homo sapiens
tgtctttgtgcttgcctgcgtccccagactcagagggaactctaatgatccaggacaaagaagttaccctggagtatgtatcaagcctggatttttgg

SEQ ID NO: 90532 - DNA, 83 bp, Homo sapiens
gctttcgcccgggtcctcctagaaattccccccgaagaagactcccccacatctggaagtccattggaatattaagcccagga

SEQ ID NO: 90533 - DNA, 96 bp, Homo sapiens
ctgcctcagcctcccgagtggctgggactacagtatgacgccgtgcccatccagtccagcgtggtgttatgttcctgcccatccccatcaatggtg

SEQ ID NO: 90534 - DNA, 51 bp, Homo sapiens
ttcctggcaagcctccttgttctcattgagtgttcaagaaggaagtgtatc

SEQ ID NO: 90535 - DNA, 98 bp, Homo sapiens
aagtgactgggcggtgccggcgccggagacgatgccgttgattctaacattttcagagaaccttttggaaagaacaagcctacttcaataaatgaagg

SEQ ID NO: 90536 - DNA, 100 bp, Homo sapiens
atccagagttacttccagtgtgttccctgaaggcaaagaatccccaggataagatcctcttcaccaaggctgaggacaactctgctggccgtccgctctg

SEQ ID NO: 90537 - DNA, 100 bp, Homo sapiens
aaaatttgtctgcaaacctggagccagaaacattaccgtcatattccacccattactaagatgttctgccttactcaatacgggtcttgttggaagctgc

SEQ ID NO: 90538 - DNA, 82 bp, Homo sapiens
agaacccaaattcaacagtgtgaaagagaaagaagaacgaggaattgctagaaatgccagatctggagtaaggaatattgtc

SEQ ID NO: 90539 - DNA, 100 bp, Homo sapiens
gtgggcgaaggacacccgcaggaactcggcagaggagaaattcagacggctcccgaggtgcttcaccgatatagacacattttgggattgtggcagccag

SEQ ID NO: 90540 - DNA, 50 bp, Homo sapiens
tctacctgtccaccgtcgtgaccgagggaactctaatgatccaggacaaa

SEQ ID NO: 90541 - DNA, 83 bp, Homo sapiens
ctcccacggattctacattatgctgttggctcctgggaccctgtgccgcgagcaggccaggcagtgtgacctcccggagttct

SEQ ID NO: 90542 - DNA, 74 bp, Homo sapiens
cagaacgtgccatggagacgcttaacgcattttgaaagcgaagcagaagccgtagaatcagcggcgagcctgtt

SEQ ID NO: 90543 - DNA, 75 bp, Homo sapiens
tgtgccatgtttgtcatcatcgttgcctttgggtccctgattctggcaaaaatacttgattctaaagctcgaaag

SEQ ID NO: 90544 - DNA, 75 bp, Homo sapiens
gttattagaacaaagatttcgcaggtggtaacaaggacgtctttgtgtgcatgcccacaggggcaggaaaatccc

SEQ ID NO: 90545 - DNA, 101 bp, Homo sapiens
cacgtgattgctgcctgcctctacctggtctgccgtacggagggcacgccgccacggatgataccatcggggaccttaagaagctgattgcagcccaaact

SEQ ID NO: 90546 - DNA, 101 bp, Homo sapiens
ggctggttatgaaagacagtgcaattgtctacaacctgttgtctctgcgcttcaactcacggatccgtgtgaagacctacacagatgagctgacgcccatt

SEQ ID NO: 90547 - DNA, 100 bp, Homo sapiens
gacgggagccccatggtccggaaggcagactgccagattcacttacagccccagctaattccaccaaacatggaggagtacatgaacagccttctctcag

SEQ ID NO: 90548 - DNA, 89 bp, Homo sapiens
ccgccgcgaggccgggaaggtgaaggaaacatactggggagaaaccctttgagtgtcccaaatgtgggaagtgttactttcggaaggag

SEQ ID NO: 90549 - DNA, 80 bp, Homo sapiens
ctgcgccgcaacgccgagcgcaccgacatctgcctgctcaaaggcgctacactaagtatgagaccagcccccattccaat

SEQ ID NO: 90550 - DNA, 105 bp, Homo sapiens
gcatcaaggtctttcccaacgaggaggacctcaccgacctccaggtcaccatcgagggccctgggtcattggtttcctggaggccattgtttgcataaaatttgg

SEQ ID NO: 90551 - DNA, 50 bp, Homo sapiens
cccaggggagttctctgtgtctgtgaagatgacatcattgatgatgttga

SEQ ID NO: 90552 - DNA, 100 bp, Homo sapiens
cgggtccagtcccgggcgggccgtcgcgggagagcctttggctatgggctgctttgtctaggaatggcctatatttcctcccagatgggacctgtgctgc

SEQ ID NO: 90553 - DNA, 75 bp, Homo sapiens
gttttggattacataaaccagtcacccaagtgcattgcctttggaaacgagatgagtgaccgaggaggtggcgtt

SEQ ID NO: 90554 - DNA, 75 bp, Homo sapiens
gctatgatgctattgtggttgaacaatggacagtcctggaaattaacgtcttcaaggacccagttgctgatccca

SEQ ID NO: 90555 - DNA, 136 bp, Homo sapiens
cttgaacgtctggactctagggaccctgctgaatagctggggctacaggcgtgtgtcactgcgcccagtgcccaccagaagtatgtccgacaagcctggcagaaggcagacatcaatacaaaatgggcagccacac

SEQ ID NO: 90556 - DNA, 95 bp, Homo sapiens
ggaagattataactttgtcttcaaggatttgaagaacccaagtgattcagcagtgcacagcccctttacaaagcgccaggcttttaccccatctt

SEQ ID NO: 90557 - DNA, 101 bp, Homo sapiens
agcagcacatcagttactacaaatgggacaggagctactgtgtgaagacattcacaggacacagagaatgggtacgtatggtacggccaaatcaagatggc

SEQ ID NO: 90558 - DNA, 100 bp, Homo sapiens
gcgggtgctcgccttcacctccgtcggcgacgggcccctctcggaccccatccaggtcaagacgcagcagggagatgcctgctctgtgcctgtatctgag

SEQ ID NO: 90559 - DNA, 101 bp, Homo sapiens
attcaacttcaatttttctgcagtggctctgggtccagccccttacttaaagattcaaccctatgaaaagataaaggccaggggcttgcctgataatatat

SEQ ID NO: 90560 - DNA, 100 bp, Homo sapiens
cttggagtccggagtaacttggccaggctggccccgagcggaactggagaaagctgaggaccagatgatgtgcttctgcatcgcactcatgatgagattg

SEQ ID NO: 90561 - DNA, 96 bp, Homo sapiens
ggaaaatttccggaaggaacaaataggcttcaccaaggtcctcaggttgagaggaactgtactccagaagctatacttaaagaactacatctgagg

SEQ ID NO: 90562 - DNA, 83 bp, Homo sapiens
gtcagacgcagccgtagacaccagctccgaaatcaccaccaaggtggaagatgcaatgctgatgtttgataaaactaccaaca

SEQ ID NO: 90563 - DNA, 75 bp, Homo sapiens
aagaggaagaagaagaagaacagaaaattggaaaagttgttcatcaaccaggaaaatatatgcagatgatgaaca

SEQ ID NO: 90564 - DNA, 96 bp, Homo sapiens
gttgggaataagaaggatcttcggaatgatgagcacacaaggcgggagctagccaagatgaagcaggtgtgagagggtccagcagaaggaaacatg

SEQ ID NO: 90565 - DNA, 88 bp, Homo sapiens
actggccagaccgggctcaccaccctggcgcaggcggtgcaagcagggcgcggatggcgtcggggcgccccgaggagctgtgggaggc

SEQ ID NO: 90566 - DNA, 100 bp, Homo sapiens
aaccctcattgaagatattttgggtgttaaaaaggtaaggctggcctctctgcagtcagaggtctgagctctgccatggggataggggtgtctttattac

SEQ ID NO: 90567 - DNA, 100 bp, Homo sapiens
gatggctgcggctgcgccgaggcgccctactcagaccattcctcaagaattttgtatccaaggcccaaaagtttgttacccaagatgatgaatgctgaca

SEQ ID NO: 90568 - DNA, 75 bp, Homo sapiens
agtttatctggatgttatcagatcacagaccatggtctcagcttttcacctctggttcctacatctggattgtag

SEQ ID NO: 90569 - DNA, 100 bp, Homo sapiens
ccattggagcccgttcccaatcagctcgtacttacttggagagacatatgtctgaatttatggagtgtcctagcagaagatgtgactcagactgcctctg

SEQ ID NO: 90570 - DNA, 100 bp, Homo sapiens
accaagagttggtgggagacgggtgaggtacaggctcagtctgcggccaagactccgtcctgcaagttgccattgccccaaatggagccttacagttggc

SEQ ID NO: 90571 - DNA, 90 bp, Homo sapiens
taaaagccccaatcttagcaagtgcggggaagagctgggtcgactcaagaacctcaagaaggcatgaagccagcccctgcagtgccgtcc

SEQ ID NO: 90572 - DNA, 50 bp, Homo sapiens
ggaccgtctgccaggcaccacagttttaaaatcaaagatgggaaaatcgg

SEQ ID NO: 90573 - DNA, 88 bp, Homo sapiens
accccgcccaggtcttcgacctcatgaacggaggcccacacctcggcttcgagagctgtgcccaggagtgaacaaccagccctacctc

SEQ ID NO: 90574 - DNA, 90 bp, Homo sapiens
ctccttggtcgccgcgtccttggctggcgtgatgcctaaatcaaaggaacttgtttcttcaagctcttctggcagtgattctgacagtga

SEQ ID NO: 90575 - DNA, 101 bp, Homo sapiens
agccatggaatgaatatccacaatttagcatcaggcaaaggaagcaccgcacatttttcagatgcgtctgttactagagtggagagtctaccttcgtctca

SEQ ID NO: 90576 - DNA, 110 bp, Homo sapiens
agcaaggtacctgcaggacccatttgtgtccattgatctcttggagcagctggggatcatgatgaagactggcccatttgcagagcactccaaccagctgtggaacatca

SEQ ID NO: 90577 - DNA, 98 bp, Homo sapiens
ccatgggaagagcatgcattgtgggttactggaggaacccgacatggattccacaggtacccactgatggtaatgctggcctgctggctgaaccccag

SEQ ID NO: 90578 - DNA, 50 bp, Homo sapiens
gtgcgtcaatcagagcgtcctgtgcgatcaatgtccgagttaccaccatg

SEQ ID NO: 90579 - DNA, 131 bp, Homo sapiens
gaagaagaccgccactgccggagccatctcggagctcacggagagccgcctgaggagcggcacaggtgctggagaatctggtaaaagcaccattgtgaagcagatgaggatcctgcatgttaatgggttta

SEQ ID NO: 90580 - DNA, 51 bp, Homo sapiens
acatcttgaaagagaagctcttcctgtgagcagtcccagctatctgacttc

SEQ ID NO: 90581 - DNA, 82 bp, Homo sapiens
gtggctcagagcacccgtatcatttatggaggtccatccaagctgaatgatcgcgctgactcaagaagaagcctttgggacc

SEQ ID NO: 90582 - DNA, 51 bp, Homo sapiens
gcgcgggatgcccaggacgtccaggatttccagatgtgacttgcactcaga

SEQ ID NO: 90583 - DNA, 83 bp, Homo sapiens
aggaagagtgtatgtgatcatcgatctctcagggtcgtcgggtgaagacccaccgtgcggaggtcgtttgaattccaaagatg

SEQ ID NO: 90584 - DNA, 75 bp, Homo sapiens
ctcaccaagtcacatgacaagcagaggaatgcaggctcaggttggaatgccaggaagtggaccagtgtccatgga

SEQ ID NO: 90585 - DNA, 100 bp, Homo sapiens
gagtctactctgtcgctcttgtgccctagcaccccgagaaccgtcagtttgagccagatgagtcgagtgtgcccatttcttatagatccttcttcccaag

SEQ ID NO: 90586 - DNA, 100 bp, Homo sapiens
gaaagcttagctctggaagtggagcagcagctgggcctggagatccagaagctgactgcacagatccaggtgggcccatctggggcagggaagagcacaa

SEQ ID NO: 90587 - DNA, 100 bp, Homo sapiens
agccccaggaccctgcggccgtgtctctgcccacgtcgagcgtgcccgagacccgaggatcatgttctaattgagctcacccaggctggattgaaaggct

SEQ ID NO: 90588 - DNA, 75 bp, Homo sapiens
tgagtggttgtgtggtcgcgtctcggaaaccggtagcgcttgcagcatgataagtttataccatggatagcacaa

SEQ ID NO: 90589 - DNA, 96 bp, Homo sapiens
gcgaaccaaagcgaccattgagctcaaggccctcaggctgctgaacttccagaggcagcctccgcagcattcctagtgtctctctacataaaggac

SEQ ID NO: 90590 - DNA, 96 bp, Homo sapiens
cgcgcaggcggtttcgcgagcgcgttggagcggcactcggagcttctacagaagattatccgtgtcctctggtggtactacttctccaaactcata

SEQ ID NO: 90591 - DNA, 100 bp, Homo sapiens
ctggagctgggtcagtccgccgctcaccccgcggccgcaccttcccgccttctcaggtgcctggctgctacaaaccatgcaatgagccatgccccgccct

SEQ ID NO: 90592 - DNA, 95 bp, Homo sapiens
gattcaagtcccaggagtcctgaccagagagcagataaacttctgcactggaggggcctctcctcccctcgttctgcacatggagctctaatccc

SEQ ID NO: 90593 - DNA, 76 bp, Homo sapiens
acgccctctgccatgatgacgtcagacgcagcaaaggccttcagtcacgctgctggagtgtagtggcatgatctcg

SEQ ID NO: 90594 - DNA, 74 bp, Homo sapiens
ccctgtttgagaaaaggcctaagaattttggcattgatcatggaagggaagtggttgctgtgtatgttactggt

SEQ ID NO: 90595 - DNA, 76 bp, Homo sapiens
cttaattcaaggtcacacaatgtcggggatggacctccagatttccttactggtgccaatgggtcatgtttggtta

SEQ ID NO: 90596 - DNA, 100 bp, Homo sapiens
agaaaaagctgaaccaggcccttttggatcttcatgccctgggttctgcccgcacggacccccatgctgaacacccaaacccaggagttcggtatcctgg

SEQ ID NO: 90597 - DNA, 98 bp, Homo sapiens
gcctgaactgatagctgcagagaagaaatatttttctttaaagcctgaagaaaaggaaactccccaacttttaaatcatttgaagaaaaggtcgaaaa

SEQ ID NO: 90598 - DNA, 100 bp, Homo sapiens
cctcccaacctcactggctactaccgctttgtctcgcagaagaacatggaggactacctgcaagccctaaattactccaaaggtttcggcggcaaatacg

SEQ ID NO: 90599 - DNA, 100 bp, Homo sapiens
attttactcatccatgtgaccatgaggaaatgagagaaatgcttacacacagaaatggtgggaaagcagtgccactctccgcttcacagatgccccctgc

SEQ ID NO: 90600 - DNA, 101 bp, Homo sapiens
atcggaacaaatacaaagcacctacagactattgtctggtgctgaagatctccagtctatgtgctgaagaagcagcagcccaagagcagacaggtcaggtg

SEQ ID NO: 90601 - DNA, 75 bp, Homo sapiens
gttaaagggaatgacttcattacagtcctcagaaacgtgaagaattatgatctctggagaaggacaggaaatcac

SEQ ID NO: 90602 - DNA, 100 bp, Homo sapiens
gatctcgatgcacgttgtgagagtgtatttggaaaagttccttccaggaggtactttatgccgaggaaaaaccagtgagtgtgatgttccagagtactgc

SEQ ID NO: 90603 - DNA, 126 bp, Homo sapiens
cccgtgtcctgcaggtattgggagatccacagctaagacaccgggacctcctggaagccaaaaatggtctgagaaagaaccccagtttaagtttatctacttcaaccacatgaatctcgccgagaa

SEQ ID NO: 90604 - DNA, 83 bp, Homo sapiens
cggctcctgccctctcgctttccctctcgcgtctctggctgcagtcaccttcaggccattcagaggaggaaagagaggggaat

SEQ ID NO: 90605 - DNA, 101 bp, Homo sapiens
taaccacctcacagattccagcttcggaacaagagaccctgctggaaatcttccatttggttatgtatcgaaactaccagcggaagaatgacatggatgag

SEQ ID NO: 90606 - DNA, 82 bp, Homo sapiens
ccaggacaatggggacccgggacgacgagtacgactacctattcaaaggtgcatggctgcctcctaatcccatagtccagag

SEQ ID NO: 90607 - DNA, 100 bp, Homo sapiens
gtagcctaaaagtggaaggaatggtagcgattgttcaattagggtatgaagaggagatcaacaaacgcacagcagccgagaatgactttgtggtcctaaa

SEQ ID NO: 90608 - DNA, 76 bp, Homo sapiens
ggaggaagaggaagatgatgatcaggtacaactccaaaaggagacattggagaagaaccaagctgggtctataagg

SEQ ID NO: 90609 - DNA, 90 bp, Homo sapiens
cacttacagtatgcaacacattttcctatacctctgtctccctttcctggtgatgatgaagaggaagtttttgacagtattgtaaatgat

SEQ ID NO: 90610 - DNA, 82 bp, Homo sapiens
ctttcccctgtcattgcacccaaaaaagcaaggccttctgagactggatctgatgatgctttcctcttaacatcctttgctt

SEQ ID NO: 90611 - DNA, 101 bp, Homo sapiens
actcgcacgcggatttggctggcgtcccgcggttgagaatgcttgcaccaagcttgtccaggcagctcagatgcttcagtcagacccttactcagtgcctg

SEQ ID NO: 90612 - DNA, 100 bp, Homo sapiens
gatgaatttgtgactcacaatctgtcttttgatgaaatcaacaaagcctttgaactgatgcattctggaaagagatttaaagacttgtattgcaagtact

SEQ ID NO: 90613 - DNA, 75 bp, Homo sapiens
cctatgtacctgttaccactttcaaaactctggaggctgccatcgagaacctcaatgaagccaagaactattttg

SEQ ID NO: 90614 - DNA, 100 bp, Homo sapiens
gcggaaacccgttcgccgagcccagcgagcttgacaacccctttcagttttcggctttgtgagaaaccttaccatcaaacacgatggccagcaacgttac

SEQ ID NO: 90615 - DNA, 104 bp, Homo sapiens
atgctttgtgcagaaaggaatcaaaagaatatttagaatgcaggatggagagacgttgccccatctgacgctcggctcgaggcctctctgtgagggaccggggg

SEQ ID NO: 90616 - DNA, 75 bp, Homo sapiens
cagattcgcagtggtcgcttcttctccttggaacgacagattcagctgattcgagagatgctcatgtgtgacaca

SEQ ID NO: 90617 - DNA, 100 bp, Homo sapiens
ccatgatcgaaattagccggacccaggatgaagaggttggagatgggaccacatcagtaattattcttgagttcaccgaacagcagaaagaatttcaagc

SEQ ID NO: 90618 - DNA, 83 bp, Homo sapiens
ctagaggggattgcagaatctccaacaactttacagagaaagctctgggcttgtactcctctccagctgtccccagacagcta

SEQ ID NO: 90619 - DNA, 100 bp, Homo sapiens
gagatggacggtcactcagcctatggaggtacaccaggggttggaaaaaccacactaggcaaagaacttgcgtcaaaatcaggactgaaatacattaatg

SEQ ID NO: 90620 - DNA, 82 bp, Homo sapiens
tataatcagattttgaccaagcattttgtaaggggcactatgaacgaagaggagcagtttgtaaacattgatttgaatgatg

SEQ ID NO: 90621 - DNA, 100 bp, Homo sapiens
gatggcgcgaggccgcagagctaaatgggggcctctccagggagtgctctgttcacggctccatcgctgttaacagtcttgcactgtttcctaggctgga

SEQ ID NO: 90622 - DNA, 52 bp, Homo sapiens
attaaaaggtgtcaagaagctcagaatgagtttcgctcttgttgcccaggct

SEQ ID NO: 90623 - DNA, 90 bp, Homo sapiens
gtttttgaccagaaaaccgacaaccttcccagaaagtccaagctcgtgtttaaacccattttcctgaacacaattgacccatctcacccc

SEQ ID NO: 90624 - DNA, 74 bp, Homo sapiens
actaggattatacattgtaagaggtgacaacgtggtatgtccagaaatcttgatgcatgtatctgaaaagaaaa

SEQ ID NO: 90625 - DNA, 98 bp, Homo sapiens
ttgcattgactggaaacaatggcatttacagaaagagtcaacagcagtggcaacagctctattaccaggttttaaacttcgccatgatcgtgtcttct

SEQ ID NO: 90626 - DNA, 100 bp, Homo sapiens
gtatggaaccggccttctttcagccaacagacattcactcatgttatgccatacaacagtgcccaccactgcgttgtggaggtggaaaacttcttgttcg

SEQ ID NO: 90627 - DNA, 129 bp, Homo sapiens
cattaatactcatcttgtccagaactctgtcaaatgaagaacactttcaagaaccaggtattgggagagttgctgctacatctttaggaaatttgactaaccatggttctgaagatttaccccttcctc

SEQ ID NO: 90628 - DNA, 82 bp, Homo sapiens
caaagcctgcgcgagaggagccgggacacgcctagcgcgggctccagatatggctcgtggacagcagaaaattcagtctcag

SEQ ID NO: 90629 - DNA, 100 bp, Homo sapiens
gcagaggcggagagaaccctgtcctgatcttcctagctctggattaatcgaattacagctgctagccaggaacatggactgaagtatccagcgctcattg

SEQ ID NO: 90630 - DNA, 75 bp, Homo sapiens
tgctgagcccaaggccaaggaccccttcgctcacctgcccaagagtgagacggtttaagcggaagcatcttactg

SEQ ID NO: 90631 - DNA, 100 bp, Homo sapiens
gaaatccaatcttccgtaacccctgcacagagcagattctgaaacttcttgacaatttgcttgcgcttataagccataggtccatggagtcagccaacat

SEQ ID NO: 90632 - DNA, 90 bp, Homo sapiens
cttggatgtagacctcgaccttcacaggactcttcattgctggttggcaatgatgtatcggaaatgaaagcatttgtccagatctctggc

SEQ ID NO: 90633 - DNA, 75 bp, Homo sapiens
gggtgtggaattaccttcactctgggaaaaggcactgaagttggtgaagctgtacttcacaaaaacagtagagga

SEQ ID NO: 90634 - DNA, 100 bp, Homo sapiens
ttggtcgaatctacaaagatatgtttttggactctaatttcacggacactgaaagcagagaccatggagcttcttgaaaacatccagtacagacctttct

SEQ ID NO: 90635 - DNA, 100 bp, Homo sapiens
cagcatgaagcgcaccccgactgccgaggaacgagagcgcgaagctaagctatgtttccagtgtcctctgggtgtttccaagagcaacaagaaacgaata

SEQ ID NO: 90636 - DNA, 100 bp, Homo sapiens
ctctggcccaggacacagggactgggactgcctacattgagaagtcagcatccggtattgtagctgtccctttcagcgaatggctccttggaagcaaacc

SEQ ID NO: 90637 - DNA, 71 bp, Homo sapiens
atgtcatccgacagctgggcagcctgactctggacttattggacaaaatgttgacattcaacccacacaag

SEQ ID NO: 90638 - DNA, 76 bp, Homo sapiens
gtccctgaagagggaagacacgcggaaacaggcagctgcattcagcctcagcggaggacacgcctgtggtgcagtt

SEQ ID NO: 90639 - DNA, 75 bp, Homo sapiens
acctgccgcggtcctcccgccggcgctggcttcatcacgtttcgctcctgtgcctacctggacaagaagcatacc

SEQ ID NO: 90640 - DNA, 90 bp, Homo sapiens
tggtgctctgcgtcctcatcgggcttatgttcgaggttgaaaggattgttgacaaaaggaaaaataaaaaagggaagacagagtatttgg

SEQ ID NO: 90641 - DNA, 100 bp, Homo sapiens
caagtgcaagctggccagggacctcaaggaagcttatgacagagtgtcaatccatatctacaaggacagagactggataatgttgttgcaaagaagtctg

SEQ ID NO: 90642 - DNA, 90 bp, Homo sapiens
agcgacgtgccccaggcggagatctcgggaaggttgtgcaggaccagcgttccctgtgcaggcgccactgcgtttcctgcagattccgac

SEQ ID NO: 90643 - DNA, 75 bp, Homo sapiens
tcacctgtacttggtcatgcagctctccttcgagaactcatagaacggaagaccagctccttggatcccaacgat

SEQ ID NO: 90644 - DNA, 88 bp, Homo sapiens
gcttagagaaaaccagttaaaaatgttgcctaaagttggtggttccaggattttactcagaatgacgttaggaagagaagtgatgtct

SEQ ID NO: 90645 - DNA, 100 bp, Homo sapiens
gaggaactggcccggaaacaggaggacggtaccgtgagggttttctctggaagcgtggccgggacaacgggcagtttttgagccggaagtttgtgctgac

SEQ ID NO: 90646 - DNA, 87 bp, Homo sapiens
tagatgaaagacaagatgtccatcttctcatgaccaactgtatcaagaagatttgtacacacagatatgacgaaagacttgaaagaa

SEQ ID NO: 90647 - DNA, 83 bp, Homo sapiens
ggagaagaaaatgctgacccaccaaatgctatctgtgagcagcagttgataatgtgcataaaatctgggaacaggccagatgt

SEQ ID NO: 90648 - DNA, 99 bp, Homo sapiens
ttttcttcatgtcttcaccaagtattaggtcttcttaatggaaaggatcctgattcctcttcaaaggtgcataaggcaaatccaatacgcaagtaccag

SEQ ID NO: 90649 - DNA, 100 bp, Homo sapiens
caattgtctgtgacagtaacagtacttgggatcccccagttccaaagtgtcttaaagctggtgtcatagatgaagattatagaggaaatgttggtgttgt

SEQ ID NO: 90650 - DNA, 75 bp, Homo sapiens
ctgcccaggctcgcctcgactccaaatggttgaaaacagatatacaggctttgaacttggcctactccagcattt

SEQ ID NO: 90651 - DNA, 87 bp, Homo sapiens
ggatatggcagtggacgtggatttggggatggctataatgggtatggaggaggacctggagtgaagacctaggaaaggacgttgaat

SEQ ID NO: 90652 - DNA, 98 bp, Homo sapiens
atttgtcacattaggaagaggacacaccaaggatccggaacatggtggcggtgctggaagtcatctccagcctggagaaataccctattaccaaagag

SEQ ID NO: 90653 - DNA, 90 bp, Homo sapiens
atcagcaccttggaacctttggcatggctaatgtaaaagcagccccaaagataattgacacaggaggaggcttcattttagaagaggaag

SEQ ID NO: 90654 - DNA, 100 bp, Homo sapiens
atgggcacagacgggacaaggaccgtaaacgatccaggtacttgaagctggtgtgtgtttcctttcagcgtcaagggttccacactgttgggagtcgctg

SEQ ID NO: 90655 - DNA, 96 bp, Homo sapiens
cgagccagagagggcccacacgactagaaggacgactgcctggcgcgatacaaaaattgcgaggacgacgggcagacgttcttcagcctagatgac

SEQ ID NO: 90656 - DNA, 51 bp, Homo sapiens
aacagagtatctcatatcttgatcagaatctcacaaactatgatctctgca

SEQ ID NO: 90657 - DNA, 74 bp, Homo sapiens
gcatcccagctacgaaggatggaatcttcaatcaatcatatttcacaagggtccctgtgaaggtgaccaacgtc

SEQ ID NO: 90658 - DNA, 100 bp, Homo sapiens
cggcggcagggacagcaggagcagtggtgctgtcagcgcggccgtcggagacatgggagacccggggtcggagccatcagtggcctatgtacataccacg

SEQ ID NO: 90659 - DNA, 100 bp, Homo sapiens
tttccagtggcacctcttccatcatgagttcctgaggcagtccgatggggctactttattccagaacaatcacaaagctaaaccagccccagaaatattt

SEQ ID NO: 90660 - DNA, 100 bp, Homo sapiens
gaagcagcgatgcctggcggagcctgcgtgctggtgatcgcgctgatgttcctggcctggggggaagattactatgacatggaatccatggtccatgcag

SEQ ID NO: 90661 - DNA, 83 bp, Homo sapiens
ttcagtacttggcaagatttgatgctcttgtgctcagtgacatcattcaggcagcctgcttctgcaaagtggtacgatcgaag

SEQ ID NO: 90662 - DNA, 101 bp, Homo sapiens
tgggcattaagacagttgccatccacagtgatgttgatgctagttctgttgcactgctgtgatccatcctcatctcctaaagatgcatcctgacttatctc

SEQ ID NO: 90663 - DNA, 101 bp, Homo sapiens
agacgaatagctttccagttcttcttacccagggcttagaaagtaacgattttgaaatgctaaatgtcccggatgttacaggtcagagccctccagacccc

SEQ ID NO: 90664 - DNA, 82 bp, Homo sapiens
caaagagctggtggcctcaggtgaaaagcgagaaccactgtctctgatcaacgtgcggaagaggaacgtggaatctggggaa

SEQ ID NO: 90665 - DNA, 98 bp, Homo sapiens
gcgactgagggacgggacagagaagtcgcgaaagtgggccagaggttctgcgacaccacctcgggttctggcctataggaacaagacattttcagtaa

SEQ ID NO: 90666 - DNA, 96 bp, Homo sapiens
ccgcgcccatggcagagccagaccgcagcggaggaggagaaagagatggacctcccggactcggcctcgagggtcttctgcggccgcatcctgagc

SEQ ID NO: 90667 - DNA, 75 bp, Homo sapiens
tgtggaaattcccagaggactttggagaccagctttggggccatttggatcacacgatgttttttcaagatttta

SEQ ID NO: 90668 - DNA, 75 bp, Homo sapiens
ccgccccctcccggggctgaccgcgtcgtcaaagagccctatgagtttgtctctctggaatggctgcaaaagtgg

SEQ ID NO: 90669 - DNA, 74 bp, Homo sapiens
tcaccaagtacaccagctcgaactcccctttgaattggagatttactacattcagcatgttatgctctacgtgg

SEQ ID NO: 90670 - DNA, 98 bp, Homo sapiens
tatttttcaggcctctggtgccaaatacattgtcttaacttccaaacatcatgaaggggatgaaatcctagatgtaaatggaataccaataaagggct

SEQ ID NO: 90671 - DNA, 75 bp, Homo sapiens
ctcagacatgttctcaccacccttgaagatgctcatgaagcagcaggaccggctggaggagcgagagcaggacat

SEQ ID NO: 90672 - DNA, 83 bp, Homo sapiens
gcagcatctgcgatgtgaggaaaggcacctccaccaggaggtgtgattgcctatatcagttcttccagctcagcctcaagccc

SEQ ID NO: 90673 - DNA, 82 bp, Homo sapiens
tttagcagcactagtattgcccaagctgactatggccttgaacacttgaacattcagaagattctcggccttgccccttcac

SEQ ID NO: 90674 - DNA, 51 bp, Homo sapiens
gtctgtttgcaaagcacctgaactgtgcctccggagccagcgtggtggcca

SEQ ID NO: 90675 - DNA, 83 bp, Homo sapiens
tgaagtgtcattctacagtgtttcagatgacaatgctccctctccttatatggcaggaagttatgttcgtgatgatgcagtcc

SEQ ID NO: 90676 - DNA, 100 bp, Homo sapiens
ggatgctggaggacatctgggggccacaaatgctccttctcctggagacgcaactcaagagttgctggaattgtggccgtaaagcgagtgaaacctgcag

SEQ ID NO: 90677 - DNA, 75 bp, Homo sapiens
atacctcttgggactgggctcgatttgaggctttggtcttctctccagacccactgctgctctcaaaacaagtgt

SEQ ID NO: 90678 - DNA, 110 bp, Homo sapiens
cttatttagttctggggagcgcctcgtcgacatgagtgatgtggaggaaaacaacttcgagggcagaaattgttggtgaggatgatggagggaaactttttactcctgaa

SEQ ID NO: 90679 - DNA, 100 bp, Homo sapiens
gcactctggcgggcataccagcgggccctggccgctcacccgtggaaagtacaggtcctgacagctgatggtgtcggacggcatgacaggcagcaatcct

SEQ ID NO: 90680 - DNA, 76 bp, Homo sapiens
tgggaagtgaagtcagtgcctcagttgctggatattgtacctgtggatgcatcttatgaagtaaaagaactatatg

SEQ ID NO: 90681 - DNA, 75 bp, Homo sapiens
ttccgcagtccccccgttccctggaggtcctgtggaatgccagagactgctgctactttgaaacgtacgatagag

SEQ ID NO: 90682 - DNA, 75 bp, Homo sapiens
ttcctggccctctaccaaaccgtgggcttttgaacacttgcagcaattagaattaataaagcccatggaaagaac

SEQ ID NO: 90683 - DNA, 100 bp, Homo sapiens
ctgccgctcatcgtgtggctgctggtgaaaagcttctccgagagagcatgtctgttcgatcctggcttccctcctgcggaacctgagagggcagcagcgg

SEQ ID NO: 90684 - DNA, 100 bp, Homo sapiens
aatagtttattgagaatagaagacaatagtctactttaccagtacttagaaatcaagagttttcttactgtacctcagattgcttatgcccgtatagagg

SEQ ID NO: 90685 - DNA, 75 bp, Homo sapiens
tgccaggagctgctcaccttcattgatgctgaactcaaggccccaggtggagatgaagaagagaatgatgagcca

SEQ ID NO: 90686 - DNA, 96 bp, Homo sapiens
gtaagctggaccactgcaatattgtgaggctgagatactttttctactccagtggcgagaagatatgcaaacatgtgttggtaaaagacataaaaa

SEQ ID NO: 90687 - DNA, 119 bp, Homo sapiens
ggacggacaggtggtgctcatcaagcaggagaaagaccgagacgcttggaagagggagttcagatgcgtctttattaccactgggaagagcagcaggtggtatcagcagagaagtggac

SEQ ID NO: 90688 - DNA, 50 bp, Homo sapiens
ctcaggcctttagtgatgatggccccttcacagatgtagtcactacaaat

SEQ ID NO: 90689 - DNA, 98 bp, Homo sapiens
gtcaccgttacattttctccagatgagtggcgatactattatgactgcatccgtgttcactgtaagattttcttcatctcaactcacctcaccactac

SEQ ID NO: 90690 - DNA, 50 bp, Homo sapiens
gaattttggagaaaagcttttggggaaaaacctggtgatgactggaaaaa

SEQ ID NO: 90691 - DNA, 74 bp, Homo sapiens
aaaaaaacccttcactgtgaagagacatgagatgattgccaaatccccagcttcagctttagctgcagctgcct

SEQ ID NO: 90692 - DNA, 100 bp, Homo sapiens
cctatgtcatttcatccaccacattacttaggtgttaaaaaagatattgagaagctttatgaagctgtaccacagcttagtaatgtgtttaagattgagg

SEQ ID NO: 90693 - DNA, 75 bp, Homo sapiens
gcaggacctcctggaactggcaaggtggtgaagaaggtgaagtccatgcagatgttccacatgcccatcacttca

SEQ ID NO: 90694 - DNA, 82 bp, Homo sapiens
atcctgtggctgggaatgtgaccccacggccagaagaggacccgtggtggcattgggggacgtgccggatggtacggtggtg

SEQ ID NO: 90695 - DNA, 82 bp, Homo sapiens
cagctgcaccccaccttgatccagcggacttacgggcggctatgagaggttttcctccgagtacccagaattctgttctaaa

SEQ ID NO: 90696 - DNA, 90 bp, Homo sapiens
ctgcgttaatgtttgcaaatgcagaggaagaatttttctatgaggtgtcatttgcctatgctgtatattggattagaatatggtttgacc

SEQ ID NO: 90697 - DNA, 87 bp, Homo sapiens
ccggtacaggtgccctgcggacacgtttctccaaggagaagtacatcctggactcatcgccagagaaactccacaaggaattggagg

SEQ ID NO: 90698 - DNA, 100 bp, Homo sapiens
tggtgccgctagccaagctgtcctgcctggcttgccgggattgctgtccttgccattggactatggctccgattcgactctcagaccaagagcatcttcg

SEQ ID NO: 90699 - DNA, 97 bp, Homo sapiens
ggatccagcccgtgccctatcgcctggagctggaccaaaagctgaccacagtggccgagaagtcgcgcgtgctgcagctggaggaggagctcaccct

SEQ ID NO: 90700 - DNA, 144 bp, Homo sapiens
gcaccttccagctggaccagtggctgcgcgcgtccaccgcgggcatgatcctgcctaagatgcccgacttcaactactgattcttgctattccaaatcctcttccacgttgacagcccttcagatatttcaacactcctctcag

SEQ ID NO: 90701 - DNA, 75 bp, Homo sapiens
cgttgaccgcacactggatgaatggaagcgtgctgatccgcagtggccgggtgcccattgtgtccttggagtgtg

SEQ ID NO: 90702 - DNA, 98 bp, Homo sapiens
ctccgggccgggcggtttggccccttagcgcccgggcgtcggggcggtaaaaggccggcagaagggaggcacttgagtggcctggtttgctttcgacc

SEQ ID NO: 90703 - DNA, 82 bp, Homo sapiens
tggttgtgtggtcgcgtctcggaaaccggtagcgcttgcagcatggtctccaattgagaaacatggcactgtttttcctgca

SEQ ID NO: 90704 - DNA, 87 bp, Homo sapiens
acccagaattcaattaaagtggctcaggcccagacatgtccgtccttgtaagttaaaagcttccatgggagccttccttcctaatca

SEQ ID NO: 90705 - DNA, 83 bp, Homo sapiens
cccgggacctgggctgggaacccgcggtggagcgggacacgaacgtggaggatcccttttcccccagaaattactcaatgctg

SEQ ID NO: 90706 - DNA, 95 bp, Homo sapiens
ctgcaagatggagccaggaggagagcccacaggtgctaaagagagcagtaccctgatggagtcccttgcagtctgcgggccaggcatcgacatcc

SEQ ID NO: 90707 - DNA, 82 bp, Homo sapiens
accgacatctgcctgctcaaagggtggcccagttgaaatccttcccttcctctaccttggaagtgcctaccatgcatccaag

SEQ ID NO: 90708 - DNA, 83 bp, Homo sapiens
tcaccttcgctaagaacccagggcagaaaggtttaggagtcagaaataccatcagaggaggggtactgtgactttaatagtag

SEQ ID NO: 90709 - DNA, 88 bp, Homo sapiens
aattatgcaagccgtcactcttattctagaaggggaacataacattgaggtcaaagagcaggcaagatgtatccaatgactttgaaat

SEQ ID NO: 90710 - DNA, 100 bp, Homo sapiens
aaagtgtggaaaatggacatcgtaaacgatcttctcgacctgcttcagcctccagctctactaaagcggcagtacatacctgtgaaaatgaagagcaaag

SEQ ID NO: 90711 - DNA, 95 bp, Homo sapiens
agacccagaagggagcgaaggtttttgctgcgccaacgcagtgaccgaaggctccgctcacgcccggtaattcgccaaaatgacgaacacaaagg

SEQ ID NO: 90712 - DNA, 75 bp, Homo sapiens
tctgcccggagaggagcagaggccaggctgctgctctgggaggtcgtggcaattctgcagaagttctattccaac

SEQ ID NO: 90713 - DNA, 90 bp, Homo sapiens
tcctacaagggcagtgacagcagtcccacgccaaggatgatgaacgacagttgtcaaaatcttcccaagatcaatcagcagaggccccgg

SEQ ID NO: 90714 - DNA, 75 bp, Homo sapiens
tggagcagaagttagcgcttctctctcgtgatgctattgctgagattagagccatttgtattgaagaaattggag

SEQ ID NO: 90715 - DNA, 88 bp, Homo sapiens
cagaagctgctgaaattcctgaataagcactacaatctggagaccacagtcccacagttggaagctgaaggtgttcctgaagtatctg

SEQ ID NO: 90716 - DNA, 83 bp, Homo sapiens
caagttgcaatgaaccccaccaacacagtttttgctacctggaccagccctgccttgagaccgtcaaccgcatcaagttgtac

SEQ ID NO: 90717 - DNA, 75 bp, Homo sapiens
ttgacgccttagataacagccatcctattgaaaatgtcaaaactggaccaatggggccaggctgaagtattgaac

SEQ ID NO: 90718 - DNA, 82 bp, Homo sapiens
cggtgagcgcccatatgggggttctggagagcggggtgtgggtgtggacgaatgtggaacctcgctctgtggctgtgttccc

SEQ ID NO: 90719 - DNA, 75 bp, Homo sapiens
tcgcctcctcgcagcagcgccatgcttccttcaaaatgtctactgttcacgaaatcctgtgcaagctcagcttgg

SEQ ID NO: 90720 - DNA, 74 bp, Homo sapiens
gatgaaatccacagtccagcccacccaggtgcagtagacattgttgcaatcatgatcggcaatctgaaaggcac

SEQ ID NO: 90721 - DNA, 74 bp, Homo sapiens
gttctcccggtgtggccacgagtcgggatcttagtaagagccctaagaccatgaaaaagctgctgcccaagcgc

SEQ ID NO: 90722 - DNA, 96 bp, Homo sapiens
aaaggctggcagcctccccgggtgcctccgcgaaaatgggaagcttcccttcatggccatgcttcggaacctgtgcaacctgctgcgggttggaat

SEQ ID NO: 90723 - DNA, 82 bp, Homo sapiens
ctccgcctgggacccctccgccccgacccgggccccgcggccctcgatgagccactcatctctgcccagctgctgccctccc

SEQ ID NO: 90724 - DNA, 98 bp, Homo sapiens
gaaaataatccagagatttccacagaaggactgggatgatacaccttttccacagggaattgagttgattacctctctagtgacccttcagctgttaa

SEQ ID NO: 90725 - DNA, 75 bp, Homo sapiens
gagctggcagcggaggtgctcatccagcaagaagagctaccagatggtgttcttgaatctgatgatgatgaagat

SEQ ID NO: 90726 - DNA, 82 bp, Homo sapiens
tgctggtaggaggagttggcggaagcacttggaactcctttataagtgtcagctgtgaggcaccatcatgactccaagcgga

SEQ ID NO: 90727 - DNA, 100 bp, Homo sapiens
ttcaaggcaagaccgaattcagaaggatatcgacgtcgtgatccagaagtccagagctgaggactgcctgtttgcagtcccttaagctcctaggattttt

SEQ ID NO: 90728 - DNA, 97 bp, Homo sapiens
tcttgtcgacatttataccgtctgagggtagcagctcgaaagtagaagaagtgggagatgagtatgatgtatgtgccatttgtttggatgagtatga

SEQ ID NO: 90729 - DNA, 100 bp, Homo sapiens
agaaactggaatctcccaacagagaaattattattttacacaatccaaagacatatctgaagagatggattaagaatgctttggattaaggattgtggag

SEQ ID NO: 90730 - DNA, 97 bp, Homo sapiens
attacccgttaagtcccccaaagatgagatttacctgtgagatgtttcatcccaacattgatgcgatgaagagagttgaagaaatcaaacagaagcg

SEQ ID NO: 90731 - DNA, 78 bp, Homo sapiens
cggttaacagcctatgggtgaaatttggctttcattcatgaatgagctatgctaagaaggaatctgatcttaatggcg

SEQ ID NO: 90732 - DNA, 83 bp, Homo sapiens
ctgaaagtcacgattaggactgacaataaggtcctgggaactccaacaagggagcaaatcagagaaatgaacccaaactacac

SEQ ID NO: 90733 - DNA, 99 bp, Homo sapiens
taataaggatgatgaattgtactctacaggtccttttggtgtgaaccatggggtggaacttcactcagatgtgatagagtatgcaaagcagaaactgga

SEQ ID NO: 90734 - DNA, 75 bp, Homo sapiens
agaggttccagttgaccagcattcatagggtgtctgcttttggggcagagttttcatcggaggcatgcagagagt

SEQ ID NO: 90735 - DNA, 49 bp, Homo sapiens
gatgaccaggaatgggaaagccccaggccttgaaccggggcattgctgc

SEQ ID NO: 90736 - DNA, 82 bp, Homo sapiens
tgccatggttctcactaaaatgaaagaaaccgctgaggcttatttgggaaagaaggtccagattcggccttggaatctcagt

SEQ ID NO: 90737 - DNA, 98 bp, Homo sapiens
caaaagaagatagaagagaatgaacggttgcatatacaaaaaccagcccaaaagacttcctcttttgaaagagaaggatggtggagaatagcattaac

SEQ ID NO: 90738 - DNA, 101 bp, Homo sapiens
gccgggaggaccgagcctaagagggcagccgcctgaaggaacgcgacggcggcgcccgcaggtttgcagtaagcattggctactggcatgacccttacata

SEQ ID NO: 90739 - DNA, 74 bp, Homo sapiens
cagtgggcctggagcagctgcggcggctcggggtgctctactggaagactgtgccctgtccacggtgcctcctg

SEQ ID NO: 90740 - DNA, 100 bp, Homo sapiens
cacgtgtcaaccctgcttccctacatgcccaacaacagacaacaggcaacagcattattgagaaaagcccttacagaagagtgtggccgtaggtcagcta

SEQ ID NO: 90741 - DNA, 97 bp, Homo sapiens
catggccgtcatgccgactctcatacaggcgggcgccagtgcatcttctagatatgcacccaatgtccagggagcgtgcaaaatttgtcaaaagtgg

SEQ ID NO: 90742 - DNA, 99 bp, Homo sapiens
atcagtttacccaatctgcactgcgagtataagaccatcatcatgtggaaactgaccagggatgagaccaactatggaattccacagcgtgctctgcgg

SEQ ID NO: 90743 - DNA, 75 bp, Homo sapiens
gtgcaagtacctgccagagaacgacctgaagcactgggcaaaaaccattccagaaaagatggactcagtgatgaa

SEQ ID NO: 90744 - DNA, 75 bp, Homo sapiens
ccggagtgtatgtctttggagaacttctggagctggccaacgtgcaggagtctcaggaggaggtctgcgatttgc

SEQ ID NO: 90745 - DNA, 100 bp, Homo sapiens
caactaccgctgctggaccacaaaccgctgccagaaaaagtcatcttagtgggatttggggaagcaacagggctgtgtggggtaacctgccacctttaag

SEQ ID NO: 90746 - DNA, 50 bp, Homo sapiens
aggtttgtcggtcgaagtggaagagatatttggagttcttacaacatggc

SEQ ID NO: 90747 - DNA, 75 bp, Homo sapiens
tgtctctctctcttttctttcagtctgcaactgtgtctgatggcgctgtttgcagacaaggtcccaaagacagca

SEQ ID NO: 90748 - DNA, 50 bp, Homo sapiens
cgaactcggcaaatacaaacaccgtgggttgtctcctcacagactatgag

SEQ ID NO: 90749 - DNA, 100 bp, Homo sapiens
ctggagcgaagtagaggatgccgaggagaaaacagcaggcacccaagcgggcggcaggtcagtcaccacgaacaggggcactcggcatgctgccccagca

SEQ ID NO: 90750 - DNA, 83 bp, Homo sapiens
atctgaagtacaaaatattttccagctattcagcataaatatacaaactggaaagcttttctagtgaaacgacttactggtgc

SEQ ID NO: 90751 - DNA, 75 bp, Homo sapiens
acaacttataaaatgttcatggccgcagcaggagtagagggatgaaactgattccaagacagcctccccgtggaa

SEQ ID NO: 90752 - DNA, 75 bp, Homo sapiens
ccaagtcaaacgcagaaggactgcctcactgagcaaccaagatgatgagccctcctcttcagctaggaaaatgac

SEQ ID NO: 90753 - DNA, 100 bp, Homo sapiens
ggggagttggaattcaagaatgatgaaactgtgaaatgcttccagactgcacacttttacttagaggacagtacatcccctagagttatatccacacctc

SEQ ID NO: 90754 - DNA, 90 bp, Homo sapiens
gataagactcttcgcatctgggacctgaataaacacgggggtccctcccttctctctgagcccatgaagacttgcttcactgggggcaat

SEQ ID NO: 90755 - DNA, 98 bp, Homo sapiens
caggatcctgcacaggcagacgcgggccagcctcagcaccgacagccgacgcgcagatagcagagccatccttgggctcgccatggccaaacagctgc

SEQ ID NO: 90756 - DNA, 97 bp, Homo sapiens
acaaatcagcatcttgctggacgacccctcacagagctcctagatccttgaagtgtgaacttcagcagctgagagagcttgtggacaaatgtatagg

SEQ ID NO: 90757 - DNA, 117 bp, Homo sapiens
acaggcaaactgtcagaaaagagtagcctgggctgtctggaaatctgagtctataccaaaactcacctttcctggtggtttactaattggttgtagtcctggttttatgaatgttcc

SEQ ID NO: 90758 - DNA, 50 bp, Homo sapiens
ataaaatagaacttccaactactgggttttcagagaaagatgctgatgag

SEQ ID NO: 90759 - DNA, 75 bp, Homo sapiens
gcaatgggaccttctcttcggatgaggagaccctggaagacaatctaaggaggctgggatgcagatggaaaaggc

SEQ ID NO: 90760 - DNA, 100 bp, Homo sapiens
gatgatgccaaagttttattaggtctggcagacccgtctgcgttaacacaagcggttgctgcctaccaaggctgtcattttataggcatgcctgaatgtg

SEQ ID NO: 90761 - DNA, 96 bp, Homo sapiens
gctgaacaggaggagcggcagggcatgaaggtccaggcgctggccaggaatggtcctcgtccgaagtgagaatgggcagttgttaatgattcctca

SEQ ID NO: 90762 - DNA, 87 bp, Homo sapiens
gctgtgctggactcaagcctttctgagttgtggagcccctgttgttgctgaaggcagcccgcattctgcagacctgccagcgctcgc

SEQ ID NO: 90763 - DNA, 96 bp, Homo sapiens
agagccacacacaccatcatggtcctgccatgtacatcttcatgtgatcagccaggattttgattctccttgccttaaaaacaaaaaacattggaa

SEQ ID NO: 90764 - DNA, 75 bp, Homo sapiens
aaatggacaaattgccccagaaaacgggacacagacccccagcccgcccagctggagtgcaatggcgcgatctcg

SEQ ID NO: 90765 - DNA, 99 bp, Homo sapiens
atcgaaggctaccgggcccagcacagccagcaccgcacgccctgcaagggagaactgataaatttcaaacggaagagagtggcagcatttagaaagaat

SEQ ID NO: 90766 - DNA, 99 bp, Homo sapiens
ctggtgttccttgactggagacaacctgcagcctcctggcaccaaagttgtcgagatgtccacagaaggaggatttggtggtactagcagcagtgatgc

SEQ ID NO: 90767 - DNA, 51 bp, Homo sapiens
cttctctataggattcggaaggacgttggcaatgcatgaaccattgcaaac

SEQ ID NO: 90768 - DNA, 100 bp, Homo sapiens
cagaagtggagaccagcagaactccaccaggccaagtcatcaaggcatgggacattggggtggctaccatgaagaaaggagagatatgccatttactgtg

SEQ ID NO: 90769 - DNA, 90 bp, Homo sapiens
gcatcccggctggagcagagccagactccagccaggaatatacggactccactggaatagacctacatgaatttcttgtaaatacactga

SEQ ID NO: 90770 - DNA, 74 bp, Homo sapiens
cgtcccccgcgggtctgctctgtgtgccatggacgggccgacgcctccccccagggtcagctgcgggctcccag

SEQ ID NO: 90771 - DNA, 107 bp, Homo sapiens
tcctctcggtgttcccgctggcggcgggcatcttcttcgtgaggctgctcttcgagcgtattggtaaaggttttcaaggtgtcatgaaaagatggggatttaaaggc

SEQ ID NO: 90772 - DNA, 100 bp, Homo sapiens
gaggcctacagaacctagcctatcagctggggctggatgagtaatggagatgtatgcatttcgattcttcatccgcctgtagatgacccacagagtggag

SEQ ID NO: 90773 - DNA, 75 bp, Homo sapiens
atttgaacaactttccgaatctgcaaaagaagccaacttctctttgcctgaaaaatgcgactatatggatgaggt

SEQ ID NO: 90774 - DNA, 95 bp, Homo sapiens
ggatggttgtgagggaagagacaggaagatggtgcccagaaatgcactcggtgatggaaagagagccactattctgaagaacacttggccaaagg

SEQ ID NO: 90775 - DNA, 74 bp, Homo sapiens
ccttaatgagcatgttgacagcatcgatgctagacagacaggagatgcacttatttacatggaaccagagaaac

SEQ ID NO: 90776 - DNA, 82 bp, Homo sapiens
gagtcgtagggaggacgccgggacacctggaagccgagaaatggaagagagaatggattctgcaagaccatgtctacacaga

SEQ ID NO: 90777 - DNA, 100 bp, Homo sapiens
caaactgcagtcaccaagtaaaacagcttaccagaactgggtgaagaagaacggggctgagcactcgctccccaccctgggcctcaccaataaccagctc

SEQ ID NO: 90778 - DNA, 101 bp, Homo sapiens
cagctagctgcttatggctataaaattacagtccaatatcagatggaaatgatgcggagccttcgccatgtaaacattgatcatcttcacgtgggctggta

SEQ ID NO: 90779 - DNA, 51 bp, Homo sapiens
ctttcacaggcccgggagcggcgcggattggctctaccagtgcacctggac

SEQ ID NO: 90780 - DNA, 100 bp, Homo sapiens
aggagaagatctttctgaagagctcaaaaaggaaaatcctttcttgaggcaagagggtgatattcatgaggatttttgcagcgtttgcagaaaaagtggc

SEQ ID NO: 90781 - DNA, 100 bp, Homo sapiens
cgcggagccggccatgggcaagtcagactctgatgccagtatggactggagatgatgggagccagttggatagccccatggaaatccccaaagagctctg

SEQ ID NO: 90782 - DNA, 75 bp, Homo sapiens
agctagggcctgggccgcggttcggccgcgccggccgagttttccagaaaaagaccttctgcactgtccatctaa

SEQ ID NO: 90783 - DNA, 100 bp, Homo sapiens
tatggtgtcttcgaacttgtgcacccgttgcagtccttcagggccattcagcttctattacttccatacagaaatgacagactttttcattgaatgatga

SEQ ID NO: 90784 - DNA, 80 bp, Homo sapiens
tcgggatctcggtgctgcagacggcgagacctcctgcacagctcaccatggatgatgatatcgccgcgctcgtcgtcgac

SEQ ID NO: 90785 - DNA, 100 bp, Homo sapiens
cagcgaacatgtcgcggcctgtcaggcaattaagttggaatatgcaaggttggttaagttggcccaagaagacaccccaccagaaaccgattatcgttta

SEQ ID NO: 90786 - DNA, 100 bp, Homo sapiens
tagatacatggagcccatcagaatggcagatggcttatgaaccacaggaattttctgaaccaacaattattctctttgaaagagaagacttcaaaggaaa

SEQ ID NO: 90787 - DNA, 100 bp, Homo sapiens
ccctgaacgggatttatacacacatcactaaaaattatccctactacaggactgcggacaagggctggcaggtcctgaacgaggctgtgggggccctgat

SEQ ID NO: 90788 - DNA, 75 bp, Homo sapiens
ttttgggaaaacacttcaaatgctgaggattacattgcagtgaaggagaagtatgccaagtacctgcctcacagt

SEQ ID NO: 90789 - DNA, 51 bp, Homo sapiens
aattaaagagtaaagttgtgctcaacggtatctgatcaatgtcacttttga

SEQ ID NO: 90790 - DNA, 75 bp, Homo sapiens
agtgtcccacgagttcccactgcaactttcatcctttgaaacgtgtgctgaaaaagaagaatcagcaaatactac

SEQ ID NO: 90791 - DNA, 90 bp, Homo sapiens
ggacaccagaggagtctctctcatcctcccggattgctctgaggccaggaggaactgagcatggaatgtggcctcaacaatcgcatccgg

SEQ ID NO: 90792 - DNA, 74 bp, Homo sapiens
gaaaacatctccactctgaagaagacactggaggtgcctttcctgaagactatcttctggtctcgaaatggaca

SEQ ID NO: 90793 - DNA, 75 bp, Homo sapiens
cttcaaccccaggggaccagaggaactcagccctgattgcggtggtcaccaacagagacacacaggagaccttgc

SEQ ID NO: 90794 - DNA, 90 bp, Homo sapiens
caacagagtctaggctgggttcattacatgattcatgagccagtttaaggaagaaatctctaaacgttttaaatcacatactgaccaact

SEQ ID NO: 90795 - DNA, 98 bp, Homo sapiens
ttccctgttgctggagatcctgggcctcctgtgcaaaagcatgatatccaggtgaaagaactggagaagcgtgcctcaggccaggcttttgagctgat

SEQ ID NO: 90796 - DNA, 100 bp, Homo sapiens
ccaaatacaatgacactgaccggtgctgggggcccctgcgccgagtggacgcctaccgcatctacttgttggtcagcatcggctcctcttacaactatgg

SEQ ID NO: 90797 - DNA, 100 bp, Homo sapiens
cctcgtggggaccttccccttcaactcttttctctcgggcttcatctcttgtgtggggagtttcatcctagcggtcgtagtcgagatcgggatcggtata

SEQ ID NO: 90798 - DNA, 75 bp, Homo sapiens
tttcatcagactaaaaagttacaggaaggaagaatcctgctcaaaaatgaggtgaattaatacttgggcgctcag

SEQ ID NO: 90799 - DNA, 97 bp, Homo sapiens
gggttgatacagcagagacgtcatacttggaaatggctgcaggttcagatgaaactggaacgccaagctgaagaagaacgaatacggaagcacaaag

SEQ ID NO: 90800 - DNA, 100 bp, Homo sapiens
cttgtcatgctgttgaatatcgggttggccattctttttgttcactttctaacttgattggaattaggaaaggtgatgaacagcctccttctaaatcatt

SEQ ID NO: 90801 - DNA, 50 bp, Homo sapiens
aggagctggcgtctctggagaaagagtgtgaacatggctacgcctcttca

SEQ ID NO: 90802 - DNA, 105 bp, Homo sapiens
gttgtgtcttgttgcgggcaccgcagtcgccgtgaagatggcgtctaccagccggtgaaatgacaatggatgctctgttggctcgattgaaacttctgaatccag

SEQ ID NO: 90803 - DNA, 50 bp, Homo sapiens
ctttgaccacgttatcaaggagcctgctcaacctgctgatgaacctgcag

SEQ ID NO: 90804 - DNA, 75 bp, Homo sapiens
ccggtgttcccgcgctttatcaagattatcgaggtggatggggaaggatttaagaacactttggaaacttcatcg

SEQ ID NO: 90805 - DNA, 100 bp, Homo sapiens
aacagcagtatgatgaactggaggctgagtacgacagcctcaaacaggagctggagcagctcaaagagcctagtgtgttaattgtaacctacaaggagcc

SEQ ID NO: 90806 - DNA, 108 bp, Homo sapiens
ccatgagcgtcccggccttcatcgacatcagtgaagaagatcagccacagcacagggtacgagagcgataaccacacaacgcccatcctctgcggagcccaatacaga

SEQ ID NO: 90807 - DNA, 155 bp, Homo sapiens
cgacctgcacgaatacgcctcgataaacagggccgtgccgcagatgcccaccggaatggagaaggaagaggagtcgtgaagctgtggtctaccaatctagacaactcagtggcaagcattgaggcaaaggctaatgtgtgctgtgttaaattcag

SEQ ID NO: 90808 - DNA, 78 bp, Homo sapiens
gcgagcccgctactgcagggacctatgagagttaagaaagacgtggacaagggcacacggcactcagacatgttcctg

SEQ ID NO: 90809 - DNA, 100 bp, Homo sapiens
tgtggctcattggaaggaaacccaggatgagctgtgtggcccagacccttccctgtcggacgagctgatctccatcctcaacgagctcactcagctgagc

SEQ ID NO: 90810 - DNA, 101 bp, Homo sapiens
acccgccgccgccgttggctggaggattcaagccaaaactcgagaatttagggaacgacaagctcgagagcgtgactatgctgaaattcaagattttcatc

SEQ ID NO: 90811 - DNA, 87 bp, Homo sapiens
acaatctaagaaggatttcagcaaatttggagcagggagacgcaggtcagaatggaaatgggctgcagaccgggcagctattgtcag

SEQ ID NO: 90812 - DNA, 75 bp, Homo sapiens
agccgatccccatttttattgaaagatgtattgagtacattgaagccacagatctgtctcgtaactgtgtaatca

SEQ ID NO: 90813 - DNA, 98 bp, Homo sapiens
tgtgggtctattggggaaggacatctgtgcctgtgcagccactgggacagcccgcctggccagccgcgtctgtgccgccagcctctgactcgagcatt

SEQ ID NO: 90814 - DNA, 98 bp, Homo sapiens
tgaccacttgccaacatttactcgtacttcttgagacggtttaagcggaagcatcttactgccattgactgccagcatttggctcggagtcacttggc

SEQ ID NO: 90815 - DNA, 98 bp, Homo sapiens
catctcccgagtctaccgagatgacatcggagctcgtccgcatggtgctgaatggctgaggaccttcccagtctccccagagtccgtgcctttccctg

SEQ ID NO: 90816 - DNA, 75 bp, Homo sapiens
gcatggatatctctactcgctccaaagggacagagcagaatgggctgatatagatccggtgccgcagaatgatgg

SEQ ID NO: 90817 - DNA, 98 bp, Homo sapiens
aagaccttcctgcgagagctgccccagccgcttctgaccttccaggcctacgagcagattctcgggatcacctgtgtagagcagaccaaacagtgcaa

SEQ ID NO: 90818 - DNA, 89 bp, Homo sapiens
gcttaataaaataaccgtccccgccagtcagaagttgaggtacaagttggggtcataattatcgagtctcttgatattatcacaattac

SEQ ID NO: 90819 - DNA, 90 bp, Homo sapiens
tgcaagatttggttatagacttccagctgaaggtttaaagcccctggatgaaacactgaagaaagcccttacaggtcaccttgaggaggt

SEQ ID NO: 90820 - DNA, 100 bp, Homo sapiens
cttactaaccacgaccatcaaatccgtgtcggagtccttacaggggctgcaaggcccagagatctggacacaagccaagaagtcaagaactgttgaagcc

SEQ ID NO: 90821 - DNA, 100 bp, Homo sapiens
tttggttggaagacctattatcagatcaaccaccaaagtgggaaacattgaaatcaagtgtgtgattaataaagtttcacaaacagaagaaatagacaca

SEQ ID NO: 90822 - DNA, 75 bp, Homo sapiens
cagagctcagggaatacttcaagaagttcggagtgggactttgaacatgtcggggatcgccctcagcagactcgc

SEQ ID NO: 90823 - DNA, 83 bp, Homo sapiens
cggagggggagactgtgccgtggagggcctcgccatgtcctgctgcccgatctatgggagtcgtcagattatactggagaaag

SEQ ID NO: 90824 - DNA, 75 bp, Homo sapiens
gcgtatggagtggaaacgcttgtagggtttcaccaggagtctggtgaaggcagaaattcatcagactgtagagat

SEQ ID NO: 90825 - DNA, 112 bp, Homo sapiens
gccgacccctggcacctggcgcccagcgcgcccgtggccgctgccgcctccgccccagaggacgattatttatcatttctactaaagcaggatctctaggaattaatctggt

SEQ ID NO: 90826 - DNA, 82 bp, Homo sapiens
tttggcacgtcctgctccgtggtgctctatgaccccctggaaagagagcttgaggcaaacaaaaaagaaaaaatgaaagaag

SEQ ID NO: 90827 - DNA, 100 bp, Homo sapiens
ggcttatcgaacagagccgggagttcaagaagaacactccagagatttatgtgatcagtttggctgaaccccgtctgcccctgcagctggatgatgctgt

SEQ ID NO: 90828 - DNA, 80 bp, Homo sapiens
cagtggcggcggcgccatggcagggcttgcagatgccatggacaatattaccaggcagaaccaattctacgatacccaag

SEQ ID NO: 90829 - DNA, 98 bp, Homo sapiens
ctcgcctacttcctggtgtcgatcgccggcctcctctacgcgctgataaagccaccaatccttccaaccgccaggaggactgggaatacataattggc

SEQ ID NO: 90830 - DNA, 101 bp, Homo sapiens
cactcctcccggaggcgacatggggcacccggtgtaccgcggcgagaagccccagctgcactacgcgatttgctgaccatgaaagaatatcactgtttgct

SEQ ID NO: 90831 - DNA, 75 bp, Homo sapiens
aatccaaatggatgaatgtagaccatcccattcatctaggagggatcatagacggtatttctatgtaaacgaaca

SEQ ID NO: 90832 - DNA, 100 bp, Homo sapiens
cggagcggcggatctggacacccagcggtctgacatcgcgacgctgctcaaaacctcgctccggaaaggggacacctgaacccctgaacagtgcccaagt

SEQ ID NO: 90833 - DNA, 75 bp, Homo sapiens
gatccagagcgccgcgcacttcgtcatgttcttcgcgccctggcttgttagcagtggcacaagatcttacagagg

SEQ ID NO: 90834 - DNA, 100 bp, Homo sapiens
cattaaatgcaatagcccttcagtactgttgtacggtgtccagcacatcttcactggaagccagcttcctcacccccgcagttggctttgctgatccccc

SEQ ID NO: 90835 - DNA, 82 bp, Homo sapiens
gaagacgggctggatgaccccaggctggaaaagctgtggcacaaggaacaggcctttgagagcagccagaagtacaaagagg

SEQ ID NO: 90836 - DNA, 98 bp, Homo sapiens
aatgtttcatcattactaacaggatattcctcatgacattgctgtctggaccttatggattttctgaacccaaacggtagtgactgtactctagtcct

SEQ ID NO: 90837 - DNA, 97 bp, Homo sapiens
tctgtgccgacaagatggcggacggggagctgaacgtggacagcctcatcacccggctgctggagggctagtgtgagaaacaccaacagcaggccca

SEQ ID NO: 90838 - DNA, 83 bp, Homo sapiens
cagagagggaagagattcagccagcacactcctcgcgagcaagcagcctcccgcgacgatgcccctcaacgttagcttcacca

SEQ ID NO: 90839 - DNA, 74 bp, Homo sapiens
ctcttttcctgtcaaattaccaggtggtccattatggctgacatgcaaaatctggtagaaagattggagagggc

SEQ ID NO: 90840 - DNA, 88 bp, Homo sapiens
ccacagctaagacgccgggactccctggaaacctagaaatggtggctgtgaaaaacaatatcgatgtcttctacttcagctgcctcat

SEQ ID NO: 90841 - DNA, 51 bp, Homo sapiens
gggcgcttcggagagtggccagtgggcctttggagtgacgctgtgggaact

SEQ ID NO: 90842 - DNA, 99 bp, Homo sapiens
gctgatcatctccatcttcctggtgttctaagaacggaagcatctgggctggatggaatttagcatcaagcagagtcccctttctgttcagagtgttgt

SEQ ID NO: 90843 - DNA, 100 bp, Homo sapiens
cggatggtggtgatggaagcaggtggaattatgccctgttggttccaatgctgggattggctgcttttcctggacccacaaaccgtggagaccaagaact

SEQ ID NO: 90844 - DNA, 98 bp, Homo sapiens
tctgcttttgccacagcagttcctgcagcttccttgaggtggtttgtgatgaaaatggttccaagggctatggatttgtacactttgagacgcaggaa

SEQ ID NO: 90845 - DNA, 50 bp, Homo sapiens
cgtcaatcagagcgtcctgtgcggttttggctacgggcctccacctccac

SEQ ID NO: 90846 - DNA, 75 bp, Homo sapiens
ggacagcatcatcttcccaaagattgaaagtctagaggaagaacgacttgatctgaaaaaaaaaattcgtcaaat

SEQ ID NO: 90847 - DNA, 98 bp, Homo sapiens
aaatacatcatgcttaaccctagttcacgaatcaagtttgtgaatagcacaatggaagaagctggactttgtgggttaagagagaaagcagatatgtt

SEQ ID NO: 90848 - DNA, 83 bp, Homo sapiens
ctctttctggcctggaggctatccagcgtcacccgccatgtcgaccttgctggacattaagagcagcgtgctcaggcaggtgc

SEQ ID NO: 90849 - DNA, 88 bp, Homo sapiens
agcagcacgggatcccagcctcaggcctgcacggacggtgttggttgggtaagactttgaccccgacgcaggcttcagtgattgccgc

SEQ ID NO: 90850 - DNA, 100 bp, Homo sapiens
gaagattgctcctggagcagttgtatgtgtagaaagtgaaatcagaggagatgtaactatcgcctcgtcacgtgttcaatatgctaaagaagtatgtccg

SEQ ID NO: 90851 - DNA, 100 bp, Homo sapiens
ttttactaaaaatggacgcctggcaaccaagtactactgagcgagtgtgcttgatccagggaacggttgaagcactgaatgcagttcatggattcattgc

SEQ ID NO: 90852 - DNA, 90 bp, Homo sapiens
ttcctcgtcatccccctgcaccaggtagtgggcagcagtcagtgacaggtgtaacctctgtggatgacagcaacagttactggaggatac

SEQ ID NO: 90853 - DNA, 75 bp, Homo sapiens
tgagtcaccagttaactatggtagcccacccagcattggtttcacaagaagtactgtggctgtatacagtacctg

SEQ ID NO: 90854 - DNA, 75 bp, Homo sapiens
tgccctgaacatcatgaattcccaagaaggaggtttattcttcagtccaaggaagcaattcacagtcagctgtta

SEQ ID NO: 90855 - DNA, 93 bp, Homo sapiens
ggtgtaccaggcgaagctggccgagcaggctgagcgatacgacgcttccccgggcgctgcctggacaggcctgcctgcgtgctgggacatgtc

SEQ ID NO: 90856 - DNA, 75 bp, Homo sapiens
tccggacacagcaagcagacgcagtacgtgctggatgtgcagttttgttgcctcacgaattccagcagcagaaaa

SEQ ID NO: 90857 - DNA, 75 bp, Homo sapiens
caggcatcatccgctatgcaattgggtttaagtgctgtggggctgctaactacacagattgggagaaaatccctt

SEQ ID NO: 90858 - DNA, 74 bp, Homo sapiens
cctgggcaggtgtcttcctcgagaggcaggcaggggatcccggacaaatacatgctacaggatttaactatcag

SEQ ID NO: 90859 - DNA, 100 bp, Homo sapiens
tatattatgccagttttttggaagtcttagttcgagatgtgtgtatttcatctgaactgtcccaagcaataaacagtggtacattgttatcaaaaccgtc

SEQ ID NO: 90860 - DNA, 75 bp, Homo sapiens
ggagctctgatcgccgggaacccttgccgctgctgtcctgcgaccccaagcagaactctttcatcaatctaccaa

SEQ ID NO: 90861 - DNA, 51 bp, Homo sapiens
gcccggccgcgaccctgtctgggaggctcataggtggaagggacttgcctt

SEQ ID NO: 90862 - DNA, 99 bp, Homo sapiens
gttcccagagcattgtgagctccgtattctctgaagcctggaaacgaggcactcagttggaagagtccagcaagatacttgccagaactaatacagctg

SEQ ID NO: 90863 - DNA, 74 bp, Homo sapiens
cagaaaagaggcaaagcaagcgagaagtcgcgggcccagcccacagcaggcttcagaacttgatgatgatgttc

SEQ ID NO: 90864 - DNA, 82 bp, Homo sapiens
agacaccaagtgagaggccaaccagctgggcctgttccgatgcgaagggtcagtgagctgcctggaaccttggctgggcgct

SEQ ID NO: 90865 - DNA, 101 bp, Homo sapiens
ggaagatgctcagaacagagcagaaatcaaattgaagagagcagttgaagaagtgaagaaattattggtacctgcaaacctcagagtgacagagccaaaag

SEQ ID NO: 90866 - DNA, 90 bp, Homo sapiens
atcattctcaccttgtatgctttacacccttcatgtggcctttataaatatgcgtttgagacagagttatatgcagaagttgaaaatgcc

SEQ ID NO: 90867 - DNA, 98 bp, Homo sapiens
agaagatgaacccacagatttggtgttttattccaaacgtctatgctgctttgttcactgcagctcttgttcctttgacgtgcctcgtggtggtgttc

SEQ ID NO: 90868 - DNA, 100 bp, Homo sapiens
aggagaagcgcttcaaggacccgggactagtggaccagctggtgaaggcagacagcgagtggcgacgatataacgaaggaggcccaacttcattcaataa

SEQ ID NO: 90869 - DNA, 90 bp, Homo sapiens
tctgatgatgccactacttgtcacattgtggtcctgaggcacacaggaaagtctttgggttcggaggattccagaaacatgaaggagaag

SEQ ID NO: 90870 - DNA, 83 bp, Homo sapiens
gcacgccgcggccgaaaccgggtgtcagctgtgatgcatgtttaaaaggaaattttcgaggtcgcagatataagtgtttaatt

SEQ ID NO: 90871 - DNA, 51 bp, Homo sapiens
gctcaggaggctgttaaactggatattggtgctggaaaaggcaaatactat

SEQ ID NO: 90872 - DNA, 90 bp, Homo sapiens
aaaccacagaaccttctgatcagtgacacgggggagttaaagctggcagatttcggtgaatctggattgggaaagtcgacattaatcaac

SEQ ID NO: 90873 - DNA, 75 bp, Homo sapiens
atcgaaatcgaatcttcggagttctctaattgaacaactaacaacagaaaaatacgagtgcatggtgtgctgtga

SEQ ID NO: 90874 - DNA, 75 bp, Homo sapiens
cctgcccctacatttggagcctggacacgcagtacagcaagaacatagttctcctgtcagcagaagaaaaaaaag

SEQ ID NO: 90875 - DNA, 81 bp, Homo sapiens
cactgctgagggggcgcgaggggaacggaggccagagctgcggctgaaggggatgctaagggagataaagcaaaggtgaag

SEQ ID NO: 90876 - DNA, 96 bp, Homo sapiens
caggacagcgcggggagtggaggcagaggcctgagattgggtttgtgctgttcccaccttttggaacacccgaatgggaccagaaggatgatgcca

SEQ ID NO: 90877 - DNA, 97 bp, Homo sapiens
gccactgttctctgggacaatgcttttgcagagcctgtcattgctagaatcgtggatggaagcagattcactgagttcaaagccttttatggagaca

SEQ ID NO: 90878 - DNA, 75 bp, Homo sapiens
gacaagttcatccccattttccaaggggacgacagcgtcgttattgggttcctctgtgacgagggtgcaggtatc

SEQ ID NO: 90879 - DNA, 75 bp, Homo sapiens
ctcttcccaaacgcatctcagcacatgcacgcgctcatcaagaagctgaatcagctgcgcgcaagcgagcctggc

SEQ ID NO: 90880 - DNA, 100 bp, Homo sapiens
tgggttcgagcggcagcacagcctacccagttctgagcatcttggggcagatggaggcctctaccaggaaatggagcagtcaatgaatatgctgaattcc

SEQ ID NO: 90881 - DNA, 98 bp, Homo sapiens
tccatctcaaataatgaagaaggtgtaaagcttgttcgaatgtctgcaagccagttagaagccctctgtcctcaggatcagttcttaagagcagcccc

SEQ ID NO: 90882 - DNA, 98 bp, Homo sapiens
aggtggtggtcaacgggcgggtgctggagctgttccgggccgcgcagctgccgaacgacgtggtcctacagcttggtgtaaaaattgccaaagcagtt

SEQ ID NO: 90883 - DNA, 100 bp, Homo sapiens
agcttccagcccaggactgctgctcgtcctcctgagcctgctgcagggcacaaggtggaggggcccacacaagggtgagtggaagccccggcagatcgac

SEQ ID NO: 90884 - DNA, 75 bp, Homo sapiens
atttatagacacccttcattgcaagttcttatttgtaagttgtggacatcggatacccaaggagacgaagctgaa

SEQ ID NO: 90885 - DNA, 100 bp, Homo sapiens
cgcctcagttttttccccagcatcatcttccccacacaatatatggtgagcaaggtgaagccaaaaaccttccctcttacccggggccgagcaagatgag

SEQ ID NO: 90886 - DNA, 75 bp, Homo sapiens
gcaaatgcagcatttttgataggtgcctatgcagaggagatgttaaagtaacccatcttgcaggacgacattgaa

SEQ ID NO: 90887 - DNA, 90 bp, Homo sapiens
cctgaatcgagcagagaaactagtacaggggctcaggtccaggtggcaggggatatgctacccaactcaactgagcgggccatcactatt

SEQ ID NO: 90888 - DNA, 75 bp, Homo sapiens
aaggacttcatctcccgatttgagacttggagtccaggtgtgagaaatttctacaaaaagacatttttgaaatcg

SEQ ID NO: 90889 - DNA, 82 bp, Homo sapiens
tggggccttgacaatttgcacttagtgaaagactggagaactgtgaatgaagacacccatcatactgactccaagccccttg

SEQ ID NO: 90890 - DNA, 90 bp, Homo sapiens
ctagaagctttctcgaatttgctgaagatgtaatacaagttccaaggaacttagtagctcgttttgacaggagccattcaagtagcagac

SEQ ID NO: 90891 - DNA, 100 bp, Homo sapiens
ctcccttacgtccccgagtgcggcagtaccgcctccttcccagccgcgcggcttcctccagacctctcggcgcgggttgtcaagttattaagcaacaaaa

SEQ ID NO: 90892 - DNA, 100 bp, Homo sapiens
gagaatggagctgctggaccggcagctgatgttctctcagtttgcacaagggaggcgacagagacagcagcagcctgtgcctactacactggcacaagtg

SEQ ID NO: 90893 - DNA, 75 bp, Homo sapiens
tcctcagtcacgggcctagaactccaaggagaaaggcggcgtgtttcaggagccgtagagccagatcgtcatcat

SEQ ID NO: 90894 - DNA, 88 bp, Homo sapiens
cttccataaacgaacccctaacagatatcatttgaggagcaagaaggatgatattatttacgttgttaaagggaagctggacgagata

SEQ ID NO: 90895 - DNA, 100 bp, Homo sapiens
taccacgagccaggataatgcaaaggaaaagaggactggagtggtttgtctgtgatggctggaagttcctctgtaccagcgctttgaacttcaagattca

SEQ ID NO: 90896 - DNA, 96 bp, Homo sapiens
ggggctcgggaccggctgccatcttagtctagggactgaggagtcgccgccgccccgagtcccggtcaagctttccgtgtactgggactacatgaa

SEQ ID NO: 90897 - DNA, 90 bp, Homo sapiens
ggcgagaggtgcggcgaaggaggcagaggcacttatgcttgtcagaagatggctgtgccacccacgtatgccgatcttggcaaatctgcc

SEQ ID NO: 90898 - DNA, 74 bp, Homo sapiens
ctcaatttgctggatttaagcactgctgcactttatgaggtttttgattggtcaaggagcacatgtaggggctg

SEQ ID NO: 90899 - DNA, 75 bp, Homo sapiens
cagcatccccaagcagggggagggtatatttacttctggcacatgggaagagaaatcagatgaaatttcctttgc

SEQ ID NO: 90900 - DNA, 101 bp, Homo sapiens
atctggttcagctttatctatattttttgactgctctgctcctctatgctggacatcaaatttccaggtacaccaaaccgctcacctttgctgactgcatt

SEQ ID NO: 90901 - DNA, 100 bp, Homo sapiens
ctacggcagtgagaccagcatcccggccgcggcccacaccgtcagcaacgccccggtcactgagtacatctttaaggatttttatgaactggagccagag

SEQ ID NO: 90902 - DNA, 90 bp, Homo sapiens
agcgagccagcgcccggagcaagcggagctcccccaagagccggaaagatttattcaggagattgagcatgctctgggtcttggcccagc

SEQ ID NO: 90903 - DNA, 100 bp, Homo sapiens
aaatgcattgagcttgggtcaggacaattccatttggggaccagagatggacggtcactcagcctatggaggtcagatggcaaaaatcaagcaaaccctt

SEQ ID NO: 90904 - DNA, 98 bp, Homo sapiens
gaaaacctggccctcttcaatttctgacaaaagagatggagtttcactgtgtcagccaggatggtctcgatctcctgacctcgtgatccgcccgcctt

SEQ ID NO: 90905 - DNA, 75 bp, Homo sapiens
gttttgatcatgttgttaccctcggacgtagcccggcttgtattgggtcctcctagccagcagttttgtgcccat

SEQ ID NO: 90906 - DNA, 75 bp, Homo sapiens
gcagtgtctgtgacaactgtgtggaggcagctgagtatgtcccagagaaggtgaagaaagcggaaaagaaattag

SEQ ID NO: 90907 - DNA, 100 bp, Homo sapiens
cggcggcggagactgcgggcccgtagctgggctctgcgagttgtcatttacgtgctgaagcatattgacttgaggaaaacgccttccttggagtttggca

SEQ ID NO: 90908 - DNA, 100 bp, Homo sapiens
cagccctgaagttgcctcttctggtgtcaaagcttttggacattcctggggctcctggaatcccagctgcagtcacagaagaggagccatgagaatgagg

SEQ ID NO: 90909 - DNA, 143 bp, Homo sapiens
caatcataaagtcatccctgtgtatgtaggagtgaatataaaaggacttcatctcctcaacatggaaactaaggtctgcagcttcactcttgaagccagcaagaccaggaacccaccgggagaaaggaacaactccagacgcg

SEQ ID NO: 90910 - DNA, 75 bp, Homo sapiens
cgccgagaggccgtgcgggacgcgggcgccaggaccggccgaacgcagaggatattgactgggtacagacagaga

SEQ ID NO: 90911 - DNA, 75 bp, Homo sapiens
taaaaagaagtgttaagaattgcctttgggactctgaaggctgaaggtattacatgaaacctttcctaaacatac

SEQ ID NO: 90912 - DNA, 99 bp, Homo sapiens
tgaaatttatggcattcagaacagccatttcataattctgaatcatgtctgataacggagaactggaagataagcctccagcacctcctgtgcgaatga

SEQ ID NO: 90913 - DNA, 108 bp, Homo sapiens
cgcacgggatccagagcgccgcgcacttcgtcatgttcttcgcgccctgcggggtcgcggccgtcaggggcactcagcgcgccgtcggggtccagaactacctggagg

SEQ ID NO: 90914 - DNA, 100 bp, Homo sapiens
cgagaacagaatttcttttggcacctcctctccgcgcgttcttgggatcctgctcacactaaaatatgaaccacaaacacacagagaaacaacctgttca

SEQ ID NO: 90915 - DNA, 100 bp, Homo sapiens
aacacaccgtatttcatctgtagcattcaagacttcaaactgaggctgacgcttgtgcttgccctggcaaccctgatagctgcctttgggtcatccttcc

SEQ ID NO: 90916 - DNA, 75 bp, Homo sapiens
cgcaccagaaccaggcgaagctggtggtggcgctgagccgcacctaccgcacgctgtcggaaaaggtaacagaag

SEQ ID NO: 90917 - DNA, 88 bp, Homo sapiens
aattcccagcctcgcttgcatctagacacaggtttccaatacttatctacaggaatcgccatgaccccagctctgagggaggcaacag

SEQ ID NO: 90918 - DNA, 100 bp, Homo sapiens
gcagccctcagcccacttaggataatggcgacagctgaggtgtcaaaccagaagagaagtaaaattcaacaaaaatttatgtgtggagttccttcttaaa

SEQ ID NO: 90919 - DNA, 88 bp, Homo sapiens
ggactgcacttgcgaagggagcttggggaggaagtacccactgatggtaatgctggcctgctggctgaaccccagattgccatgttct

SEQ ID NO: 90920 - DNA, 101 bp, Homo sapiens
gctctcttctcaacagccatacactgtgcatcttagccaacatagcggatgggacaacagcaaaagatcttattatgaccaatgatgatatcctacagaaa

SEQ ID NO: 90921 - DNA, 100 bp, Homo sapiens
aagtgaagatggccaccaaatcatgccccgagtgcgaccaacagaatttcgctaaggagtttgtgatcagtgatcggaaggagctggaggaagatttcat

SEQ ID NO: 90922 - DNA, 100 bp, Homo sapiens
tttcacttcaagtcatggatgtctaagctgagacgaacatggtttggtatgactggatgaggccctcacatgcacagcttcactctgactatatgcagcc

SEQ ID NO: 90923 - DNA, 100 bp, Homo sapiens
acccccatgtctggaggagggacgtttctaggatgacccccagagtggagaaatagccgagaggtccagttccggccgtaccgcacagacgacttcatca

SEQ ID NO: 90924 - DNA, 83 bp, Homo sapiens
tccaatgtgactgtccactacatttcactggccgcttctgtgaaaaagaatgggaggcattccagctaaaagccataggggag

SEQ ID NO: 90925 - DNA, 75 bp, Homo sapiens
gaaagtggaggtcacctactatcacaaaaatgggttatgtaccgaaggactctaccgtgtcagcgggaataaaac

SEQ ID NO: 90926 - DNA, 100 bp, Homo sapiens
tgggagagaggtacctctccttttccctctccctttccctaaggaaggatcgagatcgagaccgggatcgtgaagatcggtctaaagatcgagaccgaga

SEQ ID NO: 90927 - DNA, 97 bp, Homo sapiens
tcagcctttcaatgtgacacaaggaaagtattctacagatggtgagaacaagaccaagattggaaagccagcttcagaggagggaattacagcaaaa

SEQ ID NO: 90928 - DNA, 90 bp, Homo sapiens
gccagctctgcccctatgccagccgcaactccagccagctcaccgtccacctgcgatctcacacggaaatgagccgtcagactgctacag

SEQ ID NO: 90929 - DNA, 100 bp, Homo sapiens
tgaaacggaagaagcttgtacgtgatgggagtgtgtttctgaagaatgcagcaggaaggttgaaagatcgagggcacccagaaactgctcaacaaagacc

SEQ ID NO: 90930 - DNA, 100 bp, Homo sapiens
cttctggtggttgccactcacctgaggatggtcttgctctgttgcctgggctggagtgcagtgccacgatcttggctccctgcagccttgacctcctggg

SEQ ID NO: 90931 - DNA, 82 bp, Homo sapiens
actttttggttggggaaactcggagtacctgcagctggcctctgtcactgactccacacagttatttctcaaactctgaggc

SEQ ID NO: 90932 - DNA, 51 bp, Homo sapiens
cgggaagcgtcgggattaggtgaaagtgctccatacttgcttgcagtgcct

SEQ ID NO: 90933 - DNA, 75 bp, Homo sapiens
cagagctgcagcgttatatcctggcaaccttactaaagggattaatgaaaatcaagttccatcctcagacaagag

SEQ ID NO: 90934 - DNA, 50 bp, Homo sapiens
cagctgctgagttctcggtgaagtatgtcgggcagtctaggctctgggag

SEQ ID NO: 90935 - DNA, 82 bp, Homo sapiens
ccacgcccggctaatttgcaatacggaaattttaatagtgacaggtgcaagttttgtggtattcaatggagctctaaaaaca

SEQ ID NO: 90936 - DNA, 83 bp, Homo sapiens
gaagcgcgtcccaaggcccaggatctgcgaggcgacttggggaaaacgcaggatgataatgaagataattcaaatgatgggac

SEQ ID NO: 90937 - DNA, 100 bp, Homo sapiens
ggtcacgaagccctcagcattattgtggatgaatataagctattactactgaactatttcacaaacccattttgaaagtcaaaaaccgagcactgagtct

SEQ ID NO: 90938 - DNA, 75 bp, Homo sapiens
gcgccgtgtggcacgacacaaaaatcagggagaacgtgctggccctggacatcttctttgaggccctcaactatg

SEQ ID NO: 90939 - DNA, 108 bp, Homo sapiens
gcgcgcggaggccgcgacggacgcaagatggcgacggcgaccatagctctcgtttacccaaggtccagcctagcccctaggcaccatgtcggacagtgatctaggtga

SEQ ID NO: 90940 - DNA, 100 bp, Homo sapiens
caggacttcatccacgcctttcagccaaatgccagactgattgtcatgctcagggaccctgtggagagggtctccctctgttgtccaaggctggagtgta

SEQ ID NO: 90941 - DNA, 75 bp, Homo sapiens
cctgcttccctacatgcccaacaacagacaacaggaagatttcgatgtcgatcattttgtgtctgactgtaggaa

SEQ ID NO: 90942 - DNA, 97 bp, Homo sapiens
tctagtcctttccaccccgaaattcgccccgattaaagactgtgttgcattatcagggtgttttgaatgctgtatcaaatgcctggggggcattccc

SEQ ID NO: 90943 - DNA, 99 bp, Homo sapiens
caccaccctcgtgtctgccaccatcttcgacttgagcgaagttttatgcaaggtgaacgcttggccaagccagagcgaggcaagatgagagtgcacaag

SEQ ID NO: 90944 - DNA, 74 bp, Homo sapiens
ctgccgctgccaccggcgcgcccgatttgaagaaaacaggtctgaaacaaggtcttacccccagctgcttctga

SEQ ID NO: 90945 - DNA, 80 bp, Homo sapiens
aggagctaaagcagcgtgcgttcagccctgggccaacatgcccatcactcggatgcgcatgagaccctggctagagatgc

SEQ ID NO: 90946 - DNA, 82 bp, Homo sapiens
attctttggctcaaaggagttgtatttagtgtgacgactgttgacctgaaaagttggttgaatctggcgatgtggaacccat

SEQ ID NO: 90947 - DNA, 100 bp, Homo sapiens
ggacaacctacttaccctagtcagcctgccaggagtgaagaaagctttgggcaaatatggtcctgccgatgtggaagacactacaggaagtggagctaca

SEQ ID NO: 90948 - DNA, 82 bp, Homo sapiens
tcgaaccccgggacacgcaggaacggctccagcatcaagatccgtctgacagttctgaatgcagtgatggggaatggtctgc

SEQ ID NO: 90949 - DNA, 97 bp, Homo sapiens
cctgcagtacctgcagaaggtctctggagacatcttcagcaggacagctcggggctccgtctctggaaacgccgctggttcgtcctctccggccatt

SEQ ID NO: 90950 - DNA, 100 bp, Homo sapiens
gttgaaagcgacaagtggaggcgccgctctagcggccgggactctgaactatggcgacagtacaatgtagattataaactggagacttacttgaagattg

SEQ ID NO: 90951 - DNA, 75 bp, Homo sapiens
caactttgcgacggaaatgtgtcatcgaaagccaggaggagatgaccgccgggttctgctatggcacatggaaca

SEQ ID NO: 90952 - DNA, 90 bp, Homo sapiens
agcctggaaggtgcgtgtggggctgggtctcggagtgggagacgtggagtgcagtttgggatatgagattgaaaatgacgactcggaatt

SEQ ID NO: 90953 - DNA, 101 bp, Homo sapiens
taaaagccttaaagacttaccgaattagttttcaagaatctatctttttgtgtgaggatctgcaggtcctcagaatggttggaatgaccctccagctttga

SEQ ID NO: 90954 - DNA, 83 bp, Homo sapiens
gccgtcgccgccgccaccatgcccaagagaaagcgctcctggttgcagccagaatgcatgacttcaggaggactgtgaaggag

SEQ ID NO: 90955 - DNA, 101 bp, Homo sapiens
ctaagctgaataaagctgttttggaactgtcaggtacctcaaagcgatgaatttcatcctttcatcgaagcacttctgccccacgtccgagcctttgccta

SEQ ID NO: 90956 - DNA, 82 bp, Homo sapiens
cggcaagagctgcggagcccctggaagggagtgcatccgccccaacccttttccccctcgtctcctgtgagaattccccgtc

SEQ ID NO: 90957 - DNA, 100 bp, Homo sapiens
aggaggacatggagatgaagaagaagattaacctggagttaaggaacagatccccggaggaggagcatcagatccatgctgctgctgactcggagcccca

SEQ ID NO: 90958 - DNA, 99 bp, Homo sapiens
cctgtatgagttcctggtgggctgcgtccctttttttggagatactccggaggagctctttgggcaggtgatcagtgaaactgaaggctcagaagagga

SEQ ID NO: 90959 - DNA, 100 bp, Homo sapiens
gaagttggtagctctgaaggtgatcaggctgcaggaagaagaagggacacctttcacagctatcagggaagatatgtcttgtcgttcaagacttgcaaca

SEQ ID NO: 90960 - DNA, 100 bp, Homo sapiens
cggtagcaacctcgccccttgcaacaaaggcagactgagcgccagagaggacgtttccaactcaaagagaactgcgacacatcaccaagctgaagccctg

SEQ ID NO: 90961 - DNA, 95 bp, Homo sapiens
accgccagatcaacctggagctctacgcctcctacgtttacctgtccatggtcacggtctagatcacattctcgatccagaggaaggcgatactc

SEQ ID NO: 90962 - DNA, 130 bp, Homo sapiens
aaaaagatcgagaagcagctgcagaaggacaagcaggtctaccgggccacgcaccgcctgctgctgctggacaatgcagatcttcgtgaagactctgactggtaagaccatcaccctcgaggttgagccc

SEQ ID NO: 90963 - DNA, 82 bp, Homo sapiens
aacctctctttcgcttttgtggaactactctacggcatctggagcaactggtttttcgttggaatatacgttgcacatttat

SEQ ID NO: 90964 - DNA, 51 bp, Homo sapiens
agcacaaggtcaaaattttaaaacgggaacttaagaagtatggagttacca

SEQ ID NO: 90965 - DNA, 100 bp, Homo sapiens
ggagcctccaggagcccagacaccagccccccaccatggtggaaccgtcccaaaatgtcccttgctcagaagaaggatcgggtagctcaaaagaaggcaa

SEQ ID NO: 90966 - DNA, 100 bp, Homo sapiens
tctggactaccaaggagaagctatagactacttctactccaccaggaaggtgctggagaatctggtaaaagcaccattgtgaagcagatgaggatcctgc

SEQ ID NO: 90967 - DNA, 75 bp, Homo sapiens
gacgtgctggggctgcagcggatcaccggtgagtcttcggatgactcctacgtgtccgctggagaagagccccta

SEQ ID NO: 90968 - DNA, 100 bp, Homo sapiens
cggaggcaatggccggcaaccagctgtaagcgaggtctgtgagctttacttctctatataatttgctgaagacaaaactttgcccctatttctacgtttg

SEQ ID NO: 90969 - DNA, 75 bp, Homo sapiens
gctgccaaacttggcctgcggaaggtgcaggtgatggtcctaccagtgtgtctgttgaggtcacccgtcctaaag

SEQ ID NO: 90970 - DNA, 51 bp, Homo sapiens
ggagtgtgcgacggattgggagctgatggtgagaccattctaaaaggcctc

SEQ ID NO: 90971 - DNA, 100 bp, Homo sapiens
agagagaaaattgagacggagctaagagatatctgcaatgatgtactgaatccttgttgcctgatgactatgtggttccccttgactggaagacactaaa

SEQ ID NO: 90972 - DNA, 88 bp, Homo sapiens
actgtcccaactgtgcagttttacatggttcctccttgacaggttggcaacattgtacaagtcacccagccagaaggaatgcacagta

SEQ ID NO: 90973 - DNA, 75 bp, Homo sapiens
tcagccccccctccaacagaatcagacgccaaggacttattgttgtgctaacactgaagacttggagacagttat

SEQ ID NO: 90974 - DNA, 97 bp, Homo sapiens
ctgccctacggcttctccgccatgcaaggctggcgcgtctccatggaggatgtaaatgaagaccctggagaagatgtggccctcctctctgttagtt

SEQ ID NO: 90975 - DNA, 90 bp, Homo sapiens
aaatgtttttctggtcttcacttttttgaggcaggaagaaactaattctgaagcaagcccttatagttgtgctgcagtggtgtttcaatc

SEQ ID NO: 90976 - DNA, 98 bp, Homo sapiens
tggagaagaaatcagtcagccgcaggatgttgctggagcactgtcagtagaagaaatcactgaactactcagtctccataaattatgctgtggccgta

SEQ ID NO: 90977 - DNA, 75 bp, Homo sapiens
aactactttagaagaaacgacaccattgtttttagtgagttccttcggggttactcctgcagtaggtggactatc

SEQ ID NO: 90978 - DNA, 90 bp, Homo sapiens
actgctcacacctgaaagaccactgccgcacgaccccctgtgaagatgtggtgaacaattcctctccggcactgggaggcaccttcccgc

SEQ ID NO: 90979 - DNA, 90 bp, Homo sapiens
tccacatcggtcagaaaaagatagaaaatgctgctgtgaagacccaattaaagctttcacataaatgaagctacagctatcatgatttag

SEQ ID NO: 90980 - DNA, 96 bp, Homo sapiens
ctgtggaaagaagttgcaaaacactggagtattgggaaagggtcgttgtggtgcatagacccagagtatagacaaaatctaattcaggctttgaaa

SEQ ID NO: 90981 - DNA, 100 bp, Homo sapiens
cgcgggacgccgatgagtggccgcgcggaaggagctggagacggtcgtagctgcggtcgcgccgagaaagtgtttgtggagaaggtgctgcagagacttt

SEQ ID NO: 90982 - DNA, 100 bp, Homo sapiens
tataccttcacccagcatttcatccctcgtcgaaaggattggattggcatctttagagttccgaatctattccaaccattctgcactggagtcgctggct

SEQ ID NO: 90983 - DNA, 100 bp, Homo sapiens
caggatttggtctccacggtcaacgtggtatactcgcagacaacccaaccggtatacaatgatattgatgatgttaagaagttcaaaccgggttacctgg

SEQ ID NO: 90984 - DNA, 74 bp, Homo sapiens
attgaaaaccctgctgatgtcagtgttatatcctccaggaatactggccaggagtttgggctttgcaaaactga

SEQ ID NO: 90985 - DNA, 75 bp, Homo sapiens
gcgagtcctgagcggccaggacgacgaggagcagggcctgactgcgcaggtgaaagaacttgtcctggacaacag

SEQ ID NO: 90986 - DNA, 50 bp, Homo sapiens
gggaaccctggtcaccgtctcctcaggccctcgggaccaaggatcacgtc

SEQ ID NO: 90987 - DNA, 100 bp, Homo sapiens
tattcccgccctcggccacgctgcacctctccaacatccccctcctgagtagctgggactgccattgtgtaccacagtgcccagctgagggatctgtgcc

SEQ ID NO: 90988 - DNA, 96 bp, Homo sapiens
gcgggagccagagtcgccgccggcgtcggcgccgggcagatgattctggaccagatgaagcctgaggagccttccagctctaagatagcaggatag

SEQ ID NO: 90989 - DNA, 75 bp, Homo sapiens
ctgcattttgcacattggtttgcatgactgtttggatgccgacatctggaaaaagtttttgtctcgcccagcctt

SEQ ID NO: 90990 - DNA, 100 bp, Homo sapiens
cggcgcggcggcggcacgatggtcatggcgtatttcgtcgagaatttttgggtgaatgaaaactttgccattgatttgatagcagagcagcccgtgagcg

SEQ ID NO: 90991 - DNA, 98 bp, Homo sapiens
agaaagagatatagaaaattcttgaatgagtcctataaacatgaacaggttcctgtactactgccttgtacttttcattttggctcaccgtggatttt

SEQ ID NO: 90992 - DNA, 90 bp, Homo sapiens
tatccagccttgatacccattaccactgcctcctttattgcagcaggaatttgttacatccttaatgttcagtcaagcagtgatgacacc

SEQ ID NO: 90993 - DNA, 51 bp, Homo sapiens
tgcaacctggaattggaacggaggctgaccggttccctgatgtgttacctg

SEQ ID NO: 90994 - DNA, 98 bp, Homo sapiens
gacaagatccgcctgaacaacgccatctggagggcctggtatatccagtcaatggccaatgtacatggtggactatgccggcctgaacgtgcagctcc

SEQ ID NO: 90995 - DNA, 50 bp, Homo sapiens
gcggggggaggaggacccagaagaactttccatgactggatcacagggaa

SEQ ID NO: 90996 - DNA, 100 bp, Homo sapiens
ccgcatcaagatgctccaaactgcccagcagcaccaagtcgggctggccccgacagaacgaaaagaagccctccgagcgcccataacccagggaactgga

SEQ ID NO: 90997 - DNA, 76 bp, Homo sapiens
atcataggtggcactcatgtctcactgccccactcagggtttaaacttgaaaagactagagacagtacaaggaggg

SEQ ID NO: 90998 - DNA, 75 bp, Homo sapiens
aaagactttcagccctcaagatctacagctcaacaggatgaagatgatctggccaatgccctgatctggcctgag

SEQ ID NO: 90999 - DNA, 98 bp, Homo sapiens
tttcgatctccgccctggggtcattgtcagaatgattacggacctgaagccaaagaacaagatgcgctagtggacagattgctgaccaggggcttgag

SEQ ID NO: 91000 - DNA, 50 bp, Homo sapiens
cgctgccgccgctctgaggagttaaaggttattcaaggacacggaaaagc

SEQ ID NO: 91001 - DNA, 100 bp, Homo sapiens
agacggtgaggatgatgtaaatgagcaacactccggatcagacactggaagtgtagaacgtcattcagaggagtttgctataaaatgggagttctggttg

SEQ ID NO: 91002 - DNA, 101 bp, Homo sapiens
ctaatggtcggcgtatctactatggcatgaatgccctgcgggccaaggtcagccttattgaaagatactggctccaatactacagaatgaatagaaaaaat

SEQ ID NO: 91003 - DNA, 75 bp, Homo sapiens
gcttgccaggcctggctccatttgcctgggagcttgaaaggagaaagcacggggtcgccccaaaccccttctgct

SEQ ID NO: 91004 - DNA, 83 bp, Homo sapiens
ctgtctgtccgcttagtcatcacatcatttcactgtgatgttctcaaatagtgatgaagctgtaatcaataaaaaacttccca

SEQ ID NO: 91005 - DNA, 75 bp, Homo sapiens
tggctccctgcagtaccctttaacgaccagctttcagtgccagaggagaaggcagcagaattacttttggatatt

SEQ ID NO: 91006 - DNA, 98 bp, Homo sapiens
agatggcgaccgagacggtggagctccataagctaaaggggtgggaaccgccaaacctctcccttctttttgacttcacccttggataccatcaaggc

SEQ ID NO: 91007 - DNA, 100 bp, Homo sapiens
ggtgaagctggaacagccagaattggacccgaaaccatgcctcactgtcctaggcaagtgggtaattccagaattgattggccataccattgtcactgta

SEQ ID NO: 91008 - DNA, 100 bp, Homo sapiens
cgactgggaggagcgccggaacgccgaggcccagaatagctgaaacctttggacttcaagaaaattatatcaaaattgtcataaataagaagcaactaca

SEQ ID NO: 91009 - DNA, 100 bp, Homo sapiens
taattctccctcgagttcttgggagatgggcatttggcgagaaggctggcgttagtgaagcgcgcccggcgtcacgctcctggctaaatacaaaagcttg

SEQ ID NO: 91010 - DNA, 90 bp, Homo sapiens
gtctggtgtgggtttcccaagcaaggttccttggaagaagatgtctgcagaggttggtcaaagaaaaagtgatgtatgaaaaagaggcaa

SEQ ID NO: 91011 - DNA, 75 bp, Homo sapiens
ggttcgggtccaagatgatgccgattactcttgtctctgctgctcctgggaaagtgatttgtgaaatgaaagtag

SEQ ID NO: 91012 - DNA, 100 bp, Homo sapiens
cctggaccccaacgaggtgtgggagatcgtgggcgagctgggcgacggcgccttcggcaaggtttacaagaaaaagcttgtggtgaaggggggcaaaaaa

SEQ ID NO: 91013 - DNA, 82 bp, Homo sapiens
acttcctcattagggacagcgagtcctcggtggcataagtggaaataaactcaagctgatgcttcaaaaacgagaaggtaaa

SEQ ID NO: 91014 - DNA, 100 bp, Homo sapiens
cggacatctccctggacgaactcatcaggaagcgcggggcggcggcgaaaggacgcttcattgcccatgccattcgccactgctaccagcctgtgggagg

SEQ ID NO: 91015 - DNA, 98 bp, Homo sapiens
ccggatcaggagccgccgccgccatatcagtcacaatatggagcttccgtttctgccaagcctgaactacccctcttttacactcctattgatctggt

SEQ ID NO: 91016 - DNA, 80 bp, Homo sapiens
gctggtcaccggggtctgcctgggaggcaacgcacgggccacaggcatgttcctgcagtatacagtgccggggacggagg

SEQ ID NO: 91017 - DNA, 100 bp, Homo sapiens
cacctctacaaggatctgcagccatttatattgcttaggctactggcgtgtgctcgcccactgatatcggtgtactccgaaaagggggagtcatctggca

SEQ ID NO: 91018 - DNA, 83 bp, Homo sapiens
gtcatgagcgacagcggcgagcagaactacggcgagcggttgagccccatatgggggttggcaggcagcagagaggccccttt

SEQ ID NO: 91019 - DNA, 90 bp, Homo sapiens
ggaattccggcggctgccgtgactccagtgcaagtccggcctctttggcctacccccgttggctccgctgccccaggtcgatgagtcccc

SEQ ID NO: 91020 - DNA, 83 bp, Homo sapiens
cgcatgcgtcctagcagcgggacccgcggctcgggatggaggaataacctccatctcctgggtcccagcgattctcctgcctc

SEQ ID NO: 91021 - DNA, 152 bp, Homo sapiens
cagaaggcgaatggcttgtacccattggcaagtgttcctgcaatgctggctatgaagaaagaggttttatgtgccaagtggcttttcatggcctgccactgaaaatcaagaaagaaccccacagtccatgttcagaaatcagctctgcctgc

SEQ ID NO: 91022 - DNA, 73 bp, Homo sapiens
tcggtgtctgctgcgttcacggcaggattcggttagcaattctgtggtgttcttggtcacacatttatggagt

SEQ ID NO: 91023 - DNA, 75 bp, Homo sapiens
ctcgctgggagagaggtacctctccttttccctctccctttccctaagccactgaggcggctcccagctgcgttg

SEQ ID NO: 91024 - DNA, 101 bp, Homo sapiens
gatgaaagtgagcagtccagaaagcggcttatcgaacagagccgggagttcaagaagaacactccagagccaactgggtcctgaagtagctgaaatgcgaa

SEQ ID NO: 91025 - DNA, 100 bp, Homo sapiens
gttaaggattccaagtaactcttatttggcttccagctggtctttttaccctttgctgatgataaaaggaagatgccctttactgaaaaaatcatggcaa

SEQ ID NO: 91026 - DNA, 100 bp, Homo sapiens
tcggcggccacggcagcgcccacggccactcccgccgcgcaggagtcgggcaccatcccaaagaagcgataacccagcagccaactggcttcatgcgcgc

SEQ ID NO: 91027 - DNA, 82 bp, Homo sapiens
cagttcgcccgtccccctgccccgttcacaatgaaagaccacagcaagattctttcattcgtctcctcctagcctgggggac

SEQ ID NO: 91028 - DNA, 75 bp, Homo sapiens
gggaaccctggtcaccgtctcctcaggaaccaggctgtgcgcatccaggagggccggtaccgccaccccggctgc

SEQ ID NO: 91029 - DNA, 82 bp, Homo sapiens
ctcccagcctgtgacctttgtgaccaactccacctacgcagcagacaaggggaggttgacggatatattcagacgttacgac

SEQ ID NO: 91030 - DNA, 101 bp, Homo sapiens
ctgaagaagcagcacgaaagagagaggtccgtctaatgaagaacaggtaaacactacacgtgaagagtggtgaaagggaacattgattactgaagtgccct

SEQ ID NO: 91031 - DNA, 83 bp, Homo sapiens
acgggaacagcagtaaaggtactgaagggaggagatgttaaagtaacccatcttgcaggacgacattgaagattggtcttctg

SEQ ID NO: 91032 - DNA, 80 bp, Homo sapiens
gtgagtcttctggcaaacagtgtttgcctctggttcagctcatacaacagcttcttagatcacaagatttctgttgtgaa

SEQ ID NO: 91033 - DNA, 101 bp, Homo sapiens
gcagtgtcaagattgtatgccaggttattatggagatccaaccaatggtggacagtgcacagggacagatctggaagcatctttgctaagttttgaaaaac

SEQ ID NO: 91034 - DNA, 82 bp, Homo sapiens
ctcacatcaacttctaccagctggacatgaacaagctgagtggaggcggcgggcgcaggactcgggtggaagggggccagct

SEQ ID NO: 91035 - DNA, 76 bp, Homo sapiens
ttcaagttaaggtccaaaaaaactccagctgtgaaagcaacataaatgaacaatgtctcccttttgcagagctgta

SEQ ID NO: 91036 - DNA, 95 bp, Homo sapiens
agaacagttaatcctcaatttaagcctgatctaacccctagaaacagttggttgaatctggcgatgtggaacccatggatatggagggctgacta

SEQ ID NO: 91037 - DNA, 75 bp, Homo sapiens
gacctgtgccgcaacatggacgcgctcagcgagtgggactggatggagttcgtatgttcatgcggatgctcctac

SEQ ID NO: 91038 - DNA, 100 bp, Homo sapiens
ctatcccaggaatacagctttgcattaggtacagcagggaagaactggaaactcagagaaagaaactgcccttccatctacaaaagctgagtttacttct

SEQ ID NO: 91039 - DNA, 75 bp, Homo sapiens
gccgcgagcagagccgcccagccctgccagctgcgccgggacgttacagaatgtctgaaggggacagtgtgggag

SEQ ID NO: 91040 - DNA, 100 bp, Homo sapiens
gccgagatgccgggggagcggggccttccacaccccctccgtgggtgtgtggtgagtgtggggcgtctctggccgagcctctttttgtggaaaacgacag

SEQ ID NO: 91041 - DNA, 99 bp, Homo sapiens
tgctcaagggggacgcgacgcacaaccaggcgatggtgcactggacgggcgagaacagcagcggctcaagggttcttgttgatgcacgagataagcttg

SEQ ID NO: 91042 - DNA, 98 bp, Homo sapiens
ggaatgtcaagctggtggtccacgactgtcccgtctgggtatggaacccttcagatcaaagcttaccaataaattcagtatgtagaacagattaacgt

SEQ ID NO: 91043 - DNA, 82 bp, Homo sapiens
gcctccatgaacaatctcacccaattactctgctcaggcagaagctcctcctggggtagagacagatcttattgatgttgga

SEQ ID NO: 91044 - DNA, 74 bp, Homo sapiens
tccgtggtcgtttgtttctccaaggtttgaaaagcagctggcctgcaaggcggcttacagggagaacacagttg

SEQ ID NO: 91045 - DNA, 50 bp, Homo sapiens
ggaaaacaacttcgagggcagagtcagttcaccgggacctggaggcccag

SEQ ID NO: 91046 - DNA, 75 bp, Homo sapiens
caacgctgagcatatgatctttcggtgtctatctgcactttctttgacctgctgctgaacaggatgtcctcggac

SEQ ID NO: 91047 - DNA, 89 bp, Homo sapiens
cattacaagattgaagctttcactcctttgctagccccagcacagcaagtgctctcagaagaggagattgacgagaacttcaaggccct

SEQ ID NO: 91048 - DNA, 90 bp, Homo sapiens
atctgcagaccaaggaacttagttctgcttgagatttcaagaattttgaatactggcttagatatggaaactctgtctatttgtgtacgg

SEQ ID NO: 91049 - DNA, 90 bp, Homo sapiens
ggaagaaagaaaacctaaagtatttgccgttggtgattcaaggtttcttcaaaggaaagaagcaactggaacacacatataacactaacc

SEQ ID NO: 91050 - DNA, 100 bp, Homo sapiens
ctccatccatgtctatggaaaaactgaagacttcatcagccaacacaagatggtgaaggagacccagtactatgacatcctgggcgtgaagcccagcgcg

SEQ ID NO: 91051 - DNA, 97 bp, Homo sapiens
ttagagtttgaccatgagcagtcccgacgcagcaaaggcaaacttggaaagagcaagatcggcagccctaaagaaaatggaaggtatgggcgccgca

SEQ ID NO: 91052 - DNA, 99 bp, Homo sapiens
ctcacggcagaagtgagctggaaggtcttggagcgaagagctcggaccaagcgctcaggtttaatagactacaacttccactgtttccgaaaagctatt

SEQ ID NO: 91053 - DNA, 99 bp, Homo sapiens
atacagcttctgtatttatcagaacccttaggagaaatcttgagagtggacagcaattgtgaagatcgccagagagttctgtgtttcatcaccgccgaa

SEQ ID NO: 91054 - DNA, 75 bp, Homo sapiens
ccttctcggtggaggccgacccatccaggcagttgtgaaaaacttcaggacaaaaatgtttcatttaaggacttg

SEQ ID NO: 91055 - DNA, 76 bp, Homo sapiens
cataagggcttaactcatatatttaacccccctccaaaaaatgtggacgagtgccaccgcgtgccgccgccgtgtg

SEQ ID NO: 91056 - DNA, 98 bp, Homo sapiens
catccgagtgcagaacctgcaaggtgtcatggagaaactccagctgggcccagagattctgcagcgggaaaatccaaggcttatttatgccaggctga

SEQ ID NO: 91057 - DNA, 98 bp, Homo sapiens
cagcccgggcagagaccatgtttgacaagacgcggctgccgtacgtggccctcgatgtgctctgcgtgttgctggaggaggtggccaagttggagaag

SEQ ID NO: 91058 - DNA, 51 bp, Homo sapiens
cacagcgtttcttgcaagaatgggagatacccagaaataatcgcttaatgt

SEQ ID NO: 91059 - DNA, 100 bp, Homo sapiens
agagggccctcctggtaaacctggggaagatggtgaacctggcaaacaaggtccctctggagcaagtggtgaacgtggtccccctggtcccatgggcccc

SEQ ID NO: 91060 - DNA, 75 bp, Homo sapiens
acaaaagctgctacttatggaagatacaaaggaaatttctgtccatcatttcaccatcctcatggattggtgtgt

SEQ ID NO: 91061 - DNA, 100 bp, Homo sapiens
gcagcttctgtatgggaaccatgtagtggtacaagccagctgccatgttgtgagcacataccacatagctccatggagatgcccatgtgactgtgatgaa

SEQ ID NO: 91062 - DNA, 50 bp, Homo sapiens
cagaaagagaatgtggtccagaagaatcaggaaacccaggcccaacggca

SEQ ID NO: 91063 - DNA, 75 bp, Homo sapiens
gaagaacctcatcgctgcgacgaaaagctaccggctctctgaccagttccacgacatcctcattcgaaagtttga

SEQ ID NO: 91064 - DNA, 75 bp, Homo sapiens
ctacaatcacctaatgcccacaagggaccctgaagtggctgatggaggagagctggtcctggggggctcagaccc

SEQ ID NO: 91065 - DNA, 100 bp, Homo sapiens
acactcatcactgagaagctgcagagccagagcctggacgacctcacctgcaaggcggaggctggcccgacaccttcgacaacctggcattcatcccaag

SEQ ID NO: 91066 - DNA, 75 bp, Homo sapiens
cagtagcagtgaatctacagggacgccatcgaatccggaacttaaaaggagtctagaaaatccagcagaaaggaa

SEQ ID NO: 91067 - DNA, 87 bp, Homo sapiens
ggcctgatggagtaagaggggttggctgtgaatgggctttgaccacgacctttgaagagcttcattttgagatcaagccccacgatg

SEQ ID NO: 91068 - DNA, 100 bp, Homo sapiens
tttgagaagagcaatgacattgggggcctgtggaaattttcagaattgaaagatgttggccatcgtgatcagatggctgcagctagaggaatcctgcaga

SEQ ID NO: 91069 - DNA, 75 bp, Homo sapiens
tggatcaccaccagccggggactgggcgctaccaggtgctatcagatattgtgaaaaatgtcagctgattaaacc

SEQ ID NO: 91070 - DNA, 104 bp, Homo sapiens
tgttatgaaaatgttttgaagcaagtaaaggctggacaccagctatgaagacggccaagtgggagatgcaaatattaatacacaagaaggaggcattcacaaag

SEQ ID NO: 91071 - DNA, 100 bp, Homo sapiens
gaccccacccccgctggacagtgggggaaactgaggcctgagcgggtgatggtaatgcccgaaggagcagacacggtgtccaggcccagtcccgactacc

SEQ ID NO: 91072 - DNA, 96 bp, Homo sapiens
gtagaccagtttatgatggaaaaagaagtctttacaccgccaatccacttcctgtggcaactacagggggatgacccaagatttcctacggttcgt

SEQ ID NO: 91073 - DNA, 100 bp, Homo sapiens
agtggctctgggatattatcgatgagttcatctaccagaaagctgacttcatgagaccgaggatctcgttcgttgatcgatgctacatattcagcatgtt

SEQ ID NO: 91074 - DNA, 74 bp, Homo sapiens
aagaggaccctgcttggggaccccaagtttgtggatgtgactgagattgcccgtgaggcagaggctgccatcta

SEQ ID NO: 91075 - DNA, 100 bp, Homo sapiens
tccacgtcggctatctcgtgcttccagtgtttggctctgtgcgaaacagaggagcttggtttgatccgcaaacctgcctcgttcatgaccagcatctgcg

SEQ ID NO: 91076 - DNA, 50 bp, Homo sapiens
cccactggaagcctagaaatggagcttactccacgggaacagcctctaga

SEQ ID NO: 91077 - DNA, 100 bp, Homo sapiens
gctgcgggtgttcttttggggtagtgtctgggatccagtacgagttgaatcattgttcaaataagacctgcctagagctggaacgttacctccagagcga

SEQ ID NO: 91078 - DNA, 75 bp, Homo sapiens
tgggtgtacctcgtttttaaaaggagaagcaaaatgttatcagcatttgagggaagtcgttgcatatgatgatcc

SEQ ID NO: 91079 - DNA, 96 bp, Homo sapiens
ctccttggtacacagggccttgctgttccttgaacctgccaggtacttataagacatttccaaagtcaagttaatgagctgcagagtaaacaagag

SEQ ID NO: 91080 - DNA, 100 bp, Homo sapiens
gaaaaatcgagcagaaagaatgtctttcaggctagcctgaaagctgactctataaataagccctttgcacagcagtgccaagacttggttaaagtcattg

SEQ ID NO: 91081 - DNA, 100 bp, Homo sapiens
cactcctccaagaaccaacccccaaattggctgggacagattcctcctgcatggaaaaactactttcaaaagattggaaggaaaaaatggaaagactaaa

SEQ ID NO: 91082 - DNA, 82 bp, Homo sapiens
atcagaacggcgccgagggcgaccagatcaacgccagcaagaacgaggaggacgcgggccaacatgcccatcactcggatgc

SEQ ID NO: 91083 - DNA, 101 bp, Homo sapiens
ctttaatatgctggatgagctgctgaagcccaccgaattaggccgggctctcgccatgggtcactgtcgcctctgccacgggaagttttcctcgagaagcc

SEQ ID NO: 91084 - DNA, 100 bp, Homo sapiens
tttttgtatagctgataatggaaatgagacaattgaagctcaagcagagcttacagtgcaaggttgctttcagctatgtaacgtttttcgatcccatgag

SEQ ID NO: 91085 - DNA, 83 bp, Homo sapiens
gtgaacgggggtcctgagcctgccccagccagtaccagcgccgtgttatgcaaagggtgacctggacatatcttacatcacat

SEQ ID NO: 91086 - DNA, 75 bp, Homo sapiens
gggtccctgaagagggaagacacgcggaaacaggtagtaagcattaataatgtctttcatctttgagtggatcta

SEQ ID NO: 91087 - DNA, 100 bp, Homo sapiens
cgggtggagctcagaccggtgggctagcttatgtttattcagagccaaggccaggtccagctgactattgagcttctggacacagaagaggagaattcgg

SEQ ID NO: 91088 - DNA, 100 bp, Homo sapiens
ttatattgccacccagggtcctttatctacaaccctcctggacttctggaggatgatttgggaatatagtgtccttgggaagcaagcacttatttggcta

SEQ ID NO: 91089 - DNA, 75 bp, Homo sapiens
caggaagaaaagaagaagctgacccctgaaggaaacaaagtacgaattggagcaatgttggcttatacacctctg

SEQ ID NO: 91090 - DNA, 100 bp, Homo sapiens
tgaactggaccccgcgagcaccagagtcggcgtaactatcgcctgacaggggcgaggaggcttccgaggaggcagaggaggaggaggtgaccacaagcca

SEQ ID NO: 91091 - DNA, 75 bp, Homo sapiens
cgcagtggtcgcttcttctccttggtatgggttagaatgtctgttcaggttttatagttatggactggaaaaaaa

SEQ ID NO: 91092 - DNA, 87 bp, Homo sapiens
gggacagcattaccgacaagcaagtactatactggcaattgctggagaagattttgcaattgttgcttctgatactcgattgagtga

SEQ ID NO: 91093 - DNA, 83 bp, Homo sapiens
tggaaaccagctgcgctgtcctaaatgtggcgacttgtgcacacatgtagagacctttgtatattcttacaaccagtacagaa

SEQ ID NO: 91094 - DNA, 82 bp, Homo sapiens
tgtggaaaaccagtggtaaatgtcagctacaggccagcttatgaccagcctgaactctttgcttccggaatccgggattgtt

SEQ ID NO: 91095 - DNA, 101 bp, Homo sapiens
cagggcttgggaaggggaaggaaacctctctgaaatctgacacctgctctcccggcaaggaaacttcgcaggctggtctgtgtatgatgaccaaccaaatg

SEQ ID NO: 91096 - DNA, 121 bp, Homo sapiens
aactttctaaagtgcagatttctgagctttcatttcctgcctgtaacacggtgcttccatacaaaggggacagaagagatgatggaaggcctcagtactgcaggaggggagacggatgtca

SEQ ID NO: 91097 - DNA, 75 bp, Homo sapiens
ccgagggctacgtggtggtggtgaaggctcgcgggattgatgtgcaacaagtgtctttggttataaattatgatc

SEQ ID NO: 91098 - DNA, 90 bp, Homo sapiens
ggcgagagtgggcgagaacgtccactgcgggccggcgaaagctgtcaccttcaggccattcagaggaggaaagagaggggaatatgaagt

SEQ ID NO: 91099 - DNA, 90 bp, Homo sapiens
aggaaacatggcggcggcgggtgttgtgagcgggaagtttgggaatacctgctactgcaattcagttcttcaagcactttatttttgtcg

SEQ ID NO: 91100 - DNA, 98 bp, Homo sapiens
cttctgggaggaggtggcaagtggagaggagccagccctgccagggacccctatgaatgcaggtgcggaggaggacccacccccacagaggcctgagg

SEQ ID NO: 91101 - DNA, 100 bp, Homo sapiens
ctcttctcgccctggcggggaagggggatatgagactttctactcggaatatcctgagtgttgcgtggatgtaaaacccatttcacaagagaagattgag

SEQ ID NO: 91102 - DNA, 100 bp, Homo sapiens
cagccgatgggttgtccgactgggagcagaggaagccttgaggacctactcacagataggaattgaaggtattatccatgcagcagaagagaaggactgg

SEQ ID NO: 91103 - DNA, 83 bp, Homo sapiens
gaagagtgagagatggaacccgaagaagaaaggattcgttacagccagagattggtgtcgtgaaaactacccctaaaagccaa

SEQ ID NO: 91104 - DNA, 76 bp, Homo sapiens
actttgtgttcctggaggcgatgtacaaccagggattcatccgaaagcagtgaccaacttggaggccttgcagaag

SEQ ID NO: 91105 - DNA, 95 bp, Homo sapiens
ccagcccgcctcgccgaggaggccttcttccgtggggttagccaggatgaccggaaagaagggatgaccgcgtttgtggaaaagagaaaggccaa

SEQ ID NO: 91106 - DNA, 73 bp, Homo sapiens
aaacatgaccgctgagcccatgaggtgtttcaggcctcacctgaagatcatgaaaaatacggtggggatccac

SEQ ID NO: 91107 - DNA, 100 bp, Homo sapiens
gttttctttactctggggtcccggctgccctgtggcctcgctcctcggagggaaggaatcgtgtctcctagtgacctggaccttgtcatgtcagaagggt

SEQ ID NO: 91108 - DNA, 98 bp, Homo sapiens
gttcctgcaactgcactgattctagaaacactctctattcgaactctcatgaggcaggagtagggctgattggagccattgtacagtgtcgggaacat

SEQ ID NO: 91109 - DNA, 75 bp, Homo sapiens
gggggttccagccccagcctggcggggtgaagaagcatctgcaggacctgtccggcaggatctccagagctcggc

SEQ ID NO: 91110 - DNA, 90 bp, Homo sapiens
cccgctggcgcgcagcctcagctaggctacagatgcacatgttgaatggagctcttctggcattgctgtttcctgtggtaaacactcggc

SEQ ID NO: 91111 - DNA, 96 bp, Homo sapiens
tccacacagctcagaacagttggatcttgctcagtctctgtcagaggaagatcccttggaattgtcttagaagaaagaaggcaagccaccatttta

SEQ ID NO: 91112 - DNA, 76 bp, Homo sapiens
ggcttgaccctcagtgatctggatcgacacccagagctgtcggaaaaggtaacagaagatggaactcgaaatccca

SEQ ID NO: 91113 - DNA, 100 bp, Homo sapiens
ttcgtcctccagatcgctgaaaaggagcaggagctgttggcctctcaagagaccgtgcagtgaagctgtggtctaccaatctagacaactcagtggcaag

SEQ ID NO: 91114 - DNA, 99 bp, Homo sapiens
atacaccagtactaccaaggacagcttttttcctgcaaggtctacttccccagcaggacagcatcattctcctatatcttctagacatcactcatcttc

SEQ ID NO: 91115 - DNA, 90 bp, Homo sapiens
gctgcgcctggacctggttctgccttctggacaatctttccgaaggaggccccaaccctgagcacaacagcaacctggccaatatcttag

SEQ ID NO: 91116 - DNA, 100 bp, Homo sapiens
ggattaacactgcagagtaatggccaggacgactggaatgggaccaggccgtcgctgaaggcccctcctgctaggccagtgaagggagcatacagagagc

SEQ ID NO: 91117 - DNA, 100 bp, Homo sapiens
ttaatatctgattgggacaacattcagacccatttccagtcatgaatcaatgtccgagttaccaccatggatgcagagctggagtttgcaatccagccaa

SEQ ID NO: 91118 - DNA, 82 bp, Homo sapiens
gtggctgtaacttacgtgtactttaccaacgagctgaagcaggctaccaagcagtttctcgaagagattaacaagtggacag

SEQ ID NO: 91119 - DNA, 74 bp, Homo sapiens
gggggctaaagagcgtcgtgtggcagagaatatatatgtcccagatgtgaatcaggctttattgaagaagtgac

SEQ ID NO: 91120 - DNA, 97 bp, Homo sapiens
caaatatgaggatggttcatatacttacatcagttgttcgaccgtggcagccatgtattacagctactacatgctaccggacggcacttactgcctg

SEQ ID NO: 91121 - DNA, 83 bp, Homo sapiens
agcaaatacactgcaggtccccagccattaaacacattttacaaagccatgccctacaggtctcccatccatggccggggtct

SEQ ID NO: 91122 - DNA, 75 bp, Homo sapiens
gttcgggtgtctcgtgtgtgaacatcacagggtggcattgtgtgtcccagagtgccggagcgagtcccagaagag

SEQ ID NO: 91123 - DNA, 80 bp, Homo sapiens
gttcagttcgtcatggggctgtttggaaagacccaggagaagccgcccaaagaactgggcatacataatcttgctgctat

SEQ ID NO: 91124 - DNA, 82 bp, Homo sapiens
cggccctgtgggcctgggagctgcctctgaggaacacgccgcagagctctttgacatctgtcttgcccgagccaaggagagg

SEQ ID NO: 91125 - DNA, 75 bp, Homo sapiens
ggctccggcttctgctgttgctcttctccgccgcggcactgatccccacagaatttcgctaaggagtttgtgatc

SEQ ID NO: 91126 - DNA, 143 bp, Homo sapiens
ggtaggctgcgttgaggatctttgctcttccatccgcctttgatcgtcttcctcttcagccatccaggattttttatcaagcagaaatgcatcgaacaacgagaatcaagatcactgagctaaatccccacctgatgtgtgtg

SEQ ID NO: 91127 - DNA, 73 bp, Homo sapiens
tcaaccatcagtccctgctttaaggtgctttacaaggccaagtacggtccaatgtggatgtcctacttagggc

SEQ ID NO: 91128 - DNA, 100 bp, Homo sapiens
tgtcacttaaatatcatccagataaaggaggtgatgaggttatgttcatgaggatagcaaaagcttatgctgcgttgacctgacagttcaagaaaaggag

SEQ ID NO: 91129 - DNA, 100 bp, Homo sapiens
cctgtatgcatggtgtggggttggtgtgattagcttcgcagtctggaaagctttaggagttcacagtatcgtctggggaatatttttcatcttagttgca

SEQ ID NO: 91130 - DNA, 83 bp, Homo sapiens
ctcagaggcaaagaaagctcatcacagctcacctcgcaaaggatctccttcatccctctccagaagaggagaagaggaaacac

SEQ ID NO: 91131 - DNA, 80 bp, Homo sapiens
agattctctcctgaagtcccagatagtgaattcctaagaagaaaataatggattgcatattagttgttctctaagtggac

SEQ ID NO: 91132 - DNA, 100 bp, Homo sapiens
aggacgagcccaagagcggcgaggaggcgctcatcatcccccccgacgccgtcgcggtggactgcaaggccaagtggcatcagagctgagtgatggacga

SEQ ID NO: 91133 - DNA, 74 bp, Homo sapiens
gatgccaagtgtgtggctgaactgcagaaagagatctgagtattgatgccatggatgtggccggagaacagcag

SEQ ID NO: 91134 - DNA, 134 bp, Homo sapiens
ggccgcctcagcagccggctgcaggccagagagggcctcgggaagagatgcgaggatgacaagggatcgcttacacctgagacgaactacagaacagcacgtaccagaggtggaagtccaagtcaaacgcagaa

SEQ ID NO: 91135 - DNA, 149 bp, Homo sapiens
ggtgttcaaacagcactgccaaatagcagaagaataccatgaggtcaaaaaggaaatcaccctgcttgagcaaaggaattcagggcgacagctcagtgaagtcttcattcagttaccttcaaggaaagaattaccagaatactatgaat

SEQ ID NO: 91136 - DNA, 75 bp, Homo sapiens
tgccctcctggttcggcctccccgcgcactagaacgacaatgcagatcttcgtgaagactctgactggtaagacc

SEQ ID NO: 91137 - DNA, 100 bp, Homo sapiens
gatgcctcgaactaaacaaattcatcccagaaatctaagagccacgagactcaaacaacttgctgggaccatcccaaaatgacagagctctaccagtctt

SEQ ID NO: 91138 - DNA, 98 bp, Homo sapiens
ctatgtgaagaggaagaagatgaagatgaaggagaagctgcagatatggaagttcctcagtttgaaactacatgtaattacgtagaagctacactcga

SEQ ID NO: 91139 - DNA, 108 bp, Homo sapiens
cggccacggaggcaccatgaagaagtcttactcagtgaacacttgtcctgctccttcacctttttcttgcatggagacagcaatgtttgtaccagtgtggaaattaac

SEQ ID NO: 91140 - DNA, 50 bp, Homo sapiens
gagccagatccgcatgtgcaagcccccggatgtggaagatgtgaaatttg

SEQ ID NO: 91141 - DNA, 100 bp, Homo sapiens
cccccagattctgctgtgtgactacctggagaaagaggtcaaggggacagagggacttggactggctttggcccaataatcagagtggcagtgagcaaag

SEQ ID NO: 91142 - DNA, 51 bp, Homo sapiens
agcacgaaaacaagtccgacagtgagaatgtttcagaatggcttcggttat

SEQ ID NO: 91143 - DNA, 100 bp, Homo sapiens
ccatacgcgctctccctgtttagggtgacagaaacgaggaggtcagagccgtgggccagggcgtgctacgagcgctggagagccggcagcctgagggacc

SEQ ID NO: 91144 - DNA, 90 bp, Homo sapiens
gcagcagcagcattagcagcagcagcttctctcaatgctgagtagacaagtaaatttttgtgaaacattgcagatgttagatggatttgg

SEQ ID NO: 91145 - DNA, 82 bp, Homo sapiens
ggagaactgccttctgaaaggtggaatcctactcagaatgtgagaagaggtgcagtatattcaggctgagaaaaacaacaag

SEQ ID NO: 91146 - DNA, 99 bp, Homo sapiens
catcgtggtgtttggcggcggcaacgagggaatagtggacgaactgcacgtgtacaacacggattgagtgccatctatggggggacatatatgctgaac

SEQ ID NO: 91147 - DNA, 75 bp, Homo sapiens
ggaggatggtcctgatcagcagcagaatcttactgaacagttccttaatagcaagtttatttctgatcgtgaaag

SEQ ID NO: 91148 - DNA, 100 bp, Homo sapiens
ctaattgcttttctcgtcctgagcagacgctgccacatagtccccaaacggatgttgccttcctggagaaactgattaaagatgatatagagcgaggaag

SEQ ID NO: 91149 - DNA, 82 bp, Homo sapiens
aagtggatttccggtgaaggatgggcggagaaagattctgccagaagaagaggaatcatattgacaggtcatgaaaatgaga

SEQ ID NO: 91150 - DNA, 83 bp, Homo sapiens
gaggtttcagaagacgaggcagacgtggctcctgctgcacatgtatgacagtgacaaggcactaaagcaatcttcaaccgaac

SEQ ID NO: 91151 - DNA, 78 bp, Homo sapiens
ttaagactgtgaaaaggctggtgaaagttaagggtttggaatcacttgctaggagtcttgtctctctgccacccagga

SEQ ID NO: 91152 - DNA, 75 bp, Homo sapiens
ctggcgccgggtcccgcggggaaattgacttaacatcctttgtgacccactttgaatgggacatggccaaatatc

SEQ ID NO: 91153 - DNA, 100 bp, Homo sapiens
catgttttttgctcccacagtgctaggcttggcccgcctaaggcactgggtgtacctgctttgcttctctgcagagcagcccgacggccatggaggctga

SEQ ID NO: 91154 - DNA, 83 bp, Homo sapiens
cactccactacatccatgatgggatcggagccatgctaacgtcctggagggcgactccatggatcaggacgtcgaaagcccag

SEQ ID NO: 91155 - DNA, 100 bp, Homo sapiens
cagcggcaaggtggagctgagaggccccttcatggctgtgctctttgccaaactcgagaacatgctgcagaactccgtctatgtcaacttcctgctgacg

SEQ ID NO: 91156 - DNA, 101 bp, Homo sapiens
ttggactcagatggctttctcactgaaaactctgaagaagaagctatggagactacaccagccaaaggaaagaaagctgcaaaagttgttcctgtgaaagc

SEQ ID NO: 91157 - DNA, 98 bp, Homo sapiens
taaagatgctgttgctctctgtgaactctttaactggctggagaaagaggttttgatacttatagaggactcccttcaatttccaatggaaattatag

SEQ ID NO: 91158 - DNA, 74 bp, Homo sapiens
tcagggccacggctttagcggtgtcttttgcggacaaattattggattccagcacagtgactcacttattcaag

SEQ ID NO: 91159 - DNA, 95 bp, Homo sapiens
tcacaataagagcagaggatggaacacttcagtgcattcaagatgtgtgcaacagcaccgatcttccggaagtcgagatcattagcctgctggag

SEQ ID NO: 91160 - DNA, 75 bp, Homo sapiens
aataggtgtatcaagtaatggtgcaaagcctgaaatgatgaggagtctgatgaggaagctgtgaagaaaaccaac

SEQ ID NO: 91161 - DNA, 100 bp, Homo sapiens
gtcttccagaaggctgtagaccagagtatcgagaaggtggattctccacagttttcctcgtgcgtactcacggtggaatccgatgtgcattgaagcgaat

SEQ ID NO: 91162 - DNA, 100 bp, Homo sapiens
cctagaactacccagagcaagaccacagctggtgaacagtccaggaggtggtccaggccacgctggtggtcctggccttggccatggtgcccatcctgct

SEQ ID NO: 91163 - DNA, 100 bp, Homo sapiens
ctcatacagagattgaaatgttccttagaaaggagcagcaggctgctgagaactagccctagacctctgcgtgagggttcttctgccgaagacatcacca

SEQ ID NO: 91164 - DNA, 75 bp, Homo sapiens
ggagcgcgccctgcctgagaaggagcccctcgtcaggtttaagaaaatctacgaagaaacgcagtgagtctccac

SEQ ID NO: 91165 - DNA, 98 bp, Homo sapiens
ttacattcagttcctggactccgtggctgggagtcctccgtcagcatcagctccggctccggtgtcctccttctctcgcacttctatcacgccatcca

SEQ ID NO: 91166 - DNA, 88 bp, Homo sapiens
ggattacaggcacgcgccaccactcccaggtggtgatgatgtccagcaactctgtgaagcaggagaagaggagtttttggaaatcatg

SEQ ID NO: 91167 - DNA, 98 bp, Homo sapiens
cagaatggacaagcttaataaaataaccgtccccgccagtcagaagttgagatatccttggaacagaagatcttattgtggaagtgacttccaatgat

SEQ ID NO: 91168 - DNA, 100 bp, Homo sapiens
gtcgcctgccaccgagccgggcccacctccccaccaaggaaggtccttctctgcattccaggcagctccaccaaagtctgcgtgcaacgcccttcatttg

SEQ ID NO: 91169 - DNA, 90 bp, Homo sapiens
gatgtctgacaacgtggatcgttgttttgaaacgtgtgagctaccacgccttgcctgagttgatcttctacaagagttcaaacaaaaaac

SEQ ID NO: 91170 - DNA, 98 bp, Homo sapiens
aagtttcagaaatgtctccatgaagacaagaacctggtccatgttgcccatgaccttatccagaaactctctcctctgtgtcagcgtgttatgatgcc

SEQ ID NO: 91171 - DNA, 100 bp, Homo sapiens
attgactatgctgaattggtgtttatgacttaattcagtgcacaaatgagatgaatgtgaacatcccacagttggcagacagtttatttgaaagaactac

SEQ ID NO: 91172 - DNA, 50 bp, Homo sapiens
ctcatcaatgctgtcgagcttaagcttaagatctccttcagcgagacagc

SEQ ID NO: 91173 - DNA, 51 bp, Homo sapiens
aaactacaaacaagacttcgcaggcaagtgaaccggagcaaacgacttccg

SEQ ID NO: 91174 - DNA, 97 bp, Homo sapiens
cgacgtcttgcctgtgtcccacttgttcgcggcctatagaaaccaaggtgtatgttggtaacctgggaactggcgctggcaaaggagagttagaaag

SEQ ID NO: 91175 - DNA, 96 bp, Homo sapiens
cctgaatggcgggaagtgtgaagcggccaatggcacggaggcctgcgtaatctccaatgaacactcacccaaactccagatccggagtcatagtta

SEQ ID NO: 91176 - DNA, 75 bp, Homo sapiens
aaaagagccctggaatgtgaagagacaggaggcagcagacggacatccagaagcgatccaagcagcggaagttac

SEQ ID NO: 91177 - DNA, 87 bp, Homo sapiens
gcttcagcgtcccggcgccgtcgcgccactcctccgagtggataatattaatgcagctgtgatggatttgaaaaaaaagaagatccg

SEQ ID NO: 91178 - DNA, 100 bp, Homo sapiens
acctgcaggaagtatcgctaggaatagtgctgccgctaagtatttgacaaacagaggatctccacggtgaaagatccattcattgatatttcacttccta

SEQ ID NO: 91179 - DNA, 50 bp, Homo sapiens
atgatcctcactccttccaccacaacacagtcactcctggcggcaaacca

SEQ ID NO: 91180 - DNA, 76 bp, Homo sapiens
ttgctggtgccttcattcatgaaaagcatgcccatacgattaaacctgcaatgaaactagtgatcgagaagatggc

SEQ ID NO: 91181 - DNA, 100 bp, Homo sapiens
atttgggaacaactggtcgtcttcagttaatggcaagacttgcagagggtgatggcccgctccctctccccacccccggagctggaagaaagggatgtgg

SEQ ID NO: 91182 - DNA, 98 bp, Homo sapiens
tgaagaagcagttccacaaagccagccagattctgattctggatctgactcagattctgatcaagagaatgctgcctctggcagtaatgcctctggaa

SEQ ID NO: 91183 - DNA, 82 bp, Homo sapiens
agcgggagctggacggcgagcgcgagcggcgcgagaaagccaagcccttattccgatctacacagagccttcccactgtgga

SEQ ID NO: 91184 - DNA, 82 bp, Homo sapiens
gttccgagatgccccatcgcaccaacgaagcaactgctgagcaggattaataagaaaattccccggggaccaccttctcctc

SEQ ID NO: 91185 - DNA, 50 bp, Homo sapiens
gattccgggagcacagttccgccgagcaagtatatcgcgtcaacacagcg

SEQ ID NO: 91186 - DNA, 75 bp, Homo sapiens
tccagaccaggtctcatgcttggtgcctggtgccagactgcaaccctgctaggggtccttctcctgggttatggc

SEQ ID NO: 91187 - DNA, 82 bp, Homo sapiens
actcatacaggtcggagaggtcagcaacagggacatcgtggagacggtgctcaacctgcaaaatgatgcttcaacacccagg

SEQ ID NO: 91188 - DNA, 89 bp, Homo sapiens
gagccttcatagggacagccgcccctggtgcacacaccctcgtattctcctgcccttccccaggaccatggccaacctggagcgcacct

SEQ ID NO: 91189 - DNA, 90 bp, Homo sapiens
cgagtacctcaggaagctcagcaagactggagtccctgatggaattatgcagtttattaaggtgaaaggaaagcaagccaggatggatat

SEQ ID NO: 91190 - DNA, 98 bp, Homo sapiens
acacagttgaagctccaggaggtcaaaaggatgtaataggaaaagcactgcagtaccttggaacatttggtgaattgagcaacgtagagcaagttgtg

SEQ ID NO: 91191 - DNA, 95 bp, Homo sapiens
aacaccagatgatgaccctgagcaaggaaaatctgagggacaaaactttcggtttgaagaataagaaaggagcaaagcaacagaagtttatcaag

SEQ ID NO: 91192 - DNA, 100 bp, Homo sapiens
tgagaaaagcgagaccgcgtgcgaggaccggtgatggcccgctccctctccccacccccggagctggaagaaagggatgtggccgcatactcggcctcct

SEQ ID NO: 91193 - DNA, 75 bp, Homo sapiens
ggaaaagttaaggcactggatgaagaagttcacatggacggaaagtcccgggattctttgcgagccttcacccgg

SEQ ID NO: 91194 - DNA, 75 bp, Homo sapiens
gcgctgttggaaagcggctgcgtagacaacgtcctgcaagtcggtgctggagaatctggtaaaagcaccattgtg

SEQ ID NO: 91195 - DNA, 100 bp, Homo sapiens
gaagctgccgccgttgcctccgccgccaagagtgagcgagcggacccgcgatggagtgcctggaagagctgggatgtctggttgagtcctatggcatgaa

SEQ ID NO: 91196 - DNA, 100 bp, Homo sapiens
actgcctcactgagcaaccaagagaagaattttaaatcgtttctccaaagacattggacacttggatgatttgctgccgctgacgtttttagatttcatc

SEQ ID NO: 91197 - DNA, 82 bp, Homo sapiens
gaaggagcggccgggagcccgccgcgctggtagcgaggctgggaggcggcagaatgcagccagaggagggcacaggctggct

SEQ ID NO: 91198 - DNA, 101 bp, Homo sapiens
gtgttagacatcgagatcaatgaacctttagatgaatttacagtgatgcaggttctgaatgctgatgccattgttgtgaagctgaactcaggcgattacaa

SEQ ID NO: 91199 - DNA, 100 bp, Homo sapiens
cggtatgttgccgctgcgttgagttgtggaagatatcaataagcgcagagagccgctccccagcctggaggctgtgtatctcatcactccatccgagaag

SEQ ID NO: 91200 - DNA, 101 bp, Homo sapiens
agttgtgagtctctttcctgtttacctccagtgtcccttcttccacatgaaaaggataagggaaattcccaagcttatgaaagaaatttcatcaacaaaga

SEQ ID NO: 91201 - DNA, 100 bp, Homo sapiens
gccatgtcataggaaaaccacacagtcctgttacagaggaatgcagtagcatggatagttgatggtgaatttggagcagacgacttctgtttaacttaaa

SEQ ID NO: 91202 - DNA, 96 bp, Homo sapiens
cggggaccgccgggagcgcgcggatgtcggtgttcctggggccaggaaccagctgttgcacgtgcccttgaggcagcaccaggtgagctgctgtga

SEQ ID NO: 91203 - DNA, 100 bp, Homo sapiens
gctggaaagtctggactggctccccgtgtggatcaggagaagtgggcccagcgttcattcaggagccatgtggctagaaatcctcctcacttcagtgctg

SEQ ID NO: 91204 - DNA, 100 bp, Homo sapiens
cggcgcggcgctggcgctgccggagctgtcgacccggcctggcgccggactaggcagaagctcctcctggggtagagacagatcttattgatgttggatt

SEQ ID NO: 91205 - DNA, 75 bp, Homo sapiens
gcgattcttccagcagatatgaagagccctatgagtttgtctctctggaatggctgcaaaagtggttggatgaat

SEQ ID NO: 91206 - DNA, 51 bp, Homo sapiens
gccgaggaacccggctgaggcggcagttgagaagctgatgtctcctcgact

SEQ ID NO: 91207 - DNA, 75 bp, Homo sapiens
gccacacacaccatcatggtcctggaatcccttggcaccatgtcctgtgtgcattataaattttcctctaaactc

SEQ ID NO: 91208 - DNA, 99 bp, Homo sapiens
ccccacctcaccggggccccgccgggaactggggcccccctggggactacccagatattatgaacagtgagaaaagttatgattcattgcccaatttta

SEQ ID NO: 91209 - DNA, 50 bp, Homo sapiens
cgtgtgctccctgcctctcacggtgaaaattatctcagtgaacgaggatg

SEQ ID NO: 91210 - DNA, 90 bp, Homo sapiens
gtccaaggtggagaaaccaggatctatttggatttgccacagaatttcaagatatttgtgagcggtggatacccttcgccatgttatcag

SEQ ID NO: 91211 - DNA, 75 bp, Homo sapiens
atgatcgaggccacagcccaggtcacagtgaaaggtggcacctctgagcatgagaagctgtgccgggcccgggac

SEQ ID NO: 91212 - DNA, 88 bp, Homo sapiens
aaacttctttcacatggtacaaatattgaagaatgcagcaagacttgtgtatgcggatacctgcttcagtaccatcaagttaaaagca

SEQ ID NO: 91213 - DNA, 75 bp, Homo sapiens
catgcttgaactcagcatacaggatgtacagctaagggagaacattgagcaattcttcaccaaatttgtagatga

SEQ ID NO: 91214 - DNA, 100 bp, Homo sapiens
ataaagttctagaaacaacagtggagatattcaataagctcaaccttgaacagtggtcagaatggcttcaacattcctcaagtcaccccatgcccagaag

SEQ ID NO: 91215 - DNA, 98 bp, Homo sapiens
gaaagagattccttgcagagacagctcaacacggcacttccacagccaccagtggtaaaaacagagatggtaacaatttctgatgcctcacaaaggac

SEQ ID NO: 91216 - DNA, 100 bp, Homo sapiens
ttacagccgctcgtcagactccagcagccaagatggtgaagcagatcgagagcaaggccttcatggtgaaacacctcttggagtatacccaggcaacaga

SEQ ID NO: 91217 - DNA, 75 bp, Homo sapiens
cgaggttcgagtgttgcagagcctgcggggcaagatcttctttaaaccagaggagttacgccaggccctcatgcc

SEQ ID NO: 91218 - DNA, 100 bp, Homo sapiens
cggcttatcgaacagagccgggagttcaagaagaacactccagagcgcgttccttcacctcgggcagaataactttgcagaagcccacaggttcttcaca

SEQ ID NO: 91219 - DNA, 87 bp, Homo sapiens
tttttcttcagctttatcagaggtcatgcttcaccccttcctccatctgctgcacctaccactgattctacagattccataacagga

SEQ ID NO: 91220 - DNA, 51 bp, Homo sapiens
gcctcccaagtagctgggattacagatccatggaacccagtgacatgcctg

SEQ ID NO: 91221 - DNA, 100 bp, Homo sapiens
ctgaacgtctctccctgtcctagctctgtaactgtttacattacagatgtagagctaaaacgactgaaggatgctttcaagaggacctgtggactctcat

SEQ ID NO: 91222 - DNA, 97 bp, Homo sapiens
gggggcaagcggaaggtgatgcccaagatggaccagtctcctttagcattggaaacaccaaatcgggtatccttgggacagttatggttagagctgc

SEQ ID NO: 91223 - DNA, 98 bp, Homo sapiens
agagacaccagcttcagtggcctgtcgttggaagagtacaagctgatcctgtccacaggtatctgcccaaactggaacttatgctgtagacatttctt

SEQ ID NO: 91224 - DNA, 75 bp, Homo sapiens
cgcctcctctcctaggtgccggccgggagggcggccgcagcaggctttaatgactgatgaaacaatatccaatgt

SEQ ID NO: 91225 - DNA, 50 bp, Homo sapiens
ggaaaaagcagtaaagccagaggaagaggctgggaggcggcagaatgcag

SEQ ID NO: 91226 - DNA, 99 bp, Homo sapiens
gaacgaggtgcccagctcccgtggagaaagcttaaggacaccacgccagtgctttcctgccttccttccgaggcattgaatgccccagaggagcccgaa

SEQ ID NO: 91227 - DNA, 100 bp, Homo sapiens
tttctgacgctagcatcagcacatgtaggggtctaagaagctatggagatattttgcatagaatgaaggatctctgcagatacatgaacaactttgatag

SEQ ID NO: 91228 - DNA, 80 bp, Homo sapiens
gaggtggccggagccgtgtggaccaggaggagcgcttgtgtggaccagttgacaaagatccaaactgaattacaagagac

SEQ ID NO: 91229 - DNA, 76 bp, Homo sapiens
aggagggtgcattctgggtgatgacatgggacttggaaaaacagtacagatgattgctgtactagtggataagatg

SEQ ID NO: 91230 - DNA, 78 bp, Homo sapiens
ttgacagcacttttcaaaaacctggaatttcacgtttctgaagattttaataaaatgaactttatcaagacctaccca

SEQ ID NO: 91231 - DNA, 100 bp, Homo sapiens
actgcccacggtcattatgagaaacaagcaacggaaagatgctgaaggatgggagaccgttcagagaggaaggcctattcgttctcgatcaacagcagtg

SEQ ID NO: 91232 - DNA, 100 bp, Homo sapiens
gtgtatcaagtaatggtgcaaagcctgaagaattacgtatggaaattgcaaaacaagaattaatcgctcatgcccgggaagcagcatccagggtcctgag

SEQ ID NO: 91233 - DNA, 75 bp, Homo sapiens
ggagccctgggcgcgggggcggcgtgtcaggtggttgcggagctgagtgaagacatttccacctggacacctgac

SEQ ID NO: 91234 - DNA, 75 bp, Homo sapiens
ggttcgagatcacatgcaggactctttcttaatgcagcctgagggtaaagttctttacaaagttcgctggaaagg

SEQ ID NO: 91235 - DNA, 98 bp, Homo sapiens
ggagatgggcctactcgcccgccaccctgcgctgccgccgctctgaggagttaaagcctccagggtcgtatagacctccccctcctatgggcaaacca

SEQ ID NO: 91236 - DNA, 74 bp, Homo sapiens
tgtcttcggtggactccttcggcagtccacccaccgccgccgcctcccaggtctggtccttgcactcctgtttc

SEQ ID NO: 91237 - DNA, 89 bp, Homo sapiens
gtcgcctccttgcccgtgaccgtcgctagaactcagttgtgcgttgcggccagtcgccactgcttgaacacctacctcttcatgatgca

SEQ ID NO: 91238 - DNA, 100 bp, Homo sapiens
gctggttcatcccatcagcctggattggtgaaactgaatcacaggagatatttccagcataatggcagaacctgtttctccactgaagcactttgtgctg

SEQ ID NO: 91239 - DNA, 100 bp, Homo sapiens
gctgtactaggactgggaacgggacttccaatagtagtcagacattatcatcctgtcatactatggagccatgtacatcagatgaatttttccaagccct

SEQ ID NO: 91240 - DNA, 75 bp, Homo sapiens
cggccaagaggcaaaggggaggttacgcagcaaaccatccagaaggaaggtgctcgggtcttcggggcactgggt

SEQ ID NO: 91241 - DNA, 75 bp, Homo sapiens
gcaaacagattcagtggcctgcattgagtcctgtgaagataaatcagattagcttggatgaaagtggagagcaca

SEQ ID NO: 91242 - DNA, 95 bp, Homo sapiens
gcagctccgaggccgcggcgaaaccaggtggagtccgaggttcggaggagtatcagagttcccatggagaatgttgcaacaattgctgattgtgc

SEQ ID NO: 91243 - DNA, 75 bp, Homo sapiens
gttagccccgcgcagccgccggcgtcgccgccatggacctagactgtgccctgtccacggtgcctcctgcatgtc

SEQ ID NO: 91244 - DNA, 97 bp, Homo sapiens
atgaagcggttggcaccactgaagtgaccgaatgagaaggatttgaaatttccctgcccaagaatcaacaggaactctgtttatagaccagaaatgt

SEQ ID NO: 91245 - DNA, 100 bp, Homo sapiens
cgaaagtccgtgaagaaaggctttgactttaccctcatggtggcagcagataaacactgttgatgtgttaactacgatgggagctattcctgcagggttc

SEQ ID NO: 91246 - DNA, 100 bp, Homo sapiens
ctgtcggaaatagaggcttcgtgtttggaggcagatatcgagtgtttgaagtggtggaacgtgtagaagagttaagaaggaagtggccagtagcgtgggg

SEQ ID NO: 91247 - DNA, 100 bp, Homo sapiens
gcccaccccgcccccagcccgcagcagcatgctccaccgaaggccaggtgctggagaatctggtaaaagcaccattgtgaagcagatgaggatcctgcat

SEQ ID NO: 91248 - DNA, 83 bp, Homo sapiens
cccgccccccaccgccgccccctccggcgtgttcatgcccccggggtgacttaagagattaaaattaatttggttgctgttgg

SEQ ID NO: 91249 - DNA, 75 bp, Homo sapiens
agacccggaaggcttcaaaggctgtcgcaaggaggaagggcgacatggagtccaatgggaaatacatcaccaaat

SEQ ID NO: 91250 - DNA, 51 bp, Homo sapiens
cttttcaggcatcctcatataattaaactgcctttgaactggccacaggtg

SEQ ID NO: 91251 - DNA, 90 bp, Homo sapiens
gtctgatgccagtgccaatgagtgaagaaaaaatgactgctgcccgcattagaaaatgccacaagtgtgggactggcctcatcaaatctg

SEQ ID NO: 91252 - DNA, 100 bp, Homo sapiens
caagaggatgagcagctgctcttacgatttaaatattattctttcttcgacttgaatcctaaaaatctttggaagaactaccagaaacgagtgggaaaac

SEQ ID NO: 91253 - DNA, 101 bp, Homo sapiens
agaagtagacatggcgagcgactccccggctcgaagcctggatgaaatagatctctcggctctgagggatctttcgaagatggtttggctgccttggagat

SEQ ID NO: 91254 - DNA, 74 bp, Homo sapiens
catttagattggattctgaatatcaggcttcagaaactagctttaagaaataattctgcatctacaactcaaca

SEQ ID NO: 91255 - DNA, 50 bp, Homo sapiens
gccagtgttgtccctactgcataggaactacggaagaaaatttggacagg

SEQ ID NO: 91256 - DNA, 75 bp, Homo sapiens
agtgatgtcttccagactcggtgctgtacccgccgtggaataacactcccatggatgaagcactgcactttggac

SEQ ID NO: 91257 - DNA, 99 bp, Homo sapiens
aagatgtttgagcatgacttccgttggactgatggcagcacactgaataactgaagtgaagtgatggactccgatttggagagtagtaagacgtgaaag

SEQ ID NO: 91258 - DNA, 83 bp, Homo sapiens
cctcagttggaagcagccgatccagcctgcggagcctgtggggcagcaggaggccactgtctgcagctcccgtgaagatgtcc

SEQ ID NO: 91259 - DNA, 96 bp, Homo sapiens
actacagttcatcaacatcaactacgtccctctgaagggttatgggacccacctgatgaaccacctgaaggagtatcacatcaagcacaacattct

SEQ ID NO: 91260 - DNA, 100 bp, Homo sapiens
cgcccggagcaagcggagctcccccaagagccggaaaggtgacagagttagtccttgataattgcctgtgtgtcaatggggaaattgaaggcctgaatga

SEQ ID NO: 91261 - DNA, 100 bp, Homo sapiens
ctggcctccgtgacgcggcctcctccgcgcctcgcggcatggcgtcggaggggccgcgggagcccgaaagcgagtggtccatcaagattcacaatggtag

SEQ ID NO: 91262 - DNA, 75 bp, Homo sapiens
gaaaattaagcagatgctccagtttgagaaacctggatctgcgatctgtttgtgtggtcgtggagtcggactttg

SEQ ID NO: 91263 - DNA, 100 bp, Homo sapiens
atggtgacctcctggagaacagggacgtgtggtgtttctctttgtatttgtcttttgttcccagaacagactgctctggcccatttagagtctcttgcag

SEQ ID NO: 91264 - DNA, 75 bp, Homo sapiens
cggcgaacgcggagagcacgccatgaaggcctcgggcacgctatggcctgctgtgcagttagccaacttctacct

SEQ ID NO: 91265 - DNA, 75 bp, Homo sapiens
gagactgtgttggctgatgaaccgggactactgggtcctaaggcgtattttggggtcaaagcagagtgaacaccg

SEQ ID NO: 91266 - DNA, 83 bp, Homo sapiens
cgccgtcgccccgccgcgccgcgctccaaccgcctcctcctcctcagtaacgcggtgagaaagatcagtctaaagaaaaggag

SEQ ID NO: 91267 - DNA, 100 bp, Homo sapiens
atggaacaatcattagttcagtgcagtgtctgacttgtgacagggtactatataaatctgtgccagaaaatatataaagggcccctgggctgctctgaaa

SEQ ID NO: 91268 - DNA, 89 bp, Homo sapiens
aaaccagctgaggtgtccgtaaagattccagagaagcctgtgaacaaaagcaagcaccagaagcaccaggcttttgaagcagagctgca

SEQ ID NO: 91269 - DNA, 74 bp, Homo sapiens
taaccatcagaccttttgcaaacaggatgcaggcgactgagtcaaagaccaacaccagaagaactagaacaacg

SEQ ID NO: 91270 - DNA, 100 bp, Homo sapiens
gggcgccgggcctcccagccgacatgtctctagtggcggaagccttcgtctcccagattgcagggtgacgcagacttacgatgcaggtgcttgtatctac

SEQ ID NO: 91271 - DNA, 82 bp, Homo sapiens
caacgcctggctcggagcagcagcctctgaggcccttgatgagcctccctatttgacagtgggcactgatgtgagtgctaaa

SEQ ID NO: 91272 - DNA, 116 bp, Homo sapiens
gaaaactcgtgtccatcaaaatccagatgctggatgacacccaggaggcatttgaagttccattttagaaagagcgttttcgctacgtaaagcacattcgataaaggatatggaaa

SEQ ID NO: 91273 - DNA, 100 bp, Homo sapiens
cctgggatggcctcgatcaccaggaggaagttaagtcttcagagcctactgaggatgtggagcccaaagaggctgaagatgatgatacaggacccgagga

SEQ ID NO: 91274 - DNA, 52 bp, Homo sapiens
gctcacaaggacattgctaactggcattgagaatgccagcgacattgctttg

SEQ ID NO: 91275 - DNA, 80 bp, Homo sapiens
aggctgcggggcgcggagtcgggagccgcggcgagtcctttgcacatgttggcaacacacgcatccgcatcggcctccct

SEQ ID NO: 91276 - DNA, 82 bp, Homo sapiens
ggcctctcggcctctgccggagaaacaggtgaagatcatgacggagaaggaactcctggccgtggcttgtgagcagtttctg

SEQ ID NO: 91277 - DNA, 100 bp, Homo sapiens
ctaagatgctgccgactctgggcggcgaggaaggcgtctcccggactccattaataatatacctctttcatttcctaattgactatgctgaattggtgtt

SEQ ID NO: 91278 - DNA, 100 bp, Homo sapiens
ccaagtgaattattctgccgtggctgatggagagcacttttcaggattagaagaggctgtgtatagaaacatacaagcttgcaaggagcttgcccaaacc

SEQ ID NO: 91279 - DNA, 83 bp, Homo sapiens
tcacggagaagtccgcctgtaagagacctgcctagagctggaacgttacctccagagcgagccctgctatgtttcagcctcag

SEQ ID NO: 91280 - DNA, 101 bp, Homo sapiens
gcgctactcaggcgctggagaaatacaacatagagaaggacattgcggctcatatcaagaaggtgttgacttcaaaatcaaaactgtagagctaagaggaa

SEQ ID NO: 91281 - DNA, 100 bp, Homo sapiens
aagaaaagtgactacttcatgcctttctcagcaggtcactcctggaagcaaggcggctctagctaatttatgtattggagatgtaatcacagccattgat

SEQ ID NO: 91282 - DNA, 99 bp, Homo sapiens
agcctcccaggtagctgggattacagaaatgggacgtcggtcatcagatactgaagaagaaagcagaagcaagagaaaaaagaaacaccgtagacggtc

SEQ ID NO: 91283 - DNA, 75 bp, Homo sapiens
agcgcctggcctgcgcgccgctgcccgcgccacaggaatactcccccagttgcaagaggcgcaggaccgtggaag

SEQ ID NO: 91284 - DNA, 74 bp, Homo sapiens
aggagctagctgaaataacccttgatcctcctcctaattgcagggtgttaaataccacattatttgaaagctgg

SEQ ID NO: 91285 - DNA, 100 bp, Homo sapiens
caaatggcggacttcgacacctacgacgatcgggcctacagcagcttcggcggcggcagaggaaaaactgttcttgaaaaccacctgctatttagtcatt

SEQ ID NO: 91286 - DNA, 75 bp, Homo sapiens
gttttcccacgctaggagctaccacaacagtccctgaagaggaaggagaaggaatatgagcatgaaatggagcgg

SEQ ID NO: 91287 - DNA, 90 bp, Homo sapiens
cggcttccagctcaatcctgccggttgcgccttcttcctggacatgaccaactgatgccttcaattaagttgcagagttctgatggagag

SEQ ID NO: 91288 - DNA, 100 bp, Homo sapiens
caataaaacatctgaacttgatatgtctgaaagcaaaacaagaagtggaaaagtctttcagaataaaatggcaaaagagatttcactagcagacctccag

SEQ ID NO: 91289 - DNA, 100 bp, Homo sapiens
ctgggcatcaccaacatagccatcgacttcggggagcagatggcccctgagttctgcagcctcgaggaaggcctgccctatctggacatggtgattgcag

SEQ ID NO: 91290 - DNA, 97 bp, Homo sapiens
ccttttacgtcaccctttatggcactaatgcagattcccagactctgccactggaaatttttctggatatgccgcagaaggatccgtgccagaagca

SEQ ID NO: 91291 - DNA, 96 bp, Homo sapiens
aatgcaataaaacgcttccatctttatccagagatatgcacccaatgtccagggagcgtgcaaaatttgtcaaaagtggccttttattgtaaaacg

SEQ ID NO: 91292 - DNA, 100 bp, Homo sapiens
ctttttgcagagctctgaagggagtttccatagcaaggcgtgtacaagatccattagctgagctagtgaaaattgagccaaagcacattggagttggaat

SEQ ID NO: 91293 - DNA, 82 bp, Homo sapiens
tggagcctcagttggaagcagccgatccagcctgcggagcctgtggggcagctgaactttgacctggaccggggcgtgtttc

SEQ ID NO: 91294 - DNA, 83 bp, Homo sapiens
ctacagcacctatcacttgttccctccaagacaactgaatggacattgcacttatcttaccaagctcttctgaaggttctatt

SEQ ID NO: 91295 - DNA, 82 bp, Homo sapiens
ggagaattatggaaacctggtctcactggtagaaaagaaacgctttactgaagaggccaccaaatacttccgggagagagtc

SEQ ID NO: 91296 - DNA, 97 bp, Homo sapiens
tctcgtgcggagacaacagcaggggtcagctgggccgcaggggcgcgcagcgcggggagctgccaggcatgactgggatcctccagacagaaaagtg

SEQ ID NO: 91297 - DNA, 83 bp, Homo sapiens
cgctcggcgatggtaggcgtccctggagcggccgccttccagcagagcgcctgctcgctgtgcccccgggttatgacgacccc

SEQ ID NO: 91298 - DNA, 101 bp, Homo sapiens
tgatgacagctgtgtccttaacaaccaggccccaggtagaagaccatgatggagaaggtgatgtggctggagatgatgatgatgacgatgatgattcacct

SEQ ID NO: 91299 - DNA, 90 bp, Homo sapiens
cgaaacgcgagtccggagaggagttccgcatggagaagttgaaccagctgtgggagaaggcccagcgaagttgacgggcgccgacctgaa

SEQ ID NO: 91300 - DNA, 90 bp, Homo sapiens
aaagaatgatgatggcaagaaggcccttgtgttggactgtcattatccagaggatgaggccaagccgtacaaaaatgatccagaaatttt

SEQ ID NO: 91301 - DNA, 100 bp, Homo sapiens
gcccgctgtcaccgccatggctgccccgtgtttgctgcggcaaggacgagccggggcgctgaagcacaagctccgggtggataaggcagctgctgcagca

SEQ ID NO: 91302 - DNA, 74 bp, Homo sapiens
tggaagataaatcggcacaaaattgtcaccgagaacagagaactacgatgacccgcacaaaacccctgcctccc

SEQ ID NO: 91303 - DNA, 100 bp, Homo sapiens
gggacactcctgaagtcgggaaatggaagttcacaaatgggtgctaccatagtagatgctttggataccctttatatcatgggacttcatgatgaattcc

SEQ ID NO: 91304 - DNA, 90 bp, Homo sapiens
caaacctgaaagaccccagttatggatgggaggagcgagaacccgagcagcgccatgagcaacactaccgtcgtccccagcactgcaggt

SEQ ID NO: 91305 - DNA, 100 bp, Homo sapiens
ttctgtttagatgaccagtctcctgttctggagaccagaaggccaaaatcaaaagtatgggcaggcttgatttctttagaagactccagcggagaactgt

SEQ ID NO: 91306 - DNA, 75 bp, Homo sapiens
tgatcgcctgggtggttgttggcgtgtccctgcagcgaaggatcctggattatatctgtccaagatgcgagtctg

SEQ ID NO: 91307 - DNA, 107 bp, Homo sapiens
gagccgatgagcatggaccatagaagggctcaatgtagaagggtgaagtaccatgcaagcatttcttaaaggtacatccatcagtactaaacccccgctgaccaagg

SEQ ID NO: 91308 - DNA, 101 bp, Homo sapiens
cttgatgatcattgtgtgtattgatcaatggaagaacaaaatctggcctgaaataaaaggtgctggagaatctggtaaaagcaccattgtgaagcagatga

SEQ ID NO: 91309 - DNA, 75 bp, Homo sapiens
acctggagctctacgcctcctacgtttacctgtccatggtcctggctataagtcaccatggcacagcaagctgcc

SEQ ID NO: 91310 - DNA, 98 bp, Homo sapiens
gaggccgtcaaagtgcacagcttccccacactcaagttctttcctgccagtgccgacaggacgccgtggtccttcagcatatctctgtgctgcagaca

SEQ ID NO: 91311 - DNA, 74 bp, Homo sapiens
agacaactccaccaattgtacaggacaaggaagatggggagccaaagaccaagcatctcagagaagaggaggaa

SEQ ID NO: 91312 - DNA, 100 bp, Homo sapiens
tggaggcggcgggatggaggcggcggccggtcaaaatgcagatcttcgtgaaaacccttaccggcaagaccatcacccttgaggtggagcccagtgacac

SEQ ID NO: 91313 - DNA, 83 bp, Homo sapiens
caggcgaggtggccggagccgtgtggaccaggaggagcgctttgatattcactgatggactccaaagaatcattaactcctgg

SEQ ID NO: 91314 - DNA, 83 bp, Homo sapiens
atcgggcggctaggctctctgaggaggctgccacagtgcctcccgcgacgatgcccctcaacgttagcttcaccaacaggaac

SEQ ID NO: 91315 - DNA, 100 bp, Homo sapiens
ggccgcgcactgaggaggcggcggccgacggtggcggcgggatgcagcttgtactcccagagtacctcatccacgctttcttctgtgtcatgtttctttg

SEQ ID NO: 91316 - DNA, 100 bp, Homo sapiens
ccttgtcaaagatgccagatgtgggagacacgccaaagctcccaaggtcagatgggcagacctggaagagaagaaggatgcagataggaaaagggccata

SEQ ID NO: 91317 - DNA, 96 bp, Homo sapiens
gtctgcggaagtccccgaggcagcctccgcggaggagcagaagaaaataaacagagttgtctttgttggaaactttttacgtgtcaataccctctc

SEQ ID NO: 91318 - DNA, 82 bp, Homo sapiens
gagacaattacaaacatgttttatcaatgcagctaagctgcaccacctcgtgagcgatgacgtctgcctgaaggtggtggag

SEQ ID NO: 91319 - DNA, 90 bp, Homo sapiens
gaaaataacttgactgaattacacaaggattcatttgaaggcctgctatccctccagtatttcaataccaagtttccaggcccgaagagc

SEQ ID NO: 91320 - DNA, 82 bp, Homo sapiens
cccattgcacttcagtatctcaggcggcaccctgtccccgaggaggggaccatgacacagaggctactcacagtcgaactac

SEQ ID NO: 91321 - DNA, 82 bp, Homo sapiens
tgaagatcctggtgtcgccatgggccgccgccccgcccgttgtgcctccggagccagcgtggtggccatagacaacaagatc

SEQ ID NO: 91322 - DNA, 75 bp, Homo sapiens
gctcgtgcccgtcttattgatcctggctttggaatatataagctttgacagatccaaatgcttctgctgcccagc

SEQ ID NO: 91323 - DNA, 100 bp, Homo sapiens
gaatttgaccatcttggtgagaaacattaagacctactaccagaaatcttcccaaggctgcagacaccgacggatttgctttgggagccagagtagctgc

SEQ ID NO: 91324 - DNA, 117 bp, Homo sapiens
gttttcttatttagccggagtgagaagcaagaaggccctggacacagcaatatctctgggctttcacaggtgcagcggaactgctgcctgacgctctgcaacttcagcatccccgag

SEQ ID NO: 91325 - DNA, 76 bp, Homo sapiens
tatctacatccgaggggaattctacaatgaggcctccaatctgcaggacctgaaggagaagaaggagaaggtggag

SEQ ID NO: 91326 - DNA, 83 bp, Homo sapiens
gaacgagtgacacttcacatttgtgcttctacaaaaaagaggtaggaaaagtaattggaattgctattatgaaacactttgga

SEQ ID NO: 91327 - DNA, 85 bp, Homo sapiens
acgccgcgctgcgcatctccaacagcgacctgagcgccgcaggtggctgcgatgggacggaagccatgaatggtgccggccctgg

SEQ ID NO: 91328 - DNA, 74 bp, Homo sapiens
aaccggcacctgcacacctggatccaggataacggaggctggtagtgagttgaaactcttggaggaagcaacca

SEQ ID NO: 91329 - DNA, 100 bp, Homo sapiens
catcattaaggacggaggcacggacatggatttgattgacatactttggaggcaagatatagatcttggagtaagtcgagaagtatttgacttcagtcag

SEQ ID NO: 91330 - DNA, 83 bp, Homo sapiens
tgaaggattatttactcgatgatggaactctggtggtttcaggaagagcagcccgacggccatggaggctgaagagacgatgg

SEQ ID NO: 91331 - DNA, 101 bp, Homo sapiens
cctgaatgttcaataggcagctgagcctccacccagaccgaaaaccccagagatcttcaggtaaaataccatgaagattttgaaaaaacaaaggggagagg

SEQ ID NO: 91332 - DNA, 92 bp, Homo sapiens
ccagacgcacacgcataccccagcgcccggcagttatgtattctccgctctgtctcacccagacaatgcagatcttcgtgaagactctgact

SEQ ID NO: 91333 - DNA, 75 bp, Homo sapiens
aaaatgtttgaagcaacaagattgcttgcaacaattgttatgcttgtctggctctgggagaggagtggacagcag

SEQ ID NO: 91334 - DNA, 75 bp, Homo sapiens
cgtggagactcaggacagccaggccccaagctctctggtgatgaattctactctgacgtggccaaaggcatcctg

SEQ ID NO: 91335 - DNA, 100 bp, Homo sapiens
cacctggcacagaggcacggctgtgcagacaccaggaccatgggtttgtaccagttgctggagccccgaatgattgttcgttgcaggaaacaagatttcc

SEQ ID NO: 91336 - DNA, 140 bp, Homo sapiens
cagaaacagaggagttggagttgctactaaaaagagaggtgcctttatctgatgatgatgaaagttacacaggtcaaaagaaatagactggcaaccttattttactacacgcattgtagatgactttggcacacacttac

SEQ ID NO: 91337 - DNA, 100 bp, Homo sapiens
cgtgcccaccgtcttcgaccactacgcagttcatgacgaagaatccccacaagcgcctgggctgtgtggcatcgcagaatggcgaggacgccatcaagca

SEQ ID NO: 91338 - DNA, 75 bp, Homo sapiens
gcagacagcaactgcagcctccggagggctgcggggcgcagaggttcccatccaaccactttgggacgctgacag

SEQ ID NO: 91339 - DNA, 75 bp, Homo sapiens
catggtggacacttttcttcagaagctggtcgccgccggcaggtcagaagacatctctaacccaagaaacagagc

SEQ ID NO: 91340 - DNA, 95 bp, Homo sapiens
aagtccaggaggaagagcatgaccttgttgacgatgacatcaccactgatggctctgagagattcctctgcgaatctgtttttagctatcaagtg

SEQ ID NO: 91341 - DNA, 100 bp, Homo sapiens
gcagaagaaatctggctatcatattccagggtcacccccgagaggacaacaggcatctggaagtgctctctcgccactctgggtgctttactgtctctgg

SEQ ID NO: 91342 - DNA, 50 bp, Homo sapiens
tggtgaatggagatgcagctcagcagtctattatcctcccagtccacaac

SEQ ID NO: 91343 - DNA, 98 bp, Homo sapiens
ggagcagctacattcctcttaataaatcacacaaagaatgaacttgttcaatacaatcaaaggtctaagagtgtaaccagttccagtagcagtagcag

SEQ ID NO: 91344 - DNA, 100 bp, Homo sapiens
cctgccactacaacaaaactgtctcagcaatgtggacctgcaagctgttgtgattttcgaacttgtgtactgaaagacggagcaaaatgttataaaggac

SEQ ID NO: 91345 - DNA, 75 bp, Homo sapiens
cagcatcctccaaagcactgaacgcccggcccaggtgaagaaatctcttagaactggaggtacaaaaagagcaga

SEQ ID NO: 91346 - DNA, 50 bp, Homo sapiens
gaggaactcagccctgattgcggtaactcgggaccaaatgaagatgttta

SEQ ID NO: 91347 - DNA, 50 bp, Homo sapiens
gccaggagccaggggcccagaaggacggttcactgggaaacatcgatgac

SEQ ID NO: 91348 - DNA, 74 bp, Homo sapiens
gcagggtcaccatttgcagcgcaacatggcagttgaccacgttgttcctgagcctgggacaagcctgctcgctg

SEQ ID NO: 91349 - DNA, 82 bp, Homo sapiens
gcccagatcagaagggaacttgatggccggctgcaattggcagataaaatggcaaagatatgtgtcacaaagatgtctacac

SEQ ID NO: 91350 - DNA, 100 bp, Homo sapiens
cctcacggagctgggcgacgagctgaccctgggagacatcgacggagcatcagatccatgctgctgctgactcggagccccacagcttggcacaggctct

SEQ ID NO: 91351 - DNA, 82 bp, Homo sapiens
aaacaccctgcaatctttcagacaggaatgtctgatcacagatacggggatggtggctctactttccagagcacaacaggac

SEQ ID NO: 91352 - DNA, 76 bp, Homo sapiens
ctggcggtgctcgagtgcctgcaggatgtgagggaggtacggaatggccacatcaaaagaatcactgataatgaca

SEQ ID NO: 91353 - DNA, 100 bp, Homo sapiens
tccaaaaacacatctgttccagtctctgcagtctttatggacaaacctgaagagtttatatctgaaatggacactgctgatcttggacttgatattggtg

SEQ ID NO: 91354 - DNA, 75 bp, Homo sapiens
attagcgtctacgaccaccaagcctcgacagacagttttgactgctgctggcagcatcggacaagccagtgggga

SEQ ID NO: 91355 - DNA, 98 bp, Homo sapiens
gtggggatcagacagagattggagagaagggcacctgtgctggttgcacttgctttgattgaatgtggaatgaagtacgaagatgcagttcagtttat

SEQ ID NO: 91356 - DNA, 100 bp, Homo sapiens
atgcgtcaagtacactgaaattcatcctgagatgagttaccctgcagtttgtgaatttttgcagaacaataatttactatcaattatcagagcccatgaa

SEQ ID NO: 91357 - DNA, 51 bp, Homo sapiens
acacctgattttcatgacaaatacggaggcagttcccatgttatacgcagc

SEQ ID NO: 91358 - DNA, 100 bp, Homo sapiens
caacaattacaagatctggaggaatgcaggtcgatttggtcagacaacgccaccacttgttgattttctcaaggacattttgagaagatatccagaagga

SEQ ID NO: 91359 - DNA, 99 bp, Homo sapiens
ccgcaggggccctccacattctggccgaccaagatcactccatggatgaaatgacagctgtggtgaaaattgaaaaaggagttggtggcaataatgggg

SEQ ID NO: 91360 - DNA, 90 bp, Homo sapiens
gaagggcaggacgaggtgtcggcgcgggagcagcacttccacagccaagtgcgggagtccacgtcgtgcattgaggcccatgagaaggac

SEQ ID NO: 91361 - DNA, 75 bp, Homo sapiens
tttttcggatcatgtctggtggctccgcggattataacaggtatctggagatctgctcggcagatggtcaagaca

SEQ ID NO: 91362 - DNA, 75 bp, Homo sapiens
caggagcgacgtcaccgccatggcaggcatcaaaggaacctacaagcagcaattggcgcctattatgactttgag

SEQ ID NO: 91363 - DNA, 145 bp, Homo sapiens
tgtcgctggagcacaaaagagtctccgcggtggaggtctgcgttgctcttgcttttcctcgctggggtgtacgcggagctcccacctccatatacagccattgccagtccagacgccagtggtattccagtaataaactgccgtg

SEQ ID NO: 91364 - DNA, 131 bp, Homo sapiens
ggtggtcgtgtgtggccaggcgtctgtgggcaaaacttcaatcctggagcagcttctgtatgggaaccatgtagtggagtacaggggctcaggtccaggtggcaggggatatgctacccaactcaactgag

SEQ ID NO: 91365 - DNA, 75 bp, Homo sapiens
tggcagccagtcagtggtggaggagaacgtatttaccgggcagtcaaagatctattcctacatgagcccgaacaa

SEQ ID NO: 91366 - DNA, 134 bp, Homo sapiens
taaagtgtttgcatctcagtggttgaatcataggcaagtggtgtgtggcacaaaatgcaacacgtggaatgcagtagccctctgggcctgggatattgtggttgataactgtgccatctgcaggaaccacatta

SEQ ID NO: 91367 - DNA, 80 bp, Homo sapiens
gaaattcgccccgattaaagactgtgttgcattatcaggttccatcataatgaatggatccaatatggcaaatacatcac

SEQ ID NO: 91368 - DNA, 101 bp, Homo sapiens
agcctccctttccagaaggatataaagtcaaacaggagcctgtgattacgtgcacgatctgattttctggagagatgtgaagaagactgggtttgtctttg

SEQ ID NO: 91369 - DNA, 75 bp, Homo sapiens
ccgatatatgttctctaggccttttagaaaacatggagagaagatgactgaggaggaggtggagaccgttctggc

SEQ ID NO: 91370 - DNA, 75 bp, Homo sapiens
agattcagagcctttccgtcagccggtagatctccttgaatatccagggtttttctgtaagactgaagatgactt

SEQ ID NO: 91371 - DNA, 76 bp, Homo sapiens
cggcggcggcggcgccgggcccgggggtggtgacagcaggtctgaggctttctccaccaccacaacagcatgtggt

SEQ ID NO: 91372 - DNA, 82 bp, Homo sapiens
ccgagaccgcggccgggaccgaggctatgctaagaaggaatctgatcttaatggcgcccagatcaagcttcgagaatatgaa

SEQ ID NO: 91373 - DNA, 82 bp, Homo sapiens
catctcctggctctttcactgccgcattgtctgattacaagggccagaagctagctgaacagatgtttcagggaattattct

SEQ ID NO: 91374 - DNA, 75 bp, Homo sapiens
gacggagtacacggagcagcggccccggccccgccaacgctgccgccgggaatccggagatgatgagtatcaagg

SEQ ID NO: 91375 - DNA, 82 bp, Homo sapiens
cagtttcctgctcctcgtcatctcttctgatggacataatgggcttggaaagggcagtggccattcaccaccgagtagcagt

SEQ ID NO: 91376 - DNA, 97 bp, Homo sapiens
agccgcgccagcctcctcactggcctgccccaggaactcaccacattgcctgtcctctacctgtgcgagttctgcctcaagtacggccgtagtctca

SEQ ID NO: 91377 - DNA, 75 bp, Homo sapiens
ttttcagctaacagtaaccccagaaacttgaagggtcaaagtgcaaagggcagcttttgatttttggggcaacca

SEQ ID NO: 91378 - DNA, 50 bp, Homo sapiens
tttttggatctctgctcctatactttccaaccgattattgaccgacctat

SEQ ID NO: 91379 - DNA, 74 bp, Homo sapiens
atggtgctgtaaccacctcacagattccagcttcggaacaagagaccctgttgctgatgtatattcaagatgag

SEQ ID NO: 91380 - DNA, 101 bp, Homo sapiens
gcgatgcggggctgctggaggcggagaggcacggaggagccgctggggctgccgccacggccgcccggaggttccatcataatgaatggatccaatatggc

SEQ ID NO: 91381 - DNA, 98 bp, Homo sapiens
cgtgaatgagaaaaatggagaaaacaagacaagcccattcattcatttgagcatagcaagggacggcaaaacagaacagaaaggcggagataaaaaga

SEQ ID NO: 91382 - DNA, 118 bp, Homo sapiens
gtggcgatgctcttcttggaaaaccagatccagaaactggaggagtcccgctcgaagctaggtgatctgcaactctttcaccatctgtaatgcggagatgcaggaagttggtgttggc

SEQ ID NO: 91383 - DNA, 74 bp, Homo sapiens
tttccttcctaggagaaatcgaggagctgcggctctaccccccggaacaggtgatttggcttctgcacagttag

SEQ ID NO: 91384 - DNA, 101 bp, Homo sapiens
ctggaccaggaggaggttttcaggaccaaaattgtggaaaagtcactctgcatgtagagcgcatgaagtacaggacaataaagcttcctacacatatcacc

SEQ ID NO: 91385 - DNA, 90 bp, Homo sapiens
cagattcgcagtggtcgcttcttctccttggtgccatccttggtaggaagctttattagaagccaaaataaagaagactatgctggccta

SEQ ID NO: 91386 - DNA, 51 bp, Homo sapiens
cgcctggctcggagcagcagcctctgaggccgccatggcatcagatgaagg

SEQ ID NO: 91387 - DNA, 100 bp, Homo sapiens
aaaacctttccaagctcaaaaacaaggagctcgaggccatgagcagatataccagcccagtgaacccagctgtcttcccccatctgaccgtggtgctttt

SEQ ID NO: 91388 - DNA, 96 bp, Homo sapiens
catcattatggtgtggtattggaggaggatcaccatgatgtcccgacccccagtgcttctggaaaagttctaagaattttagatccagttacctgc

SEQ ID NO: 91389 - DNA, 100 bp, Homo sapiens
gagccactgcacctggaaaggagccagaaatgtgaagtgctagctgaaggatgagcagcagctagccaggcaaaggccagtacgggatccctgaaccatg

SEQ ID NO: 91390 - DNA, 75 bp, Homo sapiens
agattagagaacagattaagaaatacaggcgccatttcctacgaccagttctggtgactcagtccgcagctatag

SEQ ID NO: 91391 - DNA, 90 bp, Homo sapiens
ttcgtgcgcgccgggcgagggaagctggggcgcccactgggctcgggcggcagcttcgcggagagttctctgtgttcgagacaaaccagc

SEQ ID NO: 91392 - DNA, 100 bp, Homo sapiens
agaaggacgacaagcccatccgaggcttcaaccactcccagaagacgtccttcactcccaaaatgaggcttttctgaaacggcgaggaccaccaaccgac

SEQ ID NO: 91393 - DNA, 100 bp, Homo sapiens
agaagctgcaggcgcgcctggccgcgaacccggaccctaagaagacagaccccgtgcggctgacacagctgtatgagcaggcccggtgggacctgctgct

SEQ ID NO: 91394 - DNA, 50 bp, Homo sapiens
cctcccaaattgctgggattacaggaggactggaatgaaattgaccccat

SEQ ID NO: 91395 - DNA, 88 bp, Homo sapiens
cgcggagcgtcctgtcaggcggcggccgagggcgtcgcggactctccccgcgatgatgccgatgcctgaggaaacccagacccaagac

SEQ ID NO: 91396 - DNA, 75 bp, Homo sapiens
gctgcgaagacgcggtgggccgcccctccgccgtgttgaaatccttgtctcctgtagacccagtggaacccataa

SEQ ID NO: 91397 - DNA, 90 bp, Homo sapiens
ccaagggctacattgaggtgatgaggcattgaacctggccacatcccaggtaccgtgaacatccccttcacagacttcctgagccaggag

SEQ ID NO: 91398 - DNA, 100 bp, Homo sapiens
gggatcgcctgcgcgtcccgctcgtttcggtaaacgctgcatttctacaacagccacctgtgcaggccctgcatgctctgtaacctggggatttggtctt

SEQ ID NO: 91399 - DNA, 100 bp, Homo sapiens
caaacggggcagtcacaaagactacaaaaagggaaaagcgtgcactaacaccaaggtgacagagctgaatgaacctctctccaatgaagatcgaaatctc

SEQ ID NO: 91400 - DNA, 90 bp, Homo sapiens
cattaatctcccaaaatattctagaaggggaaaagctacttcaagcatacctcatctcagaactagaagctgccagaatgctctgtgtga

SEQ ID NO: 91401 - DNA, 90 bp, Homo sapiens
ctggtctcgaactcccgacctcagctgaagtgagtagtgaatatagtatggacaaggcaatggttgaatttgctacattggatcggcaac

SEQ ID NO: 91402 - DNA, 96 bp, Homo sapiens
caacaacttgcagctcatctctattgatgtgtttctgaaagatctatccagcactccgatggccagcaacaacaccgccagcatagcacaagccag

SEQ ID NO: 91403 - DNA, 98 bp, Homo sapiens
ttgaaattaccaactgctttcctttccctcagcacacagaggatgatgctgactttgatgaaggcaatttgaatcaacccatagaagtgacagcgctg

SEQ ID NO: 91404 - DNA, 75 bp, Homo sapiens
ttctcgacctgctaacagaactggaccttttcgcatgttggcagataaattgaacatgactccagaagaagctga

SEQ ID NO: 91405 - DNA, 98 bp, Homo sapiens
aagatgactacaaacataggatgttttggcgagagatgtattcagtggaggaagctggtgaggaagatcttctcagtcctccccaggacacaagcaca

SEQ ID NO: 91406 - DNA, 100 bp, Homo sapiens
ggaggagcggctgctgctgctgctgctgctgctggtggcccctttgcagtgcctccggagccagcgtggtggccatagacaacaagatcgaacaggccat

SEQ ID NO: 91407 - DNA, 98 bp, Homo sapiens
gtggattttaaccgaggcacggacaacatcaccgtgaggcagggggacacagccatcctcagaggtgtgctctgaacaagccgagacggggccgtgcc

SEQ ID NO: 91408 - DNA, 89 bp, Homo sapiens
cgccattggatgttttgtccagggcagcatctctggtgcatgctgatgacgaaaaacgagctgtggagtccaagtgtgactgccaagag

SEQ ID NO: 91409 - DNA, 100 bp, Homo sapiens
cactagtcgcgggagccacgcagaggacgccggaacaccctggaagccgagaaatgtgccggtggtggtgtgcacattgagccccggtatagacagttcc

SEQ ID NO: 91410 - DNA, 96 bp, Homo sapiens
ctccacgggtttccacattcaggagaatgaagaaagccattacgagggagagtcccgtattctcagagtaaaagttgtttctggaattgatctcgc

SEQ ID NO: 91411 - DNA, 76 bp, Homo sapiens
ctccattgttgttagaagccagatggctattcatatgaaaaggaagcaatggaaaattggatcagcaaaaagaaac

SEQ ID NO: 91412 - DNA, 100 bp, Homo sapiens
ggtcaccacgcaccgactatgtcgcctgccaccgagccgggcccacctccccaccaaggaaggtgccagaaccctgtggagcatcatgaactgggaagag

SEQ ID NO: 91413 - DNA, 74 bp, Homo sapiens
acaagcttccagtggagtcagtgcacattttagaagataaagattcaagaaatccatggtgaaaggtttggatt

SEQ ID NO: 91414 - DNA, 99 bp, Homo sapiens
agacaaaaggagattctgatgaagaagttattcaagatgggtaattcctctcctgcaattacttttggatggaagtatgcccctttctcagtagaagat

SEQ ID NO: 91415 - DNA, 97 bp, Homo sapiens
tacaaccttcgatctcctgacgagattctcaaagttggattggtggaaacaatgaaccattgacaggctttacatggcgaggtggctgtgaaagaga

SEQ ID NO: 91416 - DNA, 98 bp, Homo sapiens
cgccctagacatcttctccctcccttgcctcaggcctactctgtgtatgatgaagacattgggtactgtcaagggcagtcttttcttgctgctgtatt

SEQ ID NO: 91417 - DNA, 75 bp, Homo sapiens
tgcagtcatgtatcctgtgtttaatgaggtatttgccttatccacacatccttatggctgccgagtgattcagag

SEQ ID NO: 91418 - DNA, 100 bp, Homo sapiens
ataatattattgacctcttcctttatcagccacagtaaagaacaagcacctttggagatgagtatgcatccagcggcaagcgctccactctcagtcttta

SEQ ID NO: 91419 - DNA, 100 bp, Homo sapiens
cggcaacccatccagatcaccatgccgtggaatgcagtagccctctgggcctgggatattgtggttgataactgtgccatctgcaggaaccacattatgg

SEQ ID NO: 91420 - DNA, 78 bp, Homo sapiens
tactggaaatctgaatgctgttatcacgaatttaaactttgggataatgagctgcagtatgtggaccaacttctgaaa

SEQ ID NO: 91421 - DNA, 98 bp, Homo sapiens
aggtgtatcaagtaatggtgcaaagcctgaaaagtcatcaatgggcagcatgttccggcaacagtccatcgaggacaaggaggacaagcccccaccaa

SEQ ID NO: 91422 - DNA, 90 bp, Homo sapiens
tgttaggcgtggagagggagtgatgtcttccagactcggtgctgtacccgcctttgcagaaaaaacttcagcatgtgccaggaacacaac

SEQ ID NO: 91423 - DNA, 75 bp, Homo sapiens
ttcactgtcctggaaaaggcctgaagtggcactgaaatgaggcatagatgagatcattataaacctgcaatttcc

SEQ ID NO: 91424 - DNA, 82 bp, Homo sapiens
cgcacgtgaaggatagcagtggcctgagaaaggtgaaatgacaatggatgctctgttggctcgattgaaacttctgaatcca

SEQ ID NO: 91425 - DNA, 98 bp, Homo sapiens
agtggtcgcttcttctccttggccgcctgatcttcgacaacctaaagaagtccattgcctacaccctgaccagcaatatcccggagatcacgcccttc

SEQ ID NO: 91426 - DNA, 100 bp, Homo sapiens
ggacctccaaggaagccacgtgcagacatctacaaccttcgatctcctgacgagatgatcttgaagaccttatagttaattgggatgagagcaaaagcat

SEQ ID NO: 91427 - DNA, 82 bp, Homo sapiens
gaccagctgctggacatgtcctagatcatccagcagctcgtcaacggcatcatcacgcccgccaccatccccagcctgggcc

SEQ ID NO: 91428 - DNA, 83 bp, Homo sapiens
atattcagttgcacatccccacatcaatgcactgccaatgcaattctgtggtgttcttggtcacacatttatggagtttctga

SEQ ID NO: 91429 - DNA, 100 bp, Homo sapiens
tggcttcatcgtggcagctggctccatctgcggcagatctgtgcatgggactgcagggcttcctcatcttccacagctttgggggcggcactggctctgg

SEQ ID NO: 91430 - DNA, 75 bp, Homo sapiens
ctgcgggcccgggccatggccgccgccgatgccgagaactctcttgatagagcccaagcagccaagaataaaggc

SEQ ID NO: 91431 - DNA, 83 bp, Homo sapiens
tttgccgatccgccgcccgtccacacccgccgccaggctatgcccactggaagggccaagtgctgaattcagatgagctccag

SEQ ID NO: 91432 - DNA, 100 bp, Homo sapiens
cttcctgatctctctcgctgtgagacatgtctgagactcctgctcagtgtagcattaaggtcatatataccagaagttctgagattgaagagctgaaagc

SEQ ID NO: 91433 - DNA, 80 bp, Homo sapiens
aaagcaataccaggatagctgttgtttcagagaaagggagcagaaccatgtgtacctgggtgacaagaatgccctgaacc

SEQ ID NO: 91434 - DNA, 83 bp, Homo sapiens
gcagaatttgcccaggggaaacctcctcaggtccttcgggagggggctgagagcctcgagcagcacctggggctggaggcact

SEQ ID NO: 91435 - DNA, 99 bp, Homo sapiens
agacggtggagctccataagctaaaggatttcagatgcatgccaggtttccactgattgccagaactcgagatcactacacatggatccccaaaatcaa

SEQ ID NO: 91436 - DNA, 101 bp, Homo sapiens
ccaaccccaggaaggaaggccttggatggaccctcagattgaaggacccggtggaccttggggaccttctaccgctttgaggctgtgtgggatagctctct

SEQ ID NO: 91437 - DNA, 98 bp, Homo sapiens
tcccacacacaggatgtcaagcatgtggtttggcacccaagtcaggagattgtgaataagtggaatacagctctcattggccttatgacatactttcg

SEQ ID NO: 91438 - DNA, 73 bp, Homo sapiens
acaaagttggaagcaataccaaacagtggcatggaccacacccagcggaacggggatctgatgagcttctttc

SEQ ID NO: 91439 - DNA, 83 bp, Homo sapiens
cagcaagctgttcaatgaggaggtttttagaacttcagccataaaaatgggcagaattttccttgatcatatcggtggtaccc

SEQ ID NO: 91440 - DNA, 100 bp, Homo sapiens
ggagcagccaaccagcagcagccatcatggaggatactccagccggagagtccagagccccagcagcaagagcaacgacaccctgagtggcatctcttcc

SEQ ID NO: 91441 - DNA, 98 bp, Homo sapiens
acgacctcggcgaggtgcccaccatcgagtccctgatagtgacaggtgcaagttttgtggtattcaatggagctctaaaaacatcttcaggatttctt

SEQ ID NO: 91442 - DNA, 98 bp, Homo sapiens
gaaatcgaggagctgcggctctaccccccggatggaatgagaccgtggagctttttcgtgctaagatgccgttacggaaacatcgctgtcgtttcaag

SEQ ID NO: 91443 - DNA, 75 bp, Homo sapiens
aagagggagcagaagtgctcatcgatgctctggagccaccggctgggaaagacggacatcccagagatccctcag

SEQ ID NO: 91444 - DNA, 51 bp, Homo sapiens
gcaaatggcttagaaacatagatgaggagccggaaaattcaaatccgaaat

SEQ ID NO: 91445 - DNA, 98 bp, Homo sapiens
acagccaagcctagcagctcgggcaaggatggtggaggcgagaacactgaggaggtttacccaaggtccagcctagcccctaggcaccatgtcggaca

SEQ ID NO: 91446 - DNA, 51 bp, Homo sapiens
gtgaaacaccactgaagcattgccaaggttaaacccatccagagtaatggc

SEQ ID NO: 91447 - DNA, 100 bp, Homo sapiens
ggtgcccatccagtccggtgccatctgaagcccccttcccagatgagcagcaccagcagtaagagggctccgaccacggcaacccagaggctgaagcagg

SEQ ID NO: 91448 - DNA, 100 bp, Homo sapiens
cgaatgctgctgcagagctcggaggggcgctgtgtgtacatcacccccatggaggccctggcagagcaggaggagatgttaaagtaacccatcttgcagg

SEQ ID NO: 91449 - DNA, 97 bp, Homo sapiens
ctgactttcagctatggaatcgccgagccgctgccgctcatggatttgtgccgtcgctcggtgcgcctggccctggggagggagcgcctgggggaga

SEQ ID NO: 91450 - DNA, 73 bp, Homo sapiens
ttttttgtaagactctgtggtattgttggaggaatcttttcaacaacaggacagtcattttgtttactcattc

SEQ ID NO: 91451 - DNA, 83 bp, Homo sapiens
ctgctgggcctgcccttcaccctctacatggtgttggagagcacaatggctgaacaagtccttcctcaggctttgtatttgag

SEQ ID NO: 91452 - DNA, 83 bp, Homo sapiens
cgcagggcggctggcacaaacggcggcgccggggccggaggaaaaagctcggtttctgcaaatgcgtgaatgagccggatgcc

SEQ ID NO: 91453 - DNA, 100 bp, Homo sapiens
catggaagagtttttaaaccaggggccaccttatcttagttccagaatttagtcttcctttggaatactacctaattcccttccttatcatagtgggcat

SEQ ID NO: 91454 - DNA, 85 bp, Homo sapiens
agatattgggagatccacagctaagacgccgggactccctggaaacctagaaatggaaatacaactggagcacgcaaagcaagcc

SEQ ID NO: 91455 - DNA, 75 bp, Homo sapiens
gactgggaggagcgccggaacgccgaggcccaggagcttgaagaaatccgcaaatgtgggatgaaaaacttccgt

SEQ ID NO: 91456 - DNA, 75 bp, Homo sapiens
ccggatgcaggacagacccctcagtgttcgactacagttatagagattacattctgtcctggtatggaaacctca

SEQ ID NO: 91457 - DNA, 97 bp, Homo sapiens
tgaagattcaccaaataagctatatactttggttacctatgtacctgttaccactttcaaaacagatgagatcaccaaagagactacagagaaaaca

SEQ ID NO: 91458 - DNA, 98 bp, Homo sapiens
tggggccaccctgaggaaggaccagcgggacgcctgcatcaaggaggccattctcttggtgaactccagaaagccattgacttattcacagatgccat

SEQ ID NO: 91459 - DNA, 82 bp, Homo sapiens
ggagtcgccgccgccccgagtcccggtgcactacatcctccaggaggtggtgatgggtgggatggtgttggaaacaaacatg

SEQ ID NO: 91460 - DNA, 75 bp, Homo sapiens
cgcggagtcccaatgaaacgggcagccatggccctccacagcccgcaggatattcaaatagaagccttgctgatg

SEQ ID NO: 91461 - DNA, 74 bp, Homo sapiens
ccgagttcaacatcctcctggccaccgactcctacaaggtgactctgttttgagaagtgcaaccagatctctcc

SEQ ID NO: 91462 - DNA, 100 bp, Homo sapiens
gttctgccctggctgcctcagccctaccagcactggtcatgtctaaaggtacatgtccagggccgccgggtccccttccccattgccagcccctgaccct

SEQ ID NO: 91463 - DNA, 75 bp, Homo sapiens
cctcctgacacaacaccactcagtggacccaagtggagagattgtggaactggcgaaaggtgcatgtccctggaa

SEQ ID NO: 91464 - DNA, 98 bp, Homo sapiens
atctggggactaagcaacaggtgtttcaaggaactaattctctggccaaattcattctcccaagaagacaaggatcgaggactgtggagccaactcag

SEQ ID NO: 91465 - DNA, 100 bp, Homo sapiens
tatgagagatagcacagatggaccaaaggttatgcacaggtccttgtacaagccatcaaggaggcaaaggagcagcacccagacatgtcagtgaccaagg

SEQ ID NO: 91466 - DNA, 96 bp, Homo sapiens
atttacaatgaatggacacagtgatgaagaaagtgttagaaacagtagtggagaatcaagataagccaatggacacgtcagtgttatctgaagaag

SEQ ID NO: 91467 - DNA, 75 bp, Homo sapiens
cctgggcagggcacgaggcctctgagcctagagagtgaaggtgagcatcacggactatgtggtgtttgaccagtg

SEQ ID NO: 91468 - DNA, 113 bp, Homo sapiens
ccggacagaagatggtgcagaagaaaccagccgaacttcagggtttccaccgttcgttcaagcacagccatgacagtgcagatcctgctgaagctggaccgcctggacctcgc

SEQ ID NO: 91469 - DNA, 101 bp, Homo sapiens
gtccaggcctgacagctctgcggctcgggccctgagagctccttaataagcatttatagtcagtttttggcagcaatagaatcactaaaggcattctggga

SEQ ID NO: 91470 - DNA, 80 bp, Homo sapiens
gccgcagccatgaccgtggagttcgaggagtgcgtcaaggactccccgcgcttcaggttctggaggacacgtgccggcgg

SEQ ID NO: 91471 - DNA, 50 bp, Homo sapiens
cctgtcagtctgcagctactcagggccgttgctccagggagaactgcaaa

SEQ ID NO: 91472 - DNA, 50 bp, Homo sapiens
tgccggaggagacgctgatggagacgggtggacttcccgctggatcgaat

SEQ ID NO: 91473 - DNA, 100 bp, Homo sapiens
tgccttcaaccgggaacagagaatgtttaagaacgattccctgatgaggcagatgcgggaattggaggaccgatttgccagtgaggccagtggctaccag

SEQ ID NO: 91474 - DNA, 82 bp, Homo sapiens
tgtccaggcgggcctcccgtttctggctccgggctgagcttcctggagaagaggaagaatagcctaacatggcagaccagag

SEQ ID NO: 91475 - DNA, 100 bp, Homo sapiens
cggcactgcgggtcccgattgctgcagccgcttgtcagtgtgatgaagattggcacccaggaccgtggcaaggaggtgtacagccctgactttcatagcc

SEQ ID NO: 91476 - DNA, 76 bp, Homo sapiens
aaaaggctgctgccaaagctgccttaatatatacctgcactgtctgtagggaactgtggctgcaccatctgtcttc

SEQ ID NO: 91477 - DNA, 88 bp, Homo sapiens
ttaccttgtggaaatgatttcctcaggactccagattatctacaacactgatgagggctccgctgatcctctaaatagtgctttccat

SEQ ID NO: 91478 - DNA, 100 bp, Homo sapiens
tccaatttcttacatgcctacatcgtcgtgcaggtcgagaccccaggcacagagaccccatcctacaaggtggaacctaacttcttgtggaacaagtgtt

SEQ ID NO: 91479 - DNA, 100 bp, Homo sapiens
ggaggccacaaaaaggcaagaagcccctgtggatccccgcccggaaggagatccgcagaggacagtcatcagaaatggtgagagaactttggatgtggaa

SEQ ID NO: 91480 - DNA, 100 bp, Homo sapiens
agtgccatggcggccgccctgggagcgagcggaggagcaggcgccggaggaaattgacaatggcccttcagctatgctaggtctataatgggaagtgtca

SEQ ID NO: 91481 - DNA, 100 bp, Homo sapiens
gtggtgcgcaccgagcccttccaggacggctacagcctgtgcccgggccgggagctgggcagaatggatgatgaacttgttgttggacatagtgcaagat

SEQ ID NO: 91482 - DNA, 135 bp, Homo sapiens
gcgggacgcgagcggcgagccggagcgcggagcccggctcccgcaccatggaggaggacgacagctacgccactgaggcggctcccagctgcgttggcgacatggccgacacccccagagatgccgggctcaagc

SEQ ID NO: 91483 - DNA, 75 bp, Homo sapiens
ctctttttaagggctgggagaactcaggaagcctggattccagacagcattggaaaagacatagaaaaggcttgc

SEQ ID NO: 91484 - DNA, 76 bp, Homo sapiens
aggcgttggttcccctctttgacctggtaaatgcaggcttttatgcgagaggactgttccctgatgtgggtggagg

SEQ ID NO: 91485 - DNA, 83 bp, Homo sapiens
gcgccgagtgccagaactacgccaaggaggtggcaggggtgaaaggtgtagcagtcactcggcctacacccacagcatcgacc

SEQ ID NO: 91486 - DNA, 83 bp, Homo sapiens
gagctgtgcagccgcgaggaggcgcgggaggtgttcgagaacgaccccgagacggttgggacagcgtcttcgctgctgctgga

SEQ ID NO: 91487 - DNA, 90 bp, Homo sapiens
tcccaggccacaagacatttcctgctcggaaccttgtttactaattgataaggaagcctgtgtgggtaccaacaatcaaagctacatctg

SEQ ID NO: 91488 - DNA, 88 bp, Homo sapiens
ttcaacaagacttgtatctgtgcaagaggatgctgggaaatctcctgctcgaaataggaaagaagattctatatgatatacttgcctt

SEQ ID NO: 91489 - DNA, 71 bp, Homo sapiens
gacctgcagttccttcttcgagaaaccaaggtgactcgaaaagccctgtttcctggtgactctgagattga

SEQ ID NO: 91490 - DNA, 100 bp, Homo sapiens
agaaaacttcatcctagaccaagtgataaactgaaccctaaaacaattaatccggatagtgacaacctctggtgggacgcctttgccactgaattttttg

SEQ ID NO: 91491 - DNA, 100 bp, Homo sapiens
ctttgaagttgggttcaggagtgtagaattggcaaagttattgccagcttcctgcacatagattttcctataccatgtccacttagaatgtttgaaatgc

SEQ ID NO: 91492 - DNA, 87 bp, Homo sapiens
gccttcaattttggggctccctcgggcacctccggtaccgctgcagccaccgcggcccccgcggggacttgccatgaggtgttgaag

SEQ ID NO: 91493 - DNA, 95 bp, Homo sapiens
aacagacgaggaatcagctttgaagtgggagcccagttggaagcccgggaccgtttaaaaaactggcctgcagagatttcctcatgttagcccag

SEQ ID NO: 91494 - DNA, 75 bp, Homo sapiens
gggagctgaggaaccagatatcttgaaaagctgccagaaaggctgcgcgaaatcctggcggggaaggaacgggag

SEQ ID NO: 91495 - DNA, 90 bp, Homo sapiens
tcactaaaaccatgtgtctgaactgaagaagcttgggctcacttccacaaatcactgccccccaggtgttgagtaccagctctccagccc

SEQ ID NO: 91496 - DNA, 95 bp, Homo sapiens
cgagggcgcctctgccgtgggcgagagctctgtgcgcagccaggaggaccagctgtcacggaggcctgtccccggacctgcagtctatggagcag

SEQ ID NO: 91497 - DNA, 101 bp, Homo sapiens
gcaggctgaagaggaacgatatttccgagcctggtgaaatgggagagtgagaataaaatggtctgtgagcagaagctcctgaagggagagggccccaagac

SEQ ID NO: 91498 - DNA, 100 bp, Homo sapiens
ggccgaaggggcgtctgcggctctccgccgtccccagccctgcctctccctgggctctgacatcccaggaacagcaacagcaacagtgactcagacgagg

SEQ ID NO: 91499 - DNA, 51 bp, Homo sapiens
cctggctgagctgtcatcccccagcttccattgaagattgacatcattaaa

SEQ ID NO: 91500 - DNA, 73 bp, Homo sapiens
tttatttagcgcctaatcgctttcctgtcctgcattttccaagagataacttcaccaagatgtccagtgatag

SEQ ID NO: 91501 - DNA, 75 bp, Homo sapiens
atacctatcactcaagagactcttcatttagattggattctgaatatcaggatgccaaagaagagtgaatggccc

SEQ ID NO: 91502 - DNA, 75 bp, Homo sapiens
cgttaagtcccccaaagatgagatttacctgtgagatgtttcatcccaacagtgactctgacatcattagaagca

SEQ ID NO: 91503 - DNA, 101 bp, Homo sapiens
ccgagaccgtcctggcgcgatgcgtcaagtacactgaaattcatcctgagatgagtttctagacccaaaccattatcagcagttccaaagcaagttgtaac

SEQ ID NO: 91504 - DNA, 75 bp, Homo sapiens
agggattggccatttcaagagagcgagacatctgggccctcacagggcggcgactggcggcgcgatggacctgac

SEQ ID NO: 91505 - DNA, 98 bp, Homo sapiens
gaacttcatggtcttatgttcttccagaccaaccctggaatggtccccagccatggattcagtcccagatcttatttctttgacaaccctcgaagata

SEQ ID NO: 91506 - DNA, 100 bp, Homo sapiens
tcacaaatggagcccagaccagatgtgcctaggctcggaagcacgttcagtctggatacctccatgccttgagagcccctggagcagagaagcagctaac

SEQ ID NO: 91507 - DNA, 49 bp, Homo sapiens
gggctcttgggcgctgctctgaggataaagatggaaagccactcctgcc

SEQ ID NO: 91508 - DNA, 80 bp, Homo sapiens
tccatcccttccgaggcccgacttcggaattttggagagtaaaaggctgaaccttgttaaagagaaaaccattaatcaga

SEQ ID NO: 91509 - DNA, 100 bp, Homo sapiens
cgccctggactaccgcctggatcctcagctccagctgcactgctcagacgagattgaaactcccatgatgaacatcatcccagggggagccgtggccaag

SEQ ID NO: 91510 - DNA, 74 bp, Homo sapiens
gctggaaatcaaagtccaccatgtgcttttgcacatccaacagtgatgtgtgttctgaaattgtgaaccatgag

SEQ ID NO: 91511 - DNA, 75 bp, Homo sapiens
cctgagatcgtcaagtctcccagcgaccccaagcaataccgaaccagacgtcctgggtcctctccagcatggcag

SEQ ID NO: 91512 - DNA, 80 bp, Homo sapiens
gccggtcagcggctcgtcgccgttcgccacccaagtgggagccaagaagaaaggtttgctcccgggtggaacagggatta

SEQ ID NO: 91513 - DNA, 100 bp, Homo sapiens
gttgaggctgggcggcccaaggtggaaggaggggccgtgaggtgagagagtccgggagcccgagcttgagaagaatgtcttccaagcaagccacctctcc

SEQ ID NO: 91514 - DNA, 88 bp, Homo sapiens
gaaatgccagccagaaagagatcaagaaagcctattatcaggcatgtactggcattgaaaacattgacgaagctattacattgcttga

SEQ ID NO: 91515 - DNA, 96 bp, Homo sapiens
cgaagtctgtttggacaaaaatgccaaagatgacacccccaaccatggttgtgaagatgctagcgacacatcgctgttgggagttcttcctgcctc

SEQ ID NO: 91516 - DNA, 75 bp, Homo sapiens
ccggtgactttcacttccagccagctgtgaagaagccagaagtggacttccctgtccccccaggcagaggcagga

SEQ ID NO: 91517 - DNA, 75 bp, Homo sapiens
agagtccgatggcggcggcactgagggccccgacccaggtgaacacagtgatggatttggaaggaagtgatcttt

SEQ ID NO: 91518 - DNA, 82 bp, Homo sapiens
accctggtggacgtgcacccagaggaccaggcggcgatgcctgaggaaacccagacccaagaccaaccgatggaggaggagg

SEQ ID NO: 91519 - DNA, 100 bp, Homo sapiens
atgcagccagtagcttggatccttgtgggcatgatccataatcggtttcaaggtcaggctgccagatgggacctcactgacccagacgttccgggcccgg

SEQ ID NO: 91520 - DNA, 90 bp, Homo sapiens
aaaaaaagccagtctcaacgttttacttatacaccaggtggtgaaaacaggaatgagaacgaggagtcaacctcaaaggctgaaacctcg

SEQ ID NO: 91521 - DNA, 76 bp, Homo sapiens
aaacaagtattggtcatgttgtgcaactactgtatcgagcttcttgttttaagctcctgtatcacgtggaagagat

SEQ ID NO: 91522 - DNA, 90 bp, Homo sapiens
ctggagcatttgctgcagaagcgtagtcggccagaggaagatgcccaggaagaatttggctggaaacttgttcatggtgatatattccgt

SEQ ID NO: 91523 - DNA, 75 bp, Homo sapiens
gcagcacctccatcaggtacaacctcgaggagctctaccaggactctgaaaaggaatcttgcccaagcagtgatg

SEQ ID NO: 91524 - DNA, 98 bp, Homo sapiens
cggcagtcatctcgcggccgttcaggattgaatatgatgcatatcgcactgatttggaagaactgaatcttggaccacgtgacgcaaacactctgcca

SEQ ID NO: 91525 - DNA, 89 bp, Homo sapiens
caatttatcattgaataagtgttttaagaaagtggacaaagagaggagtcagtccagttacaacacagggatcacaacaaacacaaccg

SEQ ID NO: 91526 - DNA, 100 bp, Homo sapiens
gaggacatctctgcaaaggccccagcggcccaggtgtcatggagaaactccagctgggcccagagattctgcagcgggaaaatccaaggcttatttatgc

SEQ ID NO: 91527 - DNA, 50 bp, Homo sapiens
ccactatccagaacctccaatctttcggtgtcttggctgggcatgacaac

SEQ ID NO: 91528 - DNA, 98 bp, Homo sapiens
cctgagctcccattaggagccgctggctgcggcagcaggggactagcgtgagagattggaaacctccacctgcacaaactggatgaacttgactgcct

SEQ ID NO: 91529 - DNA, 90 bp, Homo sapiens
cttcgtcatggagggcggccttctggacaagccagacaactgtcctgacatgctgtcgcacggggcaggcggttgcagttcgagccaagg

SEQ ID NO: 91530 - DNA, 75 bp, Homo sapiens
ctgaatttgagaagtttgtgaactcaactggctatttgacagagagattctacattgcattgactgggattccag

SEQ ID NO: 91531 - DNA, 100 bp, Homo sapiens
gagaagggcgactactacgaggcgcaccagatgtaccggaccctgttcttcagcatggtggtggaacaccccgagttcctcaaggcagggaaggagcctg

SEQ ID NO: 91532 - DNA, 100 bp, Homo sapiens
atgtggtgtttggcaaagttctagagggcatgagcagcccgacggccatggaggctgaagagacgatggaatgccttcaggagttccctgaacatcataa

SEQ ID NO: 91533 - DNA, 83 bp, Homo sapiens
ggaaaacctaaccatgaagacttgaacttaatacagcaagaaagaccatcaagtttaccatatgtagtactactctctgggtt

SEQ ID NO: 91534 - DNA, 75 bp, Homo sapiens
tgctggaaacaaaatattcatgctggatattgaggtcgtggagtcagatttgagtgatgatggcaaagcatcttt

SEQ ID NO: 91535 - DNA, 75 bp, Homo sapiens
cctcaccccgccggaagcagtgcaagaagcagcagctagggaaagattttcaagggagcaaacttaaagtctccc

SEQ ID NO: 91536 - DNA, 100 bp, Homo sapiens
ccctgctggcagccctggtcctggcccaggctcctgcagctttagcagatgttctggaaggagacagctcaggtcatctctgaatttgagcaatggtgaa

SEQ ID NO: 91537 - DNA, 100 bp, Homo sapiens
gggatcagcgtgccaatgcaattgttaaaggaaatgggctggcaggaagacagtgaaaatgatgaaacatgtgctcccttaactgaggatgaaatgagag

SEQ ID NO: 91538 - DNA, 75 bp, Homo sapiens
acggagtcggcgagcccccgcggcgacagaacccagcgggtgccgcttctccacccgaggcttccacctccaacg

SEQ ID NO: 91539 - DNA, 102 bp, Homo sapiens
ctgttacctcccaagtcatcaactgtagaaaccaggcggtccagtttatcagatggagacctcacagacacggtcagtggtccccgctccacagcctccgac

SEQ ID NO: 91540 - DNA, 100 bp, Homo sapiens
agggcttcaatcaaggttataagaaaggtgcagaagtcattttaaactatggacgactccgaggaacattgagacaggggcaagtgtccgagtggtgaat

SEQ ID NO: 91541 - DNA, 75 bp, Homo sapiens
gactcctctctcaagagaagctgcaagagcaacatctttcctcaccccaagctcctgggctataacgaaaagcca

SEQ ID NO: 91542 - DNA, 75 bp, Homo sapiens
ctgtggttcggggggtgctcggaggaggcctcggtggtaccagaagaggaggggctgatgtgaacatccggcatt

SEQ ID NO: 91543 - DNA, 75 bp, Homo sapiens
cgggcaaagcccatctggtccgccgagcagattttatttggagagaagcaagcatctttgcctctttggagtagg

SEQ ID NO: 91544 - DNA, 96 bp, Homo sapiens
cctgggcccagagccgagatgagcagaacctgctgcagcagaagagggatatgtggtgcctgtcataagctccagagagctgccttccacaagacc

SEQ ID NO: 91545 - DNA, 100 bp, Homo sapiens
accagcaaaggcaccgtgacaggccaagtgcaggggccagaagacaaagtcaattccatgaactgtggctgcaccatctgtcttcatcttcccgccatct

SEQ ID NO: 91546 - DNA, 98 bp, Homo sapiens
ccggcttcaggatttacacagacgtggggcgatgcttgtgaccctgcagctcctcaaaacatccttgaaatacaatattctcccagaaaaggaagagt

SEQ ID NO: 91547 - DNA, 90 bp, Homo sapiens
aaaaagttcagtgggaagcatgtcgtctttatcgctcagaatttgcaccatcctgggattgtaaacctggaatgtatgtttgaaacccca

SEQ ID NO: 91548 - DNA, 82 bp, Homo sapiens
gactataggcatcctttccacatgacacccatgccttacgacttacaaggtatcatctttatcagaaagtgaggagtcccag

SEQ ID NO: 91549 - DNA, 88 bp, Homo sapiens
acctgctcgcagcaccctgctgtcttcccggtccggcccgctgcccgcggcgccagcaccatgggaaaactgcctttgcttctgagcc

SEQ ID NO: 91550 - DNA, 75 bp, Homo sapiens
ggaaacgtctgctaagactgcttccaatgtagaagaggaggaagacaatggtcctataatgcccttggataagaa

SEQ ID NO: 91551 - DNA, 98 bp, Homo sapiens
agaagagtgagagagagctattagagattgtgaagaagaatttcgatctccgccctggggtcattgtcagtggttttcccggattgtgtgtaggtgtg

SEQ ID NO: 91552 - DNA, 75 bp, Homo sapiens
atcatcattaaggacggaggcacggtcacccgtgtgaacagaaagtgagaggttgtagcacattgccaccgtcca

SEQ ID NO: 91553 - DNA, 100 bp, Homo sapiens
gagaaagaacacgctttgttgcttctaaacctctggaggaggagcacaaacacagagcagtctaaagcaaccgagcactgagaaaaatgaactctgccca

SEQ ID NO: 91554 - DNA, 90 bp, Homo sapiens
caaccaccgccctggccatctaccatgtggtgcctcaggaaccctgaagctgggctgagccatgatgctgctgccagaacccctgcagag

SEQ ID NO: 91555 - DNA, 83 bp, Homo sapiens
ccagagcacgacgagcgcggaggaccgggaggctcccgggcttgcgtgggaagctcttcgtgggcggtcttgactggagcacg

SEQ ID NO: 91556 - DNA, 108 bp, Homo sapiens
gaggccatcaacgtggagcaggcgttccagacgattgcacggaatgcacttaagcaggtaaagggagaagatgaggaagagaacaatttggaagtacgtgaaaccaaa

SEQ ID NO: 91557 - DNA, 82 bp, Homo sapiens
gctagtgtatgtggaaagagctgaagtgctcaaatctgaagatgagggaaaacccctgatcctaaaatgaatgctaggactt

SEQ ID NO: 91558 - DNA, 74 bp, Homo sapiens
gagcgctcgatggaacctcatcccagttgctgccaaacaaggtgaatccgacccagagaggaaagaaacaaggc

SEQ ID NO: 91559 - DNA, 100 bp, Homo sapiens
ccactaccaagaagggatctatcacctctgtacaggctggttttaacctacgcaaagttaacaaacacataaagtttccggaaatcttagatttggctcc

SEQ ID NO: 91560 - DNA, 100 bp, Homo sapiens
ggagtgaagctgcagaccttcgcggcaaagtaacatcctagacatggctttagagatccacatgtcagaccccatgtgcctcatcgagaactttaatgag

SEQ ID NO: 91561 - DNA, 75 bp, Homo sapiens
ataaatggtactgaatggacaagacatggatgcaactgaagactcaaaaaagaatgagcctatatttaaagttgc

SEQ ID NO: 91562 - DNA, 100 bp, Homo sapiens
gcgcgatgcgtcaagtacactgaaattcatcctgagatgagggccaattcctgtccccccagcagcatggcatcgtgtgctgaaccctctgagccctctg

SEQ ID NO: 91563 - DNA, 100 bp, Homo sapiens
ccttcacccatctgaagggaggaaatagtggcaggtgacagtctgcatgtgcagttttcaggccctgtgacctccctcctgtcttgcagctcctcctggc

SEQ ID NO: 91564 - DNA, 74 bp, Homo sapiens
ggccgaggcaggtggatcacgaggccaggctaccaacgtctttgtgaacatggaggaggacttcatgaagccag

SEQ ID NO: 91565 - DNA, 101 bp, Homo sapiens
aagaaggctgaagctgcacatcggattctggaaggcctggggccccaggtggagctgctccattgatatcttgatgatggggtatacctgagaggacagca

SEQ ID NO: 91566 - DNA, 89 bp, Homo sapiens
ggcggatctggaggagcagttgtctgatgaagagaaggtgatctgtgaaaatggttcgctattcacttgacccggagaaccccacgaaa

SEQ ID NO: 91567 - DNA, 75 bp, Homo sapiens
gcaacagttttagagtactttataaaattttggacggggtagaaatatttctgtcatggctcattcaaagactag

SEQ ID NO: 91568 - DNA, 82 bp, Homo sapiens
gaaccgcagtatcatgctggccaagaagatcatcattaaggacggaggcacgtgctgggattacaagcgtgagctaccacac

SEQ ID NO: 91569 - DNA, 82 bp, Homo sapiens
ctgggcgctccggtggcggcggagcttgctcacttccgacagagaaaaacaaaaggtgacagttcgcattcggagaaaaaga

SEQ ID NO: 91570 - DNA, 90 bp, Homo sapiens
aggaagtggggataaatggtcaaacaagcaactcttcttggatgccattcaccctacagaaggaatctctgggtgcccctttttcctctg

SEQ ID NO: 91571 - DNA, 78 bp, Homo sapiens
tcaaaaggtgatctggacaaaggaacaggtatctcaggcagttggccagacagcaggctgataaaaaaaaagaagagc

SEQ ID NO: 91572 - DNA, 99 bp, Homo sapiens
ccggagtcggggacccaggagtttcctgtgtccagcgctgccggagccgcctgagttctgggaagtcatcagtgatgagcatggcatcgaccccagcgg

SEQ ID NO: 91573 - DNA, 96 bp, Homo sapiens
ccctggcactgagcggccgcggccatggcgtacgcctatctcttcaagtacatcataatcggcgacacaggaagatgaagtcctcagtacattctg

SEQ ID NO: 91574 - DNA, 50 bp, Homo sapiens
cttggatgacagtcaccgacagaaggacatagggtacctccaactttccg

SEQ ID NO: 91575 - DNA, 97 bp, Homo sapiens
gcgccagcctcctcactggcctgccccaggtcacaagctacctaactaagaagtttgctgaactacgcagccccaatgagttcaaggtgtacatggg

SEQ ID NO: 91576 - DNA, 100 bp, Homo sapiens
gattatacctcactattctcttgctcgatggctactctgtaatggcaggtatctctgatgaatatataacacctatgtttagtttttataaaagtattgg

SEQ ID NO: 91577 - DNA, 73 bp, Homo sapiens
ctatcagcaggctccgggctgaagattgcttctcttctctcctccaagaacagacccaggaaagcattcagca

SEQ ID NO: 91578 - DNA, 106 bp, Homo sapiens
cgggacccggttccccggcccacagtgggggtgtgcaaacccgagagaactggacgcaaacatgcagatctttgtgaagaccctcactggcaaaaccatcaccctt

SEQ ID NO: 91579 - DNA, 101 bp, Homo sapiens
ggaatcaaagataaatccaaatactgcatatcagaaacaacaggtggacgccctgcttcatctggcccgccagaatcgggctgtggcccgcacagcccaga

SEQ ID NO: 91580 - DNA, 90 bp, Homo sapiens
cccgtgccggccagcgcaccaggttcaaggctgacacattaaaagagagatatcaaaaaattggtgacaccaaaaggaatactcccattg

SEQ ID NO: 91581 - DNA, 82 bp, Homo sapiens
ctgaaggacgcgcaggagaagctggagctcacggagaagaaggcctccgacgccctgggaggagcggggacactgaggacct

SEQ ID NO: 91582 - DNA, 96 bp, Homo sapiens
gaaaatggcagatattcaaaacgtcagcaaccaaaggcaccggccttgatgaggcaatggaatggttcttgattattacagacctctttctgaaaa

SEQ ID NO: 91583 - DNA, 101 bp, Homo sapiens
ttcttggccttgtaaaagcaaggaggagtggaatgaaatacggcaccagattggaaacacactgatccggatcaaaatacttgctggatggtggactcaga

SEQ ID NO: 91584 - DNA, 98 bp, Homo sapiens
tgagttcaatacgtctgaacctttgctgtctatggatctgctctaaaccttatagcctgcttatgggggaagggcaacaggagtagttcactccgcga

SEQ ID NO: 91585 - DNA, 107 bp, Homo sapiens
gagtcctgtgatccatcactcggattggcaggacctggggccaaaagccaagcagatataatttctacagtagaatttaatcattctggagaattactagcaacagg

SEQ ID NO: 91586 - DNA, 74 bp, Homo sapiens
cttcttctggaagaccagccaacagtccctacagatgaagaagatgaaatggaggagtccacaaatcgaccaag

SEQ ID NO: 91587 - DNA, 75 bp, Homo sapiens
ggccgctttctcggtcggcaccgccatggtattagaaaactactcggatgctccaatgacaccaaaacagattct

SEQ ID NO: 91588 - DNA, 82 bp, Homo sapiens
accagccatggactgctacacggcgaactggaacccactcggggactctgccttttaccgatgatatcatcaagttgaatcg

SEQ ID NO: 91589 - DNA, 50 bp, Homo sapiens
ggcctacgagcagctgaagctaatgtgaaagatgttgcagaagtgttcca

SEQ ID NO: 91590 - DNA, 75 bp, Homo sapiens
ttctagaaaggggtctgcgggcgcaggagctggggtccgcggtctggggccgaactgcatgaacttgcccccaga

SEQ ID NO: 91591 - DNA, 100 bp, Homo sapiens
gcctctcaggtgctgaaccagatgatgaagagtatcaggaatttgaagagatgctggaacatgcagagtctgcacaacccatgactgaagagttgctgaa

SEQ ID NO: 91592 - DNA, 50 bp, Homo sapiens
tcagcggggccgacagcctcctgggcgtggtgaccaagatgaagatgcag

SEQ ID NO: 91593 - DNA, 100 bp, Homo sapiens
ctgggcacagcatgagatccaaaggcagggcaaggaaactggccacaagagctgttcacccgctcactggctgagagcgagctccgtagtgccccgtatg

SEQ ID NO: 91594 - DNA, 75 bp, Homo sapiens
atttgatcctgattctacccaagtacatatgatttcagctgcaatggcagacaacagcagttctgtagagagttt

SEQ ID NO: 91595 - DNA, 98 bp, Homo sapiens
cccgatgcagagtgtttgaagatcatgtgtgaaatcctaagtggattgcagttgggagactttctcattaagcttccaccaacactttcttccaaata

SEQ ID NO: 91596 - DNA, 90 bp, Homo sapiens
cccttggccacctccccaggtgatgcctgaagctcaagggactgtgtccaccctcaggtcatttgaaccaattctccgcctccttcccca

SEQ ID NO: 91597 - DNA, 75 bp, Homo sapiens
tgggggtcgagcacataacggggttcgggtgtctcgtgtgtgaacatcacagaatttatccagttggcgaaggac

SEQ ID NO: 91598 - DNA, 82 bp, Homo sapiens
ccgctgcagccaccgcggcccccgcgggtgtctcaaaggctgttgagcacatcaataaaactattgcgcctgccctggttag

SEQ ID NO: 91599 - DNA, 74 bp, Homo sapiens
tcgcgctgctgggcacccacggagcctccggggctggtgacttaagagattaaaattaatttggttgctgttgg

SEQ ID NO: 91600 - DNA, 51 bp, Homo sapiens
acctcaacaatgtttttgttcaacagggcacctgtgctggttgcacttgct

SEQ ID NO: 91601 - DNA, 100 bp, Homo sapiens
gcagtcatgaggttttctctgaagaccgtgaagccactttcactttttgacagtaagaacaccaccgatagccacaccgaagagttctcccatttgctgg

SEQ ID NO: 91602 - DNA, 50 bp, Homo sapiens
tgagatctcagatacgtgtacagatccctgtgtctcatcctgtcctcacc

SEQ ID NO: 91603 - DNA, 90 bp, Homo sapiens
aaaagaagcagcaccttatctcagctccctggggataagtccaaagcctttgatttccttagtgaagacccagtgtgccatcataatgtt

SEQ ID NO: 91604 - DNA, 100 bp, Homo sapiens
agtactgtttaccagatctttgcagatgaggtgcttggttcaggccagtttggcatcgtttatggaggtgtctggttgagaagggagatgtggcctttgt

SEQ ID NO: 91605 - DNA, 74 bp, Homo sapiens
acccttcctggagaaccgggcccagcagcactggggaaatggagcagtcaatgaatatgctgaattccaaccat

SEQ ID NO: 91606 - DNA, 75 bp, Homo sapiens
gttactccattcgatttgaagactgcagtagtgcaaaaaccattcttaatggtggtgaccgcggtggcttcaaaa

SEQ ID NO: 91607 - DNA, 115 bp, Homo sapiens
catgcctccgccggggggctatgggcccatcgactacaaacggaacttgccgcgtcgaggactgtcgggtctcctctgagcctccggcctccataagacccaaaacagatgacac

SEQ ID NO: 91608 - DNA, 50 bp, Homo sapiens
gaaaaaggtttgaggagagaaggaacatccaatacttgggcaaccctttt

SEQ ID NO: 91609 - DNA, 89 bp, Homo sapiens
caggagagaatactactttgcaataacaatggaaaggtcatttcaagggcccatcctgatggagctgcagacttaccgttaccacggac

SEQ ID NO: 91610 - DNA, 98 bp, Homo sapiens
aggagctgtcgccggcggagggtgcatgtttgcgaggaagccgccgggcgccgcgcctttggatcactggggtgatcctgctggctgttggagtctgg

SEQ ID NO: 91611 - DNA, 88 bp, Homo sapiens
gtgcctgtgccaggcaggctacgagaaggtggaggatgcctgccaggggaggctgccggcgtggaccgcgggaaggcggggctggggc

SEQ ID NO: 91612 - DNA, 82 bp, Homo sapiens
gtcgctgcagagaccccgctatggctcatcatggcagaacaggatgtggaaaacgatcttttggattacgatgaagaggaag

SEQ ID NO: 91613 - DNA, 51 bp, Homo sapiens
gccaaaggttctaccaaaactgcccaaggtggaagtttagctgatgctata

SEQ ID NO: 91614 - DNA, 100 bp, Homo sapiens
atgagcagacactttaatgaccctaatgctgatgcctacttcaccaagagaaagtgggggtctcctatggacagaagtgcgggcaaggagctttgttcct

SEQ ID NO: 91615 - DNA, 97 bp, Homo sapiens
ctcgaccccccactgatcgcgctggataaagatgcgcctctgcgatttgcaggcaatgtctacttcgatctgaagtctagaggagacaagtatggca

SEQ ID NO: 91616 - DNA, 100 bp, Homo sapiens
aattcggagcctcccctgcagcgactcggaagattcgaggcggcgggggacaagtcggcgccccagagcggacgaggaatggtttgcagtgtatgtggaa

SEQ ID NO: 91617 - DNA, 100 bp, Homo sapiens
ttcaggactactttaatccagctactctacctctaacacagtacctgttaacaacagctccttaataagcatttatagtcagtttttggcagcaatagaa

SEQ ID NO: 91618 - DNA, 108 bp, Homo sapiens
gtggagccggagctgggcgcggattcgccgaggcaccgaggcactcagaggagaacatccagtcatggataaaaatgagctggttcagaaggccaaactggccgagca

SEQ ID NO: 91619 - DNA, 82 bp, Homo sapiens
cagttgtttggtgttttgcttcaggttatagatggagagacctataaaggaactgtggaaggtgcatcagtgaagaaatgga

SEQ ID NO: 91620 - DNA, 75 bp, Homo sapiens
ctgcgctcccgcgccgcgctcccctcgcccgcccgggccgccaggtatctcagcgtttgagtcagccaggagtag

SEQ ID NO: 91621 - DNA, 80 bp, Homo sapiens
tagctttctgccagagggagggtgttacgagctgctcactgtgatagggcacgtgaagcactcagacagtgcctccctga

SEQ ID NO: 91622 - DNA, 74 bp, Homo sapiens
ggaaaagcgaggcaaggcaggcggtattctaccttgtaaatactgttatttgtatatactgtaaatgatgacat

SEQ ID NO: 91623 - DNA, 100 bp, Homo sapiens
catacaccgagagagtgaggagccagacgacaagcacacactatggcgctgaaacggattaataaggaatactttcaagtcatcccaaatatggttccat

SEQ ID NO: 91624 - DNA, 83 bp, Homo sapiens
gccactgctgctccgtggagatcgtcccgcgcctgccgaaagaaatgaccgcccggatgtgccactgagagccccgcgggtct

SEQ ID NO: 91625 - DNA, 90 bp, Homo sapiens
ctccaccatatagacccggctttaccttatatcaggtctcgctctcgaagcagacattcccgtaagagcagaagccgaagtggcagcagc

SEQ ID NO: 91626 - DNA, 100 bp, Homo sapiens
tcacggttttacccagtggtgaaagaaggacggacactggatgccaaggaggcagcccaatatggcaagaaggtgatggtcctggactttgtcactccca

SEQ ID NO: 91627 - DNA, 95 bp, Homo sapiens
tggaggaaacagctatatgggaacaacatacagtgacgcttcacaggctcaacctgaattcctgaagcagcctactaatatatatgctcacgaat

SEQ ID NO: 91628 - DNA, 50 bp, Homo sapiens
tggagagcagactacagggaccccattgaccccccaaagacacacgtgac

SEQ ID NO: 91629 - DNA, 98 bp, Homo sapiens
aaacgttctgtactgtccaagtcagttcctgggtacaaggaaactaaatatattttgccaactttggaaaaagaattattcttggcagagcacagtga

SEQ ID NO: 91630 - DNA, 100 bp, Homo sapiens
ctctgggcaagttactcatctgtgagctgagggtggggccctggggacctctcttgcagacatctcaacagtgagcatgcgctggacgatagaagtacag

SEQ ID NO: 91631 - DNA, 51 bp, Homo sapiens
taggcggccatggtccaaccttgaaggtgaagaagctaagtctcagaaaga

SEQ ID NO: 91632 - DNA, 50 bp, Homo sapiens
cgttccttgaggaggtttgaaaaagctgcctgctgtttcccggggagatc

SEQ ID NO: 91633 - DNA, 99 bp, Homo sapiens
cagctcaccagcctggacccccagcaggaggaagagcgcaggcgccgtgaagaagagatgcggcggcagcaagaagaaatgatgcggcgacagcaggaa

SEQ ID NO: 91634 - DNA, 106 bp, Homo sapiens
tccattggatttaaaagacagtcctcgtcagcactgactttcagctatggaatcggtgaaatgacaatggatgctctgttggctcgattgaaacttctgaatccag

SEQ ID NO: 91635 - DNA, 95 bp, Homo sapiens
cctgggcgcgggggcggcgtgtcaggtggttgcggagctggtaagatgagcgggatcgtgtgcagaagaaaaccttcaccaagtgggtcaacaag

SEQ ID NO: 91636 - DNA, 80 bp, Homo sapiens
agccaagttccccaacggctccccgtcgtcctggtgctgcagcgtcctgtgcctcctgattgctgagtgttcacctggac

SEQ ID NO: 91637 - DNA, 98 bp, Homo sapiens
tctcctatgaagaatggaatgaccctcctgctgtgagtgtcctgccatacttcgtagctacaaaactggctaaaatccggaagccaactttggataag

SEQ ID NO: 91638 - DNA, 80 bp, Homo sapiens
gccgcgcgctatggcaccttcgcctggcccaccactcccagaggacactcatgaggaccatgatacttccactgagaata

SEQ ID NO: 91639 - DNA, 76 bp, Homo sapiens
cgccaggaaagcgacccggaggatgatgatgttaaaaaggaaagccacaaggaccacccccacaaggaggaaacca

SEQ ID NO: 91640 - DNA, 83 bp, Homo sapiens
cgccagcctcggcaccgtcctttcctttctccctcgcgttagattctcattcagattgtggatgcctcgtcagtcatcacttg

SEQ ID NO: 91641 - DNA, 75 bp, Homo sapiens
ttgcaagcaacagtagtcgctgttggatcgggttctaaaggaaagaaacagagtcttgctgtgttgcctaggctg

SEQ ID NO: 91642 - DNA, 75 bp, Homo sapiens
cagtagccatgctcatgatcggcgtgtttggatgtactttacaggagagattaaacagattctagaaaatgaact

SEQ ID NO: 91643 - DNA, 50 bp, Homo sapiens
tgaatgtgccatcgtcaccctggttgtccgcacaaaccagtgtgcagggg

SEQ ID NO: 91644 - DNA, 97 bp, Homo sapiens
agaacctctgcaagctcatgaaagaaatcttagataagaaggttgagaaggtggacctctccaaggacattcagcactgggaatccctgaaacccga

SEQ ID NO: 91645 - DNA, 75 bp, Homo sapiens
ctactctttaagctctgttagcttggcctctgtccctgaagtggccttcaagtcacaggacgcagcgattccctg

SEQ ID NO: 91646 - DNA, 76 bp, Homo sapiens
ccgagtccagcccaggaaaatggagagtctattatcctcccagtccacaacgctgaaccgtggctggacgaatgtt

SEQ ID NO: 91647 - DNA, 96 bp, Homo sapiens
atcttcccttacaagggttatatatggaattatggtaccctccctcagggcgtgttggagagtttcctgggcactgctgtctctggagccatcttt

SEQ ID NO: 91648 - DNA, 75 bp, Homo sapiens
gcagtggcttactcccggtgccaggttcttggagctgtgaggtttgtccagaggggttgcgtttatccggtttga

SEQ ID NO: 91649 - DNA, 75 bp, Homo sapiens
cccaccgccagggtcaccaagaaggagactctcaagttttcagtgaacctcttccggacgctgccaccttcatcg

SEQ ID NO: 91650 - DNA, 97 bp, Homo sapiens
agaccagtagcactaattccaactgaatgcaatatccatacatctccttctccgggaattcaagtaaggcatgtctacaccccctctacaacaaagc

SEQ ID NO: 91651 - DNA, 100 bp, Homo sapiens
acccacgtctgtctggtgataccaggggcagagggaccactctgacaggtttttcgttggaatatacgttgcacatttatggcgattctgagtgtgaggg

SEQ ID NO: 91652 - DNA, 75 bp, Homo sapiens
ctctgtcctcactgctggatgacatgaccaagaatgatcctttcaaagcccggaggctcaaggactatcagcggc

SEQ ID NO: 91653 - DNA, 100 bp, Homo sapiens
ctgcctttgacctttttgaagcctttgcaaaatgaaacaaagagtcctcttcgtggaaaagaaaaaaatacgctccctttaaacggtggattgaaaatga

SEQ ID NO: 91654 - DNA, 90 bp, Homo sapiens
ctgttgcccaaaactacagttctgtcactcacttacacagtattgggaaatctgtgaaaggtttcatcacccaaacatactagagttggc

SEQ ID NO: 91655 - DNA, 87 bp, Homo sapiens
agcggccgggctgtcgcggcccccacctcagctcgaggccacagtcatgccctaccttcaggtgttatcagaattccgagaaggagt

SEQ ID NO: 91656 - DNA, 83 bp, Homo sapiens
ccgacgccatcaggctcaacgaggaactcaaagtggatgaggaaaagttcaagctgaagaagatgtggaaaagtcccaatgga

SEQ ID NO: 91657 - DNA, 100 bp, Homo sapiens
atcgcatcctatggctcaaagaaagatgattataaagtggtggagagagagctggatgctcttttggaacagcaaaacaccattgaaagtaagatggtca

SEQ ID NO: 91658 - DNA, 100 bp, Homo sapiens
ctgcaggctgcggaatctaaaaagattgggagtatgtatttaaaaacagtgaattttcatcaaagcaagagacatatgaagaatcatccaaagttgtgac

SEQ ID NO: 91659 - DNA, 75 bp, Homo sapiens
gcacttgcattgagatgtttggtaccttgtggtctataatcctttagaacaagaccgaatctcgttggtctcagt

SEQ ID NO: 91660 - DNA, 97 bp, Homo sapiens
tggaccgactatgcaaaaagatactgtaatgcacacatcagtttgtcccgctggctggaagcctggcagtgacacgattaagcccaacgtggatgac

SEQ ID NO: 91661 - DNA, 127 bp, Homo sapiens
gatggaaaagcaccacttgctactggagaggatgatgatgatgaagttccaggagtccttcaataatgttaaacagtggctgcaggaaatagatcgttatgccagtgaaaatgtcaacaaattgttg

SEQ ID NO: 91662 - DNA, 96 bp, Homo sapiens
gtggtgctgagtctgattgctgcaggttcagattcagaacaagaaagtggacatctctaaggtctcctccaagtgtgggtctaaggctaacatcaa

SEQ ID NO: 91663 - DNA, 90 bp, Homo sapiens
atttacgcgccgtgtaactgtgaatctttcaaaggtgagaattatgaagatgatgacctagtaaattctgatgaggttatgaagaaacca

SEQ ID NO: 91664 - DNA, 51 bp, Homo sapiens
aaaccccaaaagtgtacataaggatgccatgcagcatgctgcagagtcgcg

SEQ ID NO: 91665 - DNA, 90 bp, Homo sapiens
ccggcttctcccctacgcgctacacaagtggagctccttttcctccacctaccttcccgagatttacttcatttgggtcactaggtcacg

SEQ ID NO: 91666 - DNA, 75 bp, Homo sapiens
gagggaagtcgcctctgtgctcgtgagtgcatggggtataagatccgagtgaagcctgacaggaccggtgtggtc

SEQ ID NO: 91667 - DNA, 50 bp, Homo sapiens
cgcccaccgcgccgcatccatgttcgaaatgttcgcatcttaccacatac

SEQ ID NO: 91668 - DNA, 100 bp, Homo sapiens
cgccgcggccgccgcagccatgaccgtggagttcgaggagtgcgtcaaggactccccgcgcttcagataaacccgggacccacttcactccagtgcctcc

SEQ ID NO: 91669 - DNA, 100 bp, Homo sapiens
cgagaggcggcgccgctcccaagatgtcgcagacggccatgtccgaaacctacggaacttctacttgcagaaaagtgggctaaaatgaacaagctcccct

SEQ ID NO: 91670 - DNA, 101 bp, Homo sapiens
gaccttagtgatcaggtggcacctactgacattgaagaagggatgagagtggggtcattgagcccaaggacatccatgccaagtgcgaactggcctttctc

SEQ ID NO: 91671 - DNA, 90 bp, Homo sapiens
gagccgggacacgcctagcgcgggctccaggcaccccccgagcccagctccacacaccgttcctggatctcctctccccaggcggagcgt

SEQ ID NO: 91672 - DNA, 101 bp, Homo sapiens
ggaagatgataaagatgcagccaaggtcttagcagaagatggtggtcttcgagggatagcacgaggtggtctgacaggactaacacttaccagcctctatg

SEQ ID NO: 91673 - DNA, 75 bp, Homo sapiens
cacagtgactacccccacgactgctaccactactgtttcaaggcctgccttaagtgtgaaagtaatgactgatga

SEQ ID NO: 91674 - DNA, 100 bp, Homo sapiens
tctggcggcggtagatttgaagcgcttcaaaggaccggacccagagaagaggaaaactctaccggtgcaggttcacgcaaagaatctgctccacaagttt

SEQ ID NO: 91675 - DNA, 100 bp, Homo sapiens
tcagctcttactgcgggccgctccgacggcggtccatcctgaaatttaaaagcctgttgattcaagaactttctaaagtatttccggaagacatggctaa

SEQ ID NO: 91676 - DNA, 87 bp, Homo sapiens
cgagaagctgccgccgaacgacaggacgttggggcggcctggctccctcaggtgctggagaatctggtaaaagcaccattgtgaagc

SEQ ID NO: 91677 - DNA, 100 bp, Homo sapiens
tgagagtgacccagggcctgggaaccggggcttttctcggtggtcttaggcctgttctgcaaccaaggcaaggccagggtgaccgaatcccaccatctgc

SEQ ID NO: 91678 - DNA, 100 bp, Homo sapiens
caggctccgatggcggcggccgccctgagggaccccgctcagggaaatgatgtcactctgaaactcaggctggaatacactggcatggtcatacctcact

SEQ ID NO: 91679 - DNA, 90 bp, Homo sapiens
agaacaccaaagattgtctctggcaaaggaataaagggattcattcctcattttaactgatgttacagtgaagatgggttcttgaactct

SEQ ID NO: 91680 - DNA, 96 bp, Homo sapiens
tgaaactcatgatgaacctccttcgggataaaagtcccaacatccagtttgaagcctttcatgtttttaagacatttctcttgggaagttgtgcat

SEQ ID NO: 91681 - DNA, 90 bp, Homo sapiens
gcagagccgcggccctctttagggataagtatggaagctccaaaaggaaagataccagattgatcttgatcacctctgcctccccagcac

SEQ ID NO: 91682 - DNA, 98 bp, Homo sapiens
ctattgtcactgccatgcctggtggcctgcctgtacccacgagccctaacatccagccgtccccagctcacggtttttcgttggaatatacgttgcac

SEQ ID NO: 91683 - DNA, 75 bp, Homo sapiens
gccatgtcatccacttcgcccaacctccaggagaagatggtataaactggtccatcagtgacaaagacattgagg

SEQ ID NO: 91684 - DNA, 82 bp, Homo sapiens
caacgcattccagccggcctgtgaccacctgctcaaactggaggattataaggatcgcctgaaaagtggagagcatcttaat

SEQ ID NO: 91685 - DNA, 85 bp, Homo sapiens
catgagcaagaaaagcctctgggagcagaagggaggctccaagacctcatcaacaattaagggagtaactattcccagtcagagg

SEQ ID NO: 91686 - DNA, 100 bp, Homo sapiens
ctggatgtcagtaacatgtggaaagcagatgtgcaggatgatgaggatgataatgcaggcacggagatgaagatactgcggggccactgcggaccagtgt

SEQ ID NO: 91687 - DNA, 100 bp, Homo sapiens
ctggtggtcccccgctcccggggtccccggccggccaagcagcttggacagcttttagcagctacatgcaaagaacttccaggccctaaagaaagtagac

SEQ ID NO: 91688 - DNA, 74 bp, Homo sapiens
gacggaggagaccgacgttgttagcggacctggaaaatatgacaagtgccgaacgcatcacaattcttcaagaa

SEQ ID NO: 91689 - DNA, 100 bp, Homo sapiens
tgtctgcgagccaggattcccgtcttgctctgttgcccaggctggagtgcagtggtgccatcatgccaacctcgacctcctggacttaagtgatcctcct

SEQ ID NO: 91690 - DNA, 75 bp, Homo sapiens
agtgggggtgtgcaaacccgagagaactgggctggcgcccatgcggctctacacgctctccaagcgccactttgt

SEQ ID NO: 91691 - DNA, 90 bp, Homo sapiens
ctcgcccagcgcccccaggccgctcccggggctcacggtctcaatgccaggaagcctcccgctcctaaacagcgtgttcgcttcttgctg

SEQ ID NO: 91692 - DNA, 96 bp, Homo sapiens
cttccagagccaaggaggaagggttgtccgggtaacccaggtttttctgccttttatgtgccatttgcaaaggctttatactctttgacaaacaga

SEQ ID NO: 91693 - DNA, 87 bp, Homo sapiens
ctgagagagggaagtcgcctctgtgctcgttaatttggagtggcccctggagtcagtttcctacaccatccgaggccccacccagca

SEQ ID NO: 91694 - DNA, 82 bp, Homo sapiens
ccttcgagaaatctcgtctcgaccaagagctgaagctgatcggacgccgtggaggaccggctggacaggaacctgtggccct

SEQ ID NO: 91695 - DNA, 75 bp, Homo sapiens
cagtcaataggaagtacgagtggtcctatccttcccccaaagctggagcaactctggtcgtgtacaaggacttgc

SEQ ID NO: 91696 - DNA, 75 bp, Homo sapiens
tgccttcatgggctcaatggctcctggccatgttgctgagctgcagacgggctggtccgtgcacacctaccagac

SEQ ID NO: 91697 - DNA, 99 bp, Homo sapiens
atcaaactacatctgtagccaaaattgcacaatacaagaggaaactcatggatctttcccatagaactttacaggattgacatctttaagtatgtgatc

SEQ ID NO: 91698 - DNA, 80 bp, Homo sapiens
gaacttacctgcctcttcatgcagttctccatcgtgccatgtggacgaatgtggaacctcgctctgtggctgtgttccct

SEQ ID NO: 91699 - DNA, 82 bp, Homo sapiens
cccttccccacgcaaccccagatccatttacactttacatggccataatataattgtgataatgtaataaaatcaggaaaca

SEQ ID NO: 91700 - DNA, 75 bp, Homo sapiens
gcgctgcaggctcccaacgtggactggttgcggacgctgcgagtgcccaccagaagtatgtccgacaagcctggc

SEQ ID NO: 91701 - DNA, 50 bp, Homo sapiens
cggttcagccctttgatgaccgcagcagtatacctgaggtgcaccggagg

SEQ ID NO: 91702 - DNA, 75 bp, Homo sapiens
tgatcggctccttaccagctcacctctcaccgcgcatgtttggaggcaaatgttctgaaaaagactctgcatggg

SEQ ID NO: 91703 - DNA, 74 bp, Homo sapiens
atcatgtctgcgagccaggattcccggtaattcagtaccaaactgttcgatatgatatcctccccttatctcct

SEQ ID NO: 91704 - DNA, 83 bp, Homo sapiens
cctgctggttgtgcgaaccccgggcagcccgggaaatctccaagtcagaaaggttctgtacagagtaatgagatgtgtgacgg

SEQ ID NO: 91705 - DNA, 80 bp, Homo sapiens
ctgatggtcatcttttccaagtcagcccaaggccaaccccactgtcactctgttcccgccctcctctgaggagctccaag

SEQ ID NO: 91706 - DNA, 90 bp, Homo sapiens
atcgaggcttccctggttgcttagctgggtctcggccacggcgtggagagcggcaaggactttgaacatgtcggggatcgccctcagcag

SEQ ID NO: 91707 - DNA, 112 bp, Homo sapiens
gacggtggcggctctcggagccggcgcgaatccggcccccgcagcgggacccggccactgaggcggctcccagctgcgttggcgacatggccgacacccccagagatgccgg

SEQ ID NO: 91708 - DNA, 100 bp, Homo sapiens
cttatccctgcgtagaaacgcctgccaatgctttctcatttggacccagactccagatcgggagcatttaaatcaaacggtattgagatggattgggtta

SEQ ID NO: 91709 - DNA, 106 bp, Homo sapiens
cacgttcttccaagaaaccaacattcccaacagccaccaccaccaccagatgggggatatgagactttctactcggaatatcctgagtgttgcgtggatgtaaaac

SEQ ID NO: 91710 - DNA, 80 bp, Homo sapiens
ctgatcgcctgggtggttgttggcgtgtccctgcagcgaaggatcctggttggctttgtccagggatctgaaaccacttt

SEQ ID NO: 91711 - DNA, 90 bp, Homo sapiens
ggtaatggagaccaaaagtatgttgtaccttgtgacagaatatgccaaaaatggagaaatttttgcaggtttggatgcatctgctcagac

SEQ ID NO: 91712 - DNA, 100 bp, Homo sapiens
agaaagtggtggagattgtccgctcgagcctgaaggaccctgagaaaggtgtcatggagaaactccagctgggcccagagattctgcagcgggaaaatcc

SEQ ID NO: 91713 - DNA, 100 bp, Homo sapiens
gtactttttctgccatgaatttgcattcaggactcagggagtacacacttaccaggctaattcacctaaataagattgatcctcatgctccaaatgaaat

SEQ ID NO: 91714 - DNA, 100 bp, Homo sapiens
acagtgcacagacggctgacggctcacactatttttggagcatatgcaactcatcctttcaagttcagtgaccactattatggcacaggcgaaacttttc

SEQ ID NO: 91715 - DNA, 74 bp, Homo sapiens
tgcagttactaaagaggcagcaaagatcattcaagatgattcagtggtcctgagccttctgaagttaggcttct

SEQ ID NO: 91716 - DNA, 100 bp, Homo sapiens
tgaatatgtagcccttcccagtgaagaggcctggcatgcgtgggcagtgatgaacttcgaagctgtgctacactacaaacatcagaaccaagcccgcgat

SEQ ID NO: 91717 - DNA, 100 bp, Homo sapiens
gctgctgcacattaggttgcagtatgtggccagttatttgcctcagtaaaagagaagactatgaccgtctgaggcctttatcttacccaatgaccgatgt

SEQ ID NO: 91718 - DNA, 75 bp, Homo sapiens
ctacctgcagcgccgtgtggcacgacacaaaaatcagcaaatcagccggcaccaggagcagttcatccagatgct

SEQ ID NO: 91719 - DNA, 100 bp, Homo sapiens
tcccctgcgttcagtagccccgctctcccctgtcccgaaggatgaagcctgctgggagcgtgaatgacatggccctggatgccttcgacttggaccggat

SEQ ID NO: 91720 - DNA, 95 bp, Homo sapiens
gctgcccgaggggagcaaggacagatctggtggttctccggagagcagcttcctcgggtgttacatgagccaagccctcactgtacagaagagtg

SEQ ID NO: 91721 - DNA, 82 bp, Homo sapiens
ctcacctttgtcttcctggcaagcctccttgttctcattgaggctttgccacaaatgtcagtgcagaactctggctggcccc

SEQ ID NO: 91722 - DNA, 98 bp, Homo sapiens
aacccagctcctaccagaggacctcagaaaggagctctatgaactttgggaaagcttcctgcggctgagggagggatgaaacaagtacccatgtgacc

SEQ ID NO: 91723 - DNA, 82 bp, Homo sapiens
acaaggacatcctgcgcaaggccgtgcagaagaactgaagcgctgcggcatggcgcgcgcctgcctccaggccgtcaagtac

SEQ ID NO: 91724 - DNA, 107 bp, Homo sapiens
cggggaccggcggcgctggaggagcgaggcagctgtactaggactgggaacgggtttttcgttggaatatacgttgcacatttatggcgattctgagtgtgagggca

SEQ ID NO: 91725 - DNA, 75 bp, Homo sapiens
tcactgccagcggggctaccagggtgatggcatctcacactgcaaccgcacgtgcagagtgtcgatatcgcagct

SEQ ID NO: 91726 - DNA, 76 bp, Homo sapiens
gcgctgcgctcgcgcccggatccctcaggttctgcggggagtgtctccagccctgcctgcaggtgccatccccgct

SEQ ID NO: 91727 - DNA, 75 bp, Homo sapiens
ctcgtcgagttcttcgccccctgcaaatagtagtgatagtgaagaactttcagctggtgaaagtataactaagag

SEQ ID NO: 91728 - DNA, 110 bp, Homo sapiens
cttgggttcaggaccagttggatgatgagacgttatttccatcaaaaattgggcaggcacatcatggacaagtttcatacatttctccgccaattcaccttgactctgag

SEQ ID NO: 91729 - DNA, 100 bp, Homo sapiens
gaggatgagtccacaggcttggagaaggttacaggaggttccagtggcatcgggaagtgcattgctatcgagtgctataaacaaggagcttttataactc

SEQ ID NO: 91730 - DNA, 74 bp, Homo sapiens
aatactccccatgcatcagaagaatcttcaatggatgaggaacagtcaaaggttctctccataaatgaagaagg

SEQ ID NO: 91731 - DNA, 83 bp, Homo sapiens
acggctctctgctcattggggcgttgaggaaacagctttgctgagccatcaaggtctaatggaagcatggttcggcattcttc

SEQ ID NO: 91732 - DNA, 75 bp, Homo sapiens
cctgaaagcattaccgggttcgctaggctcacagatattgatgatgttaagaagttcaaaccgggttacctggaa

SEQ ID NO: 91733 - DNA, 74 bp, Homo sapiens
tatggcgaacaggaactggatgccaactctgcccttatggaattggacaaagcccagaagaatcagtgcggttt

SEQ ID NO: 91734 - DNA, 100 bp, Homo sapiens
gcgcagaggaggagcttgctgcagagttaagactttgaccccgacgcaggcttcagtgattgccgcggatcagaagcctgagcactttggctcgagacaa

SEQ ID NO: 91735 - DNA, 100 bp, Homo sapiens
ggatcgtgtgcattacaggagtcctccacttgccactggggtattgttggaattcagcaaagcccaggtaaactctgtgccaaccaacggactgagccaa

SEQ ID NO: 91736 - DNA, 100 bp, Homo sapiens
gctaagagatatctgcaatgatgtactgatcctgggaagactctgcctgaagcccttgattattgcactgtttggctacagacagtgcctggagaaatag

SEQ ID NO: 91737 - DNA, 75 bp, Homo sapiens
ctgaaagatggcggcggcgtctgtctctgcggcttctggttctcacttgtcgatccctgcatgtcactgagtcca

SEQ ID NO: 91738 - DNA, 100 bp, Homo sapiens
ctgatcatcaagccagacaacttctggcagaaacagaggactaattttggcagttctaaatttgaatttgaggaagtttgtggtatatgaagtattgcga

SEQ ID NO: 91739 - DNA, 75 bp, Homo sapiens
caatttttgctatactcctgttctggggacagtttggtattaaaacctggaagctccgaccccaggagccagccc

SEQ ID NO: 91740 - DNA, 50 bp, Homo sapiens
ggggaagaaggtccgcgttaaatgattcagaatccatggctggaagaggt

SEQ ID NO: 91741 - DNA, 100 bp, Homo sapiens
tgctaaactgaacaagcccttcctgtttgacaccaagcctctcattgttcaaatttacatagtacatgacgaagttaaggataaagcttttgaactagaa

SEQ ID NO: 91742 - DNA, 83 bp, Homo sapiens
ctggaaggtgcgtgtggggctgggtctcggagtgggagacgtggagtgcagtttggccagatcctggatatcctggtatcacg

SEQ ID NO: 91743 - DNA, 100 bp, Homo sapiens
ccatgtcaggtccaaaaacagagacttttccctcccagtccctaagtttaagcaaaaacctcgctctatcctgtccaagtatgacgaagagcttgaaggg

SEQ ID NO: 91744 - DNA, 90 bp, Homo sapiens
acggctcacctgtgcgggatggaacaaaagttacagaatgtctgaaggggacagtgtgggagaatccgtccatgggaaaccttcggtggt

SEQ ID NO: 91745 - DNA, 75 bp, Homo sapiens
cgagaacgtgcgggaagagaagatcatcgagcatttcaaacggaccgtggcaaggaggtgtacagccctgacttt

SEQ ID NO: 91746 - DNA, 83 bp, Homo sapiens
ctgaggctacctgtgaacagtacgcagtgaatgttgtataccaagcttggctacgcaggcaacactgagccccagttcattat

SEQ ID NO: 91747 - DNA, 83 bp, Homo sapiens
cggctttgaccgagaggctgctggagctcgtgtttggacgcggggatatgagactttctactcggaatatcctgagtgttgcg

SEQ ID NO: 91748 - DNA, 100 bp, Homo sapiens
gaagatcaagaagctcattaagagcttggaggcggcccgcgggttggtcaaagaaaaagtgatgtatgaaaaagaggcaaaacaacaagaagaaaagatt

SEQ ID NO: 91749 - DNA, 50 bp, Homo sapiens
ctcccgagtagctggggttacagactgagggagctggccgtgcgactggg

SEQ ID NO: 91750 - DNA, 101 bp, Homo sapiens
ccacttcgactcagctcaaagaagtgttgtcctcctgatcttaattagggtcagaaacgtcacctccttcccaccaccagatgctgtctttgcatttcaac

SEQ ID NO: 91751 - DNA, 100 bp, Homo sapiens
tataggcgtgagccaccgtgcctggctgaagtatccggagttactcgtggcttcctataacaacaatgaagatgcccctcatgagcctgatggtgtggcc

SEQ ID NO: 91752 - DNA, 90 bp, Homo sapiens
ccggctcatccgcaacgagaaaggcgagagcccagaacgcttcctccagcttggcgccaaggtcccaaagggcgcactgctgctcggccc

SEQ ID NO: 91753 - DNA, 100 bp, Homo sapiens
agattctgtccaagaaatacaaggagcttccggagaagaagaagggtgagaaaattcatgaagacatctttgacatcatagaccgagaagcagatggaag

SEQ ID NO: 91754 - DNA, 82 bp, Homo sapiens
ttcaacaaccccaccacggagttccggtacaagctcctgcgggccggcggggatgatcggctgaatgtaacagaggaactaa

SEQ ID NO: 91755 - DNA, 75 bp, Homo sapiens
acaaagaagaccacacactgggaaacatcattaaatccagccatggcaatgacaggctcaacaccttgctcatcc

SEQ ID NO: 91756 - DNA, 50 bp, Homo sapiens
gaagatttccaatcatttctaaagaatactctgaagatagtaactccgag

SEQ ID NO: 91757 - DNA, 98 bp, Homo sapiens
gggatattgtagaaactgtctttaacctggcctgcactgcccaaagtcttggaaacttgctggatatgatgtaccgggagccagcacgatggtcctac

SEQ ID NO: 91758 - DNA, 75 bp, Homo sapiens
acatcatccctgccctggatcggcctggagccagtgcccaagtacggtttgggttatgggacccacctgatgaac

SEQ ID NO: 91759 - DNA, 85 bp, Homo sapiens
ccaacatcacgcccttcggcgccgaccagtggtggacttgctttgtgaagagacagttcatgaacaagagtctttcaggacctgg

SEQ ID NO: 91760 - DNA, 100 bp, Homo sapiens
ttcgccacagttcctaccttatgagctcggttttcttatgcttataagagtggaacaggacctggtgacgatggtggagcagctggccagattcctgggg

SEQ ID NO: 91761 - DNA, 83 bp, Homo sapiens
aaagagtcttgttatttcttctttgagaaaaacctgaaagatgtctcattctccaacatcttcaaataaagaagtggttatga

SEQ ID NO: 91762 - DNA, 100 bp, Homo sapiens
accttcaccctgtatgactttgacaacaacggcaaggtcacccgagaggattaccgagaggatgggatggatctaggcagtgacgccggcagcagcagca

SEQ ID NO: 91763 - DNA, 76 bp, Homo sapiens
gccgtggcgtcttggtgttctccacgctggttcgcaggagcctctactcattttgagaattcctttgagggttcat

SEQ ID NO: 91764 - DNA, 50 bp, Homo sapiens
ggaacagcctatgtgggcttccacggagggaagaaggagaaagggccaac

SEQ ID NO: 91765 - DNA, 80 bp, Homo sapiens
ggttcagttgctgagaagcctgacataccaggactgcctgagacaagccacaagctgctgggatagatgggcagcagaag

SEQ ID NO: 91766 - DNA, 112 bp, Homo sapiens
gccagaatgagtacctacgctatcaggaggccctgagtgagctggccactgctgaatcatcctctacaatttcatctaaccagagtcaggagtctggttatcagagcggccc

SEQ ID NO: 91767 - DNA, 75 bp, Homo sapiens
cagtatcttggtgttgctgaagagatcttgatgcccggccttgggacttccaggcagaggagtgtgcccttcgtg

SEQ ID NO: 91768 - DNA, 100 bp, Homo sapiens
catccaaatcatggggggtatgggcttcatgaaggtgggctacgaactgaaggatgagatcgagcgcaaattcgacaagtggcaggagccgccgcctgtg

SEQ ID NO: 91769 - DNA, 80 bp, Homo sapiens
cccacagccgggcgttgggggaaagctgtttgatgaagacaatccagtacacaagtctggaaccagatacatgttcacaa

SEQ ID NO: 91770 - DNA, 95 bp, Homo sapiens
atctctcccttcgcccagttccctgcatcctaagactcgaaggcagcacaggacctggaaaaattacatggacttaagtcacaacagattatctt

SEQ ID NO: 91771 - DNA, 80 bp, Homo sapiens
tgccctcaatgagcacatgaccagcttagcttctgtcctaaaggtactccaaagattcaggtttactcacgtcatccagc

SEQ ID NO: 91772 - DNA, 108 bp, Homo sapiens
gccctgcctactatctatgttgttacccccacctatgccagggactatgcagccatcgtcttctttgctaacaaccgctttgagacagggaagaaaaaactgcagtat

SEQ ID NO: 91773 - DNA, 74 bp, Homo sapiens
ctacttccagaaaaagtgctcctgggactccaggataccagttaattcatgggagcctcttctactgccacaca

SEQ ID NO: 91774 - DNA, 101 bp, Homo sapiens
tacagagcggcctgcgccagcgagtactccaaagattcaggtttactcacgtcatccagcagagaatggaaagtcaaatttcctgaattgctatgtgtctg

SEQ ID NO: 91775 - DNA, 82 bp, Homo sapiens
ccgacctcgacgtcttgcctgtgtcccacttgttcgcggcctataggtagctacagcaagctgggtagcaggcagatccaaa

SEQ ID NO: 91776 - DNA, 83 bp, Homo sapiens
accggcggcctggacccccccatgggagacgctgagtacttggcggccttcagagggtctcaacgcagactacgtgaagggag

SEQ ID NO: 91777 - DNA, 100 bp, Homo sapiens
gtgaaatttggctttcattcatgaatgagatatttgaacagtttgtcaagacaagaataaaagaagaatacaaggaaaagaaaagtaaattgctgctagc

SEQ ID NO: 91778 - DNA, 89 bp, Homo sapiens
aattggaggaagaatgatagcacagaaaatctctgtcagaactggcatttccacaggtggccgtgtaaatcctcgggaaggaattgtgc

SEQ ID NO: 91779 - DNA, 90 bp, Homo sapiens
cagctctttcctttccgtctggcggcagccatcagttctgtcaggccaagcagaaggcagccttgctggagctgctgcatgaactctaca

SEQ ID NO: 91780 - DNA, 75 bp, Homo sapiens
ggaccacccaccatgcctatccagcgtggtaccatgcgacgacgctatgaagatgatggcatttcagatgatgaa

SEQ ID NO: 91781 - DNA, 82 bp, Homo sapiens
gtcccagatatagccgttggtacaaagcagccattgtttgatgtcctgtgactgagaaaccaggctttaaactttatgcctt

SEQ ID NO: 91782 - DNA, 102 bp, Homo sapiens
cggtacttctgccactgctgctccgtggagatcgtcccgcgcctgccgatgagcagcaccagcagtaagagggctccgaccacggcaacccagaggctgaag

SEQ ID NO: 91783 - DNA, 124 bp, Homo sapiens
tccttcagctaccgggagatcttgcgggaaaaggagagctcggctgttccagccagggtctgtttctgtcgactgtggaccacttatgtgcgatccgtggaccacttgcgtgcgatctgtcggc

SEQ ID NO: 91784 - DNA, 74 bp, Homo sapiens
ctaacagaactgctgggcgaatctgagcaccaactgcacctcaccaggatgacgtagctttgccaaagacttag

SEQ ID NO: 91785 - DNA, 75 bp, Homo sapiens
gaaggacacagctactactacatctataaacgggccttcttcatcatctgcacctccaagctgggcccaccccag

SEQ ID NO: 91786 - DNA, 100 bp, Homo sapiens
gggctgtgattttcagaggggaatactaagaaactcagattgatggacaacttttcttaattaagcaccttttgatacttcgtgaacaaattgctccatt

SEQ ID NO: 91787 - DNA, 95 bp, Homo sapiens
tctgctgcggcgcggggaccgctgtgctctcggtcatctaatacatgggagaaacatggattttggagtatttcttgggtaagtaaagaacaaag

SEQ ID NO: 91788 - DNA, 100 bp, Homo sapiens
aagtgagagtcattgatcccaggaaacaagagattgttgctgagtggattagaacaagatgacatgagaattttatacaaataccttaccacctcccttt

SEQ ID NO: 91789 - DNA, 98 bp, Homo sapiens
ggcgtccgtcctgcgcatcgcagtgtgcacagccttcactgcagagcacgccacgcatgggcacgtcaagatgcaccatgcctacaccaacgtggtgg

SEQ ID NO: 91790 - DNA, 98 bp, Homo sapiens
gaagatactgcagagatattctactccatctcattcattgtacagtggtgatcatgtgtgcgagcagtgacaccatccggagcatcatgctggtggcg

SEQ ID NO: 91791 - DNA, 100 bp, Homo sapiens
cagctccatcaacctcacgctgcacctgggcatccagatgtacctctgcaacagagagcactatggctacctgcccatccccctgaagccccatcagaca

SEQ ID NO: 91792 - DNA, 50 bp, Homo sapiens
ctgctcccatcattgatgtggtgcgatcgctcaacagacagtcagctaaa

SEQ ID NO: 91793 - DNA, 101 bp, Homo sapiens
caggattcgattcttggtgttaaacaagacaacgctgaaggctcggtgcagcagccctgcaaagattgctcgctgtaagcagctcatctgtgaccccagct

SEQ ID NO: 91794 - DNA, 97 bp, Homo sapiens
cacggacgaggccgccctcagttgctgctccgacgcggaccccagtaccaaggttactactttgggattgtgatgatcgaagctatagctactacgt

SEQ ID NO: 91795 - DNA, 50 bp, Homo sapiens
agagggactgccataacattcccaaaggttcgagaacttgtcttggacaa

SEQ ID NO: 91796 - DNA, 83 bp, Homo sapiens
ctggcgggaaggctctggcttgggacgaaagtgtcaaggcattacggctcccattgagacaatgcagatcttcgtgaagactc

SEQ ID NO: 91797 - DNA, 75 bp, Homo sapiens
ccctccgggcccagtctgtctgtccgtggtggatctaaggccaagtcatcaaggcatgggacattggggtggcta

SEQ ID NO: 91798 - DNA, 74 bp, Homo sapiens
cctgaccacaatggggaggacaacttcgcccgggacttcatgatttctcgcatggaatatgtccattcaaagaa

SEQ ID NO: 91799 - DNA, 83 bp, Homo sapiens
ggagatcacaataaggaactccccgtatagaagagaagactcaatggaagacagccctgggcgctgcctatggcacagccaag

SEQ ID NO: 91800 - DNA, 75 bp, Homo sapiens
tagaagctgaaagaggagaagttcttggaagactaagaagtccaacattcggttgtatcagagtaagatggacgg

SEQ ID NO: 91801 - DNA, 83 bp, Homo sapiens
cttcccacgacagccctgcccttcccatgaggcaggctcttcagatggccgagcctcgatttaacaacccctacttctggccc

SEQ ID NO: 91802 - DNA, 74 bp, Homo sapiens
gaggaactactacgaacaatggggaaagcttacagactgtgtgctgtttgcagacaaggtcccaaagacagcag

SEQ ID NO: 91803 - DNA, 96 bp, Homo sapiens
tagcgccaccatcacctggaggaaggaagggggcagcctcccaccacaggaagagcctaaaaggcggcaacaccaacacctcttgacatggaaata

SEQ ID NO: 91804 - DNA, 100 bp, Homo sapiens
gcaggcctccgggcccggcgccgccgcccgcagggcccttggaagaaaatcctcgctgtgtccaggctgaggcggggggctaatgacagtgtgagctcta

SEQ ID NO: 91805 - DNA, 90 bp, Homo sapiens
ttgatggatttactctggaaagaagctggtttggatcttcggaatggtagtgctattggccttccagtcccacctatcacagccttaatc

SEQ ID NO: 91806 - DNA, 90 bp, Homo sapiens
agcattgcctggggtggatccaaatgactttagtaaatgcatgctgtgagttctttggaattgtgaacattcttttgaaatatggagccc

SEQ ID NO: 91807 - DNA, 100 bp, Homo sapiens
cttcccaacaccatgccgtccgccttctctgtcagctctttccccgtcagcatcccagccgtgctcacgtaatgagctgagcatgaagacagattcccgc

SEQ ID NO: 91808 - DNA, 83 bp, Homo sapiens
cggcggctcctgccctctcgctttccctctcgcgtctctggctgcagctcctggccactctgaatccacttcctggctctgga

SEQ ID NO: 91809 - DNA, 75 bp, Homo sapiens
atggtgcagaagaaaccagccgaacttcagggtttccaccgttcgttcaagatcccagatgcagtgactggttac

SEQ ID NO: 91810 - DNA, 50 bp, Homo sapiens
tgaagatggtgtcaaagagaaattctggctacagatgcacatgttgaatg

SEQ ID NO: 91811 - DNA, 51 bp, Homo sapiens
gagaaagctatgattctgatgaagtactgctggctggagcggatgtgaacc

SEQ ID NO: 91812 - DNA, 83 bp, Homo sapiens
ctcgctcacttgtgatgccctgactgagctgctggctaagatcaccaacacagacgtggttgaaatcacaaagattagacacc

SEQ ID NO: 91813 - DNA, 100 bp, Homo sapiens
cgtggttggaatgtatctggctcagaactatgatatgctattaactgagtacttggatatgaaaaatactcgtacggcctctgaaccatcagctcaacta

SEQ ID NO: 91814 - DNA, 95 bp, Homo sapiens
ggagaaacaggatgtggacgttgatctctcagccaaagaaaatggttctcctgaagaacatgcaatctatgtttgggatcatttcatagctcagg

SEQ ID NO: 91815 - DNA, 82 bp, Homo sapiens
agttcgagcactaatatttaagaaagaagatgttaactttcagggtaaatgttgtccagactcagagtttaagaaacacttt

SEQ ID NO: 91816 - DNA, 96 bp, Homo sapiens
cttccccatgatgatcctgccatgcaggcaggccctgagcacgctgctgtgtgagcagcagggcaattgaaggaacagactaaaaatcgtgtcctg

SEQ ID NO: 91817 - DNA, 75 bp, Homo sapiens
ctatgagcgggaccaccctgggcacagcaggcatcggaggaggagtatttgaagacttctgagcggaggagtcgc

SEQ ID NO: 91818 - DNA, 130 bp, Homo sapiens
ttctgtgaggcagcctagtttgcatatgagtgctgctgcagcttcccgagacatcaccttgattctactctaaaagtcaccaggaaaaattcagctccactggtcctggctctaagtctactagcaaaat

SEQ ID NO: 91819 - DNA, 78 bp, Homo sapiens
ttagctgtgctcgcgctactctctctttctggcctggaggctatccagcgtcactgcagccagaggggtccagaagag

SEQ ID NO: 91820 - DNA, 100 bp, Homo sapiens
gactaggccccaatttagtgggggtagccccttccaggttcatcacaagacctatgaagatatagataaacgtggaaaatatgaccttttacgttcaaca

SEQ ID NO: 91821 - DNA, 75 bp, Homo sapiens
ccggggctgcggtcagcgcttcgatcctgagaccaattccgacggtcaagaaagatttggaaacatgacgagggt

SEQ ID NO: 91822 - DNA, 100 bp, Homo sapiens
ggacgagtggccgactctggagcccaggctgttgcttcccagactggtggtgaatcctccatagtctggcagccttaagtgccttgaaacaattttctga

SEQ ID NO: 91823 - DNA, 100 bp, Homo sapiens
cgagaggatctggtgtaccaggcgaagctggccgagcaggctgagcgatacgacgaccctctttcccagctgcccgctcctcagcacccgaagattcgcc

SEQ ID NO: 91824 - DNA, 76 bp, Homo sapiens
atctttattatctcattgaagcttggaattacatagctggaaaggatcttacagtgtctatgtctctccccaacgt

SEQ ID NO: 91825 - DNA, 75 bp, Homo sapiens
ggccagggcagcccttcaggagctccttagtaaaggcatccgtgtcattctggaccttactcccaactaccgggg

SEQ ID NO: 91826 - DNA, 90 bp, Homo sapiens
tttctcgaatttgttcccttgttggaatgccacaacctgatttctcctttcttaggatgccacaggtggtcagaatggcttcaacattcc

SEQ ID NO: 91827 - DNA, 99 bp, Homo sapiens
agccacgggcaccgcggccgccgcctctttagccaccgccgccggcagcgaagacgcggagaaaaaagttctcggtctggaacaaaaagaatgcaaatg

SEQ ID NO: 91828 - DNA, 90 bp, Homo sapiens
aagctgaagaaaacggagacgcaggagaagaacaccctgccgaccaaagagatgccggtggtggtgtgcacattgagccccggtatagac

SEQ ID NO: 91829 - DNA, 89 bp, Homo sapiens
taccttcaagtactattgaacctgcagaagcccagagtgcctcttcagaccttcctcagtttcttaaacaattaggtctacatcctaac

SEQ ID NO: 91830 - DNA, 50 bp, Homo sapiens
cacagccaagtgcgggagtccacgtactatactggcaattgctggagaag

SEQ ID NO: 91831 - DNA, 100 bp, Homo sapiens
gccgacgcggggcccatggccaggaccaccagccagctggctgctctttggcgtaaattgcaatcgattagggatcgtttctcagaatcaagttagaagt

SEQ ID NO: 91832 - DNA, 100 bp, Homo sapiens
cacaggttcccacgctggcgcccggcgaccgggtggggctgcgacagctttctctgacttcctgatgggcagctccaaggacctggccaagcacatccga

SEQ ID NO: 91833 - DNA, 101 bp, Homo sapiens
ttcccggagccggagaccctcccttgaaaccggcactgggacttctcgatctctggaggcacctgttgcaagtgacagtgcctccggagccagcgtggtgg

SEQ ID NO: 91834 - DNA, 90 bp, Homo sapiens
cccgccgtcgccatgggccagaacgacctgatgggcacggccgaggacttcgccgaccagtcaccaccaagtaagcgaagaaaattagag

SEQ ID NO: 91835 - DNA, 100 bp, Homo sapiens
accttataaattttttgagaagcatctttcaagtgtttactcatttgcctgtggcagtagagaagagcatcacagaagttgctcaggagctgacagagct

SEQ ID NO: 91836 - DNA, 82 bp, Homo sapiens
gctatcagaactgctaaaggagagaagtttgtcatgcaggaggagttctcatggtggatgcttccaaaagcatcgaagctgt

SEQ ID NO: 91837 - DNA, 50 bp, Homo sapiens
agcctcccaagtagctgagactacaggtgcatgccaccacacccagctaa

SEQ ID NO: 91838 - DNA, 83 bp, Homo sapiens
cctcgccatggcgcggctcgcggactacttcgtgctggtggcgttcgggccgcacccgcgcgaagccccatgtgccactcccc

SEQ ID NO: 91839 - DNA, 98 bp, Homo sapiens
cgagagatggtcaggtctggagctcgaccgggccagatgcctgaaaacttcatgcctcctgttcccatcacatcaccaatcatgaacccgttgggtga

SEQ ID NO: 91840 - DNA, 83 bp, Homo sapiens
cagaaccttgacctccttgaacagttgcagattctgcatatacagactcatgaaaaattcatcagagatagtcaagaaaaacc

SEQ ID NO: 91841 - DNA, 100 bp, Homo sapiens
gtctggaacaggctgcgttagtcaactattctcggctctcagagtatgccaaaatcgaagtgttccttgcctgtatctccccttggttcaatagctacca

SEQ ID NO: 91842 - DNA, 100 bp, Homo sapiens
gggcgacgagctgaccctgggagacatcgacgaggcatttcatccttcatgaagccattcaggattttgaattgcatatgagtgcttggctcttccttct

SEQ ID NO: 91843 - DNA, 100 bp, Homo sapiens
ggaccacctgttcgtacagaatacaggcttattgtagaaaatctttctagtcggtgcagttggcaagatttaaagaaggacaggtggagggaagcgcccc

SEQ ID NO: 91844 - DNA, 50 bp, Homo sapiens
atgtttgacgacactgatggtttgggcaagttaaagtcttcagagccctg

SEQ ID NO: 91845 - DNA, 75 bp, Homo sapiens
gagcccgccgtctacccgtggccgctgccggtctacgttgtaaagaagaaagttctaccctttctgtcaaaatga

SEQ ID NO: 91846 - DNA, 97 bp, Homo sapiens
gtcttggatgcagaattcttaaagctgcaagctttcttcctggtggcagatgacatcatggattcatcccttacccgccggggacagatctgctggt

SEQ ID NO: 91847 - DNA, 73 bp, Homo sapiens
gatccatttctcctattgaggagtcaacgtgatttgaagatattaaagctagaaattggaactagaaaatcaa

SEQ ID NO: 91848 - DNA, 101 bp, Homo sapiens
aacaattgctgttcttggagctggtcgaacatctgcactctcagcctctacactggcctggcaggcggaggagacaaggacggcagcaaggtgacaacagt

SEQ ID NO: 91849 - DNA, 100 bp, Homo sapiens
tgcaggtctgcctcttccaggaacgggaacatgttttacgcctctactcagaaaatgaccgactgagaatcagcagggatggtgagagaaggtcagctaa

SEQ ID NO: 91850 - DNA, 75 bp, Homo sapiens
cggtgattgaggacaagaccatcgagctcatgggccagtatggaaattaccagcagtaagggacacacattctgg

SEQ ID NO: 91851 - DNA, 100 bp, Homo sapiens
ctcttggcttctgaggcatctgacaaggtatctcagatgaagacatcatcaacattactcttcctactggagtccccattcttctggaattggatgaaaa

SEQ ID NO: 91852 - DNA, 83 bp, Homo sapiens
aagagatccagggcttcctcgattgtgccgcgagggctcaggtctcggcgcggaagatggccggcggcgtggacggccccatc

SEQ ID NO: 91853 - DNA, 99 bp, Homo sapiens
cacagaagctgctgaaattcctgaataagcactacaatctggagaccacagtcccacagaggagtaaaggatgttctaaagaagagactgaaaaactat

SEQ ID NO: 91854 - DNA, 98 bp, Homo sapiens
agcaggacaatttccctgaactaagcgaggaactctggcgccccttaccagcttccagtctctcgaggtggccagtgtggtgcttggtccttgtttcc

SEQ ID NO: 91855 - DNA, 75 bp, Homo sapiens
ctcagcccaggagaggaaggagcggctgcggcgcgcgctggaagactctgaagaagaagctatggagactacacc

SEQ ID NO: 91856 - DNA, 75 bp, Homo sapiens
ctgcggagcatgtcgaccccggcccggaggaggctcatgcgggatttcaagcggccgacggtcgcaaggtcctac

SEQ ID NO: 91857 - DNA, 75 bp, Homo sapiens
ccaacttcgccaccctgcggtggattgactacggcaaagtggccactcaggtattgttgcagcatctggcagtga

SEQ ID NO: 91858 - DNA, 100 bp, Homo sapiens
ggccgaactgctgtatgggctctgttatcaatactctggctgaccatcatcatcgtgggactgactttggtggaagtccttggttacatgtcattattgc

SEQ ID NO: 91859 - DNA, 100 bp, Homo sapiens
gtcatcagcacaggatatgccttgtcagatctgctacttgaactaccctaactcgattctctaaccatggcacaggtagagaaacgtggaggtttgctcc

SEQ ID NO: 91860 - DNA, 100 bp, Homo sapiens
ccccctgcaagctctcttcatctgggccattcttcagaataagaaggaactctccaaagtcatttgggagcagaagacagatggagctcctattgtctat

SEQ ID NO: 91861 - DNA, 75 bp, Homo sapiens
gattatttccagcgcccattcatgttggtttattacccagaactctttgtctgggtcagtcaagaaccatttcca

SEQ ID NO: 91862 - DNA, 88 bp, Homo sapiens
tcacagcttttgtcagaagtgtattgataaatggtgttcagtgtgaggtggagctgatagagtccatagaggacctgagacaacctgg

SEQ ID NO: 91863 - DNA, 97 bp, Homo sapiens
gcacgggacactggctggtggaagatcatgttcgaatatgggaagttttaaagacagaggagcagcctgaaaaggtgatggcaaagcagatggagtt

SEQ ID NO: 91864 - DNA, 98 bp, Homo sapiens
cgtggtctcggtccgaggctttgaggagagtgagcctctcacaggcttcctcaccacggcggcagtccctgccccggtgggccgagtgcaggctgcta

SEQ ID NO: 91865 - DNA, 104 bp, Homo sapiens
cgcagggcctgcagcgggagctggacggcgagcgcgagcggcgcgagaaagttgattcttcaccacactgaaaccattaggaaaaatccttgtggttaacagca

SEQ ID NO: 91866 - DNA, 75 bp, Homo sapiens
ccaaatgaatttgcaaaacttactgtaggaatccatcaacagcatcaagtccagactaagcaaaagtgggcacat

SEQ ID NO: 91867 - DNA, 82 bp, Homo sapiens
gttccgggaagatggtgctgatcaaggaattggtatttgtggtgcagcagattcccaacagtaacctcctcctcctggtgac

SEQ ID NO: 91868 - DNA, 83 bp, Homo sapiens
cagaccatgggcctgagcatcaggtcagcccaaggccaaccccactgtcactctgttcccgccctcctctgaggagctccaag

SEQ ID NO: 91869 - DNA, 75 bp, Homo sapiens
cagccctgagggaggagacagaagcctgggccagagtcatttgatgtggtcacaaaatgtgtgagtttcacacta

SEQ ID NO: 91870 - DNA, 76 bp, Homo sapiens
aggcccacctcaaggagtgcgagcacatcaaatgcccccactccaagtacggagatggggactcgcagtgttgccc

SEQ ID NO: 91871 - DNA, 100 bp, Homo sapiens
cttgaatgacatccgagcgaaagagaaagagatagtgtgtgtaccatatcagtggcgtgtaactatgctcatcattgttcttgtcaatgcctttgtgtct

SEQ ID NO: 91872 - DNA, 120 bp, Homo sapiens
attttggtatgcagataatcactgggctcatgggtcttgctctttacaaagaggagccagcaccgctctttgaccttgccatgcttgccttagatagtccagagagtggctggacagagg

SEQ ID NO: 91873 - DNA, 75 bp, Homo sapiens
cgattctgcctgtccaagcctggtgctggagaatctggtaaaagcaccattgtgaagcagatgaggatcctgcat

SEQ ID NO: 91874 - DNA, 100 bp, Homo sapiens
ataaatccgaaacacatgacaaagttgctgcactggtcaagaaaaggattttaccaaatgttgcaagaactctggagttcttatggtagtaaaatgccgg

SEQ ID NO: 91875 - DNA, 100 bp, Homo sapiens
tgaggtggctcacgttgaccaactctttgatgatgcatccaggaagagagaagggcacagttacctaagtatcaacgtaatcttcctcggccaggacagg

SEQ ID NO: 91876 - DNA, 82 bp, Homo sapiens
tgcggcaagatcgtgtatcccacggagaaggtgaactgtctggataagagctagagccggtgcaggccacgcagaacaagac

SEQ ID NO: 91877 - DNA, 82 bp, Homo sapiens
tttgagcccggaagcgcagaagctggagccttcacgtaaatgggtccagtcatgcctcccagtaagaagccagaaagctcag

SEQ ID NO: 91878 - DNA, 96 bp, Homo sapiens
aagggaaggaaatgtgcccaacatcatcattgcggtggtgccgagtcccacaaaggaacctggaatccagctgagtgggcacgtgctgcctgtcac

SEQ ID NO: 91879 - DNA, 115 bp, Homo sapiens
gctgaaaattttccccagcagcactatgctaaggaaactccaaggcttgccttcaagaataactgcgaactacttcactccagttctcgcctgaattaccaaagcagcgttcagg

SEQ ID NO: 91880 - DNA, 100 bp, Homo sapiens
gaccacgagaactgggtgtccaactacaacgccctgcgggctgctgccggcatccagccgccaggatctgggcatccaggcacggccatgacccctccga

SEQ ID NO: 91881 - DNA, 111 bp, Homo sapiens
gggcgctgcctggcccaggcgcacacggaagtggaataagacgagttggaagaagacctgatcaacaacttcagggtgaagggaaaataattgatagaagaccagaaaggc

SEQ ID NO: 91882 - DNA, 101 bp, Homo sapiens
atcaagactggtgccccttgccgatctgagcgcttggccaagtacaaccagctcctcagcatttttgaaacgttggggttgttggagtggttggattttcc

SEQ ID NO: 91883 - DNA, 98 bp, Homo sapiens
aacgcaaggtgcctgcctcccgcatcagccgcttggccaactttggggagtggctgagctcccttcgggcccatgttgtgcgcactggcattggacga

SEQ ID NO: 91884 - DNA, 74 bp, Homo sapiens
agaagtatccaatagggatattgtagaaactgtctttaacctgaaaaagcttgtggtgaaggggggcaaaaaaa

SEQ ID NO: 91885 - DNA, 75 bp, Homo sapiens
cacgttcacggtgccccggcgccacctggagagaggccgcgtcctgggcagagaatgattacggacctgaagcca

SEQ ID NO: 91886 - DNA, 83 bp, Homo sapiens
gaagttcgagcactaatatttaagaaagaagatgttaactttcagcatgattatgatatgagggtggatgatttccttcgtcg

SEQ ID NO: 91887 - DNA, 100 bp, Homo sapiens
agatgaatgcttctcacccggaaacaaacttgccagttgggtatcctcctcagtatccaccgacagcattccaagctggaggtgcagtgtcctcctggtg

SEQ ID NO: 91888 - DNA, 84 bp, Homo sapiens
gcgcaaggtcgccctcaaggccatgatcaaaacggctgcgctggcctcggcacaccagtgccacccgctgccccggacgctgag

SEQ ID NO: 91889 - DNA, 96 bp, Homo sapiens
gcggctcgtggtggatggcatggggcgctttggcagctgcaagctttcttcctggtggcagatgacatcatggattcatcccttacccgccgggga

SEQ ID NO: 91890 - DNA, 100 bp, Homo sapiens
tacctgcagaaggtctctggagacatcttcagcagggcatcttgacccagccgaaaaagttgaagatgctcaccccaagttatggtgtgctctgagcgaa

SEQ ID NO: 91891 - DNA, 78 bp, Homo sapiens
ctgcttacattccaacaaatgtcatttccatcactgacggacagctgtcggaaaaggtaacagaagatggaactcgaa

SEQ ID NO: 91892 - DNA, 51 bp, Homo sapiens
atgttcgtggcccaggccgtgctacagtacaatgccagggagtactacgac

SEQ ID NO: 91893 - DNA, 100 bp, Homo sapiens
catcgccactgccaggcatcgcagggatattcaagattaaagcagtgcaattggctgagaaactccttcctgcctttaacacacctactgggattccttg

SEQ ID NO: 91894 - DNA, 134 bp, Homo sapiens
aacctaacaacagcagtggcagcatggagaaacgcaagtccatgtacacgcgagattataagaagcttgggttcattacggtctggaaaatcccgaagcagaagcccgtattcatctaggcattcaagatctcg

SEQ ID NO: 91895 - DNA, 100 bp, Homo sapiens
agaagagctcacgggcgtgcggttcaaggctcagctgaaggacccgcagggccccgggccagtgttatagttttgccgctggactcttccctcccttccc

SEQ ID NO: 91896 - DNA, 100 bp, Homo sapiens
ctttaatatgctggatgagctgctgaagcccaccgaattagctgcaaggagcatcccggctggagcagagccaggtgagaaaggcagcgccagaaaagca

SEQ ID NO: 91897 - DNA, 90 bp, Homo sapiens
ctctccgacgcaagactgtcccggcccggagattgccttgcaacaggtttccatgttcttccgatcagaaccaaagtgggaggtggtgga

SEQ ID NO: 91898 - DNA, 82 bp, Homo sapiens
tgccgctgccgctgccgcacctccgtagctgactcgctggagcagttcaacatgatggagaacgccatcagctccagcagcc

SEQ ID NO: 91899 - DNA, 76 bp, Homo sapiens
atggacaatttggaatccacaccaggtgactttatacacactttgggagatgcacatatttacctgaatcacatcg

SEQ ID NO: 91900 - DNA, 82 bp, Homo sapiens
ctgtcacaggccatgctctggcaaaaacgtgaaaggtgtagcagtcactcggcctacacccacagcatcgaccttgtgaacc

SEQ ID NO: 91901 - DNA, 82 bp, Homo sapiens
gcccatgctcttctcaaacagccagagacaatgcagatcttcgtgaagactctgactggtaagaccatcaccctcgaggttg

SEQ ID NO: 91902 - DNA, 101 bp, Homo sapiens
aggaactggagaggaccaacaaattcatcaaagacgtaatcaaagacggcaacgcgcttatcagcgctatgagaatcaggatctggtgattttgaagagaa

SEQ ID NO: 91903 - DNA, 74 bp, Homo sapiens
ctctctcagaacttggtgctgctagaatgcaggaacagcagatgcagatgttggacaaatttcccatggaagga

SEQ ID NO: 91904 - DNA, 50 bp, Homo sapiens
ggaagtggatgcctccatttttaagggcgaggaggcttccgaggaggcag

SEQ ID NO: 91905 - DNA, 95 bp, Homo sapiens
aagctgaagacatcaagaagatcttcgagttcaaagagaccctcggaacggtcaaccggatgcacatcagtcccaacaatcgaaacgccatccac

SEQ ID NO: 91906 - DNA, 118 bp, Homo sapiens
ccaggtccgacccgcgaacccctctgggatccccgccgctctgtctacaacccgaggtgagaagccctaccactgcaactgggacggctgcggctggaagtttgcgcgctcagacgag

SEQ ID NO: 91907 - DNA, 101 bp, Homo sapiens
tcccctcagccattgagagggtgtcagaggcaatcgtcagcatccgaagaatccagctctacattaatcatactcctccaccactgtccaagagtaaggag

SEQ ID NO: 91908 - DNA, 75 bp, Homo sapiens
caaaaacgtcaacaacagttttacggttacactcctggcacaccttacaaagtgtcctgttcccccaccagcggg

SEQ ID NO: 91909 - DNA, 75 bp, Homo sapiens
gcagtccacctataactacaacatgagaggaggtgcttatcccccgaggatgaagaggaagccggcttattggag

SEQ ID NO: 91910 - DNA, 96 bp, Homo sapiens
acctcctgcgaggcctcccgggctccgggaaaactacactggccagacatatctgaagagatggattaagaatgctttggattaaggattgtggag

SEQ ID NO: 91911 - DNA, 96 bp, Homo sapiens
acaccatgagcaaagctcaccctcccgagttgaaaaacagaatcaaattggatatccccaaccttatggccagtggggccagtggtatggaaatgc

SEQ ID NO: 91912 - DNA, 74 bp, Homo sapiens
ttggatctttatataggatttaatggttggaggctctgtcggtggtgagcgacgaccagtccctctttgactca

SEQ ID NO: 91913 - DNA, 50 bp, Homo sapiens
ctcggaacccgtggtcctccgcttcatgaacacatgattctgtgcagatt

SEQ ID NO: 91914 - DNA, 97 bp, Homo sapiens
agctagagagccgtctcccctctctggagccgagagaggccggtttcccccaccaggtgttcctggggagatggcggaacagcacggagcacccgaa

SEQ ID NO: 91915 - DNA, 98 bp, Homo sapiens
gtgcaattgaaggcggttgatggtgaagccattctgagtttatgtgttgactccgatgtgttcagagcaacattgttttgttgacacaagcatttaga

SEQ ID NO: 91916 - DNA, 71 bp, Homo sapiens
gcagttctcctacatgcgggagctcaaacgcacgctggacgccaagctgttctccatagtggtgttcggct

SEQ ID NO: 91917 - DNA, 75 bp, Homo sapiens
ggcggcggctggactaaacaggtcacctgcaggccataaaattttgagtagaaaaatccagaaatttgaaaatca

SEQ ID NO: 91918 - DNA, 75 bp, Homo sapiens
cacgtggatccaagatggcgacggcgatggattggatagctttagtcaaagcagctgctgcagctgcagccaaga

SEQ ID NO: 91919 - DNA, 75 bp, Homo sapiens
atgactgctctgcttatactggctggacagggccttcatcctagaataatcactgaaggatttgaagctgcaaag

SEQ ID NO: 91920 - DNA, 110 bp, Homo sapiens
ggttgtctcgcgccctggtgacagctcgcgcgtgctgatgatggcgggaatttaccagctgaagaaagcctgccggcgagagctacaaactgagcaaggccagctgctca

SEQ ID NO: 91921 - DNA, 50 bp, Homo sapiens
agtccggacatctgaaacttgcagcagccgctcttctaaaacattcaaac

SEQ ID NO: 91922 - DNA, 100 bp, Homo sapiens
tcaacagactcaagaactggttatacttgaaaccataatgctacaaactctagccccacagagcaggtgttgccaatgctgcggttcgtgcagaagcggg

SEQ ID NO: 91923 - DNA, 89 bp, Homo sapiens
gaagatcttcacctgcacagacccgggaacagtcggaagaaatcatctttgctaaggatgggcattttgccctggaggagctggcccaa

SEQ ID NO: 91924 - DNA, 100 bp, Homo sapiens
gaaaaatagtgcaacctacaatgggtggcatggagaaatcgttgtcaaaacagagatgtccgtcagtatgttcaaggttgtggagtgtaactccagaatt

SEQ ID NO: 91925 - DNA, 96 bp, Homo sapiens
agcagacagccatgcgcacggatcagtacaactcccggtggctgaacgggtctcgctctcacccaggctggagtgcagtgacacagttgcagctca

SEQ ID NO: 91926 - DNA, 100 bp, Homo sapiens
ggaccgcgtggactatgacagacagtccgggagtgcagtcatcacgtttgtggagattggagccacaatggtgcgcatgaatgtcctggcagatgctctc

SEQ ID NO: 91927 - DNA, 83 bp, Homo sapiens
cttgcagctgttcagaccgcgctccgccgaggtctgccatcatggatgttctcgcagaagcaaatggcacctttgccttaaac

SEQ ID NO: 91928 - DNA, 100 bp, Homo sapiens
cctattactaaagacttggatttccaactccaggaccctttccttctctacagaaatgccagatgaattgaatgatctggcacgggaccctccagcacag

SEQ ID NO: 91929 - DNA, 83 bp, Homo sapiens
ttggggcccgcgccgcgcgccggcggcaccatgaagtcagcggaggaaggtgtcgtgaaaactacccctaaaagccaaaatgg

SEQ ID NO: 91930 - DNA, 83 bp, Homo sapiens
cgcaaacccaaagatccccgttcctggagattctgattgagcaaaatgatgcttcaacacccaggccaggtctctgcctcgga

SEQ ID NO: 91931 - DNA, 101 bp, Homo sapiens
aggggctgtcctcgtcctccagctgttatctggaaggaagagccttatgtcctttttaagaagtctgacaaacctctctatggtaatgatcgatttgaagg

SEQ ID NO: 91932 - DNA, 100 bp, Homo sapiens
ttcaggtgctggaaaggaatgaggagttacagagggccgagaaggacaggatcagttacagaatgtctgaaggggacagtgtgggagaatccgtccatgg

SEQ ID NO: 91933 - DNA, 100 bp, Homo sapiens
aagctttatctgtgatagaattgctgcttaaaaaacttgaagatatcagttttagagaatgtggcgtggagaaattctcaaggaaagagtaaaatgctgg

SEQ ID NO: 91934 - DNA, 96 bp, Homo sapiens
gcagtcgtaagaagaggtcccaatcccccactctttccgccctaatggaggtctccagtttcggacttgggaccctggaggactgacgctgctggc

SEQ ID NO: 91935 - DNA, 100 bp, Homo sapiens
cctcagcctcccgagtaggtgggattacaggaaatcacattctgcctgatgaagatctggcttcctttcactggagtttacttggtccagaacatccact

SEQ ID NO: 91936 - DNA, 100 bp, Homo sapiens
gcgaggactggcgacggcgaggaggaccgtataatagacgctggccccaaaggaaactactctcgatttatgaatcacagctgccagcccaactgtgaga

SEQ ID NO: 91937 - DNA, 75 bp, Homo sapiens
gcctgcctatatgctgtggaaatgaacggggagcagcagcttgatgcaggtggagggagcaaagtcctgcacact

SEQ ID NO: 91938 - DNA, 100 bp, Homo sapiens
cagaggaagagctgaggaccctggaaaatgagctggatgagctggaccctgatatgatgacgagcatgagtggatcacccgtacctgtcgaaagggctag

SEQ ID NO: 91939 - DNA, 51 bp, Homo sapiens
aaggcgatgttggaaaaagacggaggaggacatgtatgcccaggactctat

SEQ ID NO: 91940 - DNA, 75 bp, Homo sapiens
gatcgggatttacgtggagatcaagcgcagcgatgggctggtgaattaccatatctccgtcaagtgcagtaacca

SEQ ID NO: 91941 - DNA, 51 bp, Homo sapiens
atgcattgccattatctgtgaactaggcaattcgaagttttcaagtagccc

SEQ ID NO: 91942 - DNA, 75 bp, Homo sapiens
ggaactcccaagcgactgcaggcagaagctgagacggctaaggtattacaagtggataaataatgtgcactgctc

SEQ ID NO: 91943 - DNA, 83 bp, Homo sapiens
cgccgcaccaggtcttgtagcagcgcctcctcggtgtccctggccagtgtccttccacctgtccacaagcatggggaacatct

SEQ ID NO: 91944 - DNA, 100 bp, Homo sapiens
tggctgggctgcgcttgggtccgtcgctgcttcggtgtccctgtcgggcttcccagcagcggcctagcggaactgataaatttcaaacggaagagagtgg

SEQ ID NO: 91945 - DNA, 75 bp, Homo sapiens
agaagctgaaatccattgcatttccatccatcggcagcggcagggagccaagctagctcagagcagcctgggcag

SEQ ID NO: 91946 - DNA, 83 bp, Homo sapiens
cctggagcctcagttggaagcagccgatccagcctgcggagcctgtggggcaggactgtagaagcggccaggaagaaaaccac

SEQ ID NO: 91947 - DNA, 82 bp, Homo sapiens
ctaagactacctttttcagaaatgcgcagagcaaacatctttcaaaggtcaaaatgcagatcttcgtgaaaacccttaccgg

SEQ ID NO: 91948 - DNA, 75 bp, Homo sapiens
cactacagggaagtgcatcacatgtcaggaatgtatcctgtcaggtataatgtcagtgaatggcaagaaagttct

SEQ ID NO: 91949 - DNA, 75 bp, Homo sapiens
aaccagagaaaccacttgaccttgcacatatagtgtgtctgtactcaaagatctcttggaccatttatatcctga

SEQ ID NO: 91950 - DNA, 103 bp, Homo sapiens
cggtctcccggcgaaagtgagcgaggtttgcccggagcgcgcacgaggtgcacacatcttgaccaactcagcagcaaggtggattttctttgtgtttaaagaa

SEQ ID NO: 91951 - DNA, 83 bp, Homo sapiens
ccgcacggcactgccgacctccgggagcagcgcaggacagagcgggatgccaccagcttgtccaaagggaagttccaggagct

SEQ ID NO: 91952 - DNA, 100 bp, Homo sapiens
ttttctttgtttgtttttttcgtaaacatctgggtgtatatcaaacggcaagatgtccagtaatgtcccggcggatatgttgctgatgtatattcaagat

SEQ ID NO: 91953 - DNA, 90 bp, Homo sapiens
gaactctcagatgaagatgatgaggtgtaaagggtcaagtttttgatcagaatggaaatccattacccaatgtaattgtggaagtccaag

SEQ ID NO: 91954 - DNA, 75 bp, Homo sapiens
gacaggttgtgaggaccaagcacgcctcttcaaagacgaggttccccagaacagcaaaagaaactatgggtagga

SEQ ID NO: 91955 - DNA, 115 bp, Homo sapiens
gtattctcctccgaaccccttcatgcccaaatcccggaaactccagcgtgtctccagccgtggtcatcatcagatttgaaatatttaaagtggatacaaaactatttcagcaatg

SEQ ID NO: 91956 - DNA, 100 bp, Homo sapiens
ggagacgacgctgctgggtccgctgagcggggcgacccgaggtcctggcattgatgtgcctgctccagacatgagcacaggtgagcgggagatgtcctgg

SEQ ID NO: 91957 - DNA, 100 bp, Homo sapiens
cttctaagagaagcaatgggaatttacatcagcaccctcaaaacagagtccaccctgcacctggtgttgcgcctgcgaggtggcattattgagccttctc

SEQ ID NO: 91958 - DNA, 74 bp, Homo sapiens
gccccccgggacccccacgccgccgccagaagaaatcgacgttgacgtggagagcacggactatctcacaggtg

SEQ ID NO: 91959 - DNA, 100 bp, Homo sapiens
tgcggcgcgctgctggacgaagagctctcctccttcttcctcaactatctcgctgacacgcagcgccgtggggaagacatgcttgctgatcagctacacg

SEQ ID NO: 91960 - DNA, 100 bp, Homo sapiens
tagaaacagaagatgagattatgcctgaggttgtggaaaaggaagattactcagagattatagggagcatggaacttccaggtcctgagtcagagacacc

SEQ ID NO: 91961 - DNA, 83 bp, Homo sapiens
gaagagattcagccagcacactcctcgcgagcaagcttccccgggcgctgcctggacaggcctgcctgcgtgctgggacatgt

SEQ ID NO: 91962 - DNA, 74 bp, Homo sapiens
cacgttcttccaagaaaccaacattcccaacagccaccaccaccaccagatgtgagcaggggtgagcgcagcca

SEQ ID NO: 91963 - DNA, 76 bp, Homo sapiens
ggaagaactcgtcatgctctttgtagcgtggtgcttctgttgctcacagaactgataaatttcaaacggaagagag

SEQ ID NO: 91964 - DNA, 132 bp, Homo sapiens
cgattggatttgccgaagattaggaagaatccactgatagaaatcatttccatcaataccggcctgcctagggtagttaaaagacgagtgaatgctctcaaaaacctgcaagttaaatgtgcacagatagaa

SEQ ID NO: 91965 - DNA, 73 bp, Homo sapiens
ccatgtggcacatccaagagtccaaacagagagtgggaagatgctaatcctgaggtgacgatgacaatgcttc

SEQ ID NO: 91966 - DNA, 75 bp, Homo sapiens
ctaatttgggaggctgaggacacccgagggcaggtgcctaacgtcaaggacttccagtggaagcgcctggcgcca

SEQ ID NO: 91967 - DNA, 75 bp, Homo sapiens
ttgattaacaccttaataaccagcggagctgacacagccaaatatgaagagaaggctactaaagacttggaacga

SEQ ID NO: 91968 - DNA, 97 bp, Homo sapiens
tatttcccgcaccaatgagaatgacccgaatgaactctggaagcccagccagggacaatgcaccttcacagagattctgcactaatctgagtgaagg

SEQ ID NO: 91969 - DNA, 75 bp, Homo sapiens
ctgagtccaaacactcaagatggtttggtatccctcatagatctgcttgttctttttacccaacttatctattac

SEQ ID NO: 91970 - DNA, 74 bp, Homo sapiens
gaggacagacattaacagtatttactgagagctcatcagttccaggaatggatggaggtgctttaactgataca

SEQ ID NO: 91971 - DNA, 100 bp, Homo sapiens
gtgaccaactcagtgccaaaaccagagaaagcaattgagctgcgtctggcaaaaattgaccatactgcaattcacccacatttacttgacatgaagattg

SEQ ID NO: 91972 - DNA, 101 bp, Homo sapiens
gcgcaagtcgagaggaaactgttgtgcctcttcatattggcgatcctgttgtagctgcctgagaactggacagacacgcgggagacgctgctggaggggat

SEQ ID NO: 91973 - DNA, 144 bp, Homo sapiens
ggaagacctgaagactcagctgcagagggactacacctacatgacccagtgcctgcaggaggagcgctacaggtcaaaatgcagatcttcgtgaaaacccttaccggcaagaccatcacccttgaggtggagcccagtgacacc

SEQ ID NO: 91974 - DNA, 100 bp, Homo sapiens
gtgtcatcgtaggtggccacctatggcttttggggtcctggcattgatgtgcctgctccagacatgagcacaggtgagcgggagatgtcctggatcgctg

SEQ ID NO: 91975 - DNA, 75 bp, Homo sapiens
cgccaaccagcctgtcgtgatcgacaacgccaaacgtaccaagaaagtcgggatcgtcggtaaatacgggacccg

SEQ ID NO: 91976 - DNA, 100 bp, Homo sapiens
ccactatcccattctggtggcagtgacgggcatcctggtgcagctcctggtgcgtggcccagcctcagagtctcctctgagcctccggcctccataagac

SEQ ID NO: 91977 - DNA, 90 bp, Homo sapiens
gacacccaagagcagcttgtgcacattgtagttcatctcactgaggacctgctttcccgagcgtcaatgacagtagtaaatggatgtccg

SEQ ID NO: 91978 - DNA, 75 bp, Homo sapiens
ggcagtttcaataacaggtcattgccgagaaaagcaacaggtcaccttcaagccagtgtcctgacccagtgcctt

SEQ ID NO: 91979 - DNA, 75 bp, Homo sapiens
ctcgggcgccccgcagccccccaacatcctgctcctgctcatggacgacgtgaatgaaaactttgccattgattt

SEQ ID NO: 91980 - DNA, 101 bp, Homo sapiens
ttacgtggagatcaagcgcagcgatgctggcataaccttgacaacagattgccttgaagatagcctccttacatgctactgggggtgcagtgttcaaaaat

SEQ ID NO: 91981 - DNA, 82 bp, Homo sapiens
ccccgggacctgggctgggaacccgcggtggagcgggacacgaacgtgtcattgaaattatgagactatcattcaaatggaa

SEQ ID NO: 91982 - DNA, 98 bp, Homo sapiens
caagaagatccacattgaggtagtggacaaagagctgagttatgcctggatcttcaatgaatacccttcctatcaggataatcgccgctttgtttctc

SEQ ID NO: 91983 - DNA, 100 bp, Homo sapiens
ctggaggaccagggggagagtttggagtgaagtttaatgttgccaatggagatccataatgagatggcatcaacatcagataaaggtgcccaaggaagaa

SEQ ID NO: 91984 - DNA, 90 bp, Homo sapiens
ctttatatggctgtatttgacttggcaattcctgctgaacaaataatttttcatggcggactcagattgatggacaacttttcttaatta

SEQ ID NO: 91985 - DNA, 90 bp, Homo sapiens
ggggcctgggcctgagcatcgttgggaaacgtgacactctgcgagggacccaacaagttcaagtgtcacagcggcgaatgcatcaccctg

SEQ ID NO: 91986 - DNA, 51 bp, Homo sapiens
ctgaagagggaagacacgcggaaacagacagtacaatgtagattataaact

SEQ ID NO: 91987 - DNA, 100 bp, Homo sapiens
caatagcagcggcaatacgtggaacaacactggccactttgaaccagatgatgggacgactttgtcacccgaaagaaccgccaagtgtgtgccaacccag

SEQ ID NO: 91988 - DNA, 100 bp, Homo sapiens
ttggacttgtccaagtacatcgacaagacgatccgggtaaagttccagggaggccgcgaaggctgctctttggcgtaaattgcaatcgattagggatcgt

SEQ ID NO: 91989 - DNA, 97 bp, Homo sapiens
gaacttctacccgacacttacatgccatggccttctacgttgtgaaaatgttgaaacattgtagtcggtatatacatgacttatttccttcactcat

SEQ ID NO: 91990 - DNA, 75 bp, Homo sapiens
caacgagcggagttcctgcgagctagaggtgcagcggaactgctgcctgacgctctgcaacttcagcatccccga

SEQ ID NO: 91991 - DNA, 100 bp, Homo sapiens
caatgtggatactcatcctggttctggtaaagaagtgagggtaccagctactgccttgtgtgtcttcactgctgagaaggaagaatttgaacatcaacag

SEQ ID NO: 91992 - DNA, 74 bp, Homo sapiens
agattgcctcggattccgacagcagaatgagaagactttgggacatttcatgagtcattcaagcaacatttcta

SEQ ID NO: 91993 - DNA, 100 bp, Homo sapiens
tcttacagaaatgtgtcttgttgcatttggtaatttagcagaacttgataagccaatggacacgtcagtgttatctgaagaaggaggagagccttttcag

SEQ ID NO: 91994 - DNA, 82 bp, Homo sapiens
tgtgactgaggcagtgcgggccctgctgctgctacaggagctgagagaccctaccctcactttccgtctgcttggctccccc

SEQ ID NO: 91995 - DNA, 50 bp, Homo sapiens
cttccatcctctggaaatcagctgtggccttggagtaccttttcaagttc

SEQ ID NO: 91996 - DNA, 75 bp, Homo sapiens
gtcgccgccgtcagagccgccctatcagctggatgaaaaagaaagtcggcgtctgttccaacagatcctttctgg

SEQ ID NO: 91997 - DNA, 100 bp, Homo sapiens
tgagatgtctcaattcccatgcaggcaaaggaggggagcttcacactcagcagacctcatagctgttacaccaatgactgccagccccccaggatctctc

SEQ ID NO: 91998 - DNA, 75 bp, Homo sapiens
agcaaaatgttctttactactaagcaccgttggtatcctcatggacgggtcttgctgtgtcacccaggctggagt

SEQ ID NO: 91999 - DNA, 101 bp, Homo sapiens
gttggaccttccggagcttctcagaagacagagggttttcttttgagccgcttacaaacacgcagatggcaagaagattgatggcaggagggtccttgtgg

SEQ ID NO: 92000 - DNA, 75 bp, Homo sapiens
cacctttctcctgatggccagtatgtccccaggattatgtttgttggtattggaaattatgcccttgctcagcac

SEQ ID NO: 92001 - DNA, 98 bp, Homo sapiens
ccgcgatgttcgccccccggctgctggatttccagaagacgaaatacgcgaggtgctggagaatctggtaaaagcaccattgtgaagcagatgaggat

SEQ ID NO: 92002 - DNA, 75 bp, Homo sapiens
tggagtgctggtgaatcatttcaagagggtgatagcacactcagataagaatcgcatgacaccccacaacctggg

SEQ ID NO: 92003 - DNA, 101 bp, Homo sapiens
ctgcagcacgtggacgctgactcggaagtgcaggcctcaggcccaggcccaaggccaagtgagagagcccaggccacaggacatgctgccattctgccaag

SEQ ID NO: 92004 - DNA, 75 bp, Homo sapiens
tgaagatgaaaatttccattacaagctctctattggaggcatcatcattctgaaggataccagtgaagacattga

SEQ ID NO: 92005 - DNA, 75 bp, Homo sapiens
acttggctcccttatctgacccccaaagatgatgaattctatcagcagatgccggtggccgtgggtccctacgga

SEQ ID NO: 92006 - DNA, 75 bp, Homo sapiens
ggatgtggtttccgttaagctggacaacaggttttaaaatcaaagatgggaaaatcggagaaaattgcccttccc

SEQ ID NO: 92007 - DNA, 98 bp, Homo sapiens
aattgcagaattggcctgacctcttaccaaaactctgtagcctgttggattctgaagattataatacctgtgaggccctggccaacgtcaacattggg

SEQ ID NO: 92008 - DNA, 50 bp, Homo sapiens
tgtgttcatgtcaagcatcctcataaggtctaaactaaatcataatgcag

SEQ ID NO: 92009 - DNA, 90 bp, Homo sapiens
gcccaccctccaactttgcgacggaaatgtgtcatcgaaagccaggccctgggctgcatcttgtacctgctgtgcttccggcagcaccct

SEQ ID NO: 92010 - DNA, 75 bp, Homo sapiens
cccgaggaggcagccaagctcgtagcctgccactccgtgcgccatgtagggcaggaccgggtggactttggccag

SEQ ID NO: 92011 - DNA, 50 bp, Homo sapiens
ccaatttccagatgccttgttcaacagcctcgtgtgcaagctgaacacaa

SEQ ID NO: 92012 - DNA, 101 bp, Homo sapiens
tggacaccttctaagagtttggcgagtcagtgactgaagcgcccgtccattccaagctgggagtgtccactcgccttccaccagcatggcaacgtcttcac

SEQ ID NO: 92013 - DNA, 50 bp, Homo sapiens
agcaggaggaggaccgcagcaaggcatcctctggtatcacgattccaaaa

SEQ ID NO: 92014 - DNA, 75 bp, Homo sapiens
gaagaagccaaaaacattctgggagcggaagctgtgtgcctatcctcggctggagatctaccaggaagaccagat

SEQ ID NO: 92015 - DNA, 101 bp, Homo sapiens
tggaaagtcttgacttgactgggacgcgcatgaaatttggtgccgtgactcggatcggcggacctcccttaggagatcaatcccctgtcctcctgctcttt

SEQ ID NO: 92016 - DNA, 75 bp, Homo sapiens
ggtggcggggctgaagaagcagttctacaaggcgagccaggaagctcttcgtgggcggtcttgactggagcacga

SEQ ID NO: 92017 - DNA, 96 bp, Homo sapiens
gggcgtctttcagagcattacggtgattttacaacgagatgctgctctccatagggatgctcatgctgtcagccacacaagtctacaccatcttga

SEQ ID NO: 92018 - DNA, 75 bp, Homo sapiens
caaagaaacaagccgtggaataggtgtatcaagtaatggtgcaaagcctgaagactcagaattcatgattgaaga

SEQ ID NO: 92019 - DNA, 75 bp, Homo sapiens
tgagctcggccggcaaccgagggacccgcgtccagggacgatgatgacattaatgatgttgcatcgatggctgga

SEQ ID NO: 92020 - DNA, 50 bp, Homo sapiens
gtttgggcaaagtacttgttcaaatatctcttccaaacacatgatgaagg

SEQ ID NO: 92021 - DNA, 99 bp, Homo sapiens
gtctcttatttagttctggggagcgcctcgtcgacatgagtgatgtggaggaaaacaacttcgagggcagactgaagaaaaggtgactggtctcatgag

SEQ ID NO: 92022 - DNA, 74 bp, Homo sapiens
ttcctggatgattccaaaatgaagaatttcatcacctgcttcaaagattcctggtcgggtggcttccagtggtc

SEQ ID NO: 92023 - DNA, 98 bp, Homo sapiens
aaactttggcgacaatgttggcctgtctgcaagcttgtgcaggggccatgaagcccccaggaggagaatcgagcaatctttttggaagtccagaagaa

SEQ ID NO: 92024 - DNA, 100 bp, Homo sapiens
gcacgcacccgctggacctgctcaaggctgcatggctgagaggttgaaggaggagattctcaacagagagaaaatggtagatattttggctggtcctgat

SEQ ID NO: 92025 - DNA, 100 bp, Homo sapiens
gttttgacatctggggatacgctgtatgggttggcagaaagagtggtagccacggaatccttcttcttggacacttaatgattgttggcaagaaatgtgc

SEQ ID NO: 92026 - DNA, 100 bp, Homo sapiens
atcagtatcttgccacagaaaccatacaaccctgagagcagatggctttggagacaatcctttctatcactgtttggtagcagagattcttccagcgccc

SEQ ID NO: 92027 - DNA, 100 bp, Homo sapiens
ttagaactgcaatgttcatgagaggtcacctactcatccctttcactgaagaagtggggaaaacaaggctcagacaggggtaagatgatcatgcaggata

SEQ ID NO: 92028 - DNA, 83 bp, Homo sapiens
gccttggtattacagggtcttcatgcactctgtcaagctgaggattcagtggtcccaatttaaaggctattttattttcaaac

SEQ ID NO: 92029 - DNA, 75 bp, Homo sapiens
cggccagatcggcttcatgctgtgcagcaagaacccggagcgcagctcagctgggctggaactgccctcctggaa

SEQ ID NO: 92030 - DNA, 100 bp, Homo sapiens
acaagcagcctattatgcccagacaagtccccagggaatgccacagcatcctccagcacctcagccagagactgctgctactttgaaacgtacgatagag

SEQ ID NO: 92031 - DNA, 92 bp, Homo sapiens
ggctacaagaagcgggccgcatgcctgtgtttccgcagcgagagcgaggaggagacacagccgccagcccaaacagcagcggcatgggcagc

SEQ ID NO: 92032 - DNA, 100 bp, Homo sapiens
agcaggaaacccagatggatgggaatggatcaaagctgtgatcacagatctgtctcgtaactgtgtaatcaaggaactagcaccacaacaggaaggtaac

SEQ ID NO: 92033 - DNA, 87 bp, Homo sapiens
gacgtggggggcgagtacgaccctcggagacaccgatatgaccatcaccagaggtgctggagctctacggcaatgagatcagcagca

SEQ ID NO: 92034 - DNA, 124 bp, Homo sapiens
actggggcctcattttggatatctgtgataaagttggtcagtctcgcactgggtgcggtcttgctctgttgcctaggctggagtacagtggtatgagtatggctcaatgcagcctcaaccttct

SEQ ID NO: 92035 - DNA, 100 bp, Homo sapiens
aaaatgaaatgacatttcaacgagtttgtcatcatgtgagagagaatagggtcttgctctatcgcccaagctggagagcagaggcatgatcacatctcac

SEQ ID NO: 92036 - DNA, 97 bp, Homo sapiens
aaaatggggcggaagaaaatacaaatcacacgcataatggatgaaaggaaccgacagatacactctgtgcagttttagagagagacacactcagtat

SEQ ID NO: 92037 - DNA, 75 bp, Homo sapiens
ctgtcattcacaaccccctgaaagcgtcctaaaggggatccaggtcagactataacccagccggggaagcctggc

SEQ ID NO: 92038 - DNA, 106 bp, Homo sapiens
cggcccggagcccccagcgcagcggccgcgtattggtaaaggttttcaaggtgtcatgaaaagatggggatttaaaggccagcctgctacgcatggtcaaacgaaa

SEQ ID NO: 92039 - DNA, 90 bp, Homo sapiens
tcccgattagctgggattacagataatcacatttttgcctggggcaatggtggtaatggccgcctggcaatgacccccacagagagacca

SEQ ID NO: 92040 - DNA, 100 bp, Homo sapiens
agctgagcttgccgcacaaaaagctagagagggccatgctatgatagtggaagcttatccaaaataatagatccagaagaagtgacctgaagtttctgtg

SEQ ID NO: 92041 - DNA, 51 bp, Homo sapiens
accccctgaaagcctagacatgcatgttacaccagacagctatattccatg

SEQ ID NO: 92042 - DNA, 114 bp, Homo sapiens
accttgaggttcatcaggggaaggaagagcttgaggggacagtggagaagcaggaggattaacacagattcctcagatccagaagactgaaatttcctttcgtcctaatgatcc

SEQ ID NO: 92043 - DNA, 90 bp, Homo sapiens
agccatagtacctacagcagcactccaggttatcaatactctggctgaccatcatcatcgtgggactgactttggtggaagtccttggtt

SEQ ID NO: 92044 - DNA, 90 bp, Homo sapiens
cgagcgtctgggcgggtggtagacaccattcgcttttcacccaagatgatttgatgtcttataaaactctgatgaaccatgatggctaca

SEQ ID NO: 92045 - DNA, 83 bp, Homo sapiens
ccgtgcttgccctgtcatcccacctgagaaccatgctcaccgaccctggaaagcaggcaggatgggagagtcgccgatagaac

SEQ ID NO: 92046 - DNA, 100 bp, Homo sapiens
aataaagctgttttggaactgtcaggtacctcaaagcctgcttttctaacccaaactgtatgtcttgatgacactacagtaaagtttgaaatatgggata

SEQ ID NO: 92047 - DNA, 74 bp, Homo sapiens
ggcgcccagcggtagccctccttgcgcctccgattcccagaacatacatatgatagttgagaaagacacatatt

SEQ ID NO: 92048 - DNA, 88 bp, Homo sapiens
agctatatttggtgtcctgtaaaatcacagattatggtgccaatgttaacagggctacagccaataatgatcatacagtagtgtcgct

SEQ ID NO: 92049 - DNA, 98 bp, Homo sapiens
gtggtggggccagatcgacgatgaggagggatggtttcctgccagctttgtgagggtcctgcaaccctggttccagtctggcaagcattgtagacctg

SEQ ID NO: 92050 - DNA, 83 bp, Homo sapiens
ctagcaatgagctcccaaagccatccaggccagaagaatgtttgaaggtgagatggcaagtttaactgccatcctgaaaacaa

SEQ ID NO: 92051 - DNA, 50 bp, Homo sapiens
tacttgaacagagggaggagatcagagatgggcttaggtcacgagcaagg

SEQ ID NO: 92052 - DNA, 83 bp, Homo sapiens
cttaaagctgccagcaaggatgactcaatcatcactgttttaacaggtgcagctattgctggagtttaccgagcagcagggaa

SEQ ID NO: 92053 - DNA, 50 bp, Homo sapiens
cgctgctcaagttccagatttgggcgtgatggtgggcatgggtcagaagg

SEQ ID NO: 92054 - DNA, 100 bp, Homo sapiens
cctcccaccttagcctcctaagtagctgggaccacagcctggagatgcccaaagatgagctgcccaaccataactgcattaagcacctgcgctcagtggt

SEQ ID NO: 92055 - DNA, 75 bp, Homo sapiens
aaagcaaggcatgcggacacacgccgtctctgtgtcaggaatggtctgccgaaaaccgaccgacccggttgattg

SEQ ID NO: 92056 - DNA, 75 bp, Homo sapiens
ctcagcgagataggaccctgcttcctagagcacttgcctgctaataaagatgcctttcgaaagacatggaatccc

SEQ ID NO: 92057 - DNA, 100 bp, Homo sapiens
ggggttttactctaaagggtggcctggagcacggagaaccattaatcatctctaagaaatggtggagtcaatgaagaaagtagcagggatggatgtggag

SEQ ID NO: 92058 - DNA, 83 bp, Homo sapiens
cccagccatggcagattcctccgggcagcagggtgacttaagagattaaaattaatttggttgctgttggttctgaacaaata

SEQ ID NO: 92059 - DNA, 90 bp, Homo sapiens
tgaagaagaacatgggaatgattgttataaatgaaggctctcttgatttcatcagagaagatatgaaatataaagatgctactaataaac

SEQ ID NO: 92060 - DNA, 114 bp, Homo sapiens
ggcgcagccaccccgcgggatacgcctcagcgcggtgaatgaaaactttgccattgatttgatagcagagcagcccgtgagcgaggtggagactcgggtgatagcgtgcgatgg

SEQ ID NO: 92061 - DNA, 90 bp, Homo sapiens
aaaaataataattacatctgcaaagaccttatttccaggtttctgagtcccttcaacatgatcctgggaggaatcgtggtggtgctggtg

SEQ ID NO: 92062 - DNA, 75 bp, Homo sapiens
attcatgtaagcacagtcttcacagtattgcagctgccttcctatttcaaggaaagacgccaaggtaattttgac

SEQ ID NO: 92063 - DNA, 75 bp, Homo sapiens
ctgaggtgtgagtagagcctgggggagagtggatccaggtgtgactgcacagaaaagttacaaaacaaatttgac

SEQ ID NO: 92064 - DNA, 51 bp, Homo sapiens
gccagaagcgggcggcgcgggggagatggcttgtgcagacataagagccag

SEQ ID NO: 92065 - DNA, 90 bp, Homo sapiens
gaggaggaagacgaatcgttaaacatcttaggtcagatggcagtcttgggcacgtccatctgtaaacctgctgagagctctggtgacaag

SEQ ID NO: 92066 - DNA, 90 bp, Homo sapiens
ccggcggtctgataggctacatcgcggcatgagatgaagctgtgacaggtagttggcaaaaaaggagaaagccactaaggtacaaaagac

SEQ ID NO: 92067 - DNA, 98 bp, Homo sapiens
tcgactcggtcctgtttcgacagcgaacatgtcgcggcctgtcagcaggaggagcaatctcagaactgttatgaagaccttcgaagttcttcattctt

SEQ ID NO: 92068 - DNA, 100 bp, Homo sapiens
ggtatcctcgaattcaaagtatcaaagtacaatttaccggtaactataactacccaatattgcagccatggagtccatgcttaataaattgaagagtact

SEQ ID NO: 92069 - DNA, 95 bp, Homo sapiens
tgaaccggagaccccgaaaacggaagcgcagggagaaggaagaggtgtttgaaaaggtgtctcaacaagcagcaaagtgtattccagcaatggtg

SEQ ID NO: 92070 - DNA, 71 bp, Homo sapiens
gtcatgctcagggaccctgtggagagagaccgtccaggctggacttgaactccttcctcggctgaagtgat

SEQ ID NO: 92071 - DNA, 50 bp, Homo sapiens
tcctgtacagcctgcagaactgtaagtaaggaggtctctgtaccatggct

SEQ ID NO: 92072 - DNA, 73 bp, Homo sapiens
cgcgggcgcggatcgaccggagcagagagctggcgagcaaggcaagatcctcaaggatggggacacactgaac

SEQ ID NO: 92073 - DNA, 75 bp, Homo sapiens
atggagacaggttgcagatatgaacatgtgcagaagaaatgcagagtccgaaattgaagttcagaggaagaattg

SEQ ID NO: 92074 - DNA, 100 bp, Homo sapiens
ttctgggacagctctactgacggcgagaaccgaagtttggaggtagacgagcaggcgagcggtttgcccgggcgcagagcatgaaggccgggcgggcgcg

SEQ ID NO: 92075 - DNA, 106 bp, Homo sapiens
gttccttgtggagccggagctgggcgcggattcgccgaggcaccgaggcactcagaggagtgttctaagaacggaagcatctgggctggatggaatttagcatcaa

SEQ ID NO: 92076 - DNA, 74 bp, Homo sapiens
tgtcctgccggagccgctgtgtgcaaagttcctattgatggtccccccatatgtctttggtgcaacactaacaa

SEQ ID NO: 92077 - DNA, 75 bp, Homo sapiens
aattatccctactacaggactgcggacaagggctggcaggagcttgaagaaatccgcaaatgtgggatgaaaaac

SEQ ID NO: 92078 - DNA, 95 bp, Homo sapiens
ccagactcggtgctgtacccgccgtcctcagaatggttggaatgaccctccagctttgaacagagtacccaaaaagaagaaggtactagaaaaag

SEQ ID NO: 92079 - DNA, 100 bp, Homo sapiens
aaatcagttatggaaacaccacaggttccatagtgtgtggtgaagatgggtggtcccatttcccaacatgttatacaatgttctgtgattttccaaaaat

SEQ ID NO: 92080 - DNA, 90 bp, Homo sapiens
aaggtggcagaaggacagcataaggaagccaagttggaccgttctgatgtgactgagagagaagtgtcagagatggctttggattccccg

SEQ ID NO: 92081 - DNA, 80 bp, Homo sapiens
tgtcacgctgggtaatgaggatttgactgtgaagatggcagaaacggtggacacaagcgaaatggtcaacggcgctacag

SEQ ID NO: 92082 - DNA, 95 bp, Homo sapiens
ttattcgcaatttttttaagatgcactaaatcacaattaagggcagagcggcttgggtaaatccaccttaatcaacaccctcttcaaatccaaaa

SEQ ID NO: 92083 - DNA, 74 bp, Homo sapiens
ccatggcagctccagcctctgcctcccagaaactcagggaaatgtttcaacgtgcgcaagcgttgcggcggcgg

SEQ ID NO: 92084 - DNA, 98 bp, Homo sapiens
tttgaccagaaaaccgacaaccttcccagaaagtccaagctcgtggtgggtggaaaagtgttcgccgagctgctgcagaagaatattttgcctgctgg

SEQ ID NO: 92085 - DNA, 100 bp, Homo sapiens
atttttcttccttctgtcacatcacacccaatggtgccaaatcaatcattcaggagtttccagagatcacaattttaactactgaagttcatcctgttgc

SEQ ID NO: 92086 - DNA, 80 bp, Homo sapiens
ggaccggcggcgctggaggagcgaggcagctgtactaggactgggaacgggttttaaaatcaaagatgggaaaatcggag

SEQ ID NO: 92087 - DNA, 75 bp, Homo sapiens
acgcactgggtcgtcacggaggacgggaaaatccagcagcagcaaaagctggcaggctgacagaggcggcctcag

SEQ ID NO: 92088 - DNA, 98 bp, Homo sapiens
caagttagatgccgattacccacttcgagtcctttattgtggagctaagacgtcctctactatcacgtcagaaaactcagactgaacccagaaatcgc

SEQ ID NO: 92089 - DNA, 74 bp, Homo sapiens
cagacctgctcacacttcagaatagagaagagacgagttgtactgctgtcacaggaaatggacgctggattaca

SEQ ID NO: 92090 - DNA, 73 bp, Homo sapiens
gatcttcggcctagactgcgaggaggctctaattgagaaatcaagtgctctcagaagaggagattgacgagaa

SEQ ID NO: 92091 - DNA, 75 bp, Homo sapiens
gtgcaaacccgagagaactggatagtcactgccaatccttggaacacaattgctcttctctgtggcgccttcttg

SEQ ID NO: 92092 - DNA, 101 bp, Homo sapiens
gcagaacgtgagggtgtaacttacaaaaagatttaatccagagactgacttcactatagaacccacagttgtatcaatggttggggaaagatagtggcaac

SEQ ID NO: 92093 - DNA, 95 bp, Homo sapiens
accttcgcattcagaatttgaccatcttggtgagaaacattaagacctactaccagggtttttaatgaccacaacaagcaagcatgcagcttact

SEQ ID NO: 92094 - DNA, 99 bp, Homo sapiens
gtcgtcatgcttatggggatcaagtttgccatgcagaacttgaattggggacttgttttcaagcagtaaatagcagaattcagttacaaattcttgagg

SEQ ID NO: 92095 - DNA, 50 bp, Homo sapiens
ctcccatccctgcagcatgaacaaggtgactgtaggacgaggatttggtg

SEQ ID NO: 92096 - DNA, 75 bp, Homo sapiens
ttttgacttgttaagagtggacaggttaagggactcccaggaatatcagtactatactggcaattgctggagaag

SEQ ID NO: 92097 - DNA, 139 bp, Homo sapiens
tagcaacaaaagaaagtgatggattccatcgatttatgcagtcagccaaatatttcaattatactgtgaaggactggagtccagagttgccaccagatgggatattcaaaaatacgccagagaggcctacaacctgggg

SEQ ID NO: 92098 - DNA, 82 bp, Homo sapiens
ggatcatgtctgcgagccaggattcccggcggtgcgtctttctacgtgaataggattttgtggctggccagatacactgcat

SEQ ID NO: 92099 - DNA, 90 bp, Homo sapiens
ggatcagcatcttcacacactactagatgggaactgtgtcaatctgacagaagcactgtcgctctatgaagaacagctggggcgcctgta

SEQ ID NO: 92100 - DNA, 51 bp, Homo sapiens
ctgcgtttcctggatgctcttaaaggttatctggaatgaatataccaccac

SEQ ID NO: 92101 - DNA, 82 bp, Homo sapiens
gaaggacctccacacactaaaaactggagtgagaaagatcagtctaaagaaaaggagaagaaagtgaaaaaaacaattcctt

SEQ ID NO: 92102 - DNA, 100 bp, Homo sapiens
gtgagttcctggacatcaagggctgatggactagaggcttttaccagatttcttaaaactgaattcagtgaagaaaatattgaattttggatagcctgtg

SEQ ID NO: 92103 - DNA, 100 bp, Homo sapiens
gtgggccgacatcaagagctgcgagatccaacaggttaagattctgtgtcaccagttgctggtccaggtttgtgacctgctcaggctaaaggactgccac

SEQ ID NO: 92104 - DNA, 82 bp, Homo sapiens
ccagaagtccagagctgaggactgcctgtttgcaggtgaaatgacaatggatgctctgttggctcgattgaaacttctgaat

SEQ ID NO: 92105 - DNA, 100 bp, Homo sapiens
tgggacgccagtcaccagcaggagcagccaaccagcagcagccatcatggaggcaacatgagtgagaatgaggaagaggaaatttctcagcaagaaggca

SEQ ID NO: 92106 - DNA, 100 bp, Homo sapiens
ctttctgaagctcatgaagactgtgtaaataatatcaggtatggagatggtccacgtcctcccaagatggcccgatacgacaatggaagcggatatagaa

SEQ ID NO: 92107 - DNA, 100 bp, Homo sapiens
gaaatatgctacagatagatgttaaggacatctgcaaatctttcaccaatgacgcgcgggcggccatgcgccccttcgacccctccactctgctgcccac

SEQ ID NO: 92108 - DNA, 100 bp, Homo sapiens
cctgatccaacaccgcaggacacaggaccacaaggatgccctcaccgtggtggtggatgacctccgcctgtgctctgtgaagccgtgtgaggacatcgag

SEQ ID NO: 92109 - DNA, 82 bp, Homo sapiens
acctcgacgtcttgcctgtgtcccacttgttcgcggcctatagatccagacatttaatgtggatgcaccatgccagaccgtg

SEQ ID NO: 92110 - DNA, 100 bp, Homo sapiens
gaccagctcatgggcacggctcgggacggtggattgtctcattgttagtgctgaatcttcttgcctacttgtatctgggaatttaactttgaagaggaag

SEQ ID NO: 92111 - DNA, 100 bp, Homo sapiens
gcatgcacagtggctttaagatcctcaactgccaaaaggcaatgggacaagaggcgccggtacagcatgctgcactctcaggagtctggcagctctgtct

SEQ ID NO: 92112 - DNA, 75 bp, Homo sapiens
gaaggtgcgcgccggccgcggcttcagcctggaggagctcagggtgttcggcatgaccccaacatgaaatatgag

SEQ ID NO: 92113 - DNA, 99 bp, Homo sapiens
aaggacagcctttccgcgcgggactccggggcgccacgggggccatgtaagcagcttatcacacagactttcagccaccacaatcagctggcacagaag

SEQ ID NO: 92114 - DNA, 100 bp, Homo sapiens
tatcattatatggacagtttagggaaaaaagggttgctcattttgggtatcactggagtctgatggaaagagataggcgcatctctggagttgatcgtta

SEQ ID NO: 92115 - DNA, 100 bp, Homo sapiens
tgaacatcgaatcatggaatcccttgcatggctctcaggacagcaatcagacctattgctttgagagctgtgacctccattgctcgtgctctgcctggat

SEQ ID NO: 92116 - DNA, 100 bp, Homo sapiens
tcgatgttagccgggacccgactcaggaaatggaagttccagtattaccgaaaatctctctaccgatcaccagttcttcactgcctacctttaattttag

SEQ ID NO: 92117 - DNA, 50 bp, Homo sapiens
catctgtgtgtctgggcagtgcaaggctggagtgcaatggcgcgatctcg

SEQ ID NO: 92118 - DNA, 100 bp, Homo sapiens
aaggaaaccacataccaatggaggcgggatccacagcaccattgtttactgaccagccagaggaacctgagtcaaacacaacacatgggatagaattatt

SEQ ID NO: 92119 - DNA, 75 bp, Homo sapiens
tcaggaactgtgggagctggctgagcagaaaggcaggcattcaacaacatgttttgctgtaccttgcagtgttcc

SEQ ID NO: 92120 - DNA, 76 bp, Homo sapiens
aaatatctttggcttgcagccaacaatgggtgtaaacaggaacatcgataagtagtgtaaaaacttgcacaatgaa

SEQ ID NO: 92121 - DNA, 75 bp, Homo sapiens
tgatttctgcatttccaactgagtgcccgaaggaggaaacagtgacagacctggagactgcagttctctatcctt

SEQ ID NO: 92122 - DNA, 75 bp, Homo sapiens
gttagccccgcgcagccgccggcgtcgccgccatggacctagttgtcgccgtgatcctgaaggcgctgacctacg

SEQ ID NO: 92123 - DNA, 87 bp, Homo sapiens
agctgcctcagttcttagcgcaggaccaagaatcgccttcagccctgtctggtgcatccttggcagaaagtgaggaggaaaacaccc

SEQ ID NO: 92124 - DNA, 90 bp, Homo sapiens
ggcgacccgtactgggcctactctgttggattggatgctgctggcaagacaaccattctgtataaactgaagttaggggagatagtcacc

SEQ ID NO: 92125 - DNA, 74 bp, Homo sapiens
gcagaggaccaacatgggcattttgtttatgagcaagggcaacaaaccatggatttctcttccccgaggaaagg

SEQ ID NO: 92126 - DNA, 83 bp, Homo sapiens
cggggcgggcgccgcgggacctctccgggccatggcacatggattaattgatgtatgttgagtttatggagctgccttttggt

SEQ ID NO: 92127 - DNA, 75 bp, Homo sapiens
ggctgatccagcaggaggatataaaaaagaaggagccatattgtagggtaaataccatgatttagaatgccagct

SEQ ID NO: 92128 - DNA, 100 bp, Homo sapiens
acaagaacggcggtacccgggtggttaaacttcgcaaaatgtctatatcggcacaggatgaaaacctctcaaaaacaatgtttctgccccttgctgagag

SEQ ID NO: 92129 - DNA, 83 bp, Homo sapiens
ctggaccggggtcacttagactaccccaggaacccgcgccgcgagggctccttccctcaggttctctacttaaaagacaatga

SEQ ID NO: 92130 - DNA, 97 bp, Homo sapiens
gaaaggaatgaacatgtatttaaccaagttccaacaaaagaatgctgccacagtggccctcatggagcacagcaactgctcgtcggagcccggcttc

SEQ ID NO: 92131 - DNA, 98 bp, Homo sapiens
ggagaccaagctcaaactaatggcacgctatgggcggctggcggaccctgctgtcactgactttccagctgcaggacaagttcgagcatcttaaaatg

SEQ ID NO: 92132 - DNA, 83 bp, Homo sapiens
tgacgattcagagactgaaaaacctgaggctgatgacccaaagagaaccatggagtctggcagtaccgccgccagtgaggagg

SEQ ID NO: 92133 - DNA, 90 bp, Homo sapiens
tctcttggatttggctacacacttatagatcttctgcactgtttacaggcacagaaacttgtggtggagaatgttgatgtgttaacacaa

SEQ ID NO: 92134 - DNA, 50 bp, Homo sapiens
caggtcccgaaagtgctaaaaagaaagcacacctgagctgctcttaatat

SEQ ID NO: 92135 - DNA, 75 bp, Homo sapiens
gccagcgccgtctacgtgctggacctgaagggcaagcgatgccctcctagctagccgtcacgggatggagggctt

SEQ ID NO: 92136 - DNA, 98 bp, Homo sapiens
ttccatctactgtctttttcttcaatgggcagcatatgaaagtggattatggctactgtgtgaagacattcacaggacacagagaatgggtacgtatg

SEQ ID NO: 92137 - DNA, 75 bp, Homo sapiens
tgaagagctatggtgaaacaccactgaagcattgccaaggtgttcagtgtgaggtggagctgatagagtccatag

SEQ ID NO: 92138 - DNA, 82 bp, Homo sapiens
gtttgactaagcagcctgaagaagtttttgatgtattagagaagcttggagaaggcatacggcggcatcaagaaaggagagc

SEQ ID NO: 92139 - DNA, 101 bp, Homo sapiens
gagaaaggtccctccacactcctggaactgtacacctattggaacccttaagacttaattcagtgcacaaatgagatgaatgtgaacatcccacagttggc

SEQ ID NO: 92140 - DNA, 51 bp, Homo sapiens
ctccagccgaaggagaaggggggcagtcgatgatgtgaagaaaggttacat

SEQ ID NO: 92141 - DNA, 136 bp, Homo sapiens
ctgtgggacttcgaaggagggctctcctgtctgccaccatcctgggttgacaattctacacaaggaggattttggccccaaacagtaattatcaagatgttgagaccctctataacttcctaatcaagtatgaggt

SEQ ID NO: 92142 - DNA, 82 bp, Homo sapiens
ctttcttggcccttgttcccccaaatgtctgactctgactctcggactgagaaacgcaaggctgaaggtgatgtggccgccc

SEQ ID NO: 92143 - DNA, 83 bp, Homo sapiens
gagtcaagggcacagagagatgcaaagcgacctaaaattagggtctgagagagactaagcatccatacacttttgtgtcaaag

SEQ ID NO: 92144 - DNA, 88 bp, Homo sapiens
atagtggcagaaaatctcgagaaggtccaggctgaggctgagagactggatcaggaggaagctcaaccatgctcgacagctgaccaag

SEQ ID NO: 92145 - DNA, 87 bp, Homo sapiens
cggatgccctgcagtacctgcagaaggtctctggagacatcttcagcagaattggcagagggggtcgatttgggaggaaaggtgtgg

SEQ ID NO: 92146 - DNA, 101 bp, Homo sapiens
tgaagaccaatttttacgtctagatttccatgcccatggaagattcacaatgacatcctttcaagaagtcccattgcagacttccaactttgcccatgtca

SEQ ID NO: 92147 - DNA, 101 bp, Homo sapiens
gtttttttgaagaagcaggatgctgatctaaacgtggaaaaacacgttcacgtccatgttcttcccaggaaggctggagactttcacaggaatgacagcat

SEQ ID NO: 92148 - DNA, 75 bp, Homo sapiens
gcgaatggggctcacgtcgaagactctgacctgtttttgttggacacccgtgtagtatgggcctcagaagaaggc

SEQ ID NO: 92149 - DNA, 75 bp, Homo sapiens
tatttctgagtaatctggaagaaacctgccccatgacatgtattctcgcgtttagtgggctacagatggcatggc

SEQ ID NO: 92150 - DNA, 96 bp, Homo sapiens
tctgatgatgagaatgctgtgtgcgcagcacagaactgccaaaggccctgcaaggacaagggcggaatgtacgtgttccagctctttgactactat

SEQ ID NO: 92151 - DNA, 75 bp, Homo sapiens
gcgagtgccaggaactcttctggggagaccccgacgtggagtgccgaggctctctaggaaacaccagaattatca

SEQ ID NO: 92152 - DNA, 153 bp, Homo sapiens
ttcaggtctgcactactacaccctgcatgcttcgaaactctgacagcatactggaggccattcagaaaaagcttggttaaaaggacaactctggtggatagcagaacatctgttactgatgtgaagtttgctcccaagcacatgggtcttatg

SEQ ID NO: 92153 - DNA, 100 bp, Homo sapiens
ggaagttaatgtttacggcgaagtctactcaacgtttccaagattactttctatgaagacaaaaattttcaaggccgtcgctatgactgtgattgcgact

SEQ ID NO: 92154 - DNA, 100 bp, Homo sapiens
tctctgatcgaaggggagtttccacagtgattgatgctgcctcaggaggtgtgattgcctatatcagttcttccagctcagcctcaagccctgcctcttg

SEQ ID NO: 92155 - DNA, 100 bp, Homo sapiens
tggggagaagaggattggaggtgtcagtgttaaaggaacctctacaacgaaggtgaagccacggaagataaggacctcattaatcaaggaagagaaaaag

SEQ ID NO: 92156 - DNA, 100 bp, Homo sapiens
ctggtgccagcccggctttgacatcaaggacgttgccaggttctgtccacggtgtgtccaggaaaagaggaagaagaagtaggaggagctgtgtgcccgg

SEQ ID NO: 92157 - DNA, 90 bp, Homo sapiens
ctcttttccccagtgctggacaggcacgtgacacaagctgacctcaagagctccacgttttggcttcgagcaagttttggtgctactgtt

SEQ ID NO: 92158 - DNA, 100 bp, Homo sapiens
cgccgtgtcaccttggaagtccagcgcagtgcccactaaacacgccaaggtacatgtcccagagcaagcacacggaggcccgggagctcatgtactcggg

SEQ ID NO: 92159 - DNA, 100 bp, Homo sapiens
aagaaaccgaagtgatttccagaggatttacactggagcaagctttattcgttgcatcaaacctaacttaaagatgacaagccaccactttgaaggtgct

SEQ ID NO: 92160 - DNA, 100 bp, Homo sapiens
ttacagatacagagatcatgactttggtagatgagactaacatgtatgaaggtgtaggaagaatattgggaaaatgaggtacgttagtgttcgcgatttt

SEQ ID NO: 92161 - DNA, 75 bp, Homo sapiens
caggacgtggccagcgccttggactttctgcataacaaaggtcaaaatgcagatcttcgtgaaaacccttaccgg

SEQ ID NO: 92162 - DNA, 100 bp, Homo sapiens
ctggggaggagccaaagcctcggcgctcacctaagccgcagggagatacacccaactgggagatcttagacgaattttacaatgtgaagttctgcataga

SEQ ID NO: 92163 - DNA, 73 bp, Homo sapiens
aaaactgaagatgtgaatactctgacccaacatgagtgaagtttcctgcaagaaacgggacgactatttggaa

SEQ ID NO: 92164 - DNA, 75 bp, Homo sapiens
cagttactggtcacccggtctcagaagctgcagttcatcatctgctgtgatagttccacaaccagaggatccaga

SEQ ID NO: 92165 - DNA, 83 bp, Homo sapiens
cgtgcacatccaggctggtcagtgtggcaaccagatcggtgccaagtgaaaatgcctcgtgtaaaagcagctcaagctggaag

SEQ ID NO: 92166 - DNA, 75 bp, Homo sapiens
ggagaagaaagcggagttcgagcggcagcgaaaaatgggttggctgtgttccggccgcagagcaccgtctgcgtg

SEQ ID NO: 92167 - DNA, 75 bp, Homo sapiens
gggcccacgagccgtccttaccagatacaaggcagatccaaccatccccaccgtggtcctacgatcagtcctacc

SEQ ID NO: 92168 - DNA, 83 bp, Homo sapiens
ctcagatgacctagaagaagacagtagcgactacagcattccttccaggtaagccaagatgggtgcatacaagtacatccagg

SEQ ID NO: 92169 - DNA, 90 bp, Homo sapiens
ggatttccaaggaagaatttcctctgaagcaccgataaggatgacattcggctgctgccgtcagcattgggtgtgaagaagagaaaacga

SEQ ID NO: 92170 - DNA, 144 bp, Homo sapiens
tcgccgcctccgctgggagccgcagatcagtccaagttgacggacaggaggcgaaatgtgcaaatgtttatgggccttagaaaatttacgtgtatacctgtgtgagaaaatcatagctgagagacattttgatcatctacgtgc

SEQ ID NO: 92171 - DNA, 51 bp, Homo sapiens
cgacaagggtgttcccgaactagagtggatgccacctcagtatggacagca

SEQ ID NO: 92172 - DNA, 100 bp, Homo sapiens
ccccgcgggggacactgcagccggagcccgggaggggccgcgccgccaccgtctgaactaggatgtcccgacatgaagaggagctgatcacgcagtacct

SEQ ID NO: 92173 - DNA, 82 bp, Homo sapiens
ccctgtccccgaggaggggaccatgacacagcgggtcgttaaccaagctggcctactattcaacggtacagcacaaagtcgc

SEQ ID NO: 92174 - DNA, 75 bp, Homo sapiens
cccttgaccaagctttcagaggtattctagaagaagaaattcccacagaacttaattgcccaatctcagtctggt

SEQ ID NO: 92175 - DNA, 116 bp, Homo sapiens
gtccagctggtcaccgacagggatcacttcatccgaaccctcagcctcaagccgctgctcttcggtgtcatggagaaactccagctgggcccagagattctgcagcgggaaaatcc

SEQ ID NO: 92176 - DNA, 116 bp, Homo sapiens
atcaaggaagtgatctatgatatgctgaatgctctggctgcataccatgctccagaggaaggctgcctctaagaatcaaacttcactcttgggagaaccaccaaaagaaattcggc

SEQ ID NO: 92177 - DNA, 75 bp, Homo sapiens
ctggcctggggggcagcatgagctgaccacagtggccgagaagtcgcgcgtgctgcagctggaggaggagctcac

SEQ ID NO: 92178 - DNA, 82 bp, Homo sapiens
acaagcaggtccaaagagagagtgtggatgaggtcaccattgtcaacattttgaccaaccgcagcaatgcacagagacagga

SEQ ID NO: 92179 - DNA, 100 bp, Homo sapiens
cttcgcgtctgcttcggagaccgtaaggattaagatgttctacgaggagcatttgcacttggacgatgagatccgctacatcctggatggcagtgggtac

SEQ ID NO: 92180 - DNA, 102 bp, Homo sapiens
gcttccccagccatgtggaactagggtgaaggggaaccagagcgcacaagggaactgactcaggaggcagagaagatgggcatcctcagcgtagacttgctg

SEQ ID NO: 92181 - DNA, 75 bp, Homo sapiens
gttctatcttcccatcataaaaaaacaagttggatggcttgaggactggtactaaaaggaaacgtgactgggagg

SEQ ID NO: 92182 - DNA, 100 bp, Homo sapiens
aaagcttatgcaacatgctcagcaggagcttcatcaacgatatatgtcagatctaaagtctggctcttgctgattgaattcctttggtgcagtttagcat

SEQ ID NO: 92183 - DNA, 75 bp, Homo sapiens
cggcgccgctgcagagccgagcgaatcccgagcccgggcagcagagaaacagcacccaggactatcttccaaaga

SEQ ID NO: 92184 - DNA, 83 bp, Homo sapiens
gggaaaggccgcgcgaccgcccgtcctccaactacagggaccgcacggaaccatcactgttgctggaggcacctgacaaatcc

SEQ ID NO: 92185 - DNA, 80 bp, Homo sapiens
ggactaaggcgagccggagaccgagcccgaacagcagtgcagagcagagcgggcggaggaccccgggcgcgggcgcggac

SEQ ID NO: 92186 - DNA, 120 bp, Homo sapiens
ttcggagttcagactgacaccccacatcgacaatttggaggtggcaaacagcttcgcagtcactaatgcttaaaagaggcacagttagatgaagaaggacagtttcttgtcagaataata

SEQ ID NO: 92187 - DNA, 50 bp, Homo sapiens
aggaagagttggaaaagatcaagtaaggggcagatgatgatctatgcgaa

SEQ ID NO: 92188 - DNA, 90 bp, Homo sapiens
cacgcttatctttatctgtggcatgcaactgacttcctttaataagtgttgcgctggttcaaggttgggcattgggtggaggagcagaat

SEQ ID NO: 92189 - DNA, 100 bp, Homo sapiens
aaccccttcctcccgtatatcagggcaccagtgtcttgtcacctggactccacataggactaattattatactggcaataatgatctataaaaagtcagc

SEQ ID NO: 92190 - DNA, 83 bp, Homo sapiens
agaggactctatacagggacgtgatgctggagaattataggaacctggtctccctggcttgaacatgcgaaagtgacacagac

SEQ ID NO: 92191 - DNA, 50 bp, Homo sapiens
cggcaacatggtgcggtcggggaataagtgcacttacatttcaatcgacc

SEQ ID NO: 92192 - DNA, 80 bp, Homo sapiens
ctgttttaactatccctgcctgtgactttcaagactgttgatcccacacaagagtgtttcatcccacaggctaaactaag

SEQ ID NO: 92193 - DNA, 83 bp, Homo sapiens
gacaagatgcgccgcgccagctcctactcctccctcaactccctcatcggaagtcctgacggccacgctggatctggaggacg

SEQ ID NO: 92194 - DNA, 100 bp, Homo sapiens
gactcatcaggaagtcagactcccgaaccattgctccaaatatccgttgaagcagggggcccgtctgggcagaaaccatgtggaagagctgctgcgctgc

SEQ ID NO: 92195 - DNA, 90 bp, Homo sapiens
gcgtgccctacttcaaggataagggcgacagcaacagctctgccggctggaaggaggaggcaaaacagattcagaatctgcagaaagcag

SEQ ID NO: 92196 - DNA, 75 bp, Homo sapiens
aaggcaaaactaggaaaggaaccagtattggccgcagagaataaaggccgctgtgctcgctgtggagaaaacgta

SEQ ID NO: 92197 - DNA, 90 bp, Homo sapiens
ggagttcttacaacatggcagacattgacaagcctctgtgtcctttgtcccaatagtaacaactccctcctggcctttccgggcacgcac

SEQ ID NO: 92198 - DNA, 100 bp, Homo sapiens
ggcggatggccccaggtgtaagcgcagaaagcaggcgaacccgcggcgcaataacggcaaccgaaggacctcagagcacttgaacttcaggccatcacaa

SEQ ID NO: 92199 - DNA, 51 bp, Homo sapiens
ggacatttagccgctcatcttcgagagatcaaccagctttcactcctagtg

SEQ ID NO: 92200 - DNA, 90 bp, Homo sapiens
ctgaggccagcctaagtcgcttcaaaatggaacgaaggcgtttgtgggaagctgaatatggtgggcatgatcagatagatttgtatgacg

SEQ ID NO: 92201 - DNA, 100 bp, Homo sapiens
tcttattggtcaaaaggaagcaaaacgttggggtacagctcatggcagtatcgttccttaccaggcctatatgaacccaatagcaatggcgagatcaagg

SEQ ID NO: 92202 - DNA, 99 bp, Homo sapiens
ctgcatcggatcaccggcgtgccccaccatgtcagacgcagccgtagacaccagctccgaaatcaccaccaagggcgcaccctacgacgcgcacaccac

SEQ ID NO: 92203 - DNA, 88 bp, Homo sapiens
gccatgagagggaaggaaacaagccaggttatcactgtgaggcctataataaccctgcagacttcttcttggacatcattaatggaga

SEQ ID NO: 92204 - DNA, 100 bp, Homo sapiens
ggaggcggaaggggaaagcctggagtcctggctcagcagatcgggagcggtgccgagaaaaatttccttactagatgacatttcatcgcaatgtccgatc

SEQ ID NO: 92205 - DNA, 95 bp, Homo sapiens
gcggaacgcaggagacacaagaagcggatccagggttttttgattaactcaaaaccagagaatgcctgtgaacccatagtgcctccaccagtaaa

SEQ ID NO: 92206 - DNA, 74 bp, Homo sapiens
accaggactccaaaatggcgtcagttggtgctggcatcggccccaccattcagattggggaggagacggtgatc

SEQ ID NO: 92207 - DNA, 100 bp, Homo sapiens
cccaagcagcagctgccggagcccgagtggatcggggacggagagaacacgagcccatcaggaccacccagccttctgggccctccccccatggccaatg

SEQ ID NO: 92208 - DNA, 90 bp, Homo sapiens
atctggactctttgcctgtttggatagcactattcctgatcagagaactccagttgcttcaacacacagtatcagtagtgcagccacccc

SEQ ID NO: 92209 - DNA, 83 bp, Homo sapiens
gtagataacagcttccgccaggcggtgatgaagaatccccccgaaaggaccccccaggctactgcagcactggggtgtcagtt

SEQ ID NO: 92210 - DNA, 100 bp, Homo sapiens
gggttttcttttgtccctctgatgcaagaagatggtaggactcttccagatggcactcatgagctcatcgtgcataagggtctaaaattcccaggactcc

SEQ ID NO: 92211 - DNA, 82 bp, Homo sapiens
cagagtccgcggccggggcgcgggagaacatacatatgatagttgagaaagacacatattctgatcatgaagaaataaacac

SEQ ID NO: 92212 - DNA, 97 bp, Homo sapiens
agtggttccatgatgggaagtgacatggttgaaaggattgttgacaaaaggaaaaataaaaaagggaagacagagtatttggttcggtggaaaggct

SEQ ID NO: 92213 - DNA, 74 bp, Homo sapiens
tacccactattccaaaagaacctcaggagtctgacacagtacttgatgaagaagcagaagtttttatagtcaaa

SEQ ID NO: 92214 - DNA, 100 bp, Homo sapiens
gaacttcccagcactcgaaagggaccgaaatggagagcaaaggttcaggaagatttgactgaagagaaaaaaagggaactggagcataatgctgaagaga

SEQ ID NO: 92215 - DNA, 148 bp, Homo sapiens
gcgaccactaccccctgcacctcctagtctggaaaaacgactaccggcagctcgagaaggagctgcagggccagaaccttcccaactggagatgtgaaacggtcattctccatccactcacctggtttcctgccacagagatagaagg

SEQ ID NO: 92216 - DNA, 100 bp, Homo sapiens
cggagacctacctgcggcgtcggcagctgctgctccgaggagattgtaagaacaacgctcttgtaccaggaaccattcaagtaaatggccatggaggaca

SEQ ID NO: 92217 - DNA, 75 bp, Homo sapiens
ggaggaaccggctccttgcgtcccgcctccctgggagctccgcacggtctgttcggcacttgaagtactccttgt

SEQ ID NO: 92218 - DNA, 51 bp, Homo sapiens
aattgaaaggcttcaaagctagcaggtgatgatgaacagtctacacagatg

SEQ ID NO: 92219 - DNA, 89 bp, Homo sapiens
atcaagtacctgctgcttggcttcaacctgctcttctggatcgtcagtatttaaacagatcacatcatgcgtgagtacaagctagtggt

SEQ ID NO: 92220 - DNA, 113 bp, Homo sapiens
ctaggttctgggaagatggcgaaggtctcagagctttacgatgtcacttgggaagttttccaagagataacttcaccaagatgtccagtgataggcaaaggtccgatgatgag

SEQ ID NO: 92221 - DNA, 107 bp, Homo sapiens
tgagcaagaaaagcctctgggagcagaagggaggctccaagacctcatcaacaattaagggcagcagagaagaaagtggtgaaaattacatctgaaataccacagac

SEQ ID NO: 92222 - DNA, 89 bp, Homo sapiens
cggcgcgcggcgcttcgggagccagcgggtgctggtggagccggacgcgggcgcaggtacaggtttgcagattccgccagcagcacagc

SEQ ID NO: 92223 - DNA, 74 bp, Homo sapiens
cctcaagatgcagtctcatgggcagtggtttgaggtcttgtcatctcctaatcagcagaaggaaaagaaagtca

SEQ ID NO: 92224 - DNA, 100 bp, Homo sapiens
gcggcagcagaagctaaagcaggccaagactccaggagcagaggctgagcagcaggatacagctagcgtggagcagtcctcccagaaggagtgtgggcaa

SEQ ID NO: 92225 - DNA, 82 bp, Homo sapiens
tgcctgcccaggaggactactacagcccacaccagttatcctattgaaagaggggactgatagctcccaaggcatcccccag

SEQ ID NO: 92226 - DNA, 76 bp, Homo sapiens
ttgatgtggatgatgccaaagttttattagaagggcgctatattcctcctcatttaaggaaccgagaagctactaa

SEQ ID NO: 92227 - DNA, 98 bp, Homo sapiens
ttctctgctttaacaaatatgaaagtaactcatgacatggacatgtgctatgggatgatgggaagcctgtttcgcagtggctcccggcagaccctttt

SEQ ID NO: 92228 - DNA, 100 bp, Homo sapiens
ttggcagagcttgacccaggcactacagtccagagcgtgagtccattcacatcctgagtgttgatgagaagaacaagttgggagccaagattatcaaagc

SEQ ID NO: 92229 - DNA, 75 bp, Homo sapiens
gagtcggggcagcagccgccgtgggagcatgacctcacgtggtgggcagtggcggcaacgacaaagaaaaggaag

SEQ ID NO: 92230 - DNA, 50 bp, Homo sapiens
cggctactacaaccagagcgaggacggtcttcaaagcttcacctttctcc

SEQ ID NO: 92231 - DNA, 95 bp, Homo sapiens
cctgaaacagaaattctggaacacctatatggtccagtttggccatgctggagcttgtgccaaccaggcttctgaaactgcagtagccaagaacc

SEQ ID NO: 92232 - DNA, 83 bp, Homo sapiens
gcccagcataccaggagccgggaaagagcagacggcaccgggactggtgattgcagctggaagtgcccatgaccgagctggcg

SEQ ID NO: 92233 - DNA, 100 bp, Homo sapiens
tgtctcccagagctggctgtgtgatggggaccctgactgccctgatgattcagacgagtctttagatacctgcctgaaaaccattgtgggagccctgatc

SEQ ID NO: 92234 - DNA, 75 bp, Homo sapiens
gaaccctgaagtcggtgtctgctgcgttcacggcaggattcggttagctgtttgatgaagacaatccagtacaca

SEQ ID NO: 92235 - DNA, 98 bp, Homo sapiens
gccgcgggctgcgcgcttctgtgggtgggggaaggcaggactgacgcagagtgcatggctgcctcctaatcccatagtccagaggaggcatccctagg

SEQ ID NO: 92236 - DNA, 74 bp, Homo sapiens
gaagaatctaacaaacggcaaagaacttactgattcttgaggaaactaaatatattttgccaactttggaaaaa

SEQ ID NO: 92237 - DNA, 100 bp, Homo sapiens
gcctggagtacaatgtcagtgtttacactgtcaaggatgacaaggaaagtgtccctatctctgataccatcatcccagaacacggctctagataaggagg

SEQ ID NO: 92238 - DNA, 100 bp, Homo sapiens
agcagaaggtggaggatgtggtgctgcccgagaaggtggacgtgctggtgtctgagtggatggggacctgcctgctggaccgccgggagagcctgcccac

SEQ ID NO: 92239 - DNA, 100 bp, Homo sapiens
gcaagtgttcctgcaatgctggctatgaagaaagaggttttatgtgccaaggtatgagcacattcttttagaacctgacccagtaccagcatatgctctg

SEQ ID NO: 92240 - DNA, 50 bp, Homo sapiens
ttggaggtgaacccactgagaaaggggtgaagcagatcctccgcaagcgc

SEQ ID NO: 92241 - DNA, 100 bp, Homo sapiens
agccttcccaagcttccaggtgtcccagaaacccaggaaatcgagactcatgactcccagagaggatggcatctagaagaggaggctgcggaggaggagg

SEQ ID NO: 92242 - DNA, 90 bp, Homo sapiens
tgaggatgaagacgatgatgacagtgacaaggaaaaggatgaagaggacgaggtcattgacgagaatatggttgagccccttatacccac

SEQ ID NO: 92243 - DNA, 75 bp, Homo sapiens
ctgaggcggcgcggcagcggagggacggcagtctcgcgcggacactcatgaggaccatgatacttccactgagaa

SEQ ID NO: 92244 - DNA, 75 bp, Homo sapiens
aataaaactgaccatagccagagaacagccctccatcttgcagcccagaagacaatggtacttggactcagctct

SEQ ID NO: 92245 - DNA, 75 bp, Homo sapiens
atctcgggctcggaacgagactgcacggcggttcaggaccatcatcctccatagccatagcgggcaccaaccacc

SEQ ID NO: 92246 - DNA, 90 bp, Homo sapiens
ggacctccactaatcaccagaacaaaatgtgcaggtgatggctgtggacacctagtgacttatcaggatagtggcacaatgacatctaag

SEQ ID NO: 92247 - DNA, 75 bp, Homo sapiens
tgtgattcagcctctactaaagttgtcatccgtggagcaggaaaccaggcaacaatctctttaaatacagaccag

SEQ ID NO: 92248 - DNA, 75 bp, Homo sapiens
gctgctgaagtggtttttcctaatggaaaatcacatacctttccattatctccagaagaagaagagaaaaggaga

SEQ ID NO: 92249 - DNA, 100 bp, Homo sapiens
gcgtcccgggagcccggcctcgtgcgccgcgctttgagacggaatcagtccccaatgcctggaaattcctcattggattactgtgttttaaacagaattt

SEQ ID NO: 92250 - DNA, 82 bp, Homo sapiens
gatggagcatttgatggtaatccactcttaagaactatatgtttgtatctgaaagcaaggagacggcatctggagatgtaga

SEQ ID NO: 92251 - DNA, 50 bp, Homo sapiens
cgaaaacatgaccgctgagcccatgagacctgaaggaaaagattatgccc

SEQ ID NO: 92252 - DNA, 83 bp, Homo sapiens
cctggctcttctccacaaagacacgggtcgggccccggctcagtggtcccaggcagctcgggtgtcggaacccccagacagtt

SEQ ID NO: 92253 - DNA, 90 bp, Homo sapiens
tggcattggaacttcctgttctgatagcgtggaagaaataagcgggttttgaaaacaaaaaaaagaaggagtggaagagggggccaggat

SEQ ID NO: 92254 - DNA, 99 bp, Homo sapiens
gcagctgctgttgaccttggcactggcaggatcaagtgatgctttttctggaagtgaggttgatattcactgatggactccaaagaatcattaactcct

SEQ ID NO: 92255 - DNA, 100 bp, Homo sapiens
ccgccactgccgcaggaggcgtgagaagtcttctgggagagagagttgatgaaaatacagaagaaaatcattgtggagaaacttctagccagattccaga

SEQ ID NO: 92256 - DNA, 101 bp, Homo sapiens
cccacggcacccccgcagcgctgaggacgctccggagcccggcgaccgcggtaccgcgcgccactaacagttaccttatcccatatcacacaactggtcct

SEQ ID NO: 92257 - DNA, 87 bp, Homo sapiens
ccccgcccttccccctgtctctgccctcctggcgggcccggcggctctcactatccagggactggtgattgcagctggaagtgccca

SEQ ID NO: 92258 - DNA, 99 bp, Homo sapiens
gtggaaagtctggaccgagctcttggatgttcttggacttgacggttatgatgtgattgctcaagcccaatctgggactgggaaaacggccacatttgc

SEQ ID NO: 92259 - DNA, 75 bp, Homo sapiens
gctgtgatgcctgcagagctgtggcttaccagggtccccagccccaccccagccccaaaggaggctgttcgagag

SEQ ID NO: 92260 - DNA, 85 bp, Homo sapiens
tcaggccagaccctctgggagcttctcagccattttccacagatcagggccactgctctccaggaagataaggcttttaaagcag

SEQ ID NO: 92261 - DNA, 100 bp, Homo sapiens
agcagatcgagaccgggcccttcctcgaggcggtgtcccacctgccgcccttcttcggcgttcaccttggtcgtcctgatgttttacctcagactccacc

SEQ ID NO: 92262 - DNA, 100 bp, Homo sapiens
ttaaaacataaaagtcaagtaatcaatgaaatgcagaaaaaagatcacaagcaactctggatgggattgcaaaatgtccagagcacaacctccagaagac

SEQ ID NO: 92263 - DNA, 51 bp, Homo sapiens
ctcgtggccgacggaacaatgaagagatttacaaacgaggaccacctggca

SEQ ID NO: 92264 - DNA, 98 bp, Homo sapiens
aagagttccgatttcatcactcgtgacttcactcagccgtaaagaggatgaatatccaaagaagcccttggggcagcttccacctgaacttcagtctt

SEQ ID NO: 92265 - DNA, 100 bp, Homo sapiens
ccaggtctacctcaccactggggtcatcacggctgtgagccgtgagctttgaggcggtgggatgtgtcagcagaatgtctcctgcccccgagagcgaccc

SEQ ID NO: 92266 - DNA, 50 bp, Homo sapiens
gccaaatttggtgcctggagtaggagctcatccaccatacaccatgtgct

SEQ ID NO: 92267 - DNA, 100 bp, Homo sapiens
cttggttaccaagaagccatacatgaatatgacagatacctagcatctagcaaaataatggcagctgcttaccttgaccccaacttgaatcacacaccaa

SEQ ID NO: 92268 - DNA, 100 bp, Homo sapiens
tggtccgcagcggcaacagtaacgaaaaacagggctcttagaccatgctcagcctccaagcagccttgtcatcgacaaagaatctgaagtttacaagatg

SEQ ID NO: 92269 - DNA, 100 bp, Homo sapiens
gggagacgacgctgctgggtccgctgagcggggcgacccgagattatggtgacaagctgaacatggagctgagtgagaaatacaagctggacaaagagag

SEQ ID NO: 92270 - DNA, 98 bp, Homo sapiens
ggaggatctttgggcaagctgcttaactttgctgtgacgctgtttctgcgttggaagtcctgacggccacgctggatctggaggacgtccggagctac

SEQ ID NO: 92271 - DNA, 83 bp, Homo sapiens
cacgcataatggatgaaaggaaccgacaggttatgggtgctacatgtgtgctttcagagcagtagtgtgaggaagcttggagt

SEQ ID NO: 92272 - DNA, 113 bp, Homo sapiens
agagacaaaattcagggcttccaggcaaagggagaagctgatatcctggccgcgctgtgaagcagccgacacgagtcgttgttcataaaacagcttttgaaagttgagagcac

SEQ ID NO: 92273 - DNA, 50 bp, Homo sapiens
ggaggccaggggtgtcgccatgggggcagtacccaaaggaaacgctacga

SEQ ID NO: 92274 - DNA, 95 bp, Homo sapiens
catcccgtcagagctgaggtacttcgtgaaggtgattgcccacagtgagtatcaaaagtccaaaagaatttccatctttctgagcatgcaagatg

SEQ ID NO: 92275 - DNA, 99 bp, Homo sapiens
ggaatacccgccaacaagataatcatcgctggaataatagggacctgtctgaatgtagaacacccatctcggctttctcgcaagataacatctatgaag

SEQ ID NO: 92276 - DNA, 75 bp, Homo sapiens
cccagatgtgctcaagaaatgccagcagtcatcagtgagttctgcctcagtcagctcccaagtgaggacgcagtc

SEQ ID NO: 92277 - DNA, 49 bp, Homo sapiens
ccagttatcaacatgttttaagaggctgaccggttccctgatgtgttac

SEQ ID NO: 92278 - DNA, 98 bp, Homo sapiens
agtttttaaagaacagtaggatccttgctggggacgtggagacccatctggtggatagcgaggtggtcatgctttctgcgcactgggagaagaaaaag

SEQ ID NO: 92279 - DNA, 100 bp, Homo sapiens
actggaacagctccaaccagcagccgccatggcatcagatgaaggcaaactttttgttggagggctgagttttgacaccaatgagcagtcgctggagcag

SEQ ID NO: 92280 - DNA, 100 bp, Homo sapiens
agaagtttaagagaagaaatggacatgattgcctaaatcagccaaacacaggactgtacaatttgttcaaggaatttttgtagaaaaatacgatcctacg

SEQ ID NO: 92281 - DNA, 97 bp, Homo sapiens
accgcccgcgggtgccgctcatctccatcgtgaccaaggagaaggatattgatgatgttaagaagttcaaaccgggttacctggaagctactcttaa

SEQ ID NO: 92282 - DNA, 101 bp, Homo sapiens
tgggggtgcgcgcctgcgacctgcccgcctggggtgttcctgaaaagccccatagtgattgagtcttcaaaaccaccgattctgagagcaaggaagatttt

SEQ ID NO: 92283 - DNA, 75 bp, Homo sapiens
tccaaacaaggacatggagggaaggcttcctaagttggaagcctccttagctgcagccaaaaaacagttagcaga

SEQ ID NO: 92284 - DNA, 82 bp, Homo sapiens
ggtgaccgcgattagattgcttaaggtgaatgaaaactttgccattgatttgatagcagagcagcccgtgagcgaggtggag

SEQ ID NO: 92285 - DNA, 83 bp, Homo sapiens
ttcacactgcagaactgggttctggactttgggcgtcccattgccatgaatgcctcggctggggtggagcgcctcttgctggg

SEQ ID NO: 92286 - DNA, 76 bp, Homo sapiens
tgtaaagaagagtcccacttcagtcaaagacagtagattatgagctggacagtgccacatcgcttatccaggcagc

SEQ ID NO: 92287 - DNA, 83 bp, Homo sapiens
ggggccgctctgggatcccggccaccagcaattgtccggagtccaatgtgctgattgctgctaacagtcagggtacaattaag

SEQ ID NO: 92288 - DNA, 82 bp, Homo sapiens
ctggagcctcagttggaagcagccgatccagcctgcggagcctgtggggcagggaaatgaggcaagttatcctttggaaatg

SEQ ID NO: 92289 - DNA, 100 bp, Homo sapiens
tggatttaagcactgctgcactttatgagggaggagtgaaggtcctcatcacaggcccgtggcaagaagccagcaataactacagctgcctgtttgacca

SEQ ID NO: 92290 - DNA, 75 bp, Homo sapiens
cctgtccacctgcaaggattcaaagaagggtttggaaatcccttgtctccaggttgctgggattgacttcttgct

SEQ ID NO: 92291 - DNA, 109 bp, Homo sapiens
ccatcaggtggtggtggccaagtatgcgcccagcggattctacattgcctccggagagtctctggtaagaagagtgaaagcaaagaagccaagaagtctgaagaaccaa

SEQ ID NO: 92292 - DNA, 75 bp, Homo sapiens
caacgagggaatagtggacgaactgcacgtgtacaacacggttgctgcagcaaacgagattgctaaggaaaggag

SEQ ID NO: 92293 - DNA, 142 bp, Homo sapiens
cttccctgaggctgaggcgcccggcctcccgcccgccgcgctccagatgaagtgtgagcactgcacgcgcaagggtagaatccgccaagctttgagagaaggctgtgactgctgtgctctgggcgccagctcgctccaggga

SEQ ID NO: 92294 - DNA, 75 bp, Homo sapiens
tgtgaacatgctgcacgtgtttgttctgggcgaatggcagcccatcgagataaaaacatcttacgctggagtaaa

SEQ ID NO: 92295 - DNA, 95 bp, Homo sapiens
agaggacgcggccaggcgattcggtgaagcgattcctgcaggcgttggttcccctctttgacctggtgaggaattttaaattggaacaagagcaa

SEQ ID NO: 92296 - DNA, 82 bp, Homo sapiens
gattcgcgctgctgggcacccacggagcctccggggctgatgtggacgagtgctcactagcagaaaaaacctgtgtgaggaa

SEQ ID NO: 92297 - DNA, 93 bp, Homo sapiens
tacaaggaatttttaagtaaaaattttcagaagcacatgtattataacagtattggtaaaggttttcaaggtgtcatgaaaagatggggattt

SEQ ID NO: 92298 - DNA, 100 bp, Homo sapiens
ccaagcagttggaaaggactggaacagtacgggaaattgggtcacaagctgtttggtcactctcatcttgcaaaccagaatgttctgaaggatctggaaa

SEQ ID NO: 92299 - DNA, 82 bp, Homo sapiens
ccgcttccgcatccccttcttcatgtctcaaggcttctcacggcattcagcagcagcgttgctgtaaccgacaaagacacct

SEQ ID NO: 92300 - DNA, 82 bp, Homo sapiens
gtcaggtctggagctcgaccgggccagcactgttgcaagaattcaattccgtcttcctgatggttcttcctttacaaatcag

SEQ ID NO: 92301 - DNA, 51 bp, Homo sapiens
atggaatcggtcctggaggacaggaagatgagaatgtgcctactgctcctg

SEQ ID NO: 92302 - DNA, 75 bp, Homo sapiens
aggcattttgctgtctcctcctaatacggttaagtgacccctgttcaagccgatgggatgaaagaagcttgtctc

SEQ ID NO: 92303 - DNA, 100 bp, Homo sapiens
gagaatttaacaaccttttggtcatggggactgatagaaggtttgatgaaaagggacttcctcgcccgaagagcgcgggcacagcaacgcagatgcggca

SEQ ID NO: 92304 - DNA, 100 bp, Homo sapiens
gcgcggggcggtcggctgcggtggcggcgtttggatgattgtctctcggcggcggagtcggtgtcctcatgacttctcttgtggaccatgtccgtgatct

SEQ ID NO: 92305 - DNA, 97 bp, Homo sapiens
ctggccgtggctggccacatcttctctgcaggtatcgagaaccttccctgcgaacttcagaggaacttccagctgatgcgagagctggaccagagga

SEQ ID NO: 92306 - DNA, 78 bp, Homo sapiens
ccagagaggggagccggcgaggatcaaaatcttcgaaggaggttggcagatatccctgttacaatctgtacatatcca

SEQ ID NO: 92307 - DNA, 83 bp, Homo sapiens
ccccagttcaccccttattatgtagcaccccaggagatcatgaatcagacagataaaaatcaacaagaaatcccatcatacct

SEQ ID NO: 92308 - DNA, 50 bp, Homo sapiens
ttcagattaccacactgtgaatgttgatggcacaagagactatagtcccc

SEQ ID NO: 92309 - DNA, 75 bp, Homo sapiens
ccaacacctggtccagacctcatgggagtttgagcctttgctgaagccacacgtggctgtgaagaaggtcccgta

SEQ ID NO: 92310 - DNA, 100 bp, Homo sapiens
cttcaagattttgtgccaaccaggactacgcccaagcaaggtttgatgcctatttccaccagaagaggaagcttggggtgtgactgtggggaggactcca

SEQ ID NO: 92311 - DNA, 82 bp, Homo sapiens
gcgcccgtgcgtccgtctgcgacccgaggcctccgctgcgcggataaagctgaaggttcaaacaagtggtggaaggagtatg

SEQ ID NO: 92312 - DNA, 98 bp, Homo sapiens
caaaagtggcaagctgaagaagggctcaaaatttgggcggggaactggactcactcagccttctcaacgcacgtctgctcggagatcatttgggagat

SEQ ID NO: 92313 - DNA, 83 bp, Homo sapiens
agcagctgcagcagcagcagcacagcgacaagacgcaaccatgtccaagggacctgcagttggtattgatcttggcaccacct

SEQ ID NO: 92314 - DNA, 100 bp, Homo sapiens
aagaccacctgcaacccctgccccctgtcaccttaaccagaaaacccagtttgaaaatccagtggaggaagccaaaaggaaaaagcagttaggacaggtt

SEQ ID NO: 92315 - DNA, 100 bp, Homo sapiens
ggggtcatcgacagctgcaaggaggccgtcaccttcaaggccgtcagacaagatgggcttctttcgccgaaggtacaaagaaattatcgaagctgagaag

SEQ ID NO: 92316 - DNA, 100 bp, Homo sapiens
gaaaacttgaaactaatcctgatattaagccatcaaatgtggaacctatggaaaagaaagtgactgagaccgaagatgatagtgatagtgacagcgatga

SEQ ID NO: 92317 - DNA, 101 bp, Homo sapiens
ttctaaaattggaagtgaatggccccatggtgacggtggccctgtcagtggctctcttggccctcctgaaatgcaacatggccaacgccctggccagcgcc

SEQ ID NO: 92318 - DNA, 94 bp, Homo sapiens
cagccggcgggtacctgcggccaattcggtggaacgaggacgcggactgcgaaggcagggagcatcgagtacagctgtccggcctccaacgagt

SEQ ID NO: 92319 - DNA, 78 bp, Homo sapiens
tttgacacggctttggaaacgacgtcatgtgttaggtctatgtgctctctctatcaaccattccaattcttacctggc

SEQ ID NO: 92320 - DNA, 88 bp, Homo sapiens
gactgtgggctggtgtgtggaactgattgccaaggacatggaacgctgggcccgcagtctcaacaaacaaaaagaaaacttcaaaaat

SEQ ID NO: 92321 - DNA, 100 bp, Homo sapiens
agaagtccttctcaggaaaaaaggtctccctgcggcagggcatgagggccgacccaggggtgctggccgccctctgtgagaaaactgacaatgacatccg

SEQ ID NO: 92322 - DNA, 100 bp, Homo sapiens
ggagcagggtggccgtggcagcgtcctgcagttcatgcccttcaccaccgtgcagtacctgaaggacaggcagctggcgggcgccatggtatgggccctg

SEQ ID NO: 92323 - DNA, 75 bp, Homo sapiens
cggcgagcagaactacggcgagcggtgagctgaagagacgcctgaaagctgagaagaaagtagcagagaaggagg

SEQ ID NO: 92324 - DNA, 100 bp, Homo sapiens
ggcgcgggccgaggcctgggacagctaccgcagcatgagcgaaagctacacgctggagacttatgcagagatggaccccaccacagcagccttggagaag

SEQ ID NO: 92325 - DNA, 101 bp, Homo sapiens
cgcgaacatggacgccgtcaacgccttcaaccaggagcatgctacaagtgaaaactgatgagaaactgaatgtgtctgatgagaatacagcaagttgccct

SEQ ID NO: 92326 - DNA, 100 bp, Homo sapiens
aggtctgcgttgctcttgcttttcctcgctggggtgtacgtacccggcagtgtcacctgctcctggatgtcttcaactccaccgagcatgagctgaccgt

SEQ ID NO: 92327 - DNA, 76 bp, Homo sapiens
cgctgagtggtttttcggatcatgtctggtggctccgcggattataacaggctggcctgccactcctcctgctatg

SEQ ID NO: 92328 - DNA, 100 bp, Homo sapiens
ccggggcaagaagcgccacgaggtgccaccccacgtgtacgcagtgaccgagggggcctatcggagcatgctgcaggctctttgacctcatctaccgcga

SEQ ID NO: 92329 - DNA, 50 bp, Homo sapiens
gatagactccttccagaataactcaaagcagagagagatcatcattgcct

SEQ ID NO: 92330 - DNA, 76 bp, Homo sapiens
cgcaaacccaaagatccccgttcctggagattctgattgagggcgaagctgtgctcaggcccgggctggacgcaga

SEQ ID NO: 92331 - DNA, 100 bp, Homo sapiens
acaagtagggagcagggaaagaagagtgagcctgcatgccaattctaagctcttcaggatcaaagtccccggcaacttccacgtgtccacacacagtgcc

SEQ ID NO: 92332 - DNA, 100 bp, Homo sapiens
ctttcctatggagcctccagaaatgctgtatggaagatggtaccccaaagcatatcatccagatgacaggatttaagatggaagaaaaagaagcgctagt

SEQ ID NO: 92333 - DNA, 100 bp, Homo sapiens
gagcgaagccaagccgggcggcagggcagctgcaatgactctccgcacggtattattgtcattgcaagcactattggcagctgcagagccagatgatcca

SEQ ID NO: 92334 - DNA, 98 bp, Homo sapiens
gcgatgtggagcgcttctttaagggctacgggaagatcctggaggtggatctgaagaacggattagaatatggctacatattcccgctgtcatgcagc

SEQ ID NO: 92335 - DNA, 100 bp, Homo sapiens
gagaacatccccagagtcctccctgagaaacttggggtagatttagacctcagttggatgaacccattccactgtatgaggcaaaagtttccatggaagc

SEQ ID NO: 92336 - DNA, 96 bp, Homo sapiens
agtgggcaggctgacgtgcagacgctggccatcatgcttcaggagcagctggaggccatcaacaaggagatcaaacacatcatctcagagttggag

SEQ ID NO: 92337 - DNA, 82 bp, Homo sapiens
cgacgttccatctgtggaaggacctaccaaccagcaagacagatcggcttgccaaaggatcagaatgttaccaaaagagcct

SEQ ID NO: 92338 - DNA, 87 bp, Homo sapiens
aacggtggagctaagtagccaaggattctggaaaactggcatccgttctgatgtctgtcagcttttgaaatgacattaacagaagga

SEQ ID NO: 92339 - DNA, 90 bp, Homo sapiens
attcttgctacctccagtcaagacaattctgtgaagtcgggcgcctccagcttcggggagaagttctcccgagtcaagttctcaccgtcg

SEQ ID NO: 92340 - DNA, 82 bp, Homo sapiens
aagcatacaggtgtccagcagagaagctaactgtagaacacatcaagcatttatgcggcccacatatgacagtggacataga

SEQ ID NO: 92341 - DNA, 100 bp, Homo sapiens
ccccgcagcccctgcccaggtgccatggccgcattgtaccgccctggcctgcgttacagacacaactgaggccccctttcaaggggatcagaggtccctg

SEQ ID NO: 92342 - DNA, 76 bp, Homo sapiens
aagaagaattcctcactaatgagctctccagaaaattgatgcagggagaaacaaaggcagcgctgccctcggggga

SEQ ID NO: 92343 - DNA, 101 bp, Homo sapiens
cgatgatttactgaaatttgatgacctagatggaacacatgctctgatgaaaataatgttgagtttccatgaagaacaggaagtactgccagaaactttcc

SEQ ID NO: 92344 - DNA, 90 bp, Homo sapiens
cccagaggacttctggcctttggcacgtcctgctccgtggtgctctatgaccccctgttgtgaatgggagagttcacatccgcgactggc

SEQ ID NO: 92345 - DNA, 97 bp, Homo sapiens
gtccagttgcagcccatggagatccagttcaattatgaatctcaggaacaccaccttctgtcaggaagaaggtagataatgactataatgcccttcg

SEQ ID NO: 92346 - DNA, 100 bp, Homo sapiens
atggccggcctgaccttatttgtgggccgcctcccgccctcggcccgcagtgagcagctggaggaactgttcagtcagcttatgaactctggtttaagca

SEQ ID NO: 92347 - DNA, 83 bp, Homo sapiens
aaaaagcatccccgaggaggaagacgaatcgttaaacatcttaggtcaggggtatagaacaggctatgcttacaggcatcctc

SEQ ID NO: 92348 - DNA, 98 bp, Homo sapiens
aaaacctttcaacccactgctgggagagacttatgaattagtgcggtttggtcaagaccatgccaggtcaaaccttatttggaatttcaaaacacgag

SEQ ID NO: 92349 - DNA, 75 bp, Homo sapiens
ataaaaaggcagaacattgacctgaattgcctgaattgactcctctgcaggctggagtgcaatggcgcgatctcg

SEQ ID NO: 92350 - DNA, 50 bp, Homo sapiens
ccgttcttcacccctacaccttggagattaagcatgaaaatattgttgcc

SEQ ID NO: 92351 - DNA, 97 bp, Homo sapiens
gacctcactcacactttcttcaatccagaccgagaaggctggctattgaaactcgaaccagacataagttcagaggaatctgtctccactgtagaag

SEQ ID NO: 92352 - DNA, 100 bp, Homo sapiens
tctccgacatgacatggcagccgctggcttcactgaagcacttacctttgccctgccatgaagatggacctacagctaaaaaattaaagactgagcaagg

SEQ ID NO: 92353 - DNA, 75 bp, Homo sapiens
catggatgttcttcttcgagtatttgtagaaggtcagcagataagcagagagccctagaagaaaccaaagcctac

SEQ ID NO: 92354 - DNA, 88 bp, Homo sapiens
agcctctgggcgccgtcgcttttccagcatcgcagaggcaaaagcgtggcagtgggacccaaaagacccccccaagacacatatgacc

SEQ ID NO: 92355 - DNA, 95 bp, Homo sapiens
cccgcagcaagcctgtgtgcattcataagaattcggaatgtctgaaagagcagcagaaacgctactttccaggatccagcaatcagcctggcctt

SEQ ID NO: 92356 - DNA, 98 bp, Homo sapiens
cggagagtgacggagtcggcgagcccccgcggcgacagctgcccacattggcgttggaataagtggacaagaaggaatgcaagctgtcatgtcgagtg

SEQ ID NO: 92357 - DNA, 83 bp, Homo sapiens
ccgagagcgcgaatatcgtcatcgttagaagggtacagctctgccggggggggaaaaagtggtaccattttgggcgttcttga

SEQ ID NO: 92358 - DNA, 75 bp, Homo sapiens
cctaggattgctgcaggtcagcagtctccactggaaaaaaagatcttgcggacaaggcaaaatctcagcaagttc

SEQ ID NO: 92359 - DNA, 102 bp, Homo sapiens
tcatgatacagttgataaaattgttgttcactgattaccaaagctatgtcatccatggctgcctggagaataatccaaccttggaaagatcgattgctttat

SEQ ID NO: 92360 - DNA, 50 bp, Homo sapiens
cggagactttggggcctaactagattccctataaggagcccctgctggtg

SEQ ID NO: 92361 - DNA, 100 bp, Homo sapiens
agcctcccaagtagctgggattacagatcaggaaacagagctcagtgcagcccactaaattgctcagggccctacagctaacaagcggcagaggcaggat

SEQ ID NO: 92362 - DNA, 100 bp, Homo sapiens
tcagaactcacgtccgtcgctgctgcaaccccaagatgtcggagacacggtggaaacgcttatggtcaaaatgcagatcttcgtgaaaacccttaccggc

SEQ ID NO: 92363 - DNA, 101 bp, Homo sapiens
gccaaggctatcatggatttcagattggtggacccccaaaagtacaagggcatatttaacggattctcagttacacttaaagaggatggtgttcgtggttt

SEQ ID NO: 92364 - DNA, 88 bp, Homo sapiens
agcgcagcaacgtgcggtgggaccacgagagcggtgagaaggactggcagaaatacgagactgctcggcggctgaaaaaatgtgtgga

SEQ ID NO: 92365 - DNA, 74 bp, Homo sapiens
cgacggcgaccatagctctcgcatgagccatgagcccaagtccccttcgctagggatgctttccaccgcgacca

SEQ ID NO: 92366 - DNA, 90 bp, Homo sapiens
cgcgagtgggagcaccaggatctcgggctcggaacgagactgcacgggcgccctgcgtccggcagaggaggcgagcatcccgctcaggtg

SEQ ID NO: 92367 - DNA, 98 bp, Homo sapiens
cagcggcatacagaatgcctatgaccggcgtcgagaatttcaactgcttcacggtgatgatatggcatctgccagctctagccgggcaggagtggccc

SEQ ID NO: 92368 - DNA, 90 bp, Homo sapiens
gctctatgccctgaacgaaaacatcagctggtcctatagtacccctcctcaggaatgtctccccagtgcaaggacaaagactgaagagac

SEQ ID NO: 92369 - DNA, 100 bp, Homo sapiens
catccctgatgcttggagaagctgaggacacacagggtatggcctcacaagtcttggtctacccaccatatgtttatcaaactcagtcaagtgccttttg

SEQ ID NO: 92370 - DNA, 92 bp, Homo sapiens
ggaggaggaggattcagggaataggagctggggagcccttctgcgccacagcggagctccctgggtcctcagcagtgaggctggcctccctg

SEQ ID NO: 92371 - DNA, 74 bp, Homo sapiens
taaacctcagagtcctagatggatatgtgatttctcagaaggaaagagaatgtgttcagtgcagagccttcaat

SEQ ID NO: 92372 - DNA, 82 bp, Homo sapiens
ccgtggccaccgcctccagcttgccaccaaagacctgcgactttgctcagcttcggaaccaaaaagaagcttcccagagccg

SEQ ID NO: 92373 - DNA, 100 bp, Homo sapiens
ttcatcctcggcggcggtggccgctagctccaaggaaggtcatcgtattgaggaagttcctgaacttcctttggtagttgaagataaagttgaaggctac

SEQ ID NO: 92374 - DNA, 82 bp, Homo sapiens
ttctgcctcgtcctgacacccaccaggctttgctggctcctgtctgccccgcttcagcaccatgcccttcatctactgcaac

SEQ ID NO: 92375 - DNA, 97 bp, Homo sapiens
ctgcagcccgaccagtccaagagccggcagcatgacgaaggtcattttcttctgaggaagtcattcttaaggactgttctgtccccaaccccagctg

SEQ ID NO: 92376 - DNA, 100 bp, Homo sapiens
agacagccacttggccatgtcaccaaaacaaggagaaggtgcaagactgtccgtgtggaccctgactcacaggtggtgttcccactgatgaagagcaggc

SEQ ID NO: 92377 - DNA, 74 bp, Homo sapiens
tcagcctcccaagaagctgggattacagagcagaaagaccatgggtttgaggtggcctccacttcccctgaaga

SEQ ID NO: 92378 - DNA, 76 bp, Homo sapiens
ggtttaatatctgattgggacaacattcagacccatttccagtcatgagattttgtgtcatgtatagagaactaca

SEQ ID NO: 92379 - DNA, 101 bp, Homo sapiens
tcaaatcctggaaaaaattattaggaacagcatatgccatatatgagctggctgtggcttcatttcccaagaagcaggagtgacttcagtcatcccagcaa

SEQ ID NO: 92380 - DNA, 82 bp, Homo sapiens
gggattacaagcatgagccaccgccgccaggttttaaaatcaaagatgggaaaatcggagaaaattgcccttccccatggcc

SEQ ID NO: 92381 - DNA, 100 bp, Homo sapiens
tgcggctccaggtgggctcacgcgcatggcacattacacttctgtggatttaaagtccttgcccctcagatcagctttgctcctgaaattgcatccgaag

SEQ ID NO: 92382 - DNA, 101 bp, Homo sapiens
ttcaccttgaagaggaagacggggcggaagaccaagatcatcgagatgggaaatcctcattgacgattcaatttgttgaaggccaatttgtggactcctac

SEQ ID NO: 92383 - DNA, 73 bp, Homo sapiens
ctggatatcaacgtccagcttaagatgtgtgaacttcaacccggagcactgcagccccaatggcaccgacccc

SEQ ID NO: 92384 - DNA, 90 bp, Homo sapiens
agcctggaaggtgcgtgtggggctgggtctcggagtgggagacgtggagtgcaggatcgaatcatcaatttagttgttggcagcttaaca

SEQ ID NO: 92385 - DNA, 82 bp, Homo sapiens
gctgaggactcagaccagtctctgcaagagctttgccacaaatgtcagtgcagaactctggctggccccaccaagaagacag

SEQ ID NO: 92386 - DNA, 73 bp, Homo sapiens
cctgtttgagaaaaggcctaagaattttggcattggaagatgaagtcctcagtacattctgaagaagatgatt

SEQ ID NO: 92387 - DNA, 75 bp, Homo sapiens
atgcacctggtggttgaaagttttccttcttacagagatgtgactctgtttgagttggctggatctattattggc

SEQ ID NO: 92388 - DNA, 100 bp, Homo sapiens
gtggccaccgggcatgggaagtatgagaaggtgcttgtggaagggggcccggctccctaggcgtcccatctcgctagaggaagcagagcactttgccatg

SEQ ID NO: 92389 - DNA, 100 bp, Homo sapiens
ctgcttacttctgttgggacaggccttgcatcctgtgctgccaactccatcaatcagggggcagctggcattttatgctatgtgggagcctatgtcttca

SEQ ID NO: 92390 - DNA, 100 bp, Homo sapiens
atgaaaccgaccaaactggagttagctaccggactgtcccgcgagcgtaattcgccaaaatgacgaacacaaagggaaagaggagaggcacccgatatat

SEQ ID NO: 92391 - DNA, 82 bp, Homo sapiens
gtgcggcgcagggcggctggcacaaacggcggcgccggggccggaggaaaaagctcgtgatcagggccaaagcggtcagtga

SEQ ID NO: 92392 - DNA, 74 bp, Homo sapiens
gatgatcctgaagtacagaaagacatgttattaatgctgcactggctttagcagcaaaaccacagagtaaactg

SEQ ID NO: 92393 - DNA, 127 bp, Homo sapiens
tccttgaaagaaatagaaccaaatctgtttgctgatgaagattcacctgtgcatgggaaatcctcattgacgattcaatttgttgaaggccaatttgtggactcctacgatccaaccatagaaaaca

SEQ ID NO: 92394 - DNA, 101 bp, Homo sapiens
gtctgccgcagagtcggcacctgaaggacatggagtggaatgcagtagccctctgggcctgggatattgtggttgataactgtgccatctgcaggaaccac

SEQ ID NO: 92395 - DNA, 100 bp, Homo sapiens
gattcagcaaatgaagattcagtggatgctaagccagaccggtcctcgtttgtaccgtccctcttcagaattgcaaccttgccaatggacctgatcggtt

SEQ ID NO: 92396 - DNA, 83 bp, Homo sapiens
ctgccatgtatccgcagggcagacatccgacctgcctagagctggaacgttacctccagagcgagccctgctatgtttcagcc

SEQ ID NO: 92397 - DNA, 100 bp, Homo sapiens
tgttgtgatgggagttcagtacaaggataaagagactggagatatcaagtgttggagagctggctggactacactggggaactggagccccctgagccgc

SEQ ID NO: 92398 - DNA, 100 bp, Homo sapiens
acagagatgagtttgcagttacatgtcatgctgcccaaggacatagccaagctggtccctaaaacccatctgatgtctgaatctgaatggaggaatcttg

SEQ ID NO: 92399 - DNA, 101 bp, Homo sapiens
gtccagccctgcaaactccattcatgaacatggacttcccgtgcctctggctagggctgttgctgcctttggtagctgcgctggatttcaactaccaccgc

SEQ ID NO: 92400 - DNA, 75 bp, Homo sapiens
gagagaccttagaaaggatcaggactggcggacacttctgagaaattcatcaggctgtgaagcgcgccgtgatga

SEQ ID NO: 92401 - DNA, 101 bp, Homo sapiens
gtggtgacttcagtggagagcaactcaaatggtgctggagaatctggtaaaagcaccattgtgaagcagatgaggatcctgcatgttaatgggtttaatgg

SEQ ID NO: 92402 - DNA, 75 bp, Homo sapiens
gctgtgtgtgcttctgcgccccaggtgttgtgtgtgggggtgcaggtgtggacactgccagcggctgcagccgac

SEQ ID NO: 92403 - DNA, 75 bp, Homo sapiens
gagaaaatgccagagtcatcgccggccaaccacttgccttctagcagcaggaggaggaaaccgtcgaactgccaa

SEQ ID NO: 92404 - DNA, 80 bp, Homo sapiens
gcaaagctcaccctcccgagttgaaaaaatatggacatttctggaattacagagccccctctacattgagcacaagacag

SEQ ID NO: 92405 - DNA, 100 bp, Homo sapiens
cggccatgttaaccaggaaaccttcggccgccgctcccgccgcctacccgaccggcgtctggatgctaaccacatcagctatgtgcccccaagctgtttc

SEQ ID NO: 92406 - DNA, 75 bp, Homo sapiens
atggaacatacgggcaagtttataaggttccgaggtgcaccgattatacccgtggcggccaagccggggggacca

SEQ ID NO: 92407 - DNA, 100 bp, Homo sapiens
gcaggtgggcaggaggaggaagagggagaggacgaggaagagctgagtgggacaaagggccatgaaatgacaagcattggactgctacttggtgtttctg

SEQ ID NO: 92408 - DNA, 75 bp, Homo sapiens
cacttattggaactgaaacactcaccgattcaaatgctcaggtgtctcaaaggctgttgagcacatcaataaaac

SEQ ID NO: 92409 - DNA, 100 bp, Homo sapiens
gttctctgagcttcggtgggatgaccagcagaaagtcaagaagacagcggaagctggaggagtgacagtgcaaccagagacccctctacctctgtcccag

SEQ ID NO: 92410 - DNA, 100 bp, Homo sapiens
ctgcagcaatccctttgagtttccaagtcaggatatgtgcctttcagctttaaagagaattgaagtgatgttacagcctttcgattatgatcccaatgag

SEQ ID NO: 92411 - DNA, 100 bp, Homo sapiens
ctggaaggagactggatgatagaattgtcatttatagcaaatacactgacctggttccaaaggaggttatgaatgcagatgatccagacctgcaaaggcc

SEQ ID NO: 92412 - DNA, 100 bp, Homo sapiens
ctgaggatcttggaggtgctgatcttcattgcaggagatttactgaccttaagcactatagtgatgaactgcagtctgtcatctcacatcttcttcgagt

SEQ ID NO: 92413 - DNA, 75 bp, Homo sapiens
aaaactccaagaagccaggtgttcaaggcaagaaacctattggaattcgagacttaattaatgaagctttgcatc

SEQ ID NO: 92414 - DNA, 100 bp, Homo sapiens
cgcagcccggaggccgcgcgggagagcaaagggagaaagctctaggctaaaggccagaagacctagccctgccaataaaatcaacctcattttgtgaatg

SEQ ID NO: 92415 - DNA, 98 bp, Homo sapiens
cacctggatgagacatttgctacagcatcccacattaagtcaacgctgatttagaagaaagttttaatgaacatgaactggagccctcatcacctaaa

SEQ ID NO: 92416 - DNA, 75 bp, Homo sapiens
cttctcagagtggacgagcacgacttcagcatgagacccgccttcggaggtgatcccattaagatactaatgcca

SEQ ID NO: 92417 - DNA, 100 bp, Homo sapiens
ctccaatatggcaattgacctcacctcaagcacacccaatggacagcatgcctcaccaagtcacatgacaagcatgcatcagagaatttagatgagctgt

SEQ ID NO: 92418 - DNA, 100 bp, Homo sapiens
ggcgatgtgtagtgccttccatagggctgagtctgggaccgagggaaatcctcattgacgattcaatttgttgaaggccaatttgtggactcctacgatc

SEQ ID NO: 92419 - DNA, 75 bp, Homo sapiens
ctcactctgttaaagctggtctgttctaactgagaaatggctcagggaactgttggaggcgtgttcatcacgacg

SEQ ID NO: 92420 - DNA, 100 bp, Homo sapiens
ctgagccggccgcgggcgcgaccggaggcagatctgttacctaaagcaataaaaaatggccagaggatcagtgtccgatgaggaaatgatggagctcaga

SEQ ID NO: 92421 - DNA, 101 bp, Homo sapiens
aacgggtcagttggcagccatcaaagttatggatgtcactgagactggaatcagccattttaccaagaaagttgggtttcttttactggcaaatagtactt

SEQ ID NO: 92422 - DNA, 100 bp, Homo sapiens
tactttgactatgcggcctcactgcctgaggacgacgtggactacagtggtggaggtggatacagcagtcggagaacatctggcagagacaaatacggac

SEQ ID NO: 92423 - DNA, 90 bp, Homo sapiens
atttgattaactcattcaaggttacccagttgagtttttggtcatgaagaggaagagaggcaggcctaaggggtccacgaagaagtccag

SEQ ID NO: 92424 - DNA, 90 bp, Homo sapiens
ctctctaaattgactcagctccaggtacgtcagcctgtcatatgcatcaacaaccatgtattttgttcgatttgtattgatttgtggttg

SEQ ID NO: 92425 - DNA, 50 bp, Homo sapiens
acacgctggacagagcccctgaagtgcaccaattccagctggacatcact

SEQ ID NO: 92426 - DNA, 82 bp, Homo sapiens
ctccatgaatggaaatcggctccgcagtaagcgatacgaatcccagcttcgggatcttgagcggcagtcagagcaacagagg

SEQ ID NO: 92427 - DNA, 100 bp, Homo sapiens
gggggatcgggggcggcggtggcgccggcggcgggacagggtttcaaagacaacctccacgctgtgttctgcttggctgagaactcggtggggcccaatg

SEQ ID NO: 92428 - DNA, 100 bp, Homo sapiens
cctgcacatttgtgatgatagccagtcccgagagccagagatccgtgctcagctcacagagcagatgaaatgcctggaccagcagtgtgagcttcgggtg

SEQ ID NO: 92429 - DNA, 100 bp, Homo sapiens
tgtcccatcgcaaacccaaagatccccgttcctggagattctgattgagagaggtggagaagagcgagtacttgagaaagaagaggaagaagatgatgat

SEQ ID NO: 92430 - DNA, 75 bp, Homo sapiens
gaggcagagcggctcagccagcggcagacagaacgggacctgtgtcaggttcagcttgttggtttagatgaggag

SEQ ID NO: 92431 - DNA, 82 bp, Homo sapiens
cttctgcagagagagtgcgcagaaggattccgggagcacagttccgccgaaatttatccagttggcgaaggactttgaggat

SEQ ID NO: 92432 - DNA, 113 bp, Homo sapiens
gccggcgacggaccagcgacccaagcgccgcggttaaccacgtctcgtccacgacctccctaggatcttcagcctgttaaacaagaaaacgaaaaaccccttccagaaaacat

SEQ ID NO: 92433 - DNA, 83 bp, Homo sapiens
agatcccgctgaacaatggggcaggctgccgcttcgaggggcagttcagcatcaacaagtttaaaaggatgcttaatcgggag

SEQ ID NO: 92434 - DNA, 98 bp, Homo sapiens
cgagcacccgcctccgggcatcttcaactagcaaattggtcaggagatgttggaaaaccttagtcatgacagagaaaagatacagcgagcacgtgaaa

SEQ ID NO: 92435 - DNA, 82 bp, Homo sapiens
acgggaagggccggcccgcctccctggccggggcgcagttcggaggttcagtcccagctatctgacttcatgtgaaagatgg

SEQ ID NO: 92436 - DNA, 100 bp, Homo sapiens
gtttcctccgaagctgcgctcctggaacagcagcacctgcaagcgcccggcagcggcccgcgagtacctggtgtgtaagaggaagctggagagtaagaag

SEQ ID NO: 92437 - DNA, 100 bp, Homo sapiens
gggagccccggagtccgcggcagcgccgagggcccctcccccaggcctctgggctctgagagaatggtcaagaacctggagaaggaactagcactactca

SEQ ID NO: 92438 - DNA, 100 bp, Homo sapiens
ggaagacctcactgaccccagagtggcagaaaggctgatgcagcagggtttcttccggagaacaatcagattgaagcttatctatgacagatgtgatctt

SEQ ID NO: 92439 - DNA, 75 bp, Homo sapiens
atggagtccttaaaaggcacaggagattcagtagatgaacagatggtgagaacaagaccaagattggaaagccag

SEQ ID NO: 92440 - DNA, 98 bp, Homo sapiens
gaagagaaactcagcgctggggaagaagtgggcctttggagtgacgctgtgggaactcatgactctgggccagactccctacgtggacattgacccct

SEQ ID NO: 92441 - DNA, 98 bp, Homo sapiens
aatccttgggtttgaagatgatgttgtgattgagtttatattcaaccagctggaagtgaaggatctatctggttcaatagatgacctccccatgggga

SEQ ID NO: 92442 - DNA, 90 bp, Homo sapiens
cttcagaacttttattccttccagaagcaggaatgtatcctgtcaggtataatgtcagtgaatggcaagaaagttcttcatatggatcga

SEQ ID NO: 92443 - DNA, 83 bp, Homo sapiens
cgaggctctccctgcacagcatcgcgcagaacaaagggatcagacctgatggccaaaagaaaggaagaaaatttttcctctcc

SEQ ID NO: 92444 - DNA, 74 bp, Homo sapiens
ggagatgcacagctaagatgccaggaccacctggaagcctagaaatgatgaggctgccagccttgagagcacca

SEQ ID NO: 92445 - DNA, 100 bp, Homo sapiens
ggcagagaggatatcttgggcgggggatgtgagcgctgagcccttggcagacatgccttgaattggaacgctacctacagacggagccccggaggatctc

SEQ ID NO: 92446 - DNA, 83 bp, Homo sapiens
cgcaaccagagccgccgccacggccatccggctgtccttagagcaagccctgcctcctgagccaaaggaagaaaatgctgagc

SEQ ID NO: 92447 - DNA, 98 bp, Homo sapiens
ctggcctcagcaacctgacaattctgtcgtgtcccgccgacatcggcctggctgcctggggacgcaaggccctggacattgctgagaacgagatgccg

SEQ ID NO: 92448 - DNA, 98 bp, Homo sapiens
agccgccgactcacacaaggcaggtgggtgaggaaatccaggtgcactacatcctccaggaggtggtgatgggtgggatggtgttggaaacaaacatg

SEQ ID NO: 92449 - DNA, 88 bp, Homo sapiens
gccctggtcttgctcggccgatgaagtgcagaggtttttttctggcgtggtgaccaagatgaagatgcagaggaccattgtcatccgc

SEQ ID NO: 92450 - DNA, 75 bp, Homo sapiens
gttcctgctgccctcaaggtcgtgcgtctgaagcctacaagaaagggcaaattcattcgcatcaactttgatgtc

SEQ ID NO: 92451 - DNA, 75 bp, Homo sapiens
gtccagcgactccggggcctgatgaatgacatcgaaccccgagatgcccctgtccttcacaataagccgaggatt

SEQ ID NO: 92452 - DNA, 95 bp, Homo sapiens
gggagtgtctgctgatcacttggagtgctgtcccttggaacaggaggagtaagattgaggaaatggaaaggtcagtagttgcacagctgctgagg

SEQ ID NO: 92453 - DNA, 100 bp, Homo sapiens
ctaagagtgtttgatcttcctctgacttggtactattctctctcccagagcttagaaaccaagatagccaagtggaacctgcaatcaagaatgaataaga

SEQ ID NO: 92454 - DNA, 90 bp, Homo sapiens
ttcttcatgtgttcctgtagctctgatgagtgcaatgacaacatcatcttctcagaaggttatcaatactctggctgaccatcatcatcg

SEQ ID NO: 92455 - DNA, 116 bp, Homo sapiens
catggcgtccggcagtaactggctctccggggtgaatgtcgtgctggtgatggcctacgggagcctggtagatgatgagctggagatcaaggcctactatgcaggccacgtgctgg

SEQ ID NO: 92456 - DNA, 100 bp, Homo sapiens
cgtcgctcacgctgggagctgtagaccggagctgttcctattgggccatcttggctccaccaccctggctgtggatgagatgaacggaaaggagctcaat

SEQ ID NO: 92457 - DNA, 75 bp, Homo sapiens
cctctggatgctgacagaaacaagggatgaaaactttcggaagagaaagttgcctgtggtaagttcagttgttaa

SEQ ID NO: 92458 - DNA, 75 bp, Homo sapiens
ttggaagcagccgatccagcctgcggagcctgtggggcaggtgggagaaggagagaaattggtgagggctctttt

SEQ ID NO: 92459 - DNA, 100 bp, Homo sapiens
tcgccctgtggatgactgagtacctgaaccggcacctgcacacctggatccaggataacggaggctggggctgaagaagatgcagagcagcctgaagctg

SEQ ID NO: 92460 - DNA, 74 bp, Homo sapiens
gcctcctcccgcctgccccctcagccctgtggctgggggcagagctcagagtcactttgtggcatgtatgacag

SEQ ID NO: 92461 - DNA, 96 bp, Homo sapiens
atgttgtctcacccattgccacgagtgaaagctgaaacttaccactgctgtctggaaatcacgaaggatccactagttcctggactatgggaactg

SEQ ID NO: 92462 - DNA, 100 bp, Homo sapiens
cgagcggccgctcagcgtcccccacaccacagacccgcgccgccgacgacccagcagccgccatggctctgctccgagcaatcccacagagtattgatga

SEQ ID NO: 92463 - DNA, 85 bp, Homo sapiens
gctgcccatctatactgagctcaaggacaaggaggaagcctgggaagtgcccagtgacttatggccaatgtttgatgcttaaccc

SEQ ID NO: 92464 - DNA, 78 bp, Homo sapiens
acaaagaaggcaaacccctgctgaaggatgatcggctgaatgtaacagaggaactaacgtccaacgacaagacgagga

SEQ ID NO: 92465 - DNA, 50 bp, Homo sapiens
cggccacgcgcggcgccgctcggggcatggtctagtggcccagtcaggac

SEQ ID NO: 92466 - DNA, 75 bp, Homo sapiens
tgaataacccttttaacgagtattccaaatttgatggcaagctttgggatgcgacatcagcaaatgagaggaaaa

SEQ ID NO: 92467 - DNA, 83 bp, Homo sapiens
ggagccatcacgcccagctagccatcttctaattttcattccttcaaagggtaaaccagacttgaatacaacattgccaatta

SEQ ID NO: 92468 - DNA, 89 bp, Homo sapiens
acttgagccggctctacacagcaacatccctgatgcagattgatgacaatgtgatgagggagctgtctggtctggtgattattacagca

SEQ ID NO: 92469 - DNA, 107 bp, Homo sapiens
atcatcctcgtgggcaacaagagcgacctggtgcgctctcgtgaggtctcggtggatggttttaaaatcaaagatgggaaaatcggagaaaattgcccttccccatg

SEQ ID NO: 92470 - DNA, 75 bp, Homo sapiens
ccggagataatgcaaacatgtgggaatgtctccaatcaatttcagttaggagaagttgccccagtgcaaggcact

SEQ ID NO: 92471 - DNA, 75 bp, Homo sapiens
ctgacaagccttcaaggagcccagggtgcctccggagccagcgtggtggccatagacaacaagatcgaacaggcc

SEQ ID NO: 92472 - DNA, 75 bp, Homo sapiens
tgagcggccaggacgacgaggagcagggcctgactgcgcaggtgttgacttcaaaatcaaaactgtagagctaag

SEQ ID NO: 92473 - DNA, 49 bp, Homo sapiens
aaaattcttcaagaaatctaaggtggctccaggatgtatttaacgtgcc

SEQ ID NO: 92474 - DNA, 98 bp, Homo sapiens
ggtaccatagaaacattaccagaaatcaggcagaacatctattgagacaagagaattatatccagatcgagagacagaagattctgaaagggttcaat

SEQ ID NO: 92475 - DNA, 75 bp, Homo sapiens
gaagcagccgatccagcctgcggagcctgtggggcagtgcctccggagccagcgtggtggccatagacaacaaga

SEQ ID NO: 92476 - DNA, 75 bp, Homo sapiens
gcatccggagagtggacaagaaatgatgagtctcaagcaacaaaagaaattttggcacaaaaatgtaaaacttac

SEQ ID NO: 92477 - DNA, 75 bp, Homo sapiens
tgtcggcgaagccgcgggcgaggaactgtggctgcaccatctgtcttcatcttcccgccatctgatgagcagttg

SEQ ID NO: 92478 - DNA, 83 bp, Homo sapiens
agttggatagccccgaagatgcagagttcattgttgccaaggtgtttgaccaggaacttgatgcactggaaattgagacagta

SEQ ID NO: 92479 - DNA, 97 bp, Homo sapiens
gcaaatacttgtgcactgggagaggtggatatcatccagtgaaaattggagacctcttcaatggccggtatcatgttattagaaagcttggatgggg

SEQ ID NO: 92480 - DNA, 90 bp, Homo sapiens
ctggatgccgaagtcctggaggtgttccacccgacgcatgagtggcaggcccttcagccagggaagacgagggaaaacaggacctcccgg

SEQ ID NO: 92481 - DNA, 50 bp, Homo sapiens
agtcactcataagcgcgctcaagagtacctagtcgatagtcgctggttca

SEQ ID NO: 92482 - DNA, 50 bp, Homo sapiens
ctggacatgtccaggcctaccagaaaggccttttccacctcatatccagc

SEQ ID NO: 92483 - DNA, 75 bp, Homo sapiens
gtttttggtggattagagtccatgattaaagaagcaagacgaactgctgaggtgccagatgcaattaaaaagtgt

SEQ ID NO: 92484 - DNA, 100 bp, Homo sapiens
atgagaactatttcatttgatattcctcctcaggagaaaggaggtgtggcatcaggattcaagcacgtggtacccaacgaggtggtggtgcagagactct

SEQ ID NO: 92485 - DNA, 50 bp, Homo sapiens
cctagcgataccaagaggtctcaggctatgaaaatgagccggagatcagc

SEQ ID NO: 92486 - DNA, 74 bp, Homo sapiens
acgccaaaatatgttaccttcaattcaaagatccggagttctgtaactcacttgttgtgtgcatcaaaagattt

SEQ ID NO: 92487 - DNA, 74 bp, Homo sapiens
gggagttctctgtgtctgtgaagttgctccttgagggcaggacagttcttatggctttatccgttgcgtaagca

SEQ ID NO: 92488 - DNA, 75 bp, Homo sapiens
ccggtactggagccaatcagcgcgggcagcgaaccgggggagcgaggcacggtcaaaatgcagatcttcgtgaaa

SEQ ID NO: 92489 - DNA, 51 bp, Homo sapiens
gcctggacatgtccaggcctaccaggaaccactcgttttgactattatttt

SEQ ID NO: 92490 - DNA, 50 bp, Homo sapiens
cggcctgcggcagccggtaccagcagagtcactttgtggcatgtatgaca

SEQ ID NO: 92491 - DNA, 100 bp, Homo sapiens
gaagattcttacctctttgatctcgacaataagggcatgacgtccttgatgaaggccgcgctggacctcacctaccccatcacgtccatgttctccggag

SEQ ID NO: 92492 - DNA, 74 bp, Homo sapiens
ccagtcagcaagcagcatcacaagctcagcctggacagcaacaggaaacatacctacagaccattctgtttctg

SEQ ID NO: 92493 - DNA, 83 bp, Homo sapiens
cacgatcacgttctagatcacatactccaagaagacactgtcggaaaaggtaacagaagatggaactcgaaatcccaatgaaa

SEQ ID NO: 92494 - DNA, 100 bp, Homo sapiens
cctggacccagcacggagggacttctgcagagagagtgcgcagaaggattccgggagcacagttccgccgagcggaattctccacgagttttgagcagcc

SEQ ID NO: 92495 - DNA, 51 bp, Homo sapiens
ggagcctgctccctgctcagctgcgacctgaaggagaagaaggagaaggtg

SEQ ID NO: 92496 - DNA, 98 bp, Homo sapiens
ccgccgcggagccctcatccctaacggtgaaagtgcaccaattccagctggacatcactgtgaaaatgggacgggataaagtccgagaaatgtttatg

SEQ ID NO: 92497 - DNA, 100 bp, Homo sapiens
ctgatgacgatttggatgaatatacccttagaaaaaatgtggcagtcattccatggactttttgctatttcagtttggcctttgcacttttaagtatgac

SEQ ID NO: 92498 - DNA, 100 bp, Homo sapiens
gtttgcagccctagtgtttgccggagccatggaatttgctgaaggaatcttgcctccacaccacgagtcccatgccaaggtgatgatgtatcgtaaggag

SEQ ID NO: 92499 - DNA, 83 bp, Homo sapiens
cccgcctgcccgcccgggagctgtcggccccggcccgactctatcacaagaaggtgtcgtgaaaactacccctaaaagccaaa

SEQ ID NO: 92500 - DNA, 88 bp, Homo sapiens
cactttatgaagccaacggacaagctaaaggcctaaagaatgtatttgacgaagcaatattggctgccctggagcctccagaaccgaa

SEQ ID NO: 92501 - DNA, 100 bp, Homo sapiens
ctttgtggtgggttctttcacccacctggacccagaggttggaaagaaccatgactgtattcaggaaggcacatgaactgaagcttctgtcagaatgcca

SEQ ID NO: 92502 - DNA, 122 bp, Homo sapiens
gaatgcagccgtgtgacagtaactgaacattggtctaaagtctttccaaaaggtcaaggttcacaaggagctatgaagacatgattggtgaggaggtgccatcggatcaatactactgggct

SEQ ID NO: 92503 - DNA, 83 bp, Homo sapiens
gggacggcgaggccctcatgtaccacacggtgtttgagatcctgctgagccgaggctactcggagaacagtttccgggaagac

SEQ ID NO: 92504 - DNA, 75 bp, Homo sapiens
gacagctctgcggctcgggccctgagctgtgtgccaaccacgatgcaaacatggtgaatgtatcgggccaaacaa

SEQ ID NO: 92505 - DNA, 98 bp, Homo sapiens
gactgcatcatgctgtctggagaaacagccaaaggggactatcctctggaggctgtgcgcatgcagcacctgtatatttgccttccctccatgatctc

SEQ ID NO: 92506 - DNA, 100 bp, Homo sapiens
aaagacgtccctattgtccacactgagaccaagaccatcacttatgaggctgcccaggaatgatcaccaagacacacaaagtagaccttgggctcccaga

SEQ ID NO: 92507 - DNA, 78 bp, Homo sapiens
caaaacctaagtacaacccatacaaacaacctggaggtgagggaccgcagctgaatgcacagctagaaggttggcttt

SEQ ID NO: 92508 - DNA, 75 bp, Homo sapiens
aatgtacccttgaccaagctttcagaggtattctagaagaagaaattgaggatttgacagctaaggatattgaag

SEQ ID NO: 92509 - DNA, 75 bp, Homo sapiens
ggcagctacaaaatcaatggccggacgaaagcacagaccccacaggctcctcggacactgggtccatcacctcct

SEQ ID NO: 92510 - DNA, 80 bp, Homo sapiens
ggaagagccgccgtccgcaccgggaccggagaggaagcggaggtctgaagggggacagggaacccgagcgtcatgttagg

SEQ ID NO: 92511 - DNA, 74 bp, Homo sapiens
cgatggtcggcggcgcccggatgggcagctgagggcaatagtctgaccttgattgaccttcccggccatgagag

SEQ ID NO: 92512 - DNA, 100 bp, Homo sapiens
gggcacacagagtgaacagaaaaagaggatacctctgcgatcccgggtcatctccagatgctagggttatggatcagcacttgactgtttattttcaaat

SEQ ID NO: 92513 - DNA, 75 bp, Homo sapiens
atggattacagcaacagttgtcttcagtagaaaggcttcctgcctgacacagctcacttcaagaagtgcacaatg

SEQ ID NO: 92514 - DNA, 83 bp, Homo sapiens
agcgaataaagtttatcacgccggggtccccttcccctgagcccatctacaatagcgaggggaagcggcttaacacccgagag

SEQ ID NO: 92515 - DNA, 100 bp, Homo sapiens
ctaatccttttccgaaatggcaggtgtgagtgcctgtataaaatattctatgtttaccttcaacttcttgttctggctgaacatactgacttgtggagtc

SEQ ID NO: 92516 - DNA, 75 bp, Homo sapiens
tgagtcatcacaaactgggacctccaccacatctagcagaagcatcagaacacaccatgatggctgtgacctaag

SEQ ID NO: 92517 - DNA, 100 bp, Homo sapiens
tccggcgcacagggccagcacccagcattcgggcaagggagtgcatccgccccaacccttttccccctcgtctcctgtgagaattccccgtcggatacga

SEQ ID NO: 92518 - DNA, 82 bp, Homo sapiens
tgaaaattccagtgacagtgattcatcttgtggttggactgtcatcagtcatgagtcaagtggattatcgagcaaaactttg

SEQ ID NO: 92519 - DNA, 82 bp, Homo sapiens
cgcactctctcccgcgccggcggctcagcctagccccgttcggccggccgaggtgacttaagagattaaaattaatttggtt

SEQ ID NO: 92520 - DNA, 100 bp, Homo sapiens
cttgtctggctttggggccgaacgtgaggctacgctgaccattgcccagtacagcccatgcatgatgactatgacttaagacaagaacagttgaacaaag

SEQ ID NO: 92521 - DNA, 87 bp, Homo sapiens
ggcccaccctacatttagcgcatcatgtgatccggagacgaccaccggataattctttttatgtgcgaacatgtaacaagaatccaa

SEQ ID NO: 92522 - DNA, 75 bp, Homo sapiens
cagctccgaccgcgaggacgacttctccgcagggattaatgaaaatcaagttccatcctcagacaagaggtaaag

SEQ ID NO: 92523 - DNA, 80 bp, Homo sapiens
ctgcagaggacacgaggcggcgggctggagacatggaccgcggcgagcaagattactgatctctcattacccaactatct

SEQ ID NO: 92524 - DNA, 90 bp, Homo sapiens
cagagaccacatttgaagtatatgttgaagtggcctatcccaggacaggtggcactctttcagaattctgcttggtcagaatcgtgatgg

SEQ ID NO: 92525 - DNA, 74 bp, Homo sapiens
gattttttaactgaagatagtgcctttcagccctaccagagttacagcgcacattaagcctaaaactgaccacg

SEQ ID NO: 92526 - DNA, 50 bp, Homo sapiens
agagaagagcttcagaaacagagactgggccgcgatgggcctcttggaac

SEQ ID NO: 92527 - DNA, 75 bp, Homo sapiens
gctgaatgtgttactccattgctgaggagtggtgtgtggaggtcattgcaaaggaaggacaaaacctgaaagagc

SEQ ID NO: 92528 - DNA, 94 bp, Homo sapiens
cgcgcagggcctgcagcgggagctggacggcgagcgcgagcggcgcgagaaaaaccgggctgtgggtcggcccaaggggaagctgggcccggcc

SEQ ID NO: 92529 - DNA, 80 bp, Homo sapiens
ctgctttcttttcctcagaactactatattcagtggctaaatggctccctgattcatgtaatcctgtggatttgagtaac

SEQ ID NO: 92530 - DNA, 90 bp, Homo sapiens
gtcccaatacttgtacacctccaaggctgccctgggctgcatcttgtacctgctgtgcttccggcagcacccttttgaggatggagcgaa

SEQ ID NO: 92531 - DNA, 80 bp, Homo sapiens
cagccgcaatactgatgaagctgagaagcagccacaatgctaattgagcccctgagtcctgagttggtggcagctgcatc

SEQ ID NO: 92532 - DNA, 90 bp, Homo sapiens
cagaaagtggtttggcaaaagaaaagctacctgtgagatgtgtgggatggttggcgtccgagatgctttttactctaaaacaaagcgttt

SEQ ID NO: 92533 - DNA, 111 bp, Homo sapiens
ccgcgctggtgcagccaccctcgctccctctgctcttcctcccttcgctcgcaccatggtgacttaagagattaaaattaatttggttgctgttggttctgaacaaataat

SEQ ID NO: 92534 - DNA, 96 bp, Homo sapiens
gggactgcaacccagcgagggacgcgggcagccatggccgaagcggcgcctgcccgggatgatcctcatactaacttagtaactgaagctataaaa

SEQ ID NO: 92535 - DNA, 102 bp, Homo sapiens
caccccagatgtcctcatcatcccgtcagagctgaggtacttcgtgaagcaaattcaacacccaacagcttccttaatagcaaaggtagcaacagcccagga

SEQ ID NO: 92536 - DNA, 80 bp, Homo sapiens
tgttgtcgtggccggagcggcccgcgcctgggctgccggcacttcgcggcagctgtttgcagacaaggtcccaaagacag

SEQ ID NO: 92537 - DNA, 50 bp, Homo sapiens
caggctggaatgaacctggaagacctttccaaagtgaaactgatgagatt

SEQ ID NO: 92538 - DNA, 74 bp, Homo sapiens
cagaaagagtcaacagcagtggcaacagggtatcggtacagcaatcggagagctgcctccatatttcatggcca

SEQ ID NO: 92539 - DNA, 132 bp, Homo sapiens
gtcagactgcggagcctgcgggtcgccagcggccccgccgagagccggaggcaatggatgaacagagcgtggaggttttatgaatgaagctatggctacagattccccaagaagacccagtcgttgtactgg

SEQ ID NO: 92540 - DNA, 101 bp, Homo sapiens
gaggagactctcagcaccctcagcaatgcctcctgcaccaccaactgcttagcacccctggccaaggtcatccatgacaactttggtatcgtggaaggact

SEQ ID NO: 92541 - DNA, 51 bp, Homo sapiens
agtgcccgagtccattctcaatacgatgaatggattaaagcagataaaata

SEQ ID NO: 92542 - DNA, 75 bp, Homo sapiens
tataccgatgctccacctgcctactcagaggctgagaatcaggctgaaagccgggcagcagtggaggggacagtg

SEQ ID NO: 92543 - DNA, 100 bp, Homo sapiens
cactatggaaacaagagattggatcttgctgggccgctgcttgcattcttatttagagggatttaggttgagtccccaggctgtgaattcaattgcaaaa

SEQ ID NO: 92544 - DNA, 100 bp, Homo sapiens
gtgggagtctccgcgtcccgctcgctgggagagaggtacctctccttttccctctccctttccctaagagtgcagacatcctcagcaccatcggctatga

SEQ ID NO: 92545 - DNA, 100 bp, Homo sapiens
atatgctggagtcagccctcactcagattctccccgaggagaggcggagagctgagcttgactaccgaaaagcttttggaaatgagtggaaacaggctgg

SEQ ID NO: 92546 - DNA, 97 bp, Homo sapiens
ctcagtttgtaaaaacatggcggatccagaattctgagcaacttatgactctcatctctgctgcacgagaatatgagatagagttcatctatgcgat

SEQ ID NO: 92547 - DNA, 100 bp, Homo sapiens
ttagagcacatgagcgaccacttccggaaaggaggcatgctggtgaacgcagtcttctaccttggaatagtgaatggtttgccgggcaccgctccagacc

SEQ ID NO: 92548 - DNA, 75 bp, Homo sapiens
tgtacactttcaacgtgaggccggaggtggtgcagggccgttgctccagggagaactgcaaatatcttcatccac

SEQ ID NO: 92549 - DNA, 83 bp, Homo sapiens
cctggcgcagcctccctctattaccaggagcgagcccagggcgtggtgctgaaagtgctcacaaacttcaagagcagtgagat

SEQ ID NO: 92550 - DNA, 101 bp, Homo sapiens
acttcaaatgctgtttgtattccagagactagtgaatgaagaatggctggaaggggagtgcaaagggaaggtgggcattttccccaaagtttttgttgaag

SEQ ID NO: 92551 - DNA, 82 bp, Homo sapiens
ggcggcggcaagacctctccccctcggaggcggcgggcggaggcggcggatctccatttgccaggagatgcccagcctggag

SEQ ID NO: 92552 - DNA, 100 bp, Homo sapiens
tgaggatgaagaagatgactaccagaaccttttgcccagagtagcagccaaacttgaggttgccccgatttctgacatcattgcaatcaagtcacctgac

SEQ ID NO: 92553 - DNA, 83 bp, Homo sapiens
atgcatatttgagacaacatctggatggttggggagaacgcctcactaagcagtcttttgatcacacctttcccatctccaag

SEQ ID NO: 92554 - DNA, 75 bp, Homo sapiens
actcttcccctcagagaccatggagagggacagccacgggagaggtgtgggaaatggaactggatagactcaaga

SEQ ID NO: 92555 - DNA, 74 bp, Homo sapiens
gaagcaaaggtgtattctacaaagcacttcagaattgcccttgggcaaaggccctgatccttcaccagctaggc

SEQ ID NO: 92556 - DNA, 75 bp, Homo sapiens
ggccagggcggcagcaccagcgccttcgagcagctgcagaggtcccgtggaagatagatgataagcctgtaaaaa

SEQ ID NO: 92557 - DNA, 49 bp, Homo sapiens
attccaagtaactcttatttggacctgcaagcgcaggaccgagcccacc

SEQ ID NO: 92558 - DNA, 76 bp, Homo sapiens
tggagcggagccggccgtacgcggtgctgcgagggcagaacctggaatgcatgaactgcacccggctcagtgacat

SEQ ID NO: 92559 - DNA, 75 bp, Homo sapiens
ccaagagccattgaatatgttaaggatcgaggccatcaagctacagatggtcttacaaatggaaccccaaatgag

SEQ ID NO: 92560 - DNA, 82 bp, Homo sapiens
gactgggcggccggccgacccttcctgtcgctgacggcgactgcgggaggccaggtctggtgtggcagatgtggatagctgg

SEQ ID NO: 92561 - DNA, 74 bp, Homo sapiens
aacagacagatttgtcatgaagaaactcaatgatcgtgtcatgagaatacgtgcttttcaacatgccttcagca

SEQ ID NO: 92562 - DNA, 75 bp, Homo sapiens
gagatattctactccatctcattcattgtacagattttaccaaatgttgcaagaactctggagttcttatggtag

SEQ ID NO: 92563 - DNA, 100 bp, Homo sapiens
tccgaccccaatcggaagcctaactacagcgagctgcaggactctaatccagtggtgggtacgggcacctcgctggcgctctcctccctcctgtccctgc

SEQ ID NO: 92564 - DNA, 75 bp, Homo sapiens
ccaggagctcctccaccaggccaaagacttcggcattccctgtattgaacactgatatacaaggaatgaatagaa

SEQ ID NO: 92565 - DNA, 90 bp, Homo sapiens
ttgcatcaagctgggcatccagggctcgtacttctgctcgcaggtgtaatggataggtaacagagaagacctcgtcccttcctagtcagg

SEQ ID NO: 92566 - DNA, 83 bp, Homo sapiens
cgtgagaaggcgctgcgcaggcaggcggaggagttggaatcgaagcctcttaaaatggcagatgacttggacttcgagacagg

SEQ ID NO: 92567 - DNA, 75 bp, Homo sapiens
aaaagagatgtggggggattctcgacctgctaacagaactggaccttttcgccgaatttgccacatacctgaatt

SEQ ID NO: 92568 - DNA, 83 bp, Homo sapiens
cgctcattgggaatttagttaagagcagcccgacggccatggaggctgaagagacgatggaatgccttcaggagttccctgaa

SEQ ID NO: 92569 - DNA, 130 bp, Homo sapiens
agagacataagacgtgcacgactcgccccacagggccctcagaccccttccttccaaaggcctcctgacaaggtgatccgggcgggccccgcaggaattttatcccctcaccggcctcacactagtatcg

SEQ ID NO: 92570 - DNA, 75 bp, Homo sapiens
gagtatctggaaagctcgggacaggatgcactcctgtaggaggcctgctgatggcatttcagaagtactctggtg

SEQ ID NO: 92571 - DNA, 73 bp, Homo sapiens
tgatgctgtggaacttgcaaatcgaagttaagctgaaggaatctgttgttgaaaatcatgcagtgttaagtta

SEQ ID NO: 92572 - DNA, 74 bp, Homo sapiens
cctgggcacatgggagtccccaaaattacattgccaagcggggatctgatgagcttctttcttctggcatcatt

SEQ ID NO: 92573 - DNA, 82 bp, Homo sapiens
ggggttcccttcacactccacccacgatttgagggcaagagctgcagccccctggtttttagaacttcagccataaaaatgg

SEQ ID NO: 92574 - DNA, 51 bp, Homo sapiens
ctccacgggcggctgcagggtggagtgtcgacttcttccactacaaaatct

SEQ ID NO: 92575 - DNA, 73 bp, Homo sapiens
atttggaccaaaaggacaagcagtttgttgccaagatgggtgcatacaagtacatccaggagctatggagaaa

SEQ ID NO: 92576 - DNA, 75 bp, Homo sapiens
accccggaatcccgcgcgctgcccacgattcgcttctgaggaaatttgcgagaatccccgatttatcattgatgg

SEQ ID NO: 92577 - DNA, 75 bp, Homo sapiens
cgatgttggactcatagtcactgccagaaagcctcctccaaaactgcccagtggagtgttcagtctggaatttca

SEQ ID NO: 92578 - DNA, 95 bp, Homo sapiens
ggcggcgagcggttccttgtgggctagtgtcttgggacaaggtgcgcattcctggtgtgctgcagcgattgggagtgacatactttgtggttgct

SEQ ID NO: 92579 - DNA, 83 bp, Homo sapiens
tagtggaagatgtaaagcaatatttcgagcagtttggcaaggtttcccatccacataccaagctgatgaggatcccatcgttc

SEQ ID NO: 92580 - DNA, 83 bp, Homo sapiens
agctcgtgaattagcaggttcttaatagtcatcctagaggatataggtgatctttcactgtgctttggatttatatttactgg

SEQ ID NO: 92581 - DNA, 90 bp, Homo sapiens
cgcgcatcccgcaagtcggaacccggcggatcggatcccgcagatcggagacggggcctggagtactatactggcaattgctggagaaga

SEQ ID NO: 92582 - DNA, 95 bp, Homo sapiens
ggaaaacaaatcaaactgcaaatctgggatacgactttctgctgctgaagtaatgcaatggtctcaatctctggaaaaacttcttgccaaccaaa

SEQ ID NO: 92583 - DNA, 80 bp, Homo sapiens
tggagggccccgacgatagcgaggtcacctttgcattgcactcaggtgagaagccctaccactgcaactgggacggctgc

SEQ ID NO: 92584 - DNA, 98 bp, Homo sapiens
gcggacagcagcctcgggtgcaatcctggagccccccagtgaggggtgaagaacctgatgaagatgatgcatatcaggtattgtcaacattgaagagg

SEQ ID NO: 92585 - DNA, 83 bp, Homo sapiens
gggtgtaatacatcatgaactgcaggatgatggtggtgctaccccagtacaggatgaacgggattcagggtcagacggtgagg

SEQ ID NO: 92586 - DNA, 74 bp, Homo sapiens
cgccgcacggagttgcgtcccggggacttggggccgcagggaggtcatacttacctggttgcttgcgcatctag

SEQ ID NO: 92587 - DNA, 75 bp, Homo sapiens
agtaccagatggggagcaccaaggtctttgtcaagaacccagagtcggagctgtggctaaaggaagtggaggggc

SEQ ID NO: 92588 - DNA, 90 bp, Homo sapiens
ctccgtggccttagctgtgctcgcgctactctctctttctggcctggaggctatccagcctggtactcctggttaatcaacagcttcgtc

SEQ ID NO: 92589 - DNA, 49 bp, Homo sapiens
ccaggactgactaaccaaccagaatatgtctgtgctggagaatcatcac

SEQ ID NO: 92590 - DNA, 116 bp, Homo sapiens
gaaattatccctttatgtttgcgaattatggaatctggaagtgaactttctaaaacacttctccaatttgggaaatacctgctatatgaatgctattctacaatctctattttcac

SEQ ID NO: 92591 - DNA, 100 bp, Homo sapiens
tgctgacccagctctgaatgagcttctggtgtactatttaaaggttcgttccaccagtcataaaccagatgaaatctatggcatgattgaaagactatct

SEQ ID NO: 92592 - DNA, 75 bp, Homo sapiens
tcttcttgtgtcaccatgctattatgcatagaaaggtggtattaaagataatcaaacattatcaagaagaaggac

SEQ ID NO: 92593 - DNA, 74 bp, Homo sapiens
ttatagatggacaagagacgatcattctgcaagcaggcaacctgaatacagcctttctgagaaaagtctacagc

SEQ ID NO: 92594 - DNA, 83 bp, Homo sapiens
atcatgtctgcgagccaggattcccgcagcgtccgtctccaagagagtatgaagagagtgcgtctgtagggcagggaagatgg

SEQ ID NO: 92595 - DNA, 100 bp, Homo sapiens
aagatgttgttgtccctactatggaaattaaggtggttatcactaggctaaaactggacaaagaccgcaaaaagatcctcgaacggaaagccaaatctcg

SEQ ID NO: 92596 - DNA, 75 bp, Homo sapiens
atcaacgtcctccgggaccggagtcagaaccctccgcagagtaaaggcaattcgaagttttcaagtagcccttca

SEQ ID NO: 92597 - DNA, 75 bp, Homo sapiens
ggcaaaacgaaaaagctcaatgcctcagaaattcattgggattttgcttgcccaaagaatttatggaagattcag

SEQ ID NO: 92598 - DNA, 97 bp, Homo sapiens
gagagcgagctgagtggttgtgtggtcgcgtctcggaaaccggtagcgcttgcagcatgggtctcccttgatctgagaatggctacctctcgatatg

SEQ ID NO: 92599 - DNA, 100 bp, Homo sapiens
gaaactcaaggtccagggagtggagctgcggtctcctgtttgataaaagaatattggccagtattgcagattttaactgatttggctgatcctccaggga

SEQ ID NO: 92600 - DNA, 85 bp, Homo sapiens
gtcatgaagggctgcttggcaaatcaggctgacctcgacacagagtggaatctgtttatagggccttaaagcggctgacaatgac

SEQ ID NO: 92601 - DNA, 126 bp, Homo sapiens
cgcccacacctgtctgagcggcgcagcgagccgcggcccgggcgggctgctcggcgcggacttaattcagtgcacaaatgagatgaatgtgaacatcccacagttggcagacagtttatttgaaag

SEQ ID NO: 92602 - DNA, 90 bp, Homo sapiens
ctcatgtacgagtccgagaaggttggggtcgcctcttccgagacatgcgtcgggatgtccaggaaatttttcgcatgaccccccacgaga

SEQ ID NO: 92603 - DNA, 100 bp, Homo sapiens
cgagagctgggacgtcatcaagctgctggctgccattctccacctggggaatgtggggttcatggtcattgagaagtttgattatgtgtttgccgagaac

SEQ ID NO: 92604 - DNA, 50 bp, Homo sapiens
ctacaaccttcgatctcctgacgagcctcctggcagaggcaggcgtgcgg

SEQ ID NO: 92605 - DNA, 97 bp, Homo sapiens
gcggggaagaggaggcggaaaaggacgcaaagttctccggcgagggggatatgagactttctactcggaatatcctgagtgttgcgtggatgtaaaa

SEQ ID NO: 92606 - DNA, 101 bp, Homo sapiens
cattaacagtatttactgagagctcatcagaactgataaatttcaaacggaagagagtggcagcatttagaaagaatctaattgaaatgtctgaactggaa

SEQ ID NO: 92607 - DNA, 100 bp, Homo sapiens
ccaagcagggcaacgctgtgaccctgggagattactaccagggccggaggattaccatcaccggaaggattggttttcagagacatttcggaaagtgaag

SEQ ID NO: 92608 - DNA, 82 bp, Homo sapiens
tgaacaatgcacggttgtgttgcgtgtagcttccactttcataagatgtgaagttcatttccaatccgccctccatggtggc

SEQ ID NO: 92609 - DNA, 50 bp, Homo sapiens
cgctgctgcccgcgctcgccgcacgaggtcaaaatgcagatcttcgtgaa

SEQ ID NO: 92610 - DNA, 80 bp, Homo sapiens
ctcaggacaacccagatgtgcaacaaagtgcgatgagagcgaaatgtcatcagtgcagtcacaacaggagcagttgtccc

SEQ ID NO: 92611 - DNA, 51 bp, Homo sapiens
atgatgaagaggatgatgatgaagagttcatgcagcatcccaagaactttg

SEQ ID NO: 92612 - DNA, 75 bp, Homo sapiens
tggacacggacgtggtcaagctcctcccacatgtcatcagcaggatgggcaagctggagcaggtggacgtgaacc

SEQ ID NO: 92613 - DNA, 75 bp, Homo sapiens
ttcagctccagctccgctctcttcggctgccccaatccccggcagctctctcagctgtagtaggacaggaccttg

SEQ ID NO: 92614 - DNA, 74 bp, Homo sapiens
cccagatttctgtggcagaagatgatgatgaaagtgtcaacagcgacctcatttacattacagctaagaaagat

SEQ ID NO: 92615 - DNA, 80 bp, Homo sapiens
atcgtggagaacctcttctaccctgtgaccctggatgtgctgcaccagtgcctccggagccagcgtggtggccatagaca

SEQ ID NO: 92616 - DNA, 134 bp, Homo sapiens
ttccagggcttgggaaggggaaggaaacctctctgaaatctgacacctgctctcccggcaaggaaacttcgcaggctgactgggactcttcaattaatctgacatttcacaaatccaaaattgccgtggatgaa

SEQ ID NO: 92617 - DNA, 75 bp, Homo sapiens
atgagtcaagtcagacttcattacagaaagagtgatgacaagaacttcagacgtggatcaacctggagaaggcag

SEQ ID NO: 92618 - DNA, 92 bp, Homo sapiens
gggttattcgagtgaccgagaccgcggccgggaccgaggtctctgctttctatccgtcaagatgataaagtcgtgtgcccgagaaccaaaga

SEQ ID NO: 92619 - DNA, 78 bp, Homo sapiens
cagcctggattggtgaaactgaatcacaggagatatttccaggaggaactctctggaatgaaaaataaaatacaagta

SEQ ID NO: 92620 - DNA, 82 bp, Homo sapiens
ccaaaccaggagattgcgagggagcgatgcggtgcagcgcggtatcgagaaccttccctgcgaacttcagaggaacttccag

SEQ ID NO: 92621 - DNA, 48 bp, Homo sapiens
ccagcacacagaagccgagacggccatttcataattctgaatcatgtc

SEQ ID NO: 92622 - DNA, 100 bp, Homo sapiens
gtggattccaatctctgttgcttcatcccaggaaagacagggtcttggtggcgcatacctgtcttggtggcacgcacctgtcatcccagctactcaggag

SEQ ID NO: 92623 - DNA, 82 bp, Homo sapiens
ggaaagaacaggctaaattagaaaagggagtattttgtcaaagttgaagataacgaaggaggcccaacttcattcaataagg

SEQ ID NO: 92624 - DNA, 83 bp, Homo sapiens
tccagagctgagaaggactgcctgtttgcaggtttggaattcacccagttgcaggccgaatgcctggtcagcttaatgtgctg

SEQ ID NO: 92625 - DNA, 100 bp, Homo sapiens
ctctcactgcggagaggtgtttggtgcagaagactgcagcgaggcaagaaacaacagattgaaaatggtagtggagcagaagataatggtgacagttcac

SEQ ID NO: 92626 - DNA, 96 bp, Homo sapiens
aagatccccgagatgcagctgatgcagtccgagagctagatggaagcgagttcctggggaaaaccccagggcaaaacgctcagaaatggattcctg

SEQ ID NO: 92627 - DNA, 114 bp, Homo sapiens
ggggctactgtgcgctgtgctgggcgctgtcatgatcgtgatggtgccgtcgctcatcaagcagcaggtccttaagggggggccctcagcctcttggccttgaacgggctgttc

SEQ ID NO: 92628 - DNA, 98 bp, Homo sapiens
tggaagtaaagatgcagaggaaagaaaagaatacattcctgattacctgccacccattgtgtcttctcaagaagacttcattatcctggcagtatggg

SEQ ID NO: 92629 - DNA, 97 bp, Homo sapiens
cgtcgtgcgcctgggggtgcgcgcctgcgacctgcccgcctggaatggtgaacacagaaatcgaggtgcaagctcaaaaagagatgggaccagcagc

SEQ ID NO: 92630 - DNA, 80 bp, Homo sapiens
agcactactatacagcaagcgactggagaattctcaccaaatgttcccaaatccttatcctcagctgtgaaggtaaaaat

SEQ ID NO: 92631 - DNA, 75 bp, Homo sapiens
tttctcggtcggcaccgccatgataaactcaagccatggagggattactgcattacatcaaccctgcacacgcca

SEQ ID NO: 92632 - DNA, 83 bp, Homo sapiens
ggaaggatcttctcatgcacagaggcaacaaatggcaactttctgatgatgcagccaacacgaacggttgtcatgtgtaacac

SEQ ID NO: 92633 - DNA, 100 bp, Homo sapiens
tgttgcttggcctggtgggcccagtcctcggtgcggcgcggccaggcatggttgtaatccataagacaggacatattgctgctggtacatctacaaatgg

SEQ ID NO: 92634 - DNA, 75 bp, Homo sapiens
tgtgaccgggctgaagccaggagactgggtgattccagcaaatgctggtttagctatctcacgtgagagggcagt

SEQ ID NO: 92635 - DNA, 100 bp, Homo sapiens
cgggatcctctgctgcatagtttcggtcatctaaaggaggttttaaacagtataacaggtgatttgatgaaggctgctgcaggagagttcgcagatgatc

SEQ ID NO: 92636 - DNA, 83 bp, Homo sapiens
gtgtaatgaaaacaaatgacattgttcgatacagggtgtatgagttatttctcaaactctgaggctgcggagttcacacattg

SEQ ID NO: 92637 - DNA, 75 bp, Homo sapiens
cgtctcggcccttgcctgcgcgcctaccaggctcgaccccaggaactctgcgaccttcaagtcgtttgaggaccg

SEQ ID NO: 92638 - DNA, 105 bp, Homo sapiens
gccatcgtggtgtgttcttgactccgctgctcgccatggtgctggagaatctggtaaaagcaccattgtgaagcagatgaggatcctgcatgttaatgggtttaa

SEQ ID NO: 92639 - DNA, 83 bp, Homo sapiens
aaggaatcgtatcgtatgtccgctatccagaacctccactctttcgagcagccatcagcagggaccctttctacgaaatgctc

SEQ ID NO: 92640 - DNA, 125 bp, Homo sapiens
ctgtagttactgtggaatcaataagccatggcatctaagaaatttgctgttaaaaattcccgtactgattagtcaacagtggaaaatctgaagagatgcaagcaggaaaaagaaattaaaccagg

SEQ ID NO: 92641 - DNA, 101 bp, Homo sapiens
cagcggatttcggcctggcccgggcctatggtgtcccagtaaagccaatgacccccaaggtggtcactctctggaaagaccacagcaagattctttcattc

SEQ ID NO: 92642 - DNA, 98 bp, Homo sapiens
cagatggcagccagtcagtggtggagggtcagcgccaaactggaggggaatgaaacactaaaagttgtagaactcgacagaagagtgaacaccacttt

SEQ ID NO: 92643 - DNA, 75 bp, Homo sapiens
tgccccaccctggtcacttccccaccggaggtttatcacaagtgcctgagattgtgagggagacccaggacctaa

SEQ ID NO: 92644 - DNA, 100 bp, Homo sapiens
tgggtatcaccgccctacacatcaaactccgggccacaggaggaaataggctcctactgaagtggcgcataactgacgctgtgtgtgtcaggacgcgagg

SEQ ID NO: 92645 - DNA, 73 bp, Homo sapiens
tgggaattgctgaattagaactgcagaggttcctctacagcaaggttttccagaagagattcaatggctcagt

SEQ ID NO: 92646 - DNA, 82 bp, Homo sapiens
tgcgcgcccgccagctgctccggagatacgcttcctgcctgacacagctcacttcaagaagtgcacaatgtcagaacgtgga

SEQ ID NO: 92647 - DNA, 76 bp, Homo sapiens
ggtggtgaagaagcaccaggccatggaggccatgctgctgtacctgggcgaacctcttcccggccgctctggtgca

SEQ ID NO: 92648 - DNA, 101 bp, Homo sapiens
accaagcgaggccaggccgctctggaccgtctcaaggtgtttgacggcatcccaccgccctacgacaaggggcagcttggtggctgccgagtggaggccag

SEQ ID NO: 92649 - DNA, 75 bp, Homo sapiens
gtgttccggtctttcacgatgcattaaagaatctgaatctgaagctgaagaaggtgactgaattttgaaactaca

SEQ ID NO: 92650 - DNA, 100 bp, Homo sapiens
tgctgatagtctccagcgggcctggactgtgggctggtgtgtggaactgtattgcctaagtgtaatcttgaacatgggcggtgctgtgagtgctggtgaa

SEQ ID NO: 92651 - DNA, 75 bp, Homo sapiens
aatgaaagacattcaggatcaacttgaacgaatatttctgatggctgatcactgggaaactgcacctcgtcacat

SEQ ID NO: 92652 - DNA, 90 bp, Homo sapiens
ttttgagatggagtctcactctgtcgcccaggccccacctaccttttatacctttgacttgctgaaggaattgggttaattgtcccgtag

SEQ ID NO: 92653 - DNA, 75 bp, Homo sapiens
acagccacagcgccgagatggaggcgggaggcagcaccgggctcttgatggacttggcagccaatgaaaaggccg

SEQ ID NO: 92654 - DNA, 100 bp, Homo sapiens
ctcctcctccccagttctactcaagccttattgaagagataggaactcttggttgggataaggtatgttagagcccaccaaggaaccactgaaaccactt

SEQ ID NO: 92655 - DNA, 93 bp, Homo sapiens
cacagaaagactgtagaaaatttccagttccacagaagttggactaaatgctcttccttcagaggattatccggggcatctactcaatgaaaa

SEQ ID NO: 92656 - DNA, 100 bp, Homo sapiens
cccccacgccagctacagcgcccctccgaaatccagcatcctcacccgggctggcgagcagcgcaaacggagccagtccatgaagtcctacccatccagc

SEQ ID NO: 92657 - DNA, 75 bp, Homo sapiens
aggaaggaggaggaataatatttatggagcatatattatggaacacagttatgaagacagtatggagtttccaga

SEQ ID NO: 92658 - DNA, 100 bp, Homo sapiens
accaatcaggaaatcgaaattgtctacaagtcctgaatcctgactacgtctactttgagaactcctccagcaacccatacctgatccggagaatcgagga

SEQ ID NO: 92659 - DNA, 80 bp, Homo sapiens
aggtctcacctgaggtgaaccttcgaccttggacttctcagcctccagaatgggagaagcatgacactggccaacactgc

SEQ ID NO: 92660 - DNA, 75 bp, Homo sapiens
gacgctgctgggtccgctgagcggggcgacccgaggggaaagttgctcagacagcttgcatgtcagcctgccagc

SEQ ID NO: 92661 - DNA, 83 bp, Homo sapiens
cgttcctggagattctgattgaggacttgcaccttcgagatcccctgtgtttacccagctggaggatgatgaacagtcgtggg

SEQ ID NO: 92662 - DNA, 90 bp, Homo sapiens
ttaaaggatagttcttcaggaacagaacgaacagctttcagagattgttcgtgagttcaagtcgactaaccgcttgctcctaactggaac

SEQ ID NO: 92663 - DNA, 75 bp, Homo sapiens
ggaagccgaccctgatggtcagcagcctgaaaagtgacactccattcagggtaatggacaagatggagtttgcag

SEQ ID NO: 92664 - DNA, 100 bp, Homo sapiens
cttggcttgattcagtctgccttgtaacagctgagatctgtatctgtggacctgaatgttgatccctcgcttcagattgacatacctgatgcgctcagtg

SEQ ID NO: 92665 - DNA, 75 bp, Homo sapiens
aactcacaacaaggaaagtcccctgttccaaaagctgagacaagatcttgaaatggtactgtccactaaggagtc

SEQ ID NO: 92666 - DNA, 100 bp, Homo sapiens
cgtgcccaggcggtgatgtcgccgcggccgaggatcctctgtgccagctccggccgcgcagcccggggaggataacacagccagcattctgacaaggcgg

SEQ ID NO: 92667 - DNA, 100 bp, Homo sapiens
aaaaataaagaggagtccgttaactatctgttatccagaatacacagccaaaattgcctggaaaagagcagtgagaggagtccgggagatgtgtgatgca

SEQ ID NO: 92668 - DNA, 82 bp, Homo sapiens
ggcgtgcactccgcacctcggggacattattgcgcgtggaacggctgcttttggaaggtggttttacgcacgacgagctgct

SEQ ID NO: 92669 - DNA, 82 bp, Homo sapiens
gaggcagccagcggatcttgggtgagaagccctaccactgcaactgggacggctgcggctggaagtttgcgcgctcagacga

SEQ ID NO: 92670 - DNA, 75 bp, Homo sapiens
agcttgagtttggggccttctgcagctgaaatcaatcaagggttcgtgggcccccaagaaggagccgtacgcccg

SEQ ID NO: 92671 - DNA, 101 bp, Homo sapiens
caagattccagatgttcctgtggaccccagtccaggtatgtacaagctgtgaggacaacgcagaagccaatgggttttgtgtagagtgtgttgaatggctc

SEQ ID NO: 92672 - DNA, 98 bp, Homo sapiens
gaatcctgcggcagaagccgagttcaacatcctcctggccaccgactcctacaagtgtgcaacttgctttggtgtttgctgttttattgccacagatg

SEQ ID NO: 92673 - DNA, 50 bp, Homo sapiens
ggcggagctccacgacgagctggaaaagttaatatgatcctctgttgaag

SEQ ID NO: 92674 - DNA, 83 bp, Homo sapiens
cggcggtggtggtggaggagttaacgacgctttcaaagatgcactgcagagagcccggcagacaatgcagatcttcgtgaaga

SEQ ID NO: 92675 - DNA, 95 bp, Homo sapiens
cctcacctcaagcacacccaatggacagcatgcctcaccaagtcacatgacaagcagtggctgccccctgcgttcctccatccaaccatgagctg

SEQ ID NO: 92676 - DNA, 100 bp, Homo sapiens
caacatttcatgagagaagaaatacaggatgcctctcagctgccacctgcctttgacctttttgaagcctttgcaaaaaggatgtggatccctcagttgg

SEQ ID NO: 92677 - DNA, 100 bp, Homo sapiens
agtccaagtcaaacgcagaaggactgcctcactgagcaaccaagatgtcctctacaagcctggtgatgcccacacaccacttacttcgtgcgcaacaaca

SEQ ID NO: 92678 - DNA, 81 bp, Homo sapiens
gatgagcccggcctcccttttcatcaggacgggaagatgccgctcctacgaggactgctgtggctccaggtgctgtgtgcg

SEQ ID NO: 92679 - DNA, 73 bp, Homo sapiens
tggggatggcgcatcacacaccaaagggagctgcagtccatggctgaccaggagcaggtgtcaccagccgcca

SEQ ID NO: 92680 - DNA, 100 bp, Homo sapiens
aaaaacttcaaaaggacattaaggatctgggagggggttgaagctttgagagaagcagcaactgctgttgagcaagagaaagaaatccttctggaaatga

SEQ ID NO: 92681 - DNA, 98 bp, Homo sapiens
ccaccatcaagctgtctaagtccaaagatttttacccaggatccagacacattagtcaagctgcagccaaagtcgacgttgaatttgattatgatggg

SEQ ID NO: 92682 - DNA, 90 bp, Homo sapiens
cagacggattcatttagagctgcggaacaggacgccctctgatgctagcttgtcactttctgcaaaggtttccctcagggagcctcctgc

SEQ ID NO: 92683 - DNA, 98 bp, Homo sapiens
gaaagaggcccatcacattccaggggttcattagaccagtcattaaaggatacactgaagaaattttccatcgagaaacgctttgcctactggtcagg

SEQ ID NO: 92684 - DNA, 85 bp, Homo sapiens
gaaattgaagaaaaactaagactcacatctacaagcaatgaactggtgttgctggaagaagccaaggatttgctctctgactggc

SEQ ID NO: 92685 - DNA, 51 bp, Homo sapiens
ggtgcagtcttattttgaaaaggctccatgacaagtggcaccaacaacagg

SEQ ID NO: 92686 - DNA, 115 bp, Homo sapiens
gcgatgcgtcaagtacactgaaattcatcctgagatgaggattttttatcaagcagaaatgcatcgaacaacgagaatcaagatcactgagctaaatccccacctgatgtgtgtg

SEQ ID NO: 92687 - DNA, 100 bp, Homo sapiens
gttggttgcagttgtgtagtagttaagggctaattgactataattttcattgcttccggaaggccattcatgaagtttttgaggtgagaatgaaagtagt

SEQ ID NO: 92688 - DNA, 95 bp, Homo sapiens
gaagctgagaccacatccatggtttctatgcccctctatgcagtcatgtatcctgtgtttaatgagtccccacagccaaggaaaatcatttgtat

SEQ ID NO: 92689 - DNA, 90 bp, Homo sapiens
ctgggtccctccgaacaagtgaaaagaggtccttgtatgtcagggttgctatcagcactggatcttgttgaagtcaatcctcagttggcc

SEQ ID NO: 92690 - DNA, 98 bp, Homo sapiens
tttgctcttccatccgcctttgatcgtcttcctcttcagccatccagcatggccgaaacagaagccctgtcgaagcttcgggaagacttcaggatgca

SEQ ID NO: 92691 - DNA, 74 bp, Homo sapiens
cctggtcttgctcggccgatgaagtgcagaggtttttttctgcccccaaatacatcaagatgtttgtactggat

SEQ ID NO: 92692 - DNA, 82 bp, Homo sapiens
ggagaaccccgagtgcggcccggaggcggcggagggcaccccgggcgggcggcggctgctaaggaagaggcccagcagaagg

SEQ ID NO: 92693 - DNA, 50 bp, Homo sapiens
gacagcaacaaccagtgtattcaggtcagggagcctgagctggagccagg

SEQ ID NO: 92694 - DNA, 90 bp, Homo sapiens
gccgcgtccttggctggcgtgactttccttatcccagttgattgtgcagaatacactgcctgtcgcttgtcttctattcaccatggcttc

SEQ ID NO: 92695 - DNA, 90 bp, Homo sapiens
tgtcaagctcacagtcaacaaagggttgagtaaccattttcagggaggtggctgccgcttcctgcgctacgactgtgtgatctcctcccc

SEQ ID NO: 92696 - DNA, 46 bp, Homo sapiens
tcttaggcgacacacctggaagcagacggaagtgaaaatgtgacag

SEQ ID NO: 92697 - DNA, 99 bp, Homo sapiens
cagtgactagatcagagatcatagatggaacagatggagtcggataactgttcaggaggagatgatgactggacccatctgtcttcaaaagaagtggac

SEQ ID NO: 92698 - DNA, 75 bp, Homo sapiens
aaggatcaaccctctgcatacagtaaaattctggtacaggtcaaagaggtcctctccaagctgagcacgctcgtg

SEQ ID NO: 92699 - DNA, 98 bp, Homo sapiens
tcagaatcgaatctcttctccctccccttcttggttatgatgtgattgctcaagcccaatctgggactgggaaaacggccacatttgccatatcgatt

SEQ ID NO: 92700 - DNA, 101 bp, Homo sapiens
aacaggcctccaagtacccaagggcgccctgcgtccggcagaggaggcgagcatcccgctcaggtgatgaggaacccctcgcgcacccagcgcagaaggct

SEQ ID NO: 92701 - DNA, 73 bp, Homo sapiens
ttgcccgtggggtgcaaaagatcctgcagatcttgagccagatgattgtgcatccatttacatctttaatgta

SEQ ID NO: 92702 - DNA, 50 bp, Homo sapiens
acaagatggtttacatctcgaacggattttctattgcagcagaccatgct

SEQ ID NO: 92703 - DNA, 88 bp, Homo sapiens
ccaaaatccaacagcagttctcagacctcaagaatagcctaacatggcagaccagagacagcgctcactgtctacctctggggagtca

SEQ ID NO: 92704 - DNA, 75 bp, Homo sapiens
cctggtcgaacagttttttctaatggctattcaagttgtatcacggactgattcaccgagcccaaccgtactcaa

SEQ ID NO: 92705 - DNA, 74 bp, Homo sapiens
cggcgcggaggccccgggcgcggcgcagctctggattaatcgaattacagctgctagccaggaacatggactga

SEQ ID NO: 92706 - DNA, 75 bp, Homo sapiens
cgactccaaaaccgcctcctcttccacttggctcacaagagaatggatcttggagaatgtctgaaagtccatgac

SEQ ID NO: 92707 - DNA, 96 bp, Homo sapiens
ggggcatcagtgatgggactgagtactggattgtccggaattcatggggtgaaccatgggctggagtgcagtggcgcagtcatggctcactgcagc

SEQ ID NO: 92708 - DNA, 82 bp, Homo sapiens
tagagttcgaaaagctgagaatcctcagtgtttgctaggtgcatggctgcctcctaatcccatagtccagaggaggcatccc

SEQ ID NO: 92709 - DNA, 99 bp, Homo sapiens
ggaaaatgaagataagaaaggggtgcagctacaggtcaatgtgacggtggactacattagaccagccagcccagccacagagacagtgcctgccttttc

SEQ ID NO: 92710 - DNA, 100 bp, Homo sapiens
ggtgcgcagcagaaagcatttaaccagcatggctacttcatattttggaaagcagtttttaagacaagctatgtggttgatgttgcagaatgatgagccg

SEQ ID NO: 92711 - DNA, 82 bp, Homo sapiens
cgcgctgccctagggcccggccgacccgcggcccgaaaatttcccaggaacgagaaaaatttgctgatgaaggcagtatatt

SEQ ID NO: 92712 - DNA, 100 bp, Homo sapiens
ctgttactggttacagagtaaccaccactcccaaaaatggaccaggaccaacaaaaactaaaactgcaggtccaggggctgataggatgtcttcatttgg

SEQ ID NO: 92713 - DNA, 82 bp, Homo sapiens
ctgaggtgaaccttcgaccttggacttctcagcctccagaatggcttatgcaagcaaagatctggaggagcagttacggtct

SEQ ID NO: 92714 - DNA, 98 bp, Homo sapiens
cgctcgtcccagcccacccgcccggtgcggagctcgccatggcggccaccgacctggagcgcttctcgatgtaatgatgtctgctagaactttgattc

SEQ ID NO: 92715 - DNA, 83 bp, Homo sapiens
agaagctttatctgtgatagaattgctgcttaaaaaacttgaagaacagctttgctgagccatcaaggtctaatggaagcatg

SEQ ID NO: 92716 - DNA, 76 bp, Homo sapiens
aaaggctgtagcaaatacaatgagaacatcacttggaccaaatggtgtcattccacacatccacaaatctctgatt

SEQ ID NO: 92717 - DNA, 113 bp, Homo sapiens
cttgctccctacgatgagaactggttctacacgcgagctggcccggaggctgtttgatgtcctgcacgagcccttcttgaaagtaccctgatgaccccagctgccaaggaaac

SEQ ID NO: 92718 - DNA, 82 bp, Homo sapiens
gggacaccgcggaagtcgggaaatggccaggagtggtggctcacacctgtaatcccagctctgggaggccaaggccagtgga

SEQ ID NO: 92719 - DNA, 110 bp, Homo sapiens
ctctcagggctcacccggaaggacctcctgggccagaatctgcattttaacaagatgctcaggccatttccaatccagaggaagaccttctagaagaagtgatgggtggg

SEQ ID NO: 92720 - DNA, 75 bp, Homo sapiens
cccgggaggtgttcaagacccagggggtgatcaagtacatggggccggcagaactgtaagagtaaatgggtccag

SEQ ID NO: 92721 - DNA, 75 bp, Homo sapiens
cagaaattgccggtctgggagttgggggcaaggagaagatcctgccgggaagatttccagaggattccagaactt

SEQ ID NO: 92722 - DNA, 100 bp, Homo sapiens
gtctttcatgctattaaatctgtcaaccctggtacctgacagtgtaaagaaggagctcctacaaagaataagaacattccttgctcagcatgccagcctt

SEQ ID NO: 92723 - DNA, 51 bp, Homo sapiens
aacctgaaagtggaggctgcgaaaatagatgagaccctttttgctcttcct

SEQ ID NO: 92724 - DNA, 100 bp, Homo sapiens
ttgcagaagtaacattcctttgaacactcagctttctgaaatggtgtcccaccgcaaggactggagaagggcatcagatgccagctctgaaaaactcttc

SEQ ID NO: 92725 - DNA, 73 bp, Homo sapiens
aggcctccgcttctccggcctccctgctcttaccgggagaccgatttgggatgttgcccctggatgagcctgc

SEQ ID NO: 92726 - DNA, 114 bp, Homo sapiens
tgcagcgactcggaagattcgaggcggcgggggacaagtcggcgccccagagcggacgagatatgtgtcacaaagatgtctacacggaactgccagggaatggactcagtgatc

SEQ ID NO: 92727 - DNA, 80 bp, Homo sapiens
ctcccctggaccgaaccaaaatcatcttccaaggacagtttattctgcgttgtagcagcatttggctgtttctactactg

SEQ ID NO: 92728 - DNA, 100 bp, Homo sapiens
cctggagggggcagtcccgggagaacctgcggcggccggagcgagattaaaagctgctttgacccagcaacatcctccagttaccaatggtgatactgtc

SEQ ID NO: 92729 - DNA, 74 bp, Homo sapiens
tgggactaccgggctgtcaaatttacattaactatgagaattaagcagcgcgatgtacaatacggtgtggagta

SEQ ID NO: 92730 - DNA, 97 bp, Homo sapiens
cctcagcctcccgagtacctgagattagcccaggagccctctggcacaaatggaagaagaaagaagggagcaagtagctaaaattaagaagatggag

SEQ ID NO: 92731 - DNA, 100 bp, Homo sapiens
tctgggtgggcaacttacccgagaacgtgcgggaagagaagatcatcgagcatttcaaacgtccagttacaacacagggatcacaacaaacacaaccgcc

SEQ ID NO: 92732 - DNA, 95 bp, Homo sapiens
cagaagatcgagagcctaactttgcaaccattggtctgcaggacatcactttagatgatgggatgtttcagcagcccctgagaaggaagaggagg

SEQ ID NO: 92733 - DNA, 90 bp, Homo sapiens
tgctccctttaaggaggctcttcttagggaagctgagctaaggaaacagagggttatgggatttttagcagacaaaaaaccagaacaagg

SEQ ID NO: 92734 - DNA, 85 bp, Homo sapiens
ttcctccagccaattgcaaagggtagtggtagcagagaattttgatgaaatagtgaataatgaaaataaagatgtgctgattgaa

SEQ ID NO: 92735 - DNA, 90 bp, Homo sapiens
ccttcttctttgccttggggaagatcctctctgtggagatatgtgttgagacggattctccgccgagctgtccgatacgcccatgaaaag

SEQ ID NO: 92736 - DNA, 80 bp, Homo sapiens
tgccgtgggtccgcgctgcttccacccaacttcctgttaggtatcatgatattagctggtttgacatcaagtcatttgtg

SEQ ID NO: 92737 - DNA, 100 bp, Homo sapiens
aaagactggcaaaagcacaaggattctcgctgtgacagagacaacaccgagtatgagaaatggagtggtttaataattataaaagatctcttgctactta

SEQ ID NO: 92738 - DNA, 97 bp, Homo sapiens
catgaccagcttagcttctgtcctaaagaggctgttgctcccagcactcacccgacatctgcctccgtgactgtgaccaccccagggctcctcctga

SEQ ID NO: 92739 - DNA, 74 bp, Homo sapiens
cgtgatctgcccatcttgttactccctagcagtgtggtaagaaagccaagacgaacttgaccattatatcaacc

SEQ ID NO: 92740 - DNA, 74 bp, Homo sapiens
catcatggcggctggccgggcccaggtcccttcctccgtgtgaacccacatccctgcccccagggccacctgca

SEQ ID NO: 92741 - DNA, 80 bp, Homo sapiens
tgctgagtcagtgtgacagtccatatgtaaccaaatattatggatcctatctgaagggcagcccaatggatccaatggtg

SEQ ID NO: 92742 - DNA, 100 bp, Homo sapiens
gggacgggacgtgcggcccagcgagttggtcggtcccggggtcacccgctacgggaagcaggcctcgccacagatctgtacccccgatttggtggtattc

SEQ ID NO: 92743 - DNA, 100 bp, Homo sapiens
gcttattgtatggaggagaagcaaaatagcgtcattgatatctgcttctaagatgaccaggttaagcagctgcaggaggaaacgccacctggtggtcctt

SEQ ID NO: 92744 - DNA, 88 bp, Homo sapiens
ggaccacacaaagtcttactgggtgaggacgcttgagcggaagttagaagcaaaaatgatcaaggaggaaagcgactaccacgacctg

SEQ ID NO: 92745 - DNA, 87 bp, Homo sapiens
agatgacagcccgcagagagttaacttctgtttacatggaactcagacatctgcaaatcatgaagcctccccagctttctgaggatg

SEQ ID NO: 92746 - DNA, 100 bp, Homo sapiens
gaaggacttggatgaagaaatctttgatgatgatgacttttaccaccagttgaggctgtgaagctgggcagggtttcagctgagctgaggttggaagtcc

SEQ ID NO: 92747 - DNA, 73 bp, Homo sapiens
ggagcagatcgattttaccttggataccctgctttgggttgaccacaatatggatgtcaatactgaagaagat

SEQ ID NO: 92748 - DNA, 75 bp, Homo sapiens
ttgtccagcgactccggggcctgatgaatgacatcgatctacccagacccggagctggaagtacaagtattgggc

SEQ ID NO: 92749 - DNA, 50 bp, Homo sapiens
gagataaactccctgaacctaacgcttgaaggatgccaatgatgtaccaa

SEQ ID NO: 92750 - DNA, 73 bp, Homo sapiens
caattccagcctatcacctaagagaccttatcaaaagggattgcaataaagttcaagaaaaaagaggtgctgt

SEQ ID NO: 92751 - DNA, 90 bp, Homo sapiens
cagacgatgtaagatctgctgttacttcttgctgtgtgaccttggcttcagaatggcagaagatgatccatatttgggaaggcctgaaca

SEQ ID NO: 92752 - DNA, 95 bp, Homo sapiens
acctccagtgtcccttcttccacatgaaaaggataagattgataggcagcagtttgaagaaacagttcgaactctaaataacctttatgcagaag

SEQ ID NO: 92753 - DNA, 75 bp, Homo sapiens
tcttttcaatgctgcgaaagctgccaaaagtgacatgcagcaccctggaggagaagaggttctgctggaacaagc

SEQ ID NO: 92754 - DNA, 100 bp, Homo sapiens
ggtggagccaccagcctctccttggtgaagtattacagacacttagcacctgatcacttgctgcaaatatgtcatcgactaggacctcttcttgaacaag

SEQ ID NO: 92755 - DNA, 100 bp, Homo sapiens
ccgacaggatgcagaaggagatcactgccctggcacccagcacaatgaagatcaaggcctttgggctgcccatcaccgtggcccatgtggatggccaaac

SEQ ID NO: 92756 - DNA, 87 bp, Homo sapiens
gcgcctcggccgaacccctccgcagcagaggctgggaggcggcagaatgcagccagaggagggcacaggctggctgctggagctgct

SEQ ID NO: 92757 - DNA, 100 bp, Homo sapiens
aaaaaactgacagcttactccttgtattgattctactcttctctacaaatatagactccgttccctaccacagcctttgaggatgaggatgatgaccttc

SEQ ID NO: 92758 - DNA, 100 bp, Homo sapiens
cgcagctgaaagcgtgaactgtgtaattaataaaatgtctccaacatctctaaagatcacactaaggcaactcatggaggggtcttcaaagaccttgcaa

SEQ ID NO: 92759 - DNA, 76 bp, Homo sapiens
cagatatcgaggaaaatcgaactatgctcttcacggaggaagaaatagaatttctctacaatgagaacacggttag

SEQ ID NO: 92760 - DNA, 82 bp, Homo sapiens
tgtgtggaatattggggggctcggctgcagacttggccaaatggacgggactattaagggggatatgagactttctactcgg

SEQ ID NO: 92761 - DNA, 75 bp, Homo sapiens
gccaagaaggagaagcagctgcggaaaatgctagaaggggacaagcaggccttcgcactatcacgtcctctggga

SEQ ID NO: 92762 - DNA, 98 bp, Homo sapiens
gagtacaccccgcagcacagccgcgacttcaaggacagagcgggatgccaccagcttgtccaaagggaagttccaggagctcctggtgggcatcgttg

SEQ ID NO: 92763 - DNA, 100 bp, Homo sapiens
ctggaggtcgccatggggcgaggcagcggcaccttcgagcgtctcctagcccgcagggccccggaccccggcttccaggagcgcttcttccagcagcgtc

SEQ ID NO: 92764 - DNA, 88 bp, Homo sapiens
ccaagaggcagacctaggaaatggattagcctgaggcctgctcagtcgttcctaatgaataaaaatcaagtgccaaagcttcagcccc

SEQ ID NO: 92765 - DNA, 90 bp, Homo sapiens
gtgaggacgcggcagcccgtggagtcggctgagggaaaagcgaggcaaggcaggcggtgagggagataaatctgcaggacatcaaggaag

SEQ ID NO: 92766 - DNA, 75 bp, Homo sapiens
ctttcaagcagtcattcatatcagcgtaatgatctgcagcttcgtagagacctcatggcctatgacagaagaggg

SEQ ID NO: 92767 - DNA, 77 bp, Homo sapiens
tccaccatgattgtgaggcttccccagccacgtggaactgacacaactggagaaactggttattttaccaaggcttt

SEQ ID NO: 92768 - DNA, 100 bp, Homo sapiens
acctgaaacagaaattctggaacacctatatgaatggcgagaactaccgggcagatgtggtggatctgttcccagggacttttgaggttgtggagatggt

SEQ ID NO: 92769 - DNA, 50 bp, Homo sapiens
cttgccccagtccaaccccagagcggataacagcgacttgattgcatgta

SEQ ID NO: 92770 - DNA, 97 bp, Homo sapiens
gacgacaaaatgcaaaaaaggaggccaaagactttatcgaaagctgctttgcgtcgcagttggagcagcacccccaccgcaggtggcattgaaggga

SEQ ID NO: 92771 - DNA, 82 bp, Homo sapiens
tttctcgcaagtgttctggtcctggtcgccacacctttttcgacagaaccaagttgtattgttagacacactggaacaagag

SEQ ID NO: 92772 - DNA, 75 bp, Homo sapiens
gtgagcctggactcgccctcctatgtcctgtacaggttatgaagacagtatggagtttccagaccatagtagaca

SEQ ID NO: 92773 - DNA, 95 bp, Homo sapiens
cggaagggtgatgtggctgcggcatcgccggcctcgctatgagcctggagaaagttcttgtggaattcagtcacaaggagttgtttgatttctat

SEQ ID NO: 92774 - DNA, 100 bp, Homo sapiens
gaacagtgtacccaaagcgacctgaaaaaccagttcctccaccacctcctatagccaaggtctacatcaactattacgacatgaacgcggccaatgtggg

SEQ ID NO: 92775 - DNA, 80 bp, Homo sapiens
agttggaagcagccgatccagcctgcggagcctgtggggcagatattaacctggctgcagagccaaaagtgaaccgagga

SEQ ID NO: 92776 - DNA, 82 bp, Homo sapiens
aagcgctcggcgcttggcgctggcgctggccaaggcgatgcttgtggttggtggcatcgaccgggtttatgaaattggacgc

SEQ ID NO: 92777 - DNA, 100 bp, Homo sapiens
agacgcaccattgaagttaaccggtgtaggagaagaaatccgcagaagcttattaaagttaagctcattcttggaatcccagaacaggccttaagtcttc

SEQ ID NO: 92778 - DNA, 98 bp, Homo sapiens
ccagcacctccttcaggttacttcatggcagctatcccacagaacactcgtgaaactgctcaggccatcaagggtatgcatatacgaaaagccacgaa

SEQ ID NO: 92779 - DNA, 80 bp, Homo sapiens
cggaaggttaatgttcttcagaagaaggcatttgcaagtaaaatcactggcatgttgttggaattatccccagctcagct

SEQ ID NO: 92780 - DNA, 78 bp, Homo sapiens
gatcatgtctgcgagccaggattcccgcgccgtgccgtccctgcagtgacaccgaggtgctcctagccgtctgcacca

SEQ ID NO: 92781 - DNA, 98 bp, Homo sapiens
actggagccaccagcccaaccgtgttgtatgtgagtggaggaaatacgcaggttaccgcagtgccattggattcttactgcaatgaccgaagtgcaga

SEQ ID NO: 92782 - DNA, 98 bp, Homo sapiens
tctgttagtgggagatccttgttgccgtcccttcgcctccttcaccgccgcagaccccttcaagttctagtcatggtcatttcttcagatagctcccc

SEQ ID NO: 92783 - DNA, 74 bp, Homo sapiens
agctgctccgcctcctaatacagaccctgctctcagcggcccacgaggtggagttgcagcggcagaaggaggcg

SEQ ID NO: 92784 - DNA, 93 bp, Homo sapiens
cttcccgtcagcctggcatttgacaaatgtacagcttgttcttccaaagtgactgccagaaagcaactgattcagacctttcttctccacggc

SEQ ID NO: 92785 - DNA, 95 bp, Homo sapiens
gtcatgctggagatgcgtcaggcaggcattgtgcccaacaccatcacctatggctactacaataagctctggtcccattttggcagaagaagctg

SEQ ID NO: 92786 - DNA, 75 bp, Homo sapiens
tgggcagaagagaagcagtgaaggagtgcagaggcatcacctgaaagagattaaaatggcttccagaggaaagac

SEQ ID NO: 92787 - DNA, 82 bp, Homo sapiens
gtgagcgacccggacaccgacgcgctcatctgctggagcccgttttccaagagataacttcaccaagatgtccagtgatagg

SEQ ID NO: 92788 - DNA, 100 bp, Homo sapiens
ctgctgcagggcctggtagtgtggagcttcagcggcctggaggaggacgaggcgggcgaggcagacatctggtccctgggcataacagctattgaacttg

SEQ ID NO: 92789 - DNA, 100 bp, Homo sapiens
tgatgctggcgtgcggatacagttcaagcaagaagacagcgacagctgtggcgcactgcaaacgcggcaatggtctcatcaaggtgaacgggcggcccct

SEQ ID NO: 92790 - DNA, 83 bp, Homo sapiens
gaggacttaaatgaagccactgattagcaatttaaagatcctctccaagaccgaatccgggataccttgatccatgaaatgtg

SEQ ID NO: 92791 - DNA, 100 bp, Homo sapiens
tcaccgctctaaggaactaccacagtcagaagtaattcgccaaaatgacgaacacaaagggaaagaggagaggcacccgatatatgttctctaggccttt

SEQ ID NO: 92792 - DNA, 100 bp, Homo sapiens
cggccctatctgtctcctgatgcctgagcagaggtgagccctattcccagaggcaggtggtgctgaccctgtaacccaaaggaggaaacagctggctaag

SEQ ID NO: 92793 - DNA, 74 bp, Homo sapiens
gaacaaaattaaacaactacctgctgaaattgggagaaaaaagggcatcatccccattccgaagggtcagggag

SEQ ID NO: 92794 - DNA, 75 bp, Homo sapiens
aggatttgcgcaagcaggtagcgccgctgctgaagagtttccaaggagagtcataccctaatgatcccagcaaga

SEQ ID NO: 92795 - DNA, 106 bp, Homo sapiens
gctgaggcggaagatccaggagctgttccacgtggagccaggcctgcagaggctgttctacaggggcaaacaggacgtggcccagtggaacatcgggagcctccgg

SEQ ID NO: 92796 - DNA, 80 bp, Homo sapiens
aacccagaatggagaaattgtacagtttaaaggtgcaacccagtttatgcctgaccccaagctcatggatcacgggcagt

SEQ ID NO: 92797 - DNA, 101 bp, Homo sapiens
acacaacaagtttagggagtccatggccagaaaacttttggggtgtcagaacctcaaagataacaccattggcatcgaggagaatgcagtctccctgacct

SEQ ID NO: 92798 - DNA, 101 bp, Homo sapiens
tcctgggaagcgctgtgaaatgggctgctttgtcaccgaaaagacctggatttggcaaaagtaggataccttgactccaacactaacagctgtgctgatag

SEQ ID NO: 92799 - DNA, 82 bp, Homo sapiens
ggccacgtgcagcggggagggacgccctctgccttcgaccggatcctggcgccatgtcagaaccggctggggatgtccgtca

SEQ ID NO: 92800 - DNA, 99 bp, Homo sapiens
gaaaagctgcaggccggtgctcttgcaactgacgcagtcactgcagcactggtggaacttgagatcatatactcctatgaaaggaggaatctccaatgt

SEQ ID NO: 92801 - DNA, 96 bp, Homo sapiens
ggctccaatggcgctttctacaagatgagaactggactgatgaccaactgcttggttttaaaccatgcaatgaaaaccttattgctggctgcaata

SEQ ID NO: 92802 - DNA, 75 bp, Homo sapiens
caaaccaaatatcaaaatttgtactcaggtgaaaggaccagatgaagttggaggtggctcctgtattttgctggt

SEQ ID NO: 92803 - DNA, 100 bp, Homo sapiens
tgccatagctttcctccagcagcccaggcagcaggtatattgtgatgggccacatctaccataagagacggcagctccctacagctctgctccaggtcct

SEQ ID NO: 92804 - DNA, 89 bp, Homo sapiens
gccagggtccctgaagagggaagacacgcggaaacagatatggccgcgtggaaagtgtcaaaattcttcccaagaggggatctgaagga

SEQ ID NO: 92805 - DNA, 75 bp, Homo sapiens
acatcaccatgctggtcagcttggtcatgatctaccagttcattgttcagatatgaagagcattttaagaggtgc

SEQ ID NO: 92806 - DNA, 98 bp, Homo sapiens
tctggaggacgctgaggggcggaggcgggagaggcgagctcgcgatgagtggtctcggcaggctcttcgggaaggttggttgaatctggcgatgtgga

SEQ ID NO: 92807 - DNA, 100 bp, Homo sapiens
tgctaaatttgaaaaggagaaaatgaatgccaaatgggacacggtcagaggggtgaaaggagtcttcctggcaaaccaaaaaattgatgggaaagtgatg

SEQ ID NO: 92808 - DNA, 74 bp, Homo sapiens
atcaagaggatggattcgacttagacttgacctacattgtggatatcaagcctgccaatatggaagagctaaca

SEQ ID NO: 92809 - DNA, 96 bp, Homo sapiens
atcagccagtctctttcatcatcaagcagacatactcaagggatatgatgatacatacgcagaacaaagttacgaaggctacgaaggctattacag

SEQ ID NO: 92810 - DNA, 83 bp, Homo sapiens
cgagaccgcggccgggaccgaggttactccacaggatccgctgaacataggatgttgccacaaaatctacctcgtgtattttt

SEQ ID NO: 92811 - DNA, 117 bp, Homo sapiens
cgggttcacgccattctcttgcctcagcctcccgagcagctgggactacaggtgcccgccaccacacccaggcagagtggcatgattccgactggatactctcagtgccagccaaat

SEQ ID NO: 92812 - DNA, 75 bp, Homo sapiens
cgtgctccaaagtcatcgtccggtttctcactgtgatgatgaagcatgacctattcaggcctgttctgtgtggtc

SEQ ID NO: 92813 - DNA, 75 bp, Homo sapiens
ccgggcgcgggcagagcgcggcggcgcgggtaggtgagctcgtgaaacaatatgaagaggagaaaatagcctttt

SEQ ID NO: 92814 - DNA, 100 bp, Homo sapiens
cctgcactctgcctcgctcagccggctgctcagggtcgccatctggatgcgggagtcatcctgggcagaaggactgagctgggagtgtccactcgccttc

SEQ ID NO: 92815 - DNA, 83 bp, Homo sapiens
ctcagttggaagcagccgatccagcctgcggagcctgtggggcaggtggcattgcagacagtgtagccaagtggatatttaaa

SEQ ID NO: 92816 - DNA, 74 bp, Homo sapiens
aagaaagtgaggaagggaaagcagcaatttcacaactcagggcaaactaggcgtggcaactgctggctgcgtga

SEQ ID NO: 92817 - DNA, 49 bp, Homo sapiens
aaggattccaagtaactcttatttgaatcattgcgatgatgagtccaga

SEQ ID NO: 92818 - DNA, 90 bp, Homo sapiens
aaggaagcaagcagttcagaagagccaaggaataaacatgcaatgaacccaaaaggagggctgtgctgaagtttgctgctgccactggag

SEQ ID NO: 92819 - DNA, 76 bp, Homo sapiens
attcgacacagatgggaatggagaagtagactttaaagcctccgcagcattcctagtgtctctctacataaaggac

SEQ ID NO: 92820 - DNA, 100 bp, Homo sapiens
cgggccctccgcgcggtccatcgcccactggacgccgcccgcggccggaccggcgcgggtttaagtggacgccaggtgcaccggacacaggctgtgttta

SEQ ID NO: 92821 - DNA, 75 bp, Homo sapiens
gaagaacgccgccatccagccaccattccaagatcccaccaaatattttggttgtgagctgggagcacagaccca

SEQ ID NO: 92822 - DNA, 120 bp, Homo sapiens
ggccgcagagctaaatgggggcctctccagggagtgctctgttcacggctccatcgctgttaatataagccttccaaagtcagcagcaatctgttacacagcagcactgttgaagacaag

SEQ ID NO: 92823 - DNA, 93 bp, Homo sapiens
gttgctaaggatagcagacaagttcacccaacataactttcaagagctacaagtgtattcatcagagtttggaggacaataatagatgtccca

SEQ ID NO: 92824 - DNA, 75 bp, Homo sapiens
cccggggtctatggaagtaatggaaggacccctcaacctgaggagccatgagtgaaggcgtacaagaggggtctt

SEQ ID NO: 92825 - DNA, 82 bp, Homo sapiens
cttggatagacttatacctcaggtgacttaagagattaaaattaatttggttgctgttggttctgaacaaataatgagttct

SEQ ID NO: 92826 - DNA, 74 bp, Homo sapiens
ctacgtcccgctgccgtcgccgccgccaccatgcccaagagaaaggtaattggtacgcctcagagaccggcagc

SEQ ID NO: 92827 - DNA, 100 bp, Homo sapiens
cggggcgccagctctgcaggagaggcctctgagaaggaacccttgaaactggacaagatcgagggcgtgttcgagcggccgagcgacgaggtcatccggg

SEQ ID NO: 92828 - DNA, 96 bp, Homo sapiens
cgtgaaggttttgactctgatatcaacaatcgggagagctggtgacggcctccaaggccatcattgaaaaggagtaccagccccacgtcattgtga

SEQ ID NO: 92829 - DNA, 100 bp, Homo sapiens
accgaaatgagactccctcagatccagtgataattgacagcagttcctacagaggttgacagctaccatagcctattccctctagaaccactgccacctc

SEQ ID NO: 92830 - DNA, 74 bp, Homo sapiens
ggaggctctggcccgggctccgcgtacttcctgttcagtttggatttaggtggcgagtagaaaaagaagtaatt

SEQ ID NO: 92831 - DNA, 83 bp, Homo sapiens
tgtaacttttgatcgaactggcagacggatatttactaaatacaaacctggtcgatgtgatgatattttgaaatggaagcctc

SEQ ID NO: 92832 - DNA, 83 bp, Homo sapiens
ctgggattcgcgctgctgggcacccacggagcctccggggctggtgctcttacagcctgttccaagtgtggcttaatccgtct

SEQ ID NO: 92833 - DNA, 100 bp, Homo sapiens
gaggcacccgaagaagagaccatccatatttccagttttcggctttgtgagaaaccttaccatcaaacacgatggccagcaacgttaccaacaagacaga

SEQ ID NO: 92834 - DNA, 51 bp, Homo sapiens
cagctgaaagaaaatgccagcgaggtgaatgaactcattcttaaacagaag

SEQ ID NO: 92835 - DNA, 74 bp, Homo sapiens
tgcggtgctgctcagtgcagttcagattcctggattttgtgaagggggatttaaaatccatgaggctgatataa

SEQ ID NO: 92836 - DNA, 90 bp, Homo sapiens
tgggacaatatcctctgtggagaacacccccccatggaggcgagatccagctccaggtcccacaggggctcttcttccccacgaaaaaga

SEQ ID NO: 92837 - DNA, 50 bp, Homo sapiens
cctatagaagacacccctttggttccgccaacaggaaggccgggtgtgca

SEQ ID NO: 92838 - DNA, 100 bp, Homo sapiens
aagtacctattgaatgaagagtatgttgtgctcactaaaaaaaactgaaagcaatccaagtgtccctaaaaggcagggatataactggtgccatgaccgg

SEQ ID NO: 92839 - DNA, 98 bp, Homo sapiens
gctattgccttattttttctcatggatgttcttcttcgagtatttgtagaagggctgaacatatgcagaagaaaaggagaaaacaagaaaacaaagat

SEQ ID NO: 92840 - DNA, 50 bp, Homo sapiens
gccgtccggagccagccaacgagcgcggaaggagagttttacatggaagt

SEQ ID NO: 92841 - DNA, 97 bp, Homo sapiens
ctccaaggccgtcgccgaccgctacgctgtctactggaacagcagcaaccccaggtgtttaagatagaagtgctaatgaatggaagaaaacattttg

SEQ ID NO: 92842 - DNA, 100 bp, Homo sapiens
agacatgagcaagaaaagcctctgggagcagaagggaggctccaagacctcatcaacaattaagggatgccagatgatatgaacttcagtgatgtaaagc

SEQ ID NO: 92843 - DNA, 100 bp, Homo sapiens
atgaaatgtactgcaaagattcacggggtgactcagggggaccgttggtgtgcagaggtaccctgcaaggtctggtgtcctggggaactttcccttgcgg

SEQ ID NO: 92844 - DNA, 75 bp, Homo sapiens
agccgatccagcctgcggagcctgtggggcaggtaagaattgtgacaaaggccagtcttttttcattgacgcccc

SEQ ID NO: 92845 - DNA, 100 bp, Homo sapiens
gggactctgcaatagatacatggagcccatcagaatggcagatggcttatgaaccacagagagcctgttacctatccataaacccccaaaaggatgagac

SEQ ID NO: 92846 - DNA, 75 bp, Homo sapiens
acaattaccatttggactccagtggtagctatggttccacttccaaacatgagttccaggccgagacaaagaagc

SEQ ID NO: 92847 - DNA, 51 bp, Homo sapiens
tacgtggaggagctggtggagattcgcgttggactcttcacagaaattggg

SEQ ID NO: 92848 - DNA, 75 bp, Homo sapiens
gtagctctgctaattgggccaaatgctcctttaatttttgaacgaggcacttcaaaaaacgtatcagaagatact

SEQ ID NO: 92849 - DNA, 89 bp, Homo sapiens
agtctgggggccgagaccacacagcctcccgagcacaacaaggagaggtgatgaggttggcatgtcgtttggatcccaaaactagcttc

SEQ ID NO: 92850 - DNA, 99 bp, Homo sapiens
cattcacacggaggattaccggctgcgactcatctccctcaaggtgttccagacggcaagtgagcgggtggaggcagagggcctggcggccctccactc

SEQ ID NO: 92851 - DNA, 82 bp, Homo sapiens
tgacagctctgcggctcgggccctgagcttccccgggcgctgcctggacaggcctgcctgcgtgctgggacatgtctggcct

SEQ ID NO: 92852 - DNA, 75 bp, Homo sapiens
gccggcacgcgactccccccgggcccaaaggctctgccagcagacagccttggcacacaggcacaagggctggag

SEQ ID NO: 92853 - DNA, 98 bp, Homo sapiens
cacagtccatcggcatacggagacagaaagaatcttcaagagggagacatagggaaaaggaagacataaaaatcactaaggaaagaactccagaaagt

SEQ ID NO: 92854 - DNA, 100 bp, Homo sapiens
gcttctccatatacaacttgaatggtcatcctgtacagttctacagcatgaataggcctgcctctcgccatactcccccaacaatagggggctcgttgcc

SEQ ID NO: 92855 - DNA, 80 bp, Homo sapiens
tcaccttcagcaaagtacagcgcttctgggagtccaactcggctgcccacaaggaggaattgaatgatctggcacgggac

SEQ ID NO: 92856 - DNA, 100 bp, Homo sapiens
catctttcgggctgccgagggtgttcttgacgattaatcaacaggtggtttgaagtgtcctgtttgcagctttgtatatggcaccaaatgggagttcaat

SEQ ID NO: 92857 - DNA, 101 bp, Homo sapiens
attacacggccagttttgaaatcgacacacaaagaatagagttgagcctgtgggacacttcggaagctccaccatgaggcgaggtggatggaggaagcgag

SEQ ID NO: 92858 - DNA, 75 bp, Homo sapiens
ggcggcccactggcagttcgaggtcgcaatggaagaagagatcgccgcgctggtcattgacaatggctccggcat

SEQ ID NO: 92859 - DNA, 100 bp, Homo sapiens
actgcaaaggccaatgttggtgctggcaaaaagatcggaagttgcacccatcaaatgggtcagattgccatcgtctcgtttcaaaattccactcccaaag

SEQ ID NO: 92860 - DNA, 87 bp, Homo sapiens
gatagtaaaactgaagaaaagacagctgctagtgctcctgccaatgtgtgggcagatttgtccttcccattctgcaaccatggcaag

SEQ ID NO: 92861 - DNA, 75 bp, Homo sapiens
gcttggagtgcagaactgaaagagaaaaaggtccacttaccatttctgcacaggaaaatgtaaaagtggtgtatt

SEQ ID NO: 92862 - DNA, 100 bp, Homo sapiens
ccgatcgccgcggggcagttcgggccggctgtcctggcgcgaaactatgttccaacttcctgtcaacaatcttggcagtttaagaaaagcccggaaaact

SEQ ID NO: 92863 - DNA, 115 bp, Homo sapiens
accagctggacattacattaagaaggggtcaaagtttagctgctcgagatcgaggagtaatcgtgtggaagcgtggacaagagatgttgctttcttactcagacaagaaggcagg

SEQ ID NO: 92864 - DNA, 78 bp, Homo sapiens
aactgtgcagttttacatggttcctccttgagaatgggtaccacagaccatgtcatcgtcctggcgtccacgaaccga

SEQ ID NO: 92865 - DNA, 100 bp, Homo sapiens
aaataaagatttcaggagctattggaccctgtgtgtcactcaattctaaaggaccctgtgtgtctgaaaattctcttcaagaaaatgaggaggaggagat

SEQ ID NO: 92866 - DNA, 83 bp, Homo sapiens
cccagacgtgggcttctccagctatgagcttgtggccacaccccacaacacctctaaagacaatgcagatcttcgtgaagact

SEQ ID NO: 92867 - DNA, 74 bp, Homo sapiens
gaaatgatctggctcgatgcctaagatggggaggaggctgctggatgtcattcacacagaaaataaactctacc

SEQ ID NO: 92868 - DNA, 83 bp, Homo sapiens
ttcctataaatctcgcccaaacaggaaagcatgtagagcgcatgaagtacaggacaataaagcttcctacacatatcaccagg

SEQ ID NO: 92869 - DNA, 75 bp, Homo sapiens
gtggaagttcccgccccggagagcggcgaggcggcagccacagaatcatattctaagaactcagccactcaggta

SEQ ID NO: 92870 - DNA, 106 bp, Homo sapiens
ctggaatggctggtctttttagcatctctggcaagatatgggagacagagctactggatctcagccttgtcaaagatgccagatgtgggagacacgccaaagctcc

SEQ ID NO: 92871 - DNA, 94 bp, Homo sapiens
gcaggtgatgcggtttactatactgcttcatatgcaaaagatccacttaataactatgcagtcaagacaattgtggcaattaataaagacccag

SEQ ID NO: 92872 - DNA, 73 bp, Homo sapiens
tcgtcaccagcaagcttgcgggtgtggtttattgacaatcatttacaatgccgaagagtgctgtagtgagcca

SEQ ID NO: 92873 - DNA, 96 bp, Homo sapiens
tttacagttgacagtcctgttcagcagacgagctcatctgcgcctttgtttagaacgcttaaaagttctgattccactaggaccagactgcacccg

SEQ ID NO: 92874 - DNA, 100 bp, Homo sapiens
cgggcagggggccgagagagagccgttgttgcactgctgtcctgggatgtgggacaacatcacgtgttggaagcccgcccatgtgggtgagatggtcctg

SEQ ID NO: 92875 - DNA, 100 bp, Homo sapiens
accattctccgaggctgcccggggctgcccggggccccagggccaaagggagaggcaggtgtcattggagagagagaaaaccgtgaggacatactgaatg

SEQ ID NO: 92876 - DNA, 75 bp, Homo sapiens
ttgccacgggcattctccatctccttgcagggtaaaaaatatttccgagataggaggggaggtggcagaaattca

SEQ ID NO: 92877 - DNA, 51 bp, Homo sapiens
gtggagatatggcgcaactgcggcgctcttcaggcagtgacagtggtggga

SEQ ID NO: 92878 - DNA, 51 bp, Homo sapiens
agtcaggttccgatgatcgcgctgcagacctgagtcagaactccatcacag

SEQ ID NO: 92879 - DNA, 100 bp, Homo sapiens
gcgatgtctgtggactgtcttgggcagcatgcagtgctttctggcctctactcttcatggatcttttggatgaaagaacactcgtggcagtagaacggcc

SEQ ID NO: 92880 - DNA, 82 bp, Homo sapiens
tcccaccttctgggcaaagaatgtagtcaatttagacaatggctttggccacagccgtcttgtgaaggaaaacctgattgac

SEQ ID NO: 92881 - DNA, 120 bp, Homo sapiens
gaaggacgtgctgacccgcctgaagcacctgcgggcgctgctggttgctgatatgtgttcaagatgagtgggatgggagaaaatacctctgacccctccagggcagagacaagaaagcgc

SEQ ID NO: 92882 - DNA, 100 bp, Homo sapiens
gccagcaggcggacgctggcttctccgcctgggacccctccgccccgacccgggccccgcggccctcgatgaggtgaaaggtgtagcagtcactcggcct

SEQ ID NO: 92883 - DNA, 97 bp, Homo sapiens
gaagatggtcgtgatccttggagcctcaaatatactttggataatgtttgcagcttctctcgtggcattatccttcagtggggctattggactgact

SEQ ID NO: 92884 - DNA, 50 bp, Homo sapiens
atagaagaacccttattactccaccagtcaaggatgctatctaaatgggc

SEQ ID NO: 92885 - DNA, 50 bp, Homo sapiens
tgcagtgtctgacttgtgacaggaaaagagtgatttctgacaaaaaatac

SEQ ID NO: 92886 - DNA, 82 bp, Homo sapiens
gaaagagatatgaagatcttcctataaatagcaatccaggcctgaaagtaagcaggagccagtgaaaacagaaatgggtcct

SEQ ID NO: 92887 - DNA, 136 bp, Homo sapiens
gacgacagttcaaacaaagaggccgcggaggagaagccggaggaggacaacgactaccaccgcagcgacgagcagatgagggaatctcgctgggaagctgacaccctggacaaagagggactgtcggaatctgttc

SEQ ID NO: 92888 - DNA, 98 bp, Homo sapiens
aataatgccacttttgattgcaaagtgctatcaaggaaccacgctctcgtctggtttgatcacaagacgggcaagcacttttccagccattaactcca

SEQ ID NO: 92889 - DNA, 90 bp, Homo sapiens
caggatatgaagttcatcatcaaaaattgtatgtccgtggttcagaccctgtattaaagcttttggacgacaatgggaacattgctgaag

SEQ ID NO: 92890 - DNA, 101 bp, Homo sapiens
ctatggatgatcgagaggatctggtgtaccaggcgaagctggccgagcaggctgagcgatacgacggtggagtggctgaaacttctcagcaggcgcatcta

SEQ ID NO: 92891 - DNA, 46 bp, Homo sapiens
gcggcggcagcagcagtgagagagcctggagacacaggccccatcc

SEQ ID NO: 92892 - DNA, 74 bp, Homo sapiens
ccggagcttctcagaagacagagggttttcttttgagagctcctgaaattattcttgggttaccattttgtgaa

SEQ ID NO: 92893 - DNA, 100 bp, Homo sapiens
ggaaaaatgtgagagagaagttgtcagcaggagaggccctgtctcagcgggaccctcctcacaacaacttcttcttcttcgatggcatgaaggggaatgg

SEQ ID NO: 92894 - DNA, 100 bp, Homo sapiens
cagagatcaagcaagggattcttcctttgagagaagacatggagagcgagaccgtcgtgacaacagagagagagatgaagatgacgccaacagactcggg

SEQ ID NO: 92895 - DNA, 83 bp, Homo sapiens
ctaaactattcatatccaggatccgatagctctctgcttattaatggctcaaattacacaagatgaatcttcttatcttctgg

SEQ ID NO: 92896 - DNA, 100 bp, Homo sapiens
ctaatgacagtctccaaattcgcctccatctgtaccatggaacaagatcactcaaggtgaaggataatctactaataccagcactttgaatgaaaatttg

SEQ ID NO: 92897 - DNA, 90 bp, Homo sapiens
ctttattggcagaaggtgtcattttaagacgagtaggcgaagcaaggactgtactgaacgacacctgggtctccttcccttcctggtctg

SEQ ID NO: 92898 - DNA, 100 bp, Homo sapiens
ctggatttcagtgtcattgtgatggctgtgcctgacgaggaggccaagacaaccaccacaaacactcaagtggaaggggatgatgaggccgcattcctgg

SEQ ID NO: 92899 - DNA, 99 bp, Homo sapiens
cgctgaacggcggagcgggagcggccggaggagccatggactgcagcctcgtgcggacgctcgtgcacagatacccagatgacgtgtactactgtggaa

SEQ ID NO: 92900 - DNA, 100 bp, Homo sapiens
cagcattctttcttggcatttttgaatacgcctaccgatgctctggatcaatttgaagcacctctgtgggcatatattgcttgtgcctgtggccttttca

SEQ ID NO: 92901 - DNA, 90 bp, Homo sapiens
gctgggcttcctgggcagctcgtcggtgttctgcaaagactgcaggaagccctgggcgctgcctatggcacagccaagagcggtaccggc

SEQ ID NO: 92902 - DNA, 100 bp, Homo sapiens
cggccagtaaagaaccagaatgcactggtcagttaatacaagaactgcggagagctgcatgcagtcgaaccagatgttatggaagcaagttcacaattac

SEQ ID NO: 92903 - DNA, 82 bp, Homo sapiens
ccctgaagagagaaggcaaagaacctctggtgttgaaagttttcggctttgtgagaaaccttaccatcaaacacgatggcca

SEQ ID NO: 92904 - DNA, 83 bp, Homo sapiens
tcgttcaagacaggtgtttaagcgtaatctgtaagtcagatgctccaacaggggatgttcttcttgatgaagctctgaagcat

SEQ ID NO: 92905 - DNA, 71 bp, Homo sapiens
cggaggacagccagcaggacctgcctggggagcggtaatcaggaagcagccgctgcccctgacacaatggc

SEQ ID NO: 92906 - DNA, 90 bp, Homo sapiens
agacacagaactgaaaaggtattttggtgcccgggcaatcctgggggagcaaaggtttgggaagtagctgctccatacattgaaaaatac

SEQ ID NO: 92907 - DNA, 97 bp, Homo sapiens
tctcactaaccacaggcatcagttggtactcgccatgaaactcaaagatcgagagttgcagagcttgaagtgaaaaccagagaaaaattagaagctg

SEQ ID NO: 92908 - DNA, 100 bp, Homo sapiens
gggcgctgctttaccacgcgttggtgagtcagagtcagaagcaaaggtagatggagagactgcatcggacagtgagagccgggcagaatccgcacccctg

SEQ ID NO: 92909 - DNA, 100 bp, Homo sapiens
agtggaagatgatcacatcccagagccccccaggcatcatgagcgtcttggacgacgtgtgcgccaccatgcacgccacgggcgggggagcagaccagac

SEQ ID NO: 92910 - DNA, 90 bp, Homo sapiens
ctttgaccataaagctgacttggaagactttgactccaaggtgcaagggaacgctgtgaggagctccgtgttgaattgttatctatccat

SEQ ID NO: 92911 - DNA, 83 bp, Homo sapiens
agtcgtcttccacttgcacgaaagctttcctaggccaaaaagagtttctcctggcggcgctggtcctgtctctcattctgccg

SEQ ID NO: 92912 - DNA, 52 bp, Homo sapiens
gatcgatctaagatggcgactgtcgaaccgcaggatgaagttaaaggaagta

SEQ ID NO: 92913 - DNA, 51 bp, Homo sapiens
tgcaacctctacctcccaggttcaagctgaggcaggagaatggcatgaacc

SEQ ID NO: 92914 - DNA, 100 bp, Homo sapiens
agcaacagcaagaagaagagcccagctagcaccttcgccctctccagccaggcctatgagagctacaagaagaaggactacacccaggtggactacttaa

SEQ ID NO: 92915 - DNA, 90 bp, Homo sapiens
ggacggggccgggcgacctgggcaccagcaggacccgaggccaggagccaggggcccagaaggacggggaggtttactgcatcgacgcgc

SEQ ID NO: 92916 - DNA, 100 bp, Homo sapiens
catacttcttttctgcctcagaagaagtggttcctgagggtctctattccaatgtggcctgtccaggtacagcattgaccaatttgacatatggaattct

SEQ ID NO: 92917 - DNA, 82 bp, Homo sapiens
agacttttctcagatgttggatatttgcttggaaaaacgtgtgggtacgaccttgacggtctggaaaatcccgaagcagaag

SEQ ID NO: 92918 - DNA, 75 bp, Homo sapiens
gcccgcgcacttccaggtgcacagcgcgggagccgtcacggtgctcaagatcaaattttctccggtggctaaaaa

SEQ ID NO: 92919 - DNA, 83 bp, Homo sapiens
ttacaagccccagttagatctcccatcactaggagttttgctcgagagtaatttcatctgtgccaaagcctccagaggacaag

SEQ ID NO: 92920 - DNA, 82 bp, Homo sapiens
gccgcggagcgccagctcaatgaattgcagagtgggcaggatcttaagacccgataggtgcagaacccatctggacacggag

SEQ ID NO: 92921 - DNA, 75 bp, Homo sapiens
gccaagtcagccacctggacgactagacgcttgaagcaaagctgccatcccagaagacgacatgctctcagcaac

SEQ ID NO: 92922 - DNA, 51 bp, Homo sapiens
ggccctcattcaggcccagccctgggccgattcacgattgcggccaagcac

SEQ ID NO: 92923 - DNA, 110 bp, Homo sapiens
ccccgttggagcccctgctttccactgtccacagatcctggtccctacaaataagcctgctcatgtgagataagaaaggagttcctggaaccaggaattcattctcagtg

SEQ ID NO: 92924 - DNA, 74 bp, Homo sapiens
acccgagaagtcatggacctaatcagtacatcaagtgttgcaagagcctggagtggcacctttgatgaacttct

SEQ ID NO: 92925 - DNA, 75 bp, Homo sapiens
cacagaaatagtggagtacaccagcaaagatgagatggtgagaacaagaccaagattggaaagccagcttcagag

SEQ ID NO: 92926 - DNA, 100 bp, Homo sapiens
gaaatgcagagaatataaggaatgtggcagagactttggtcataactttcagttaactcagtatcaagtggttgtgtcaaaccgattggtgacatctcca

SEQ ID NO: 92927 - DNA, 100 bp, Homo sapiens
caatgtactggatcgaaatgtccatgagaaaaagcttggagataaagttgctttttactgtgctctggtgctactgattgctcaagagaaggaaagaaac

SEQ ID NO: 92928 - DNA, 75 bp, Homo sapiens
cgcgtctctctgctgcggcgcggggaccgctgtgctctcgctctggatggacaaggaaaaagaggaaagcatgaa

SEQ ID NO: 92929 - DNA, 100 bp, Homo sapiens
aaggataaactacctacatagaggacatacctttggttaaaggagctgccgtcaggtctgccatcatggatgttctcgcagaagcaaatggcacctttgc

SEQ ID NO: 92930 - DNA, 100 bp, Homo sapiens
ctttctggagaagccgtggcctgatggtttttagaacttcagccataaaaatgggcagaattttccttgatcatatcggtggtacccgtctgttttcttg

SEQ ID NO: 92931 - DNA, 88 bp, Homo sapiens
aagctttcatggcagaccagcaactcccctactggtacataccgagcatcaaatattaaggcacccggagaacagacagtaccagcct

SEQ ID NO: 92932 - DNA, 83 bp, Homo sapiens
ccaagttcctgacagcctggaacaacgtcaagtacggatctggagtgggagagcaggatgggggactgatcggtgccgaagag

SEQ ID NO: 92933 - DNA, 100 bp, Homo sapiens
gaatgatcctgggatggaaattttttgatcatgcggcacatcttgggggagctctttttggaatgctcagtagatgaaggcgtttctgagggcttgccta

SEQ ID NO: 92934 - DNA, 82 bp, Homo sapiens
cggggacattattgcgcgtggaacggctgcttttggaaggtgcagtagacattgttgcaatcatgatcggcaatctgaaagg

SEQ ID NO: 92935 - DNA, 83 bp, Homo sapiens
caaggagctaaagcagcgtgcgttcagccctggggacttgaactgccatgtcctctgaagaaggaaagctcttcgtgggaggg

SEQ ID NO: 92936 - DNA, 76 bp, Homo sapiens
aaaactggatgttggtagaaaaagcaagagtttgttatatagcaccccgtgctgatcccattccaatatgtagctt

SEQ ID NO: 92937 - DNA, 100 bp, Homo sapiens
ataatgatagaatgaagaccacaataaaagagacctctacttagctcagcaattcttaccttggagaagaaaattgagggactgaattttattagatgct

SEQ ID NO: 92938 - DNA, 51 bp, Homo sapiens
ctcccacagcagccaaaccagaaggaaattcgaaatgagtcccatgactat

SEQ ID NO: 92939 - DNA, 97 bp, Homo sapiens
ttgaatatcgtaagcgcacgtttaaacatctcaagcttaagagttggacagtggaggaccttcagaagaggctcttggccctggaccccatgatgga

SEQ ID NO: 92940 - DNA, 75 bp, Homo sapiens
tctgatacagcttcagttaatgaaaatgggctaggaccataattatggtgctcgtcctcctccgacacctccggc

SEQ ID NO: 92941 - DNA, 98 bp, Homo sapiens
ctataccagccaccctgcccccaagaaggaagtcatcatgggccggcctggaacaggtctcctctgagcctccggcctccataagacccaaaacagat

SEQ ID NO: 92942 - DNA, 100 bp, Homo sapiens
ttaccctggggtttcctcattgcgcaagaggtccaaaggcttctaagcatgcgggagaagaagtgctgcagggtgtggacaattcgctggtgggcctgca

SEQ ID NO: 92943 - DNA, 82 bp, Homo sapiens
cccatcataagctacaaacccttgcaactaacctcttggcttctgaggcatctgacaagttataatcgctggttatgtcaag

SEQ ID NO: 92944 - DNA, 74 bp, Homo sapiens
tcatcttcaacttgtagacacagccgggcaacagtagaagactcagaaagtggtgtttacatgcgattcatgag

SEQ ID NO: 92945 - DNA, 50 bp, Homo sapiens
tgtttgctcctaacttgctcttggacagaacttccaacactatgttgaat

SEQ ID NO: 92946 - DNA, 75 bp, Homo sapiens
caactgaagattcatacgcagctggcagatattatcatagttgctgcaggtggagtctttcattttggatcagga

SEQ ID NO: 92947 - DNA, 98 bp, Homo sapiens
ccaaatgaatttgcaaaacttactgtagtccccagaagaccatgtctgtgttgagctgtatctgtgaagccaggcaagagaatgaggctcgaagtgag

SEQ ID NO: 92948 - DNA, 142 bp, Homo sapiens
gctccgcggcggctgcgaaggcggcggctcctgccctctcgctttccctctcgcgtctctggctgcaggtacgaggaacagcaaattcaggaaaaagtggcgacctttcgactcatgttgctggagaaggatgtgaaccctg

SEQ ID NO: 92949 - DNA, 83 bp, Homo sapiens
cacccaggaaaagactcaggacggacaagcacagtcttcggaaggacaagatgaagctcatcatcctggagcactattctcag

SEQ ID NO: 92950 - DNA, 93 bp, Homo sapiens
ggagatcctgatgtttctcagtgccattgtgatgatgaagaaccgcagatccaacggagtttcgctcttgttacccaggctggaatgcaatgg

SEQ ID NO: 92951 - DNA, 100 bp, Homo sapiens
atctcagcaacggacactttcgcaacatcaagggagttttccggggccctctcagcaagaacgggaacaaaactctgctgtcctgagagcacgtctctac

SEQ ID NO: 92952 - DNA, 100 bp, Homo sapiens
gggactcgcctttgccctggcaaacactggaatcctactttttctatgaagaactggtggatgtttctgcatctgtcttaccagaattgaaaagagaaac

SEQ ID NO: 92953 - DNA, 114 bp, Homo sapiens
ctgcccgacagtcctagctaaacttcgccaactccgctgcctttgccgccaccatgcccaaaacggccctagcaacagaccacctatcagagccgaaggcagaaacttcccctt

SEQ ID NO: 92954 - DNA, 101 bp, Homo sapiens
gcagcctgcccaacttctgcgggatcttcaaccacctcgagcggctgctggacgaagacctcgaagtagggggaaaactgcagtggaagatgaggacagca

SEQ ID NO: 92955 - DNA, 75 bp, Homo sapiens
cgacgtgttgggctatgtgcacccggacctgctgaaagggcagctgtgcggagggtagtggcagccatgaaccgg

SEQ ID NO: 92956 - DNA, 96 bp, Homo sapiens
ttgtaccccactgctggggtggtggttccaatgagacagggcacaccaaactccatctgacgttgccccatctgacgctcggctcgaggcctctct

SEQ ID NO: 92957 - DNA, 97 bp, Homo sapiens
aagagtggagaacggcaacccatccagatcaccatgccgttaatgaaggagttcccccttctgagtatgttcaatatccatgaaaaccttttagaag

SEQ ID NO: 92958 - DNA, 75 bp, Homo sapiens
attttaagtgtggcatacaagaaagaaaagggagatttcattgccctggatcttggtgggtcttcctttcgaatt

SEQ ID NO: 92959 - DNA, 100 bp, Homo sapiens
ggaaacttgcagagaatgaaatcactttgtgtcaaaaagaaataactcagctgaagcatcaggtttctgtcaggatgaattggcagagcttgacccaggc

SEQ ID NO: 92960 - DNA, 75 bp, Homo sapiens
ccttgaaaaagctgccctgagacggtgtcccgccgaaagggaatgcagagagcaaccaatgtcacctaccaagcc

SEQ ID NO: 92961 - DNA, 100 bp, Homo sapiens
ggacgatgtccaaaacaaaaaatggcatcacctgtcaaaaatggagttccacttctccccacagacctagataaagaaatgggggctccgagcagtcaag

SEQ ID NO: 92962 - DNA, 100 bp, Homo sapiens
atctgttgagatctccatccatcaaactgcgcaggagtaaggcaggaaaccgacgagaggacctcagctccaaggatgggaaggccattgtgactatgtg

SEQ ID NO: 92963 - DNA, 100 bp, Homo sapiens
tggatgaggaggagccggagacgccgcggaggagaccggaccgaagacggaccgtgccgggaagagctcgcaaaggatctccttcatccctctccagaag

SEQ ID NO: 92964 - DNA, 74 bp, Homo sapiens
ccttggaacagcataactggaacatagaggtgtcccgacccaggctaagcttgagcatggctgagcaggagccc

SEQ ID NO: 92965 - DNA, 74 bp, Homo sapiens
cgccgccgcgcacaaccgcacgtgcagagcactacaaacaccactggtttcccgaaaagccgtccaagggctcc

SEQ ID NO: 92966 - DNA, 74 bp, Homo sapiens
caagaatgaactggagacagagaataggcattcaaaagtgcggcagaagagtgaggtggacattgttgttagcg

SEQ ID NO: 92967 - DNA, 100 bp, Homo sapiens
aaagccagttgatgccacttgctattggagttgtgggatgtacagttacccagcacgtgtacctcctcctcctcctattgctcgggctgtagtgccctcg

SEQ ID NO: 92968 - DNA, 100 bp, Homo sapiens
cagtgtagtggcgtattccacatagcaaacagattcatgatgttgctatcaaaagttgagaaattgtcagaagaaatcatggagataatgcaaaatttaa

SEQ ID NO: 92969 - DNA, 85 bp, Homo sapiens
ggggcgtagcctcctttctccagaaaggaaccgaggcctgcctggagccccagatcaccccttcctactacaccacttctgacgc

SEQ ID NO: 92970 - DNA, 90 bp, Homo sapiens
agaactttctgcatttgacagataaagatggtgaacaacctcaaatactgctggccaacccatggccagcacagacatgatggaataaag

SEQ ID NO: 92971 - DNA, 75 bp, Homo sapiens
gctctccgccgcctggaccaaccacgtcttcctgggctgcagtgtgaagcctcagtttaggtcatctggtggttc

SEQ ID NO: 92972 - DNA, 74 bp, Homo sapiens
gtagaagcttccactccctcctgcccagatccggccaaggacctcagcaggtgtcatggagaaactccagctgg

SEQ ID NO: 92973 - DNA, 100 bp, Homo sapiens
cggcaaccaaatcggcgccaaggttcatcatgcctagtggcgtataagaagaccccgccaccggtccctccacgcaccacttcaaagccgttcatctcag

SEQ ID NO: 92974 - DNA, 51 bp, Homo sapiens
cctcggggctggcagccctggccaaggtgggcaccaatcttactgacatcg

SEQ ID NO: 92975 - DNA, 82 bp, Homo sapiens
gacaaccagaaagaaagtttatgcaaacctttgttctggctcctgaatgtttgggaaatgggaagtaatgacagctggcacc

SEQ ID NO: 92976 - DNA, 101 bp, Homo sapiens
gattttgatgtggatgatgccaaagttttattagttcaattttgtggggaaattgcttggaccaagaggaaactccttgaagaggctacaggaagaaacag

SEQ ID NO: 92977 - DNA, 100 bp, Homo sapiens
tggactacccgatttttcgcttctcttcagggatgagtcatgtggtggtgaaaaatgaccctgaactggaccagcagattttgtatcagattgtaccatc

SEQ ID NO: 92978 - DNA, 75 bp, Homo sapiens
catcaccactcaaaactgtaatactaaatgtgttaccataccaagctcattcttggaatcccagaacaggcctta

SEQ ID NO: 92979 - DNA, 74 bp, Homo sapiens
ctgatgtcaatcttgagggctagtcgttccccatcaggaagtcctcgcagaagtgcaagtcctgaaagaatgga

SEQ ID NO: 92980 - DNA, 82 bp, Homo sapiens
aagaattctctatttctgctccgtcatccatgccactgggctcttggctttgggcctcagtgcaagtccattggaaaaggca

SEQ ID NO: 92981 - DNA, 74 bp, Homo sapiens
aaattaattgctatcaatgcgaatgatcctgaagcctcaaagtttcatgcctactttggggataaaggattatt

SEQ ID NO: 92982 - DNA, 75 bp, Homo sapiens
cgacattgccgtcgacggcgagcccttgggccgcgtctcctttgagcccgagcaggtcggggagctgtgcttctc

SEQ ID NO: 92983 - DNA, 75 bp, Homo sapiens
cagtccacccaccgccgccgcctcccagaactgctctacatttggcctgtgccagtggccatgtgaaagtggtca

SEQ ID NO: 92984 - DNA, 88 bp, Homo sapiens
ggaatgaattcagatatttccagagaatgaccacaacctcttcagtagaaggtcaaaatgcagatcttcgtgaaaacccttaccggca

SEQ ID NO: 92985 - DNA, 98 bp, Homo sapiens
aacaagcaagcatgcagcttactgcttgaaagttgccttagaagtggtgagatgggaagctgcagttggaagaccctggaggatgcctgacaagggga

SEQ ID NO: 92986 - DNA, 100 bp, Homo sapiens
gacggttcttgttccagtatgacaactatgggtccacagctgaggacattgtggagtggctgaagaagctgagggtaaaaagctgggattggtaggctgg

SEQ ID NO: 92987 - DNA, 115 bp, Homo sapiens
cttcactgacctaccccctggacctggtcagagcgcggatggccgtaaccccgaaggaaatgttggatggcaagcatgtggtgtttggcaaagtgaaagaaggcatgaatattgt

SEQ ID NO: 92988 - DNA, 100 bp, Homo sapiens
ggcatctttggcttcagcgtgtcccgttgtgcccacgtgcctcagggccttggtagaaatggcccgggtagggggtgcctcctccctggagaatactgtg

SEQ ID NO: 92989 - DNA, 100 bp, Homo sapiens
aatggaatcggtttctgagtccagccaacagcagaagagaaagccagttatccacggactggaagatcaaaagagggcttctccagggaaagtgaccgag

SEQ ID NO: 92990 - DNA, 96 bp, Homo sapiens
ctgttgcctatgcgccaaagaaggagctaataaatattaagggaattagtgaagccaaagctgataaaattctgaaactaagaatttggaggatga

SEQ ID NO: 92991 - DNA, 85 bp, Homo sapiens
gcccacctgtgtcctggttgagggtctccagggttctttggggcccgaggagaccaagacacattccaccccagtggggggtccc

SEQ ID NO: 92992 - DNA, 100 bp, Homo sapiens
ttttgaagcaccctaatattgaattttgatttggctgctgggctgctaccttgaaatccaagccctaaaaatgccagcttctttggacttagaagatgac

SEQ ID NO: 92993 - DNA, 83 bp, Homo sapiens
aggaggaattcaccctgttcgtctatgatggcgttcaggaagtggcttatattcactcaaaccagaatgtaattggatcgagc

SEQ ID NO: 92994 - DNA, 95 bp, Homo sapiens
ctgagcgggacctgcgagcagcgcgggcggcagcccgggggaagcgaaaatgatgcatcctgttgccagcagtaatccagctttctgtgggcctg

SEQ ID NO: 92995 - DNA, 75 bp, Homo sapiens
cggagcgggcggctgagacaaaggcgacgggagtgcatccgccccaacccttttccccctcgtctcctgtgagaa

SEQ ID NO: 92996 - DNA, 82 bp, Homo sapiens
atggtacatgagtggctatcatactggctattatatggtcagcttttgccaactgttttcaaatcacatgcatgggggatct

SEQ ID NO: 92997 - DNA, 100 bp, Homo sapiens
gtgggcgatgggcccgtggacatgcgcacctcacacaggtaaattcgaaccaccattatttcacccgaatgtgtacccttcggggacagtgtgcctgtcc

SEQ ID NO: 92998 - DNA, 99 bp, Homo sapiens
ccacagtgcagatcagttgaaaactcaggcagtggatttcatcaactagttttaaaatcaaagatgggaaaatcggagaaaattgcccttccccatggc

SEQ ID NO: 92999 - DNA, 75 bp, Homo sapiens
ctcaccaagtcacatgacaagcagttcctgatgttattagcagcataaggcaattatctaaagcggccatgaaag

SEQ ID NO: 93000 - DNA, 87 bp, Homo sapiens
taaagctgagctgcgaggaaaatggcggcgggagtgagaaagatcagtctaaagaaaaggagaagaaagtgaaaaaaacaattcctt

SEQ ID NO: 93001 - DNA, 76 bp, Homo sapiens
ggtgccggaatctgtctcctgatcatcattcagacatcgataagcaatatcatctcaattgaaactcctaatacag

SEQ ID NO: 93002 - DNA, 100 bp, Homo sapiens
gaagatggcggatctggaggagcagttgtctgatgaagagaaggaagtcaccaaagcagtacagcctctcttactgggaagaatcatagcttcctatgac

SEQ ID NO: 93003 - DNA, 87 bp, Homo sapiens
aacagtctcgttgctgcctctgtgtacgctgaggggggaggtggataattactgtaccttcctcatggaaaaagttttatttaaagt

SEQ ID NO: 93004 - DNA, 96 bp, Homo sapiens
cgccctgcgccccgctctgctgtgggcgctgctggcgctctggctgtgctgcgcgacccccgcgcatgaggtcctgctgtactagccaccaaagca

SEQ ID NO: 93005 - DNA, 125 bp, Homo sapiens
gaggctacaggctcagggtatccaagtatttgatcctggggagtctgattcagatgacaactgtacagatgtcactgaaccttttgatggaacaaatacagccagagcagtgcacgaaaagcaga

SEQ ID NO: 93006 - DNA, 50 bp, Homo sapiens
ggaacggaggccagagctgcggggttgtgtccactgtggtccccgactct

SEQ ID NO: 93007 - DNA, 83 bp, Homo sapiens
caaagaccgaattgaaatctttccctcgcgaatgatggggagggacgcgcggcactgccctcgagaactggcgctccggtgaa

SEQ ID NO: 93008 - DNA, 98 bp, Homo sapiens
tggggtctggctctgccccttttcttcttctgctgggaggttggggtctctgggagctctgcagggttaccatccattgacccatcaggcagctcccc

SEQ ID NO: 93009 - DNA, 75 bp, Homo sapiens
cgggagatcttgcgggaaaaggagagctcggctgttccagccaggatttggagtccaggaatgagactaagcatt

SEQ ID NO: 93010 - DNA, 100 bp, Homo sapiens
ctagtcccattctccaccaagtctggggataccttactgctcctgcaccacggggacttctcagcagagaacatggacttcccgtgcctctggctagggc

SEQ ID NO: 93011 - DNA, 90 bp, Homo sapiens
gtcggtacgagaagatcgagatcatgccagagggaacatttacggatgagaagtcaaaagcttcccaccacatttacccatattcttcct

SEQ ID NO: 93012 - DNA, 50 bp, Homo sapiens
gcagtctgctggatcacagagagaaatggtggagtcaatgaagaaagtag

SEQ ID NO: 93013 - DNA, 82 bp, Homo sapiens
cgtccgtccgccgccaccacccactccggacacaggacaggaagatgtcacccaagcgcatagctaaaagaaggtccccccc

SEQ ID NO: 93014 - DNA, 74 bp, Homo sapiens
cagaaagcaatgataattcccaggacagtcagtctggtactaacaatgcagagctccttaataagcatttatag

SEQ ID NO: 93015 - DNA, 83 bp, Homo sapiens
ggacaatggtcaccgtctcttcagcagcctcccgcgacgatgcccctcaacgttagcttcaccaacaggaactatgacctcga

SEQ ID NO: 93016 - DNA, 50 bp, Homo sapiens
gcgagtgggactggatggagttcgttgccatctgcacgaggtcagagctg

SEQ ID NO: 93017 - DNA, 75 bp, Homo sapiens
gaattatgggaacgtggtctcactggttcctgtgccttaagaacattagaaccttcctgtccacctgctgtgaga

SEQ ID NO: 93018 - DNA, 98 bp, Homo sapiens
gcctcggtgccacccagccgggggtagatgctgcctcgcccaggtgtcatggagaaactccagctgggcccagagattctgcagcgggaaaatccaag

SEQ ID NO: 93019 - DNA, 90 bp, Homo sapiens
atgtgggacatacaagcgttggatatagaggtgatggttgctgaagccttggatatttccagagaaacctacctggcaattctgatggac

SEQ ID NO: 93020 - DNA, 82 bp, Homo sapiens
cggcctatcgctaccctccgaagtccggatctggtgaagaatcatctgatgtatgctgtgagagaggaggtggagatcctga

SEQ ID NO: 93021 - DNA, 100 bp, Homo sapiens
cgtagcggtggcggaggaggcgggcagagatcctacaagaatccaggatgatgatcccagattgccagcgcaggttggaagccgcatatttggatcttca

SEQ ID NO: 93022 - DNA, 101 bp, Homo sapiens
tggtgccgggggtcgctggctctgctgctgccgccggcgaaggaggaggcgttgccggattgataggcagcagtttgaagaaacagttcgaactctaaata

SEQ ID NO: 93023 - DNA, 99 bp, Homo sapiens
agctggagcaagggaccgagctatgggtggctgagagaggaaccacccagggctgccatccagactggtcttctgaggacctctgccctctacacagcg

SEQ ID NO: 93024 - DNA, 88 bp, Homo sapiens
ctgaagctcatcatgaccttccagaattacgggcaagcgctgttcaaacccatgaagcacattcaggaccccgcgagccagcggctga

SEQ ID NO: 93025 - DNA, 97 bp, Homo sapiens
agattgaaatgatcatgacggaccttgaaagggcaaaccagattctgctcagcaatcctcagatgtggtggttaaatgattccaatcctgaaaccga

SEQ ID NO: 93026 - DNA, 50 bp, Homo sapiens
cggagtttgacgaagaggtggtttttgagatactattcgttacttgtcct

SEQ ID NO: 93027 - DNA, 98 bp, Homo sapiens
cttgaccctggggaccttcctcgtgggagctgcgctggccgctggcctactctggaagttcagaacaggagtacagctgtgtagtaaagatgccttct

SEQ ID NO: 93028 - DNA, 100 bp, Homo sapiens
ctgagaaaggtccctccacactcctggaactgtacacctattggaacccttaaggtgctggagaatctggtaaaagcaccattgtgaagcagatgaggat

SEQ ID NO: 93029 - DNA, 75 bp, Homo sapiens
gcaacgagcacaacaggagctacgaggagttgaatgattacggacctgaagccaaagaacaagatgcgctagtgg

SEQ ID NO: 93030 - DNA, 109 bp, Homo sapiens
gtttatctcaaggcctgagtagccggtaacaaacgagggttcccgggattggaccgacgcagccatgtcttcccaagggattgttgaagaaacttctgaagagggaaac

SEQ ID NO: 93031 - DNA, 118 bp, Homo sapiens
gccccagttatgtggaatgggcacagagcaaggctgctggattccagtatccagtgataagggctcctgtccccagatgtcttatgtctccagaaaattcagatccacaattccactt

SEQ ID NO: 93032 - DNA, 75 bp, Homo sapiens
cgaggggtgaagcggcccaggtgagggctggcgcccatgcggctctacacgctctccaagcgccactttgtcctc

SEQ ID NO: 93033 - DNA, 87 bp, Homo sapiens
ggttattgtaatgatgttgatcgggagttgagaaaatgcctgaagaatgagctctattatcaagtcctaaattttggaatgattgtc

SEQ ID NO: 93034 - DNA, 100 bp, Homo sapiens
gaatgtggtcgacgagaagccccaacagcacggcgtggcctctcagcctcggcacgtctgagaatggtggatgtggtggagaaagaagatgtgaatgaag

SEQ ID NO: 93035 - DNA, 82 bp, Homo sapiens
caaaaccacaaacttgcctacgtcagtaacagccaccaagccatgaatgacctggtgcagtccatggtcctagcaggacagt

SEQ ID NO: 93036 - DNA, 100 bp, Homo sapiens
ctcctatgagctcctctctggcagaccatcatcaaagaggggatgctgaccaaacagaacaattcattccagcgatcaaaaaggagatactttaagcttc

SEQ ID NO: 93037 - DNA, 82 bp, Homo sapiens
ccgctctccagcccgcttgaacgccgattatgtttcgaggggaagtacgtttaaatgtggaagagaaaaaaacaagagctgc

SEQ ID NO: 93038 - DNA, 100 bp, Homo sapiens
ggccgagcgggcggcttcctggcctgggcgctccggtggcggcggaggatcccatgacagattctgttgtcacgtctccttacagagtttgagcggtgct

SEQ ID NO: 93039 - DNA, 82 bp, Homo sapiens
agctttcctaggccaaaaagaggagcagtatagcatcaagttctagaggaattgggagccattgcaaatctgagggtcagga

SEQ ID NO: 93040 - DNA, 73 bp, Homo sapiens
agaaccacattttgggtttgaagaatcttctacatgagagaactcgatgccaccgcaacggtattggcgaacc

SEQ ID NO: 93041 - DNA, 75 bp, Homo sapiens
attgacatttaattttagggtcctttatatagaagggagagtagggtgtactctgtgtgaccgcgcctatccctc

SEQ ID NO: 93042 - DNA, 100 bp, Homo sapiens
gtacctttcagctgcgccggccgcgaggccacggagagctcgccttggagagcccaggagcaggggagacatgatggagacctcacagacacggtcagtg

SEQ ID NO: 93043 - DNA, 75 bp, Homo sapiens
ccagcgcagccagagctgggatgacagctgcggcttgatgagacccaggaggcagagttccaggcccttcggcag

SEQ ID NO: 93044 - DNA, 100 bp, Homo sapiens
ctaccgctatgcccggagcctggaggagctgctgctggacgccaaccagctccgcgagctgcccgagagcatcctggccagaacaagccaaggagccaag

SEQ ID NO: 93045 - DNA, 83 bp, Homo sapiens
agctctaggattgggggtgctgcccggaaacgtctgtgggaaagtctgtgtgcggctccgggctcgagtgccctgtgtgcaag

SEQ ID NO: 93046 - DNA, 96 bp, Homo sapiens
agcgagatgcggagtgagctactaggcacgcaatttgagaactggcgagagaaccagccggacaatttcttcgcgggtggcgaggactgtgtggtg

SEQ ID NO: 93047 - DNA, 100 bp, Homo sapiens
gttgtgccagcgactaaaaagaggacagctgggaagtggtggaaggactgaggggggagatgaattacacccaggagccaccagttcagaaaggattttt

SEQ ID NO: 93048 - DNA, 98 bp, Homo sapiens
aagaaggttaagctggctgtcctgaaatattataaggtggggaaggagaagggtcgtctctgagcacggagcaggctggtcctgccttgacccagccc

SEQ ID NO: 93049 - DNA, 96 bp, Homo sapiens
gcgacaagccgctggcagccgcggatctcaccgccgctcaggacttcccaagtaagaagcggaagaggagccgctggaaccaagacacaatggaac

SEQ ID NO: 93050 - DNA, 101 bp, Homo sapiens
acccaggaaagggacatctgctcctccaaggcagagcggctcccccctttcgttaccttccacgctgtatgtccgtgagaaatacaatgaagacggtctga

SEQ ID NO: 93051 - DNA, 73 bp, Homo sapiens
cgtccgccgcccgccggatcccccggaccccccgaccgtgagccaccagctgggcagcatcatggacctcttc

SEQ ID NO: 93052 - DNA, 100 bp, Homo sapiens
ctcggctcctgtcgtccgttctctcaggctcccgttcaggtgattttacaacgagatgctgctctccatagggatgctcatgctgtcagccacacaagtc

SEQ ID NO: 93053 - DNA, 75 bp, Homo sapiens
caagaagagcggcgtctacgaaaggccctgctggagaagtgaagttattgccagtggactgtgagagaaaaacag

SEQ ID NO: 93054 - DNA, 83 bp, Homo sapiens
cgaacttttgacacggctttggaaacgacgtcatgtgttaggatattagaaatggctactccccagtcaattttcatctttgc

SEQ ID NO: 93055 - DNA, 83 bp, Homo sapiens
cgagattcaagattatttgcaacagctcacgggagcaagaacgaatccacattcatctcaatggaaggatcctgccttaagtc

SEQ ID NO: 93056 - DNA, 99 bp, Homo sapiens
aacatggtaacacttaaaatggtactcggggacctccaaagactaaactgacaagccttcaaggagcccagggggaacgtgtgaaagaagaattgtggg

SEQ ID NO: 93057 - DNA, 75 bp, Homo sapiens
ggaactagtcggacaaagccctcgcgtcggacccttgccagaactgttagaaaacgaaaagctgcttgagagcaa

SEQ ID NO: 93058 - DNA, 100 bp, Homo sapiens
tttggaggggtgcaagaacttttaaatcaaccattgcagtgtcgagatggctatgaaccctgtgtaaatgaaggaatgtgtgttacctaccacaatggca

SEQ ID NO: 93059 - DNA, 100 bp, Homo sapiens
aattaaagggagattacacagaagcaaaagccttgatagcatggatttctgtgagctcactgaagagagaagggcacagttacctaagtatcaacgtaat

SEQ ID NO: 93060 - DNA, 100 bp, Homo sapiens
cgcacccgccttttctctctctcctctggcaggatgaggcgtgcaggcctggtggatggaactgaggttcaacactctggcaaaatgcccacactgcaaa

SEQ ID NO: 93061 - DNA, 75 bp, Homo sapiens
ggtatccggaggattgtggctgtcacaggtgccgaggcccagaagaaaccagggtggttatgaccgctactcagg

SEQ ID NO: 93062 - DNA, 101 bp, Homo sapiens
ccaatgcgacttaccactgcaaaaaggatatgggccctcacattttccaaacctgtccatctgctaactattttgactgcagagccatgtccattggagcc

SEQ ID NO: 93063 - DNA, 98 bp, Homo sapiens
caagtacaccattacaccagtgaagatgaggaagtctgggggccgagaccacacagtcttgctggaatgagtacctgacaactcggatcgagcagaac

SEQ ID NO: 93064 - DNA, 51 bp, Homo sapiens
cttcacgttcactgaaggcgataaggacatccataaaaattcatcagagag

SEQ ID NO: 93065 - DNA, 85 bp, Homo sapiens
gtcaggtacctcaaagcgtaaatatgtgtcacaaagatgtctacacggaactgccagggaatggactcagtgatcaaacccctgg

SEQ ID NO: 93066 - DNA, 100 bp, Homo sapiens
actgctatgaagactgagaattgtgtggccaaaggccgttgctccagggagaactgcaaatatcttcatccacccccacatttaaaaacgcagttggaga

SEQ ID NO: 93067 - DNA, 74 bp, Homo sapiens
agcgcagtacgtttctccagagctgctcacggagaagtccgcctgtaagagcaattctgtggtgttcttggtca

SEQ ID NO: 93068 - DNA, 83 bp, Homo sapiens
cagaacctttgacttggtgttgaaagtgaaatgtcatgcctctgaaaatgaaggaggagttggatttgtcttctagttctcag

SEQ ID NO: 93069 - DNA, 74 bp, Homo sapiens
aaagattcagagttggataagcacttggaatcacgggttgaagtgaaatcaaatacattgcccatctcgctgca

SEQ ID NO: 93070 - DNA, 75 bp, Homo sapiens
tgaaacctgcatttgattaagcaagaattcgcttgcaagttaaggatttccacaagacggcaccctatgtcgtca

SEQ ID NO: 93071 - DNA, 88 bp, Homo sapiens
ccgggggaggcgacgctaagttgctgatcgtggcgatgtgaagttcatttccaatccgccctccatggtggcagcggggagcgtggtg

SEQ ID NO: 93072 - DNA, 147 bp, Homo sapiens
ccggtggcggcggtggccggggagcccatggcgtacagtcaaggaggcggcaaaaaaaaagtctgctactactacgacgagctccctctttgcccactagcagggcattagctggtgctgaagacagtggctgcttggcgagcctgg

SEQ ID NO: 93073 - DNA, 75 bp, Homo sapiens
cgtcagacggcagtggtggaaaagatccatgccaagtattgtccttgtgaacttccttgaagatggcagcatgtc

SEQ ID NO: 93074 - DNA, 98 bp, Homo sapiens
cggagctctgatcgccgggaacccttgccgctgctgtcctgcgaccccaagcagcatccagcacgtgtatggtgcccagcaccccccctttgatccac

SEQ ID NO: 93075 - DNA, 100 bp, Homo sapiens
gatgaagaaacccagcttgatatgttgctgtcaaagctcgaaaaacagcagcagaggaaagaaaagaccagagctaagggaccttctgaatcaagcaagg

SEQ ID NO: 93076 - DNA, 100 bp, Homo sapiens
aagcagagacaccaggacagaaaagacagtgttctgctttcatggagttcacagaagagtcgaggaggtgtgatgaatgcagactctgctaccattttgg

SEQ ID NO: 93077 - DNA, 75 bp, Homo sapiens
ttccagggcaagaacctggacaccgtgaaggatgccctcaccgtggtggtggatgacctccgcctgtgctctgtg

SEQ ID NO: 93078 - DNA, 83 bp, Homo sapiens
ctccggccaggacgctgggagctgcctgcgggaaggtgcggggagcggagccatggcctccgatggtgggcagtggtggtgct

SEQ ID NO: 93079 - DNA, 75 bp, Homo sapiens
ctgcgagcagcgctactgcgccgtgtgccgcgaggagctgcgccagatggcggctcagcggcagcgggcgctggc

SEQ ID NO: 93080 - DNA, 111 bp, Homo sapiens
gtggatggcgtggagatatggcgcaactgcggcgcgttctggcctataggaacaagacattttcagtaatggaagaaggagcttccaggctggggaagatcatcatttcca

SEQ ID NO: 93081 - DNA, 100 bp, Homo sapiens
tccactgttcctggaggaatccgagaagagcagagcggagggagccccagacacgggctacaataaggcagtggattggtgggcattaggagtgctaatc

SEQ ID NO: 93082 - DNA, 100 bp, Homo sapiens
cgcgagcgtctgggcgggtggtagtctatccagaagttaaaggagagattgctcgtaaagatgaaaagctgctgtcgtttctaaaagatgtgtatgttga

SEQ ID NO: 93083 - DNA, 76 bp, Homo sapiens
agagacggctactatgaagcagaatttggacaagaacgcagacctttgttgtatgatctcgtgaaaccttgagaga

SEQ ID NO: 93084 - DNA, 75 bp, Homo sapiens
gcggaggacactcctgcgaccagggcgggcaggtccggacgcgctgggccctggtcccttcggccgcaaacggcg

SEQ ID NO: 93085 - DNA, 93 bp, Homo sapiens
atgttgtcaaggtggcctaccaggaggccaggggtgtcgccatggtggacccaagtggagagattgtggaactggcgaaaggtgcatgtccct

SEQ ID NO: 93086 - DNA, 100 bp, Homo sapiens
actggataagaaatcaaaaatctggtgaaattgccggcaagagggagttaaggacattccaggcagaggcaagctaaaccatttacttctaaagtgaaac

SEQ ID NO: 93087 - DNA, 100 bp, Homo sapiens
ctgggcgcagctggtgtcatcctctggggtgacgcggggtacaccacaagcacgtttttcagttatgggacaaaaatattatatcaaaacactgaagctt

SEQ ID NO: 93088 - DNA, 100 bp, Homo sapiens
tttcacgttttaatgccgagaggtctctgtgacgattttgagagagtctacagggagattgaacaggtgattggcccacatcgccctccagagcttcatg

SEQ ID NO: 93089 - DNA, 75 bp, Homo sapiens
ggggtcccgaagccccctgcaggaactctacaacccaatccagccgctgtacaaccagccctccgacacccggca

SEQ ID NO: 93090 - DNA, 46 bp, Homo sapiens
tttcaactcttatactctcacagtgtcacatttgaagacgagcact

SEQ ID NO: 93091 - DNA, 90 bp, Homo sapiens
ctgttttggaactgtcaggtacctcaaagccaaattgctatcactgctgggtgcaaaaccaccacctctgctgtcatggttcactgcctg

SEQ ID NO: 93092 - DNA, 100 bp, Homo sapiens
atacaccgagagagtgaggagccagacgacaagcacacactatggcgctgaaacggattaataaggtgagagtccatacatggagctccctggagcccgt

SEQ ID NO: 93093 - DNA, 75 bp, Homo sapiens
ggggtatataacatcaaattttaaggggccagagcatatgcagtcgacaagttggatggcttgaggactggtact

SEQ ID NO: 93094 - DNA, 100 bp, Homo sapiens
gccttagctgtgctcgcgctactctctctttctggcctggaggctatccagcattgcctgtttggtacctgtggaccagtttcaactttatcagaggtta

SEQ ID NO: 93095 - DNA, 75 bp, Homo sapiens
ggacggcacctccttcgacaccaggatgtgaacctgaagatgccccggaacaaccagctgctgcacttcgccttc

SEQ ID NO: 93096 - DNA, 96 bp, Homo sapiens
cattaccatgcctacagagttgcaacaatgactatgtgcctgtgtgtggctccaatggggagagctaccagaatgagtgttacctgcgacaggctg

SEQ ID NO: 93097 - DNA, 82 bp, Homo sapiens
gggctgtttggaaagacccaggagaagccgcccaaagaactgcttcgagagctgtgcccaggagtgaacaaccagccctacc

SEQ ID NO: 93098 - DNA, 100 bp, Homo sapiens
cctgagctgaaatggcagacgatctcggagacgagtggtgggagaaccagccgactggagcaggcagcagcccaggtgaaatgacaatggatgctctgtt

SEQ ID NO: 93099 - DNA, 83 bp, Homo sapiens
ctagcttcaccttcacgatgtttcccttggtcaaaagcgcactaaatcgtctccaaggtcctcgaggccacacgggttaatcg

SEQ ID NO: 93100 - DNA, 74 bp, Homo sapiens
gctgccttgttaccagctggagcttgacgcagaaggacagaataacgggctcccagattcacaagccccaccaa

SEQ ID NO: 93101 - DNA, 100 bp, Homo sapiens
acagatctcagccccgggctcccagctgcccacctcataggtgctggagaatctggtaaaagcaccattgtgaagcagatgaggatcctgcatgttaatg

SEQ ID NO: 93102 - DNA, 74 bp, Homo sapiens
agcaagactaacaccttacttcctccccagcccccacctattcctgcagctaactgccttctatgaaagcagtc

SEQ ID NO: 93103 - DNA, 110 bp, Homo sapiens
gtccagaagcttcaggaaaaaatttattttgcacttcaacatgtgattcagaagaatcacctggatgatgagaccttggcaaagcagaaaaatatggctcaggagactaa

SEQ ID NO: 93104 - DNA, 100 bp, Homo sapiens
gtcattactgtgacggctatcaaacagttgacgccagagggaggcatcaaaaaaagattcggagcaaaactcagaattacctcaacgtgtatgcggcgga

SEQ ID NO: 93105 - DNA, 80 bp, Homo sapiens
ccttaataaccagcggagctgacacagccaaaccatcatcaaagaggggatgctgaccaaacagaacaattcattccagc

SEQ ID NO: 93106 - DNA, 100 bp, Homo sapiens
gtcagggtcaagtcgtgttctgatcactactgacttgttggtaccacttaatgggcaagtttatgaacttttaactgtcttcatggactggatttcggat

SEQ ID NO: 93107 - DNA, 50 bp, Homo sapiens
cagacaccagccccccaccatggtccagccctgctgggagttttctgcca

SEQ ID NO: 93108 - DNA, 90 bp, Homo sapiens
gaagtgaagaatggcattccttctaacagaattattttgggagggttttctcaggaggagatgttaaagtaacccatcttgcaggacgac

SEQ ID NO: 93109 - DNA, 75 bp, Homo sapiens
ccgcacctcaagcaggtggtcaggcagatgatccaacaggcccagaaggtggagtgcaactcaaaattggaccca

SEQ ID NO: 93110 - DNA, 73 bp, Homo sapiens
agattgtgaagaagaatttcgatctccgccctggggtcattgtcaggttcatctacgagacggagcatcacaa

SEQ ID NO: 93111 - DNA, 51 bp, Homo sapiens
cacgaggagcctgaaatatggaaaaagatgaggtctcactgtgttgcccag

SEQ ID NO: 93112 - DNA, 100 bp, Homo sapiens
ctgggtgtgcgacgggtaccgagattgtgcagatggctctgacgaggaagcctgccccttgcttgaggacaagaattttgggcagatttgaatgccatga

SEQ ID NO: 93113 - DNA, 90 bp, Homo sapiens
ggtctcaaggcaagcctattgagttaacacctctgccgctgctaaaaggaggcaagtgaggcctatctggttggcctttttgaagacacc

SEQ ID NO: 93114 - DNA, 100 bp, Homo sapiens
catctggattgtagccataagtggacttattttggctgaagagctgtgtactcctccagatcctggtgctgcttttgtggtggtagaatgtccagatgaa

SEQ ID NO: 93115 - DNA, 76 bp, Homo sapiens
gtacttcaccaagattgccaccaggtgctgcaacatggtctggaactctgagtcatagcgtcggttgatgtcgtcc

SEQ ID NO: 93116 - DNA, 74 bp, Homo sapiens
ttgaagtgtcaaaatccatagatggaaaagatggccagctgcgggccgtccagcggctgtgccacttctacagc

SEQ ID NO: 93117 - DNA, 50 bp, Homo sapiens
ccaaagtttgcagaaaagaatatgaggaaatgacttgcagttgagtgagt

SEQ ID NO: 93118 - DNA, 75 bp, Homo sapiens
ggacgacgacgacgaggaagaggaggtttctgaggaacttacaatgtctcagaaaaatggtgggaatgttcttca

SEQ ID NO: 93119 - DNA, 75 bp, Homo sapiens
cgcgagccccgcactctctcgatgagtcggagaagtcccagccaaggattgtcaccagtgaagaggtcattattc

SEQ ID NO: 93120 - DNA, 75 bp, Homo sapiens
ggatcccagcctcaggcgtgcgcggacggtgtgcggaaagtggtaaaatagctgtggagtgcagacccagtgaag

SEQ ID NO: 93121 - DNA, 82 bp, Homo sapiens
agattcgcagtggtcgcttcttctccttgtgaaattggagcgatttgaaattccaatcaaggttcgattaagcccagagcca

SEQ ID NO: 93122 - DNA, 87 bp, Homo sapiens
cgagagcgcgaatatcgtcatcgttagaagacgcatcttctctccagactgccgatcccagaaagccaggtgatcaccattaacccc

SEQ ID NO: 93123 - DNA, 98 bp, Homo sapiens
agattcgcagtggtcgcttcttctccttgactgacattgagattacacgagaggaggacttcacccgaattctccagatggaggaagagtacatccag

SEQ ID NO: 93124 - DNA, 50 bp, Homo sapiens
ggcctcactcaaacagtaaacgaggtgctggagaatctggtaaaagcacc

SEQ ID NO: 93125 - DNA, 75 bp, Homo sapiens
tcgagagcaccgacaccgcctgtgtggggcccaccctccggtttttggattcaaagcataaaaaccattacaaga

SEQ ID NO: 93126 - DNA, 83 bp, Homo sapiens
ccgaaacgcaggccaactcgaccacagaccctctttcccagctgcccgctcctcagcacccgaagattcgcctgtacaacgca

SEQ ID NO: 93127 - DNA, 82 bp, Homo sapiens
gtcatccagaaaatcggcgacctcctggttcagcagcttccaattgtggacaagataaggaccattgcccaggctgtctatg

SEQ ID NO: 93128 - DNA, 100 bp, Homo sapiens
cgcaagcatgcccaccactgccacaaacgccgcaccaggtcttgtagcagcgcctcctcgagaactattgtcgagtgatgcgatgaaagaatataacagg

SEQ ID NO: 93129 - DNA, 100 bp, Homo sapiens
cccgcttcctgatcctgcctcagcttctcctctccacagctcagagagtggcaacagtgtgaaaagactgaaaccggaccctgagccagatgacaagaat

SEQ ID NO: 93130 - DNA, 50 bp, Homo sapiens
tgacccggtgcagctagaagtccatatcgtgaatgaagaatggctggaag

SEQ ID NO: 93131 - DNA, 96 bp, Homo sapiens
tgggaagaaagaaaacctaaagtatttgccgttggtgattcaagggctgttcgctgctacgaatctttaatcttaaaagctgaaggaaaagtggag

SEQ ID NO: 93132 - DNA, 87 bp, Homo sapiens
ggagtctgtcaaagagaaagtaacaagaatcattcttgcagcatttcgtgttccagcaacagatagaaatgctttaagttcactctg

SEQ ID NO: 93133 - DNA, 90 bp, Homo sapiens
gggtgcagactatatggactgcttatatagcttggaactgcagttggctttttgctaccaccagttttagtacccaacacacagaatgac

SEQ ID NO: 93134 - DNA, 100 bp, Homo sapiens
cagaaactggacagtaagaaacttctagacctcctgccccccgaggtctgcagtctcctgaacccagcagccatctacgccaacaacgagatcagcctgc

SEQ ID NO: 93135 - DNA, 97 bp, Homo sapiens
ggaccctcattgaggaagcccactgaccagatccattgacaagtagagctcaggtgtcatggagaaactccagctgggcccagagattctgcagcgg

SEQ ID NO: 93136 - DNA, 99 bp, Homo sapiens
tggtagaaactgggtttctccatgttggccagagaactttactgaatatttgatggtggatgaagaagcacatgaatttgttgcagaactgaaggaacc

SEQ ID NO: 93137 - DNA, 100 bp, Homo sapiens
tggcaaggatactagagggaactactcgagtaggcgaggtcagactacataccgaataggagtccttccaaaaatggccatgatccaaaggaaccagagc

SEQ ID NO: 93138 - DNA, 97 bp, Homo sapiens
gtgttaatcattgtcacctaaatggcatagttcacagggacctgaagagctgttccctgtgctgcagaaacgcctgtgccacccctgctgggaggtg

SEQ ID NO: 93139 - DNA, 100 bp, Homo sapiens
gcaaccccagatccatttacactttacagttctcttgctgcaaatggccctaccaccttggttgataaagtttcaaatcccaaaactaatggggacagtc

SEQ ID NO: 93140 - DNA, 74 bp, Homo sapiens
gggacaccgtgggctgcgtgtgggacgggtttagcggcagcctcttcggttgcagagcctgaggcctgtgatca

SEQ ID NO: 93141 - DNA, 100 bp, Homo sapiens
ccttcagacagagccaaggtgcagggcaacacctctacaaggatctgcagccatttatattgcttaggctactggtgctcctgacctctgataaagctgc

SEQ ID NO: 93142 - DNA, 75 bp, Homo sapiens
ttcagtaacacacctggaacaggaacccagcaacaattcttctgccagattactcttgtctctgctgctcctggg

SEQ ID NO: 93143 - DNA, 76 bp, Homo sapiens
caaggtgaacgggcggcccctggagatgattgagccgcgcacgctacagtacaagatgcagaggccaggatgtggg

SEQ ID NO: 93144 - DNA, 111 bp, Homo sapiens
ccgtgaccgagagcgtgaccgagagcgcgaatatcgtcatcgttagaaggtgacttaagagattaaaattaatttggttgctgttggttctgaacaaataatgagttcttt

SEQ ID NO: 93145 - DNA, 75 bp, Homo sapiens
gggaaatgggaatgtacacgataattaaagagtaaagttgtgctcaacggagccatgtggctagaaatcctcctc

SEQ ID NO: 93146 - DNA, 100 bp, Homo sapiens
agctcgcctgcatctactcggccctcattctgcacgacgatgaggtgacagtcacggtggagcagttctggaggttttatagccacatggtacgtcctgg

SEQ ID NO: 93147 - DNA, 101 bp, Homo sapiens
cagcgatgaacagaaaattaagcctgtgactgaaaatttagtgctgtcttcacatactggattttgccaatcttcagggccgcgatgggcctcttggaaca

SEQ ID NO: 93148 - DNA, 90 bp, Homo sapiens
tactgctatgaagcatcccttccacatcaggtgaccatcttggtgctgcagggccggctggatgaggcccgacagatgctctccaaggaa

SEQ ID NO: 93149 - DNA, 82 bp, Homo sapiens
cctcggcactaggcagcggaggagcccgaccgacccggaacccaagacagaccaggatgaggagcattgccggaaagtcaac

SEQ ID NO: 93150 - DNA, 98 bp, Homo sapiens
tttcaaccatctttggcgaggccttgcttccttccactcgactcggaatacctggccatcacctctgaaagcaaagagaactgcacgggcgtccaggt

SEQ ID NO: 93151 - DNA, 100 bp, Homo sapiens
ccgacgcaaaccaaggatctggggatcttcgcactatcccaaggcatgaacaaccgggaggtgctggagcaggtggagcgaggctacaggatgccctgcc

SEQ ID NO: 93152 - DNA, 78 bp, Homo sapiens
cagtggtcgcttcttctccttgctagagttgggaagacatcactgattatgtctctggtcagtgaagaatttccagaa

SEQ ID NO: 93153 - DNA, 100 bp, Homo sapiens
cagattaagcgtcagcttcctgttttatagttactccacaggatccgctgaacataggatgttgccacaaaatctacctcgtgtatttttctctttcact

SEQ ID NO: 93154 - DNA, 100 bp, Homo sapiens
tgagttcgggggtcggcggaagatggcggccggcgaaaggagctggtgcctgtgcaagttgttgagggcttgtcaatgaggcagatcagattcaggttcg

SEQ ID NO: 93155 - DNA, 100 bp, Homo sapiens
ggggagcggggccttccacaccccctccgtgggtgtgtgtacctggagtagaacagaaaaattattatgtctgtgttcccttgggactcattggaaattg

SEQ ID NO: 93156 - DNA, 98 bp, Homo sapiens
gcggatccccaagcccgccacgccgcccagcccggccccgcccgcgccggaagagccacgccggacaggaagatgtcacccaagcgcatagctaaaag

SEQ ID NO: 93157 - DNA, 74 bp, Homo sapiens
cggcaagaagatcggctgcggcaacttcggggagctccgcctaggttcgatacaagaggctgttttcctagcgt

SEQ ID NO: 93158 - DNA, 100 bp, Homo sapiens
ttacacgggatgcttgtgccctcctggggctctccgtggagtcccctctcagtgtcagattcccgacagttaagcaatggggagacatttggctttgctc

SEQ ID NO: 93159 - DNA, 74 bp, Homo sapiens
atccaacaagatcccccgtctgaggactgacctttttccgtccttattccttaaatggatacagagtgagagta

SEQ ID NO: 93160 - DNA, 99 bp, Homo sapiens
cggtgtcggagcagctcagccaggatttgctcaggtgtgaagatgccttaagaaaaaataagagcttaattgggccggatcaaaaggagtatcaaaggg

SEQ ID NO: 93161 - DNA, 74 bp, Homo sapiens
gtgtcatcacagcctacacaaacagatttacaagcagcacgccgcagggccgtaggcagccatggcgcccagcc

SEQ ID NO: 93162 - DNA, 97 bp, Homo sapiens
cgcctggtgctcaagactttctccgaggtattgttgcagcatctggcagtgagactgaggatgaggacagcatggacattcccttggacctttcttc

SEQ ID NO: 93163 - DNA, 82 bp, Homo sapiens
cttgggacccaccgctgccctcagctccgagtccagggcgagggccttgggtgtctccgtgactgactacacgttcgaggac

SEQ ID NO: 93164 - DNA, 95 bp, Homo sapiens
cgttggtgcatgaaagtcttctaaccattccaaaatctctttcagatatccttggaacagaagatcttattgtggaagtgacttccaatgatgct

SEQ ID NO: 93165 - DNA, 100 bp, Homo sapiens
atcccgtcctttcgctatgaagagagcgacctggagcggggatacacggtatgaggatacatgggctgcacttcacagaagagccaaagactgtgcaagt

SEQ ID NO: 93166 - DNA, 98 bp, Homo sapiens
acctactgtggggccgcggccggaccgagcgcctcgacctcggtctgaggcagccgggattgcttaccacctgcagcgtgctttcggaggcggcggct

SEQ ID NO: 93167 - DNA, 76 bp, Homo sapiens
aaggtgcgcggagggactgcaccttctccatcaggtgcagaaggttttgcgtgtgaagctgtgtggaaatgtgaaa

SEQ ID NO: 93168 - DNA, 100 bp, Homo sapiens
gcctcgtcaaccagcagagcttccaggacatcaagcccatgcgggaccagatcatccgcgtgaagcggtgcatggaggactgcaacagaggagtggggga

SEQ ID NO: 93169 - DNA, 74 bp, Homo sapiens
tgctcctgcggctgtatggagcgattttgcagatgatggatggaatacccatgtcaatgaagaatgaaatgccc

SEQ ID NO: 93170 - DNA, 92 bp, Homo sapiens
accgcggacgcccgctgagcttggcgcacgggccgaccaggtgcccgtggttgacacgagctgtgtccccagctgttcccgtctacaatggc

SEQ ID NO: 93171 - DNA, 100 bp, Homo sapiens
gacactacatcaaggactgcccccagttctggacttcagtgaccccttcagcactgaagtgaagccgagaatcctgctcatgggcctgaggagaagcggc

SEQ ID NO: 93172 - DNA, 90 bp, Homo sapiens
ctgagacaaccacttctggtggttgccactcacctgaggatagtacagttgtgaatttggctccgcgaagtattatgcactgtgtggctt

SEQ ID NO: 93173 - DNA, 82 bp, Homo sapiens
agagcaggacagcggcccggaggacctgcctctcgtcaggattttttatcaagcagaaatgcatcgaacaacgagaatcaag

SEQ ID NO: 93174 - DNA, 90 bp, Homo sapiens
ctgccctgctggcttccgctcccgagggcccggggccccctgccaagatgtggaagatgtgaaatttgtcatcaattatgactaccctaa

SEQ ID NO: 93175 - DNA, 100 bp, Homo sapiens
tttttttgtattgtggaaggcctccggcacaattcagttcaactgcaacccaaagagtcgattgatccaattaaagaaagagaagctggagtatactcca

SEQ ID NO: 93176 - DNA, 75 bp, Homo sapiens
cggagctgcccgcgccatgtccgcgcacaatcggggcaccgagctcggttcagtaccttgaaatagttccagaaa

SEQ ID NO: 93177 - DNA, 74 bp, Homo sapiens
cgggatcgacgcggacagcgggctggagcctgacgagctggcggattcctgacattcagacaactgacttgtaa

SEQ ID NO: 93178 - DNA, 97 bp, Homo sapiens
ctctcgcagtcggagaggcggctaaggaaaggtgccacagcagagacgcgaaggagaggccctagaaccctcagaccatgaccgacttcataccttg

SEQ ID NO: 93179 - DNA, 98 bp, Homo sapiens
ctcatggtgaacatgtaggttttagaattttcatggatgccatactactttctttgactagaaaggctggattctagtgacatttataacgaattgaa

SEQ ID NO: 93180 - DNA, 100 bp, Homo sapiens
atgaatattatcaggtggtctattattatacagtcacccccagttatgctcccagttgaggataaaatcaggatcattgcacagaagatctatggagcag

SEQ ID NO: 93181 - DNA, 95 bp, Homo sapiens
agctattagagattgtgaagaagaatttcgatctccgccctggggtcattgtcagcatccggtgaaagacagagatcacatttcaactagattct

SEQ ID NO: 93182 - DNA, 100 bp, Homo sapiens
ccggccaccagcaattgtccggttggacaattaaagatactgctgaaatcagtgcttgaccaatggagtagtcacaaagtggcctttgacaagataaaca

SEQ ID NO: 93183 - DNA, 50 bp, Homo sapiens
gcgtccctgatccagaaggtgaacccgagcaacttcccgagaagagaaga

SEQ ID NO: 93184 - DNA, 90 bp, Homo sapiens
gttaactttaccattgcagaacgggcacagagggtacgtcgtttcagagaaaccagacaaaaaaatactaatgaagaagatgatgaagtc

SEQ ID NO: 93185 - DNA, 75 bp, Homo sapiens
gttatcgaatattcagcaagggtgcatctgagataattctgaaaaagacccatggatgaaggaccagatcttgat

SEQ ID NO: 93186 - DNA, 101 bp, Homo sapiens
ctggtctccattatttgagatgagttacatcttggaggatcttctgaggtcggagcttccagattcaattgaaagtgcattgcagggtgatgaaagatgtg

SEQ ID NO: 93187 - DNA, 98 bp, Homo sapiens
gcagaaactgcggcttcagagaatccagatggagagagaaaggattcgaatgcgccaagaggagctcatgaggcagaagcctaaagaaactgttccaa

SEQ ID NO: 93188 - DNA, 96 bp, Homo sapiens
cctggctcaccaggtcatactatctatgagccagcaccgctctttgaccttgccatgcttgccttagatagtccagagagtggctggacagaggaa

SEQ ID NO: 93189 - DNA, 75 bp, Homo sapiens
cagaagccaaacaggaggaggaagtggagggtgctggagaatctggtaaaagcaccattgtgaagcagatgagga

SEQ ID NO: 93190 - DNA, 90 bp, Homo sapiens
gttaatggttgctaaaaaagcggtggatgctgaaccagtcctgaaagctcaccagtctcactctgcaaatagcctaacatggcagaccag

SEQ ID NO: 93191 - DNA, 98 bp, Homo sapiens
taatctcacagctcttgcagctattggaccaaggaagaagagaccactagaatctggaattgaggtgaaggtgataaagtaaagtgctttcactgtgg

SEQ ID NO: 93192 - DNA, 100 bp, Homo sapiens
gccgcaccaggctcatcctgtccatcgtgtgcctgatgatcacgcagctggctggcttcagtggaccacattgtaggtttaacactcaatgtacaagacc

SEQ ID NO: 93193 - DNA, 75 bp, Homo sapiens
gatgccctgcagtacctgcagaaggtctctggagacatcttcagcagcaccgacgagagtgctggggaataaaaa

SEQ ID NO: 93194 - DNA, 83 bp, Homo sapiens
ctatggtgggcaaactaagccgattttccggaaaaagagttgatctctctaatgtattagatcttcatgcctttgatagtctc

SEQ ID NO: 93195 - DNA, 98 bp, Homo sapiens
ttagccccgcgcagccgccggcgtcgccgccatggacctagtttctgtgtttgaagaacatacgcaccttcctgaaagtctgccacgataaatttgga

SEQ ID NO: 93196 - DNA, 101 bp, Homo sapiens
ggctgctaggagccggtcagaggcttagaccatgctcagcctccaagcagccttgtcatcgacaaagaatctgaagtttacaagatgcttcaggagaaaca

SEQ ID NO: 93197 - DNA, 80 bp, Homo sapiens
ccagatatcttgaaaagctgccagaaaggacgagcctgtggagtgggagacacctgacctttctcaagctgagattgagc

SEQ ID NO: 93198 - DNA, 75 bp, Homo sapiens
cggagaccgaggagcagcagcgattctcttaccaacaggcaaggggagagccagttgcgcagagccctgcaacca

SEQ ID NO: 93199 - DNA, 82 bp, Homo sapiens
aaacaagacagttctgtctgcagaagcccattatggctgtaactggagatgacacaggtactgtgtgcagaaatgtgattga

SEQ ID NO: 93200 - DNA, 100 bp, Homo sapiens
cagcagcagcagccagtattcgggaaaggcagacaggtcaaaatgcagatcttcgtgaaaacccttaccggcaagaccatcacccttgaggtggagccca

SEQ ID NO: 93201 - DNA, 100 bp, Homo sapiens
ctggcagcatggctcagactgcatgacagttcacttagcagccatggaaggccaccttcactgtttcaaattcctagtcagtagaatgagcagtgcgacg

SEQ ID NO: 93202 - DNA, 82 bp, Homo sapiens
gctggcccctgttgtgtggggcccatgtgtgccagaagaacagccctggcacctatcaggaggagcccccaccgagccgagt

SEQ ID NO: 93203 - DNA, 97 bp, Homo sapiens
gcctctcttttaatcaacatcttggcaagagtcttctggtccctgttgacgatgaaacgaggaggaagagatagtgaccgtaattcatcagaagaag

SEQ ID NO: 93204 - DNA, 50 bp, Homo sapiens
catggggcaggatggcaccagccttggacgagagaaaaagcttgctctaa

SEQ ID NO: 93205 - DNA, 100 bp, Homo sapiens
tccccaacaccccaccaagctgggctgcaagacgggttatggtggccccatgacttccttccttgataattctgaaataatcagcagaaacggaatggaa

SEQ ID NO: 93206 - DNA, 50 bp, Homo sapiens
ctgaacacactggcccactaccaggtgacagacgggtcctcggtggcact

SEQ ID NO: 93207 - DNA, 100 bp, Homo sapiens
taacactgcatgaaatgttagaggacttccccagcgtggtgctagttggcctcggcaaaaaggcagctggaatcgacgaacaggaaaactggcatgaagg

SEQ ID NO: 93208 - DNA, 76 bp, Homo sapiens
ggaagtgcttggggatggagtgcctccaaaggttgctgaggtacaccaggggttggaaaaaccacactaggcaaag

SEQ ID NO: 93209 - DNA, 82 bp, Homo sapiens
gggaaaacccccattcattctggattggtggatctgaagtacaaaatattttccagggaagtgtgacctttgaagatgtggc

SEQ ID NO: 93210 - DNA, 78 bp, Homo sapiens
tgaatagctggggctacaggcgtgtgtcactgcgcccaggtcgtagacatgccagaacacaacccagggcagatgggc

SEQ ID NO: 93211 - DNA, 100 bp, Homo sapiens
ggaatgatccttactaaccacgaccatcaaatccgtgtcggagtccttacaggtgctgacagctgcagaagaaattgtacatggtgctgtacagaaggta

SEQ ID NO: 93212 - DNA, 98 bp, Homo sapiens
gaagatcctggaggtggatctgaagaacggttcctacaacagcagccagtacccctgatgccgttgacaagtatctcgagacacctggggatgagaat

SEQ ID NO: 93213 - DNA, 83 bp, Homo sapiens
cagcattcggccagagcccccttgctggattatatctacaggaggcttcgtgacggagttatcagagacattgagaggcaaat

SEQ ID NO: 93214 - DNA, 74 bp, Homo sapiens
atgctgtgtcttggggccctttgggacgagtgctgtgactgtgttgatttacagccagttacttactcagaacc

SEQ ID NO: 93215 - DNA, 88 bp, Homo sapiens
ggcgcctctgcgcgcgggaagatggcggaacaggctaccaagtccgtgctgtttgtgtgtctgggtgaaattgatcttcaaattctct

SEQ ID NO: 93216 - DNA, 75 bp, Homo sapiens
agcttcatgaactccaagccaaaatcacagctttgagtgagaaacaggaacaagtggtgatgaacttggacagca

SEQ ID NO: 93217 - DNA, 90 bp, Homo sapiens
aggagattggctttgagacgaccagaaatattggttcagcccctgaaagtttccaacaggaaatcatgtgcacttcacattcagaaacgc

SEQ ID NO: 93218 - DNA, 74 bp, Homo sapiens
caacatggcggaacgcaggagacacaagaagcggatccagttctgacacagaccttagagatgagagagaactt

SEQ ID NO: 93219 - DNA, 75 bp, Homo sapiens
cggaggcagaggtggaggcgctttgaaaggaatgaatctgaagtctgctgcagtaaaacacagaaggctttaaaa

SEQ ID NO: 93220 - DNA, 88 bp, Homo sapiens
gagaggtatcagaagcttaaaaaggtccttgctgcgaaagtgctcaaccttgtgctgccaaacttgtccctcgggcccatcgactcca

SEQ ID NO: 93221 - DNA, 90 bp, Homo sapiens
caagacggacgtcatcctgatcttggaactgcaatactgaacactgcgcagcttgcagaggtctcctggcagccctcattaggaattctg

SEQ ID NO: 93222 - DNA, 101 bp, Homo sapiens
ggcccggcggctgctgctgctgctgacgctgctgctgcccggcctcggggaaaccagggtgacagaggagacaaaggcgcggcaggagcagggctggacgg

SEQ ID NO: 93223 - DNA, 75 bp, Homo sapiens
agaggcgacgcgagatggcggcagcttcagcggcggcgatctcaggctccccaggttcatcctgtgtcgtctccc

SEQ ID NO: 93224 - DNA, 75 bp, Homo sapiens
ctcagtggaacaatcttttgttggattgaaacagctaatcaggttggcgatttgaaggagctgcagacactagac

SEQ ID NO: 93225 - DNA, 122 bp, Homo sapiens
tgttcggagtttcttccttctggtgggttcgtggtctcgctggctcaggagtgaagctgcagaccttcatgagagtttcattctgtcgcccaggctggagtgcaatggcgcgatctcggctc

SEQ ID NO: 93226 - DNA, 75 bp, Homo sapiens
cctacatcccacagagatacccagacaacaggatcgtctcgtccaaggcatgttctctatgggatggccagcttt

SEQ ID NO: 93227 - DNA, 51 bp, Homo sapiens
gagaaagaaaaggaacgggagctgagagcacagtggagaatttacagtctc

SEQ ID NO: 93228 - DNA, 90 bp, Homo sapiens
ctttgtggagacatcaatgtatttcttaccaaaagacactttcagttgactggattgttgctgacatcttggccatcaggcagaatgcgc

SEQ ID NO: 93229 - DNA, 50 bp, Homo sapiens
gggaccttgttatagaagccttaaagattgcttatgcccgtatagagggg

SEQ ID NO: 93230 - DNA, 74 bp, Homo sapiens
aacgagttctctagcgctagtgatgtgataccccatgtttccccatcactcgaggagtctgggcagagactgga

SEQ ID NO: 93231 - DNA, 50 bp, Homo sapiens
ggtgatggggcattcttgctaacaacgcatgttatttgaaagcaattgag

SEQ ID NO: 93232 - DNA, 90 bp, Homo sapiens
ccaagagactttacttcagagccccggcttattgaccctcgagtcttccatccagggcctccggataatgtgaagctgagtgagcctccg

SEQ ID NO: 93233 - DNA, 74 bp, Homo sapiens
gaagagcagttcccaggatctgcataaaggttccaatgattttggttggcaataaatgtgacctggaagatgag

SEQ ID NO: 93234 - DNA, 76 bp, Homo sapiens
ggaccagcgtctcggaggcgccgcagcgagtgatagacagccaagcagagaaactgaaggagcttgacaaggagat

SEQ ID NO: 93235 - DNA, 74 bp, Homo sapiens
aacaaggcgattccgcagtccccccgttccctggaggtcctgtggaatgaaagctaccctggttgaccatggga

SEQ ID NO: 93236 - DNA, 100 bp, Homo sapiens
ccccctttggtgatgtctgcttgctgaggctacagcagcggaagatgtcggacagcgaggacagcaacttttccgaggaggaggacagcgagcgcagcag

SEQ ID NO: 93237 - DNA, 131 bp, Homo sapiens
tctccagtcagcgtcagagttggaggcctcaattttaaagaaggcaaagccatggtcatcgttgcgggacagagcgggatgccaccagcttgtccaaagggaagttccaggagctcctggtgggcatcgtt

SEQ ID NO: 93238 - DNA, 74 bp, Homo sapiens
atgacatgaccaagatgcccgagtgctacttctactccaagttcggctgtaccttcacagtcctggtgcacacg

SEQ ID NO: 93239 - DNA, 100 bp, Homo sapiens
ctttgttattggagaaacatgcagattatatcgcatcctatggctcaaagaaagatgattatcatttacagccgaacaataccagcaacatcaacagcaa

SEQ ID NO: 93240 - DNA, 98 bp, Homo sapiens
tccaacattcatcgcagctggtgggtgtacacactgctgtttaccttggcgaggcctttcaccaagtccatggaaaccacccctactcctaatccccc

SEQ ID NO: 93241 - DNA, 90 bp, Homo sapiens
ctcaaaagcaagatatactactaactttgaaatggaataagtctcacaccattttgctggtacagcctaccaagaggccagaaggcagaa

SEQ ID NO: 93242 - DNA, 100 bp, Homo sapiens
gtctcagggctccctcaactcctccgccagcctggaccttggcttcctagccttcgtcagcagcaaatctgaggatgtcagtgggcccctgagggagctg

SEQ ID NO: 93243 - DNA, 82 bp, Homo sapiens
tcaggctgcatcaggatgaatgatgacccaagtatggaaattcagaccaggatgtagcactcaaacttgcccaggagcgagc

SEQ ID NO: 93244 - DNA, 99 bp, Homo sapiens
agcaccatggcgaccaccgtcagcactcagcgcgggccggtgacttaagagattaaaattaatttggttgctgttggttctgaacaaataatgagttct

SEQ ID NO: 93245 - DNA, 74 bp, Homo sapiens
acctcagtcctaactgtagggaaggaagccttgttctgggaggtgatcagtgatgaacatggcatcgaccccac

SEQ ID NO: 93246 - DNA, 96 bp, Homo sapiens
ggactttcttccagcttctgctgtccttctttgtggagagcaaggtccctgaagacttcatctcccgagagctgtttgacacagtccaagtgtaca

SEQ ID NO: 93247 - DNA, 90 bp, Homo sapiens
cctcaccatacaggaacagggcagacgttagcgtgagtgatcactctcaatcccggttgatattcactgatggactccaaagaatcatta

SEQ ID NO: 93248 - DNA, 98 bp, Homo sapiens
ctcgggccgcgggctgcggacgctcggtcccgcgctgcgcatccccgcggacgccacagcgctaacaccttccaccatgaccacctcagcaagttccc

SEQ ID NO: 93249 - DNA, 100 bp, Homo sapiens
atgcttcaaaagctgttgaaattgttacttcaacttctgctggatacattaattgtttggtcagaagcagagaactatgatttggctctgagttttcagg

SEQ ID NO: 93250 - DNA, 75 bp, Homo sapiens
ccagggtgtctggtccacgacctatcctaggcgccatgctggaatagtcaaatgatttcagttcgtgaagccaaa

SEQ ID NO: 93251 - DNA, 107 bp, Homo sapiens
cacccattcctttaaatccggagggggaaaaaatcccaaggtctgcaaagaacctaaaggcagacccagaagagctttttacaaaactagagaaaattgggaagggc

SEQ ID NO: 93252 - DNA, 90 bp, Homo sapiens
cttcttcttaatcccatatctggacatctggaacatccatgactctttttgatcagaacaatgctgcaaaaaaagaagagtcagaaactg

SEQ ID NO: 93253 - DNA, 99 bp, Homo sapiens
agagcagagaaggagcgaatcatgaatgaggaagatcctgagaaacagcgcaggctggagcaaaagcgaaagcttcggatctacatttccaatacgttc

SEQ ID NO: 93254 - DNA, 93 bp, Homo sapiens
cgcggagcccggctcccgcaccatggaggaggacgacagctacgccgcggcgagtcctttgcacatgttggcaacacacgcatccgcatcggc

SEQ ID NO: 93255 - DNA, 100 bp, Homo sapiens
ggaaagttcacacagaccaaattggactagctttgctgaagaatgaaatgctaggtcagtggaaagtccaatcatgtgaggagaaactaaaatatgtatg

SEQ ID NO: 93256 - DNA, 100 bp, Homo sapiens
gatcctgagtacaacacggtggcaagcaagtttaatcagacctgctcacacttcagaatagagaagatctcaggaaacaggctcgacagctggaaaatga

SEQ ID NO: 93257 - DNA, 75 bp, Homo sapiens
cagcattaccttcccttcccttgaaaggtgtgggcccatcgctggatggatctgtcagaacacggctttgggctg

SEQ ID NO: 93258 - DNA, 50 bp, Homo sapiens
gctaagctcatcattgttactggagacggtggctcagggagtaaaggaag

SEQ ID NO: 93259 - DNA, 90 bp, Homo sapiens
tccggatcgcatggaagacgcagcctggccgcgctctcccactccctcgtgaaagatgcttctgttcctctgattgatgttacaaacctc

SEQ ID NO: 93260 - DNA, 87 bp, Homo sapiens
gaaagtcaagaaaatagatgcttctaaatctgttgatgaagttcctagaagccaaaccaaactgacaataatgcttgaaaaattagg

SEQ ID NO: 93261 - DNA, 98 bp, Homo sapiens
ggaagcactcatgcaactttggtggcggccactcagttttctctgccagtgtctgtttggaaattttagcattcaggtgccaggaatgcagatgggac

SEQ ID NO: 93262 - DNA, 75 bp, Homo sapiens
tcaaggtcgaagttttttcatccaaagccagttccgcaagagtgagccatggagctacgtgtggggaacaagtac

SEQ ID NO: 93263 - DNA, 90 bp, Homo sapiens
gaggagctgcagctgtttgaccaggagcccatgagaagcctggtgctatctcagagcaagtgtcttctgagaaaccatcaggcttgaagg

SEQ ID NO: 93264 - DNA, 75 bp, Homo sapiens
atgaaattgaattgaagaaaattgcacgtaatcacccaaatgccaatgagaaagatcagtctaaagaaaaggaga

SEQ ID NO: 93265 - DNA, 98 bp, Homo sapiens
gagaatcttgtgcgggaattgctgaaaaactggaggagtgcctaaagcagttaaaggaagaaagagtgataaggcttaaggttgataaacgagtcagt

SEQ ID NO: 93266 - DNA, 98 bp, Homo sapiens
cgacgatcctctagagcactgtgtgtctccccggacgcgagcccgctcccctgatacggcaagaagaagctgaaatacctgccctacaatcaccagca

SEQ ID NO: 93267 - DNA, 80 bp, Homo sapiens
ctcggacactctcttcaacaccaccctggtcgtcaccaccatcctggcagcctggcatcctcgctacaacctcattgttg

SEQ ID NO: 93268 - DNA, 90 bp, Homo sapiens
ctgggagaagtgaccctcctgcgcctgatccaaaaggaaagtcctcggccgtagagattcagatgatgaccactcccgaaaccattctcc

SEQ ID NO: 93269 - DNA, 75 bp, Homo sapiens
ccaaaaagctttctgctaggggcaggtaacttgcagactcacttacgacggcattctggtgaaaaaccatacatc

SEQ ID NO: 93270 - DNA, 83 bp, Homo sapiens
gccaagaagatcatcattaaggacggaggcacggttacgggcaggacttgagtggcttcggacagggcttctcagaccccagc

SEQ ID NO: 93271 - DNA, 115 bp, Homo sapiens
aaagatgagatttacctgtgagatgtttcatcccaacaattagcctgaggcctgctcagtcgttcctaatgaataaaaatcaagtgccaaagcttcagccccagataactatgat

SEQ ID NO: 93272 - DNA, 100 bp, Homo sapiens
cagagaccaataaaaataaactgcttgaacatcctttgactggttagccaggagctcgcccgtcagcgaggagtcctggagcgcacagagaagatggtgg

SEQ ID NO: 93273 - DNA, 113 bp, Homo sapiens
tacagccgctcgtcagactccagcagccaagatggtgaagcagatcgagagcaagacctgcctagagctggaacgttacctccagagcgagccctgctatgtttcagcctcag

SEQ ID NO: 93274 - DNA, 98 bp, Homo sapiens
cggattccagccccgagcgggacagcgcggcggggagcgacgagtacatgtacccctccatggatcagctggctgaaatgcttcctggagtccttcaa

SEQ ID NO: 93275 - DNA, 100 bp, Homo sapiens
atgctgccaaacatgcccataagttttgtaacacagaagatgaggagactatgtatctgcggaggagattaagtgagagagagagaattggagaattggg

SEQ ID NO: 93276 - DNA, 80 bp, Homo sapiens
ggagtccttggggacggagcagcgcgtcgtggggcgagcggcaggtttacccaaggtccagcctagcccctaggcaccat

SEQ ID NO: 93277 - DNA, 100 bp, Homo sapiens
cactgagtggtaatggatgatgcagttcaaataactaagcgcatttgtagccatgaagtgccatcttgcccaatatgcctctatccacctactgcagcca

SEQ ID NO: 93278 - DNA, 87 bp, Homo sapiens
tcactgtgaatgatgtcaaaatgtgtgtgggccactgcagaacaaattagacttgcacagatgatttcggaccataatgatgctgac

SEQ ID NO: 93279 - DNA, 128 bp, Homo sapiens
tcacagatatacagagttgtccatggaaacggcaagcagaagaatatgcaaattttaggttgcaaaagcttctcatttcagagagatgccaggatcctaagtgcctgccaaacttaccaattctaagg

SEQ ID NO: 93280 - DNA, 109 bp, Homo sapiens
tcgaaagcatggcgtcggtggtgttggcgctgaggacccggacagccgttagcagacttgaagaaagagaagcagaactgaagaaggaatataatgcattacatcaaag

SEQ ID NO: 93281 - DNA, 91 bp, Homo sapiens
gctattggccgacatatgtgcctatggaagttcatttaccaccagaggtttggtttaagaataaaagggccagatgtaggcgacatcagag

SEQ ID NO: 93282 - DNA, 75 bp, Homo sapiens
tgggggtccacactgcaatgtttttgtggaacatgtggacatttgggagcaataaaaataagaagaaaggaaaag

SEQ ID NO: 93283 - DNA, 74 bp, Homo sapiens
gggagccgtggcctcctctccgccctagcgctgaggctggccgatcctgctggggctgaccggggtccccgcgg

SEQ ID NO: 93284 - DNA, 88 bp, Homo sapiens
aacaagatgttgtcctgtgctggggctgacaggcccaaccgcttgcttatcctccacggcttcctggacgaaaacgtgcactttttcc

SEQ ID NO: 93285 - DNA, 114 bp, Homo sapiens
gcctgggttacaagcagcaagtgcgcggttggggccactgcgaggccgttttaggtgacagagttagtccttgataattgcctgtgtgtcaatggggaaattgaaggcctgaat

SEQ ID NO: 93286 - DNA, 97 bp, Homo sapiens
aaaatccaagacatacaactgaagacaagtgagccagatttcacctctgcaaatatgagagattctgcagaagttaattgtgtgaggaacacgccgg

SEQ ID NO: 93287 - DNA, 101 bp, Homo sapiens
caaacaattttatttaaccacggtgcagttcagaatattgctcacctactaacctcactgtcctacaaagtggtgaagcagtattttccaatttgaagatt

SEQ ID NO: 93288 - DNA, 82 bp, Homo sapiens
gcgcggggactgcaaccctaatcagaagcccctgaatgtgacagtgatccgcaggggggaaaaacaccagcttagacttgtt

SEQ ID NO: 93289 - DNA, 50 bp, Homo sapiens
ccccgcgccgccaaccccttccagcaggccccgccagcaggcgaagcagg

SEQ ID NO: 93290 - DNA, 100 bp, Homo sapiens
gctgccgccgtcctcccctgtctacccggagctgtctcgagctgagccccctaccgggccggatcccgaggggaggacgaggaagaaacgaacgtgatag

SEQ ID NO: 93291 - DNA, 117 bp, Homo sapiens
cagcactatttgaaacttttatctcatctggcttggcgcctgaggttctcccattagagagaaaattcatgaaccctttcaacatgcctaatctgtatcagaagttggagagtgatc

SEQ ID NO: 93292 - DNA, 50 bp, Homo sapiens
gttagcagtcacgacctccagcacaggttggtcaaagaaaaagtgatgta

SEQ ID NO: 93293 - DNA, 86 bp, Homo sapiens
gtacttcgacgaacactacgagtaccgggcgtgatggtgggcatgggtcagaaggattcctatgtgggcgacgaggcccagagcaa

SEQ ID NO: 93294 - DNA, 75 bp, Homo sapiens
gccatggccgaggtgttgcggacgctggccggtctcatcacaactacgtcaaggaagctagaccgagaacagcaa

SEQ ID NO: 93295 - DNA, 75 bp, Homo sapiens
gtctgcggaagtgcagctgcctcagttcttagcgcaggtgccgtgagcgatgtggagatgcaggaacactatgat

SEQ ID NO: 93296 - DNA, 102 bp, Homo sapiens
gcctcgcctttgccgatccgccgcccgtccacacccgccgccaggtgaaatgacaatggatgctctgttggctcgattgaaacttctgaatccagatgacct

SEQ ID NO: 93297 - DNA, 100 bp, Homo sapiens
aataccagtccccagtgagggtgtacaaatacccctttgaattaattatggctgttggtcacagcagatgtagctttttacactggaaatcttcaagcct

SEQ ID NO: 93298 - DNA, 75 bp, Homo sapiens
attagccttcgcggggcaaaatggatttaggtcctgaatatgaaggtatatttaacacttcattgcagtggatct

SEQ ID NO: 93299 - DNA, 76 bp, Homo sapiens
gaaacagtgaccctgagcgaagccaagccgggcggcagatggtgatggaatttcctgataatgtgttaaatctcga

SEQ ID NO: 93300 - DNA, 100 bp, Homo sapiens
cgagtctccgccgctgcgggcccgctccgacgcggaaggccatttcataattctgaatcatgtctgataacggagaactggaagataagcctccagcacc

SEQ ID NO: 93301 - DNA, 100 bp, Homo sapiens
gtgagaagcccaactaaagccccacatttgcagctcattgaaggaaaggtatatcaaggagtgaagaaagatggctttttacaacctcattttttggcag

SEQ ID NO: 93302 - DNA, 122 bp, Homo sapiens
ctgcacatcgtggtggtcggatttcaccacaagaagggctgccaggaaccttgggtaatgtggaacatgggaaccaatgtcagatgaaattgatgtatgaacataatcttcagagaacagcc

SEQ ID NO: 93303 - DNA, 83 bp, Homo sapiens
gtggcagcggcggaaaccgaaggggagccatggcggctgacagtcgggaggagaaaggaactcattatacaatgacaaatgga

SEQ ID NO: 93304 - DNA, 82 bp, Homo sapiens
cggcgagaaagcacggggtgaaactgaccacagtgctcaccacccaccaccactgacttcccaagtaagaagcggaagagga

SEQ ID NO: 93305 - DNA, 82 bp, Homo sapiens
gcagctattgctggacggccagtgggagagcgaggcctgagcctctgcgtctaggtattacaagtggataaataatgtgcac

SEQ ID NO: 93306 - DNA, 87 bp, Homo sapiens
agacactgcaaatgaagctctcgaggctgctaagagactaagatttttagactctgaggagcagttggagctaatccacattatgga

SEQ ID NO: 93307 - DNA, 87 bp, Homo sapiens
gacgaggctcgggataacgcctgcaacgacatggtaagactttgaccccgacgcaggcttcagtgattgccgcggatcagaagcctg

SEQ ID NO: 93308 - DNA, 100 bp, Homo sapiens
cgaccacttgcggcctgagtatgtcctcctgcccctgctcgagtcttgcagtgtgcggcccgacgccagcgtttccagtcaccgcttctttggacccaat

SEQ ID NO: 93309 - DNA, 100 bp, Homo sapiens
gtggaaggctgtttggaacagagtgcaaaatggcaactcttaaggaaaaactcattgcaccagttgcggaagaagaggcaacagttccaaacaataagat

SEQ ID NO: 93310 - DNA, 100 bp, Homo sapiens
aaaaaaaagccggagtattttactaagcccctaaaatgtcgagatttgtacaaggctttatctattaacccgacagacgcatggtcggtgcacaccgtcg

SEQ ID NO: 93311 - DNA, 50 bp, Homo sapiens
acatacagtcgcctctgacaagccagaaggtgcttcctggaggggcctgc

SEQ ID NO: 93312 - DNA, 96 bp, Homo sapiens
ctttgaggccaataccaccgtcggccgcatccgtttccacgactttctgggagactcgtgacttcatggtcatgacgattttcttcaatgtgagca

SEQ ID NO: 93313 - DNA, 98 bp, Homo sapiens
gttgaacacaaaccatcacaaagttacctacgtgttagaaataaatctgatattgcaccttcacagcaacaagcaacctttcccctggatctcacaaa

SEQ ID NO: 93314 - DNA, 100 bp, Homo sapiens
agtgaccaggcttgttctggatccctatttattaaaggtggtgacagcaggagcaatcatccctttccccttggctccaggccagtcccttcctgattcc

SEQ ID NO: 93315 - DNA, 100 bp, Homo sapiens
ggcgccgctgcccatggagggagtggacatcagccccaaacaggacgaaggcgtgctgaagggggcatttccgtctggcgaggcgactgaaaatcctgag

SEQ ID NO: 93316 - DNA, 50 bp, Homo sapiens
ctgacaacttttaatgagattgacatgagatcacagattctgctggccat

SEQ ID NO: 93317 - DNA, 153 bp, Homo sapiens
tccgttcttgccaagttctccttgccggtctccttgtcagaatttaggaatcccctggcccccgctgtgcaggaggtaacaaatcggaagtacccaaaactgaaagaagtggatgatgtgcttggtggagcagctgcctgggagaatgttgac

SEQ ID NO: 93318 - DNA, 98 bp, Homo sapiens
tcttatctgccctatttgcagtggagtcttggaggagccagtacagtgattacagcaacataaaggcagcatatgaggccatgaagaatgtggcctgt

SEQ ID NO: 93319 - DNA, 82 bp, Homo sapiens
aacccagcaccacgagcctcagcttcacctccatgggcatcaacatgtgcagggctcgcggcctggcaagaatgtacagctg

SEQ ID NO: 93320 - DNA, 100 bp, Homo sapiens
ctcaccggctgggtgggttcgagcaactaccggtgatgtcttggcattgcccattttcaagcaggaagattccagccttccattggatggtgaaacagag

SEQ ID NO: 93321 - DNA, 95 bp, Homo sapiens
tcctggtgagctgtcctcatccactgctcgctgcctctccagaccctcaggcagtttgattgcatctacacaagataaacccaaccagcaggata

SEQ ID NO: 93322 - DNA, 100 bp, Homo sapiens
gacagaggtgtgctgacgacctgctacaacagaatggatgtggccacggcgctgcctctgcaagtggccccctcggcagtgcccatggacctgcgcctgg

SEQ ID NO: 93323 - DNA, 51 bp, Homo sapiens
cagtgtatcaaagtgtggactgagaagtcctcatttgcctggagacatcag

SEQ ID NO: 93324 - DNA, 50 bp, Homo sapiens
ctgagaccaccgcagcccactccctaggcggaaggtgctctaccagcgtg

SEQ ID NO: 93325 - DNA, 100 bp, Homo sapiens
gggtccagtgtccaaccagggctacatgccttatttaaacaggttcattttggaaaagcatgtgcagtctttgccaacaaaaaaaattaccaagaaacct

SEQ ID NO: 93326 - DNA, 98 bp, Homo sapiens
ctcttttcgaagcctgacttggccaccttcgggttccccatctcatgctgggaggtggggaagacagggctccagctaccacaggacgggctctgggt

SEQ ID NO: 93327 - DNA, 83 bp, Homo sapiens
gtccgcgggaagatggcggcgccgctcatccccctctcccagcagtgtcctcagcctgcgggggctgcgtggaggtggactcg

SEQ ID NO: 93328 - DNA, 75 bp, Homo sapiens
taatctgatcgggtcttccttcatcttaaagcttttcaagccaggccaagaagctgtgaagtaccagggtcctcg

SEQ ID NO: 93329 - DNA, 100 bp, Homo sapiens
ctgtcggacattctgcaagccctgatcctcacaccagcagggaaatcctcattgacgattcaatttgttgaaggccaatttgtggactcctacgatccaa

SEQ ID NO: 93330 - DNA, 74 bp, Homo sapiens
ccgcaccacctcctgctgccttcccgtcgccgctcccgaagcttttccagccacataaagaagatccctaatag

SEQ ID NO: 93331 - DNA, 100 bp, Homo sapiens
atgaagcctaaactgatgtaccaggagagatctaccgcatcgtgtcacagaaacagatcgcagaccgcgctgcccacgacgagtccccggggaacaacgt

SEQ ID NO: 93332 - DNA, 95 bp, Homo sapiens
cacactcattcgggttggacttgccggcgtcaccgccgcggacttcgctttgggccatgaccaggatggtaagcggatgtttggcacctattttc

SEQ ID NO: 93333 - DNA, 100 bp, Homo sapiens
tttggcactaacataacttatgttgtgattggagatggccgagatgaggagcatgccgctaaccagtcgtgccaagcggacctcgtgaaggacaacggcc

SEQ ID NO: 93334 - DNA, 87 bp, Homo sapiens
gccagagacctacgtggcagctgtgaaaaaagccatttccgaagcattcctctgaatattgatttgctgaatagcccagacttattg

SEQ ID NO: 93335 - DNA, 74 bp, Homo sapiens
aggattccaagtaactcttatttgggcctcctcccaaggagaacatgagaccacttcatatctggaactctaga

SEQ ID NO: 93336 - DNA, 101 bp, Homo sapiens
gaaagatctggcgatgacctacaaacagaggtgtcagttgtacccgaggcgttctcagcagcagcaagtacctgtggtggatttccaggctgaactgaggc

SEQ ID NO: 93337 - DNA, 48 bp, Homo sapiens
ctgaaggattggtcgtgtaccccaaaactgacacgtctgaccccgaga

SEQ ID NO: 93338 - DNA, 80 bp, Homo sapiens
ggaaaatccgcaagaccatcatgcaggtctgggaggggctgaacgtggtgaagacaggccgagtgatgcttggggagacc

SEQ ID NO: 93339 - DNA, 82 bp, Homo sapiens
gcctgcagagctgtggcttaccaggtgggagatgccatcccagcagtggaggtgtttgaaggggagccagggaacaaggtga

SEQ ID NO: 93340 - DNA, 82 bp, Homo sapiens
tgcagccacgcgggcgagcggctgtgtggatgtcggcgaagccgcgggcgagctgtttgcagacaaggtcccaaagacagca

SEQ ID NO: 93341 - DNA, 100 bp, Homo sapiens
ggaggagcgcgccctgcctgagaaggagcccctcgtcagcaaagggttaccttccagttcaacatttaccttggaagaggggaccatctacttgaccgct

SEQ ID NO: 93342 - DNA, 100 bp, Homo sapiens
cgttggcagcaaggaggtgaccctgaacctctacgacacggccgttacagaatgtctgaaggggacagtgtgggagaatccgtccatgggaaaccttcgg

SEQ ID NO: 93343 - DNA, 75 bp, Homo sapiens
ccagcaacttcctcgagatcgatgtgtgatctaccatgcattgtctcagaaagaggcgaatgactccgatgtcca

SEQ ID NO: 93344 - DNA, 100 bp, Homo sapiens
gtccgccgctcaccccgcggccgcaccttcccgccttctcaggtccctgtgcgttttattgcgacctgccggtgggaactttgtctccgagtcggagcag

SEQ ID NO: 93345 - DNA, 74 bp, Homo sapiens
atgcaaagatttggaaccacagctgtccctacgtatcaggttggaagatcatgctttacgattatggaatatcc

SEQ ID NO: 93346 - DNA, 100 bp, Homo sapiens
atcgggagaatgctcttcaggatagtatcttggccagggaactcaaacagcagatgcaggaacggaaaacagttcttccttcaaagcatgcagtacctga

SEQ ID NO: 93347 - DNA, 101 bp, Homo sapiens
gttaatgggccgggaccgaaacctagccccggacgagaagcgcagcaacgtgcggtgggaccacgagagcatgtgtatatctcatgattgatatggagaaa

SEQ ID NO: 93348 - DNA, 76 bp, Homo sapiens
agcatccgcaaacattcagacaaaattggagagactgccatgaagcaactttccagagtgttgaatcttccaccag

SEQ ID NO: 93349 - DNA, 75 bp, Homo sapiens
tcgccccctacccgcttctcgtagtcctgggagcacagcagaagtccctgtatgatgagattcgtcagtttcgca

SEQ ID NO: 93350 - DNA, 58 bp, Homo sapiens
gggggcgcgaggggaacggaggccagagctgcgctctctgatgtaaaggatggagtaa

SEQ ID NO: 93351 - DNA, 100 bp, Homo sapiens
aacagtttggcgtgcaacatggggcttgagaaagggggcaagattcttgccaagagaattaatgtgcgtattgagcacattaagcactctaagagccgag

SEQ ID NO: 93352 - DNA, 75 bp, Homo sapiens
gccctgctggcgtggctggaccggtttccaatacttatctacaggaatcgccatgaccccagctctgagggaggc

SEQ ID NO: 93353 - DNA, 98 bp, Homo sapiens
tcggattcttgacactttgggattgcttcggcaggaagcaggttcaaggtaaagacccatcagtggaagtcacacaggacctcattgatgaatctgaa

SEQ ID NO: 93354 - DNA, 88 bp, Homo sapiens
ttgaaccagtagaccctaatgatgcaccagattattatggtgttattaaggaacctatgggaagtgagctcacaatgactcaagctgc

SEQ ID NO: 93355 - DNA, 100 bp, Homo sapiens
gtgcccccgggttatgacgacccccaataaaggaaacaaggccttgaagggtatcaagccagcaaaccggatgcactcttcaagttggaacaaggagaac

SEQ ID NO: 93356 - DNA, 98 bp, Homo sapiens
ttctcagattggcttcaactgcagttggtgtagtaaacttcaaaggagtacttgattcttcagaaaacctccaaagtagatgtggactcaagtggaaa

SEQ ID NO: 93357 - DNA, 83 bp, Homo sapiens
tggatgtggaattctccgtccctttccagggagggaacaaagcccacagcaccgattttcgacaatgaagccaaagacgtgga

SEQ ID NO: 93358 - DNA, 49 bp, Homo sapiens
tcatccttttccaccagctaaagatactgtggatggtagggaagaaaag

SEQ ID NO: 93359 - DNA, 100 bp, Homo sapiens
tgcaaaacgagactgttaataaaacctaccccagggtaggacggactgttcgtgcctggagaagttccctgtgatccagcacttcaagttcgggagcctg

SEQ ID NO: 93360 - DNA, 90 bp, Homo sapiens
ctgtactgtcgggacacctttgaccacccgactctcatagaaaacgagagtatatgcgatgagtttgggtttgtgtttagtgaatcagag

SEQ ID NO: 93361 - DNA, 90 bp, Homo sapiens
cgaggactgcggggtccggtgtccacgcagaggatgtgacaagcagttcttcaatgcctcggtgcagtttgccaacatggacccgctgct

SEQ ID NO: 93362 - DNA, 75 bp, Homo sapiens
gatcagttcattggcatctttgctcaaaatagacctgagggaatggcatttactttacaagaacgacaaatgctt

SEQ ID NO: 93363 - DNA, 100 bp, Homo sapiens
ccggagccgggccggcgtggcccgagttccggtgagcggacggcggcgcgcgcagatcttcttcagcagtatcgttctgctgtgtgcaaactagacagtg

SEQ ID NO: 93364 - DNA, 74 bp, Homo sapiens
gtcggggccggctgaccaggaacctgggcgagcagcggcgggggcccgagggggaaatcctcattgacgattca

SEQ ID NO: 93365 - DNA, 96 bp, Homo sapiens
ggcacacctctgtgcagaccacatcgagcgatgccaattctcggaagcaagaagcagagtggaaagaaaaggcaataaaggagctagaagaatggt

SEQ ID NO: 93366 - DNA, 85 bp, Homo sapiens
ggatctggccaacaccaccggcacagtgacggcttcagagggggagtgtttaaagacaccagcaaagacaaatttgactacattg

SEQ ID NO: 93367 - DNA, 80 bp, Homo sapiens
tttttaggagatacttaaataagattttaattgaagctggaaagcttggacttacagaccttccagaacttgatacacca

SEQ ID NO: 93368 - DNA, 82 bp, Homo sapiens
ttgccacggctgaaccctccttctcaatcttggaacagcacccccttctttaagccccccgaatccaagcccaacttcaccc

SEQ ID NO: 93369 - DNA, 50 bp, Homo sapiens
gcgggttgctcacttacactggaaaagtgtctaccatcagagggagatct

SEQ ID NO: 93370 - DNA, 83 bp, Homo sapiens
gatcatgtctgcgagccaggattcccgatggtcagtaggacagaaggtaacattgatgactcgctcattggtggaaatgcctc

SEQ ID NO: 93371 - DNA, 99 bp, Homo sapiens
aggaagagtcagcagagcaaccagagttctactacgatgagtttggtttccgtgtgtacaaggaaggtggtcctagtggagagcagtgagcgtctggga

SEQ ID NO: 93372 - DNA, 101 bp, Homo sapiens
aaagctgcacttgaggcccagaatgcactgcacaatattaaaactttacctgggcaatgcagtcaaccttttaagcaatgttccagtctcttgtttggatg

SEQ ID NO: 93373 - DNA, 100 bp, Homo sapiens
tgcccccaaacagttatacctgaaggggaatgctgcccggtctgctccgctactgataaagtggagaattttcatgaagaacatgaaaagaatagtcacc

SEQ ID NO: 93374 - DNA, 75 bp, Homo sapiens
gtcatcatagtcagtctgggatatggcatcgtcaagctagtgaaaactttagtggctgacactcctctaactgcg

SEQ ID NO: 93375 - DNA, 100 bp, Homo sapiens
aggttcgggaagctgttggagcagtgtggggaatttcccaccaggatgagtatgattggctgtgattttaggatttgacgggatctgaactatacaccca

SEQ ID NO: 93376 - DNA, 82 bp, Homo sapiens
cagcaagattgtcggcaagtggtgaaatgacaatggatgctctgttggctcgattgaaacttctgaatccagatgaccttag

SEQ ID NO: 93377 - DNA, 100 bp, Homo sapiens
gaccccgagcaccgggccctctgcgacctggggccctgggtgaagtgctccgtcgcccttgcctccaggtatatgagtagaccagtgatgagtggcccag

SEQ ID NO: 93378 - DNA, 50 bp, Homo sapiens
ccacaccatccttctcgctgcaggctcacggatgattgatatccagacca

SEQ ID NO: 93379 - DNA, 98 bp, Homo sapiens
ggctctttcagggtgcccagggtggaggggaaggggagtcagccagacccccatcctgacaaggttttgctgttactgctcagtgtagtcacaccttg

SEQ ID NO: 93380 - DNA, 100 bp, Homo sapiens
gaccgatgaagactttgaccagtttgtgaaggaacactcctctgtcctcgtcatgttccacgccccatgtggaagatggatgcctgaagtgtagactgct

SEQ ID NO: 93381 - DNA, 50 bp, Homo sapiens
cgcgaatatcgtcatcgttagaagtatttcaggggctgccaagctgctct

SEQ ID NO: 93382 - DNA, 50 bp, Homo sapiens
gcctcccaaggtgctggaattacagcacccctgcagtggaccatgagtcg

SEQ ID NO: 93383 - DNA, 80 bp, Homo sapiens
tcacctcgctactcgcttgcctacccgccggcccgcgggtctacttcctcaaagacgagccaaactcaggctgtaccttg

SEQ ID NO: 93384 - DNA, 100 bp, Homo sapiens
ctgaactcaggcgattacaagacgattcacctgtccagcatccgaccaccgaggctggagggggagaacacccagatcattggaaattgtgtgtccatct

SEQ ID NO: 93385 - DNA, 97 bp, Homo sapiens
cagccaggagtcatgagcgacagcggcgagcagaactacggcgagcgggttgcacgttttcaaaaaatacctaatggtgaaaatgagacaatgattc

SEQ ID NO: 93386 - DNA, 100 bp, Homo sapiens
gcagagtcaacataaacaagacaagaatagccagcagccctgttctaggtgctcagatggagttataaaactgaagatttggagactggagttcaccttg

SEQ ID NO: 93387 - DNA, 75 bp, Homo sapiens
tcagagtaggaaataattttcacaaccttcaagaaattcggagcgatgaagtaacttgatttgaacaagatcaca

SEQ ID NO: 93388 - DNA, 101 bp, Homo sapiens
ctgtccagccagcatggaaccaaagcggatcagagagggctaccttgtgaagaaggttaatgttcgtgaagaaattgaagagttttttccaagaatgtgga

SEQ ID NO: 93389 - DNA, 103 bp, Homo sapiens
ccgcgcgcagggcctgcagcgggagctggacggcgagcgcgagcggcgcgagaaagggggtcctgtggagatccttcccttcctctacctcggcagtgcctac

SEQ ID NO: 93390 - DNA, 83 bp, Homo sapiens
gtcccctctcttacaagcccatcatgctatggaaaaaatggaagaatttgtttgtaagtcttccgtgtgtgctaagatcgtgc

SEQ ID NO: 93391 - DNA, 100 bp, Homo sapiens
gggaggtgggtactacacaaccgtctccagccttggtctgagtggactgtcctgcagtgtgttaacagggcacaaccattatgtgatgtgtgctcagttc

SEQ ID NO: 93392 - DNA, 100 bp, Homo sapiens
ctacctggacgacaagaggaagtaacctcaagaatagaattccttttggggaagaaagagatgtcatacttgtaacaccacagatcgaaatgccatatgt

SEQ ID NO: 93393 - DNA, 50 bp, Homo sapiens
cacaccccttccagctacatcgaaacgttcaggctcttcgggcccagctg

SEQ ID NO: 93394 - DNA, 85 bp, Homo sapiens
aagagtgtcacggtgatcatggaaccccacaaagaggtcagtttaggggctggtgcaaaggatgagttgcacattgttgaagcag

SEQ ID NO: 93395 - DNA, 100 bp, Homo sapiens
ctacactgtcactgacctagtgggatagatggcaatgggaaagcccccagcaaatcagagctccgccatctctatttgactgagaagtatgtgtggaggt

SEQ ID NO: 93396 - DNA, 100 bp, Homo sapiens
agttgtgacaaatcaacacaaaccccaagtcctccttgccaggccttcaaccactatctcagtgcaatggatcagccagtagacatgatgagcatcaaag

SEQ ID NO: 93397 - DNA, 91 bp, Homo sapiens
ctcattttggatatctgtgataaagttggtcagtctcgcactgggagacctgttctgatgatgtgtgtggtcctcaccacactgccctgcc

SEQ ID NO: 93398 - DNA, 95 bp, Homo sapiens
gggaggtgaagcctcagtttcaaggtaaggctggcctctctgcagtcagaggtctgagctctgccatggggataggggtgtctttattactgcag

SEQ ID NO: 93399 - DNA, 75 bp, Homo sapiens
taatattggccaatcatcaagacaagccagcagctcgctcagtacaagaggtagaagaatacatgttcacttcca

SEQ ID NO: 93400 - DNA, 98 bp, Homo sapiens
ttccggaggcccggccacctctgagaagggagacgacgctgctgggtccgctgagcggggcgacccgagaaatgcactcggtgatggaaagagagcca

SEQ ID NO: 93401 - DNA, 100 bp, Homo sapiens
ctcagccagctcctgcgaccgccctgcgcttcgtgcaccggggcggtccgttgccaaagccagcaccgactagatttccttcagctgatgattgactccc

SEQ ID NO: 93402 - DNA, 74 bp, Homo sapiens
ttttgcatcctacgtaaccagaccaagctgtgggtgttctggacttggtgcctctttctgttatatgctttcct

SEQ ID NO: 93403 - DNA, 75 bp, Homo sapiens
cggccatgggcaccctgggcaaggcgagagaggctccgcggtggataagattgtggaccagctgcagcagttaat

SEQ ID NO: 93404 - DNA, 83 bp, Homo sapiens
ccaccggggtatcttcagccgcctccttgacagtcttcggcaggaagtacctggagtagaacagaaaaattattatgtctgtg

SEQ ID NO: 93405 - DNA, 98 bp, Homo sapiens
gaacaccctatgggatgccatatcttggatccacatctcaaagaagtggggcttcaccaagttcaatgctgatgaatttgaagacatggtggctgaaa

SEQ ID NO: 93406 - DNA, 50 bp, Homo sapiens
ctctggaaaaacttcttgccaaccaaagtttggacatatttgactctttt

SEQ ID NO: 93407 - DNA, 100 bp, Homo sapiens
cagcgtctgctcgtggaaaccaagataaagatgcccattttccaccaccaagcaagcaggaagctgtgggagaccgggtgcctgttcttctgctgggtaa

SEQ ID NO: 93408 - DNA, 100 bp, Homo sapiens
ctatgatgctgatggtgatggagattttgatgtggatgatgccaaagttttattaggtgtgcaactgaggaacatggctcaagaaactaatcacagccaa

SEQ ID NO: 93409 - DNA, 95 bp, Homo sapiens
atgaacattgtattgagaacaatatagatttgcagggatgtcctttaactccattgcctccagttagtattgctattcgatttacctatgtactt

SEQ ID NO: 93410 - DNA, 75 bp, Homo sapiens
acagatggctacatgccccgggaattggcatctatgtcacgatgaaaactttcggaagagaaagttgcctgtggt

SEQ ID NO: 93411 - DNA, 101 bp, Homo sapiens
ttgatcctgattctacccaagtacatatgatttcagctgcaatggcaggtgttggaggtacttctgaaaatgatgacccttccaaaatggttatggttctg

SEQ ID NO: 93412 - DNA, 51 bp, Homo sapiens
tgctcagagtctcaatgaacttgaactgataaatttcaaacggaagagagt

SEQ ID NO: 93413 - DNA, 78 bp, Homo sapiens
aggagctgacggccgccaagaagcacggcaccaaaaacaagcgcggtattagaaaactactcggatgctccaatgaca

SEQ ID NO: 93414 - DNA, 125 bp, Homo sapiens
aggggattgcctggcaggacgtgaaggggaagaggcccaccctggagtaaccctcactggagaatccagaggaaagtggagaatgaggacatgaataaagaccagatcttgctggaaaaagaagc

SEQ ID NO: 93415 - DNA, 75 bp, Homo sapiens
gtacagtggcatgggccccgattacagctggcccgttggaagaagagcggtttggcttccctgcattcagcggca

SEQ ID NO: 93416 - DNA, 75 bp, Homo sapiens
agggaaccctggtcaccgtctcctcaggctctgacgcccgctctgcggcttcggtgtttgaacaggccacagtcc

SEQ ID NO: 93417 - DNA, 76 bp, Homo sapiens
gctgaatagactgcacctggctatcccaaccaggagggacgataagcgcctgcctccagcaccctgaagatgctgt

SEQ ID NO: 93418 - DNA, 100 bp, Homo sapiens
ctgggaccccgggctctgcagccacaaccatgtttggccggaagcgcagtgtctcctttgggggcttcggatggtattttgaaggtggcgtctcatctgt

SEQ ID NO: 93419 - DNA, 75 bp, Homo sapiens
tgaaagagatgaaaagtggggattttgccctgatcccagccacagaaacactattcagaatgggtgtagcaagag

SEQ ID NO: 93420 - DNA, 82 bp, Homo sapiens
aggcactggatgatgcaatcaaagctcgacttctcaatcccaagtggccaaaggtgtggacactgccagcggctgcagccga

SEQ ID NO: 93421 - DNA, 107 bp, Homo sapiens
tccctcgccctaatcccccaacgaggaaggaaggagcagttggttcaatctctggtatcagatgtagaaggtggtgatggactgcagctcagaaaggaacatactct

SEQ ID NO: 93422 - DNA, 75 bp, Homo sapiens
ggcctagacctgaactcttcagataatcagagtggaggaagtacagccagcaatcgtaaagctgaaaattgaaat

SEQ ID NO: 93423 - DNA, 82 bp, Homo sapiens
tcttcgcctcgcctcgggacccgcggtccccgctcttgctggaagccatcttcgacaagagcacagggaaggttgttttgaa

SEQ ID NO: 93424 - DNA, 100 bp, Homo sapiens
agaagctttccgcccggctaagagccttgaggcagaggcagctggaccgagctgcggctgctgtgggagaagatgcagtagaggatgatgctgaagagaa

SEQ ID NO: 93425 - DNA, 100 bp, Homo sapiens
aagccttctaccagtaaataccatcttgtacgagcaatattggagtcaatagctttcagtgggagccaagaagaaaggtttgctcccgggtggaacaggg

SEQ ID NO: 93426 - DNA, 74 bp, Homo sapiens
gaccggctgctgcaggccatcgacccccagagcaacacctagaggatcaagacataatgggagcatttttagac

SEQ ID NO: 93427 - DNA, 100 bp, Homo sapiens
ggattaccccgacattctccacctcctgggaggccagccattcccaaatgccccaaggatgaagaacggagacgggtcgacatgttaaaacgggtcagtt

SEQ ID NO: 93428 - DNA, 100 bp, Homo sapiens
ggggaatttccttgtgcctccattcccgggaggggggagcggcgttggaggccaccgtttccaggttcttctgtgtggcagttcagaatgatggatcaag

SEQ ID NO: 93429 - DNA, 75 bp, Homo sapiens
acatcaggaagatactgcagagatattctactccatctcattcattgtacaggtctgaaggggcgtctcgattac

SEQ ID NO: 93430 - DNA, 74 bp, Homo sapiens
tatatgccaccatggagaagcataaagaggacttgattattcttagaaatgcacttgacctgcttttgccaaag

SEQ ID NO: 93431 - DNA, 82 bp, Homo sapiens
cggctgccagtattgccactcccgcacggagcagcagttccatcccgagaggtggggctggtgtccgagcacttctcgcagg

SEQ ID NO: 93432 - DNA, 75 bp, Homo sapiens
gcctgccagcccctcctcagatgcccctgccggagatccctcagccctggctggacgccaagagtgccgaggatg

SEQ ID NO: 93433 - DNA, 75 bp, Homo sapiens
ggggatgaacatcgacatcgccagcatcgacatggtttccgaagtcaacatgaaagatttgatcaccaggagatt

SEQ ID NO: 93434 - DNA, 74 bp, Homo sapiens
ggggccgctctgggatcccggccaccagcaattgtccggtatatttgcttacttaaactaccatgttcctcgaa

SEQ ID NO: 93435 - DNA, 75 bp, Homo sapiens
agccgctgcccgaactcccggcccgaactccagcagtgattccagcagtagttcaagtgatgattctccagctcg

SEQ ID NO: 93436 - DNA, 100 bp, Homo sapiens
agaggaggccgtccagcagatggcggatgccctgcagtacctgcagaaggtctctggagacatcttcagcaggtgcgttgtagaagacaagaactcaaag

SEQ ID NO: 93437 - DNA, 100 bp, Homo sapiens
cggcgccagcccgggccctcggcagggaggatgacggagctgcagtcggcactgctactgcgaagacagctggcagaggccattaactgtttgatgcgag

SEQ ID NO: 93438 - DNA, 50 bp, Homo sapiens
cgccgaggcaccgaggcactcagaggagggcaccgcgtccgtgctgcagc

SEQ ID NO: 93439 - DNA, 85 bp, Homo sapiens
atcccactgatgaggatcagcccatgtgacctgggagctgtcatttccctcctgctctggggacgacagctttttgcactgtact

SEQ ID NO: 93440 - DNA, 74 bp, Homo sapiens
cttgtattctggttgatcatcttagggagccattgtatataaagaatggattgggatgatgaatattctcataa

SEQ ID NO: 93441 - DNA, 106 bp, Homo sapiens
aattcctccatcatcaaaggacaaacttggtgtctgggtatataaaaacaagtcccagactactatgacatcatcaaaaagcccattgccttaaatataattcgtg

SEQ ID NO: 93442 - DNA, 82 bp, Homo sapiens
tgcctttctatttattttacctcagtataacattagcgtgcctacagcagtgcatgcaagatatgggaaatactaaagcaag

SEQ ID NO: 93443 - DNA, 100 bp, Homo sapiens
gaacaatccgtctggatcacggatgtaggaagtggcaaatacgccatgcgagacctagtccacaggcttccaggagggaacaacagcaacaacactgcaa

SEQ ID NO: 93444 - DNA, 51 bp, Homo sapiens
gtccgccagagctgcggccgccaaggttcctatatgatagtggactcttca

SEQ ID NO: 93445 - DNA, 100 bp, Homo sapiens
taaacttggcttcctcgcttctgctcctcaggaattcggcgttggaactactttttcccagaagaattactggtttatgatatttgtaaatatcggtggt

SEQ ID NO: 93446 - DNA, 100 bp, Homo sapiens
ccgcgatctgcaccgggggaagcgcatgccgctgccatggcccagacactgcagatggagatcccgaacttcggcaacagcatcctggagtgcctcaatg

SEQ ID NO: 93447 - DNA, 100 bp, Homo sapiens
gcctgtcattcctggaactgggcatcatagccgacgctaccgtccgctccctggatgcttgctctgtcaaggcacagcctattgtctcctttgctcagtg

SEQ ID NO: 93448 - DNA, 101 bp, Homo sapiens
cgcggggaactcgacttgaccggcgccaaacagaacacaggagtgtggctagtcaagaaagaatcttcaagagggagacatagggaaaaggaagacataaa

SEQ ID NO: 93449 - DNA, 50 bp, Homo sapiens
caacaccaccttcatctccaccatcgcttagaccatgctcagcctccaag

SEQ ID NO: 93450 - DNA, 100 bp, Homo sapiens
gtctgtagcgtccctccctctcaaccacaataacaggcggagggtcggcgtaggtgatctgcaactctttcaccatctgtaatgcggagatgcaggaagt

SEQ ID NO: 93451 - DNA, 75 bp, Homo sapiens
tcagatcagtagaagcagatttcttttggatagtgatgggaaaagttttgtttggctatgccaccacagtcatcc

SEQ ID NO: 93452 - DNA, 83 bp, Homo sapiens
taccagtccccagtgagggtgtacaaatacccctttgaattaattatggctgaaataatgcaaaaggtgtcccaaggctcctg

SEQ ID NO: 93453 - DNA, 83 bp, Homo sapiens
tggttgcggttcccctatgcgtgtgggaattacagaaactggaggtattccaatgctgctagagttcttggagcaaaatattg

SEQ ID NO: 93454 - DNA, 141 bp, Homo sapiens
ccgaggttggaacacctggcgagtcctcggtgtcggtggccggcagtcatctcgcggccgttcaggagaaccgcctggcccagcacaccctccaggccctgcagagtgagctggacagcctgcgcgccgacaacatcaagc

SEQ ID NO: 93455 - DNA, 75 bp, Homo sapiens
cttgaatgactggaaactgattggaaactctttgggaaagccactcgaaaaggagtcagtggatcggtggggaaa

SEQ ID NO: 93456 - DNA, 98 bp, Homo sapiens
ctggctagaagcagagacaccaggacagaaaagacagtgttctgctttcatggagttcacagaagagtcgaggaggggataaaaacattcagatggca

SEQ ID NO: 93457 - DNA, 75 bp, Homo sapiens
ccggaggaggacaacgactaccaccgcagcgacgagcaggacttgctgtgctcagatcctccattcaagagagct

SEQ ID NO: 93458 - DNA, 90 bp, Homo sapiens
tgaggagaacgactgggttcgcctgcccagcaaatgcgaagacttaattcagtgcacaaatgagatgaatgtgaacatcccacagttggc

SEQ ID NO: 93459 - DNA, 82 bp, Homo sapiens
aagacccggagcggcggcgactccgccccgcagcaggaagaggatgccaagtttgtggaggaacggagaaagcagctccaga

SEQ ID NO: 93460 - DNA, 51 bp, Homo sapiens
ggaaaacaacttcgagggcagatacgtcccggaggacctccttcccgtcta

SEQ ID NO: 93461 - DNA, 102 bp, Homo sapiens
tgcattcctggtaacaagataacccagcaagactcagactgctaacccaaggatcaactattaaggcctgggcagatttgtccttcccattctgcaaccatg

SEQ ID NO: 93462 - DNA, 74 bp, Homo sapiens
agggtgaagcatgtgaggagccgccccggagccaagcaggagggaagagagttttgcggcctccaggtggtgga

SEQ ID NO: 93463 - DNA, 100 bp, Homo sapiens
ccctgcagtcgcctccaacacccgctgctgcccgcccgctgcctgcctgcctggcatctctctctcccgaaaaggtcacggatcgcctacagtgacgaag

SEQ ID NO: 93464 - DNA, 100 bp, Homo sapiens
ctgcaattgagaaacaggcacacaagtgtgaggagttgctaaatgctcagtcctacaagattatcaattttgcccccagtttacttcggattatagtctc

SEQ ID NO: 93465 - DNA, 75 bp, Homo sapiens
ccccatatctcccgtgtccacgtcaggggatgtctgcaggtgaagagaaacggattcgggaattctaccagtccc

SEQ ID NO: 93466 - DNA, 100 bp, Homo sapiens
tgatgctttccccaacatatcttcagatgagtcttataccttagatagaactttaggagacaaaaggcatcttgtgactgtagaagtggaagcaaggcca

SEQ ID NO: 93467 - DNA, 90 bp, Homo sapiens
aaaagttccatactgtcagtggaagcaaggttgcatctggaggtggtggggttggagatggtgttcaagaaccaaccacaggcaactgga

SEQ ID NO: 93468 - DNA, 82 bp, Homo sapiens
cggggctgctggtgggccgcgtcgaagacatggaccagggctacggaggccgccatggcatcagatgaaggcaaactttttg

SEQ ID NO: 93469 - DNA, 100 bp, Homo sapiens
tgctcttgctaaagaggtagcaagaaagaaaattagagtgaatgtagttgcaccagtcactgtgtgcccagtattctgcagacaaacgagaagatgagaa

SEQ ID NO: 93470 - DNA, 75 bp, Homo sapiens
cgaggccacaaagacagatgttactgtggttaggtttccagtgatggctgtggacacctagtgacttatcaggat

SEQ ID NO: 93471 - DNA, 75 bp, Homo sapiens
aggccggcgtgacaggctctgtcactaaaataggtaagaatgattgatgttggctgatattggagtgctcattca

SEQ ID NO: 93472 - DNA, 127 bp, Homo sapiens
cggctgcttcatcaccaccgccttcaaagacaggagcgtcccggtgcggctgcacgtctcgcggatcatgctatccagctatgggacacagcaggacaagaacgattcagaaagagcatggttcagc

SEQ ID NO: 93473 - DNA, 75 bp, Homo sapiens
gaaataccgcattcttatcacaaaggtgaaaattagttctgctgtgcttaaagctgcggcccatcactatggagc

SEQ ID NO: 93474 - DNA, 100 bp, Homo sapiens
gcccggggaactccatcacagcctgtaagaagtcagaagaagaagttgtagaaggagagaaggaagtcgaggctttgaagaaaagtgcggactgggtatc

SEQ ID NO: 93475 - DNA, 100 bp, Homo sapiens
agaagacggaaatccaaaggcagacagtacgggctcccttcgccaaactcttcattttctctgaggagcaccgaacagccagttccctgagcagtggtgc

SEQ ID NO: 93476 - DNA, 99 bp, Homo sapiens
tgttaagaaatcgacgctgcactgtagcatacctggttttcagagaaagatgctgatgaggtgaaaggaatttttgtagataccaacttatacttcctg

SEQ ID NO: 93477 - DNA, 83 bp, Homo sapiens
gcgcgaagctggccaaagcctgcccagacggctcacctgtgcgggatggaacaaaagattacctaggaacagtacgatttggg

SEQ ID NO: 93478 - DNA, 73 bp, Homo sapiens
ttcaagcttaggaccacccaccatgcctatccaggggcaagattcttgccaagagaattaatgtgcgtattga

SEQ ID NO: 93479 - DNA, 80 bp, Homo sapiens
gacttccccattctgtgccagacatgtcttggagaaaacccatatatccgaatggagaattctcaccaaatgttcccaaa

SEQ ID NO: 93480 - DNA, 74 bp, Homo sapiens
aagaggaggaatcacgctcggaaacaatggacctgcctagagctggaacgttacctccagagcgagccctgcta

SEQ ID NO: 93481 - DNA, 74 bp, Homo sapiens
tcgggtgggagtgacccgattttccaggtgtctggaaatgaagtatggaaatgaaatcatgaataaagacccag

SEQ ID NO: 93482 - DNA, 50 bp, Homo sapiens
gtgattttaaagttggagatgcctcagtgatcccagggcaccgccgtgtg

SEQ ID NO: 93483 - DNA, 100 bp, Homo sapiens
ctgggttggagttactggtatgccttggtatggaacccttcagatcaaagcttaccaataaattcagtatgtagaacagattaacgtagttgaaatgagg

SEQ ID NO: 93484 - DNA, 82 bp, Homo sapiens
tgcgtcctgcactgaaaggaaatgacggattttccatcactggtgcaagctatatttaacggagatcctgatgaagttcgag

SEQ ID NO: 93485 - DNA, 75 bp, Homo sapiens
gctgctcatttgccggtgaccggagccatccagactgaggaagacccggaaacttaggggccacgtgagccacgg

SEQ ID NO: 93486 - DNA, 100 bp, Homo sapiens
ggcttcagaatgcagtgttttcggatgaagatgagctggattcccacaccatggtgaagactagtgtggagagtgtgggcaccatgcgggccacaagcac

SEQ ID NO: 93487 - DNA, 75 bp, Homo sapiens
tgctgcaccgacctcgacgtcttgcctgtgtcccacttgttcgcggcctataggaactctgcgaccttcaagtcg

SEQ ID NO: 93488 - DNA, 74 bp, Homo sapiens
gcatattgtactggcctgctgctggcccgcagggatgagagccactcagagtgggtgtcttgtgtccgcttctc

SEQ ID NO: 93489 - DNA, 90 bp, Homo sapiens
ccccctgcaggaactctacaacccaatccaggctaaaaggattcttgaagatcatggctcacctgctggagagattgatgatgaagacaa

SEQ ID NO: 93490 - DNA, 83 bp, Homo sapiens
ctaaagcagcgtgcgttcagccctgggctggcacacccataccgagcagcggtcctgagggccatggagagggtcctgagcag

SEQ ID NO: 93491 - DNA, 100 bp, Homo sapiens
ctcaccgggcagcgtgggtgagcggcgcagcggcggcagcggagagcgagagaggggagcaggtgcgaatcataaacatgtacaaggaaattgatcaaac

SEQ ID NO: 93492 - DNA, 75 bp, Homo sapiens
cctggcaagattcttctgaattgtgctgccttggccaaaagagggcaaactctttgattctacaatagctgatga

SEQ ID NO: 93493 - DNA, 76 bp, Homo sapiens
cgtgaaacttgtccgtgccaaatttcctgaacacaccattatgaatgtggccccgtcccagagcaccacccgagac

SEQ ID NO: 93494 - DNA, 100 bp, Homo sapiens
tgcaaaaatgtctctctatccatctctcgaagacttgaagaattaaacaaccaccatgtcgagcaaaaaggcaaagaccaagaccaccaagaagcgccct

SEQ ID NO: 93495 - DNA, 100 bp, Homo sapiens
cccagagctccgatccctgcgcgggctcgagagctcgccccgaacgggggtcttcctcctccgccgttgacagtcacttatataagaagaaccttgatgt

SEQ ID NO: 93496 - DNA, 101 bp, Homo sapiens
gcgtcttccgtgggcaacgtggccgacagcacaggatttcctaatggaaacattcatcatgtttaagaacctcattggaaagaacgtttaccccttcgact

SEQ ID NO: 93497 - DNA, 88 bp, Homo sapiens
cgcggcgcggcggccgggccctcgagacggggacgcgaactgtgactgtctaaatggaggaacatgtgtgtccaacaagtacttctcc

SEQ ID NO: 93498 - DNA, 88 bp, Homo sapiens
cgcgcaggaaacatggcggcggcgggtgttgtgagcgggaaggatctttggaattagacactccttcacagccagtgaacaatcacca

SEQ ID NO: 93499 - DNA, 88 bp, Homo sapiens
gactccaggacacccctgaagccgagaaatgctctatcaaggcttgtcaagcagtgtgctcatcacatggtaaatcatgcagcgtgga

SEQ ID NO: 93500 - DNA, 90 bp, Homo sapiens
cccctcctcccccctcccctcagcggtggctcccaagaagtccgagacacgcggagtcttttagtcctgctatacagctgcaccttgtac

SEQ ID NO: 93501 - DNA, 100 bp, Homo sapiens
gcgccgtgctcgccctcgtcctcgccccggccggcgcttttcgcaacggtttggcaaacatcgaaaagatgacaagattgagaaaacgggtaaaataaaa

SEQ ID NO: 93502 - DNA, 78 bp, Homo sapiens
aaaatcacctcgtttaatggcacaaggtgaagtattacagacacttagcacctgatcacttgctgcaaatatgtcatc

SEQ ID NO: 93503 - DNA, 50 bp, Homo sapiens
tcccccagttccaaagtgtcttaaaggagactttcatcgaaaacttccac

SEQ ID NO: 93504 - DNA, 50 bp, Homo sapiens
cgtgatcctgatgctgaatactgagggttatttggtagagtgataaaagc

SEQ ID NO: 93505 - DNA, 100 bp, Homo sapiens
tggccccgagggcggatccgagagttcacatgagactctgaatatagtggaggagaagaagcgggcagaggttgggaaagacgaaagagtaatcacagaa

SEQ ID NO: 93506 - DNA, 75 bp, Homo sapiens
caggagacccctctgctgcaccacttcatgacaaagagagacttgttgaaatgctccgtgccatgaagcagaagg

SEQ ID NO: 93507 - DNA, 98 bp, Homo sapiens
cgaagtcaaggccctgtgcgctaaggccaggtcttgggcgtctttggtactggcttttttaggggtctgcctggggattacccttgctgtggatagaa

SEQ ID NO: 93508 - DNA, 90 bp, Homo sapiens
cctgcaccgcgcctcgcaaaaaacctccacagctgttgagaaaaaggagaaacctcttccaagacttaatatccattctggattctggat

SEQ ID NO: 93509 - DNA, 100 bp, Homo sapiens
gcaggaggaattgctggtgccttcattcatgaaaagcatgcccatacgattaaacctgcttacatccttaatgttcagtcaagcagtgatgacaccagtg

SEQ ID NO: 93510 - DNA, 100 bp, Homo sapiens
gagaagatggctttaaagaatacacttcaagttggtttttgctctcggcagtctccagctatagaggtcctgaaaagagggagaaggcattggaaactaa

SEQ ID NO: 93511 - DNA, 87 bp, Homo sapiens
gacgtggtggagattgaggccaaactggacaagcagtgagttcctcctcctaactcaggcttccaggaaggatatcctctgcttctc

SEQ ID NO: 93512 - DNA, 50 bp, Homo sapiens
aaagctcatggcccaccagctagaaagcccacatatgacagtggacatag

SEQ ID NO: 93513 - DNA, 90 bp, Homo sapiens
gagcagcaggcctccgggcccggcgccgccgcccgcaggcatgtagaagtccaggtgtttggtgatcaccatggcaatgctgtgtacttg

SEQ ID NO: 93514 - DNA, 96 bp, Homo sapiens
gaccattcagatgggatctttccggatcaatccagatggcagccagtcagtggtggagaaaccagcctggacaccaagtctgtgtcagaaggccac

SEQ ID NO: 93515 - DNA, 100 bp, Homo sapiens
gtagttcatggccttgtggacttcatacaaaattatagtagaaaaggccatgagacccctcagattctgcatatacagactcatgaaaaattcatcagag

SEQ ID NO: 93516 - DNA, 85 bp, Homo sapiens
acaattacctgcacgacacatggaaattggactaaattaccagaatgcaggggttatgatgtgattgctcaagcccaatctggga

SEQ ID NO: 93517 - DNA, 90 bp, Homo sapiens
caaaaacccccatcctgggaaaaatggggaagctggactacatccccgtggagggtgagctgctgttccagcctggggaggcctggaaag

SEQ ID NO: 93518 - DNA, 96 bp, Homo sapiens
gcctcccgagtagctgagattacagggcgatgagggtggagagcgggtgctacagcagcgctggacctccttcctcaaggcccagctgctgtgctc

SEQ ID NO: 93519 - DNA, 100 bp, Homo sapiens
tctaatctcacggatatcctctgttgggggagaaggactatctcagcaaaaactcatcatcaggctgttaacttcaacattttcgagggcatggtttgcc

SEQ ID NO: 93520 - DNA, 51 bp, Homo sapiens
gacagctatatttgcccatgttattcaagtggcagctagactgtcttgctt

SEQ ID NO: 93521 - DNA, 111 bp, Homo sapiens
ttccccggcccacagtgggggtgtgcaaacccgagagaactgggtcctcgatgggcttcctggaatattggtgtgtttatttgcatcagatgtgctggaattcatagaaat

SEQ ID NO: 93522 - DNA, 83 bp, Homo sapiens
cttgggcaccaccacccaatcaggacagagcagcatgattccaggtggctcaatgatgatgattattctccaccgtctaagag

SEQ ID NO: 93523 - DNA, 100 bp, Homo sapiens
tccttttccctctccctttccctaagttttgatgtggacaatggcacatctgcgggacggagtcccttggatcccatgaccagcccaggatccgggctaa

SEQ ID NO: 93524 - DNA, 100 bp, Homo sapiens
ccataatagaatgtctacattcctaatgagtccctggaacgccagatgcgtgaaatggaagagaactttgccgttgaagctgctaactaccaagacacta

SEQ ID NO: 93525 - DNA, 100 bp, Homo sapiens
actgccatcaatattacaacgtatccagaccaggagaacaacaagttgcttaggatatctcctcaccttgcttacgaacaggaatttcagcaacatcacc

SEQ ID NO: 93526 - DNA, 75 bp, Homo sapiens
gatgaaaaagtaccttcagtttgtggcagctctcacagatgtgaatacacgtcttgggcgtctttggtactggct

SEQ ID NO: 93527 - DNA, 115 bp, Homo sapiens
acgactgggaccgggacctgctgctggacccggcctgggagaagcagcagcgcaagctgcctcccgaatgatcaccaacagcctgaaccatgactctccacccagcacacccccc

SEQ ID NO: 93528 - DNA, 97 bp, Homo sapiens
gaggagagcaccatccgacactttgccatgaatgccgcagccactgcagcagctgagagataacgaaggaggcccaacttcattcaataaggagcct

SEQ ID NO: 93529 - DNA, 90 bp, Homo sapiens
cgacagtgaggaggacggagaggatgtgttcgaggtggagaagatcctggacatgaagaccgaggggattcttggatctcccagtcagct

SEQ ID NO: 93530 - DNA, 50 bp, Homo sapiens
cagaaatcattatcttagccaccagaattctgcttggtcagaatcgtgat

SEQ ID NO: 93531 - DNA, 100 bp, Homo sapiens
aaaagtatctcatatgaccagtggattatttttacccaagatacttaggtaagtctcaattacttctctactctggttgtcgtagaggcatagttggggg

SEQ ID NO: 93532 - DNA, 112 bp, Homo sapiens
tttgataaaaattacaaggactggcagtctgctgtagagtgtatcgcagtgttgggatagaatttttgcggcatttgaagagctttttccagattatgtttaaaattgaaac

SEQ ID NO: 93533 - DNA, 99 bp, Homo sapiens
gcgggtctgaggatgccctgctgtgtctctgggacctgcaggcacgcaagtggaaattcgagatgagctacacggcgctcgccgccttagtacccggag

SEQ ID NO: 93534 - DNA, 88 bp, Homo sapiens
gtgaatcagcagccaaatacacctcaaggaataggttctcctagtgtctatcatgcagttatcgtcatctttttggagttttttgctt

SEQ ID NO: 93535 - DNA, 100 bp, Homo sapiens
aaaagatagtcttccaattgatctttcagaattaaatttcaaggataaagatttggatcaagaagagttggagtcacttctccaattgtggctcacactg

SEQ ID NO: 93536 - DNA, 100 bp, Homo sapiens
gggccagcaccttctctctaaagcccaagaggagtttgagtccttaatggatcagtactttgcccgaatgtgctccttgatgttaagtaaggaattgcca

SEQ ID NO: 93537 - DNA, 100 bp, Homo sapiens
aatgtggagcagaggaacgattcaagaaattctgcggtaaaactcatcagacttcatgactgattaaagtgagaaagatcagtctaaagaaaaggagaag

SEQ ID NO: 93538 - DNA, 100 bp, Homo sapiens
ggaaagcgggaagactcatcggagcgtgtggatttgagccgccgcattttttaaccctagatctcggttcagcgtcttccatttctttcaagctcaaatc

SEQ ID NO: 93539 - DNA, 76 bp, Homo sapiens
ggtgggtccctcagcccttctgagctctgtgctgaacaagaaaaacacaccttgactttagtcagatacatcactg

SEQ ID NO: 93540 - DNA, 75 bp, Homo sapiens
cctgatcgagtccctccggaactcacactccagatttgaacatggaattcaatccttcagatcatcctcgggcca

SEQ ID NO: 93541 - DNA, 100 bp, Homo sapiens
gttctcctccgccgctcctccgggcttgccctggagccctcaggtactccaaagattcaggtttactcacgtcatccagcagagaatggaaagtcaaatt

SEQ ID NO: 93542 - DNA, 100 bp, Homo sapiens
aaaattcatcagagagcattttactactgagctgcaaaggaacatcggaatttgccttttatgcgtgagctgaggtatctatttgcacttcttgttggta

SEQ ID NO: 93543 - DNA, 100 bp, Homo sapiens
accatggaaaaagtgacttgagcaggactgactgcattgcacagatgatggatatttacgtatgtttgaaacgaccatcctggatggtggacaataaaag

SEQ ID NO: 93544 - DNA, 101 bp, Homo sapiens
cgcgacgaccctagtgctcgtcgccgtggcgccatgggtgttgtccgcagccgcagaaatgcactcggtgatggaaagagagccactattctgaagaacac

SEQ ID NO: 93545 - DNA, 86 bp, Homo sapiens
acaacgccttaacccaaggaagtgactcaaactgtgagaacttcaggagaacatgatcgtgtatgtggaaaagaaagtgctagaag

SEQ ID NO: 93546 - DNA, 98 bp, Homo sapiens
tgtacttgccgccgtcccggctcacctggcggtgcccgaggagtagtcgctggagtccgcgcctccctgggaggactttttgtaaatagcccagaaga

SEQ ID NO: 93547 - DNA, 98 bp, Homo sapiens
ggaactacagccagatgcggatccgggccaagcagtgggccgagctgagctgactgctgcccactttggaggaggcggtgggctccttcacaagaaga

SEQ ID NO: 93548 - DNA, 83 bp, Homo sapiens
atgaaagagcgccttgggacagggggatttggaaatgtcatccgatggcacaatcagggtggctgttgcaccacgccctccct

SEQ ID NO: 93549 - DNA, 50 bp, Homo sapiens
aggagcgggagccgggtgcacggtggacgacatccttggagaaggcagcg

SEQ ID NO: 93550 - DNA, 90 bp, Homo sapiens
tttgttcttcagcagaatttgaccaacatcaccatgtcgcgggaggcagacctggactttgcaaggtctagtgacggagcccgcgcgcgg

SEQ ID NO: 93551 - DNA, 82 bp, Homo sapiens
tggacctcatgcaccatattcacatgttgaactatgaatagactgacccagctggaaagactggatttgggaagtaacgaat

SEQ ID NO: 93552 - DNA, 90 bp, Homo sapiens
gcgaccgtcgccggcagcgccgcgaaggcggtgctcgggccagcccttctctgccgtccctgggaggcgggctgcatgctgttcccccac

SEQ ID NO: 93553 - DNA, 100 bp, Homo sapiens
ggagccgggacccagggcccgggatcgccgagcccgacctcgggcgccccgccggtcacctccgcgcggacaccaggccaagactaaggggctgcagagc

SEQ ID NO: 93554 - DNA, 89 bp, Homo sapiens
ttagcgtgagtgatcactctcaatcccgggatctgtggttgtggttccggagaatctggttgtgctgtgtgtggatgttgcaaggcctg

SEQ ID NO: 93555 - DNA, 75 bp, Homo sapiens
ggacaatggcaacatgtacaagagcatcctggctcgagtacttgcaccagaagcagagcaaagtctccagtgagc

SEQ ID NO: 93556 - DNA, 50 bp, Homo sapiens
gcaagcatgcagcttactgcttgaaagagcaagcaccagaagcaccaggc

SEQ ID NO: 93557 - DNA, 100 bp, Homo sapiens
cggggaacttgtgagcctgcggtgaaagacggagtctcagtggcgtgatcctggttcactgcaacctctgggccccccccaacccactgcgagttcaagc

SEQ ID NO: 93558 - DNA, 100 bp, Homo sapiens
gtctcttctcgccctggcggggaaggcgcccgctccggccggcaccatggacagcgaggcattccagagcgcgcgggactttctggacatgaacttccag

SEQ ID NO: 93559 - DNA, 100 bp, Homo sapiens
tcttcacccaggccctggagtgcatgcgcagccatccaacatattctttacaatggatgatgtggtcaaggttggagactttgggttagtgactgcaatg

SEQ ID NO: 93560 - DNA, 100 bp, Homo sapiens
aagagacaaccataaagagaaagctagtgaatgggaaaatggtagcgagcttgcatggagatggtcccctgcggctgctgctgctgccctctatccacct

SEQ ID NO: 93561 - DNA, 75 bp, Homo sapiens
catctggagtgagtgcaggaccagattacaggctgtgccagccctggaaaaacagttacaattgttgttcgtggt

SEQ ID NO: 93562 - DNA, 100 bp, Homo sapiens
cggtgcaagaggcgcaaacaagccaatcccaggaggaaaaacggcacgtctgagaatggtggatgtggtggagaaagaagatgtgaatgaagccatcagg

SEQ ID NO: 93563 - DNA, 86 bp, Homo sapiens
attgtacaagccaagatttcatctattgaatttgggtacatggcaatgtatcaggaacacagaggttggattctgctacagtcagg

SEQ ID NO: 93564 - DNA, 83 bp, Homo sapiens
gatgaaggtggaggcagcgcggctctcagccttatgatctcctcattgcgtccccctctgcccactggacttggacttcagat

SEQ ID NO: 93565 - DNA, 75 bp, Homo sapiens
tttggaaaaaggctgtctctagacagcagtcttgtgggaacctcagaacctgttctggatccacagcaaatccaa

SEQ ID NO: 93566 - DNA, 76 bp, Homo sapiens
aaataatgcagtgtatgccttcttaggcttgacagccccacctggttcaaaggcatcaacttctaactcatctcgc

SEQ ID NO: 93567 - DNA, 82 bp, Homo sapiens
gggagcagtatgtggaccgagcccggtactcagccttttaaaaactggaggtggataggcatgtagacctgctagaagttgc

SEQ ID NO: 93568 - DNA, 99 bp, Homo sapiens
ttgaagaccagtcccttgaaaaagacagtgacgacaaaacaccagatgatgaccctgagcaaggaaaatctgaggatgagaactggactgatgaccaac

SEQ ID NO: 93569 - DNA, 106 bp, Homo sapiens
tgggcgacccggtgtgtggcgcgcccagagccccgcgtttcagccctagggaagatgttccattcagtgccacaccagtgaatgccttttataatggctgcatgga

SEQ ID NO: 93570 - DNA, 83 bp, Homo sapiens
caacccgcaaacggtgggggtcggccggggccgcttcaccacttacgaaatcagggtcaagggatagctgggagtatggccac

SEQ ID NO: 93571 - DNA, 83 bp, Homo sapiens
ggcggcccagagggaatggaccccgatggtgtcatcgagaacactcgtgaaactgctcaggccatcaagggtatgcatatacg

SEQ ID NO: 93572 - DNA, 100 bp, Homo sapiens
aaaagtcgtcactctttcaccaagaattttgcaagagtaaagatgcaagtaaccatgtccctggcatctttggtgggaagagcaccagactttaatgaag

SEQ ID NO: 93573 - DNA, 51 bp, Homo sapiens
ccagctccgaaatcaccaccaaggtggagccatcgaagcccccacccacag

SEQ ID NO: 93574 - DNA, 100 bp, Homo sapiens
ctgccatggctcagaccgtgcagaatgttacattgtcgctcactctgcccatcacgtgccacatttgcttggggaagaatcctggttttgacttcagtgg

SEQ ID NO: 93575 - DNA, 75 bp, Homo sapiens
attgattaaagagaaactcatttttccctacgtggaattggatctacatagcactgttgcaagaattcaattccg

SEQ ID NO: 93576 - DNA, 98 bp, Homo sapiens
ccaccatcccaccaaagggggctgctgaccgagagagctcactcagccaggctccctgactggcagtcctcacctttccgagctgtctgtgaactcgc

SEQ ID NO: 93577 - DNA, 100 bp, Homo sapiens
atgctcaagagcccattcttttcatcattcggaagcaacagcggcagtcccctgcccaagggtcaagaaagtgactcatcagagacctctgtgcgaggac

SEQ ID NO: 93578 - DNA, 90 bp, Homo sapiens
tatggctatgcagaattttcaggaactttgtgaaggaagccgaggagatcagctccaaccgccggatgaatagcctgaccctaaaccggc

SEQ ID NO: 93579 - DNA, 100 bp, Homo sapiens
agctccaaaaccactcgcatctgagcctgccgatgacactgcagagctgtacgtctctgaccgagagggaagcgatgccacgggagatggaaccaaggag

SEQ ID NO: 93580 - DNA, 100 bp, Homo sapiens
ttgggacccaccgctgccctcagctccgagtccagggcgaggagcatcagatccatgctgctgctgactcggagccccacagcttggcacaggctctctc

SEQ ID NO: 93581 - DNA, 75 bp, Homo sapiens
acaggaacttggtagtagtcaatcagcaggacattcagtcccctgaagctgaatatgtagatttgcttcttaatc

SEQ ID NO: 93582 - DNA, 100 bp, Homo sapiens
atgtttgaacaaactcgaagaacagctgtggaaagaagttgcaaaacactgggtctcaacaaatggcagctattacatcagacagtgacgagtcctgctg

SEQ ID NO: 93583 - DNA, 101 bp, Homo sapiens
ccctacatttggagcctggacacgcagtacagcaagtacaacaaacacctcttcgtgcacattgggcatgccaaccattcttacagtgacccattgcttga

SEQ ID NO: 93584 - DNA, 98 bp, Homo sapiens
caccgtgaacggacagtcccccccagtttgcgcgataacaatatctcagaccgaggcatctgcaagctcattgaatgtgctcttcactgcgagcaatt

SEQ ID NO: 93585 - DNA, 98 bp, Homo sapiens
ggatttccttgggtcttccggtaggagctgtaatcaattgtgctgacaacacagcagtgcctgatttgagatggggtcccaggtctcggtggaatcgg

SEQ ID NO: 93586 - DNA, 83 bp, Homo sapiens
gacccggggggagcgcggggcgacgctggctgcagggacccggtgacagcgtgagagcaccgaacaagatttgtgatgaaatg

SEQ ID NO: 93587 - DNA, 75 bp, Homo sapiens
ggattttgcacttgtgcagaccgggcgagcagagtaagaagcagaaaaagcttgtggtgaaggggggcaaaaaaa

SEQ ID NO: 93588 - DNA, 90 bp, Homo sapiens
caacattcgatttattggaggcctacttgcagcatattacctatcaggagaggagcatatgggtgattttggaagcattcatagacccgg

SEQ ID NO: 93589 - DNA, 97 bp, Homo sapiens
aaagaccaggttcaagggtctctccagaaaatcttgtggacaaatccaggggaagatgaggagaaaaggcgacctgatattttccatgcattgaaaa

SEQ ID NO: 93590 - DNA, 75 bp, Homo sapiens
ggaggttcgcggctctaacggggctttctacaagatttcagagacaactgtctgaaccctgccaccccttccctc

SEQ ID NO: 93591 - DNA, 100 bp, Homo sapiens
catccactctcccagagtgctccaacgggactgaaccacatgggctggccagagcacacaccaggcactgcaaaagatacagatattgtggatgaagcca

SEQ ID NO: 93592 - DNA, 100 bp, Homo sapiens
gattttcctatagcagattttacgccaaaccactggctgccttggtgacatacaaaggaagggaggtgattcatggcaggggacgtggaaggattctgtt

SEQ ID NO: 93593 - DNA, 73 bp, Homo sapiens
gaacttgccctgtctcctcgcagatgaggtttttggattcaaagcataaaaaccattacaagatatacaatct

SEQ ID NO: 93594 - DNA, 75 bp, Homo sapiens
aaaagagttgattgaaattatctctggtgctgcagctctacttggccttgaaagagctgatacagctgaaaaagc

SEQ ID NO: 93595 - DNA, 100 bp, Homo sapiens
atgtactccctctccggggatccatttgggctgcaaacgctggtgtcacagccagccccccaactgacctcatctggaagaaccagaactcgtggggcac

SEQ ID NO: 93596 - DNA, 100 bp, Homo sapiens
gacgaacatttctgggtgacactcaacaggattcccggaaagaccacagcaagattctttcattcgtctcctcctagcctgggggaccaggctcgaactg

SEQ ID NO: 93597 - DNA, 90 bp, Homo sapiens
tcgagattgtcgtcatcctagaaggcattgtggaaacaactggttttttgcatgtctgacacccatgactccacctggaccttatggctc

SEQ ID NO: 93598 - DNA, 100 bp, Homo sapiens
gatgaatgcaataattctccattgagaagagagaagaacattctcgaatacctagaatgggtcattgtatacagcagattctagaaagtgttaatcattg

SEQ ID NO: 93599 - DNA, 80 bp, Homo sapiens
gctatcatcacatggtacaagcgtgggggcagccttccctcccgacaccagcttgagcagccgggactgctctccctgaa

SEQ ID NO: 93600 - DNA, 100 bp, Homo sapiens
ctctgctggcatctgcgattgcatttttcctgttttaacaacggctgtgctagacgaagtggtgaagcccaagacagtcattttgtttactcattcagcc

SEQ ID NO: 93601 - DNA, 100 bp, Homo sapiens
gctgcagaccaggccaggccagctggacgggcacaccatgaggcctcatggcggtccgagcttcgttcgagaacaactgtgagatcggctgctttgccaa

SEQ ID NO: 93602 - DNA, 100 bp, Homo sapiens
tccaagtggaggttcctacagagattcatatgagagttatgaacacagatatgtagaactcttcttgaattctacagcaggagcaagcggtggtgcttat

SEQ ID NO: 93603 - DNA, 88 bp, Homo sapiens
gcggggcggcggcgacgcggacctgcggactagcgaacccggaggcgtgagccactgcatccagcctaaactcactagggagattttt

SEQ ID NO: 93604 - DNA, 75 bp, Homo sapiens
caacaatatcattctccttcaagggaataaaattttctaagatggcggcacccagtcagcagaggctggttgtag

SEQ ID NO: 93605 - DNA, 74 bp, Homo sapiens
cccgcgccgccgggacccccaggacgacgtgtacctggacatcaccgcattgcagtgtcgagatggctatgaac

SEQ ID NO: 93606 - DNA, 101 bp, Homo sapiens
ctttgttattggagaaacatgcagattatatcgcatcctatggctcaaagaaagatgattatgttcccaccttagggtcccaggaaggtgcctttgagaat

SEQ ID NO: 93607 - DNA, 74 bp, Homo sapiens
ccagattcttccattttgaaaaaggaccgtataatagacgctggccccaaaggaaactactctcgatttatgaa

SEQ ID NO: 93608 - DNA, 100 bp, Homo sapiens
gatctctcaagattcagtagggaacagagttgtggaaagtaaaaatgtagccctaccaaaaggaactattgtactggcttctccaggctggacaacgcac

SEQ ID NO: 93609 - DNA, 83 bp, Homo sapiens
ggacgttcccttcacggagaaagattttgatgttctaagaacggaagcatctgggctggatggaatttagcatcaagcagagt

SEQ ID NO: 93610 - DNA, 87 bp, Homo sapiens
agttggagaagtatccaatagggatattgtagaaactgtctttaacctggagcatttcctccctctgctatttatacacggaaagac

SEQ ID NO: 93611 - DNA, 82 bp, Homo sapiens
ggctcctgtcgtccgttctctcaggctcccgttcagatgaggacggggacttggttgccttttccagtgacgaggaattgac

SEQ ID NO: 93612 - DNA, 75 bp, Homo sapiens
cggactggagctctgggctgcggcgcacgccttgcccgcccagtaatctatgccagcaattatgacaatgttagc

SEQ ID NO: 93613 - DNA, 74 bp, Homo sapiens
ttttggaaaagagaactcaaggtctggcagggagaaaggagcaaggcacattgcaagcaacccgtgccttgatg

SEQ ID NO: 93614 - DNA, 100 bp, Homo sapiens
ccagaggagaataatttggaagactgttgtggatgttgataccacctatccagataagaagtccatcttaatgtacatcacatcactcttccaagttttg

SEQ ID NO: 93615 - DNA, 98 bp, Homo sapiens
cgaccagatgcaccagcaggagtccacatcgaggacgtcctccgggcactcccacgaccagagttctagtaactcatgttctgtacttgaagctgcca

SEQ ID NO: 93616 - DNA, 117 bp, Homo sapiens
gataatgaaaagagcaaagatgtgaatggacccgaaccactcaacagccgaagcaacaaactgcactaattcagaaggagctggcggacatcactttagaccctccacctaattgca

SEQ ID NO: 93617 - DNA, 98 bp, Homo sapiens
aggtgccggtggtgcgagtcttcggagcgaccccggcaggaggactcacgaatggcagtggaagatacatctctgctgctccaggcgctgaagccaag

SEQ ID NO: 93618 - DNA, 75 bp, Homo sapiens
gtatgcttgggagtcttctgctggaggttccttcactgtgcgtgctgaccatggagtcctggagatggagcgctt

SEQ ID NO: 93619 - DNA, 100 bp, Homo sapiens
cttttggagcagcagagactgcttgcagaccaggattctataaagcttttgctgggaacacaaaatgttctaaatgtcctccacacagtttaacatacat

SEQ ID NO: 93620 - DNA, 98 bp, Homo sapiens
tgaggcggaacaggccgggcaccaaggcgcagatatttagcttcctgtggtatactgatgagcagaactcttccactacatacctcaattttgcctaa

SEQ ID NO: 93621 - DNA, 100 bp, Homo sapiens
cacggccagatctgccctccatggaataccagcaatggtggattttgctgctatgagggaggcagtgaaaactcttggaggtgatcctgagaaagtccat

SEQ ID NO: 93622 - DNA, 128 bp, Homo sapiens
tccgggcgcggggaagtcatgctcgcttcacggaggcaatagctagccggttcatgaaccatcgagctccagccaatggccgctacaagccaacttgctatgaacatgctgctaactgttacacacac

SEQ ID NO: 93623 - DNA, 80 bp, Homo sapiens
ttcgggctgggagcgtgctttccacgacggtgacacgcttccctggattgggcctttgaagacctcagcaaactaatgat

SEQ ID NO: 93624 - DNA, 100 bp, Homo sapiens
tcgggttgactagtggtggatccaactactcgctggccagacatacttctccatcaagtatgatggtgaaggatgaatatgtgcatgactttgagggaca

SEQ ID NO: 93625 - DNA, 100 bp, Homo sapiens
gggcggactgcaaacctggcacttctcgggaccagcagccgaaggcgcctctgaccgcttcagcaaccaggagggattgactgagatcttaacaacagca

SEQ ID NO: 93626 - DNA, 82 bp, Homo sapiens
ggagaaaagagaaatggagcaaaaacattccaccattcaacaaaagactggtattgctcgagttccacttgctggagctgcc

SEQ ID NO: 93627 - DNA, 83 bp, Homo sapiens
tccatcttcgggatcttcgacgggcacgggggagagggaggaatgatcaattggaatcgtctttttcctcctttacgtcagcg

SEQ ID NO: 93628 - DNA, 82 bp, Homo sapiens
acacgcataccccagcgcccggcagttatgtattctccgctctgtctcacccaggtgtggatgaggtcaccattgtcaacat

SEQ ID NO: 93629 - DNA, 90 bp, Homo sapiens
ctggtagacggcaaggatgtgatgccagaggtcaacaaggttctggacaagatgaagtctttctgccagaaactggcgatggaatatgag

SEQ ID NO: 93630 - DNA, 107 bp, Homo sapiens
ggacgggccatacccaataaccaggtgcttggcaaaatcgagcgggccattggttatggaaacaaaggacatgctttacatcgtcactgaatttgctaaaaatggag

SEQ ID NO: 93631 - DNA, 100 bp, Homo sapiens
gccgctggctgcggcagcaggggactagcgtgagagcattagtgccagcagtagttcccaagggctgtctcagccatccacccagacgactcagtatctg

SEQ ID NO: 93632 - DNA, 100 bp, Homo sapiens
ttataactcaaattcacaacctccggggatgcgaaaacacccggccttactgaggaacaaaggtaagactttgaccccgacgcaggcttcagtgattgcc

SEQ ID NO: 93633 - DNA, 96 bp, Homo sapiens
aaggctgagatgcttgcagactatttctctttggaaattgatgagtcgagttgaactgaaaagattatgtgaaattttcacaagaatgtttgctga

SEQ ID NO: 93634 - DNA, 100 bp, Homo sapiens
cttccactgcagtgcagacgggcgatcctgcttccaaagatcaggttcaagggcagacggggtttttgaggaggattcgcaaattgacatagccacagta

SEQ ID NO: 93635 - DNA, 74 bp, Homo sapiens
cttggaccccggcttctgggacgcgtcagatatccaaacacagcctgtgagcttctgacttgtgatgtgccgca

SEQ ID NO: 93636 - DNA, 100 bp, Homo sapiens
tgttcatccacccatccgtctgtccatccgcccactcagctatctgtttatcaagaatcatgtcaaccctgccatggacttcacgcagactccacctggg

SEQ ID NO: 93637 - DNA, 82 bp, Homo sapiens
caggactgaacagggagccaactgtttctttgaacagtaaatcagatccacacaacttaaagatctgctgccgagtgaatgg

SEQ ID NO: 93638 - DNA, 100 bp, Homo sapiens
tcagctgcaacaacttcaatgcagtctttagtcgcatttctaccaggtgatcataaacagcacaatcacaccgaatatgaccttcaccaaaacgtcacag

SEQ ID NO: 93639 - DNA, 100 bp, Homo sapiens
gccgtgagctgcggcaggacggctggagaatggccaacatgcagggactggtggaaagactggaacgagctgtcagccgcctggagtcgctgtctgcaga

SEQ ID NO: 93640 - DNA, 100 bp, Homo sapiens
ccaaggtgctgagccggcgcggggtcggcgctgggctggaggcggcggagcgcgagagcttcgagcggactcaggtaatattttcatatctcgaacctca

SEQ ID NO: 93641 - DNA, 97 bp, Homo sapiens
gttgcggacagtatgaggcaagcgcagggggacggggaccagcagctgtcgccgccgctctcagatggagggagcgaggaaccaccggatcgaagac

SEQ ID NO: 93642 - DNA, 75 bp, Homo sapiens
cgacctcgacgtcttgcctgtgtcccacttgttcgcggcctatagatgaggacggggacttggttgccttttcca

SEQ ID NO: 93643 - DNA, 75 bp, Homo sapiens
ctggaactcacctacctgcccaccaatgccagcctgtccttcctgcaggtgtccctcaatgcatggttctggtcc

SEQ ID NO: 93644 - DNA, 88 bp, Homo sapiens
aagatggcgccaggacgaaggccctactgggcaagaacattaaccaggtggtatttgttggaaatttcttgagaattaatacgatcgc

SEQ ID NO: 93645 - DNA, 75 bp, Homo sapiens
aaacatggtggacagaaagtcagcctcttgtgcttatgttcctgaggaagaattgaaggcagcagaaatagatga

SEQ ID NO: 93646 - DNA, 96 bp, Homo sapiens
cggagaccctcccttgaaaccggcactgggacttctcgatctctggaggcacctgttgcaagtgacaggttcacctttccttgccagtgaagatgg

SEQ ID NO: 93647 - DNA, 50 bp, Homo sapiens
aggattccaagtaactcttatttgaaactgccagaggcatgcagcattgg

SEQ ID NO: 93648 - DNA, 100 bp, Homo sapiens
ggactgaccaaaaagcagctggacagcacaattggaatccaccctgtctgtgcagaggcaccaagtatagatgagaaagtagatcttcattttattgcat

SEQ ID NO: 93649 - DNA, 75 bp, Homo sapiens
tacacaaatgcacgcgacaggaaccagcaacaacgaactgtctacagactgatgctcgtgaaagcatggaacgtg

SEQ ID NO: 93650 - DNA, 74 bp, Homo sapiens
tcgctgattccagagagctaaagccgatgagcatgaataatctttcatttagtgagctatgttgcctcttctgc

SEQ ID NO: 93651 - DNA, 75 bp, Homo sapiens
aatctccggccgaagagcggcggcggcagcggcggtattgttgcagcatctggcagtgagactgaggatgaggac

SEQ ID NO: 93652 - DNA, 76 bp, Homo sapiens
gaaggatcaaggacggatgatgaagtagtacagaggacacaagcctctgtcaaaaaagaagagaaaagatcgtctg

SEQ ID NO: 93653 - DNA, 98 bp, Homo sapiens
tgtatttgatcctgattctacccaagtacatatgatttcagctgcaatggcagctgatgttctaatcatgtcagataaagatgatattgagactccac

SEQ ID NO: 93654 - DNA, 75 bp, Homo sapiens
aaccctctctctaccacgagcagcgccctgggagccctcacgagtcccggtgctctgtggatgtgtatagtttta

SEQ ID NO: 93655 - DNA, 100 bp, Homo sapiens
cgatgcagctgtgcgctctcattttaccaaagtggaacgcatccccaaggccctggaagtgacagacctgagaaatgccagtggcctgacagcagcagac

SEQ ID NO: 93656 - DNA, 100 bp, Homo sapiens
tggtgtcgtttttccttgagctgaacgtcttgcaacagtggccgcacgcatagatgacaagagcacctcaaaggcagcagcctcaaggagcagccatggc

SEQ ID NO: 93657 - DNA, 100 bp, Homo sapiens
tgggctgtgctggtcacagccacactctgcaccgctaggccgtccccgaccttgcctgaacaaggacctgaaggagaagaaggagaaggtggaggagaag

SEQ ID NO: 93658 - DNA, 74 bp, Homo sapiens
atgtacatgggccagcggtatgtggaagtgacatcgtctttaaaccctgcgtggcaatccctgacgcaccgccg

SEQ ID NO: 93659 - DNA, 83 bp, Homo sapiens
gctgcaccgacctcgacgtcttgcctgtgtcccacttgttcgcggcctatagcccgtggaccgggagcccgtggaccgggagc

SEQ ID NO: 93660 - DNA, 75 bp, Homo sapiens
gctagcaccccagagagtgaggagtggagcagcagccagcctgggcaaacttgaagataaatcttttgactccag

SEQ ID NO: 93661 - DNA, 100 bp, Homo sapiens
catcgtgctgcagtacgtgcctcatgatcgcttcaacaagggcaccttcagcctgcggaagctatgggccttcacggggcctggcttcctcatgagcatt

SEQ ID NO: 93662 - DNA, 100 bp, Homo sapiens
tggaacccaagcagtggcgaagggaatcgcaaggctcttccctgaccattttctactgtccctgcgcgagtgatgagccctcctcttcagctaggaaaat

SEQ ID NO: 93663 - DNA, 74 bp, Homo sapiens
ttgagggtctccagggttctttggggcccgagatatggaatgtgcagatgtcccactattaactccaagcagca

SEQ ID NO: 93664 - DNA, 82 bp, Homo sapiens
cacaccctcctgtatggcacgaaccccctcaaccggcagaaactggacagtatcgagaaccttccctgcgaacttcagagga

SEQ ID NO: 93665 - DNA, 74 bp, Homo sapiens
aggcgctgcgccgcaacgccgagcgcaccgacatctgcctgctcaaagatgcatcactgtaagcgataccgctc

SEQ ID NO: 93666 - DNA, 100 bp, Homo sapiens
cggctccatcaacacgctctcggcaaaaaatctcctgcaaagaagctgagccatgcaattagtaaatctttggggtgtgtacccacgagagaacccccgc

SEQ ID NO: 93667 - DNA, 80 bp, Homo sapiens
tgcgtgagcgagcagaggcttaaggtcttcagcggggcgctccaggaggcactcacaggaattgcattttgtgaaaaaag

SEQ ID NO: 93668 - DNA, 100 bp, Homo sapiens
cagaggccagctgtttttgaggatcctgctccacagagaatgctctgcacccgttgatatgcctgaggaaacccagacccaagaccaaccgatggaggag

SEQ ID NO: 93669 - DNA, 83 bp, Homo sapiens
tcagtttacagaaggcaagtgtaaagcactgccagtgaaagatgtagaagataaacctgaacaacaaaccagaacaagagaga

SEQ ID NO: 93670 - DNA, 97 bp, Homo sapiens
atgggcactggacgggtgattatggtggcccacttttcctcctgccaggaaagaccacagcaagattctttcattcgtctcctcctagcctggggga

SEQ ID NO: 93671 - DNA, 132 bp, Homo sapiens
cgagactggagcagagccgctgggcgccggagccgaggcgagcgccgcgcgcaccactgggttacacatcattttggaatgactgtatatcatctggattacgtggctgtatgttaattgaattagcattga

SEQ ID NO: 93672 - DNA, 76 bp, Homo sapiens
tgtgaggggattcacttgtgtgcggaactcctcggaaccatgtccacaggtcctggctaccctgggaagagacaag

SEQ ID NO: 93673 - DNA, 88 bp, Homo sapiens
cgtcgctatgagcgggaccaccctgggcacagcaggcatcggagacaatgcagatcttcgtgaagactctgactggtaagaccatcac

SEQ ID NO: 93674 - DNA, 50 bp, Homo sapiens
actcaaacaccacctctgggacaggacctcagcagccatgtcgaagcccc

SEQ ID NO: 93675 - DNA, 75 bp, Homo sapiens
tccccaggaatcagctcttctgttcattccagtccacagcccctcaacagagacttttttgtataacgagctcta

SEQ ID NO: 93676 - DNA, 75 bp, Homo sapiens
tttgacaattatcggcgctgtgtcagcagaaatgaccatggttgacacagagatgccattctggcccaccaactt

SEQ ID NO: 93677 - DNA, 113 bp, Homo sapiens
catcatgttctcatcgggcaccacgggcgcacccaagtgcatggtgcattccgctgggacaatgcagatcttcgtgaagactctgactggtaagaccatcaccctcgaggttg

SEQ ID NO: 93678 - DNA, 83 bp, Homo sapiens
ttcccatccaatacttggtgactggtctattcaagttcaagtgaatcttttctgggagaagaggctacaaggacttagtgcat

SEQ ID NO: 93679 - DNA, 75 bp, Homo sapiens
ggagttggaatttgtgcaatgtttagccaacccaaattaccttaattagacattttaaatccaaaggatgtgatt

SEQ ID NO: 93680 - DNA, 100 bp, Homo sapiens
ttccagagccaaggaggaagggttgtccgggtgtttggagaagagggattgaccctgaatcttgaagacgttcagcctcatgacttaggaaaagttggag

SEQ ID NO: 93681 - DNA, 100 bp, Homo sapiens
ggagaagtaccagtgcacaagctacaatccctcaaaaaagtgcttcagagtgagttttgtacagctattcgagaggctgtgaggatatcattgctgagag

SEQ ID NO: 93682 - DNA, 83 bp, Homo sapiens
ggcacgacagccttgaggcccagcgctagcacccagacactgacgaatgcctagggactccctgtcagcagagatgtaaaaac

SEQ ID NO: 93683 - DNA, 83 bp, Homo sapiens
caaggacatacagaccaatgtctacatcaagcacccagtgtccctggagcaagcattgatctggagaacattgtgtactacaa

SEQ ID NO: 93684 - DNA, 82 bp, Homo sapiens
atacctctcgcatgtccacctcacagctccagaaggtcctgagcctcggccacatcagcaccgactacccgctggccgaaac

SEQ ID NO: 93685 - DNA, 74 bp, Homo sapiens
atggcctataaaatgcttcaagtagtcctgtgctcaacattgcttatcgctctacattaatcatactcctccac

SEQ ID NO: 93686 - DNA, 50 bp, Homo sapiens
ggaccacggggagccccacgaggatgccggaccagatctctgtctcggag

SEQ ID NO: 93687 - DNA, 78 bp, Homo sapiens
gaactgcagtcatggatcatattacggtacccaaggtggtgaaaactattggcttgagggaagtttggttctttggtc

SEQ ID NO: 93688 - DNA, 98 bp, Homo sapiens
ctggatcaacaccggggagtctgcggcttcacgttacagcatggaagctgttgccaagtttgatttcactgcttcaggtgaggatgaactgagctttc

SEQ ID NO: 93689 - DNA, 75 bp, Homo sapiens
cagcagtcatgtaactataagcagcttcggaaaggagccaatgaggtttgcagatggcgtgtacctggttctgct

SEQ ID NO: 93690 - DNA, 75 bp, Homo sapiens
agaaggaacggaaacaaagttattttgctcggacactgccttaggaaaaccacgagaggtgtttcgacttcctac

SEQ ID NO: 93691 - DNA, 109 bp, Homo sapiens
cttgaatttcttacagactgccaaatggaacagacaagcaggttgtcttgaattcagcagctgaatatcaagacctttgaattcaacaagaagttaagacatttatagt

SEQ ID NO: 93692 - DNA, 82 bp, Homo sapiens
ccaataaccaggtgcttggcaaaatcgagcgggccattggtaactaggatttctacctcaaccgcgagacctatgcaaggac

SEQ ID NO: 93693 - DNA, 75 bp, Homo sapiens
ctcactttctgaaatggaacctcaggatcttgagctagagatcagtgctaacatcttccgtacacttcctccaag

SEQ ID NO: 93694 - DNA, 75 bp, Homo sapiens
ctctcgaccccctctcttggggtttaaggacccattccaacaatctcgtaaaacatggtggattactatgaagtt

SEQ ID NO: 93695 - DNA, 100 bp, Homo sapiens
aaggatgacaaggaaagtgtccctatctctgataccatcatcccaggactttatggacagcagcctgctaaccaagtcatcattcgagagcgctatcgag

SEQ ID NO: 93696 - DNA, 100 bp, Homo sapiens
aggcggcccgcttcctggaatggcaagcgcagcaacaacagagagcacgtgcccgtggaccgggagcccgtggaccgggagccggtggtgtgccaccccg

SEQ ID NO: 93697 - DNA, 100 bp, Homo sapiens
cacatcctctcggtgttcccgctggcggcgggcatcttcttcgtgaggctgctcttcgagcgttctcctgtgcctcctgttggctctctttgcatctggc

SEQ ID NO: 93698 - DNA, 100 bp, Homo sapiens
agaccccagttttgctgaccttattcaccatgacttatcagctggcaaacttccccagactctgcgaggaaacggaaaggattgttgctaaccacattcg

SEQ ID NO: 93699 - DNA, 88 bp, Homo sapiens
ggacttgaagcagaaagcaagtgaatacgagtcagaagctttcaccaacaatcaccagtggtttacacaacattgcaaggagcattga

SEQ ID NO: 93700 - DNA, 100 bp, Homo sapiens
ccctgctgatttcacagggagcatggcccttgatctcaggaccttgaccccagaactgaaagcgtctctagcagctgatatccccagacttggatatagt

SEQ ID NO: 93701 - DNA, 100 bp, Homo sapiens
aagctgctgcgctgctcgcgttggtagcacaggcggagtgcagcggaggcccctgccgctgccgtcatgccgttcccgtttgggaagtctcacaaatctc

SEQ ID NO: 93702 - DNA, 90 bp, Homo sapiens
gacgtggccagacatggcattctgcaggtggcagatcttcgcaaatactgtggacaatgcccgcatcgttctgcagattgacaatgcccg

SEQ ID NO: 93703 - DNA, 98 bp, Homo sapiens
aggccatggagggacaggatccggaggcgccagctcaaccctacagcctccgcttggcgtcccgatgctctccaccagcggccccgtacatcaccagg

SEQ ID NO: 93704 - DNA, 73 bp, Homo sapiens
gcgacgcccggcccgcagggcagactcatggagagatttctcatggatggcttgtatccttcaaggtttgaag

SEQ ID NO: 93705 - DNA, 124 bp, Homo sapiens
ggaatcatggcggctgcgctgttcgtgctgctgggattcgcgctgctgggcacccacggagcctccggggctggaccctttgaggatgccctgaagttgcatgagtgctcagtggcggcaggcg

SEQ ID NO: 93706 - DNA, 82 bp, Homo sapiens
cttcgcgtctgcccggccaagaggcaaaggggaggttacgcagcaaaccatccagaagaattcagaaggagctggcggacat

SEQ ID NO: 93707 - DNA, 123 bp, Homo sapiens
ccagatggccgcgctgcgtcgaatgctccacttgccgagcctgatgatggggacgtgccgcccctttgcgggtactggtgtggcatactcggacagagaagcccaagatgaagcaggaggagc

SEQ ID NO: 93708 - DNA, 83 bp, Homo sapiens
cagaaattctggaacacctatatgatatgagaccttggtggggacaattgggaaaaagtttgccagaaagagagaccatgcca

SEQ ID NO: 93709 - DNA, 100 bp, Homo sapiens
cattcttcccatcctgctattctgtctcgatggtttcagaacacagtagccatcaggaccccctgacagatagctgctaacatccagtcatggataaaaa

SEQ ID NO: 93710 - DNA, 74 bp, Homo sapiens
gaaaattgaaatcagccagcacgccaagtacacttgctctttctgtggcaaaaatctaggtcaacctattaaga

SEQ ID NO: 93711 - DNA, 76 bp, Homo sapiens
ttttgtttgccgaagtgacccccacaacgatgcgtctcctggatggggcgcaaaccagaagaagagggtgtggaag

SEQ ID NO: 93712 - DNA, 75 bp, Homo sapiens
tgtacaccctcaacaaacaccagcgctttgggtgatgtgtccaatctagatcccaacttctcatttgaaggcacc

SEQ ID NO: 93713 - DNA, 50 bp, Homo sapiens
ccgagcaggaggcgccatcatgcggagcgtgctttggacaccatgaattt

SEQ ID NO: 93714 - DNA, 82 bp, Homo sapiens
gcaacacgtgatgtgtctacttatcaggtgtcttgggacaaggtgcgcattcctggtgtgctgcagcgattgggagtgacat

SEQ ID NO: 93715 - DNA, 75 bp, Homo sapiens
gctggctttgccattagcgggggcctttcctgaggacggcgtacggagtgtggtgcaatgcgtgttttactatct

SEQ ID NO: 93716 - DNA, 83 bp, Homo sapiens
agacttttctcagatgttggatatttgcttggaaaaacgtgtgggtacgaccttggttttgagcaaaattttggactgtgaag

SEQ ID NO: 93717 - DNA, 82 bp, Homo sapiens
caccagttcgcccgtccccctgccccgttcacaatacttcccaagtaagaagcggaagaggagccgctggaaccaagacaca

SEQ ID NO: 93718 - DNA, 100 bp, Homo sapiens
agttactgccgcgccaccgagtccggaccggagactttggggcctaactaggatcttcagcctgttaaacaagaaaacgaaaaaccccttccagaaaaca

SEQ ID NO: 93719 - DNA, 96 bp, Homo sapiens
agacctgggcactggcagctcgggcttcaccattgacaacgtgatgaaggttttgatacttatagaggactcccttcaatttccaatggaaattat

SEQ ID NO: 93720 - DNA, 96 bp, Homo sapiens
cgcaaactcttaaggtcactttctgaaggcggcctcatcacagtcggaggttgggcccgaaggcatcctgcagaacggggctgtggacgacagtgt

SEQ ID NO: 93721 - DNA, 98 bp, Homo sapiens
cggcgggagctggacgcgggaggaggcggcggcggcgtactatactggcaattgctggagaagattttgcaattgttgcttctgatactcgattgagt

SEQ ID NO: 93722 - DNA, 100 bp, Homo sapiens
cacaggaagagcaagagagtttatctgtgggtgagaattgcggcgagcagtaagaagcagcgtgtggaaaagggagacgattgttcatcaacatgagtat

SEQ ID NO: 93723 - DNA, 84 bp, Homo sapiens
ggaaattgcgctggaccgtcgccttgctcctcgccgcggcggggactgcaggaacaagatcactcaaggtgaaggataatctac

SEQ ID NO: 93724 - DNA, 83 bp, Homo sapiens
aagacattgcttcgggaagccatccatttagccagagacggtctcgccacattgcccagactggtctgaaagtcttgggctca

SEQ ID NO: 93725 - DNA, 74 bp, Homo sapiens
tccatcaggaccccagatgtctgacagccctgtgtgacaccaagataagtaactggactgctgggacgggcccg

SEQ ID NO: 93726 - DNA, 74 bp, Homo sapiens
cgcccttcccctggatacggtcactttctacaagggtgtgtccgcagccggccaggtggtatccctgaaggtgt

SEQ ID NO: 93727 - DNA, 100 bp, Homo sapiens
attgctgagaagctctacactcaaggtagtttatgccaacgtgacttcattcatacagatgaaccaaggatcgggatagcagtataaaattagaatcaag

SEQ ID NO: 93728 - DNA, 50 bp, Homo sapiens
cgcctgcaagttcctgagagccggggttacagctgaagtaaagcacaaca

SEQ ID NO: 93729 - DNA, 100 bp, Homo sapiens
gacgggcggtggccgcactgggaccccggaatcccgcgcgctgcccacgattcgcttctgagagggagagacaagctcaacgagaagatgccctcgagct

SEQ ID NO: 93730 - DNA, 103 bp, Homo sapiens
ccggactagcgagatggcaaggctgaggacgggaggctgattgagaggcgaagatgtgacaagccgaggcggtgagccgggcaggaggaaggagcctccctca

SEQ ID NO: 93731 - DNA, 100 bp, Homo sapiens
cttgtatgtctctaccatccaactgatctgtgcccctgccccatgcagaagaaatgtcttagcacggatgataccatcggggaccttaagaagctgattg

SEQ ID NO: 93732 - DNA, 96 bp, Homo sapiens
cacgagtcattgtttggatctgttgctgatgatcagaaacttatgatgcatttctcattgcaattgtggtaccagatgttgagacattatgttcct

SEQ ID NO: 93733 - DNA, 82 bp, Homo sapiens
ctggacctcatactcttctgttttccattccacatgagtcagtttttttcaccgctcaaccctgtgagagtacacattgaaa

SEQ ID NO: 93734 - DNA, 73 bp, Homo sapiens
atggcgcttgacggaccagagcaggccaccagcttgggctccccacggagggcagcaagtgggacttggggaa

SEQ ID NO: 93735 - DNA, 80 bp, Homo sapiens
attcttctcttctccgatttaccaggtgacttagattctaccacatttggtaccataccaccacaccctccacctccccc

SEQ ID NO: 93736 - DNA, 75 bp, Homo sapiens
ggacttatatccgggattgtggggttgaaatcacaaagattagacacctttttagataggtgttcttcagcacca

SEQ ID NO: 93737 - DNA, 100 bp, Homo sapiens
tgatgaagggaaggaaatcatgtcaagcgaagccttgaaaaagctgccctgagacggtgtcccgccgaaagctggcctgctgctgtgggtctgcaggctg

SEQ ID NO: 93738 - DNA, 90 bp, Homo sapiens
cctcccaggtagctgggattacagataaatatgggatatcttctggtgatgctggaagtaccttcatggaaagaggtgtgaaaaacaaac

SEQ ID NO: 93739 - DNA, 50 bp, Homo sapiens
ggccctgacggaggggaggaaggtaacaagatgctcaactatagtgctcc

SEQ ID NO: 93740 - DNA, 82 bp, Homo sapiens
taccaagaagccagtcaagcggccagatgtgcactcccagcaacacccctgccacgccgcccaacttccccgatgcgctggc

SEQ ID NO: 93741 - DNA, 97 bp, Homo sapiens
agcagtcctaccatgtcagccttcccagtagctgggaccacagggcacctcaacacctttgcttcgaatagcctgggctcgaatcatattggatgaa

SEQ ID NO: 93742 - DNA, 75 bp, Homo sapiens
gacccttctctcccctccactttctcccgggacttcgggaactatcacctgggcgtcatgtcctggatcatcccc

SEQ ID NO: 93743 - DNA, 83 bp, Homo sapiens
gccgtgttcgacatcctggccgtgctgcaggttcgtgctggccgtgggcagcgccgtctttgatgccatgttcaacgggggaa

SEQ ID NO: 93744 - DNA, 74 bp, Homo sapiens
ccgggaggggggagcggcgttggaggccaccgtttccaggggagctgaatatgtatctgcaagagagtggatga

SEQ ID NO: 93745 - DNA, 75 bp, Homo sapiens
atcggaagtgaattcggattgtttgctgctccatcaagtatgatggtgaaggatgaatatgtgcatgactttgag

SEQ ID NO: 93746 - DNA, 90 bp, Homo sapiens
aggacataagagcagaagctgacacctttatgtttgagggcccagttagatgactacttccctgattccgagaaccctgaagtggggggc

SEQ ID NO: 93747 - DNA, 85 bp, Homo sapiens
aggtgaaacagattgagccagaaggaagacaatgctgcattcttcagcatccaaatattcttcagtgtgttggacagtgcgtaga

SEQ ID NO: 93748 - DNA, 100 bp, Homo sapiens
ttcaagtccttcctggggaccgggaggaaatactatgtgaagtatgccggaaaacatttaaacgcaaagattaccttaagcaacacatgaaaactcatgc

SEQ ID NO: 93749 - DNA, 75 bp, Homo sapiens
agtcctctgtcaccaacatcatctgaggctgaatttgataagaccactgtaattcagaggtccgtggggccagcc

SEQ ID NO: 93750 - DNA, 98 bp, Homo sapiens
acagcagcctggaaaatgtgaaggtacaaggactgttcgtctgacatacaaaaacagcagcagccgctcttctaaaacattcaaaccaaagaagaata

SEQ ID NO: 93751 - DNA, 75 bp, Homo sapiens
tgtacaatctaaagtggactgcattttgggatgatccaccaacacattctcagccagacagtgatgatgaagcag

SEQ ID NO: 93752 - DNA, 100 bp, Homo sapiens
gggacagggggatttggaaatgtcatccgatggcacaatcagttagagatgtttatgattacttccgagctgtcctgcagcgtgatgaaagaagtgaacg

SEQ ID NO: 93753 - DNA, 98 bp, Homo sapiens
tctgccgagcctcggtcccggcccccatcctccccgccccatcggttgttgtctgggcgggcaagccgattttttcagttgatattcaccctgacggg

SEQ ID NO: 93754 - DNA, 82 bp, Homo sapiens
agcaacacagaatttctgcaagtaattgctctgtctcccactccgtgctgtctgagatgcaggtgattgagcaggaaacccc

SEQ ID NO: 93755 - DNA, 80 bp, Homo sapiens
gtacgataccgaagcgggctgtgtgccccttctccacccagagtgagacggtttaagcggaagcatcttactgccattga

SEQ ID NO: 93756 - DNA, 73 bp, Homo sapiens
tttgagaaaggaaggaatatatcctgactgattgaactgcaagcacatgttgaccagataactgaaatggcag

SEQ ID NO: 93757 - DNA, 75 bp, Homo sapiens
tgacaccggagtttgacgaagaggtggtttttgaggtacaggtttgcagattccgccagcagcacagcaagctct

SEQ ID NO: 93758 - DNA, 100 bp, Homo sapiens
acataagcaggcttgtgcacaaccagttctttattggtgaaaacatgaatccagatggcatggttgctctattggactaccgtgaggatggtgtgacccc

SEQ ID NO: 93759 - DNA, 51 bp, Homo sapiens
acattccgaaactgtcaagattggcaagcaaagtgcagaggaaagttccac

SEQ ID NO: 93760 - DNA, 50 bp, Homo sapiens
taccaacctaccctgcaaatcaggcctgggccgaggccactggtgcatat

SEQ ID NO: 93761 - DNA, 75 bp, Homo sapiens
tcctgctcacagcccgacgaaaggatgccaaatgtcaatgagctgaaggagaaaggcaacaaggccctgagcgtg

SEQ ID NO: 93762 - DNA, 100 bp, Homo sapiens
ctactttatagtcctgattcaagtgttggcggatggaagggaggagactcctgaccctcagaatggccacgccttggagtcactcttcataaggttgtag

SEQ ID NO: 93763 - DNA, 111 bp, Homo sapiens
gaagaaacgggccgcgaaccgcagtatcatgctggccaagaagatcatcattaaggacggaggcacggtgaaatgacaatggatgctctgttggctcgattgaaacttctg

SEQ ID NO: 93764 - DNA, 98 bp, Homo sapiens
aactttcaacaaccccacagaggactttaggagaaagttgctgaaggcaggaggggaatgctgtctctgcaatttgagaggaggtgctcttaagcaaa

SEQ ID NO: 93765 - DNA, 100 bp, Homo sapiens
gccccaggtgtaagcgcagaaagcaggcgaacccgcggcgcaataacgtggctgcttcaacccccaactccactgctggtgcagccatgaactccttgac

SEQ ID NO: 93766 - DNA, 83 bp, Homo sapiens
tcgacacacaaagaatagagttgagcctgtgggacacttcggatgcagaggccaggatgtgggcccagccctgtgccaggagg

SEQ ID NO: 93767 - DNA, 90 bp, Homo sapiens
gccatggcggagtcggcgcctgctcggttgtcatttacgtgctgaagcatattgacttgaggaaaacgccttccttggagtttggcatga

SEQ ID NO: 93768 - DNA, 95 bp, Homo sapiens
agagccacacacaccatcatggtcctgccccccgaatccaagcccaacttcacccctctcgccatcttggcccatgttctcggcgccatccagcc

SEQ ID NO: 93769 - DNA, 100 bp, Homo sapiens
gagcttctgggagccaccgtctgaagggcgccctgcgtccggcagaggaggcgagcatcccgctcaggtgatgaggaacccctcgcgcacccagcgcaga

SEQ ID NO: 93770 - DNA, 100 bp, Homo sapiens
ccgtttctggctccgggctgagcttcctggagaagaggaaggcatctcccctcagatggaagtcacatgtgtgcccacgcccacaagcacagtgtcctcc

SEQ ID NO: 93771 - DNA, 95 bp, Homo sapiens
tccagtccttgctgaagagactttccgttacatgattgaccacgttgttcctgagcctgggacaagcctgctcgctgcctttgaccagtggaggg

SEQ ID NO: 93772 - DNA, 83 bp, Homo sapiens
ggacaagcttctggaagctctttgcggtggcgttggtgctgtttgcggatgctgatgcagacaatgcagatcttcgtgaagac

SEQ ID NO: 93773 - DNA, 84 bp, Homo sapiens
aagtttctaagtgaaagccttatgtggcatatttcatcacaagttgctgaacttaagacatgtgctcaccgatatgaaaaaagg

SEQ ID NO: 93774 - DNA, 100 bp, Homo sapiens
tttgccaaacaccctcgacttggttacctgcctgtccagacagttcttgaaggtgacaacttagagacgcagagactccccctaatgggccagattgtgg

SEQ ID NO: 93775 - DNA, 97 bp, Homo sapiens
gcggccgggggctcggccgggccgtcccggcctgcgcagcctgagactggattatggacagaacttggaaatattgagaataatttcttaaagccac

SEQ ID NO: 93776 - DNA, 100 bp, Homo sapiens
aacagaagaagccctttgaggagcactggaggaagcacaccctgtcctatgtggacgttggcactgggaagaatgttggctcaattaagaaacatcaggg

SEQ ID NO: 93777 - DNA, 82 bp, Homo sapiens
cagatctctgcagttacaggaacatcgtctgcttcatgtttggtgccctggttgtcagatgttggaaagcagtaggacggaa

SEQ ID NO: 93778 - DNA, 100 bp, Homo sapiens
tgcctcagcctcccaagaagctgggattacagatcctagtccactgcctggaacatggaagatgctccataattgtttgctgaaggaacgagtgataacc

SEQ ID NO: 93779 - DNA, 80 bp, Homo sapiens
ggtgcctggggctgaacgcggctttctgctttaatgaagcaccagttgagattcccagtccttctgaaaccccagctaaa

SEQ ID NO: 93780 - DNA, 82 bp, Homo sapiens
gctgccagcgccgggggcatgctcacctacggcgtctacctggtatcctgtggagcacccagacaaattcctgaagtttggc

SEQ ID NO: 93781 - DNA, 74 bp, Homo sapiens
ctgcctcccctgcgtcccgccaccggccgcttctgtcctcggtgaggccccactgcaggccccaccatggcgcc

SEQ ID NO: 93782 - DNA, 101 bp, Homo sapiens
ctactggaaaaaccattttcagttaaagcagagagaactcgatgccaccgcaacggtattggcgaaccggcaggatgaaagtgagcagtccagaaagcggc

SEQ ID NO: 93783 - DNA, 82 bp, Homo sapiens
cgctgctgctgcccggcctcggggtgatttgtggagctatgatttcttcagtggtgaatttgtggtgtcacctgaaccagac

SEQ ID NO: 93784 - DNA, 72 bp, Homo sapiens
taagtccttccggcagctctcccacctccagcagcacaccagaaacagagctgtcagtcagtgctgaattag

SEQ ID NO: 93785 - DNA, 74 bp, Homo sapiens
gcagcttcagcagaggctgcagggccagcagtactttaggatggagctgatgcatgctgaaaaactgaggaagg

SEQ ID NO: 93786 - DNA, 83 bp, Homo sapiens
ctcttcgctctcttcctggctgcgtccctaggtgtctgtgacctttgaggatgtggctgtgacattcacccaggaggagtggg

SEQ ID NO: 93787 - DNA, 82 bp, Homo sapiens
ggcgggcctcccgtttctggctccgggctgagcttcctggagaagaggaaggagttcatgatcaagtgttgcccacaccaaa

SEQ ID NO: 93788 - DNA, 75 bp, Homo sapiens
cccagtaggagaatgactccgattcgtgaccctcagcgccggtgcatgtcgataaatgcactcggtgatggaaag

SEQ ID NO: 93789 - DNA, 101 bp, Homo sapiens
gccttatttgaagaagaaggatgaatctcaggaaggcaagcagcagtatctgcagtccatagaagagcgtgagaaactgaaaggcctaaagaatgtatttg

SEQ ID NO: 93790 - DNA, 98 bp, Homo sapiens
aggcaggccgggcaggggtgtcggacgcagggcgctgggccgggtttcggcttcggccacagctctggattaatcgaattacagctgctagccaggaa

SEQ ID NO: 93791 - DNA, 75 bp, Homo sapiens
gcagcgggagctggacggcgagcgcgagcggcgcgagaaacccaacagcatggtggtggaacaccccgagttcct

SEQ ID NO: 93792 - DNA, 50 bp, Homo sapiens
ctttttctccaaacaccatttcaagatatgttgggaaaacggattcgata

SEQ ID NO: 93793 - DNA, 75 bp, Homo sapiens
gcactgtcacaggagaactacacaatgggaagtcgagacaacatgagtgtgattttgatctgttttccaaatgca

SEQ ID NO: 93794 - DNA, 116 bp, Homo sapiens
cctggcttggcagtatcggtttgtcattgagttggaccttagcccatctactggcattgtggttgcccccaagtttcctggcagtgtgtgatactgaggaggtgagcttgtttctg

SEQ ID NO: 93795 - DNA, 75 bp, Homo sapiens
ctctcagctgccacctgcctttgacctttttgaagcctttgcaaaacaaacagcactgctcagcattttgaactt

SEQ ID NO: 93796 - DNA, 123 bp, Homo sapiens
ctgtgttgctgctgctggattcagtgtgggagagtttgcagccctagtgtttgccggagccatggaatttgctgaaggatgagtgtgcaaaccatccgaaatgtgttcagcgttgaagctgga

SEQ ID NO: 93797 - DNA, 90 bp, Homo sapiens
ccaccggtccccaacgcatcatgccagggagccaagcgtcctgcccggcctaaggaagagcccaacactgctggaagtgagcatgcccca

SEQ ID NO: 93798 - DNA, 83 bp, Homo sapiens
aaggtggcctaccaggaggccaggggtgtcgccatgctgccctgtgagctacaggacatggttcggaaacatttgcacagtgg

SEQ ID NO: 93799 - DNA, 83 bp, Homo sapiens
ctcgctctaaagacggaaccgccacagcactcaaatgatatcatcaagttgaatcgaaaggaagggaagaagcagaattttcc

SEQ ID NO: 93800 - DNA, 100 bp, Homo sapiens
atgagttggataactctctaaactctcagtctaacacgaatacagacagctctgcctcaccgagggagccaaagacgagtgtaatgtggtagaagttgtg

SEQ ID NO: 93801 - DNA, 75 bp, Homo sapiens
cagaaagcaggcgaacccgcggcgcaataacggttgttatcgtcaggagctgtgcaaactgatgtgtgaacggct

SEQ ID NO: 93802 - DNA, 82 bp, Homo sapiens
tctttgtgccgcagcttcgcaggtaatactgcattgcatgattgtgcagaatctggaagtttggacatcatgaagatgcttc

SEQ ID NO: 93803 - DNA, 106 bp, Homo sapiens
aggcagctccgagtgaggaccatctacgagagcaaaatgattgaatacgatcctgaaagaagattagggataaacacacttgttacctatgatatggttccagagc

SEQ ID NO: 93804 - DNA, 100 bp, Homo sapiens
ccctcgtgagcgacccggacaccgacgcgctcatctgctggagcccgctgcatgaaagcggttacgatgctggcaaagccctgcagcgcctggtgaagaa

SEQ ID NO: 93805 - DNA, 74 bp, Homo sapiens
tttatcgtggtggagtccaccctggctgtggatgaaacgaggaggaagagatagtgaccgtaattcatcagaag

SEQ ID NO: 93806 - DNA, 75 bp, Homo sapiens
gagaccgcttaccgcatctggctggagccctgcattcgcggcgtgtgcagaacccgagcaacttcccgagaagag

SEQ ID NO: 93807 - DNA, 101 bp, Homo sapiens
aataccagtccccagtgagggtgtacaaatacccctttgaattaattatggcttgttctaagaacggaagcatctgggctggatggaatttagcatcaagc

SEQ ID NO: 93808 - DNA, 51 bp, Homo sapiens
cttggccaaagaagactccaaaggcgggtgccacgtctatgtgggcttcgt

SEQ ID NO: 93809 - DNA, 75 bp, Homo sapiens
tgatcatgctgggagccatctgtgccatcatcgtggtagttattgtaactgctaacattgtgatccagactgaac

SEQ ID NO: 93810 - DNA, 90 bp, Homo sapiens
ggcgacagcagccaggagtcatgagcgacagcggcgagcagaactacggcgagcgggttccaatttattgtgcctaaagaatggaacagc

SEQ ID NO: 93811 - DNA, 50 bp, Homo sapiens
gcttttctggagcgcttaccaggaatctatggatttcctgaaatatgttg

SEQ ID NO: 93812 - DNA, 100 bp, Homo sapiens
ccggcagagcagggggccgaggacaccagatgtcaagccctccaacatcctagtcaactcccgtggggagatcaagctctgtgactttggggtcagcggg

SEQ ID NO: 93813 - DNA, 96 bp, Homo sapiens
cggttgtcaaggattcagagcagatgtgatctgcgctaggtggcatctcctctcacggatgcctcgcaagccctcgcagggagcctggtagcaggg

SEQ ID NO: 93814 - DNA, 97 bp, Homo sapiens
cggggagcgtccggagctagctggatcctctaggcaggttattctggtacaagttaacccaggagaagcatttacaataagaagagaagatggacag

SEQ ID NO: 93815 - DNA, 90 bp, Homo sapiens
cttgctccattgtcgaccagaagaccaaagagaaccctgtacagtaagaaatatggtgtggacctcatcagatacactcatgcagcaaac

SEQ ID NO: 93816 - DNA, 90 bp, Homo sapiens
aaacgatccagacggcagggagtgcatcaaaggtgtgaacacaggttcttttgaagtaaccagtgatcttttttgcttaccctcatcaac

SEQ ID NO: 93817 - DNA, 75 bp, Homo sapiens
atataaaaggacttcatctcctcaacatggaaactaagacagtgggagtagctcaccgttacccaagtatgcttc

SEQ ID NO: 93818 - DNA, 100 bp, Homo sapiens
atcagcccctggaagcagatgaagcttctcccatggtacaagttgatgagaagggtgagaaagtgagaccaagtcataagcgttgtattgtaattcttag

SEQ ID NO: 93819 - DNA, 75 bp, Homo sapiens
ggaaacaaagttattttgctcggcaattgctggctactttgatatatattttgagaagaattgccacaacagggt

SEQ ID NO: 93820 - DNA, 101 bp, Homo sapiens
gcggacagtatgaggcaagcgcagggggacggggaccagcagctgtcgccgccgctctcaggattctttctactaatccagatacttgttgaagtgctgac

SEQ ID NO: 93821 - DNA, 98 bp, Homo sapiens
ggaacgactgcggcgcgctgctggacgaagagctctcctccttcttcctcaactatctcgctgacacgcagattactacagcccggccatgctgggcc

SEQ ID NO: 93822 - DNA, 82 bp, Homo sapiens
tggactccttcggcagtccacccaccgccgccgcctcccagcaagctgcctcgtacccagccagacggcaccagcgtccctg

SEQ ID NO: 93823 - DNA, 83 bp, Homo sapiens
cgccaatctagaatactctgcggacccccaggcccacctgggatagtaattgttgaggaaataaccgaaagtacggccacact

SEQ ID NO: 93824 - DNA, 83 bp, Homo sapiens
cttcccaacattcttgtctgtggaagaatttttaactttgaccatagagcataggaaggggactcaaggatagacttcaaaag

SEQ ID NO: 93825 - DNA, 83 bp, Homo sapiens
gggaaccctggtcaccgtctcctcaggactgcaagatggaggaaggcgggaacctaggaggcctgattaagatggtccatcta

SEQ ID NO: 93826 - DNA, 101 bp, Homo sapiens
ttccaaacactctgaatcccattctcgatcaagatcaaaatccaggtactacctttcccaagccaggtggtgtacaacagggtaggcaagtgtgggagccg

SEQ ID NO: 93827 - DNA, 75 bp, Homo sapiens
ggctgggaacccgcggtggagcgggacacgaacgtggggtctaatgtgatggaagagcaggacctgcgggacatc

SEQ ID NO: 93828 - DNA, 75 bp, Homo sapiens
ccagcgtgtgtcagcctccttatccaaacggcaaggcagcctccccgggatgtctcctgggctataacgaaaagc

SEQ ID NO: 93829 - DNA, 100 bp, Homo sapiens
caaggtctctcgcgggcgggagaacggaaaactcccaacttcctgctgaagtgagtagtgaatatagtatggacaaggcaatggttgaatttgctacatt

SEQ ID NO: 93830 - DNA, 75 bp, Homo sapiens
aagctgcagcggaggaaggcgagactcgctctgttgcccaggctggatcatagctcactgaagcctcaagtgatc

SEQ ID NO: 93831 - DNA, 74 bp, Homo sapiens
gacgttccctcccccgatccaagttggaattagcatcctctcggggagatcctgaaggagctagacgagtgcta

SEQ ID NO: 93832 - DNA, 82 bp, Homo sapiens
tgcaccccaccttgatccagcggacttacggggggatatgagactttctactcggaatatcctgagtgttgcgtggatgtaa

SEQ ID NO: 93833 - DNA, 80 bp, Homo sapiens
ccggcttgttgtcttcaattaaaaaatttattaaaggaagcacacctaaggcctttgaagacctcagcaaactaatgatc

SEQ ID NO: 93834 - DNA, 76 bp, Homo sapiens
agctggctgtcctgaaatattataaggtggatctgtggtgcattggagtgctttgctatgagctgctggtggggaa

SEQ ID NO: 93835 - DNA, 74 bp, Homo sapiens
actgtgagaacaacacgcctgactgcacagagagggaacacagccgcacccgggtctgtgccagctgtggttgg

SEQ ID NO: 93836 - DNA, 88 bp, Homo sapiens
tgatggagattttgatgtggatgatgccaaagttttattaggagacatagatgattgtgacacactggcacaaacccgcatgtatgac

SEQ ID NO: 93837 - DNA, 75 bp, Homo sapiens
ctcacgctgagagggacacgcagtgacgagcggccgaagcagctttgcggttatgaagacagtatggagtttcca

SEQ ID NO: 93838 - DNA, 71 bp, Homo sapiens
gcaattcaactgggagggctctgtgccagttcttgcctttctgaagggaacctcagggcctgatccgacta

SEQ ID NO: 93839 - DNA, 74 bp, Homo sapiens
ctgtatcttcatggtgcggctcatcttcgagaggtgccagcgagatttcagattcctgtaaacctctaaagaaa

SEQ ID NO: 93840 - DNA, 100 bp, Homo sapiens
tcaggcaatctcagcaagaacagtacagtattaccttgtcggatggcagttcctgatctatgtggaatatattattcgagtgcaaagaggaatttctgtg

SEQ ID NO: 93841 - DNA, 100 bp, Homo sapiens
caggaccctctggaagcctagaaatggttctgaagaaagtctccaaatacattcaagagcagaatgagaagatctatgctccacaaggcctcctcctgac

SEQ ID NO: 93842 - DNA, 98 bp, Homo sapiens
tctcaatatctgtcttcggtggactccttcggcagtccacccaccgccgccgcctcccagagatcctgaaggagctagacgagtgctacgagcgcttc

SEQ ID NO: 93843 - DNA, 75 bp, Homo sapiens
tgtggagagcgacccgtggccttgtgtttcagttttcggctttgtgagaaaccttaccatcaaacacgatggcca

SEQ ID NO: 93844 - DNA, 96 bp, Homo sapiens
cggggcgcagcaaagggagctggagcgcatggctgaggtcttggtcaccggggaacagctacggtgctgctacccccgtatgatgatgccactgtg

SEQ ID NO: 93845 - DNA, 75 bp, Homo sapiens
tcagagacatgagaagattcatactgcaaatagtagtgatagtgaagaactttcagctggtgaaagtataactaa

SEQ ID NO: 93846 - DNA, 83 bp, Homo sapiens
ggaggccgcctggggtagcggcggcgggagtcctggcgctctgcagaactctgacagcgtcccacctggctacgagcccatct

SEQ ID NO: 93847 - DNA, 48 bp, Homo sapiens
tggagtggtggatcagaccaaagatggccctggcttgaaaaacagtcc

SEQ ID NO: 93848 - DNA, 75 bp, Homo sapiens
gaattacctgaatggagtgaaaaagtggctcacaacattttgtcaggtgttgatagattggataaagatctgacc

SEQ ID NO: 93849 - DNA, 82 bp, Homo sapiens
tgcagaaaagcgaccggcggccacagacaatgcagatcttcgtgaagactctgactggtaagaccatcaccctcgaggttga

SEQ ID NO: 93850 - DNA, 75 bp, Homo sapiens
gatcgatctaagatggcgactgtcgaaccggcgaaggaggtggaggagaccatcgagggcatgctcctcaggctg

SEQ ID NO: 93851 - DNA, 97 bp, Homo sapiens
ctgcacacggtcaactccaggcacgaggccagcctgaagttgtacaagctcttcagtaggttacctgcaacatccaggatcagaacaagtacaattt

SEQ ID NO: 93852 - DNA, 100 bp, Homo sapiens
cagaccccgcgcggggcgccggctccatggcgaccgggctcggggagccggtctatggactttccgaagacgaggtgcattggatcgttgtgtgatgggg

SEQ ID NO: 93853 - DNA, 99 bp, Homo sapiens
caggagattgcgagggagcgatgcggtgcagcgcgaccgaagccaggacagcacagccgtagcactctcagactctagctcaacgcaggacttctttaa

SEQ ID NO: 93854 - DNA, 100 bp, Homo sapiens
ccaagggacaaggtgtcaacaatgtgccgtggtgaaagtggggcaggtaaaaccgaaagcactaaattgatcctcaagtttctgtcagtcatcagtcaac

SEQ ID NO: 93855 - DNA, 75 bp, Homo sapiens
tgggaaccagtctttcaaaatatttttaaagagcgagaagaagatttgaggcgtttgtctcgcccattggaatgt

SEQ ID NO: 93856 - DNA, 131 bp, Homo sapiens
gcgcagaaaactcctccagcagatccggcttgcccagaaagagaagacagccatggaaggctttctgtctctggtcgtgatgagaacagtgtggagttaaccatggctgagggaccctacaagatcatctt

SEQ ID NO: 93857 - DNA, 101 bp, Homo sapiens
cacccccgactcgggcttggcgcggcggccagaggaaccccgaggaaagagccagacttctcagaggtcagtctgttcaacaagtgggaccccagggcctt

SEQ ID NO: 93858 - DNA, 98 bp, Homo sapiens
cacaatagaacactggatcgatcgggggatctaggcgacatggagccattgaagggaacaacacccttgatggccccaatcttcatctccttcttcat

SEQ ID NO: 93859 - DNA, 90 bp, Homo sapiens
gaacacagccagtgtgaatgcagctgccaatttgtggtgtctgaagaccaagactacacagctcattttgctgatcctgatacattagtt

SEQ ID NO: 93860 - DNA, 75 bp, Homo sapiens
tcattgtgaagaccggagggacacaccctgctgctggtcagtgagaaggtcggaggggccgaggggaccaagctg

SEQ ID NO: 93861 - DNA, 135 bp, Homo sapiens
ctggctgcagcctccggcactttgcctgcgaacagaacctgctgtcgcggccagatggctctgcttccttcctgcaagcctcgcgtcccgagtttgactggcaggacccgctggtgctggaggagcagctgacca

SEQ ID NO: 93862 - DNA, 83 bp, Homo sapiens
aaagaggagctgatagcggagctgcaggtgcatgtgagggaaccctggcttgttcaacctgtcacctcatctttgaagatcac

SEQ ID NO: 93863 - DNA, 82 bp, Homo sapiens
aaagagtggatttcagcctgcacggatggtcttgaaacacaaatggtttttgaggacgattatttatcatttctactaaagc

SEQ ID NO: 93864 - DNA, 50 bp, Homo sapiens
gttaacgtctctgttagttcagagttacagagatgaatcccaatgtggta

SEQ ID NO: 93865 - DNA, 83 bp, Homo sapiens
cggcaagacctctccccctcggaggcggcgggcggaggcggcgggtgagaggaccatgctcgacagctgaccaaggccatgat

SEQ ID NO: 93866 - DNA, 115 bp, Homo sapiens
ctggaggagccgccgagcggagacccgggagcaggagctgggcctaggtctgcgccctgacaatgcagatcttcgtgaagactctgactggtaagaccatcaccctcgaggttga

SEQ ID NO: 93867 - DNA, 138 bp, Homo sapiens
ctggaggcctacctaaaccagcacttgtctggctttggggccgaacgtgaggctacgctgaccattgcccagtacaggcaaatgaagaggattcttccagttctctagtgaaggatcacctttttcagcaagagacag

SEQ ID NO: 93868 - DNA, 82 bp, Homo sapiens
tgcgacccagccagccagcaacctggaccgctggtaggtgagtgctgtcctcggctcactttcctcaagctctccggctgcc

SEQ ID NO: 93869 - DNA, 101 bp, Homo sapiens
tgaagagaggttttgaattcacgcttatggtagtgggtgattaggaagaagcttgttcgtaaaacgctggacatgatcaagaagattgctgatgataaata

SEQ ID NO: 93870 - DNA, 100 bp, Homo sapiens
cgagtgccttaaagcctactcagatcaggagcacatcaaactctggaggagttctggaggtccatcagttctcaagagacgccagtgtggccgaggcctg

SEQ ID NO: 93871 - DNA, 95 bp, Homo sapiens
agccttgatacccattaccactgcctcctttattgcagcaggaatttgccccatggctgggggttatggagtgatgggtgacgatggttctattg

SEQ ID NO: 93872 - DNA, 100 bp, Homo sapiens
gctggggcttcccggacaggattgacgacattttgaaagcgaagcagaagccgtagaatcagcggcgagcctgttgaaagaacccacaggtgcatttcac

SEQ ID NO: 93873 - DNA, 87 bp, Homo sapiens
acaagtagctgctcttccaagcaaggaagtcgacagacaggtgatttggcttctgcacagttaggaggagcaccaaaccgatgggag

SEQ ID NO: 93874 - DNA, 80 bp, Homo sapiens
ggaaagcagtaccttttaaatctcattgatacaccgctgcagattctggaagaaaaaaataagaatttacaagaggcttt

SEQ ID NO: 93875 - DNA, 83 bp, Homo sapiens
cgtcaagcacatgttcgtacacacagactaggactcaatgaaattgctgcccccatgttcctgaggctctgcaagctgaagct

SEQ ID NO: 93876 - DNA, 100 bp, Homo sapiens
gatgcagaaaacttaatggaggaggctgaggttacgaaggtgagaatctgatgaaaattctaaaagacattgaaaacagcacagaaatcatgttggacag

SEQ ID NO: 93877 - DNA, 51 bp, Homo sapiens
attccaagtaactcttatttggcattagacagaaagctggaagttgaaatg

SEQ ID NO: 93878 - DNA, 80 bp, Homo sapiens
ccacgaagttgccagggcctgtccaggagcgtgaggatcatccccggagaggacgggaggatcggcagcacagggaacca

SEQ ID NO: 93879 - DNA, 111 bp, Homo sapiens
cggcgctggaggagcgaggcagctgtactaggactgggaacgggtgtcatggagaaactccagctgggcccagagattctgcagcgggaaaatccaaggcttatttatgcc

SEQ ID NO: 93880 - DNA, 100 bp, Homo sapiens
gcaaccaggaggcagtaaattcttcagctgctcggacagatgaagctccccaaggagctgcaggagttattcctgatgaagctaaagctttgtctctgtt

SEQ ID NO: 93881 - DNA, 76 bp, Homo sapiens
tcagctgctgcagagtgaacttttccaaaattctggaaatgctcagatccacctacttggaaacatagtgatctgg

SEQ ID NO: 93882 - DNA, 90 bp, Homo sapiens
ctggtgtccacagccctgaagagctggacggatgttagcctgctgcctgccttcgatgctgtgggcggcccctatcagattgaggtccac

SEQ ID NO: 93883 - DNA, 82 bp, Homo sapiens
ctgcgtggggctcggccgcgcggactgaaggagactgaagaatatgcttttaaggctattaaccagggtggccttacatcag

SEQ ID NO: 93884 - DNA, 80 bp, Homo sapiens
ctcaatcttggaacagcacccccttctttaaggagccttcacgtaaatgggtccagtcatgcctcccagtaagaagccag

SEQ ID NO: 93885 - DNA, 50 bp, Homo sapiens
aggacactgacggatgatatggcaacttcagagtggacgttggattaccc

SEQ ID NO: 93886 - DNA, 75 bp, Homo sapiens
cgaaaacgtggttgtagagttccgtgactcccaggtgcagcggaactgctgcctgacgctctgcaacttcagcat

SEQ ID NO: 93887 - DNA, 90 bp, Homo sapiens
ccttgtgaaacctcctagtagaaaaagttcttgggacaaacttcatttgactatttggagttttcctcgtcttactggatgtcactctcg

SEQ ID NO: 93888 - DNA, 75 bp, Homo sapiens
tggacttgagtggccagtaagagaaggctgtcaccaatacagcttaacaggaaaactgcctttgcttctgagccg

SEQ ID NO: 93889 - DNA, 51 bp, Homo sapiens
ggagaaaagtggtgacttattggaaaggccgagggggacggcaagatgcac

SEQ ID NO: 93890 - DNA, 76 bp, Homo sapiens
agcccccagaaccaggcccccaactcagccatctgcggaggtcaaggctactgcagcactggggtgtcagttgttg

SEQ ID NO: 93891 - DNA, 50 bp, Homo sapiens
aagggacaaggtgtcaacaatgtgccgcaaatgccagatgttaatgtaag

SEQ ID NO: 93892 - DNA, 100 bp, Homo sapiens
cgcccgaagacgcgctcctggctcggcccgacagcctcgcttggccgccagttcttctgcagccgaaggcggccagggagctggagagcagagaggcaga

SEQ ID NO: 93893 - DNA, 96 bp, Homo sapiens
gtctcctccacctggacatactacttgcagactgacaatgggaaagtggtggtgtttcaggtcaaaatgcagatcttcgtgaaaacccttaccggc

SEQ ID NO: 93894 - DNA, 50 bp, Homo sapiens
gacatgtcatcaactcagctgaattcactgtctgtagcatctgctcctcc

SEQ ID NO: 93895 - DNA, 74 bp, Homo sapiens
agtcaatcgaacagactcagattaaggcattctgaaggcaaatcctgtttagacccaggcaaaggttcctggtg

SEQ ID NO: 93896 - DNA, 50 bp, Homo sapiens
atcaaatctactactgttcatggcagtgccgcagaatggaattcggcatt

SEQ ID NO: 93897 - DNA, 140 bp, Homo sapiens
cacgagcggaagatcaagctggacatcttcctgcaactgcgcatctttgagcagtacaccatcgaggcgcttaaattcctagcgaagtgccgtaagaaaaagaaactatttgctccttggcgaggactccaagaactcac

SEQ ID NO: 93898 - DNA, 75 bp, Homo sapiens
gaaagcaaaccaggaggaggacatccctgtgaaggccttcatgccccgaggactagcagacaaacaaggacctga

SEQ ID NO: 93899 - DNA, 89 bp, Homo sapiens
caagcatgcagcttactgcttgaaaggttcggctttagagtgtggtgaagggtacttttcatggtgcatggaaggaaagccaatgcgca

SEQ ID NO: 93900 - DNA, 74 bp, Homo sapiens
cggagtgagcggagtagcgagtcggcaacccggaggagatggctggccgagctctcaagcagactggcagcagg

SEQ ID NO: 93901 - DNA, 74 bp, Homo sapiens
gcccagccaccagcaaccccccaggaaatctactttcttcaatgtgttaaccaatagtcaggcttcagcagaaa

SEQ ID NO: 93902 - DNA, 100 bp, Homo sapiens
ggaggctctaggctccaagacgccgtcgcttgagttgcagatctgatctcttctgaacacctcatcgtgtctccatccctgggaatctgaccctagcaac

SEQ ID NO: 93903 - DNA, 75 bp, Homo sapiens
gcggagacgtgggcgccctccccgccaaggcccgtgcgaggcagtgacatcagtgtctggcccaggtgagcacct

SEQ ID NO: 93904 - DNA, 100 bp, Homo sapiens
gacagaaatcattatcttagccaccagtgccggtggtggtgtgcacattgagccccggtatagacagttcccccagctgaccagatcccaggtgttccag

SEQ ID NO: 93905 - DNA, 75 bp, Homo sapiens
ggaaaacaagctcagaacgctcgccgattctaccattatgttctccaacatcttcaaataaagaagtggttatga

SEQ ID NO: 93906 - DNA, 100 bp, Homo sapiens
gctggctgcaaagaagggactggtagtgggcagcagtcagtgacaggtgtaacctctgtggatgacagcaacagttactggaggatacgggggaagagtg

SEQ ID NO: 93907 - DNA, 75 bp, Homo sapiens
cgcagtggaagtcaagagcaagtgcggaaacatggctcgcgaaggactgcggaccctcgtggttgcaaagaaggc

SEQ ID NO: 93908 - DNA, 98 bp, Homo sapiens
gtgcctcacccctttctacaaggagggcaagtttgcttccaagggagaagaagaagttgagcaagtccctgcagaaaccctctaccaaggcttgctcc

SEQ ID NO: 93909 - DNA, 87 bp, Homo sapiens
cgccgtggacaagctcctgctagaggaggcgttgcaggacagcccccagggcaccctcatccagcatctgaaggagcacctgctgca

SEQ ID NO: 93910 - DNA, 100 bp, Homo sapiens
cacactgacactacctattttcaagagccctgtgggtgaggggaagtggcttcgaaacattgactattaccgtttagatggttccactactgcacagtca

SEQ ID NO: 93911 - DNA, 51 bp, Homo sapiens
ggggggaccagcccctcaccacctcccagggtcttcctctgttgcccaggc

SEQ ID NO: 93912 - DNA, 76 bp, Homo sapiens
atgccgggggagcggggccttccacaccccctccgtgggtgtgtgtggtgtcccaggaaagaaatgtggcaccatc

SEQ ID NO: 93913 - DNA, 75 bp, Homo sapiens
agaactcgtcatgctctttgtagcgtggtgcttctgttgctcacagtttggaccccaatgaccagaagtctctag

SEQ ID NO: 93914 - DNA, 75 bp, Homo sapiens
cgtatcacaaaagcagatgctgctgaattctggagaaagttttttggagacaatgggcctttggagtgacgctgt

SEQ ID NO: 93915 - DNA, 90 bp, Homo sapiens
cggaaatgcccttacagcagcaggcggctatgagaggttttcctccgagtacccagaattctgttctaaaaccaaggccctggcagccat

SEQ ID NO: 93916 - DNA, 121 bp, Homo sapiens
ccggacagccgcgcgctgagggtctcggggcgggcgccgcgggacctctccgggccatggtttcactgttacatgccttgaagtgatgaggaggtttctgttactatatgctacacagcag

SEQ ID NO: 93917 - DNA, 100 bp, Homo sapiens
gctgtcacgtctcagcaatagactgctcttgagacatatgtagagtgtgtcggtcagaaggaacacctgagaaaccgctttatcatccttgtgtatgtac

SEQ ID NO: 93918 - DNA, 98 bp, Homo sapiens
ggggctgcagccgtcatgccggggatagtggagctgcccactctagaggagctgaaagtagatgagcccctgtccctgccttacccagcaagcttccc

SEQ ID NO: 93919 - DNA, 100 bp, Homo sapiens
tgctcagcaccaacaggtccgccaaatccggaagaagatgatggaaatcatgacccgagaggtgcaaactgaacaatgaggacgcatggacacaggaagg

SEQ ID NO: 93920 - DNA, 82 bp, Homo sapiens
gtagcgataagtttgatttgccctatgggatgagaacatcagtctttagatgacctttcaaatgtttcttctgatgactcag

SEQ ID NO: 93921 - DNA, 75 bp, Homo sapiens
cgcagtggtcgcttcttctccttggagcagctgatgagccagatccgggagacgcagcagctctgccaccagacc

SEQ ID NO: 93922 - DNA, 100 bp, Homo sapiens
ctgcaactaagtctaaactgcattacaagcagcagtggggacgagctttgaaagaacttgccagacttaaacaggagagaagaccaagaggtcggagaag

SEQ ID NO: 93923 - DNA, 83 bp, Homo sapiens
aggcccttggtaacctcgtggaggggatggatttccataagttttactttgagaatcccccatggctgggggttatggagtga

SEQ ID NO: 93924 - DNA, 100 bp, Homo sapiens
cggacgatggacagccagggcaggaaggtggtggtgtgcgacaacggcaccggggagtgtttctcaggagctatcagaaactatcctcaccatggtagcc

SEQ ID NO: 93925 - DNA, 83 bp, Homo sapiens
acaaaagctaattgagtacacgttcctgttgagtacacgttcctgttgaagaagagcctctgaatattcattcattcagcaag

SEQ ID NO: 93926 - DNA, 75 bp, Homo sapiens
tacgcgcacgttggaaccgaagagagctctgttgttgcagaattacatgaatgacagtcttcgaaccaatgtgtt

SEQ ID NO: 93927 - DNA, 75 bp, Homo sapiens
gaacgatgttggactcatagtcactgccagaaaggaagagaggatggtgatgcaccggttacaaaagatgagacc

SEQ ID NO: 93928 - DNA, 100 bp, Homo sapiens
ggcacctgcaaagacatgaccagtggctacgtgtgcacctgccgggagggcttcagcgatcctgcctgtgacccacacggagatctccccagaacaggta

SEQ ID NO: 93929 - DNA, 75 bp, Homo sapiens
atcaggcactctggcagaaactggccaaggacattcagtgtgcaacttgctttggtgtttgctgttttattgcca

SEQ ID NO: 93930 - DNA, 100 bp, Homo sapiens
tgcacgacgatgaggtgacagtcacgcatgcagcagattggaataaatatgatgaccgattgatgaaagcagcagaaaggggggatgtagaaaaagtgac

SEQ ID NO: 93931 - DNA, 83 bp, Homo sapiens
cacaaatgtaacttctgaggacaaaaaggttattatcaacccttactttgctaagcaagaaactgaactgttacaagattacc

SEQ ID NO: 93932 - DNA, 50 bp, Homo sapiens
gcggccacggagaagggcgcgcttttcggagactgggaagcccaactgcg

SEQ ID NO: 93933 - DNA, 100 bp, Homo sapiens
cttactccttttgtggaggagaacttagtttcagcccgatgagagaaagggaaagttaaggatgctggagcagaacaatggatttctctttctctttcat

SEQ ID NO: 93934 - DNA, 99 bp, Homo sapiens
cccaggtgcccagaggactttcttccagcttctgctgtccttctttgtggagagcaagatccccagctcaagggtatagtgaccaggttatattgcagg

SEQ ID NO: 93935 - DNA, 101 bp, Homo sapiens
gtccatcccgtcgagaaccagtccgggatgtgggaagggtggagagattcaaccagttagcgtgaaagttggagataaagttcttctcccagaatatggag

SEQ ID NO: 93936 - DNA, 96 bp, Homo sapiens
gctgaagtacctgcggctgcgcaaagcggccaaggccacggtgtttgacgagattgaggagctgcgggccgagatgctggagatgcgggacgtcta

SEQ ID NO: 93937 - DNA, 90 bp, Homo sapiens
cagcagaccacccagcagcagctgccccagaaggtccatattactgtggtgtgggagcagacagagcctatggcagggacatcgtggagg

SEQ ID NO: 93938 - DNA, 100 bp, Homo sapiens
tcccagagtgctgggattacaggatttttcgggattgtcaccctacgaaaggaagagactgaagaacatatcagaaaacgcagacttttttgcttctctt

SEQ ID NO: 93939 - DNA, 76 bp, Homo sapiens
gcactctcatcgctctcggcctcggcctcggcctccgacacgataaggagggttcctgcccccaggtgaacattaa

SEQ ID NO: 93940 - DNA, 100 bp, Homo sapiens
gaccagcgcccgaaggccgacacgctggccctgaggcaacggctcatcaggatgatcggctgaatgtaacagaggaactaacgtccaacgacaagacgag

SEQ ID NO: 93941 - DNA, 100 bp, Homo sapiens
cttttgtaacttttgatgatcatgatacagttgataaaattgttgatatattggatgaactgaaaaaagaataccaagaaatagaaaacttagacaagac

SEQ ID NO: 93942 - DNA, 101 bp, Homo sapiens
aggtggaggatgtggtgctgcccgagaaggtggacgtgctggtgtctgagtggatggggacctgcctgctgaaaagcacttggttctgcttcgagatggaa

SEQ ID NO: 93943 - DNA, 100 bp, Homo sapiens
ccttgtggtacctgctccgacggcgaagaaatgtccatgacctccctcagggatccgagccaggagacactgagcctttggagttaggaggtcctggagc

SEQ ID NO: 93944 - DNA, 82 bp, Homo sapiens
cagccatggaacccgggttacagcagtgagggggccacggctcaagaataccaagctgctattttacacttgaagagggagc

SEQ ID NO: 93945 - DNA, 100 bp, Homo sapiens
gccatattgaaagaagctgagagagaggttgggacaaacattcctatggttaccatggtgatgatgggcattcgttctgctcctcggggactggccagcc

SEQ ID NO: 93946 - DNA, 100 bp, Homo sapiens
cgggtgccccttccctggagtgtgccgaagagattcttttacatctggaggaaactgatgaaaattttcacaagctgacgttcctcagggagtgattcga

SEQ ID NO: 93947 - DNA, 100 bp, Homo sapiens
gtaacttttaacttcacgttggagaatcagatccaccgaggcgggcagtacttcaatgacaaccagttcatggattcaatgcagttggatcccgagacgg

SEQ ID NO: 93948 - DNA, 80 bp, Homo sapiens
gagattctgcggcgaatacgccaggtgtgactggctggaagtggcgtggctgcagcccctgtcaaagggaacaggaagca

SEQ ID NO: 93949 - DNA, 75 bp, Homo sapiens
caaaaacgtcaacaacagttttacgtgaaagcagcccagagcctccccacggtcaacctgcagcctctggaatgg

SEQ ID NO: 93950 - DNA, 100 bp, Homo sapiens
aggaaagtcaggctaaaagtgtctgctgctgctgccgccccccactccgcctccgggagaggtccttccatagtgacgccccccaaggacatctggaatg

SEQ ID NO: 93951 - DNA, 90 bp, Homo sapiens
cagcacggcacagcacgctcgacttcatgctcggcgccaaagatcgttaactgaagacaatatgcaaaattctcacatggatgaatacag

SEQ ID NO: 93952 - DNA, 50 bp, Homo sapiens
atctggtcaaacatggaatggggacagtcattttgtttactcattcagcc

SEQ ID NO: 93953 - DNA, 75 bp, Homo sapiens
cctatggtgtctggaacaaatgatgaaaactttcggaagagaaagttgcctgtggtaagttcagttgttaaagta

SEQ ID NO: 93954 - DNA, 100 bp, Homo sapiens
cattaaggaactagaacaagaagaagaggagaggaaaaaggaagagagcactgcagccagtgaaaccactgaggtgcccgtggttgacacgagctgtgtc

SEQ ID NO: 93955 - DNA, 98 bp, Homo sapiens
gggaaggagctgggcggcgagtccaactttggtctcggcgcggaagatggccggcggcgtggacggccccatcgggatcccgttccccgaccacagca

SEQ ID NO: 93956 - DNA, 98 bp, Homo sapiens
gcctttccagcccgtggtccttctccatattcgaggtaccaaccaagaagctgaagaaatatgagaaagaatatcagacaatgcgagagagtcagctg

SEQ ID NO: 93957 - DNA, 100 bp, Homo sapiens
gtcgcctctgtgctcgtgagtgcatggggtataaggccctggccaacgtcaacattgggagcctcatctgcaatgtaggggccggtggacctgctccagc

SEQ ID NO: 93958 - DNA, 100 bp, Homo sapiens
cgggacgccaagcacttcctgccgcgggcggcgcgccgcagctgcccaggccggaccgggccgggcgcccgcagggggggccctcagcctcttggccttg

SEQ ID NO: 93959 - DNA, 75 bp, Homo sapiens
ccagctgggcgagtatctggaggagatccgcaaggatgctctccgggcgctcaactttgcgtacacggtgagcac

SEQ ID NO: 93960 - DNA, 82 bp, Homo sapiens
cggcgtctgcgcttccccatggggctggcctgcggcgcctgggcgctctgagcaagaaggctcactttgtgctcaacattgc

SEQ ID NO: 93961 - DNA, 100 bp, Homo sapiens
ttacggcaagcctgtccatcatggtgttaaccagctaaagtttgctcgaagccttcagtccgttgcagagctctggattaatcgaattacagctgctagc

SEQ ID NO: 93962 - DNA, 50 bp, Homo sapiens
gcctccagcggggatgacacagaagagtggcagaatttagtgacatttgg

SEQ ID NO: 93963 - DNA, 98 bp, Homo sapiens
tagaaaatggacctgctgacagagcagatggcctggagattcatgacaaaatcatggaggaaagaccacagcaagattctttcattcgtctcctccta

SEQ ID NO: 93964 - DNA, 75 bp, Homo sapiens
tatctatggatttcccttttgaggaaacaagtttcagccactaaggccgaagcagaaaaggatggagtgaaggtc

SEQ ID NO: 93965 - DNA, 96 bp, Homo sapiens
ctccctactcttctaaggatcgctgtcctgacagaagagaagtccccacgagaagaagaagaagaggcggtcccggtcgcggaccaagtccaaggc

SEQ ID NO: 93966 - DNA, 100 bp, Homo sapiens
ccctgggagaagaaggctgtgaacagcttcaggaggtgctggagggcttcaacatggccaaggtgctggcgtccctcagctcacggatgattgatatcca

SEQ ID NO: 93967 - DNA, 75 bp, Homo sapiens
cacttcaaacattcgtctcggaaaccccgcctcttacagtcacgagagtgctcaagctggtattactatgtaact

SEQ ID NO: 93968 - DNA, 74 bp, Homo sapiens
cgcatcttctggcggaccgtgcgaggtatgcatttatagagtttgcttcattcgaagacgctaaagaagcttta

SEQ ID NO: 93969 - DNA, 75 bp, Homo sapiens
ccatgaacatcaccgatgagatgaagcgcatgtttaaccagctgtgtttgatatacagaggaaagtcacctatag

SEQ ID NO: 93970 - DNA, 75 bp, Homo sapiens
ccagaaggcagcggcggcccaggccagcattcccgcagtgaaaggtgtagcagtcactcggcctacacccacagc

SEQ ID NO: 93971 - DNA, 75 bp, Homo sapiens
tgtggggctggttctctccaggacatctaccaagagatcacccctgacctgctacctcggccgccccggttgctt

SEQ ID NO: 93972 - DNA, 100 bp, Homo sapiens
tgatgaagttctggttgctggatttggtcgcaaaggtcatgctgttggtgatattcctggagtccgctttaaggttgtggaaaatgcccttaaagtgaac

SEQ ID NO: 93973 - DNA, 98 bp, Homo sapiens
taatggggcacccacagccaacttccaacaagatgtgggcacaaaaactaccattcgcctgatgaactctcagtggtgcttcatgccccacctccaac

SEQ ID NO: 93974 - DNA, 100 bp, Homo sapiens
gagtcccctgatccccaaccgcactgaggataaggaggagaacaggaagagcacgatggatggagcagatggtgctttttacccagatgaaatacaaagg

SEQ ID NO: 93975 - DNA, 74 bp, Homo sapiens
agccacagacggaacaagcatgcagttcaggacctcaaggggctcggctatgagaaggggaagcctgtgggtct

SEQ ID NO: 93976 - DNA, 75 bp, Homo sapiens
gtgtatgcactttactacaaagatggacttctctgtacagatacaaccagacctccaaagaaagacgaagaaaat

SEQ ID NO: 93977 - DNA, 75 bp, Homo sapiens
gtccaagaagcaaaaaagggactgctaagaagataccaccagcaattctgtggtgttcttggtcacacatttatg

SEQ ID NO: 93978 - DNA, 83 bp, Homo sapiens
gatcaggatcggaagcctgcgtaactttctcccttgatccgggagtctttccactgggatcgaatcatcaatttagttgttgg

SEQ ID NO: 93979 - DNA, 75 bp, Homo sapiens
atgccctgcccactactctcttaatgctgacaacaggacttgtagtgataggtgcagatggtcacaactccggag

SEQ ID NO: 93980 - DNA, 75 bp, Homo sapiens
cgcagaatgcaatgatgaaagcttctggttcagattttggtcgcccaactcacattgaagcctaagacccagctg

SEQ ID NO: 93981 - DNA, 99 bp, Homo sapiens
gcaagcgcagggggacggggaccagcagctgtcgccgccgctctcaggttcctaaatatttgtcacagcaatgggctaaagcctctggaagaggtgaag

SEQ ID NO: 93982 - DNA, 75 bp, Homo sapiens
ctggggagatggaggggccggggctgggctcgcagatccagctccaggtcccacaggggctcttcttccccacga

SEQ ID NO: 93983 - DNA, 100 bp, Homo sapiens
cgtgacctggtacatcgccgagttctcacaatcctggaggaagagaaggctcagcaagaagagcgcatgaggatggagtccagaagacaggccacagtgt

SEQ ID NO: 93984 - DNA, 75 bp, Homo sapiens
aattctgaactcaggacttggcaagtgtgttgtgctctccgaccccttgaaggactcttctcgaactcaggaatc

SEQ ID NO: 93985 - DNA, 83 bp, Homo sapiens
aggccagtcgcctccaggccaagagggatccttcacccgtgtctgcccttcagatatttcaacactcctctcagcatcctcca

SEQ ID NO: 93986 - DNA, 98 bp, Homo sapiens
aacacagtattgaaatgcatttgccttatacagctaaagccatggaaagggcatatctggaatctgaagttgctatatctgaggagttggttcagaag

SEQ ID NO: 93987 - DNA, 131 bp, Homo sapiens
ctcgggaactcatcagccgcatcaaacagagtgaactttctgccaagatgcggaatgctgaaatacttttaaagctgataaacctagggaaactgcctcctgatgccaagccccctgtcaacctgctttac

SEQ ID NO: 93988 - DNA, 97 bp, Homo sapiens
gctggtccaggccttccagtacacagacgagcatggggaagctctttcgacgtgtagcagcagctttgccgggaatggaaagcacacaggacagaag

SEQ ID NO: 93989 - DNA, 90 bp, Homo sapiens
cgagcggtgactccccgccgctcccgggggccgtgacgattgcccaaggactccagatactccaaataatgaccctcgttgttctactag

SEQ ID NO: 93990 - DNA, 100 bp, Homo sapiens
gggacgcgccggaggaaagatggaagactaccaggctgcggaggaggctgtgacaaaccctgtgcccacgctgcctccactgccgggagactcagggctg

SEQ ID NO: 93991 - DNA, 100 bp, Homo sapiens
gggaaactgccggccgggccgctggcccgtggacgcctgggaggtggccaagtgggctcgggatgagtttgaaggcctcttcaagcagccagcagaaaat

SEQ ID NO: 93992 - DNA, 75 bp, Homo sapiens
gctccgctgcgcgcaggctgggctgcaggctctcggctgcagcgctggaacatccagtcatggataaaaatgagc

SEQ ID NO: 93993 - DNA, 100 bp, Homo sapiens
agacgcttcggagagtgttgccaaaagtcagagagtctccccaggacagtgctatcacccgggatattaaccgaacattcccagcccatgactactttaa

SEQ ID NO: 93994 - DNA, 74 bp, Homo sapiens
ccgccatggagcccgactcggtgattgaggacaagaccatcgagctcatgggtcttactgaagtaacacaaagc

SEQ ID NO: 93995 - DNA, 75 bp, Homo sapiens
agcatctaggaggggtgaaaagactctgctgggccgctcagccatgcctgagggagcccaaggactgagcctctc

SEQ ID NO: 93996 - DNA, 75 bp, Homo sapiens
gtctttaagaagatagcaaattttacttcagtatcctggtgtgaaccagctatcctccagtataggaggattgag

SEQ ID NO: 93997 - DNA, 101 bp, Homo sapiens
cccgaggcgaggaggagcgctggcgttgttgacctcctgtactggagagacattaagaagactggagtggtgtttggtgccagcctattcctgctgctttc

SEQ ID NO: 93998 - DNA, 101 bp, Homo sapiens
ggagctcgtgctggctctgacccatctggaattgcctctagagtggactgtgttgggaagttcttcacttgaaggtaattctgttccacaggatatctgct

SEQ ID NO: 93999 - DNA, 75 bp, Homo sapiens
cttggtattgcacggacacctatgaagaccagcagtggagggacattttattcagaaattaaatcattcagagtt

SEQ ID NO: 94000 - DNA, 82 bp, Homo sapiens
atcagatcaaccaccaaagtgggaaacattgaaatcaaggcagaagctcctcctggggtagagacagatcttattgatgttg

SEQ ID NO: 94001 - DNA, 71 bp, Homo sapiens
ccatcgccttctcctttttctccatcttcacctgggttgggggccgtcccgctcctaaggcaggaagatgg

SEQ ID NO: 94002 - DNA, 75 bp, Homo sapiens
gcagcagcaactcctgatttaggggcaatcgatgacaaggacaaataccagtttggtaagacaaagatctttttc

SEQ ID NO: 94003 - DNA, 75 bp, Homo sapiens
gaccctatggaagcagaagaagctgaggatgaagaagatgccaagaaaaccatgtgggaaaggctgacagcccct

SEQ ID NO: 94004 - DNA, 78 bp, Homo sapiens
taccctcagctctagctgatactacagacagtacaacagatggaacttgctaaggaagaaaagtgtgaatttctgcca

SEQ ID NO: 94005 - DNA, 80 bp, Homo sapiens
tggaagagaatctgagtacaaacaggatttttagactctgaggagcagttggagctaatccacattatggaaatggaaac

SEQ ID NO: 94006 - DNA, 73 bp, Homo sapiens
gcatcactcccagctgcgcaaagcttgcgaggtggcgttaggtgctggagaatctggtaaaagcaccattgtg

SEQ ID NO: 94007 - DNA, 106 bp, Homo sapiens
agcagaatgaattccgcgacgatgcgtgcagaaaagagatccagggcttcctcgattgtgccgcgagggctcagtggatgattcaacagccacacaaagcagcaac

SEQ ID NO: 94008 - DNA, 101 bp, Homo sapiens
gcacccaacagaatattttgttcatgttattgaaaggatcgattactttggggttgctgcaacagtatattgcatgctctttggcacttacatgaaagtga

SEQ ID NO: 94009 - DNA, 75 bp, Homo sapiens
cactgaaattcagagaggggaagtgatttgcctcagcttgtactctgatgtagaaggccaatccttaagacaccg

SEQ ID NO: 94010 - DNA, 100 bp, Homo sapiens
caggaggctaagaaagtggtgaatcccctgtttgagaaaaggcctaagaattttggcattggagctcttgtccctggcaaagcgaaagcgcagtgactct

SEQ ID NO: 94011 - DNA, 75 bp, Homo sapiens
cccatggaaggaaactttgaagaggtgaatcacaagcctttgagaacagcctgagccttcagccctcacagatgc

SEQ ID NO: 94012 - DNA, 75 bp, Homo sapiens
cgacttcctccccgcgccccctccccctcgccatgaagctcaagaggtttggatatggaccttcttcaattcctg

SEQ ID NO: 94013 - DNA, 83 bp, Homo sapiens
ctgaagacaggcttaagcatggaactcattatacaatgacaaatggaggcagcattaacagttctacacatttactggatctt

SEQ ID NO: 94014 - DNA, 100 bp, Homo sapiens
ccactctttccgccctaatggaggtctccagtttcgggctttgttcgcgggggtcacagctctcatggctgcagctagcgtgaccccccctggctccctg

SEQ ID NO: 94015 - DNA, 100 bp, Homo sapiens
gcagctccacgaaaggcagccgcggatcgccgcgctcagcgacaaacaagaagagcagcgaagaggcacaaaaagagaggagaaggatatcaaatttatt

SEQ ID NO: 94016 - DNA, 82 bp, Homo sapiens
cacgctcgcgtgctgatccgccagcgccatatcaggttgggggccgtcccgctcctaaggcaggaagatggtggccgcaaag

SEQ ID NO: 94017 - DNA, 90 bp, Homo sapiens
agctccaccgctctgaaggggatctgcagaggctccaccaaagcctgtacccaagaccattgacaaccagcgagtgtatgatgaaaccac

SEQ ID NO: 94018 - DNA, 50 bp, Homo sapiens
ctggacacagaagtatttgtgacagggaaaactgaggctgccatcaaaaa

SEQ ID NO: 94019 - DNA, 87 bp, Homo sapiens
acctccatcaggtacaacctcgaggagctctaccagagatcctgaaggagctagacgagtgctacgagcgcttcagtcgcgagacag

SEQ ID NO: 94020 - DNA, 95 bp, Homo sapiens
agatcaccgtgacatccgaggtgcctttctccaaaagatgctctacccatggtaccccaggaccagaaggcaaccatatttcagatttaccactt

SEQ ID NO: 94021 - DNA, 100 bp, Homo sapiens
tactttgtggtgattcatctggggccttatttccactttgtaattccagcgagtcgacttcccatcctgagttgagttttgattcatcatggataatctg

SEQ ID NO: 94022 - DNA, 83 bp, Homo sapiens
ccattctggccatcattacaacttccctcgtgtcacggatgataccatcggggaccttaagaagctgattgcagcccaaactg

SEQ ID NO: 94023 - DNA, 101 bp, Homo sapiens
agggacgtgctggccgtgatcaaacactgcaaggaccccctccggctcaagtgtgtcaagcaaggcatgacagcaagcgctgtggcggctttgatcctcat

SEQ ID NO: 94024 - DNA, 100 bp, Homo sapiens
cttggagacattgtagagattgcacaccccaacgatgaatacagggctctgccagcagacagccttggcacacaggcacaagggctggagcccagagatg

SEQ ID NO: 94025 - DNA, 100 bp, Homo sapiens
ggagtttgggatcggctacagcgacacagcctggatctcctccatcctgctggccatgctctacgggacaggtaactaggatttctacctcaaccgcgag

SEQ ID NO: 94026 - DNA, 75 bp, Homo sapiens
gaggccgtggagctggtcccagcaggagcgccaactcaggcagcttgttcctgggcttcccgatggactcgagtt

SEQ ID NO: 94027 - DNA, 100 bp, Homo sapiens
agaaattatagaagatttggccttctactctagtacagtagtatctctattgggtttgtggatgcacttagatgtttgcaatgagcactgtggctggcat

SEQ ID NO: 94028 - DNA, 50 bp, Homo sapiens
cttttactggctgtaaatcctgtcagtcattggcaccatgaactggaata

SEQ ID NO: 94029 - DNA, 75 bp, Homo sapiens
ttcggtggactccttcggcagtccacccaccgccgccgcctcccagatggaagtacaggctccaccaggcaccac

SEQ ID NO: 94030 - DNA, 100 bp, Homo sapiens
gaaggaacctgggatggttgtgagggaagggacaagaagatactgccctggattttgacacttcatgacatgtcattatttagagcaataatgaatattg

SEQ ID NO: 94031 - DNA, 100 bp, Homo sapiens
aaggattccaagtaactcttatttgggttttctagtaccttcacaggagaaaggagacccaaagatgaccaagtgtttgaagccgtgggaactacagatg

SEQ ID NO: 94032 - DNA, 100 bp, Homo sapiens
gttttcttatttagccggagtgagaagcaagaaggccctggacacagcaatatctctgggctttcacagccgcggcccatggagcccgccggcccggccc

SEQ ID NO: 94033 - DNA, 120 bp, Homo sapiens
ctcggatgccgacgtggtcatctgggaccccgacaagttgaagaccataacagccaaaagtcacaagtcgaaggtggtcttctgccctgttaaagaagccctggaggtggactggagcag

SEQ ID NO: 94034 - DNA, 100 bp, Homo sapiens
aggtctgagaatagtgaagcaactcattcctttcaggacattccctctgatgtcctattttcaaactaatctggccaacctatttgtggaaatggaatgg

SEQ ID NO: 94035 - DNA, 100 bp, Homo sapiens
ctctggacatgtttagcttcagggatcatcctgggctctctctttgaaatctgcttgggccagtatgatgatgtgatggagtgcccagtgatggaaactg

SEQ ID NO: 94036 - DNA, 97 bp, Homo sapiens
gacagatacacggtgtcggaggaaaaccagcctggacaccaagtctgtgtcagaaggccacctcaagaggaacatcgtggtgaagaccgtggagatg

SEQ ID NO: 94037 - DNA, 90 bp, Homo sapiens
ggacaacctgtggcccatgatcctcactctgctggtggactatacactccagacctcgcttagcataaccccatcatcacccagttcttc

SEQ ID NO: 94038 - DNA, 100 bp, Homo sapiens
caaattttgctactgtcagatggattgactatggaaaagttgccaaattggactaccgaccagactcccggaaatcatgttggtaggatcccagtctttt

SEQ ID NO: 94039 - DNA, 90 bp, Homo sapiens
cgcggcggccgcagctgccacaaaccagggtcctgaggacaccgtgagccagccaggcctggccgctgggcctgaccggccccccagccc

SEQ ID NO: 94040 - DNA, 50 bp, Homo sapiens
cacggctttagcggtgtcttttgcggccaatatacccagtagaagaatta

SEQ ID NO: 94041 - DNA, 100 bp, Homo sapiens
cttcgaggcatgatggtcgactacaagaagagggcggagcggagacgggagtattatgaaaagatcgtggcattgccaggacttacacagatcaatgtgt

SEQ ID NO: 94042 - DNA, 99 bp, Homo sapiens
tcaggaccagctcattgaaaagagatttcggctgaatgcgtcttcttggcccatgttccttttgaagacgctaaatggagcagagatggctcccatcag

SEQ ID NO: 94043 - DNA, 75 bp, Homo sapiens
tggtcctggagttccagtggaggaagcagaaggaagattgagaggatccagaatccagatctctggaatagctac

SEQ ID NO: 94044 - DNA, 90 bp, Homo sapiens
gcacagatgtggaaagtgaatgtgcggaaaatgccttcaaatcaggtacatctaccctttagattccttgacctggattgaatactggcc

SEQ ID NO: 94045 - DNA, 82 bp, Homo sapiens
cgaactccgcaatgaggacgttcaggcatgaatcatacaaaactcaatatagagcaatgtttgtaatgaattgttctattaa

SEQ ID NO: 94046 - DNA, 95 bp, Homo sapiens
agaaaatcccccttgtgaagaagaatcagcagttcttgctttgtataaaacacttcaccagtatacgggaaggttacactaaagcaagtcccaga

SEQ ID NO: 94047 - DNA, 90 bp, Homo sapiens
ggccaccaccggccgcctcagccatggacgcgtccctggagaaggaatagccaggccagaagaaggaaggcctgtggtgagtgggacagg

SEQ ID NO: 94048 - DNA, 75 bp, Homo sapiens
gtgaagttcctttacactgggtgtgtaagaagattttacatcctgaagtccaaactctagatctacggagctgcg

SEQ ID NO: 94049 - DNA, 100 bp, Homo sapiens
tatgatgctgatggtgatggagattttgatgtggatgatgccaaagttttattagtgccgcagaatggaattcggcattgttcctacacagcttctcggc

SEQ ID NO: 94050 - DNA, 83 bp, Homo sapiens
gtttatgtccgacgtgcagctaggacaagaattttgggcagatttgaatgccatgaacgtgtatgaaacaactgaatttgacc

SEQ ID NO: 94051 - DNA, 100 bp, Homo sapiens
acttcccccggccagagcaatggccgctgagaacagcaagcagttttggaagaggagcgctaagctgccggggaggctgaagtgcaatgttgtgatctcg

SEQ ID NO: 94052 - DNA, 80 bp, Homo sapiens
agactagacctcgtaattacattctctcggccagcgcctccgcgacaatgcagatcttcgtgaagactctgactggtaag

SEQ ID NO: 94053 - DNA, 100 bp, Homo sapiens
tgccacccaagtttatgtagcgttcttggtttacctggacctcatggaaacaggttccagagagattcctggaagttgctcagatcacattacgggagtt

SEQ ID NO: 94054 - DNA, 75 bp, Homo sapiens
gggagttgggaggacccgggacaccgcacagccgggaaatggaagttattgccagcgccattttaaacaacaaaa

SEQ ID NO: 94055 - DNA, 75 bp, Homo sapiens
agaattacgggcaagcgctgttcaaacccatgaattacagaatgtctgaaggggacagtgtgggagaatccgtcc

SEQ ID NO: 94056 - DNA, 101 bp, Homo sapiens
agcccctttagccatgtggatacctacggagcacgagaaatacggcgtggatcgaaaagtatcctccttgcacacctcccgagttcagaggcagatggtgg

SEQ ID NO: 94057 - DNA, 119 bp, Homo sapiens
ggaaacagcagatgtaccctcagtacgccacctactattacccccagtatctgcaagccaagacaatgcagatcttcgtgaagactctgactggtaagaccatcaccctcgaggttgag

SEQ ID NO: 94058 - DNA, 82 bp, Homo sapiens
caaaagctctcagggatgctggtctggcagtcagctttcttggactccgtactgttggtgtaaccaaggcctggaggtctgg

SEQ ID NO: 94059 - DNA, 100 bp, Homo sapiens
tcttcctatccaatccctgccttttgagtccaggtggccaaacgtaccaagaaagtcgggatcgtcggtaaatacgggacccgctatggggcctccctcc

SEQ ID NO: 94060 - DNA, 101 bp, Homo sapiens
ggctgggctgatctccgtcgggggagccaagtacctgccgatcaccagcgccgcggactcggaggccatcacgtttcagaagctggtgaaggggcacgcgt

SEQ ID NO: 94061 - DNA, 82 bp, Homo sapiens
ccagttccaaaacagtgtctgatcttaggggaacaaataggcctgtgctcctttatatcactggagaactcttaaaccgaca

SEQ ID NO: 94062 - DNA, 75 bp, Homo sapiens
atgcccccactaacggggacttcacctttgtctcctcagcagacgcggaagggcaattcatgatgttaaagccac

SEQ ID NO: 94063 - DNA, 98 bp, Homo sapiens
cagattcggacaccgagaacaggagccggagggagttccactctattggcgtgcaggtggaagaggacaagagcatgtcagctgaactgttccgacca

SEQ ID NO: 94064 - DNA, 74 bp, Homo sapiens
gggaagtcatttctactggacttcatgcttagatacatgtataacaaggtacagcaatcatttgaaactccaag

SEQ ID NO: 94065 - DNA, 100 bp, Homo sapiens
caacagtgatgaggaaagctgtgaaagttctcaaggcatcaagcatgatggaaccatgtgtgatacctgccgccagcaaccaatcattggcattcgatgg

SEQ ID NO: 94066 - DNA, 88 bp, Homo sapiens
aaattttagcacaactccggacacttgttttccagtgtgatcttacccttaaagctcttggattccttagcaccaccacagctcagcc

SEQ ID NO: 94067 - DNA, 107 bp, Homo sapiens
tcattcctgccaagtgtatctgttaataattcttggagaatctgatagtaatgatgacactgaagatgtttcactgtttgatgcggaagaggagacgactaatagac

SEQ ID NO: 94068 - DNA, 51 bp, Homo sapiens
cttggccccgtccttacctcacagggattaatgaaaatcaagttccatcct

SEQ ID NO: 94069 - DNA, 98 bp, Homo sapiens
cggcagcctcagagaagcctgacctggccggctatgaggcccagggacggggaggtttactgcatcgacgcgcggttctacgggaacgtcagccggtt

SEQ ID NO: 94070 - DNA, 83 bp, Homo sapiens
acggagctgcggtggcgtctccacacgataaatactgcaacaactgtagctgacttaaagtcaataataaatgaatgctataa

SEQ ID NO: 94071 - DNA, 98 bp, Homo sapiens
aggaaagccgggtatctgtggtctttaagatgtggtgaacaaatagaagctgagggtgaaggacctacagctgtcaccttcatctcttctcaacactg

SEQ ID NO: 94072 - DNA, 75 bp, Homo sapiens
tgggccgccgagctggacccggaccggttttgggcgccaagcccatctttgtgtgcttgcatccaactgtgatga

SEQ ID NO: 94073 - DNA, 75 bp, Homo sapiens
cttacgcagaaggacctggccacgctgtccaatgtgaaagaaaacccattgaagtatcacgagaaaaatcttcca

SEQ ID NO: 94074 - DNA, 131 bp, Homo sapiens
gagtacagcttcaagtgaagttaatctgaggtgaagcaaacagaaaattgtggaggttttgttgggggacttgatctcatcttcatgccaggccttgggtttgacaaacatggcaaccgactggggagggg

SEQ ID NO: 94075 - DNA, 100 bp, Homo sapiens
cacaattactgatgggagcaagttgactaccaccagtggagtccaggatgagaggttcgtgtcttcctaaaagaaggttttattgggaggtaaaggtcaa

SEQ ID NO: 94076 - DNA, 50 bp, Homo sapiens
ccagttactctaacaagtctggaggccacagaaacactattcagaatggg

SEQ ID NO: 94077 - DNA, 100 bp, Homo sapiens
ggatctggaagctgagggcacgtgtttgcggttcagccctttgatgaccgcagcagcaaaagtggtggatcttgatccctgtctttccaagaagcctcta

SEQ ID NO: 94078 - DNA, 100 bp, Homo sapiens
tttgaaataagaggaactcttttaccagaaatgcatcgtgattcctgtccattggactgtaaggtttatgtaggcaatcttggaaacaatggcaacaaga

SEQ ID NO: 94079 - DNA, 51 bp, Homo sapiens
gtggaattttggagatattcaaagagagtgataatgaactctcaagtggaa

SEQ ID NO: 94080 - DNA, 75 bp, Homo sapiens
ctccacctttacttttacctacgttggcggccccagaagaaaagaagaagccgacgtggggcaggccttcgcggg

SEQ ID NO: 94081 - DNA, 90 bp, Homo sapiens
gctcatctgaaggacttggatgaagaaatctttgatgatgatgacttttaccaccaggactgtggtctggagctcaatgatgaagatggc

SEQ ID NO: 94082 - DNA, 50 bp, Homo sapiens
cgggaagcagggattccagtgccaagcaataagagctaactgccatcaag

SEQ ID NO: 94083 - DNA, 50 bp, Homo sapiens
cccaaactacgggaaattattgcaggtctggcagacccgtctgcgttaac

SEQ ID NO: 94084 - DNA, 100 bp, Homo sapiens
cgacaagagtgatgagaaggagtgccgtttcagtgtagctcagaagccatttggagccacgtatgtatggagcagcatcataaacactcttcaaacacaa

SEQ ID NO: 94085 - DNA, 73 bp, Homo sapiens
ggagaacctcggagaccagcagggcacagatgattgtggccatgaaggcagtgtctctgggcttcgacctgga

SEQ ID NO: 94086 - DNA, 75 bp, Homo sapiens
caagtcttctctgcagctttaccgggagtctactcttcatcttgtgttgagacttcgtggtggtgctaagaaaag

SEQ ID NO: 94087 - DNA, 99 bp, Homo sapiens
cctggccagctgccgcgactgggaggagcgccggaacgccgaggcccaggttcatcatgcctagtggcgtataagaagaccccgccaccggtccctcca

SEQ ID NO: 94088 - DNA, 100 bp, Homo sapiens
tgttcttcttcgagtatttgtagaagggcgataaactacattcagttgagtctgcaagactgggaggaactggggtgataagaaatctattcactgtcaa

SEQ ID NO: 94089 - DNA, 100 bp, Homo sapiens
gggcggagagaactcagcgaggattctgaggacttggaaaaggagagtgacacacccctccagcaagtatccattgaagaaattctagaagaacaaaggg

SEQ ID NO: 94090 - DNA, 75 bp, Homo sapiens
ctccagactacatcgcccccgagaattatatccagatcgagagacagaagattctgaaagggttcaatgaaatga

SEQ ID NO: 94091 - DNA, 96 bp, Homo sapiens
ctccctgagcagcttttttagagacaagtcatcaattgctggctcagaagatgctgaacctcttgctccacccatcaaaccaattaaacctgtcac

SEQ ID NO: 94092 - DNA, 100 bp, Homo sapiens
gcttcattcagatgtggtggaatatgccaaggaaaaactggagagcttcatcaaaaatagtgatagctttgataagacacattggcgtgagacctgggag

SEQ ID NO: 94093 - DNA, 98 bp, Homo sapiens
agataccacccacttctgatacaaagtcagatactgcaacaggttatcaagttatacccaaccagcagcaaaactaccaaggaatagttggagttcag

SEQ ID NO: 94094 - DNA, 95 bp, Homo sapiens
ttttacttggatgcagttttgaagtattaagctttacatcttcacagtggagttggatcacaggattgattttgaactcagagaaggccttgtgg

SEQ ID NO: 94095 - DNA, 83 bp, Homo sapiens
cgcctttcccgaggaccggtccgaactggcgcaggggccgctgcggcaaggaaaaccaattctgtgtcctcggaggaccacag

SEQ ID NO: 94096 - DNA, 100 bp, Homo sapiens
cgtggagatatggcgcaactgcggcgcacattccagctgcagctcttgtctcctagcagcagcattgtcccagcatttaacacggggaccatcacacaag

SEQ ID NO: 94097 - DNA, 74 bp, Homo sapiens
ggcttttcatcagaagcgtctatgattccttcagataccagggactgcttatcacacagactttcagccaccac

SEQ ID NO: 94098 - DNA, 88 bp, Homo sapiens
gcgagagccaggtttgagtccaaagtaccctccttctactaccggcccacgccctccgactgccagtcgcaatggaagaagagatcgc

SEQ ID NO: 94099 - DNA, 75 bp, Homo sapiens
gacattgagcttgtttcaaattcagcggccctgggagagcctcagctctgctatatcctggatgccatcctgttt

SEQ ID NO: 94100 - DNA, 100 bp, Homo sapiens
cagcgagccgtgagatgcgtggtccaccatcggtgacctcaccgcctcggttcgccctcagccgccccgagtgatcagcagctggactgtgccttggacc

SEQ ID NO: 94101 - DNA, 101 bp, Homo sapiens
ctcgggatggtgccacaggaggctgtgcgggccccgctccgcttcgaatggtggcttttcatggcctgccactgaaaatcaagaaagaaccccacagtcca

SEQ ID NO: 94102 - DNA, 82 bp, Homo sapiens
gtaagcgcagaaagcaggcgaacccgcggcgcaataacgggagcaccccatcggagacaagagcttccagaactacatccgg

SEQ ID NO: 94103 - DNA, 49 bp, Homo sapiens
gaccggaagtgctccagaactcaaggtggggtcctggatcggtttcgcc

SEQ ID NO: 94104 - DNA, 97 bp, Homo sapiens
agcatcagcgtcatcgacagccccggcatcctttctggggagaagcagcgcatcagccgagggcgccaatgcttcggcattagagaaagagattggt

SEQ ID NO: 94105 - DNA, 100 bp, Homo sapiens
atctcagatgttgttgatgaagtaatacagaactgccccatcgatgtgcggcgtccgctgtataaggctaaagaattacctccaaagccattgtcaagac

SEQ ID NO: 94106 - DNA, 83 bp, Homo sapiens
aacagggaaaaatacttgcaaatacgtttataacatacactactcagacagatgcacaccggctgcaccatgtcagcagcctg

SEQ ID NO: 94107 - DNA, 97 bp, Homo sapiens
tagaatctccactgaaacatcagctttgtttttgggaggctgaggaaggaggatcatttgagcctgggaggttaaggctgcaataagctgtgactgt

SEQ ID NO: 94108 - DNA, 71 bp, Homo sapiens
cctggcctcaaagaagatactctgcaattcctgataaaaggtcatcagactagtgctgagtcttggggtac

SEQ ID NO: 94109 - DNA, 75 bp, Homo sapiens
agaagatcaagactagtgtgagcaacaaagtgctggagaatctggtaaaagcaccattgtgaagcagatgaggat

SEQ ID NO: 94110 - DNA, 93 bp, Homo sapiens
tgcagcgggagctggacggcgagcgcgagcggcgcgagaaagggacggcaaaacagaacagaaaggcggagataaaaagaggggtgttaaaag

SEQ ID NO: 94111 - DNA, 90 bp, Homo sapiens
gcccttcctcctctgtgcggtgctgctcagtgcagttcaggttcctaaaagtaaagctctagaggccgtcaaattggcaatagaagccgg

SEQ ID NO: 94112 - DNA, 99 bp, Homo sapiens
ggagccacccccccaagcagcccccaccacatcctaacctggcagactggtactatactggcaattgctggagaagattttgcaattgttgcttctgat

SEQ ID NO: 94113 - DNA, 97 bp, Homo sapiens
cttcaattctcccaagtcgctctttctgggaaaagttatagaaattgttgccaaggtcagagaagtctcccagcccgactggacgcctccaccagaa

SEQ ID NO: 94114 - DNA, 76 bp, Homo sapiens
gatcatcctggggacctggtacatggaggaagagttcatcgattggtggagcaaattctttgcctccataggggag

SEQ ID NO: 94115 - DNA, 83 bp, Homo sapiens
cacgaaggcaccgacgtcatcatgctgaccaccaatcagatccgtaagtgcctccggagccagcgtggtggccatagacaaca

SEQ ID NO: 94116 - DNA, 75 bp, Homo sapiens
atccttctttttagagatcgttttgatggatatatcttccttgacagcaaaggcttacatcaaaatctatcaagg

SEQ ID NO: 94117 - DNA, 76 bp, Homo sapiens
gagtttgtgatgaagcaggctctaggaggtatgacctggacgcgtgtgacattcaagaaaaatacccggatttatt

SEQ ID NO: 94118 - DNA, 90 bp, Homo sapiens
atttaattcagatcagcttaatcatttgtttgttctcattcagaaggaggcatttggctttattgaaagaggtgatgttgtaaaagagat

SEQ ID NO: 94119 - DNA, 73 bp, Homo sapiens
cgcctcaggccagtgcctgaagacgctcatcgggggccgatggcatccgtggtctgaagggcacaaagggcga

SEQ ID NO: 94120 - DNA, 90 bp, Homo sapiens
gtggatgatgccaaagttttattagtttcccaggcggcaagtgcgacccggctgaccaagatgtggtgcacacggccctgcgggaaaccc

SEQ ID NO: 94121 - DNA, 91 bp, Homo sapiens
cgcagggacatttctagtagcctcaacagcctggctgatagtaatgccaggaccctccattttccatatccaggaaaatgtgatgcgccac

SEQ ID NO: 94122 - DNA, 50 bp, Homo sapiens
ggagagtccggccgcgacaggacggacaactacacctttgcccaacctgg

SEQ ID NO: 94123 - DNA, 96 bp, Homo sapiens
aagaagcacctggatgagacatttgctacagcatcccacattaagtcaacgttggctggagttgtcttccttggagtcgggctgtgggcatggagc

SEQ ID NO: 94124 - DNA, 50 bp, Homo sapiens
ggaggagtctcagagctgtcagaaaggaaaatgttggggcttttcaggaa

SEQ ID NO: 94125 - DNA, 100 bp, Homo sapiens
ctttcctgagactcaccgtccactccttctccaaaagatagagccacgaaccccctgaacaaggagctcgactgggccagcatcaacggcttctgcgagc

SEQ ID NO: 94126 - DNA, 90 bp, Homo sapiens
ggatttgttaaggattccaagtaactcttatttgactacgtctactttgagaactcctccagcaacccatacctgatccggagaatcgag

SEQ ID NO: 94127 - DNA, 100 bp, Homo sapiens
gagctgtactccagacacaacccggccatcgaggccctgctgcacgacctcagctcccagaggatcaccagcgtggggcagcacgctgaggaaacgcaag

SEQ ID NO: 94128 - DNA, 82 bp, Homo sapiens
ccgccgctgctaaatatatccgtaggaatggagagggaccggatctcaggatctcatctggccaccgcgttctggaagaggc

SEQ ID NO: 94129 - DNA, 110 bp, Homo sapiens
tgccgtccttctccactttcgccagcccgtgccgcgagcgcggcctgcaggagatgatatcatcaagttgaatcgaaaggaagggaagaagcagaattttccaagactaa

SEQ ID NO: 94130 - DNA, 100 bp, Homo sapiens
cgcgcgccgggagctgctgagcctaccgccgccagagtccagcagtccagagcgtgagtccattcacatcctgagtgttgatgagaagaacaagttggga

SEQ ID NO: 94131 - DNA, 100 bp, Homo sapiens
cccccaagcgcacctatgacatgatggagggccgcgtgggcagagccatctcctcagccagcatcgaaggtaccgaaagcacagtaatcactggtgtcga

SEQ ID NO: 94132 - DNA, 124 bp, Homo sapiens
tgccccaccatgtcagacgcagccgtagacaccagctccgaaatcaccaccaagaacatccagtcatggataaaaatgagctggttcagaaggccaaactggccgagcaggctgagcgatatga

SEQ ID NO: 94133 - DNA, 100 bp, Homo sapiens
ggacgagccagtggcaatgacccagacccggacgacccccattgctgagccagcggagctgcttgatacttggtgcttgaaaaactgaagaaggaagacg

SEQ ID NO: 94134 - DNA, 75 bp, Homo sapiens
tggaaagaatgatagccattctttcagaaaactatggcggaaaatgataacaacgaacttgatgcaagtgatagg

SEQ ID NO: 94135 - DNA, 117 bp, Homo sapiens
ccggtcctcagcgactcttctgacctccgcgcgacgtacccgccgccgccgttggctggaggagtccaaaactacttacctggaagaccttccaccaccccctgagtatgaattggc

SEQ ID NO: 94136 - DNA, 75 bp, Homo sapiens
gccgctctgaatcttgccgccctgcactgccgcttcggtcactacttctgcagaaagccgtcattacacctgatt

SEQ ID NO: 94137 - DNA, 74 bp, Homo sapiens
ttccagcttctgctgtccttctttgtggagagcaagaacctcaagaaggcatgaagccagcccctgcagtgccg

SEQ ID NO: 94138 - DNA, 75 bp, Homo sapiens
acgtgaagcgcttgcagacgcactgctacaaggtccatgaccctcatgatggagcagtccaagaagtcctccctc

SEQ ID NO: 94139 - DNA, 82 bp, Homo sapiens
caaagtctccgtctggagtaaggtgctgcggagcgacgcggcctgggaggataaggttatattcccaaataactttgaaaca

SEQ ID NO: 94140 - DNA, 98 bp, Homo sapiens
agtgaccacgggtgcagacagcaatggtgagatgagtcccgcagagctgctgcacttccagcagcaacaggtccatgcctcccgcagcaacaacatgg

SEQ ID NO: 94141 - DNA, 80 bp, Homo sapiens
gaaattgagggttcttgccatggaacatcatttacagcgagcaatttcagcacagcaagtgtttagagaaaaaaaagaga

SEQ ID NO: 94142 - DNA, 100 bp, Homo sapiens
tgatgccattccagcactggactcatggaggctgagcatttattcagctggaacccaggctggagaagagatgcctgttgtttcaaaaaccaacattaag

SEQ ID NO: 94143 - DNA, 100 bp, Homo sapiens
gtatccctccacacatgatcatcagtatttgcctcctgtgtcccaaccggcctgagtcaacagttccaagagcctctgagttcctgccttttttcatctc

SEQ ID NO: 94144 - DNA, 98 bp, Homo sapiens
gctttgaatgctatggctacgacatcatcatcgacgacaagctgaagccctggctgatcgaggtttgtctacagattttgagcgttcgaagttgaccc

SEQ ID NO: 94145 - DNA, 82 bp, Homo sapiens
gaaggctacggcaccatgtacatgaagacacggcttttccagtgcatttgcacagtataacttggaccagtttactccagta

SEQ ID NO: 94146 - DNA, 101 bp, Homo sapiens
atatcgttggacccagaattgaggtgccttatgtggatttggaacaccaaggaacctactggtgtcatgtatataatgatcgagacagtcaagatagcaag

SEQ ID NO: 94147 - DNA, 74 bp, Homo sapiens
cgagaggccgtgcgggacgcgggcgccaggaccggccgaacgcagaggtaagaatgattgatgttggctgatat

SEQ ID NO: 94148 - DNA, 100 bp, Homo sapiens
gaggcgaccgccatggcgttcctcaaactccgtgaccagacatgcgtcgggatgtccaggaaatttttcgcatgaccccccacgagaagcaggtcatgat

SEQ ID NO: 94149 - DNA, 87 bp, Homo sapiens
cccactcggcgtcgcgcggcgtgccctgcttgtcacagtgtaaacaggaacatcgataagtagtgtaaaaacttgcacaatgaaatc

SEQ ID NO: 94150 - DNA, 50 bp, Homo sapiens
cttctgaacaaggccaacacctatgcagtgcctgatcaactttctagcgg

SEQ ID NO: 94151 - DNA, 50 bp, Homo sapiens
aggaggccgcgccgatgaacctgaccgagaagccagctgaagatgagtgg

SEQ ID NO: 94152 - DNA, 106 bp, Homo sapiens
cagaaggcctctctcctgatacagcaggcgctcaccatgttccctggagacctgcctagagctggaacgttacctccagagcgagccctgctatgtttcagcctca

SEQ ID NO: 94153 - DNA, 83 bp, Homo sapiens
caccagtgcggggagccggaaggaggagccatagcttggagtagggtctgcttagtggcctatcttggcttgtttatgctttg

SEQ ID NO: 94154 - DNA, 100 bp, Homo sapiens
aaaaagcgtccgcttccagctttgcgcaggtatccagtagaaaaagcactctccagtgttcatctgtggaactggatggttcctacttgagcatagccag

SEQ ID NO: 94155 - DNA, 100 bp, Homo sapiens
acatacagtgacgcttcacagggcactttggaaagacatgagacaggagaaagagcacgaattattcttaattgttgtgatgattcacagcttgtgaagt

SEQ ID NO: 94156 - DNA, 83 bp, Homo sapiens
ccccagtgagggtgtacaaatacccctttgaattaattatggctgaattgaatgatctggcacgggaccctccagcacagtgt

SEQ ID NO: 94157 - DNA, 100 bp, Homo sapiens
gcttattttactcctttatggagcaaatatgaactcttctgaagaaaggtcttatcacaatggccatacttagaacatgagcaaggatttcaattgactt

SEQ ID NO: 94158 - DNA, 75 bp, Homo sapiens
gctatttgggtgatacccagtgcagtgaactgcagggcattttgtcagtgatgctgatctttgccttcttccagg

SEQ ID NO: 94159 - DNA, 100 bp, Homo sapiens
gactacaaggacgagttctcgggcagaggcgacctccccgcgttccatgcgcacagggacagggccgcttacaaacacgcagatggcaagaagattgatg

SEQ ID NO: 94160 - DNA, 73 bp, Homo sapiens
tgttggaccttccggagcttctcagaagacagagggttttcttttgaggaagctcaggtgacattagaatgtg

SEQ ID NO: 94161 - DNA, 85 bp, Homo sapiens
agaagcagaggaagcagcttgcaagattggtgttagactgggattcagtcagagccagggattaatgaaaatcaagttccatcct

SEQ ID NO: 94162 - DNA, 82 bp, Homo sapiens
cctggagcagccaccgccgcaatcatgatgacagtcatgtccctttccagggacctcaaggacgactttcacagtgacacgg

SEQ ID NO: 94163 - DNA, 50 bp, Homo sapiens
tgaaagactcctctatggaaagttgttcaccgtggtaagactacgctgga

SEQ ID NO: 94164 - DNA, 100 bp, Homo sapiens
agagaagccgggagcgagcccaggcggcagggaaatgatcttcattggttagcatgtgccttatatgtggcttgcagaaaatctgttccaactgtaagca

SEQ ID NO: 94165 - DNA, 90 bp, Homo sapiens
aagaggtgtcggaggtctcatctttgaactactgccggagcttctgccaggaggaaaaggcttctcttttacatcgtactcaggaagaaa

SEQ ID NO: 94166 - DNA, 101 bp, Homo sapiens
atggcactgttgcctatcagaagtcaattcaaaggacctgcccccagagagagaccgactgtgattcctccaccacctcactctgctccttccctgttgcc

SEQ ID NO: 94167 - DNA, 100 bp, Homo sapiens
ggaggaggaaaatattggtacttcaaacatgcaagttggaatggctaaagtaaataatgccagcctgattggactgggttatactcagacccttcgacca

SEQ ID NO: 94168 - DNA, 50 bp, Homo sapiens
ctaacactcatcttcaaaagactgttgaggagctcaagcttgggaaaatg

SEQ ID NO: 94169 - DNA, 98 bp, Homo sapiens
ctcgccctccccaccgacatcatgctccagttcctggatagattcccagaagtgggataactggatcagagggtgattaccctgtgtataagagtatg

SEQ ID NO: 94170 - DNA, 74 bp, Homo sapiens
ctgtgggaaataatgatgtaaaggtttcctatcctgggagcaggagagtgtgcctatttgaatgacaaaggtgc

SEQ ID NO: 94171 - DNA, 75 bp, Homo sapiens
catgatgttgacacgggctgggcgcccccagaagcccgggaacaaaccacaacattctgaaattttttggttatt

SEQ ID NO: 94172 - DNA, 73 bp, Homo sapiens
ttcatatattatctaccagataataatccaatgacgatatgattcatagtccagcgtttgagtgagcactcca

SEQ ID NO: 94173 - DNA, 90 bp, Homo sapiens
tgatgagcctcggaaagtgctcctgcggctgtatggagcgattttgcagatgaagaggatgtggagaactttgacgtgaccaacttgtct

SEQ ID NO: 94174 - DNA, 50 bp, Homo sapiens
aggagcgcttccgcaccatcacctccacgagggtgaggacaaaatcttct

SEQ ID NO: 94175 - DNA, 75 bp, Homo sapiens
cttcggtggactccttcggcagtccacccaccgccgccgcctcccagccttccccccaatgcctgtgccccctgc

SEQ ID NO: 94176 - DNA, 89 bp, Homo sapiens
tgggagccgcaccacctaacgctggccgacaacagcctggcgtccgccacgggcaccctcatccagcatctgaaggagcacctgctgca

SEQ ID NO: 94177 - DNA, 100 bp, Homo sapiens
ctgggataattatccaaataaattgcaagcattctatccaaatggaaagaccacagcaagattctttcattcgtctcctcctagcctgggggaccaggct

SEQ ID NO: 94178 - DNA, 100 bp, Homo sapiens
gggtccagccgtccccagaacgcagatcagaggtagtcggacctttcccgctggcgcgcagcctcagctaggtggccaccgagtactaaattcacttggg

SEQ ID NO: 94179 - DNA, 100 bp, Homo sapiens
aaggaagagctcatatttcactgtggattcaggcgcttccgagcctcacctttattctctcagcacactgcagtgctctggaactgaacccgcagtatct

SEQ ID NO: 94180 - DNA, 100 bp, Homo sapiens
agttggcgcccaagtccagaatccgcgcgcaccgcgagttgctgggagcctgagcacctttcgtttttcggctcagagaaagccaagtgcaacttgcttc

SEQ ID NO: 94181 - DNA, 83 bp, Homo sapiens
cccgcaagcccagacaatgccggtggaggaatttgtggctggctggatctctggcccgtgaaggtggagcggacccggaagcg

SEQ ID NO: 94182 - DNA, 100 bp, Homo sapiens
ttgaaacttttatctcatctggcttggcgcctgaggttctcccattagtcactcaagactgcttgcaactgattgcagacagtgaaacaccaactataca

SEQ ID NO: 94183 - DNA, 95 bp, Homo sapiens
gcctgagagagatttttctaaggttgtgtgtagtggtgtagccactacagggacagcctggacccatgggcacaaagaagcaaaacagcgcatcc

SEQ ID NO: 94184 - DNA, 100 bp, Homo sapiens
gggaaagggtgtcccccaacggctcatgagaggctagaagattccaaactagaagctgtcagtgacaataacttggaattagtcaatgaaattcttgaag

SEQ ID NO: 94185 - DNA, 90 bp, Homo sapiens
gcaagtttgactctgaacgcagcatcagctttatcccgccagatggagagtttgagcttatgaggtcttgggcgtctttggtactggctt

SEQ ID NO: 94186 - DNA, 75 bp, Homo sapiens
gggaggattgcattcagtctagttcctggttgccggctgaaataacctggaagctatgaagcagataacccagct

SEQ ID NO: 94187 - DNA, 97 bp, Homo sapiens
ggcaggatggactttgttgtcccggtcccagaccaccctcctccaccgtcgcctcccactgcaaaaaggcctggctcctgttggatcaccaggatgc

SEQ ID NO: 94188 - DNA, 83 bp, Homo sapiens
cgtaactgaaagaggaaatcttctacaaattccaggtactccaaagattcaggtttactcacgtcatccagcagagaatggaa

SEQ ID NO: 94189 - DNA, 49 bp, Homo sapiens
tgcctggcaaccaccccgtctgagaagataaaagaatcagagtgtctca

SEQ ID NO: 94190 - DNA, 75 bp, Homo sapiens
gtgactgctttggacgtgggagtcacctgaaagccaggaaatggaaccagtgaccttcaaggacgtggccgtgga

SEQ ID NO: 94191 - DNA, 82 bp, Homo sapiens
aacgcaaacccggaagcggatcgggtggagtgtaggtcatatcgccgcggtctactggggttcatcccatctgagccaggcc

SEQ ID NO: 94192 - DNA, 101 bp, Homo sapiens
gagagccggcggcgggaggccaaggtgaatgaaaactttgccattgatttgatagcagagcagcccgtgagcgaggtggagactcgggtgatagcgtgcga

SEQ ID NO: 94193 - DNA, 100 bp, Homo sapiens
gaacgctggggaggttgggctgaactgcagtgggagaggagaagagatgctggcgtgaagggggaactctaatgatccaggacaaagaagttaccctgga

SEQ ID NO: 94194 - DNA, 100 bp, Homo sapiens
cgcgcttccggcccctgcacgtccgcaaccttctcagcgcctatggcgaggtcggacgcgtcttctttcaggctgaggctatcatggtgaacttacttca

SEQ ID NO: 94195 - DNA, 75 bp, Homo sapiens
ctgatgcgagtctgggctctgcctcaccacttgtctcagaggattgtctcaaagcttgccaggagcagattgagg

SEQ ID NO: 94196 - DNA, 96 bp, Homo sapiens
ggctgtgacgcgcgcgccggagcggggtccgatggttctcgaaggcccgcggcgccccgtgctgcagtccaaggccattggtttgctagatgtgga

SEQ ID NO: 94197 - DNA, 51 bp, Homo sapiens
gtcgcgcttcttccccactcccgagacagatacacacaaatccatgttttt

SEQ ID NO: 94198 - DNA, 115 bp, Homo sapiens
accaaggatggtcaaaagcatgtggtcacattacttcaggaattcaaggagttgtggaagcctatcagagctgtcttcctaagctccaactctacggtcccaccaacattgcccc

SEQ ID NO: 94199 - DNA, 74 bp, Homo sapiens
cacctccagcccctgcgcctcgggattatcatctcagttaagacacgttcagaacggcaactcttaaggttaaa

SEQ ID NO: 94200 - DNA, 75 bp, Homo sapiens
agacgacgctgctgggtccgctgagcggggcgacccgagagcctccattatggcatgctgaatttaccaaagaag

SEQ ID NO: 94201 - DNA, 101 bp, Homo sapiens
gatgaccttaacacagtagcagctggaaccatgacaggcatgttgtataaatgtacagatagacgatcagctgaacactctcttgaaggagttccagctaa

SEQ ID NO: 94202 - DNA, 96 bp, Homo sapiens
agccggtgctgcagaaccagatccgggagcacgtcatcgccatcgaagatgcagacggtgcagcaggagcagctgctgcaggagacgcaggccctg

SEQ ID NO: 94203 - DNA, 82 bp, Homo sapiens
gtgcaggaccctaacgacaggcgcctccggcccatttacgtacctggagtagaacagaaaaattattatgtctgtgttccct

SEQ ID NO: 94204 - DNA, 100 bp, Homo sapiens
ctgcacattaggttgcagtatgtggccagttatttgcctcagtaaaagagcagtaacagagaagaattttgaaacaaaagattttcgagcctctctagaa

SEQ ID NO: 94205 - DNA, 142 bp, Homo sapiens
tatgtgactatcattgatgccccaggacacagagactttatcaaaaacatgattacagggacatctcaggctgagcggaaggaggagaaaaaggcggctgcccctgctcctgaggaggagatggatgaatgtgagcaggcgc

SEQ ID NO: 94206 - DNA, 100 bp, Homo sapiens
aagcatgtcatgtctgatagctctttggatttaccaacagttagtggccagcatcctcctgctgcagcttagcagtgtctgcaaaaacgaatcttttcct

SEQ ID NO: 94207 - DNA, 82 bp, Homo sapiens
ttgccttgagtcagtgcgccgctctccagcccgcttgaacggtgacttaagagattaaaattaatttggttgctgttggttc

SEQ ID NO: 94208 - DNA, 100 bp, Homo sapiens
catatttcgaggactcaccaatctggttcggctgttcctggatgcctatgctgagcacaagttacagttctgggcagtgacagctgaaaatgagccttct

SEQ ID NO: 94209 - DNA, 83 bp, Homo sapiens
tatgcttcgtttttcgccgtcatgggcgcctcggccgccatggtcttcagcgtgcaagaagaaacacacgctgctgtgccccg

SEQ ID NO: 94210 - DNA, 75 bp, Homo sapiens
tgcatacctccttccctgtcctcaatcagaatttatccagttggcgaaggactttgaggatttccgtaaaaagtg

SEQ ID NO: 94211 - DNA, 100 bp, Homo sapiens
ctcagtctcctgagtagctggaaccacagtgtcaccagatcctgagagttttgggatttcgatagactcttcaagaaataaaagcttctcaagtgtcaat

SEQ ID NO: 94212 - DNA, 82 bp, Homo sapiens
cgagaaatggccgcgtcggcaggagctggaagctatcaaagctcgagtcagggagatggaggaagaagctgagaagctaaag

SEQ ID NO: 94213 - DNA, 51 bp, Homo sapiens
aacaccagcagctgtcagacctgcacaaggacttggaccctctgtggaaca

SEQ ID NO: 94214 - DNA, 100 bp, Homo sapiens
aacgatcagcacttcagtcggaaagttggaacctctgacaagaccaagtactaccttcaagacctgcactggttaaacatcataatcatgtgtgttggcc

SEQ ID NO: 94215 - DNA, 101 bp, Homo sapiens
gaccccaacaccgggaagtgtctggagctctgccagtgccggccgggagaaggcaattgctcctgctgtaaggagtgcatgctgtgtcttggggccctttg

SEQ ID NO: 94216 - DNA, 83 bp, Homo sapiens
agagagcccaacgcctggtgctcaagactttctccgaggaccaagaatcgccttcagccctgtctggtgcatccttggcagaa

SEQ ID NO: 94217 - DNA, 100 bp, Homo sapiens
agaggctcatgcagagaagaaccggctcatggagtcgagggctgtgctgggggccctgggcagggccctgagccccttggaggagtggcttcggctgcac

SEQ ID NO: 94218 - DNA, 100 bp, Homo sapiens
ctgagcacacggactaaccacatagagacgctgggaaagctgagggaagagctggcccgcaccgccgccatgatgtgcgaggtgatgcccaccatcagcg

SEQ ID NO: 94219 - DNA, 75 bp, Homo sapiens
gggagactagcttggccacaggagacaacgttgaggtacagacagcttcatcgcagtaggaatggcagccccatc

SEQ ID NO: 94220 - DNA, 75 bp, Homo sapiens
gacagcccatcgtgtgaactatagagtttgtggacagatttatattgtgtcgctcttgcaatatattatcacatc

SEQ ID NO: 94221 - DNA, 98 bp, Homo sapiens
gccaggactgatgcagatgcccctcctccaccagaggactgggaggagcatgtcaacagaacacacgcaggacttgaaagatgttactaataatgtcc

SEQ ID NO: 94222 - DNA, 99 bp, Homo sapiens
taaccggctcaccacactctcgtggcagctcttccagacgctgagtcttcgggaattgttgtggcagcactgcctgaaggtatgagaccagattctaat

SEQ ID NO: 94223 - DNA, 100 bp, Homo sapiens
tgcgatgccaaagaccccacggacccgttcagcttttcctccgcaaccatgtctgacaaacccgatatggctgagatcgagaaattcgataagtcgaaac

SEQ ID NO: 94224 - DNA, 80 bp, Homo sapiens
tagccatgtggatacctacggagcacgagaaatacggcgtgggacccagatgatgtggtaccagttggccaaagaagagc

SEQ ID NO: 94225 - DNA, 90 bp, Homo sapiens
cccagctgaaggaaagcggaatcgatctgacaccgagcaggtgaccgaagaggcctatgtcccagtgagtgacatgaacggcctgggatt

SEQ ID NO: 94226 - DNA, 100 bp, Homo sapiens
cgtctccattgagcgcggaactcgccacggtatgtcttactgaaagaaagaaacatgcttctaaccctagagcaggaggccaagcggcagagattgccaa

SEQ ID NO: 94227 - DNA, 50 bp, Homo sapiens
cagatctggatcatcaaagacagccattccaccctatggtgaatctggat

SEQ ID NO: 94228 - DNA, 75 bp, Homo sapiens
tacctcaggggccgtccccaggacactgtccggatcttccctccctggagatgacctggcttccaccactttctg

SEQ ID NO: 94229 - DNA, 97 bp, Homo sapiens
tctagtccctcttacttgaagcatgtctttcagagcccggcaccacccatcttgagtatctggtgtctgacttccagcaactgctggcctgtgccag

SEQ ID NO: 94230 - DNA, 75 bp, Homo sapiens
agccaaaatgaagacctgtgttgatacctataccaaccgtttaaggaggcaggtggaagtcatcataaagtttct

SEQ ID NO: 94231 - DNA, 51 bp, Homo sapiens
ttcctgcccaacaaacagaggacagtggtaaatgagctggatggtatcccg

SEQ ID NO: 94232 - DNA, 75 bp, Homo sapiens
cggcgaggatcaaaatcttcgaaggagggatagcaaaacctgatctcataaaacctaggtcacaaaggacagccc

SEQ ID NO: 94233 - DNA, 98 bp, Homo sapiens
tccgcgcacatcactcccgagtggaggaagcaatacatccagtatgagggaggaataagtttttttcatctgtaatttggaagccaagtcagtaacaa

SEQ ID NO: 94234 - DNA, 100 bp, Homo sapiens
gattttctgctggccgtctgtaccgcactttaaaaggccatcggtggaagaaaggagccttctgtgactggacctacagagacatctgggattttctgcg

SEQ ID NO: 94235 - DNA, 100 bp, Homo sapiens
gagtacttctgaatcagcattgttagaactaccattgattacatgtgaatctgtacaggaattacatgaatgacagtcttcgaaccaatgtgtttgttcg

SEQ ID NO: 94236 - DNA, 75 bp, Homo sapiens
ccagattttaagcagcatgttcagataaatctgaatggaagagtgaggtgacaagaccaccttccagctacaggt

SEQ ID NO: 94237 - DNA, 74 bp, Homo sapiens
taaccaggtcgtcaagccacaggttttccagtcgcactgcggttctagataaagcagagtatctaagagatatg

SEQ ID NO: 94238 - DNA, 75 bp, Homo sapiens
gaaaagatctctctacttctcctaagattgtctaaagccccaggaaaaatggtggaaaattcaccgtcgccattg

SEQ ID NO: 94239 - DNA, 96 bp, Homo sapiens
cttacgtgtactttaccaacgagctgaagcaggtcatctacacgaacaatcagaggtacatggctgccatcatcttgagtgagaagcaatgcagag

SEQ ID NO: 94240 - DNA, 83 bp, Homo sapiens
aagaaggagatacattaaatgcaatagcccttcagtactgttgtacgggaagtcgagataacatgagtattgtactagtttgc

SEQ ID NO: 94241 - DNA, 100 bp, Homo sapiens
ttagaactcagctatcacaaacgtcatttggatagaccagtgttcttacggttttgggaaacattggacagcggacaaggcaaaatctcagcaagttcgg

SEQ ID NO: 94242 - DNA, 82 bp, Homo sapiens
cagtccagaccctgctgctgtcttcaaagaagggtgactatgaccagagcaggaccaaagtgctgcacatgagcctgaaccc

SEQ ID NO: 94243 - DNA, 98 bp, Homo sapiens
agacggccactccaggctggattgagaacatcctctccgtgcagccctacagccaagaatgggagctgttgagtcgtggggacagcttgaaggagcca

SEQ ID NO: 94244 - DNA, 108 bp, Homo sapiens
actggtgtctcctgcggaagggcagctgggcacgccttccagaccgaggtttttcgttggaatatacgttgcacatttatggcgattctgagtgtgagggcagacttc

SEQ ID NO: 94245 - DNA, 100 bp, Homo sapiens
gtgctagcggaggagtttgggaacctgactccggagcagctggcggcgccgatcccgactgtagaggttattgaagacaatggtgttcgaagagttgtcg

SEQ ID NO: 94246 - DNA, 50 bp, Homo sapiens
gtgtgttaaagtaacagatgatttagttgaattgaatgatctggcacggg

SEQ ID NO: 94247 - DNA, 75 bp, Homo sapiens
gcagttcagaagagccaaggaataaacatgcaatgaacccaaaaggaagatgattgaagaatcactgaagattaa

SEQ ID NO: 94248 - DNA, 82 bp, Homo sapiens
gcagcgggagctggacggcgagcgcgagcggcgcgagaaatgatgtcttggcattgcccattttcaagcaggaagattccag

SEQ ID NO: 94249 - DNA, 75 bp, Homo sapiens
ctattcaggataacacaagtcccttgccggattgagagctactcatgtaagatggcaggagacgacaaacacatg

SEQ ID NO: 94250 - DNA, 75 bp, Homo sapiens
tgccttcaatactacctttatttccaccataggtcaatgagctgaaggagaaaggcaacaaggccctgagcgtgg

SEQ ID NO: 94251 - DNA, 82 bp, Homo sapiens
tgcagaagacggatgagtctgggccccactcccaccgcctctactacctgggccgagacgcatccagagctttcgtgaccgg

SEQ ID NO: 94252 - DNA, 97 bp, Homo sapiens
gttgtacagccagaaaccggggaccttaacaatccacctaagaaattcagagattaatccaaaagagggatgtaaagttcacgtggtcttcagcaca

SEQ ID NO: 94253 - DNA, 90 bp, Homo sapiens
ccaccttgtccacaaattcgtcattggccacttaaaggtagcgctggtatatggtcaaatgaatgaaccacctggtgctcgtgcccgggt

SEQ ID NO: 94254 - DNA, 75 bp, Homo sapiens
tccggatgctcatccataaaactgaagatgtgaatactctgtatctctcagaagatagaagtgtgcaagaagtac

SEQ ID NO: 94255 - DNA, 100 bp, Homo sapiens
ctggtctttctcaacctcatcttctggttatttctcaaactctgaggctgcggagttcacacattgaaatctgtcatctttttcagagagaaactttcgg

SEQ ID NO: 94256 - DNA, 74 bp, Homo sapiens
aaatgcaatttgctgttggctggagtggttccttaaatgtcgaagaaggaaaataattctgaggtaggggcctc

SEQ ID NO: 94257 - DNA, 50 bp, Homo sapiens
ccggaggaacccggactccggcgtagcgatattgaagcacagattcgaga

SEQ ID NO: 94258 - DNA, 100 bp, Homo sapiens
ttctggtgggatcgttggctatgtaaaaacaggtgcatgtttgcctacaagctgggtctgaatgacttgccccagtcagtcgcctttttcagtgcagtcg

SEQ ID NO: 94259 - DNA, 100 bp, Homo sapiens
cactaggagtatgccagatggaagaaccattgttagtgaacgtggacaaagctgttgtctcagggagcacagaaactctgaagcggctcatggcagatga

SEQ ID NO: 94260 - DNA, 101 bp, Homo sapiens
ggtccggacagccgcgcgctgagggtctcggggcgggcgccgcgggacctctccgggccatggcagggagagcaacaagccccggccctcagagctcagcc

SEQ ID NO: 94261 - DNA, 80 bp, Homo sapiens
atggcagattcctccgggcagcagggctttttagaccccgagaagaagcttttttctcaccgaatattatcaagggatga

SEQ ID NO: 94262 - DNA, 100 bp, Homo sapiens
aaaaaaccgagttgctgctcagagaagtcggaagaagcagacccagaaggctgacaagctccatgaggaagctcttcgtgggcggtcttgactggagcac

SEQ ID NO: 94263 - DNA, 100 bp, Homo sapiens
gcagatgatttgcagtgaccattttgttgcagttgactcacgattatagtcatagaatcctcactatggatgggctcattgaggacattaagcatcggcg

SEQ ID NO: 94264 - DNA, 51 bp, Homo sapiens
cttcaccttgttcatggtgtcctgtaaggagtggaagctggacacactatg

SEQ ID NO: 94265 - DNA, 100 bp, Homo sapiens
cggcgtcgcgcggcgtgccctgcttgtcacaggtgggaggctggaactatcagtaatctatgccagcaattatgacaatgttagcagaccatgcagctcg

SEQ ID NO: 94266 - DNA, 100 bp, Homo sapiens
cttggccatcactatacacaacgttccagttgcctttccccatcttcctggttctgctccttcgtggcctagtcttgtggacaccagcaagcagtgggac

SEQ ID NO: 94267 - DNA, 98 bp, Homo sapiens
aaaccgtggctgctcgataaatcagacagaacagttaatcctcaatttaagcctgatctaacccctagaaacaggaccagcaacggagcgaggagctg

SEQ ID NO: 94268 - DNA, 83 bp, Homo sapiens
ggaacgcgcagccagccttgggaagcccagggtacccagtgtgttgaacaaattcaagagttggttctacgcttctgtgagaa

SEQ ID NO: 94269 - DNA, 86 bp, Homo sapiens
ccgcgaggaggcgcgggaggtgttcgagaacgaccccgagacggaggatacgaagcgttttcggcttcctgcccggagctgtgcag

SEQ ID NO: 94270 - DNA, 75 bp, Homo sapiens
gccgtcgatacatcctatcttcaagggtggcaatgaccatgagatcttcacagaccccagaaccatgggctactc

SEQ ID NO: 94271 - DNA, 75 bp, Homo sapiens
gggccagagggctcccgggctgggcaggtttttcgttggaatatacgttgcacatttatggcgattctgagtgtg

SEQ ID NO: 94272 - DNA, 74 bp, Homo sapiens
aatggttcacagttcttcatgtttgatattaaactgctctcagaattttcctcttgcctagcagatcagcattt

SEQ ID NO: 94273 - DNA, 97 bp, Homo sapiens
gcaggctggagcccaagccccagccccctgtggctgaggctacaccccggagccaggaggtgccctacgggctgtccttgcgcctggcccgcctttg

SEQ ID NO: 94274 - DNA, 75 bp, Homo sapiens
tgagaactcaagtgatgtagaggtacaaaatgaggccaagacacccttgaagaagttcttgttgaagctggctgt

SEQ ID NO: 94275 - DNA, 100 bp, Homo sapiens
acatggcccaggcagaccttgcagtcaaaagcagataaaatccccccatctctgtactccacctactgccaggcctgctctgctgctgaagagaagccag

SEQ ID NO: 94276 - DNA, 51 bp, Homo sapiens
cacccggccaggttcccaggaagagttcttcaagttcaagggctttgggag

SEQ ID NO: 94277 - DNA, 100 bp, Homo sapiens
cgggtcgggcgtctccgccggctactgccgcttcagttctcccggtgtggccacgagtcggatttgagttttgtcaccggctcccacgtcggagagctga

SEQ ID NO: 94278 - DNA, 100 bp, Homo sapiens
atttcttgctggttgaatacctccctctccactcccatcttcagggtctcctctgagcctccggcctccataagacccaaaacagatgacacctcttccc

SEQ ID NO: 94279 - DNA, 124 bp, Homo sapiens
tagaagattccataattgaggatgaagatgatgaagccgaggtagaagaagatgaacccacagatttgggaaatccctaagtcagccaacccctcctcccatgccaatcctttcacagtctgaa

SEQ ID NO: 94280 - DNA, 100 bp, Homo sapiens
tgatgttggtggctaagctcatccagtgtattgtgtttggccctcttcgagtgagtgagagacagacctggtggtgaacttaacccaggagaagatgaag

SEQ ID NO: 94281 - DNA, 101 bp, Homo sapiens
tctcaatagcagcccaaacagattaagacatgggagtctctagtgatccctgaaaagttccagcatattttgcgagtactcaacaccaacatcgatgggcg

SEQ ID NO: 94282 - DNA, 100 bp, Homo sapiens
tttctttccccctttaacttagaggaacgaggattatacagaaatttgaattaaacgagaagattcatcaccgctttgatggctgcctcacaaacttcac

SEQ ID NO: 94283 - DNA, 82 bp, Homo sapiens
ccagtggggcattcgtcttggtaaacttggtgtctggaattaactttcttctctggtgtatatggaacctgtattggtgcta

SEQ ID NO: 94284 - DNA, 100 bp, Homo sapiens
ggcccgcgggggagccccgggagccgcacgtttgcgtgtgaacttggacatgggcaaagcggtgtatggatggatgatgatgaaagatgagaacatccct

SEQ ID NO: 94285 - DNA, 101 bp, Homo sapiens
gagacactgatatggatggggttggagatcagtgtgacaattgccccttggaacacaatccggatcaggagttgtatcccgcattttgtattcacaacgga

SEQ ID NO: 94286 - DNA, 100 bp, Homo sapiens
agaattcagaaggaacttgcagaaatcacattggaccctcctcccaactgtagagttacactgttagaccttatgatagccaagataacgagtgatgagc

SEQ ID NO: 94287 - DNA, 75 bp, Homo sapiens
cccttctgcccggcgcttcggcccgggccgctcaggtgcaggtacatgtcccagagcaagcacacggaggcccgg

SEQ ID NO: 94288 - DNA, 50 bp, Homo sapiens
cagcacacagaagccgagacgacaagttggatggcttgaggactggtact

SEQ ID NO: 94289 - DNA, 100 bp, Homo sapiens
ttcactacccttcatgcatgaaagacaaagctactcaggaatttgtaagtgtctgggttcgagatcctaggattcagaaggaggacttctggcattctta

SEQ ID NO: 94290 - DNA, 141 bp, Homo sapiens
agagcgttcctcaaggcccaggctgctttcttcggtagctaccgaaacgctctgaaaatcgagccggaggaggaagccaagaatctggtgagcgaagccatcgcagctggcatcttcaacgacctgggctccggaagcaac

SEQ ID NO: 94291 - DNA, 80 bp, Homo sapiens
cagagtggagccatggctagaggacgagcctgtggagtgggagacacctgacctttctcaagctgagattgagcagaaga

SEQ ID NO: 94292 - DNA, 90 bp, Homo sapiens
gctggacacagcctagccagctcccacagaaactccagccgctgcgcggccctgcgcatgctgctggcagatcagggccagagctggaag

SEQ ID NO: 94293 - DNA, 100 bp, Homo sapiens
ccctgcacagcccggagtggagcgaggagcgcttccgcgtggacaggaagaaacttgaggccatgttacaaggcactgacatggccgtcttctgtctgct

SEQ ID NO: 94294 - DNA, 75 bp, Homo sapiens
ctacggagtcagattcctgaaaaagaatgtcgtactctcaggaggctccaccatgttcagggatttcggacgccg

SEQ ID NO: 94295 - DNA, 107 bp, Homo sapiens
tttgaattgactacccaatgtcctgcccctgtttctgtcctgtagcacttagggattctgaacacgaccctctttgagagttgggagataatcgggccttatgcttc

SEQ ID NO: 94296 - DNA, 100 bp, Homo sapiens
ctactaatggacagttagtcacccacctacatgttgagcaccagtatgcatgagcgggtgaaccgaacagaaagacagtttcgatcacttccagctaacc

SEQ ID NO: 94297 - DNA, 99 bp, Homo sapiens
cctccactccgtcccccgcgggtctgctctgtgtgccatggacggggggatatgagactttctactcggaatatcctgagtgttgcgtggatgtaaaac

SEQ ID NO: 94298 - DNA, 106 bp, Homo sapiens
ctgtacaccccatcccagacgaagacagtccctggatcaccgacagcacagacagaatccctgctaccaatgacattaaagtatcagtaaatgattttatcatcaa

SEQ ID NO: 94299 - DNA, 66 bp, Homo sapiens
gcgggatttctatgcagcgtaccccctgacggaggactttccccttttcccagtccgagtttgacg

SEQ ID NO: 94300 - DNA, 100 bp, Homo sapiens
actgtgtggacaggctcttacagtgcactcggcaggcagtacccctcttctctggttaccttcccgccaatgtagaccggagaccagccactctccagag

SEQ ID NO: 94301 - DNA, 75 bp, Homo sapiens
tggaacctgagctgggtctctgactcacttctgactttagagttgtggaaagtaaaaatgtagccctaccaaaag

SEQ ID NO: 94302 - DNA, 100 bp, Homo sapiens
aatgttcttaggatcctcctcccgtccttctcatccttcgactcacaccacccggcaagaactgctcactacggctccctgccccagaagtcacacggcc

SEQ ID NO: 94303 - DNA, 100 bp, Homo sapiens
cgcgagcccagagctccgatccctgcgcgggctcgagagctcgccccgaacgggggtcttcctcctccgccgttgacagaagctgctgatgggagctcca

SEQ ID NO: 94304 - DNA, 50 bp, Homo sapiens
ggacagaggttattttagtatagaggaagcaagatttccagatgtagcaa

SEQ ID NO: 94305 - DNA, 101 bp, Homo sapiens
gattggtgagagcgttttcgcgaggtcgcaaattccggattctgccgttcctgtattgctaccagtctaaagaacaacaagtggacctgtccttattgccg

SEQ ID NO: 94306 - DNA, 95 bp, Homo sapiens
cagctacattcctcttaataaatcacacaaagaatgaacttgttcaatacaatcaaaggctcatggatttgagatcttatgctccaaatgtagcc

SEQ ID NO: 94307 - DNA, 75 bp, Homo sapiens
agggcctgcagcgggagctggacggcgagcgcgagcggcgcgagaaaacctgatggccaaaagaaaggaagaaaa

SEQ ID NO: 94308 - DNA, 100 bp, Homo sapiens
aagatgcctcgaactaaacaaattcatcccagaaatctaagaggtgagacacagtaacctggttgaactctgcatctggaaagctgaagactgaagaaag

SEQ ID NO: 94309 - DNA, 98 bp, Homo sapiens
agctgggctcccttggagacagagcgccatgggaaaccgggtctgctgcggaggaagctggtaattttaaccaatcagatgacaacaaagattgatag

SEQ ID NO: 94310 - DNA, 107 bp, Homo sapiens
ggcatccctagctccagccgcaatgccattaccagttcctacagctccactcgaggcatctcacaggagttgtaagacgttcatcgccgtgttatccttgagtaaag

SEQ ID NO: 94311 - DNA, 90 bp, Homo sapiens
ctcggactcgccgggcgctgcggtggctccctgggccgaggcctgttacatgaacagaatatggcaaaaatgagactacttacttttatg

SEQ ID NO: 94312 - DNA, 90 bp, Homo sapiens
tcccgagtagctaggactacagatgcaaaatccacaagtattcaagtgattgttaaagagggaggcctgaagttgattcagatccaagac

SEQ ID NO: 94313 - DNA, 50 bp, Homo sapiens
cgcggcctgggatgcgcttgggctccctgatctgactgcagccatgagca

SEQ ID NO: 94314 - DNA, 82 bp, Homo sapiens
cactcggctcctgtcgtccgttctctcaggctcccgttcagctgctgatgcaaggaatcccctgggctcccgtccactccac

SEQ ID NO: 94315 - DNA, 82 bp, Homo sapiens
ggagaacacagttggagaaaatcggcagctgagacggccttggccgggttttggccaaattgggcgagggcacaaaataacc

SEQ ID NO: 94316 - DNA, 96 bp, Homo sapiens
tcccctggagagagcggcgcctgggacattcctggagtgtcacgaagctgccgtctccatctactgcagcatgcgcaaacggagcctctcccactg

SEQ ID NO: 94317 - DNA, 100 bp, Homo sapiens
gcctgagcactgccttgtcagtggagaagaccagcaagcgtggcggcaagatcatcgtgggcgacgccacagagaaagcatccgcacttccactaatagc

SEQ ID NO: 94318 - DNA, 83 bp, Homo sapiens
gtgggagtctccgcgtcccgctcgctgggagagaggggagcttttggaagagtcccagatggaagcgaccaggctccggcaga

SEQ ID NO: 94319 - DNA, 148 bp, Homo sapiens
caattgcagcctgcggagaggcctccccagctcagacctggggcccctacctccctacagacagagccacaaggaacagatgttgttattgtaaagaatggaagaagaatatgtggaacaggaggttgtttagccagcgcacctttac

SEQ ID NO: 94320 - DNA, 98 bp, Homo sapiens
ttgtctcccacggtcatccgctcagggctgaaagtgatcctgccatgaagcagtttctgctgtacttggatgagtccaatgccctggggaagaagttc

SEQ ID NO: 94321 - DNA, 96 bp, Homo sapiens
agatggcgggacggctgccggcctgtgtggtggactgtggcacgggaaggactccatgaaagatgacagaagaagttattgtgatagccaagtggg

SEQ ID NO: 94322 - DNA, 90 bp, Homo sapiens
ctggactcatggaggctgagcatttattcagatacgtaggtaacctttccagagatgtgacagaagtccttatacttcagttgttcagtc

SEQ ID NO: 94323 - DNA, 83 bp, Homo sapiens
aaggaggaattcgccgtgcccgagaatagctccgtccagcagacctagaggatcaagacataatgggagcatttttagacaag

SEQ ID NO: 94324 - DNA, 82 bp, Homo sapiens
gccagatggtgttacctggagcttaaaaagctgcacgcaagtgttaaacttctgatcctgcagctcctgaaaggcaagctgg

SEQ ID NO: 94325 - DNA, 100 bp, Homo sapiens
gagagccgcgggagagtgtgcagccgagtcactactgcctgcctgcctgcctgctacggcagactcagtgggatcctcctacttgggaaagcccaggaga

SEQ ID NO: 94326 - DNA, 100 bp, Homo sapiens
ctgtaatttctaaacatccaggaacaggtgaaaggtgtagcagtcactcggcctacacccacagcatcgaccttgtgaacccagcgacctgactgccttg

SEQ ID NO: 94327 - DNA, 82 bp, Homo sapiens
gggagacacattttatgttgtgtcatttcgaaggttggaccctgggcgttttttacacatggggacccaggctcgccaaagc

SEQ ID NO: 94328 - DNA, 82 bp, Homo sapiens
tggggacaaagccgctccacctcccatgtcggcacagggtttggagaacattgattaaggaagcattttcctgattgatgaa

SEQ ID NO: 94329 - DNA, 78 bp, Homo sapiens
aaacgcaagagtctcttcattaaccattcctcctcgccctctgactaatatgaatgacaccatggttagccacatgtc

SEQ ID NO: 94330 - DNA, 82 bp, Homo sapiens
ccgcatgctgcagcttatgaccatcaatatgtttgcagtacacaactcccagctgaaaggaatactcccccagttgcaagag

SEQ ID NO: 94331 - DNA, 83 bp, Homo sapiens
ggcttttcatcagaagcgtctatgattccttcagataccagggactggtttactcctggcttgggggcattaggaagcactgg

SEQ ID NO: 94332 - DNA, 97 bp, Homo sapiens
ctgagctggttggccctgtgatccctcaagactggtccacggagtgtatgaccacaaacagccatcaaggcttcagggatgacttcttagggggcag

SEQ ID NO: 94333 - DNA, 90 bp, Homo sapiens
ctttactttccagaacccttactcagatgaaattgagtacatcatctgtaccaacaccaatgtgaaacatgtcatgctgcccaaggacat

SEQ ID NO: 94334 - DNA, 100 bp, Homo sapiens
cctgggaggccggccggtgccagcacctttcggcttctgagacggcggcagcagcggcattcagaaaaatggctactggacaggatcgagtggttgctct

SEQ ID NO: 94335 - DNA, 100 bp, Homo sapiens
ttaaaatgtatccagttttatgctgatgagagctataacttaatggagatgtaatcagtgtagagaaaaccgtgaagagatgccttttggacactttcaa

SEQ ID NO: 94336 - DNA, 97 bp, Homo sapiens
gtcagcaccatctttctaacagtctgtccacgttctctgtgggttcattgccggacttgagtctgagttcatggagactctgtcggatgaagaagta

SEQ ID NO: 94337 - DNA, 88 bp, Homo sapiens
ccctcagcatctcccttcatgtctgggtcatggacccagagttcaacaatacagatcagattgacctgtatgatgatgtgctgacagc

SEQ ID NO: 94338 - DNA, 96 bp, Homo sapiens
ggacttaattttaacaccagcgcatgtcagccaactggagaatgctggaggagaccttaaggatggccaccaccactatgaaggagctgttgtcat

SEQ ID NO: 94339 - DNA, 100 bp, Homo sapiens
gagacagtctggaagagctgatggaagaggaccatagaattttttggctgattacaggaattatgttcatgggaagtggcctcatctggaggcgcctgct

SEQ ID NO: 94340 - DNA, 100 bp, Homo sapiens
cctacctgaagtatgccattagttcccaggaatatgaagacaaggctggaagacctagcaagccaccctctccaaagcagaatgtgaggaagaatcttga

SEQ ID NO: 94341 - DNA, 75 bp, Homo sapiens
tgacccgactgcctctctcagtgaggcataatcaccagcaacacccgggacaataatacgggggccacctacccc

SEQ ID NO: 94342 - DNA, 51 bp, Homo sapiens
tgctcaacgacgaggacctgacgcagaagagaaaggatgcacgtcccagga

SEQ ID NO: 94343 - DNA, 73 bp, Homo sapiens
agatggtcaaggtcagccgcaactacttcagcaagctgtaatagctcttcaagtctgcaataaaaaatggcct

SEQ ID NO: 94344 - DNA, 83 bp, Homo sapiens
cttagggacaacaccgggacacccgcgaggccggaaaatggtatcatgatattagctggtttgacatcaagtcatttgtgagt

SEQ ID NO: 94345 - DNA, 75 bp, Homo sapiens
aggtttgaaaagcagctggcctgcaagctggagaatgctggaggagaccttaaggatggccaccaccactatgaa

SEQ ID NO: 94346 - DNA, 100 bp, Homo sapiens
cagaggagctcaaaatggagttgccggagagacagcccagtctcacagaaagttctccgctcccagacatgggtccctcggcttcctgcctcggaagcgc

SEQ ID NO: 94347 - DNA, 100 bp, Homo sapiens
ggagagagatgttatcatgagggaattccggtcagggtcaagtcgtgttctgatcactactgacttgttgaaccaacttcttcttaaaacagggaagaag

SEQ ID NO: 94348 - DNA, 101 bp, Homo sapiens
gaagcaggatgaactgaaacggattgccagagaattggcagaagggtttggaatcacttgctaggagtcttgtctctctgccacccaggacatcatggcag

SEQ ID NO: 94349 - DNA, 75 bp, Homo sapiens
atcaagcgggagttcaaggaggtgctgaagagcgaggagccctcccaggcccaatacttcaaagcatcctacctc

SEQ ID NO: 94350 - DNA, 100 bp, Homo sapiens
atctccggcgcgggcactgctttccactcggctcctgtcgtccgttctctcaggctcccgttcagacccaacatgagtgaagtttcctgcaagaaacggg

SEQ ID NO: 94351 - DNA, 75 bp, Homo sapiens
ccccgtacgtcactaccactgtctctgctcacagtgccaaggttgcctggctggacaaaatcgacagacgctatg

SEQ ID NO: 94352 - DNA, 75 bp, Homo sapiens
gaaaaggccgaacatggagatcaagattatatctggcaagtagcctgcagtatgaaatgctgctgctgacggatt

SEQ ID NO: 94353 - DNA, 90 bp, Homo sapiens
gaaatcgagactcatgactcccagagaggatggcatctagaaggccaggaatagttgctgaacaccccaggcctgctgaggtccctcctt

SEQ ID NO: 94354 - DNA, 49 bp, Homo sapiens
caggaaccaccagtgacagaacccaacatgagtgaagtttcctgcaaga

SEQ ID NO: 94355 - DNA, 90 bp, Homo sapiens
ttttgtggaatgcacagtcatacaaattatatagttgtacaatggtagatggagtgatgattcttcctgtgcttatcatgattgctctcc

SEQ ID NO: 94356 - DNA, 82 bp, Homo sapiens
cataatgcttctaattctgaaatggttttgatgatgatggttcagaatttcatgaacatatatttctggagaaacacctgga

SEQ ID NO: 94357 - DNA, 83 bp, Homo sapiens
ggactccttcggcagtccacccaccgccgccgcctcccagattttgcaagaacgaggctcaaggatgtgagggacacagtatt

SEQ ID NO: 94358 - DNA, 98 bp, Homo sapiens
tgggagttcagccaggacgtctacctgtccaccgtcgtgaccgaggtttggccggaagaatgtgctgttcgtgaccatgggcatgcagacaggcttca

SEQ ID NO: 94359 - DNA, 90 bp, Homo sapiens
ggccatggccgcctcggagcggctgtacgagttgtggctgctctactacgcgcagctcggcaagatgtcggtgaaggagggcgcacagcg

SEQ ID NO: 94360 - DNA, 89 bp, Homo sapiens
gtgaggatgaagaagatgactaccaggcaccacctacctatgatgccgtggtacagatggagtaccttgacatggtggtgaatgaaaca

SEQ ID NO: 94361 - DNA, 100 bp, Homo sapiens
ctggagtgggcgcggaggcgaccgccatggcgttcctcaaactccgtgaccagggtgagcatggacaatcttgtgccaaaatgcttgtgaatcgagcatt

SEQ ID NO: 94362 - DNA, 100 bp, Homo sapiens
cacagttcctgggaaggtggagccaccagcctctccttgctctgggaaaccaaggttttgcagtctaaagcaacagaagacttcttcagaaatagcatcc

SEQ ID NO: 94363 - DNA, 75 bp, Homo sapiens
agaccctgccagtgagagaggaaatgccagctcttctcagaaagaaaagcaccagaaatgtcagcagcccaggac

SEQ ID NO: 94364 - DNA, 98 bp, Homo sapiens
ctgcttcaaaagaacaggaccccgtacgtcactaccactgtctctgctcacagtgccaaggagcatcagatccatgctgctgctgactcggagcccca

SEQ ID NO: 94365 - DNA, 100 bp, Homo sapiens
gtgaagtggaggattgagaggggtgttgtacagcaaacagagagcttagtgcgtggcttctatgagctgggatctagcaattgggaggcagcagacttgg

SEQ ID NO: 94366 - DNA, 75 bp, Homo sapiens
gagacatcctatattcctttcagagttcctgagttggaggtagaagaagaaacccaagttcaagagatgacttta

SEQ ID NO: 94367 - DNA, 88 bp, Homo sapiens
gccagcgtcgagaagggcgactactacgaggcgcaccagatgtaccggaccctgttcttcagtgacatattcgatgccatgttccctg

SEQ ID NO: 94368 - DNA, 100 bp, Homo sapiens
cttctcacgttcagccggcgtataccaacccaccccacatggcccacgtacctcagttgaagaacaagagaggcaggaaaggaatagaggccaacagccc

SEQ ID NO: 94369 - DNA, 82 bp, Homo sapiens
gtccgagctgagatccatctgcaccacggtgctggtcagggaagtcaaagatgcatccctgagttcttcctagcaggcaagc

SEQ ID NO: 94370 - DNA, 100 bp, Homo sapiens
tctaaaattgctgcctctggtggggaagtggaaggaacgtgttgtgggctttcacgtactgggtccaaatgctggagaagttacacaaggctttgcagct

SEQ ID NO: 94371 - DNA, 100 bp, Homo sapiens
aacagcagcagcagcggctccggcagcggtagcacgagtgcgggcagcagcagccccggggcccggagagacacgatgaggcgagtggtacgacagagca

SEQ ID NO: 94372 - DNA, 100 bp, Homo sapiens
aaagtggagtccgagctgagatccatctgcaccacggtgctggtttgttgaagaggaccatattccttacataaatgcttttcagcattttccagaacag

SEQ ID NO: 94373 - DNA, 49 bp, Homo sapiens
tgcagccgcacctggccaagggtggaacggcacatgtgtgatggggaca

SEQ ID NO: 94374 - DNA, 75 bp, Homo sapiens
ctggaccaagatcgagcccagcgtcaacttcctcaagtcgcccaaaggagtctcacaactcaagaaagaaacggg

SEQ ID NO: 94375 - DNA, 89 bp, Homo sapiens
ttggcaaggagatcattgacccagtgctggatcggatccgcaagctggatttggaactagctctggttttggatgcagcaccacagggg

SEQ ID NO: 94376 - DNA, 101 bp, Homo sapiens
gccttgaaacgcaatctcagtctctctcacgttcccagagcatggatatcgatggtgtctcatgtgagaaaaggcgaggcggctttgcacaaggtggacat

SEQ ID NO: 94377 - DNA, 75 bp, Homo sapiens
cgccgcgtccttggctggcgtggctgtgcctgcgcccagaagcagctacacttcatggaccagttgctcgatacc

SEQ ID NO: 94378 - DNA, 74 bp, Homo sapiens
ggaaaatctccccggtgactttcagatccttcccgccagaagaaacttatgttgggagatcaacaccagctagt

SEQ ID NO: 94379 - DNA, 100 bp, Homo sapiens
cacgatcacgttctagatcacatactccaagaagacaatgatgataattccgaagaaggcttccacactattcattcaggaaggcatgaatatgcattca

SEQ ID NO: 94380 - DNA, 88 bp, Homo sapiens
catcgtattacacctgaggaggccaagagagcaaagtcccagaacccactgcgcagcttcaagcacaaaggaaagaaattcagaccca

SEQ ID NO: 94381 - DNA, 82 bp, Homo sapiens
cccattcatcaccctggagccttccctcctcttcccagcaggccaggtcatcctgtacagttctacagcatgaataggcctg

SEQ ID NO: 94382 - DNA, 54 bp, Homo sapiens
aagaacaagtaccgccccgacctgcgcatgactgatgctgctctaatgtatgat

SEQ ID NO: 94383 - DNA, 75 bp, Homo sapiens
cgacaagccgctggcagccgcggatctcaccgccgctcaggagctgcaagcgtttgctcaccacggccgctccct

SEQ ID NO: 94384 - DNA, 97 bp, Homo sapiens
atgacactcttattgaaacaacagactatgctgggcttattctttggaaacatgatgagcaaggagaagcgagaggctgtcagtaaagaggacctgg

SEQ ID NO: 94385 - DNA, 138 bp, Homo sapiens
ctctgctcccccgcctaagccatgcacctctgtgggggcaatgggctgctgacccagacagtttgtgggggagagaaaccttatttgtctccagacattctagaggagaagcactgtgaattcaaacaacttgctctg

SEQ ID NO: 94386 - DNA, 99 bp, Homo sapiens
agcatcagcatcatcgacacccccgggatcctgtctggagagaagcagcggatcagcagagcggccgtggatgactacccgctgcccagtcacctggac

SEQ ID NO: 94387 - DNA, 90 bp, Homo sapiens
gggagaaccagccgactggagcaggcagcagcccagggggaagcgagtagcattatctgatgatgagacaaaggaaactgaaaacatgag

SEQ ID NO: 94388 - DNA, 101 bp, Homo sapiens
ctcgtcgaaaggattggattggcatctttagagtacgagtggctgctttacagaatctggtgaagataatgtccttatattatcagtacatggagacatat

SEQ ID NO: 94389 - DNA, 82 bp, Homo sapiens
gacgaactcaaccagcacaacagggcttgtcaatgaggcagatcagattcaggttcgacgggcagccaatcaatgaaactga

SEQ ID NO: 94390 - DNA, 82 bp, Homo sapiens
caggacacccctggagtctctctgcaccctctgtccctggacagcccagaccgggaaccagattgttcagattccattctgt

SEQ ID NO: 94391 - DNA, 100 bp, Homo sapiens
ccatcttcgggatcttcgacgggcacgggggagaggtgattttacaacgagatgctgctctccatagggatgctcatgctgtcagccacacaagtctaca

SEQ ID NO: 94392 - DNA, 90 bp, Homo sapiens
cccaacaccattcagtaccggggctgttacctgagggagcacacggcttggtgccggggggccccctcctcaccagtacccaccccaggg

SEQ ID NO: 94393 - DNA, 50 bp, Homo sapiens
ccacgcagtcacagagtgacatggttggctcccatcatctgagactccac

SEQ ID NO: 94394 - DNA, 95 bp, Homo sapiens
atggatttttgcatgagacgcttctggacagaaagaatcttcaagagggagacatagggaaaaggaagacataaaaatcactaaggaaagaactc

SEQ ID NO: 94395 - DNA, 74 bp, Homo sapiens
gcttgccctggtcttgctcggccgatgaagtgcagaggtttttttctgcccaacgatgatcaaatatggcatca

SEQ ID NO: 94396 - DNA, 101 bp, Homo sapiens
ccctgagctcccattaggagccgctggctgcggcagcaggggactagcgtgagagaacctgtgagaagtttctacaatggtgggctcagctctcaggagag

SEQ ID NO: 94397 - DNA, 98 bp, Homo sapiens
agagagcctggtgtggagcaagataagctgagatctgtatctgtggacctgaatgttgatccctcgcttcagattgacatacctgatgcgctcagtga

SEQ ID NO: 94398 - DNA, 106 bp, Homo sapiens
ctgtgacagagacaacaccgagtatgagaagtctgtcagtttgtcgtctctgtcaacgggctcaatgtcctgcatgtagactaccggaccgtgagcaatctgattc

SEQ ID NO: 94399 - DNA, 90 bp, Homo sapiens
taacaatgggaaacattggtcgacaactggcaatgaatgaaatgcattctttgctggaaagatactcagtgaatgaaggtttagtggctg

SEQ ID NO: 94400 - DNA, 100 bp, Homo sapiens
tactggatcgaaatgtccatgagaaaaagcttggagataaagttgctttttactgaaaacactttcctggataaaaaagaaaacattccagatgcatgat

SEQ ID NO: 94401 - DNA, 82 bp, Homo sapiens
tcacacgacttcagatggagctcatggagtacaaaacagattctcaaagttggattggtggaaacaatgaaccattgacagg

SEQ ID NO: 94402 - DNA, 100 bp, Homo sapiens
ctttctttaagaagacatttgtcaaactcaacaaattgaaggttaacaccttaagagttgtagttactgaccaggtgaaaggtgtagcagtcactcggcc

SEQ ID NO: 94403 - DNA, 100 bp, Homo sapiens
tacggaaaaggaacagattgttcctaaaccagaagaggaggttgcccagaagaaaaagaaaggagcgagtgggactgtgctgctggccggctcctctttg

SEQ ID NO: 94404 - DNA, 101 bp, Homo sapiens
gaaaaggttattgtgcctaacatggaatttagaggctgcgctgaacatcttaaagttgctgtctgagttggaccaacaaagtacagagatgccaagaacag

SEQ ID NO: 94405 - DNA, 82 bp, Homo sapiens
ccgctacgagctggctttaatcctgaaagccatgcagcggttccaaagaactactggttcagattttagctcttcccaagtt

SEQ ID NO: 94406 - DNA, 100 bp, Homo sapiens
gcttgacggcttggacgaagatggggagaaggaagcgagactcatacgcaacctcaatggtctccggccgaacaagcagacctttaaccctacagacact

SEQ ID NO: 94407 - DNA, 96 bp, Homo sapiens
ggggcattaaaggagtcttcaggggacccctgtgcaagaacggatctccctctccgggaactcaaagttggcattcccgtcacggatgagaatggg

SEQ ID NO: 94408 - DNA, 98 bp, Homo sapiens
tactgtgacctgaacaaagacaaggtcatttcactgcctgagctgaagggctgcctgggtgttagcaaagaagagtccctgcaggaagcatcacccag

SEQ ID NO: 94409 - DNA, 50 bp, Homo sapiens
tctgcctgtgttgaccttattcacaaagcaatggttcagcatgtataaac

SEQ ID NO: 94410 - DNA, 96 bp, Homo sapiens
accatgtcagacgcagccgtagacaccagctccgaaatcaccaccaagaagctccaccatgaggcgaggtggatggaggaagcgagctgaaaatga

SEQ ID NO: 94411 - DNA, 80 bp, Homo sapiens
gacttcccggacgctgggaaatgggcgccatgttttggaagtttgacctgcacacaagctcgcacctggacacgctgctg

SEQ ID NO: 94412 - DNA, 83 bp, Homo sapiens
agaagacaagagtcatggaaaaaaccaagtggctggatatcaaaggaaatcatggccagaagcggactcctagaagaggggag

SEQ ID NO: 94413 - DNA, 82 bp, Homo sapiens
agtcagtcattttactgtcaagacatttcttcggcattctgcaacagggcaaactctttgattctacaatagctgatgaggg

SEQ ID NO: 94414 - DNA, 98 bp, Homo sapiens
gcagcaagatggcggacgagaaggacagggaagggctgaagaagatgcagagcagcctgaagctggtggactgtatcatcgaggtccacgatgcccgg

SEQ ID NO: 94415 - DNA, 100 bp, Homo sapiens
gcccgtcatggagatggaaaaggagttcgagcagatcgacaagtccgggagctgggcggccatttaccagggtatttgaagtataccatacaactgtttt

SEQ ID NO: 94416 - DNA, 100 bp, Homo sapiens
gcaaaagcaaagaccagaaagagtgtctcatcttcttcaagataacttgccaaaattgctgaaccggataaggacctggcagaaaacccaccagggggag

SEQ ID NO: 94417 - DNA, 99 bp, Homo sapiens
gctgtttgtatgcacgacttgaagacacgcacttatcattcagtgggggagttgctggaagccatcaaacgtgactttggttcctttgacaagtttaag

SEQ ID NO: 94418 - DNA, 75 bp, Homo sapiens
gtcgagaggaccatcctgggtgctggccctgtgctggagatccggaacatggtggcggtgctggaagtcatctcc

SEQ ID NO: 94419 - DNA, 96 bp, Homo sapiens
acaaatatttacagtcggaggagtactcggtgaaatcctgtcctgaagactgtaaggtataagccactggctgatacattcctgcgtgagaagaag

SEQ ID NO: 94420 - DNA, 80 bp, Homo sapiens
atcgaatgaggctctggaatagttccaatggagaaaacacacttaactctcagaaattgagcccaatgtattccttcgac

SEQ ID NO: 94421 - DNA, 101 bp, Homo sapiens
tctagatgtgtctttactgaataaacaaggagggatgtttctaacccgagcaatgtctgggatagtaaagctctgaaggatgaaaatctacctcctgtcat

SEQ ID NO: 94422 - DNA, 88 bp, Homo sapiens
gctatagtctggtatcaaaagaaggtaaaaagaacgtattctcatggtacttacagagctggcccaatgagacaaataagcttggtgg

SEQ ID NO: 94423 - DNA, 98 bp, Homo sapiens
cggctcgacgcagcagaggcgacgcgagatggcggcagcttcagcggcggcgatctcaggacgagattgaggagctgcgggccgagatgctggagatg

SEQ ID NO: 94424 - DNA, 74 bp, Homo sapiens
acacagatgtccaagctgccaattcccaaaccagatctagattcttacgtgtttctgagagtgagagaacgaca

SEQ ID NO: 94425 - DNA, 82 bp, Homo sapiens
aggggcggaggcggaggcagaggtggaggcgctttgaaagggggatatgagactttctactcggaatatcctgagtgttgcg

SEQ ID NO: 94426 - DNA, 100 bp, Homo sapiens
ccgcctgccatgccccagccagtccccacagcataacagggtctcctcatgctgctacagaacctacctacaatacactggggcaacgaagaaattgggc

SEQ ID NO: 94427 - DNA, 80 bp, Homo sapiens
cttctcagaagatcagagaactagagtctatgatcggcatagacccagctgcccaggaggcccgcaacaagttcgaggag

SEQ ID NO: 94428 - DNA, 80 bp, Homo sapiens
gacaagtttgcagatcgggagcgcaaggtcgccctcaaggccatgatcaaaacgctccccacaggtgcaggaagccgccg

SEQ ID NO: 94429 - DNA, 100 bp, Homo sapiens
ggagtcaatacctccggatactcagtttgtaaaaacatggcggatccagaattctgttccaggaatggatggaggtgctttaactgatacaagtctcaca

SEQ ID NO: 94430 - DNA, 82 bp, Homo sapiens
tcgggttctcctaggaagtttcaggtcagcccaaggccaaccccactgtcactctgttcccgccctcctctgaggagctcca

SEQ ID NO: 94431 - DNA, 88 bp, Homo sapiens
agtagctggaaccatcatatgcaccagcacgcctggctaaaaagtttcctacactactgaggtttaggggcactgtgaagcaaaagcc

SEQ ID NO: 94432 - DNA, 75 bp, Homo sapiens
aggcaacgacgttccatctgtggaaggacctaccaaccaggtatcatgaactgatcactaaatatgggaagttgg

SEQ ID NO: 94433 - DNA, 100 bp, Homo sapiens
caggaacatggactgaagtatccagcgctcattgggaatttagttaagggatcaagcatgaattgcaagcaaactgctacgaggaggtcaaggaccgctg

SEQ ID NO: 94434 - DNA, 100 bp, Homo sapiens
gtcaaagaagatgcctcgaactaaacaaattcatcccagaaatctaagagattgaatacctgcttaagaagcttacagaagctatgggaggaggttggca

SEQ ID NO: 94435 - DNA, 96 bp, Homo sapiens
ctctgtgatgggccctgtccctgtctcccagagcctgagccaccaaagcacaaggcagaaaggagtgtattaaaggtggaagaaggtccatatctt

SEQ ID NO: 94436 - DNA, 82 bp, Homo sapiens
caaagagaaaaggggcattatcccgctggatgcacactgctgcgtggaggatgtcctggaacaggtggaggcctatcaagct

SEQ ID NO: 94437 - DNA, 100 bp, Homo sapiens
ccaaggaaacaggatgctgatagtctccagcgggcctggactgtgggctggtgtgtggaactggaaataagatatgtggaacggagttatgtatcaaaac

SEQ ID NO: 94438 - DNA, 50 bp, Homo sapiens
tccccatcaccggcacacattgtctgtaaacaggaacatcgataagtagt

SEQ ID NO: 94439 - DNA, 100 bp, Homo sapiens
agaagatgaaaaatgggctaatgtttgtaaaactggttaacccctgttcaggtggattcgaaagctatggcagctcctcatacgggggagccggcggcta

SEQ ID NO: 94440 - DNA, 83 bp, Homo sapiens
cagggccgtgccgcagatgcccaccggaatggagaaggaagaggagtcgaatccacattcatctcaatggaaggatcctgcct

SEQ ID NO: 94441 - DNA, 88 bp, Homo sapiens
ttccttatcaagaaggatgcacaagatgagaagcagctgacacaggatgatgatactgatgcggttgagattgctatcgacaacacgg

SEQ ID NO: 94442 - DNA, 74 bp, Homo sapiens
atcctatggctcaaagaaagatgattatgaaatgctgtctatgatttcttcattggccgtgaattaaaccctcg

SEQ ID NO: 94443 - DNA, 50 bp, Homo sapiens
tcaggcctgacaatttcatctttgagtaaaggtgggattctatccaaagc

SEQ ID NO: 94444 - DNA, 97 bp, Homo sapiens
aaaaaggaagtttgtcctgtcctggatcagtttctttgtcatgtagccaagactggagaaacaatgaagtggacctctacagaatgaacagccagga

SEQ ID NO: 94445 - DNA, 100 bp, Homo sapiens
gcagcagcaaatccaccacctcccagatccccctccaggcacaggaaggaaatcaagagcccctgcctgccttggctcaggtggccccagattcctggtc

SEQ ID NO: 94446 - DNA, 100 bp, Homo sapiens
ttggataagaaggctgtgctgcccacgcctgtcacgaagccaaagctggactcggcagcgtacaaggatcagttacagttgtggattcgaggcaacgtga

SEQ ID NO: 94447 - DNA, 98 bp, Homo sapiens
gagacagctgccatccactgactcgtaaaacctgcgccccctggacatcctggcggaagtggtcccttctgatggcgccacaagcgggatcaggatag

SEQ ID NO: 94448 - DNA, 100 bp, Homo sapiens
agttaaggagtatgcccaagttttccgtgaacatgccaacaaattgattgaggtccttatgtcgtcagaagatcgagaagctcaggaggatgaattgctg

SEQ ID NO: 94449 - DNA, 88 bp, Homo sapiens
tggccttgggcgcttgcacagctttagcccattttcaggtcctccagcagcctgacctgagtgggttagtgatccagagaaaccagca

SEQ ID NO: 94450 - DNA, 82 bp, Homo sapiens
cgaggctcctgcgctcccgcgccgcgctcccctcgcccgcccgggccgccaggtcaacaacggttccagcctcagggatgag

SEQ ID NO: 94451 - DNA, 98 bp, Homo sapiens
tcctcaccaggaactacctcaaacaaggcttcatggaaaagactgggccaaagtttctcaagtcaaagaaggccctgtcctagcaactagttcaggag

SEQ ID NO: 94452 - DNA, 100 bp, Homo sapiens
aaacacgtcatgaggaaggagcagcgcaagaactcttgatgtttcagtgagctttaatggaggaaaatctgtcatttcaggatcattaattgtcacagcc

SEQ ID NO: 94453 - DNA, 100 bp, Homo sapiens
tgcagcaaagattacaccaagatctgtgctgaccacaggaattggatctactagtgcagattcatgatgttgctatcaaaagttgagaaattgtcagaag

SEQ ID NO: 94454 - DNA, 50 bp, Homo sapiens
attccaagtaactcttatttgcgacgagtagaacagcccctctatggttt

SEQ ID NO: 94455 - DNA, 100 bp, Homo sapiens
attgtttgtcaccacaaaaaggacagatgctggtgggctgcgcggacaggacggtgaagcacttcagcaccgaggatggcatattccagggtcagagaca

SEQ ID NO: 94456 - DNA, 99 bp, Homo sapiens
ggtgtaccaggcgaagctggccgagcaggctgagcgatacgacggtttctgagtcccttcaacatgatcctgggaggaatcgtggtggtgctggtgttc

SEQ ID NO: 94457 - DNA, 96 bp, Homo sapiens
cgggtaaacatggtggacagaaagtcagcctcttgtggtgaaaggtgtagcagtcactcggcctacacccacagcatcgaccttgtgaacccagcg

SEQ ID NO: 94458 - DNA, 100 bp, Homo sapiens
ccttgtgtgtctggagctccggcgtgggatcccggatataggtggcgacatgtctaagaatgtgagccagtcacagatggcaaaattgaaccaacaaatg

SEQ ID NO: 94459 - DNA, 89 bp, Homo sapiens
ggccgatgaggaagtactgagcctgttggaggaactggcccggaaacaggaggacgaccacagccgctttgtcaactgtgtgcgattct

SEQ ID NO: 94460 - DNA, 100 bp, Homo sapiens
ggggacaccatcctcctcaactgcctggaagcgttcaagagaattccgccccagatgtctctgcccacccacgcaacccagactatgaagagtccggtga

SEQ ID NO: 94461 - DNA, 83 bp, Homo sapiens
cgcgcctctcgatgggcagctcgcacttgctcaacaagggcctgccgcttggtcaaaatgcagatcttcgtgaaaacccttac

SEQ ID NO: 94462 - DNA, 113 bp, Homo sapiens
atccacgccagccgcaccatgccgctcctaagcctgcacagccgcggcggcagcagcagtgagaggtgaccagaagtcagcagcttcccagaagccccgaagccggggcatcc

SEQ ID NO: 94463 - DNA, 90 bp, Homo sapiens
cgcggcacctgcgaagatgcttccctgtgcaagagactagacgcttgaagcaaagctgccatcccagaagacgacatgctctcagcaacc

SEQ ID NO: 94464 - DNA, 90 bp, Homo sapiens
cttggatgaattgcttgctttggaggccaagactaaggggctgcagagcggggtggacattggcgtcaagtactcggagaagcaggagcg

SEQ ID NO: 94465 - DNA, 74 bp, Homo sapiens
acgatcatcctggggacctggtacatgaatgaagagtagttttacagaaaaaagaggacaatattgggatcacc

SEQ ID NO: 94466 - DNA, 101 bp, Homo sapiens
tcctagtttccgatccattcgagagcatcagaagggatcttgcctcggagctggtcccactacacggtgcctgccggcatgaccgtcatccagtgggtgtc

SEQ ID NO: 94467 - DNA, 80 bp, Homo sapiens
tgtctattctgaactcaacttctgaaatttacagaaacaaactacatctcaggaagtagagaagatcctctaatggatcc

SEQ ID NO: 94468 - DNA, 80 bp, Homo sapiens
gtgtcaattatttcaagaattaccatagacctgcctagagctggaacgttacctccagagcgagccctgctatgtttcag

SEQ ID NO: 94469 - DNA, 75 bp, Homo sapiens
ggttagtgcaagcatctgggccatcttcaataaagcgtggatacccatcaacgaagttttgatattggaattcag

SEQ ID NO: 94470 - DNA, 82 bp, Homo sapiens
ggacagcttcgacttagccctgctccaggaatgggacctcgagtcactgtgacaatgcagatcttcgtgaagactctgactg

SEQ ID NO: 94471 - DNA, 101 bp, Homo sapiens
tcaaaaagtgaatcccgactaaaacatctgttgcagcgagccccagattattgcccagagacaatggtaatagcctgcagctggtgttttgagaagcccta

SEQ ID NO: 94472 - DNA, 73 bp, Homo sapiens
atgtgccgttacggcagcgccggcagctactgggcctctttattgctgtcaaagatgaggaccctggctcaca

SEQ ID NO: 94473 - DNA, 75 bp, Homo sapiens
ctgcagagcgcgcagtacctccgtatgaatgacccatattaaatcgcccttggtgaaagaaaattcttggaatac

SEQ ID NO: 94474 - DNA, 90 bp, Homo sapiens
agaagctgtcggagcttcccaagatgcttcaggactgccccaaggcccgcagggaggtggagctgcactggcgggcctcccagtgcccgc

SEQ ID NO: 94475 - DNA, 113 bp, Homo sapiens
cgaggatgcgtgttcgcgggtgtgtgctgcgttcacaggtgtttctgcggcaggagcatcagatccatgctgctgctgactcggagccccacagcttggcacaggctctctca

SEQ ID NO: 94476 - DNA, 100 bp, Homo sapiens
gccaaaggattgcttcgaaaccttcgacttccttcagggtttaggagaagcactgttgttttccacacaggtgttgacttcaaaatcaaaactgtagagc

SEQ ID NO: 94477 - DNA, 98 bp, Homo sapiens
agccggctgcaggccagagagggcctcgggaagagatgcgaggatgacaagcgaagcagcagttttgggaatttcgatcgttttcggaataattcttt

SEQ ID NO: 94478 - DNA, 82 bp, Homo sapiens
tgcctgtgtcccacttgttcgcggcctataggtccggcctctttggcctacccccgttggctccgctgccccaggtcgatga

SEQ ID NO: 94479 - DNA, 75 bp, Homo sapiens
gcccagagtgcctcttcagaccttcctcaggtttggaaggtttgcagttgctgctcttcagtccaaagtagaaca

SEQ ID NO: 94480 - DNA, 87 bp, Homo sapiens
agagttctgttgtgaagaatgcatgtccaaatatacagttttgttctatcagcaaacggggattcagcgtccgatcctttggaacag

SEQ ID NO: 94481 - DNA, 128 bp, Homo sapiens
tgcaaaagcaaatataaacatcgaaaaggcgttcctcacgttagctgaagatatccttcgaaaggcttttcctccaaatgcgatcattgtatttttctactgcagtgcagtgactatattcttcacaa

SEQ ID NO: 94482 - DNA, 101 bp, Homo sapiens
ggcggcggctagtccgcggccctgctgagagggaaaaggacgccgcggtcttcccaggcgtcgcggagagcagcccgtggaccgggagcccgtggaccggg

SEQ ID NO: 94483 - DNA, 83 bp, Homo sapiens
actgaagtggtttgcaacatccttcttctggataacactgtacaagctttcaaagtcaattggctgacaagattttgaaaaag

SEQ ID NO: 94484 - DNA, 75 bp, Homo sapiens
acccccaggaccaccagccttacctgtttcccaggcagctgcagacttgaaacagttctgtctgcagaatgctca

SEQ ID NO: 94485 - DNA, 50 bp, Homo sapiens
cacagcagggcggaggaaagtgcagggccatcgatgcacccctcggagct

SEQ ID NO: 94486 - DNA, 100 bp, Homo sapiens
cacacagacatgatggctctcattgacatcactgtgcggcacatcgcagacctgtcaccaggagacaagaacaagaggaaagtatggggaaggagccaag

SEQ ID NO: 94487 - DNA, 100 bp, Homo sapiens
gtgattctctgctagatgttgtggttgaaaataatctagatattgatggctttgggtatgttggagctagaggctgagcatgaccaggacctgagtaaac

SEQ ID NO: 94488 - DNA, 78 bp, Homo sapiens
tagatgccagtccctcaaccttgaactttccagacgcagaactgaattactgaaccttcaacatgcctactataaact

SEQ ID NO: 94489 - DNA, 100 bp, Homo sapiens
ctcttcctgagcaagaaattaaaacactggaagaagatgaagaggaactttttaaaatgcacctacgggctgagcaacgcgctgctggagactccctgga

SEQ ID NO: 94490 - DNA, 98 bp, Homo sapiens
gagaaaaagcccaggcataaaatcatctccatattctcaggcacagagaaagtaagactttgaccccgacgcaggcttcagtgattgccgcggatcag

SEQ ID NO: 94491 - DNA, 99 bp, Homo sapiens
gacgaagacatgacacttacaagatggacagggatgataattgggcctccaagagctagagatgaagatggacatgctgaaaattttccccagcagcac

SEQ ID NO: 94492 - DNA, 98 bp, Homo sapiens
gtgaacggagtgaccaagagcaggtttgagtctgcgggccaggcatcgacatccgcaacgactatcagcagctgaagcgcctggagaactgcacggtg

SEQ ID NO: 94493 - DNA, 82 bp, Homo sapiens
cgcgcagggcctgcagcgggagctggacggcgagcgcgagcggcgcgagaaagaatggtcctcgtccgaagtgagaatgggc

SEQ ID NO: 94494 - DNA, 48 bp, Homo sapiens
ccagatgtgtcccgtccaagagcaaggcaaatactctatctggatctt

SEQ ID NO: 94495 - DNA, 99 bp, Homo sapiens
gtttactctcatcctcactgaacctgcccaagcccagaaggctgaggctgaggtggcctccttgaaccgtaggatccagctggttgaagaagagctgga

SEQ ID NO: 94496 - DNA, 154 bp, Homo sapiens
cttggagctaatgttccacgttcccaaggttgtgagtgcttatggccacattcctgcatcagctcagccatcgcggtactccaaagattcaggtttactcacgtcatccagcagagaatggaaagtcaaatttcctgaattgctatgtgtctgg

SEQ ID NO: 94497 - DNA, 100 bp, Homo sapiens
gaggcagcgcgggatcccagcctcaggcgtgcgcggacggtgtgcggatgaggaaactgagacccagaaaggtggaagcacttgtctaaggtcacgcctc

SEQ ID NO: 94498 - DNA, 96 bp, Homo sapiens
catgggagcagagctcagacatgttctcaccacccttggggctgctggccagaacaaacaacattctattaccaagaacacggccaagctggaccg

SEQ ID NO: 94499 - DNA, 54 bp, Homo sapiens
ggagaagccctcgagcatccccacaggtgtggtacccacagcccctgaacagcc

SEQ ID NO: 94500 - DNA, 100 bp, Homo sapiens
ttgcaagagcccgacttgaagtggaaaatcaagctaagcgcctactagagcagggtttggagactcagtcagagcaccataacatggtgtgggaagtgaa

SEQ ID NO: 94501 - DNA, 75 bp, Homo sapiens
cagtatatggatacggagtacaaaaacggcccttggatgatggagaaatgttcccactgccaggaggcaggcgcc

SEQ ID NO: 94502 - DNA, 100 bp, Homo sapiens
gtggttgtcagtgctatctggaaggagctaattagcttggtgaagtcagttactgaatcaggaatggctttctaaaggacatggggaatacagagaaatc

SEQ ID NO: 94503 - DNA, 80 bp, Homo sapiens
aactgaaatgagacatgcacataatatagggaattcggcaccggttgagaggtagtgccaatgctgtgaggatccgagcc

SEQ ID NO: 94504 - DNA, 50 bp, Homo sapiens
tgaagatctcgaaggatttcataggaactcttcatttttgactctgctgg

SEQ ID NO: 94505 - DNA, 82 bp, Homo sapiens
aaggatctggggatcttcgcactatcccaagcttatgttcctgaggaagaattgaaggcagcagaaatagatgaagagcacg

SEQ ID NO: 94506 - DNA, 100 bp, Homo sapiens
cccgaggccatcgaggcgcaatacgagtaccggacgacgcgcgtcagccgcgagggtggcgttctcaagatcattgagaagcagccaggccacattcgga

SEQ ID NO: 94507 - DNA, 100 bp, Homo sapiens
aggctccggaggcggcgggacagagcgcctgcgaccccagtcggtgctccggggaggtcacctgacgaggagagacccacaagcattgaactattttcta

SEQ ID NO: 94508 - DNA, 89 bp, Homo sapiens
cagctcgcgggtctttggacaccaccggtcctgagtccgcgactgtgacaaagacatgctgatcaacattctgactcagcgctgcaatg

SEQ ID NO: 94509 - DNA, 58 bp, Homo sapiens
gcctaccatatgttccaaatactgccttctccacagtaggcactcctgactacattgc

SEQ ID NO: 94510 - DNA, 100 bp, Homo sapiens
ggaccgagacctcatgacacttcctattcagaaggagagtcccgtattctcagagtaaaagttgtttctggaattgatctcgccaaaaaggacatctttg

SEQ ID NO: 94511 - DNA, 82 bp, Homo sapiens
tggacgtgcacgcagcccggcgggaggataaagaccaccacggctctacagattctcccctgcccctggagaaggaggagca

SEQ ID NO: 94512 - DNA, 75 bp, Homo sapiens
actgttttccggtttggtgatcaatacagctggagatccccaagtaagcccttggcacggaaattaatggattgg

SEQ ID NO: 94513 - DNA, 95 bp, Homo sapiens
ctgcgactccggagacagcccaaatatcctcggaagagcgctcccaggagaaacaagagggaaatgatgcccctgctgtccctgatcttctctgc

SEQ ID NO: 94514 - DNA, 100 bp, Homo sapiens
cttcatgctttttcttctcaccatttctggccaaaactacaaacaagacttcgcaggcctgtttaaagaagaaaacccgtatgctagatttgaaaacaac

SEQ ID NO: 94515 - DNA, 100 bp, Homo sapiens
ggctgtgtcggtcgccgctgctcccgctcctgctgggagaggccagagactgctgctactttgaaacgtacgatagaggccctgatggacagaggagcaa

SEQ ID NO: 94516 - DNA, 97 bp, Homo sapiens
ctattgtggacccacagaatcagaccatgactaccttcacctggaacatcaaccacgcccggctgatggaacagatggagtcggataactgttcagg

SEQ ID NO: 94517 - DNA, 99 bp, Homo sapiens
aacgccgtgcagctgcccatcgaccagtagctgcagctgaggacagccaccctttcttcgtctctgctgagcgaaggctacacggcccttcctccttgc

SEQ ID NO: 94518 - DNA, 88 bp, Homo sapiens
ggctcaagcgatcctcacctcggcctaccgagtagctgggactacaggcacgcgccactacactcggacaaatttacatgtattggag

SEQ ID NO: 94519 - DNA, 90 bp, Homo sapiens
ggataagctggagtctattcctggattcaatgtcatccagagcccagagcagatacgtggttgcagtaggattggagtgtggaaagattt

SEQ ID NO: 94520 - DNA, 100 bp, Homo sapiens
aaaggatgcttcgcgttttctctctcctttttggagacagattcgcagtggtcgcttcttctccttggctggctttgctacagctgaccactccagtcag

SEQ ID NO: 94521 - DNA, 80 bp, Homo sapiens
ctggcgctgtccctgaatggctttggtggcatctgcctaacgttcacttcactcacgcttctttatgaaaaaggcatcag

SEQ ID NO: 94522 - DNA, 90 bp, Homo sapiens
ggcggcgccggcctccggggagaaacgggccatgaagcccccaggaggagaatcgagcaatctttttggaagtccagaagaagctactcc

SEQ ID NO: 94523 - DNA, 76 bp, Homo sapiens
ccattccagcactggactcatggaggctgagcatttattcaggcatcagaacacaccatgatggctgtgacctaag

SEQ ID NO: 94524 - DNA, 99 bp, Homo sapiens
gttttggaacctcgtctttttattgacggtgtcttgtgtgaaagtctggctcttgctgattgaattcctttggtgcagtttagcatgttcctctgtgtt

SEQ ID NO: 94525 - DNA, 82 bp, Homo sapiens
tgatgctggagaattataggaacctggtctccctgggaactgtggctgcaccatctgtcttcatcttcccgccatctgatga

SEQ ID NO: 94526 - DNA, 83 bp, Homo sapiens
aagaaatgagcagctttggataatgacgacagcaacccgaagacagggaaatttagccatcagagggttctcgcttcagcaca

SEQ ID NO: 94527 - DNA, 100 bp, Homo sapiens
cggaatgcactacaacaggaaaatcatattatagatggagtaaaggctagatgaactgcagaagcaactacaagaagacataaggcaaggccgaggcatt

SEQ ID NO: 94528 - DNA, 100 bp, Homo sapiens
gtaggatcatggcttactgcagtctggaactcctgggctcaaaccatcctcccacctcagccttatcaggaactgaggacatatctaaattttctagttt

SEQ ID NO: 94529 - DNA, 83 bp, Homo sapiens
agaagatcttcgagttcaaagagaccctcggaacgcactgccgccctgcactgtagcagatgcctaaataaagtgtggagcct

SEQ ID NO: 94530 - DNA, 100 bp, Homo sapiens
acaaaggtcttgaaggccctaaaggtgaagttggagcacctggttccaagctgctgtcggggccgtgtttggcctcaccacctgcatcagcgcccatgtc

SEQ ID NO: 94531 - DNA, 101 bp, Homo sapiens
gccagctgtaaagccttgggctcccttgcaggattcagaagtgtatttagcatctctagtgccatcagacaagatcagttgatcagaacagaaagctagct

SEQ ID NO: 94532 - DNA, 100 bp, Homo sapiens
attaaatctttctacaatatgtgtcgcaaccattagaaagtgctgaaggaagtcacgtttcaggacaaagcaatgggcgagatccacaagctcttgccaa

SEQ ID NO: 94533 - DNA, 82 bp, Homo sapiens
ccagagctttcacgaaggcaccgacgtcatcatgctgaccaccaatcagatccgtaaggtcatcatcagatttgaaatattt

SEQ ID NO: 94534 - DNA, 74 bp, Homo sapiens
tcatggggaaaatctccccggtgactttcaggaatgaatctgaagtctgctgcagtaaaacacagaaggcttta

SEQ ID NO: 94535 - DNA, 82 bp, Homo sapiens
ccagcctcaggcctgcacggacggtgttggttggggccggagcctcaacagaaagctcctttagttcctcctcctccaccgc

SEQ ID NO: 94536 - DNA, 95 bp, Homo sapiens
acatgcccctcacctccacctacctgaagcagatgaagcttcgagtgatgaattcccaggagcagcaggacagctggcctgaagctcagagccgg

SEQ ID NO: 94537 - DNA, 124 bp, Homo sapiens
gctgggctcggtattccccttcctgctagtcctggtggatctgcagtacgaaggatatacgtggcatttcaagtgatcagttgcatagagtactaaaaagtgtggaatcagaaagacataagca

SEQ ID NO: 94538 - DNA, 80 bp, Homo sapiens
agatgagagaccactctttccccaacacgagtacacgagacaggattgagaaaggagagattcaaattgtgacttcagat

SEQ ID NO: 94539 - DNA, 97 bp, Homo sapiens
ttcttccctgggctggtgaagtacatgaactcagggccggttgtggccatgaactctcttgatagagcccaagcagccaagaataaaggcaataaat

SEQ ID NO: 94540 - DNA, 100 bp, Homo sapiens
tggcagtggctccatgtactctctgcaagggatccacggggacatgaatgtcattctctggccaattcaggaactgcctcctgagcgtggagcctgccat

SEQ ID NO: 94541 - DNA, 101 bp, Homo sapiens
cacaggctctggctgtgccctggtccagctgcagccactgacagagtgtgagtgccatgggcacacccacagctgccacttcgacatggccgtatacctgg

SEQ ID NO: 94542 - DNA, 75 bp, Homo sapiens
gcctggagtgtgtgcccactgaggagtccaacatcaccatgcaggacacagcattgttggttttgccatgtacta

SEQ ID NO: 94543 - DNA, 78 bp, Homo sapiens
gtgccagcacctttcggcttctgagacggcggcagcagcggcattcagcgccagcagccctgtggtggcgacgacgat

SEQ ID NO: 94544 - DNA, 49 bp, Homo sapiens
tggcagtgctcaaactcaccgaccagggcctgctttcttccccgggcga

SEQ ID NO: 94545 - DNA, 50 bp, Homo sapiens
cgggacgtcagtcctggaggaggcgaggcttccaaacagtttcataatga

SEQ ID NO: 94546 - DNA, 87 bp, Homo sapiens
ttgcaaggtctcctgccagtcagtctcctcctctctgttgcaggacccccgcagcaaacacaagtttaagatccacacgtactccag

SEQ ID NO: 94547 - DNA, 100 bp, Homo sapiens
acactcttattacaagtggtgctgacactgcaaagtgatctttagacagtgactgagtatggatcatttgaacgaggcaactcaggggaaagaacattca

SEQ ID NO: 94548 - DNA, 80 bp, Homo sapiens
cacacgcttcctctccagagtgatcaagtgtgacccgaagcagcagtccgcggcgtgcggcaggcccaggcagaagacgc

SEQ ID NO: 94549 - DNA, 51 bp, Homo sapiens
aggagccagtcctggaagccaatgaatatcttcttgaagccctgcatcctc

SEQ ID NO: 94550 - DNA, 98 bp, Homo sapiens
ttttttgcctttgttgattaactggacaaattcagatgccttcaattaagttgcagagttctgatggagagatatttgaagttgatgtggaaattgcc

SEQ ID NO: 94551 - DNA, 75 bp, Homo sapiens
ctctcgcttcgtcctacacttgcgcaaatgtctccggttggtttgacttccacaaatgcagaagtaagaggattt

SEQ ID NO: 94552 - DNA, 82 bp, Homo sapiens
gcgtgtccctgcagcgaaggatcctgccctcccaggcccaatacttcaaagcatcctacctctgctcaatatatattacttg

SEQ ID NO: 94553 - DNA, 98 bp, Homo sapiens
tctatgaatatccttctctgagaccatacagagtccttcgaggatccagacacattagtcaagctgcagccaaagtcgacgttgaatttgattatgat

SEQ ID NO: 94554 - DNA, 75 bp, Homo sapiens
aagtgatcagggtctcctgcggtgatgagtttaccattgctgccactgatgtttctcccgtacatcccagtccag

SEQ ID NO: 94555 - DNA, 98 bp, Homo sapiens
cgccctcgcctcacctggcgcaggtaaaatgtcggttccaggaccttaccaggcggccactgggccttcctcagcaccatccgcacctccatcctatg

SEQ ID NO: 94556 - DNA, 97 bp, Homo sapiens
gctccaaagagatctcagcgctcaccgacttctctggtcccgtgggagtagggctgaatgaactgaaacgaaagctgctgatcagtgacacccagca

SEQ ID NO: 94557 - DNA, 128 bp, Homo sapiens
ggtaaaacttgcctactgatcagttacacaaccaatgcatttcctggagaatatatccctactgtagagcaatgtggtgttaaaaatgatgaaagtagcagctcatccattatctttgctgagcccac

SEQ ID NO: 94558 - DNA, 50 bp, Homo sapiens
catttctacaacagccttatgtgtttacgaaaatggggttacagaagatg

SEQ ID NO: 94559 - DNA, 90 bp, Homo sapiens
gtttgccccaggtccagcaagactatgaatctctgttccaaatgctttgctgatgtctcacgcagccaccagtgccttctgccgttccat

SEQ ID NO: 94560 - DNA, 99 bp, Homo sapiens
catggccactgactcatgggccctggcggtggacgagcaggaagctgcggctgagtcgatgagtttgatgcctacatcattgtgtctttcgtgaatgcc

SEQ ID NO: 94561 - DNA, 82 bp, Homo sapiens
cagcagcgtggcctccgccaccgtgcacatccgaatgggaaaatggacatgaactttgaattttccctttctccaaatgttt

SEQ ID NO: 94562 - DNA, 75 bp, Homo sapiens
aggcggatctcagaaggccagttcaaaggaattacatgaacgacagccttcgcaccgacgtcttcgtgcggttcc

SEQ ID NO: 94563 - DNA, 75 bp, Homo sapiens
attacgacctgttcaagcagagctattggaatcacaggaaggaccatgaaaaagctgaatttgaggtacatgaag

SEQ ID NO: 94564 - DNA, 100 bp, Homo sapiens
aacgattgggctgagcagaggacgacatgttgcttttcgtggagatttacactgactgggccaaccactacctagcaaaatcaggccacaagcggctgat

SEQ ID NO: 94565 - DNA, 75 bp, Homo sapiens
atctgtgctgagcagcgaaacctgagcgagcaggtcatgcaagacaagataatctgccttccgaaaagagtgcag

SEQ ID NO: 94566 - DNA, 82 bp, Homo sapiens
cccttggagccatcctctacaggacccgctttctaccattaagtgtgtgctgtatttatggagtttaaagattaatcatccc

SEQ ID NO: 94567 - DNA, 75 bp, Homo sapiens
ctggacaattcacctgcctcctatgtcttccatccagacaatgctgttggaagtgtgaatcctgctgaaaacttc

SEQ ID NO: 94568 - DNA, 73 bp, Homo sapiens
gggctcaaaccatcctcccacctcagccttgtacaagaaaattccccaggacacagagctggtttggagcctt

SEQ ID NO: 94569 - DNA, 74 bp, Homo sapiens
caagacaccccttgaccagcacacactgcaaggagatcagaatttgcaccatcctgggattgtaaacctggaat

SEQ ID NO: 94570 - DNA, 100 bp, Homo sapiens
cgtggctcccgccaccgcaaggaggtggactacagcgactcactgacggagaagcagtggctcaagaacccttaggagaaatcttgagagtggacagcaa

SEQ ID NO: 94571 - DNA, 100 bp, Homo sapiens
gaattggcaatcaatatatttcagtatctggacaggaaagaactaggaagatgtgcacagaccttgacagaaaacttgctgaaaaaagaacaagactata

SEQ ID NO: 94572 - DNA, 73 bp, Homo sapiens
cccttacggcccacgccgtaatcctggtgaccgagaaggagagctattgaaattgtagagtcagatgtcaaaa

SEQ ID NO: 94573 - DNA, 90 bp, Homo sapiens
ggggctgctccccaggacctgagcaggaacctggagttttcagaacaagttgaaatcatcgcagaaggataaagttcgtcagtttatgat

SEQ ID NO: 94574 - DNA, 100 bp, Homo sapiens
caagacacacaactcataacagttgatgaaaaattgtgagtgatagttgcttcaggaatcttgcagaagaccgcagtgggataaatctcaaagatctcgt

SEQ ID NO: 94575 - DNA, 100 bp, Homo sapiens
ttcaagttcttggaacaaattctgaccaaaagatctcagattgctataactgaaggtatatttgaacttccaaatctcacaattcaagctacaagagcac

SEQ ID NO: 94576 - DNA, 97 bp, Homo sapiens
ggcggcggcgtgatgttctcggcaggagcggagagtttgctccaccaggccaggtgctggagaatctggtaaaagcaccattgtgaagcagatgagg

SEQ ID NO: 94577 - DNA, 50 bp, Homo sapiens
cttcagcccccccgcgaacgcccaaggtactccaaagattcaggtttact

SEQ ID NO: 94578 - DNA, 82 bp, Homo sapiens
aaaccttataccctcatgagcatggtggccaacctcttgtatgagaaacgatgcctgctctgtgcctgtatctgagatcatc

SEQ ID NO: 94579 - DNA, 100 bp, Homo sapiens
catgttgacagctgctctggcccctggagctgccaactctcctaccaccaacccgaaacagaaaccacactgccgaggaatggctcccaatggcttacca

SEQ ID NO: 94580 - DNA, 100 bp, Homo sapiens
acgaggaacaaattgtacatttgcccattctcaggaagagcttgaaaacattccaagaatcaagcactacaaagtgatgagcgtaggacaaaactacact

SEQ ID NO: 94581 - DNA, 135 bp, Homo sapiens
ttgaatacctgaagttcgataaagggccgtggctcaagcaggacaatcgcactttataccacctgcgattactgttcatctgcagaagccagcggacgcctctgttcaacttgtgggttacctggctcatgagac

SEQ ID NO: 94582 - DNA, 90 bp, Homo sapiens
tgttactccctaatcaagtgtgggatagtataatccagcaggcaaccaaagaaaggcagactacaagttactgagcacctccctgagaaa

SEQ ID NO: 94583 - DNA, 98 bp, Homo sapiens
aaatgaagcccataggacttcaagagagccaattgcatgatttctggcgtttggattactgggaagatgatcttcgtcgaaggagacgatttgttcgc

SEQ ID NO: 94584 - DNA, 100 bp, Homo sapiens
gtaccccttcaacgccaagcagcccaccgacatggcccggaggcagcagaaggcctatatgaacccaatagcaatggcgagatcaaggggtccaatccag

SEQ ID NO: 94585 - DNA, 100 bp, Homo sapiens
ttcacgcacgggatccagagcgccgcgcacttcgtcatgttcttcgcgccctggccaccagcttgggctccccacggagggcagcaagtgggacttgggg

SEQ ID NO: 94586 - DNA, 83 bp, Homo sapiens
cttccccagccatgtggaactacaatgcagatcttcgtgaagactctgactggtaagaccatcaccctcgaggttgagcccag

SEQ ID NO: 94587 - DNA, 136 bp, Homo sapiens
acctggcggccatcgtcatcctgctgctgaagatctggaagacgcgctcctgcgccgggcgtgatggtgggcatgggtcagaaggattcctatgtgggcgacgaggcccagagcaagagaggcatcctcaccctga

SEQ ID NO: 94588 - DNA, 98 bp, Homo sapiens
atgaactggtgaagaaaattggcaaagctgtggaagactccaagccctactgggaggcacggagggtggcgaggcagataaaatctacgtggttgact

SEQ ID NO: 94589 - DNA, 83 bp, Homo sapiens
tgaaggacctgagcctgacgcgggccgcgcgggtaactgcatcctgcccagcatgacggccccctgcccgccgccacctccag

SEQ ID NO: 94590 - DNA, 82 bp, Homo sapiens
tgggtcgcttggaagaagccaaggccctgaagcagagaccacgatttgtagctttaaagaaacaacctgcatatttaggagg

SEQ ID NO: 94591 - DNA, 50 bp, Homo sapiens
ctccccttctattgttctgtggcccagggcaagtgtccagagaatggctg

SEQ ID NO: 94592 - DNA, 98 bp, Homo sapiens
tctggcccgaagccttcctttatcgctttcaggtgtctgcttttggggcagagttttcatcggaggcatgcagagagttaggcttttctagcaacttg

SEQ ID NO: 94593 - DNA, 50 bp, Homo sapiens
aaaaaaaccatgaagctggaacatcaggacttgcaattgtgaccaaatat

SEQ ID NO: 94594 - DNA, 83 bp, Homo sapiens
gcctgcgaccccagtcggtgctccggggaggtcacctgacgaggagataccagcgggcaagcagaaaacaagaggctcaagag

SEQ ID NO: 94595 - DNA, 82 bp, Homo sapiens
cgcctctcgatgggcagctcgcacttgctcaacaagggcctgccgcttggaccaagaatcgccttcagccctgtctggtgca

SEQ ID NO: 94596 - DNA, 75 bp, Homo sapiens
catcattaaggacggaggcacggatgaatttcatcctttcatcgaagcacttctgccccacgtccgagcctttgc

SEQ ID NO: 94597 - DNA, 74 bp, Homo sapiens
aaaatttgaagaaagaaatcactaactgtttaaaactattagagacgctgaccggaaaggagattgagattgac

SEQ ID NO: 94598 - DNA, 96 bp, Homo sapiens
aggaaacggcttcttcctcacttcgccgcctgtaatggcatagaggagcctttggaagaatcctctcatgaacctgaacctgagccagaatctgaa

SEQ ID NO: 94599 - DNA, 51 bp, Homo sapiens
ctcattggctagaacatattaagtccacaagccctagccatgccgtggtag

SEQ ID NO: 94600 - DNA, 96 bp, Homo sapiens
gagagagaaaggagagacaattatgttcctgaggtctggaacgatttcatgaaccgctccggggaggagcaggagcgggttcttcgctacctggag

SEQ ID NO: 94601 - DNA, 75 bp, Homo sapiens
aggatatcacctaccttcgcatcccggtcgctgatacccctgaggtacccattgagtgagatcattggccgagac

SEQ ID NO: 94602 - DNA, 96 bp, Homo sapiens
cgaaaccctgaccggatcccataaacactgtcggtatcattgcccagtgcctaagatcttttatgttcagctcactgtaggaaataatgaattttt

SEQ ID NO: 94603 - DNA, 83 bp, Homo sapiens
aaggaagcacagaagtcgcaggcagcctctcagaaagctcccctgggacctgtggccgccgcccacagaccatgctcctgggg

SEQ ID NO: 94604 - DNA, 90 bp, Homo sapiens
tggagtccggacatctgaaacttgatgggaaactcttgtctagtgatgtgactcattacgtgatcccagactggaaagttgttcaagatt

SEQ ID NO: 94605 - DNA, 98 bp, Homo sapiens
aaccaacactcctagccaatggtggtcatggagtagaagggagcgatactacagcattagtgccagcagtagttcccaagggctgtctcagccatcca

SEQ ID NO: 94606 - DNA, 100 bp, Homo sapiens
gttaactctaacgtgaacgcggaccaggaggccagaagccaaggagtcctcagtgacggtgggatccacaacatctccacatcgctgtccccacccagcc

SEQ ID NO: 94607 - DNA, 100 bp, Homo sapiens
gggacgtcttcctgtatagagcgtacctggcgcagggccgcgatgggcctcttggaacattggtgtgttcatctgcattcgatgtgctggaatccacagg

SEQ ID NO: 94608 - DNA, 76 bp, Homo sapiens
ctaaacttaagtggaaataaactgaaagatatcagcaccttggaacctttggacccagatgatgtggtaccagttg

SEQ ID NO: 94609 - DNA, 73 bp, Homo sapiens
catgcttcctatctaccctgccattgatattgatgcacagatccagctccaggtcccacaggggctcttcttc

SEQ ID NO: 94610 - DNA, 84 bp, Homo sapiens
agttggaagcagccgatccagcctgcggagcctgtggggcagggtgaatcatttgatgtaaaagacttgactccataatctgca

SEQ ID NO: 94611 - DNA, 100 bp, Homo sapiens
tgaagataccacgctgcatgtgtccttagtagtcatgtctccttaggctcctcttgcacacagcaagaaggaggccatcagcaaactgggaagaggaccc

SEQ ID NO: 94612 - DNA, 90 bp, Homo sapiens
gaggtagtcggacctttcccgctggcgcgcagcctcagctaggcaagctacgacctatatctatgccagtggaatataattgggtggggg

SEQ ID NO: 94613 - DNA, 74 bp, Homo sapiens
tccttctgtatatggctgcgccccaaatcagggtactgatggtgctgggagcaggacggggacccctggtgaac

SEQ ID NO: 94614 - DNA, 76 bp, Homo sapiens
tcttgctaaagaggtagcaagaaagaaaattagagtgaatgtagttgcaccaggtaatcaatattatcaatgctgc

SEQ ID NO: 94615 - DNA, 74 bp, Homo sapiens
gggaggaaccgttacgggaactgaagttgcggggatcctgaaactccgccacatctggaacctgaagttgatgc

SEQ ID NO: 94616 - DNA, 75 bp, Homo sapiens
cgtttccaccccaagcccagtgaccttcacctgcagaccggctataaggtgaaggaatacgactccatctcccgg

SEQ ID NO: 94617 - DNA, 100 bp, Homo sapiens
agcatccattgcaaaccttattaatctcagggaactggatgtcagcaagaatggtatgccattgcattggccttaagggaaaagcagcgtgtaatattta

SEQ ID NO: 94618 - DNA, 74 bp, Homo sapiens
caggaagctcagcaagactggagtccctgatggaattatgcagtttattaaggaaagaccacagcaagattctt

SEQ ID NO: 94619 - DNA, 83 bp, Homo sapiens
cactgctgtgcgtgcacacatactcacacagatgaacctctagtcttgctttgaaaaaatcattctgtgtaactcttgactgt

SEQ ID NO: 94620 - DNA, 98 bp, Homo sapiens
tccgcacctcggggacattattgcgcgtggaacggctgcttttggaagtgcgcgtcccgggacgactggcgctgtgcgcgctccatgcacgagttttc

SEQ ID NO: 94621 - DNA, 75 bp, Homo sapiens
gcccggagcaagcggagctcccccaagagccggaaagccatggactttccccagcacagccagcatgtcttggaa

SEQ ID NO: 94622 - DNA, 74 bp, Homo sapiens
gataatgaaacatttggatttgaaattcaggccgcattgacaggaagattgagttccccctgcctgatgaaaag

SEQ ID NO: 94623 - DNA, 82 bp, Homo sapiens
ggatcccggcggccgcgtgcagggcacccgctggcgccacggccaggacaattttgacttcagcgttccaggatccatgaag

SEQ ID NO: 94624 - DNA, 83 bp, Homo sapiens
ctcacaatgaggctccctgctcagctcctggggctgctaatgctctgggtctctggcaaaggccggcgtgtgcagccccagtg

SEQ ID NO: 94625 - DNA, 100 bp, Homo sapiens
gaagaaaatgctcagatggtgaaggccagtagtgccagtgttcagagggatttcatggaccccactgtcaataacaatgtcatttgtcagagtgaaccgc

SEQ ID NO: 94626 - DNA, 100 bp, Homo sapiens
ctgacgcttgatgagaaggacccacggcgtctgttcgaagatgtacaggtggatcatctgaatctcctgaaacagtttgaacacctggaccctcagaacc

SEQ ID NO: 94627 - DNA, 96 bp, Homo sapiens
gtggagtacatcacccgctacatcgccagtctgaagcagaacaagcgagtgagcatcaataaagatgagctgaagtcaacgtcaaaagctgtcgaa

SEQ ID NO: 94628 - DNA, 75 bp, Homo sapiens
ctggagggccccttctggcagcctgtctccactaactctggaccctaaaacagctcacccaaatctggtgctctc

SEQ ID NO: 94629 - DNA, 100 bp, Homo sapiens
gcgaacgcggagagcacgccatgaaggcctcgggcacggactacttccagcaacccagtctcctgccatgtccgaccccatcacgctgaacgtcgggggg

SEQ ID NO: 94630 - DNA, 74 bp, Homo sapiens
ccatggtggaggagacagcagcatgatgatgatgcaacacagtcactcctggcggcaaaccaaacaaaaccaga

SEQ ID NO: 94631 - DNA, 59 bp, Homo sapiens
tttgctcgctacactactcctgaggatggtctattctggataagcaggttttgtgaaga

SEQ ID NO: 94632 - DNA, 100 bp, Homo sapiens
gccaatggcctcacgttggtgtctagagctcaccagctagtgatggagatgccttcaattaagttgcagagttctgatggagagatatttgaagttgatg

SEQ ID NO: 94633 - DNA, 83 bp, Homo sapiens
acagagagggcctgggagcttgctgcagcttcagctacgagttccagggagctctgtcctggtgaccgtgcccgggttatgac

SEQ ID NO: 94634 - DNA, 100 bp, Homo sapiens
gggaaatcctctgcttgacatctctgctgtagtggacaaagatttccttgataagtcttcaaagcttcacctttctccaaaggcagatgtgaagaacttg

SEQ ID NO: 94635 - DNA, 75 bp, Homo sapiens
gaggacctggggcagatcttcaccatccgcaggtgcccctccacggacccagatgtcaagccctccaacatccta

SEQ ID NO: 94636 - DNA, 98 bp, Homo sapiens
ctctccactgcccgcatgaaccgggtcctcagcttccacagcgtgtctgtgtactatgaggggctgcaggacaagctggcacagatccgcgatgcccg

SEQ ID NO: 94637 - DNA, 82 bp, Homo sapiens
gtgttgagcttttcatggattatcttacgtagataagacactgcaacagtattaatctctggagaagacacatccacagtta

SEQ ID NO: 94638 - DNA, 76 bp, Homo sapiens
aaccccgtaaagtggttggttgcagttgtgtagtagttaagaatgccagctgatgaagaccgagaggccgcgaccc

SEQ ID NO: 94639 - DNA, 100 bp, Homo sapiens
tgggagcctagaatgcatcagtgcccttgtggcgaatggggctcacgtcgaggacttcctggtgaccgagggcctcctggacctccagggatacgtggtc

SEQ ID NO: 94640 - DNA, 98 bp, Homo sapiens
agaagcccaagactaagattctcaaaatggtcttgcaagagcaaaatccgtccctagccacacatactccaacgaagtggttaccttgtggtacagac

SEQ ID NO: 94641 - DNA, 82 bp, Homo sapiens
ggtcgcgaaggcagtaccgtttcctcagcggcgggtagcatctccgcccccacttactgatactcctgacactacagcaaat

SEQ ID NO: 94642 - DNA, 100 bp, Homo sapiens
aacctttccaacacagatgtccaagctgccaagtcagtttgctgagaacgaaaccaatgaggtcaattttagagagataccttcacatgtgctatcgaaa

SEQ ID NO: 94643 - DNA, 83 bp, Homo sapiens
cagaagccgagttcaacatcctcctggccaccgactcctacaaggtactggctgtgatcgaacttctcaaccctcagagactt

SEQ ID NO: 94644 - DNA, 51 bp, Homo sapiens
ctatgtgaacgttgtcagcctaggtcatgcagaaggcttttgtatgatgtg

SEQ ID NO: 94645 - DNA, 73 bp, Homo sapiens
ggagactgcgggcccgtagctgggctctgcgaggttctgcacttttaaaagaaaagcaaaggcatcgattaca

SEQ ID NO: 94646 - DNA, 75 bp, Homo sapiens
cagaccaggagaggatgtgctccatgaaacaaagagtcctcttcgtggaaaagaaaaaaatacgctccctttaaa

SEQ ID NO: 94647 - DNA, 100 bp, Homo sapiens
ggtcagtccgccgctcaccccgcggccgcaccttcccgccttctcagaccgagacatgggtgcccggcaccgcgcccgagcccactccattcagatcatg

SEQ ID NO: 94648 - DNA, 96 bp, Homo sapiens
tggcaattttttgtggaacagaattggagcaggtggcacaagaatggctcaactctccaaatagagagaatttctatcagttgcaagtacgaaaat

SEQ ID NO: 94649 - DNA, 82 bp, Homo sapiens
accaggcgaagctggccgagcaggctgagcgatacgacgggacagcaaaacctggcgtttccacggtaccaaacacaactca

SEQ ID NO: 94650 - DNA, 82 bp, Homo sapiens
aagttagctgacttctgggggaacaacaacgagatcctcagtggaaacccctcctggagtttccccaaagccatggacagcc

SEQ ID NO: 94651 - DNA, 114 bp, Homo sapiens
gccacgataaatttggattaaggaacagcgagctgtttgacccctttgacctcttcgatgtgcgagactttggaaagcggggatctgatgagcttctttcttctggcatcatta

SEQ ID NO: 94652 - DNA, 74 bp, Homo sapiens
cttggagcacttcctattccactggattgggaaagaccatggcagcaaagtggaagatgctttctacaaaggtg

SEQ ID NO: 94653 - DNA, 100 bp, Homo sapiens
cgcgagacttctggcaatttagagcaactactccttgctgttgcttgaaaataaggaacttcgagaattattgtccatcagcagtgagtctcttcaagcc

SEQ ID NO: 94654 - DNA, 75 bp, Homo sapiens
tcctatttcagcagttggccacaacttcattgctgggaaaaggagtggacctaccctatgagacgagagatgcag

SEQ ID NO: 94655 - DNA, 100 bp, Homo sapiens
gtcttccccggctcgccaactcggctgctctgggggattcgtgcgcgggtgaagcagctgaccgatgaggaggagtgttgtatctgtatggatgggcggg

SEQ ID NO: 94656 - DNA, 101 bp, Homo sapiens
gtttggttctcccggcagcagcccgacgcaaaccaaggatctggggatcttcgcactatcccaagatatttggagttcttacaacatggcagacattgaca

SEQ ID NO: 94657 - DNA, 100 bp, Homo sapiens
gtgtggaaggccggccgcaaggaggaggccaccaaccagacggtgatgcctcccatgaaacccaggaacctgagtccttctcagcctggtcagatcgcct

SEQ ID NO: 94658 - DNA, 50 bp, Homo sapiens
tcccaagtagctgggataacagttcttagctgtgatggatccttgcaatg

SEQ ID NO: 94659 - DNA, 50 bp, Homo sapiens
gtgacaaagtggccactggatcttacaggctgactttgccatcgaggcct

SEQ ID NO: 94660 - DNA, 118 bp, Homo sapiens
atcttcacagaatacacctctggctcaagtgtttgtccctttggagtctgttaagcccaaaacaagtcaccaagctctccagaacatgcccaaagtgctccgtgatgttgaagcccta

SEQ ID NO: 94661 - DNA, 100 bp, Homo sapiens
aaaggcactttattatgcaggtggtctgtgaagccacacagtgtccagatacgaggagctccaagagtcaggatcgcaagtcagaaagcaaagaaaagag

SEQ ID NO: 94662 - DNA, 101 bp, Homo sapiens
ccgtgcagcttgaggacatccgcaacctgcaggatctcacgcctctgaagctggccgccaaggagggcaagatcgaggcacctctcccagacacctaccgg

SEQ ID NO: 94663 - DNA, 134 bp, Homo sapiens
tcttgctgatataatggccaagaggaatcagaaacctgaagttagaaaggctcaacgagaacaagctatcaggaccttaaaggctttgatccaggagagaaatactttcataacacatcatggggtgatgtttc

SEQ ID NO: 94664 - DNA, 100 bp, Homo sapiens
cctttcctcaggagtcatttctgttccgcacaggcctgctgaactgggtgctttatatagggtgacttcatggtcatgacgattttcttcaatgtgagca

SEQ ID NO: 94665 - DNA, 102 bp, Homo sapiens
gggggcctacgtgaaggtgcacactgtggagcagggagaaattttggtgcctgactgacagaagttcttgcccccggggagctggtgtggacagaggagggg

SEQ ID NO: 94666 - DNA, 93 bp, Homo sapiens
ccgggcgcgcagcgacggagctggggccggcctgggaccatgggcgccgccaccggcacggccaggccagcatggtggaccacttacttccag

SEQ ID NO: 94667 - DNA, 95 bp, Homo sapiens
gagcgcgccgctgctcccggaccgggccgcgcacgccgcctcagggcagctggtggaatttttgaagaaaatggaatctcgaggccccctttcgt

SEQ ID NO: 94668 - DNA, 80 bp, Homo sapiens
aaggcctcggtgcagtttgtggattacctaatggtgtcctcagttgtgggcttctatagctctccactcttccggagcct

SEQ ID NO: 94669 - DNA, 98 bp, Homo sapiens
cggcgcccagcggtagccctccttgcgcctccgattcccaggggtattccctcagcggatactacacccatccatttcaaggctatgagcacagacag

SEQ ID NO: 94670 - DNA, 100 bp, Homo sapiens
ctgctcctgcggttggtgagattacctgggtctagagtgcggagctgctccgtggccacgaggacgtcaccatgaaagtgactgagaccgaagatgatag

SEQ ID NO: 94671 - DNA, 98 bp, Homo sapiens
gtctctctgctgcggcgcggggaccgctgtgctctcgcccctctgaaatcaaagagatcttgcatctggctggactcaatgagctggaggtgattccc

SEQ ID NO: 94672 - DNA, 100 bp, Homo sapiens
cacagctgctcggggggatgctcggggctgccttggccaagtgccgccaagccagacgaactaggtctgaggtcacattgttgtggaagaataaccttcc

SEQ ID NO: 94673 - DNA, 96 bp, Homo sapiens
cctgcctcagcctcccaagtagctgggactccaggcgtgtgcgtgcagacggagacagtgctgcggcaggccattgccgagcgcatcaagcctgtg

SEQ ID NO: 94674 - DNA, 100 bp, Homo sapiens
caagacactgctggaaaacacagagatgaccaagcgagacgtgcctggcttcgccatcgggggcctgagcgggggtgagagcaagtcgcagttctggcgg

SEQ ID NO: 94675 - DNA, 75 bp, Homo sapiens
tacagagtttgaccctacgaccagtcatcccgtggttcagattcagaacaagaaagtggacatctctaaggtctc

SEQ ID NO: 94676 - DNA, 100 bp, Homo sapiens
cgggatctcaggtcctcgggggcggcggccacgccaaggacggccaaactgattatccaccagacactcagcgtcttagaagatattgtggagaatatct

SEQ ID NO: 94677 - DNA, 99 bp, Homo sapiens
actggattcacgggtagagattggcttcgggctgagctagcagtgagcaccttttggcccaatgaatatcaggaaggaaaatcacctcggcagtgtttg

SEQ ID NO: 94678 - DNA, 90 bp, Homo sapiens
tgaccaacagataactgaggacaatggacctgcctgggcatagacttccttaagattcttctgcacagtcagtatcctcgggagttcgtg

SEQ ID NO: 94679 - DNA, 83 bp, Homo sapiens
agggcatgatcaacctcgtcatgtcctacgcgtctgcgctcctcagaccaccggcaggtgaacagcctgatgcagaccgagga

SEQ ID NO: 94680 - DNA, 108 bp, Homo sapiens
agtacaaaggcatggggctgtccatgggcaccatgatctgtggctgggataagagaggccctgagacgagttgtactgctgtcacaggaaatggacgctggattacaa

SEQ ID NO: 94681 - DNA, 82 bp, Homo sapiens
ggaagctctagaggcgttttttggccaagggttctcaacatcagcacctcggttcagctggcagcctccatgccttcaggat

SEQ ID NO: 94682 - DNA, 100 bp, Homo sapiens
gagtgtatgaccacaaacagccatcaaggtctctcaggcagctgcagagcttcaacagtactgtatgcagaatgcctgcaaggatgccctgctggtgggt

SEQ ID NO: 94683 - DNA, 115 bp, Homo sapiens
tgaaggagcagatttacaaactggccaagaagggccttactccttcacagatcgggcagagcggcttgggtaaatccaccttaatcaacaccctcttcaaatccaaaatcagccg

SEQ ID NO: 94684 - DNA, 98 bp, Homo sapiens
cagggtacaaataaatgagtgaacgatgttgctctagatacaggtcagaagccaatgacctggccctgaggctggctcgccactacacgggacaccag

SEQ ID NO: 94685 - DNA, 100 bp, Homo sapiens
gccctgggctggaacgaccctgaaactggcgatggaatatgagaggagccctctggaaagaaaaggacagaccctgtgctttcatgaaagtgaagatctg

SEQ ID NO: 94686 - DNA, 98 bp, Homo sapiens
ccggagccgccgcaagccacacggtcgcaatggaagaagagatcgccgcgctggtcattgacaatggctccggcatgtgcaaagctggttttgctggg

SEQ ID NO: 94687 - DNA, 75 bp, Homo sapiens
cctacctcccaacaccattatggaatacaaaactcacaccgacagcatcaacaaggacacccaggcccattattt

SEQ ID NO: 94688 - DNA, 80 bp, Homo sapiens
tcttggtttggtctacttccattataatgcatttcagtgcctgtcacatattggaatgccacaatggaatggcccaagac

SEQ ID NO: 94689 - DNA, 83 bp, Homo sapiens
ccgaaaacaccctgcaatctttcagacaggtgatggcatcagctgagaagggaaggaagcccatgtgaggacactgaagaagg

SEQ ID NO: 94690 - DNA, 100 bp, Homo sapiens
ccaacctctcgtacatcggcgagggcgcctacggcatggtgtgatgccagaccagtttgaccaggcggttgtgctgaaccagctgcggtactcagggatg

SEQ ID NO: 94691 - DNA, 100 bp, Homo sapiens
cgctgacactgcgcctacacagaatttcacggtccctcatggtgtctcactccagcagacagaggattgtgtcgtgccaatgagaacagattctactaca

SEQ ID NO: 94692 - DNA, 100 bp, Homo sapiens
agtgtttgagaattacacggccagttttgaaatcgacacacaaagaatagagttgagcctgtgggacacttcggcggccttgcaggccactcgagcccta

SEQ ID NO: 94693 - DNA, 51 bp, Homo sapiens
agagcagcggaaaatgatccagtcacagagctcccagctcctccagcagcc

SEQ ID NO: 94694 - DNA, 74 bp, Homo sapiens
ggaaagaggaggaaaacaaaagctgctacttatggaagatacaaagggggtgcccagaggatgcgacatcctca

SEQ ID NO: 94695 - DNA, 83 bp, Homo sapiens
cagcttggagcttttcttggctcttttgttagtatatacaaggaggctgaaccgtctgagcccagaagtgctgaggtgacgag

SEQ ID NO: 94696 - DNA, 90 bp, Homo sapiens
gcaagattctctcctgaagtcccagcctttgcaactggactgtgacctttgtgccatagtgtcaaactcaggtcagatggttggccagaa

SEQ ID NO: 94697 - DNA, 90 bp, Homo sapiens
ctgctgccagttcatcacctccgttaccgcgctctatgacctgtcatcagctgtaaaactaccatagaagctatccatggattgatgtct

SEQ ID NO: 94698 - DNA, 101 bp, Homo sapiens
tgaggtggatggagaagcagctgggggccttggctgtaaggacccctaagggtcccactctatgaccagtgggaggatgtgatgaaagggatgaaggtgga

SEQ ID NO: 94699 - DNA, 82 bp, Homo sapiens
ccaagatcccagtcacaattatcaccgggtatttagggtcctgcagttctgagcttgggttccctttgcctggacaccaacc

SEQ ID NO: 94700 - DNA, 75 bp, Homo sapiens
ctcgcttttcccctggccttctgtatcttcatggtgcggctcatcttcgagagctgcagaaccttggcctgaaaa

SEQ ID NO: 94701 - DNA, 75 bp, Homo sapiens
gcagctacacaaagagggtcatctcttctattgtacctgcagtttgtcagaggaatggctgtgaatggatgcctg

SEQ ID NO: 94702 - DNA, 75 bp, Homo sapiens
ttgagacagcaatggtcacctctataggaatgcacctggttatcaatactctggctgaccatcatcatcgtggga

SEQ ID NO: 94703 - DNA, 98 bp, Homo sapiens
cggagcaccgcccgcgtcccggcccccggcaccatggacgcgccgcgcgcctcggcggccaagcccccgaccgggtttgcctgcaatgagatttcatt

SEQ ID NO: 94704 - DNA, 82 bp, Homo sapiens
tgaacttatgaaaaccttcagttacaggtaccaggtcatcagtacaccatctgatattttcatggtgatggaatatgtctca

SEQ ID NO: 94705 - DNA, 82 bp, Homo sapiens
tcaggaacagggacagcacctcatcccctggatgggggaccacaagatcctcatcgacagatttggtgttgtactgcgaggc

SEQ ID NO: 94706 - DNA, 100 bp, Homo sapiens
cagacctcgggcaccgcctcgactgtctggacctgaaagtcagggagtctgctccaagcagacactggtggtcccgctccactacaacgagtcctacagc

SEQ ID NO: 94707 - DNA, 48 bp, Homo sapiens
attacatgaagtatcatgtttctgtttccaccgtgcacattatgaaga

SEQ ID NO: 94708 - DNA, 90 bp, Homo sapiens
gcctcaagccgctgctcttcggactctcacagaaggaggaagaggaggacacttttattgaagaacaacaactagaagaagagaagctat

SEQ ID NO: 94709 - DNA, 99 bp, Homo sapiens
caaagaaaacacgaattatttctgagtgtatctcgcagtcagcagtgaaaacaaagttcgaacagcacactatcagagctaaacagatactagctactg

SEQ ID NO: 94710 - DNA, 109 bp, Homo sapiens
aacaaagctctgctcacgtttcccttcctccatatttactggacagagtgctgttacgtcccggaggacctccttcccgtctacaaagaaaaagtggtgccgcttgcag

SEQ ID NO: 94711 - DNA, 75 bp, Homo sapiens
caggacctggccagtgcttccctggaggagtatatattctggggaaatatggacagaagaaaatcagagaaatac

SEQ ID NO: 94712 - DNA, 100 bp, Homo sapiens
atcaacatcatgattgagccacaagccacacggaaggcccaggtgtcttacaagtatcaagaacttactatatgtggttgaataaacaatcaaggtaaag

SEQ ID NO: 94713 - DNA, 74 bp, Homo sapiens
gctccgactccagggctcctgtctacgaccagataattcgtgtccagtccccggatggagtgaagcggatcaca

SEQ ID NO: 94714 - DNA, 75 bp, Homo sapiens
gttagagtctgaagttgttaccaatggtgaaactacatgttcagaaaaaagttactgtggcccatgtcctaaaaa

SEQ ID NO: 94715 - DNA, 82 bp, Homo sapiens
tcttcggcctgggccttaccatcttcatcatgcacatcttcaagcatgctcagacaatgcagatcttcgtgaagactctgac

SEQ ID NO: 94716 - DNA, 100 bp, Homo sapiens
agccactcggccctgcgccgcgacaagtacgtggccgagttcctcgagtgggaatatgcttttaaggctattaaccagggtggccttacatcagtagctg

SEQ ID NO: 94717 - DNA, 50 bp, Homo sapiens
ccagcacgttctcttggtctggaagaaatattctagaagtggttctgaca

SEQ ID NO: 94718 - DNA, 80 bp, Homo sapiens
agcctgcggagcctgtggggcagcctggctcccaccatgagtgctgagcttaacgtgcctatcgacccctctgctcctgc

SEQ ID NO: 94719 - DNA, 99 bp, Homo sapiens
gtcagcttttggactccctattgtatttgccagagcacatctgcaatggctgccatccggaagaaactggtgattgttggtgatggagcctgtggaaag

SEQ ID NO: 94720 - DNA, 100 bp, Homo sapiens
gacttcgtctctcctgccctggagctgagtggggcgctccgcttctacgacagatccgacatcgacgcagtctactcttgctggtggatgccctccttac

SEQ ID NO: 94721 - DNA, 100 bp, Homo sapiens
gaaaaagggaagcgaagaggattccccagcatcctgggacccccacggagaccaagccgtcatgacaacagtgcaagtggtttgtcctgattgtagtgat

SEQ ID NO: 94722 - DNA, 74 bp, Homo sapiens
atcaggttcacgccaacagtacctcattgctctttggcgactcttattggaagagagagaaaatccttcaaaac

SEQ ID NO: 94723 - DNA, 83 bp, Homo sapiens
cgctggagctgggtcagtccgccgctcaccccgcggccgcaccttcccgccttctcagggtcctgccctccggaggagcagcc

SEQ ID NO: 94724 - DNA, 100 bp, Homo sapiens
cagcctgccatgggacgtggggtccaccggtacagtgtggacgaatgtggaacctcgctctgtggctgtgttcccttggcactccttagtccccttcctg

SEQ ID NO: 94725 - DNA, 101 bp, Homo sapiens
cttgcttttaggagacagccactttctgtgtggtacgctggattcaaggatgcctgatatcagttttagagaatgtggcgtggagaaattctcaaggaaag

SEQ ID NO: 94726 - DNA, 101 bp, Homo sapiens
tttgtggctgcctttgttgctgctgcacattaggttgcagtatgtggccagttatttgcctcagtaaaagactctgtgcagtgtgcctagaagacttcaag

SEQ ID NO: 94727 - DNA, 100 bp, Homo sapiens
ccagctgcgcaaagcttgcgaggtggcgttagaacaaaatccagtctcatagcagaggagaatataatgtttacagcaccttccagagccatgaaccaga

SEQ ID NO: 94728 - DNA, 90 bp, Homo sapiens
actcacaaatcagcaacacagaatttctgcaagtaattgctctgcttatgataatgtcaacaaagttcgagtagctatcaagaaaatcag

SEQ ID NO: 94729 - DNA, 75 bp, Homo sapiens
cacgagggaagtgtaccgctcctaccgccagctgcggacccagggctttggaggatcaagcaaccccttctgagc

SEQ ID NO: 94730 - DNA, 76 bp, Homo sapiens
gacgagggcgcccgacccgggactagaggacggaagggtctggaaggtcaaaatgcagatcttcgtgaaaaccctt

SEQ ID NO: 94731 - DNA, 90 bp, Homo sapiens
acagaagatatcaaatcagcatttgccccctttggtaaaatatcagtcattttcagagcacatggatgatagcaagcaagaatctaccac

SEQ ID NO: 94732 - DNA, 75 bp, Homo sapiens
agcccaccacacacgttctgcaaagtcgacaagaatctcaataacagtatgaacctgatgttgttgttaaacgac

SEQ ID NO: 94733 - DNA, 83 bp, Homo sapiens
gccgtctgctcttctgcctcttgatctccgccaccgtcttcaggccagccggaagaattaacctcgagtctgcacgcttttaa

SEQ ID NO: 94734 - DNA, 75 bp, Homo sapiens
tggccgagcaggctgagcgatacgacgttaaacacagtgggaatatcacttttgatgagattgtcaacattgctc

SEQ ID NO: 94735 - DNA, 75 bp, Homo sapiens
agaatccgggacagaagggtcccaagagtcgcgcttggtgagggttttggccaaattgggcgagggcacaaaata

SEQ ID NO: 94736 - DNA, 100 bp, Homo sapiens
ggagactttggggcctaactaggttcgagaacttgtcttggacaattgcaaatcaaatgatggaaaaattgagggcttaacagctgaatttgtgaactta

SEQ ID NO: 94737 - DNA, 101 bp, Homo sapiens
aacgggcagtttgtcgaacgatgttggactcatagtcactgccagaaaggttgggcccatgagatgtgtgctctgtatattccggaggtacaatttgccag

SEQ ID NO: 94738 - DNA, 87 bp, Homo sapiens
aaactgtggagtatctgcactcacaggggcatcatggcagaacaggatgtggaaaacgatcttttggattacgatgaagaggaagag

SEQ ID NO: 94739 - DNA, 83 bp, Homo sapiens
agaataccaagaatacaatccttatgaagtattaaatttggatcctgtagttgatgtcacttggcgatattcctgcaaacatg

SEQ ID NO: 94740 - DNA, 83 bp, Homo sapiens
cccacctccagctccgccactgccaggctctggaccctggactctgcagaaggccaagactaaggggctgcagagcggggtgg

SEQ ID NO: 94741 - DNA, 100 bp, Homo sapiens
ctacaaaggaagacttgtaacctggagaagagagatccgtgctcagctcacagagcagatgaaatgcctggaccagcagtgtgagcttcgggtgcaactg

SEQ ID NO: 94742 - DNA, 100 bp, Homo sapiens
gtgtcctgagatcaaatggcacttcattggccacctacagaaacaaaatgtcaacaaattgatgggcattgaacctggccacatcccaggtaccgtgaac

SEQ ID NO: 94743 - DNA, 50 bp, Homo sapiens
ctgatgcatttcatggctatcatctacacaagccccatgtgccactcccc

SEQ ID NO: 94744 - DNA, 100 bp, Homo sapiens
gtcgggccaaggttccgcgccgggcgtggacggtgtggggcggtcccggccccgcagtgtggacgaatgtggaacctcgctctgtggctgtgttcccttg

SEQ ID NO: 94745 - DNA, 98 bp, Homo sapiens
cagcgccgagcgcggcccgggcgccatcgagccttggcggcggacgtgcagctgagatctgtatctgtggacctgaatgttgatccctcgcttcagat

SEQ ID NO: 94746 - DNA, 110 bp, Homo sapiens
ctccgtttatgcagaagcttggctttggtactggggtaaatgtgtacctaatgaaaaggtatgttcaagatcagtaaatttagaaaaagcttcagagtctttgaaaggaa

SEQ ID NO: 94747 - DNA, 100 bp, Homo sapiens
ctgtacagctcgatctaggttctgcggcacgggatggcggaggcgcctcctgtctcagattctgcatatacagactcatgaaaaattcatcagagatagt

SEQ ID NO: 94748 - DNA, 100 bp, Homo sapiens
gcaagaggaagtcagggggaaatgagctccactcgcgccggacacagggagcagcgagcacgcgtttcccgcaacccgataccatcggacaggatttctc

SEQ ID NO: 94749 - DNA, 90 bp, Homo sapiens
ttaaattatgaagatgtaaggaaaaaatcctacgctaacactgtcgcagtttgaaagcataaagccaaggtagaagcaatgaccctggac

SEQ ID NO: 94750 - DNA, 100 bp, Homo sapiens
gatggccaccagggtccggacagcttctatttgggctaagtcctatcagccatggaaacaccattgctctcttcttccggtcactgttgccaaactatac

SEQ ID NO: 94751 - DNA, 118 bp, Homo sapiens
ccaggttgtgggggaagcacaaaaacaaacctgatatgaattatgagaccatgggaagagcactcaggtgcagattttaatttcagtgactgaattaaaaggtgtcaagaagctcaga

SEQ ID NO: 94752 - DNA, 100 bp, Homo sapiens
tccgcggagatctctctcatctcgctcggctgcgggaaatcgggctgaagcgactgagtccgcgatggagtgcaagagaagcctgagccagtgccgctgg

SEQ ID NO: 94753 - DNA, 100 bp, Homo sapiens
ctctcataagccaggtcttagaggctcccggagtgtatgtctttggagaacttctggagctggccaacgtgcaggagcacttttcaggattagaagaggc

SEQ ID NO: 94754 - DNA, 82 bp, Homo sapiens
gcccctgcccagatccggaagaacggtgaatttcccccgcaggtgtcgtgaaaactacccctaaaagccaaaatgggaaagg

SEQ ID NO: 94755 - DNA, 100 bp, Homo sapiens
accttccagaattacgggcaagcgctgttcaaacccatgaagatggaacaaaattcatctgtattggggctctgtattctgaacttctggctgtcagcag

SEQ ID NO: 94756 - DNA, 100 bp, Homo sapiens
ggagcattaaggtctggtcggatggggcaggatggctgcgttgacacgtcttatttaatccacatcatagggaaagcgctctagcgagtgctgatttaga

SEQ ID NO: 94757 - DNA, 127 bp, Homo sapiens
acatcagctctcctgggaccctccaagagcactagtgtctagaaggcactaagggtgtcatggagaaactccagctgggcccagagattctgcagcgggaaaatccaaggcttatttatgccaggct

SEQ ID NO: 94758 - DNA, 100 bp, Homo sapiens
cgtggatgagggcgcctgcagatcccggctagggcacggaccgcctaggccgagatctgcttggctttgaggaagagtggcagtactgcctcactgcata

SEQ ID NO: 94759 - DNA, 96 bp, Homo sapiens
tggtgtcatcgtaggtggccacctatggcttttgggctccagaaacatgacaaggaggactttcctgcctcttggagatcagaggaggaaatggca

SEQ ID NO: 94760 - DNA, 83 bp, Homo sapiens
caggaagagctgcagtctttgtgggacaagcaaattgtggctactaatttgccccctgaagatcaagatggctctggggatga

SEQ ID NO: 94761 - DNA, 50 bp, Homo sapiens
caaagcaggcgactacagccacgtgaagtgtttgtggagaaggtgctgca

SEQ ID NO: 94762 - DNA, 82 bp, Homo sapiens
ctgtccagtgagaagggccggctgcctgagcgcctcaccaagttcctcatcacccaggtgaaaggtgtagcagtcactcggc

SEQ ID NO: 94763 - DNA, 83 bp, Homo sapiens
gcggcagcgacgagaacctggatcaggagcttactccacgggaacagcctctagataatctgagttgttgaaaatacgaagcc

SEQ ID NO: 94764 - DNA, 90 bp, Homo sapiens
tgcccacgcccatgcagccgtcctccgccaggccccaagaacggctgttactttgggggagtttgtgacattcgaggatgtggctgtgca

SEQ ID NO: 94765 - DNA, 50 bp, Homo sapiens
cagcatccactggagctacaagagctactgcagcactggggtgtcagttg

SEQ ID NO: 94766 - DNA, 100 bp, Homo sapiens
tagaaggaaagttcaacatacagcacaattctggacacattgtattggtttgatgctcctacctggaacaggtcttttccaatggtcaccttggaagtga

SEQ ID NO: 94767 - DNA, 82 bp, Homo sapiens
cgcggcggcagcagcagtgagagtgtcaacagcatctccaccctggagcctgtgagccggtgccagcgcctgagtgagctgt

SEQ ID NO: 94768 - DNA, 82 bp, Homo sapiens
gaccaacaggaagttccgccatgacaaaagggtttacttgggacgagtaccggaagcgagagtgtcgagaccacctcagagt

SEQ ID NO: 94769 - DNA, 83 bp, Homo sapiens
gaggagacgcggagccgaagtgccattgtcatcaaggctggaggccgctacctgggtcccgcagcccccggaagccaatagac

SEQ ID NO: 94770 - DNA, 75 bp, Homo sapiens
gacttttcaagaggggatcccttccgtttaaacatctccctctttcaggtttttctattgggaaagctactgatc

SEQ ID NO: 94771 - DNA, 97 bp, Homo sapiens
cacggagcatggaggcagtcaggaaaatggcaccagggtgtgaattgtgcatcccgcggggatcactgccaccaccccctgaaccacggatttgact

SEQ ID NO: 94772 - DNA, 83 bp, Homo sapiens
ctccacttccaaggatatagagcagctggcataaccttgacaacagattgccttgaagatagcctccttacatgctactgggg

SEQ ID NO: 94773 - DNA, 100 bp, Homo sapiens
ggacacccctgaagccgagaaatgatcatcaatgctgtggtactgttgattttattgagtgccctggctgatccggatcagtataacttttcaagttctg

SEQ ID NO: 94774 - DNA, 75 bp, Homo sapiens
ctcctgcctcagcctcctaagtagctgggactacaggactttctgaagaccttttcccccgatgtcttccggttc

SEQ ID NO: 94775 - DNA, 89 bp, Homo sapiens
tttgccaccacactccagcttggggtccacatatagcctcagttacattagctgcttatgaatgcaattcagttaattttcccgaacca

SEQ ID NO: 94776 - DNA, 100 bp, Homo sapiens
gccagcccacgcatggtgccccgtgctgtgtacctgcccaattgtgaccgcaaaggattctacaagagaaagcagagactacccagtaaagaactaccag

SEQ ID NO: 94777 - DNA, 90 bp, Homo sapiens
acatcatcctctcccacctgtccaagctcaagatggatttaagcgagagcctcactggttcccaggacatcaacctgaactggatcctcc

SEQ ID NO: 94778 - DNA, 90 bp, Homo sapiens
aagtgcagctgcctcagttcttagcgcagggaaatcctcattgacgattcaatttgttgaaggccaatttgtggactcctacgatccaac

SEQ ID NO: 94779 - DNA, 100 bp, Homo sapiens
gagccaaagtggtgatgctacttgaggggaatttctgcaacccatagtcaacgattacatgggcgccaatgcttcggcattagagaaagagattggtcca

SEQ ID NO: 94780 - DNA, 100 bp, Homo sapiens
gggagctcgggccaatcagagggacggccccagaatggcatgcccaataggggcacaaaacgtccccgggatgatgaagaggaggagcagaagatgcgtc

SEQ ID NO: 94781 - DNA, 82 bp, Homo sapiens
aaactgcttggcacctcttcaataggtgacattcaatgagtgacttaagagattaaaattaatttggttgctgttggttctg

SEQ ID NO: 94782 - DNA, 75 bp, Homo sapiens
gatgaagggctacccgcactggccggcccgggagccagcattcgaacgttcactccattttattttctggtggag

SEQ ID NO: 94783 - DNA, 100 bp, Homo sapiens
gacccgtacttgaagccctacgccgtggacttccagcgcaggcctggacttctcaacatcagtgaacctgccgcgcagccatggctggcagacacgtggc

SEQ ID NO: 94784 - DNA, 75 bp, Homo sapiens
atcactggccggaaccgctccttggaaggtcgctgggaggtggcattcaaagtttctccacagtcgaactcctct

SEQ ID NO: 94785 - DNA, 74 bp, Homo sapiens
caagccctatgaaggagagagctcatatatcatatttcaacagtttgatgggtgacagtggatagtggaaacag

SEQ ID NO: 94786 - DNA, 100 bp, Homo sapiens
atccaaggaacgtttggggtttcctagactacgcgtttgttcacatggagaaggaagcagatgccaaagccgcaatcgcgcagctcaacggcaaagaagt

SEQ ID NO: 94787 - DNA, 83 bp, Homo sapiens
ccggaactgcggcagtctctccctgccaggctcttcatccaaggtcaaaatgcagatcttcgtgaaaacccttaccggcaaga

SEQ ID NO: 94788 - DNA, 82 bp, Homo sapiens
cgcccaagagttgcggcgtattggagacgagtttaacgcttactatgcaaggaggtggatgacaatcgagcagcagaagaat

SEQ ID NO: 94789 - DNA, 75 bp, Homo sapiens
gattgcagaccaagaattagcagaagcccttcaaaaatcagcagaggatgcaggcatagcccttttgtacctgca

SEQ ID NO: 94790 - DNA, 76 bp, Homo sapiens
ccactggattgggaaagaccatggcaggcaactcatgcagcaattccagaaccccgacttcccacccgaagtagag

SEQ ID NO: 94791 - DNA, 100 bp, Homo sapiens
atgctggtgaggcgccgccagctctggcctgactgtgtgcgtggcaggcccggcctgcccagggacctcccgaattccctggtaacagtgttcattctct

SEQ ID NO: 94792 - DNA, 74 bp, Homo sapiens
ccgggtcaacctctttacggattttgacaagaaagcaaccatggaagacctgggggaaaacaccatggttttat

SEQ ID NO: 94793 - DNA, 90 bp, Homo sapiens
gacgaattccaacttgtttcacgctatatcaggatgagataactgaaagggaagcagaaccatactatgggctatacaaagcggaccagc

SEQ ID NO: 94794 - DNA, 100 bp, Homo sapiens
tcccagtacctgctcaactggtgtgtgcagatcgcaaagcaaagagcaaatcgcctgtaaaatctacggagcggacagcaaagttgaccctaaactccaa

SEQ ID NO: 94795 - DNA, 82 bp, Homo sapiens
ctgaagtccctggaggaggagctggagaggaaggcgagggttgtgagtcccggcccagcccctccacccccctgcccccccg

SEQ ID NO: 94796 - DNA, 49 bp, Homo sapiens
aggatggccgggacgaggccaattgccccttcagtttggaaacctgcag

SEQ ID NO: 94797 - DNA, 100 bp, Homo sapiens
caactagccaatgccatgatgcctggtgccccattacaacccgtggacagttcgtgtttggttaaagagagacagtggacagtattggccaagcgtatac

SEQ ID NO: 94798 - DNA, 100 bp, Homo sapiens
tggacccttatgtacactgctgtatgttactcttacaattctgtgctcttctgtgagttcaggcatcctctggtatcacgattccaaaacccccaaagcc

SEQ ID NO: 94799 - DNA, 75 bp, Homo sapiens
cagccccgcacggcccgggcccacatggtctgtcttctgctgatcccaactctgattggaatgcaccagcagaag

SEQ ID NO: 94800 - DNA, 100 bp, Homo sapiens
agaagacactgactgaggaccatggaaaggtgggagaggacgtgcggcttctctgcttcctttgaacagagctctagactgcctgcgctgctgacttaag

SEQ ID NO: 94801 - DNA, 74 bp, Homo sapiens
cccgcgcagccccggcccgcttcccggcgcccgcggcctgcatctgcccggttctcccatgggcaggtggtctc

SEQ ID NO: 94802 - DNA, 100 bp, Homo sapiens
caagatcttgatctatatccatagattggaatattggtgggccagcaatcctcagacgcctcacttaggacaattggagtcattcgttgcccagtttgca

SEQ ID NO: 94803 - DNA, 100 bp, Homo sapiens
gcagcgcaaccacgagacggccttccaagttgatattcactgatggactccaaagaatcattaactcctggtagagaagaaaaccccagcagtgtgcttg

SEQ ID NO: 94804 - DNA, 74 bp, Homo sapiens
gacaggcgcctccggcccatttacggatgttccctttctacagctgctggaggactggactgctactactactc

SEQ ID NO: 94805 - DNA, 83 bp, Homo sapiens
gcggcgccttcctgctgctcttcctgctcgtgctcactgtcaccgagccgctgcggccaggtctcggcgcggaagatggccgg

SEQ ID NO: 94806 - DNA, 100 bp, Homo sapiens
cgcgaccggcgcgatgagtgccaacgaggaccaggagatgaccgtccggctggaacgcggagtgtgagagctccggtgacgaaagtccatggcggttcag

SEQ ID NO: 94807 - DNA, 100 bp, Homo sapiens
ctgtccgacaaccctggcgtccatgagcctggtcacttttacaaagagaaagtttggattaatgaagaaagcctatgaacttagtgtgctctgtgactgt

SEQ ID NO: 94808 - DNA, 101 bp, Homo sapiens
gcctggagatggagttcgactgcgagggcctgagacggctgcttggcaagcagtcctgcgttaactgcggccgggaggctatgagcgagtgcaccggctgc

SEQ ID NO: 94809 - DNA, 89 bp, Homo sapiens
gcttttcatgattggagaacttgtaggactcagcccaaaaccatgtttgcccaagttgaatctgatgatgaggaagcaaagaatgagcc

SEQ ID NO: 94810 - DNA, 100 bp, Homo sapiens
catgagagcgcggccggaggacaggaagggaaaaggccgaggcatcagcgtgtgaagaccgcaaagacgatcccgagtacagttgtgaacagcattgctg

SEQ ID NO: 94811 - DNA, 87 bp, Homo sapiens
gaaggcaccgacgtcatcatgctgaccaccaatcagatccgtaaggccggtctaattgaagccaacggagaactcaaggtcttcata

SEQ ID NO: 94812 - DNA, 116 bp, Homo sapiens
aaaacttcgaagtgaaggacaaggaatatgggctttactaggcagaatcacagggcagacggtctggaaaatcccgaagcagaagcccgtattcatctaggcattcaagatctcgt

SEQ ID NO: 94813 - DNA, 82 bp, Homo sapiens
cgcagaaaccccgttgacaaggcactgctttttcatgacgatacaaggtctcgctgttctacctaggctgttctagaactcc

SEQ ID NO: 94814 - DNA, 75 bp, Homo sapiens
cttattttttctcatggatgttcttcttcgagtatttgtagaaggctgtggaataatggcaacagaaagactggc

SEQ ID NO: 94815 - DNA, 53 bp, Homo sapiens
cgcggggctgccggagaccggccgcatgggctggagtgcaatggtgccatctc

SEQ ID NO: 94816 - DNA, 82 bp, Homo sapiens
ggatggtcgcacgcatgattgtcggcatctcacaggtaactaggatttctacctcaaccgcgagacctatgcaaggacggtg

SEQ ID NO: 94817 - DNA, 100 bp, Homo sapiens
tgccattcccagaggagcctgagaagaggcagaggaaggcgaaacatggctggtgcaaatatatacagagcttcataatcagcccaagaccacatagagc

SEQ ID NO: 94818 - DNA, 98 bp, Homo sapiens
agctacatgagaggattgcctgaggccaggagtttgagaccagcctgaacaacatagtacaaagaggatggtgaagctttgctaattttgctaccctc

SEQ ID NO: 94819 - DNA, 50 bp, Homo sapiens
gaatgcagtttttacataagttttcactttatccaaatgcatagatgccg

SEQ ID NO: 94820 - DNA, 90 bp, Homo sapiens
gccagtggctgtcattacatatgagatgagtctcttgaagactacagatgattgactttgaagatgtgattgcagaaccagaagggacac

SEQ ID NO: 94821 - DNA, 75 bp, Homo sapiens
aataagaagaagcaactgtacaaaccatactcgggaagaggctctgtcgggattggccggaagcagaagggaggt

SEQ ID NO: 94822 - DNA, 100 bp, Homo sapiens
tgttatacgcgtccgaaacgcccaggagatcttgagtgatatgaggtcgtgctcaagtttgaaatgggccatgtgagagcgaggaacctggcctatgaca

SEQ ID NO: 94823 - DNA, 90 bp, Homo sapiens
tcatcatctacttcacaggaattgccatttcatcattctgaaaggctacaagcgtcctctgacactcgaggatgtctgggaagttgatga

SEQ ID NO: 94824 - DNA, 83 bp, Homo sapiens
cgacgacgaggaagaggaggtttctgagcttcggaaagaacagtcattgcattatggttcggttcttcttataactgaattac

SEQ ID NO: 94825 - DNA, 90 bp, Homo sapiens
tgtaccccactgctggggtggtggttccaatgagacagggcacaccaaactccatctggcgtcctgcctctgcggctctgccccctgcat

SEQ ID NO: 94826 - DNA, 100 bp, Homo sapiens
tcagttgcgactgcacaatgatatgcacaaaggcatggccaggttttgagagattacctgaagttgcactcaaaagcaagatatactactaactttgaaa

SEQ ID NO: 94827 - DNA, 74 bp, Homo sapiens
ggcctatggacccccatcctagaaccagagaggacaatggcactacctggcagcaccatctaaacctgtatcat

SEQ ID NO: 94828 - DNA, 51 bp, Homo sapiens
agcacggtactggagaacacggatggtttttgccaatccagaagactgtgt

SEQ ID NO: 94829 - DNA, 100 bp, Homo sapiens
ttccacaatggcagctgggtccacctcaccatcaacgattcctacgagaagcaacaggcacaaggctctggtcggaaaaaattactgtcttctactctaa

SEQ ID NO: 94830 - DNA, 97 bp, Homo sapiens
aatgtcccagaaaggacacaaatagatgtaggcagaatacctttacagaggttaaaattggtgaagagcgattatatgttagagatagctgatcaag

SEQ ID NO: 94831 - DNA, 72 bp, Homo sapiens
agcctctcgaatgggcacacctgtgtaggtcatgcaagacaagataatctgccttccgaaaagagtgcagcc

SEQ ID NO: 94832 - DNA, 74 bp, Homo sapiens
cgtgttcggtgaccgcagcactggggaaacgatccgctcccaaaacggtcggagctcttaggcctgctgaaaac

SEQ ID NO: 94833 - DNA, 50 bp, Homo sapiens
cccagccagaaagcaacagtgttaccaggcatgcatatcattctgtttca

SEQ ID NO: 94834 - DNA, 90 bp, Homo sapiens
tggaaatccagaacattcggtcaccgcatgcttttcacttccactgcatctctcgctggctcaaaacacgacaggtgtgtccattggaca

SEQ ID NO: 94835 - DNA, 74 bp, Homo sapiens
gtgaccgagagcgtgaccgagagcgcgaatatcgtcatcgttagaagaagccaaagatgttgaccaggaagatc

SEQ ID NO: 94836 - DNA, 75 bp, Homo sapiens
gccaggcttcccaacattcttgtctgtggatcaaaaccattcaagtgcaagatatgccattttgcaacagctcag

SEQ ID NO: 94837 - DNA, 100 bp, Homo sapiens
cagaagttcttccttgaagaaatacagcttggtgaagagttactagctcaaggaacaacatgccagaatttcacaaattaaaagcaaagttgataaagaa

SEQ ID NO: 94838 - DNA, 100 bp, Homo sapiens
ccttagctgctcacatatggatactttcacagttcagaacaaatcacctgctgcagtaacagaaccagagacaaataaatttgatagtaccggatatgat

SEQ ID NO: 94839 - DNA, 100 bp, Homo sapiens
ggatatggcttccttgaactgcgggacgtgtagctgcagctgtggggtggaccatggaaacagggttcttcatcactaggaactggctctcctagaatac

SEQ ID NO: 94840 - DNA, 97 bp, Homo sapiens
gaacttgagagtgagactttgaaatcagaggaattccagaagaggctgcacccttataagggaacaccaggcacttatttgacttctcataatcagg

SEQ ID NO: 94841 - DNA, 100 bp, Homo sapiens
accacccatcttgagtatctggtgtcactcgagaaggtgcttggcatcacagcccagaacagcagtggcctaacctgtgaccccggcacaggccatgtgg

SEQ ID NO: 94842 - DNA, 101 bp, Homo sapiens
ccgaagtgattttagctacatcaagtgatgaaaaacacccacctgaaaatatcattgatgggaacatcatttacagcgagcaatttcagcacagcaagtgt

SEQ ID NO: 94843 - DNA, 100 bp, Homo sapiens
gaaactatggcctccaggcttccgacggcctggtcctgtggtcggcccgaaataggcggagttgggattcgaactcatttcacaggcagagggaggagag

SEQ ID NO: 94844 - DNA, 75 bp, Homo sapiens
ccgcctgcctgcgcacctgcactattgcccagaagaaaagatgtttggttttcacaagccaaagatgtaccgaag

SEQ ID NO: 94845 - DNA, 50 bp, Homo sapiens
agtggaggggagccaggcggccgcctcagaatatgcttttaaggctatta

SEQ ID NO: 94846 - DNA, 100 bp, Homo sapiens
aactgtcccctctgactaccatttctaaggaccctgatgctcccataagacagaaaatgccccttgatgatctggatagagaagatgaagttagattact

SEQ ID NO: 94847 - DNA, 97 bp, Homo sapiens
ttgactccatcctggagcagatgcgccggaaggccatgaagcagggcttcgagttcaacatcatggtggtcggcttgggaacaatgggccgaggcat

SEQ ID NO: 94848 - DNA, 82 bp, Homo sapiens
ttcaacttcccggatccctactccaaaggcgaccattgacgaggtggagacggacgtggtggagattgaggccaaactggac

SEQ ID NO: 94849 - DNA, 99 bp, Homo sapiens
ttttttattcgttactatgtggatgttccacaggaagaagtgccattcagagaatggggagaaggaacccccgacaacactactctgggttcagtattt

SEQ ID NO: 94850 - DNA, 80 bp, Homo sapiens
cctcagttggaagcagccgatccagcctgcggagcctgtggggcaggaggcaggtggaagtcatcataaagtttctgttt

SEQ ID NO: 94851 - DNA, 96 bp, Homo sapiens
gatttgatacgactgccataaacaaaagctattacaatgtggctgcagttcatggagctcgtttcaaagggcaagatctaaaactggcatggaata

SEQ ID NO: 94852 - DNA, 119 bp, Homo sapiens
ggaggccactgtcttctcttcctcctccaccgagtcgtgctctcgccccaacccgcgcgccaggtgtcgtgaaaactacccctaaaagccaaaatgggaaaggaaaagactcatatcaa

SEQ ID NO: 94853 - DNA, 100 bp, Homo sapiens
ttcctgggccgcgccgaggtggacctgcgggatctgcaccgcgaccagggccgcaggaagacgcataataaaagactagtggccttagtgcccatgccca

SEQ ID NO: 94854 - DNA, 98 bp, Homo sapiens
gagaccttagaaaggatcaggactggcggggccagatattcgaagcttacaacatggcagctttgtggaaattaccttgtattttcatctgtgagaat

SEQ ID NO: 94855 - DNA, 82 bp, Homo sapiens
cgccccctccggcgtgttcatgcccccgggtgtcaacagcatctccaccctggagcctgtgagccggtgccagcgcctgagt

SEQ ID NO: 94856 - DNA, 127 bp, Homo sapiens
gcaattgaacttctgatggaaaccgctgaagttgaacaaaatggtggtctctttataatgtactatcaactacagtaaagaccttcctctggcccaaggaatcaagtttcagtaaaggtgttttaga

SEQ ID NO: 94857 - DNA, 82 bp, Homo sapiens
aagatctggaagacgcgctcctgcgccgggatgtttcagcagcccctgagaaggaagaggaggaagctgagggcccgctgag

SEQ ID NO: 94858 - DNA, 75 bp, Homo sapiens
gcccgcgcggcgccgggcgctgactgagagtgactgcaccaagctcttcagccagggcattggaggggagcaggc

SEQ ID NO: 94859 - DNA, 100 bp, Homo sapiens
agatgaccttcacggccactggccagaggtacttcctcaagtatgtgtacattccagtgggcgggtcccagcatggcctgctggggacactgttttccac

SEQ ID NO: 94860 - DNA, 50 bp, Homo sapiens
tacacgccgccgcttgtgctgcagccatgttcctctgctggtctgggttc

SEQ ID NO: 94861 - DNA, 96 bp, Homo sapiens
atgtcttggatcttcatggaaatcagcagggagaaggttttaaggtgaaaacgaagaaagaaatccggcatgtggaaaagaagagccactcgtaac

SEQ ID NO: 94862 - DNA, 85 bp, Homo sapiens
ccgctgtgtggttgcaacggagataaattcccggaaccgcgattcggcgtgtcagtgagacggtttaagcggaagcatcttactg

SEQ ID NO: 94863 - DNA, 80 bp, Homo sapiens
gtgcctgaagcgggaagggtggtcagcaggcacaggagaagcgaatatggatctctctaggagctgacactcgaaccttc

SEQ ID NO: 94864 - DNA, 83 bp, Homo sapiens
gaagttaaaagagcagcactccaagttgggacagaaataacccagagccctggaacaaactgggtcccaatgatcaatacaag

SEQ ID NO: 94865 - DNA, 80 bp, Homo sapiens
ctcagcgagagtgccaaccaggccttcctgatctctgttgaggagctggcgcggaatctggtcatcaaggtcaacaggga

SEQ ID NO: 94866 - DNA, 75 bp, Homo sapiens
tattcaaagacatttacaacacagcttgtggatatgggggcaaagggaataccttggcaagcagctccagtccga

SEQ ID NO: 94867 - DNA, 100 bp, Homo sapiens
ctaggcttggcccgcctaaggcactgggtgtacctgctttgcttctctgcagtcttggtgatgccttggacagcagcaactccatgcaaaccatccaaaa

SEQ ID NO: 94868 - DNA, 90 bp, Homo sapiens
attcaaagtcagaggccaatgatgttacaatctgccttagcatttgaacagataattaagagcaagtgataatcaagttactatgagtct

SEQ ID NO: 94869 - DNA, 90 bp, Homo sapiens
ggaacaaaagaaacttcgtatggcctgtccttcttcaaaccacggcccggaaacttcgaaagaaaagctcccctgaacagcagctgcagc

SEQ ID NO: 94870 - DNA, 75 bp, Homo sapiens
tataccttttttggtcggaatgattcagggagtaggttgcatctttgttgaaatgatccaaggagttgctgcttt

SEQ ID NO: 94871 - DNA, 76 bp, Homo sapiens
ggagaagaaggacaagcttgcggtattacatgaaacctttcctaaacatacatttctgatgaacggcttaattcaa

SEQ ID NO: 94872 - DNA, 106 bp, Homo sapiens
gaaactctttgggaaagccactcgaaaagctatgtgatgatgatgccatttaaacgacaggctctagtggaatttgaaaacatagatagtgccaaagaatgtgtga

SEQ ID NO: 94873 - DNA, 97 bp, Homo sapiens
ggaatcctctccatctggttcgaagtctcagcggtattctggtgcttatggtgcctcagctccctcgtgaaagatgcttctgttcctctgattgatg

SEQ ID NO: 94874 - DNA, 90 bp, Homo sapiens
tgattacaaagcagttaaacaagaagggcggtttaccaaagcaggagtgacacaggacctaaagtccctggtacgtgagcccctttcccg

SEQ ID NO: 94875 - DNA, 83 bp, Homo sapiens
gaaaacgttcaccaagtgggtcaacaagcacttaatgaaggtgcaggtgatggtcctaccagtgtgtctgttgaggtcacccg

SEQ ID NO: 94876 - DNA, 135 bp, Homo sapiens
gagtggccctgcaggctgagaaactggaccaccatcctgaatggtttaacgtgtacaacaaggtctccaccagctcctggccgggttcgaggacaagtcagcctatgcgctctgcacgtttgcactcagcaccgg

SEQ ID NO: 94877 - DNA, 136 bp, Homo sapiens
cgcccgcagcctgccgcccgccgcagggcgctgacggtcccgcacgtctgccgctgccaccggcgcgcccgagaatgaatctgaagtctgctgcagtaaaacacagaaggctttaaaatgttttcttgcataaaat

SEQ ID NO: 94878 - DNA, 82 bp, Homo sapiens
tcagcagccttggtgctcaggtgccagatgcaaagcactattcctgatcagagaactccagttgcttcaacacacagtatca

SEQ ID NO: 94879 - DNA, 98 bp, Homo sapiens
ttccagaacatctgggagaatatttaatggaaaatcgcttggttaaaacctgacacttttaacagttggactaaatgctcttccttcagaggattatc

SEQ ID NO: 94880 - DNA, 100 bp, Homo sapiens
gcagcagcaagctgcaagcagtgcaagcgagaatggcagtggggcaccctatggaaagcgtctctagcagctgatatccccagacttggatatagttcct

SEQ ID NO: 94881 - DNA, 101 bp, Homo sapiens
agtagaggtgtatgactgggaccgagatggaaggaaacccagcgtttgctggcagaaccagttcctggcatcaaagccgaaccagatgagagcaacgcccg

SEQ ID NO: 94882 - DNA, 100 bp, Homo sapiens
tcggactgatgtttttgatgcttggatgtgcccttccaatatacaatgggaatgtaagacggacttagatattgcatacaaatttggaaaaactgtggtg

SEQ ID NO: 94883 - DNA, 101 bp, Homo sapiens
gcccacatcaaggagtatttctacaccagtggcaagtgctccaacccagcagtcgtactgtacaatttgttcaaggaatttttgtagaaaaatacgatcct

SEQ ID NO: 94884 - DNA, 116 bp, Homo sapiens
cagcgccagcggccgagcgggcggcttcctggcctgggcgctccggtggcggcggagttccagggtctccctccactgctgtagtaacccgggtccggggcctcggtggtgctcct

SEQ ID NO: 94885 - DNA, 90 bp, Homo sapiens
cattgctgcatcaagaaacccaagctgctgaggatgaatgctatcaagtaagacaagtgtttgcccagaaacttcacaaaggcctttccc

SEQ ID NO: 94886 - DNA, 50 bp, Homo sapiens
gtcctatgtggacgtcggcactgggaagtgcacagccagagaacaacaca

SEQ ID NO: 94887 - DNA, 101 bp, Homo sapiens
agaatatgctagtggaggggaaatatttggatgcatgtggtccatattctccggatgagtgcatctctttgcctgtttacacaagtgctgaaagggatcgt

SEQ ID NO: 94888 - DNA, 100 bp, Homo sapiens
actacatcatcaactcctaatagtaactctacatctggttctgctactagcaacccttttggtttaggtggccaagactaagcagcagattgaggagcag

SEQ ID NO: 94889 - DNA, 76 bp, Homo sapiens
caccaatgtgatggtgacagtggccaagtccttcgaggcaccaataaaatgacagagcgggatgccaccagcttgt

SEQ ID NO: 94890 - DNA, 100 bp, Homo sapiens
ggggagaaaaaagattcagattacgaggattatggatgaacgtaacagacaggaactgtggctgcaccatctgtcttcatcttcccgccatctgatgagc

SEQ ID NO: 94891 - DNA, 90 bp, Homo sapiens
ctttggggcaccacagagatgcgggtttcagagcagcgatggagaaattaaatacttgcaattagcagaggaactgattcgtcctgagag

SEQ ID NO: 94892 - DNA, 75 bp, Homo sapiens
tcagccaaacatttgaacgagtggtggactgtaaggacaatgtcatcaaggctggagtgcagtggcgcgatctcg

SEQ ID NO: 94893 - DNA, 75 bp, Homo sapiens
cgcgaaatgatgggatagcgttgcaaatccttaaaagagtcttaacgagatgtggtcttgctatgttgcccaagc

SEQ ID NO: 94894 - DNA, 71 bp, Homo sapiens
gcagaatacagagatatggaatcagatcccttcattaacaggagaaatgcaaataccttcatatcccctca

SEQ ID NO: 94895 - DNA, 82 bp, Homo sapiens
aagcaccttcattctgctggaattattcatcgggccacagaaagcgaggctggtgatatggacctgagtgggttgccagaaa

SEQ ID NO: 94896 - DNA, 98 bp, Homo sapiens
tgagctgtgcctttcaccttccaccatgattgtgaagccttcccagacatgtgacacagctgttcacggaagaccaggatgtagatgagggacttgtc

SEQ ID NO: 94897 - DNA, 87 bp, Homo sapiens
ttggagaacttcatacacttcgagatcagcatcttaacaattcatcatcatatcctcttctcagtttattcattgatgcagaaagca

SEQ ID NO: 94898 - DNA, 82 bp, Homo sapiens
gctggaagccatggcggagcccagtcccgaaggtcaaaatgcagatcttcgtgaaaacccttaccggcaagaccatcaccct

SEQ ID NO: 94899 - DNA, 107 bp, Homo sapiens
ggccgatgaagtgcagaggtttttttctgacttaattcagtgcacaaatgagatgaatgtgaacatcccacagttggcagacagtttatttgaaagaactactaata

SEQ ID NO: 94900 - DNA, 90 bp, Homo sapiens
ccaccaggactgaccgctgccgcccagcacgtccagtgatgcagccaacacgaacggttgtcatgtgtaacacaactttcgatcaccgcg

SEQ ID NO: 94901 - DNA, 75 bp, Homo sapiens
gcatcatagttgtgtatgatgtgacagatcagagacgagttgtactgctgtcacaggaaatggacgctggattac

SEQ ID NO: 94902 - DNA, 74 bp, Homo sapiens
ggaagcgctaccagcgctcccatgatgataccacaccggagagaacattgaaagtattctctaagctatttgaa

SEQ ID NO: 94903 - DNA, 98 bp, Homo sapiens
atcacttataaatggcgccgaagcaggacccgaagcctaaattccaggagggaactttatattgctgttggaatatctggagccatccaacatttagc

SEQ ID NO: 94904 - DNA, 74 bp, Homo sapiens
aggcctccccaaccatgtgcaattgtcacggagctgctggacgtctccatggagctgggctgtttcctggctgg

SEQ ID NO: 94905 - DNA, 75 bp, Homo sapiens
gagacacattttatgttgtgtcatttcgaaggctggactgggcagcctttggggtcatgacccttccctccatcg

SEQ ID NO: 94906 - DNA, 75 bp, Homo sapiens
cgatcactagccaccgctcctcgcaccctgagcgctgggccacctcgtcccagctcattgctatggacagtgcta

SEQ ID NO: 94907 - DNA, 100 bp, Homo sapiens
ggccacctccacactgctggccggagactcggactcccaggaggaagcgcacggcaagctcgtgctctggtcggccctgactgccgccgcaggaagaggg

SEQ ID NO: 94908 - DNA, 75 bp, Homo sapiens
cttcggcagtccacccaccgccgccgcctcccagccggctcagttcggggaagctgcaggagttcggcgtgggtg

SEQ ID NO: 94909 - DNA, 101 bp, Homo sapiens
agagttctccaaacatgatcgtttactgcaaaaataactgaagtgaagtgatggactccgatttggagagtagtaagacgtgaaaggaatacacttgtgtt

SEQ ID NO: 94910 - DNA, 88 bp, Homo sapiens
tccgtgctatgtggacgacgtccaaggccacctttgatgccatttctaagacctacagctacctgacccccgacctctggaaggagac

SEQ ID NO: 94911 - DNA, 100 bp, Homo sapiens
ctccttcaccgccgacttcaagaagggcaaatcataccccttcagggggccattcccacctgtatggaatccaattacctacttagatcataacaacttt

SEQ ID NO: 94912 - DNA, 100 bp, Homo sapiens
cgatactccagtgcattcaccaacaggatattttttgccatggtggattttgatgaaggctctgatgtatttcagatgagtttccaggatggcttctgca

SEQ ID NO: 94913 - DNA, 90 bp, Homo sapiens
cttcctgctgcggttcctgcgcgcccgggatttcgatctggacctggcctggcggcaggataacctagggtctcagtttagccacatgag

SEQ ID NO: 94914 - DNA, 100 bp, Homo sapiens
cgctttggagactggagaggggaacaaaatcacatgatccgcacccccagcatgaggcaggaggagcgctacctggtgttggaggtacttctgaaaatga

SEQ ID NO: 94915 - DNA, 60 bp, Homo sapiens
ccctcctaggaaggcccgggtcccacagagcagcccgacggccatggaggctgaagagac

SEQ ID NO: 94916 - DNA, 90 bp, Homo sapiens
tgctcgcgtgacgaccgcattcgtggcagaataatccagaatggctactctgatctatgttgataaggaaaatggagaaccaggcacccg

SEQ ID NO: 94917 - DNA, 75 bp, Homo sapiens
caggccctgaggttgctcctcccggggcccttcccgggcaaggatgaatccttaaagcaattgcaggtagttcat

SEQ ID NO: 94918 - DNA, 98 bp, Homo sapiens
ccaacttctttggcaagtggacattttactggctcaaacaagcaaagtggatcagcaaaggctgcagtcaccagcatcttttccaaccttaatgaact

SEQ ID NO: 94919 - DNA, 102 bp, Homo sapiens
aatagggaaagtgaggcagctgcaaggagggcggcgggactgcactcgagtgtccagacctgctcgatggcactcctggccagggcactttatgacaactgc

SEQ ID NO: 94920 - DNA, 90 bp, Homo sapiens
gtaggaggctgtcctgtctgcagtcctgacacagctctccctgaggagcagccacattccagctcccagtgcgcccctctccactgtctc

SEQ ID NO: 94921 - DNA, 100 bp, Homo sapiens
ctgacgtgtttggagggaaatgggaatgtacacgataattaaagagtaaagttgtgctcaacggtttgccaaagagcgcaggctgagaatatggagagac

SEQ ID NO: 94922 - DNA, 101 bp, Homo sapiens
gccggggccgccatggagcccgactcggtgattgaggacaagaccatcgagctcatgagctttttgacaactacatgcaacaagatgcccatgaattctta

SEQ ID NO: 94923 - DNA, 99 bp, Homo sapiens
gaggatggaatgagacccaagatgctcttcatactgtagaaaaatattcctttgaagagccctgaccctctattctgcaccctgtgagccaccgagact

SEQ ID NO: 94924 - DNA, 100 bp, Homo sapiens
cacagtcatggatctggaagctgagggcacgtgtttgcggttcagccctttgatgaccgcagcagatacagtttatgtaacttgatggaagaaaatggaa

SEQ ID NO: 94925 - DNA, 127 bp, Homo sapiens
gatgtcttttgaaaggtgtactgcaaggaacaaaatgtttgtaaattctccttttaccaagtgtttacaggcattggagtttttacatgctaatcaagtgatccacagagacatcaaaagtgacaat

SEQ ID NO: 94926 - DNA, 100 bp, Homo sapiens
taactgttgatcagaaaaccttccatttccagggtaactcaactggacccaaataaatcattattggaggtaaagttgttccctcaagaaacccttttcc

SEQ ID NO: 94927 - DNA, 98 bp, Homo sapiens
gcaagctgcagaatttcctctacaacgtgctggagcggccgcgcggctgggcgttcatctaccacgcctacgtggtggtgaaggaggagatctttgat

SEQ ID NO: 94928 - DNA, 100 bp, Homo sapiens
aaatccagatgaaagaccatctttcttaatggacttggttacttatataacaaggttccagtgggacatggccaaatatccaatcaagcagtccctgaaa

SEQ ID NO: 94929 - DNA, 88 bp, Homo sapiens
atgacatatttttggacctgaaacagaaattctggaacacctatatgtgcctcaacctggtgttcctgctggcagacgtgtggttcgg

SEQ ID NO: 94930 - DNA, 99 bp, Homo sapiens
ggatgtaggaaccttggcttccccatgcttgcccagtcttgctggtggatgccctccttactccccaatatatacgtcttggatagactgttggtgcat

SEQ ID NO: 94931 - DNA, 100 bp, Homo sapiens
gaacgagtattcagctcttcacagggggtagaacaagtggtactaggattatacattgtaagaggtgacaacgtgtcatgttggccccccttatttccat

SEQ ID NO: 94932 - DNA, 50 bp, Homo sapiens
ctggagagggggcgctgagctgttgggggccgcgatgggcctcttggaac

SEQ ID NO: 94933 - DNA, 101 bp, Homo sapiens
gaggatctggtgtaccaggcgaagctggccgagcaggctgagcgatacgacggtaaagtgttgagagaggagaaccagtgcattgctcctgtggtttccag

SEQ ID NO: 94934 - DNA, 100 bp, Homo sapiens
ctcctgagaaaaggatagcttcagaaatcagaaaaacatttgggaggtgtctagcccagtggaccttctgaagaattttctgggttcctgtgaccctcag

SEQ ID NO: 94935 - DNA, 98 bp, Homo sapiens
ctgcagccgagatgccgggggagcggggccttccacaccccctccgtgggtgtgtggtcgcgtggggcaggcagtggcgctgcgggccaaggccttcg

SEQ ID NO: 94936 - DNA, 100 bp, Homo sapiens
aagccttcgtctcccagattgcaggaagatgaagtcctcagtacattctgaagaagatgattttgttccagagctacatagaaatgtacaccctcgagag

SEQ ID NO: 94937 - DNA, 80 bp, Homo sapiens
tgcgccccagacccaagaatcgcccgcctctccaagaccatccctggctgctgcttcctgcctgacacagctcacttcaa

SEQ ID NO: 94938 - DNA, 51 bp, Homo sapiens
gaggcgagccctggtggaggaagagtggagtggcagggtcccagccagtga

SEQ ID NO: 94939 - DNA, 100 bp, Homo sapiens
acgtgctggccctgtccactgagcgagaactatttgcctggggccgtggagacagcgctcattgctgggatggatatggtgagttttcatgtacattgac

SEQ ID NO: 94940 - DNA, 100 bp, Homo sapiens
taaagatatcaggtggctggttataagtcttttggaggacgaacaactggaggaatgatttcggcatgtctaggagagtcagagaaaagacgggagggaa

SEQ ID NO: 94941 - DNA, 100 bp, Homo sapiens
gaattacctggaacttcatcatcatctacttcacaggaattgccatttagcccacccacctttgggttcctgttggacatcgatggagtgcttgtgcggg

SEQ ID NO: 94942 - DNA, 84 bp, Homo sapiens
gagagccccggagtgagcggagtagcgagtcggcaacccggaggttttaaaatcaaagatgggaaaatcggagaaaattgccct

SEQ ID NO: 94943 - DNA, 85 bp, Homo sapiens
acaatttctacatctgcccgaccaacaagaggaagttggatgcagcaacatcagaggggtgattacccccaattgccaaagaggt

SEQ ID NO: 94944 - DNA, 74 bp, Homo sapiens
cagccaagaacaaagactacatgagcatcattcgcatgtggctagtttcggagcaacatcccctgtcacctggt

SEQ ID NO: 94945 - DNA, 90 bp, Homo sapiens
tgttgccatggctccccaggctgacaatccccttggcagatctgtccttaggaaagatatttaccagtttatctcaagtctcaattgaac

SEQ ID NO: 94946 - DNA, 90 bp, Homo sapiens
caccgatgcacttggagcctggaggtgggccccctccacccccagcacttcccacctggtcggtcccgaacggcccctccccggaggagg

SEQ ID NO: 94947 - DNA, 51 bp, Homo sapiens
cgctgggcgcgtcgaggactgggttccagcagcactgatgtgaaggaaaac

SEQ ID NO: 94948 - DNA, 74 bp, Homo sapiens
ggcaagatttgatgctcttgtgctcagtgacatcattcaggtactctttcatctactggacagagttcgagagt

SEQ ID NO: 94949 - DNA, 100 bp, Homo sapiens
tgcggaccacggcctgtcagcacgtctgtttgaattgggtcctgatggaggagatcatgaaactgatggtgaccttcttgcagagactgatgtattggct

SEQ ID NO: 94950 - DNA, 95 bp, Homo sapiens
gtcagagcgagtctcggagaagatgtggtggcttccgtttgttggtggaggaggtggcaggcctcggcgagtttattaaccacttaacctctcag

SEQ ID NO: 94951 - DNA, 83 bp, Homo sapiens
ttgcctccacttggcccgtccatagagccagacctgcctagagctggaacgttacctccagagcgagccctgctatgtttcag

SEQ ID NO: 94952 - DNA, 75 bp, Homo sapiens
accgagccgatcgccgcggggcagttcgggccggctgtcctggcgcgactacatgaggaaataattgacttttat

SEQ ID NO: 94953 - DNA, 50 bp, Homo sapiens
caccaccttcaaaaatttctgatttcaaatatgcgtgcattagagaatga

SEQ ID NO: 94954 - DNA, 100 bp, Homo sapiens
ggggaaggcaggactgacgcagagtaggtgagctcgtgaaacaatatgaagaggagaaaatagccttttaaggaaattggcccacagaaaggatggcctt

SEQ ID NO: 94955 - DNA, 90 bp, Homo sapiens
gaccccgagcaccgggccctctgcgacctggggccctgggtgaagtgctccgccgcccttgcctccagtcaagctgcagtttcagctcag

SEQ ID NO: 94956 - DNA, 99 bp, Homo sapiens
ggacagccttggcagcagtggcccttgaaccagcaacaatggatgcagtcattccagcaccaacaggatccaattccttcctcagagatcacctatggg

SEQ ID NO: 94957 - DNA, 100 bp, Homo sapiens
gttctacctgggagaatccaccgccatccgccaccatggaccctttgaggatgccctgaagttgcatgagtgctcagtggcggcaggcgtgacagcagcc

SEQ ID NO: 94958 - DNA, 100 bp, Homo sapiens
aggcgggcggggaggcgggagcaggagcccgcggccggccagccgaagatggtggcggctactcctcctgtcaggatggctaaaggtgaccccaagaaac

SEQ ID NO: 94959 - DNA, 50 bp, Homo sapiens
ggctttgccagcaaaaccgaaacagccactgtagtctgcagatcaaagct

SEQ ID NO: 94960 - DNA, 100 bp, Homo sapiens
gcagaggtgcacgttcagcaagcaaatcagcagctgtcaagggcagcagattatcaggtcagcaaaaggttgaggggtgaggtgggtctcctgttcacca

SEQ ID NO: 94961 - DNA, 100 bp, Homo sapiens
ccaaataagctatatactttggttacctatgtacctgttaccactttcaaaaatatttgttcagtcgaatcaaggtgaagaggaaacaacaagaatttca

SEQ ID NO: 94962 - DNA, 50 bp, Homo sapiens
atcatcattaaggacggaggcacggctgtctgtccccagaccccagagca

SEQ ID NO: 94963 - DNA, 90 bp, Homo sapiens
gcggcggttgcgggggggaagtgactgggcggtgccggcgccggagacgatgccgttgtgtgtttgtcaaagtgtctctgatgaaccaca

SEQ ID NO: 94964 - DNA, 83 bp, Homo sapiens
gtccttgctggtgcatgcgtcgtcggcctctgggcagcaggtgttccactgtgtccactttgagtgtccagagcagcagagca

SEQ ID NO: 94965 - DNA, 74 bp, Homo sapiens
cacgtcttatttaatccacatcataggggcagatttattgaaattaactagagatgatgtgatccaaatctgtg

SEQ ID NO: 94966 - DNA, 98 bp, Homo sapiens
agatcagacccagagcagaatgaaaagctaaagacaccgagtactcctgtggcttgcagcactcctggttatgggagaagatatcccagaaaaaataa

SEQ ID NO: 94967 - DNA, 100 bp, Homo sapiens
tctcttatttagttctggggagcgcctcgtcgacatgagtgatgtggaggaaaacaacttcgagggcagatgccggtggtggtgtgcacattgagccccg

SEQ ID NO: 94968 - DNA, 98 bp, Homo sapiens
aggcagcaccggaggcccaggtctccgtgcagcccaacttccagcaggacaagctccaggccatgcccgcagccggaggtgtgctctaccagccctcg

SEQ ID NO: 94969 - DNA, 100 bp, Homo sapiens
tccatcatgaaggagttccggtcgggcgccagactcatggagagatttctcatggatggcttgtatccttcaaggtttgaagtaccccttgttcctgtgg

SEQ ID NO: 94970 - DNA, 100 bp, Homo sapiens
gcattgatcagagaaagattttcacctttgcagagaagggtccatgccttcctagaacagtggggtcttattaactaccaggtggatgctgagagtcgac

SEQ ID NO: 94971 - DNA, 83 bp, Homo sapiens
ttcagaaggagctggcggacatcactttagaccctccacctaattgcaggtgcactttacaggtccccgatgaaccaagagaa

SEQ ID NO: 94972 - DNA, 75 bp, Homo sapiens
aggcggtgtggtttactccatgcagttgtcaggaggtggatgaaaatactaggaaaagtttatttaagttacgtt

SEQ ID NO: 94973 - DNA, 100 bp, Homo sapiens
gaaaactaggaatctatgatgctgatggtgatggagattttgatgtggatgatgccaaagttttattagattcagaatggacagtttagaagaacctcag

SEQ ID NO: 94974 - DNA, 100 bp, Homo sapiens
ctgcggcacatggagcctgaccttagtgccagggtcaccatctaccaggtgcagcggaactgctgcctgacgctctgcaacttcagcatccccgaggagc

SEQ ID NO: 94975 - DNA, 100 bp, Homo sapiens
aagcggtcatgtctcgctacacgaggccccccaacacctccctgttcatcaggaacgtcgcggacgccaccaggtcagtaacagatccaagagatggaaa

SEQ ID NO: 94976 - DNA, 99 bp, Homo sapiens
cccagaacgtctccgacatcgctgtgaaggtggaccagatcctgcgccacagtctgctcctgcacagcaaggggacatctctacaccgttcccatccgg

SEQ ID NO: 94977 - DNA, 98 bp, Homo sapiens
ttgtatgcctcaatttgctggatttaagcactgctgcactttatgagagttacactgttagaccttatgatagccaagataacgagtgatgagccact

SEQ ID NO: 94978 - DNA, 100 bp, Homo sapiens
cacctagaagaggtgatgatagctttggagacactgcgcatggagtacctctccctgatgcatgctatagtccgcaccacaccctacctgcagcaccgcc

SEQ ID NO: 94979 - DNA, 88 bp, Homo sapiens
gctgctcagctcgggccacggagaggagcagcccccggagacagcggcacagaggtgcttctgccagtttgcagaatttgatcagatc

SEQ ID NO: 94980 - DNA, 121 bp, Homo sapiens
ccaaggaaggccaacgtggaggcctcacgcagctccacagacagccccagctcggtgttcctcagtgataatagagtgacatccttcagagacctcattcatgaccaagatgaagatgagg

SEQ ID NO: 94981 - DNA, 75 bp, Homo sapiens
gagcgacagagacaagctgagcttgccgcacaaaaagctagagaggatgaccggaaagaagggatgaccgcgttt

SEQ ID NO: 94982 - DNA, 74 bp, Homo sapiens
atgatgcaatcttcaggaaagtaagagggagtgtttttgggcctaggcctgagtggaatcattcctaccttgca

SEQ ID NO: 94983 - DNA, 87 bp, Homo sapiens
cggttccagactctgaagactgcctggggccagcagccaaacatttcagtaatgcagagtcctcttgttggagttacatctactcct

SEQ ID NO: 94984 - DNA, 101 bp, Homo sapiens
gcgaggcccacaaggtgctgggcaaccgctgggccgagatcgccaagatgttgccagggagccttgtcttaaaagaagaagcatctgattaccttgaattg

SEQ ID NO: 94985 - DNA, 75 bp, Homo sapiens
caaaagcgttaagattgaggaacgggaaggcatcactgtctattccatgttgggggccgtcccgctcctaaggca

SEQ ID NO: 94986 - DNA, 82 bp, Homo sapiens
tcaagagactgatcaaattgtgagaggaaaacagcctacccggttggtcaaagaaaaagtgatgtatgaaaaagaggcaaaa

SEQ ID NO: 94987 - DNA, 50 bp, Homo sapiens
gttgacaccttttgacatgagcatccagagccataagtgtgatccttggt

SEQ ID NO: 94988 - DNA, 101 bp, Homo sapiens
tatttgcacaccatccaggagtcagtttattactggaaaacatatctgaagagatggattaagaatgctttggattaaggattgtggagcacatttcaatc

SEQ ID NO: 94989 - DNA, 99 bp, Homo sapiens
cagctggttgtagagacgtagcaggagacatttctgggaatatggtagatggatatagagatatacagtttatgtaacttgatggaagaaaatggaatt

SEQ ID NO: 94990 - DNA, 75 bp, Homo sapiens
tcttggatgaattgcttgctttggagggtttccaggcctgaggtgcccgccctggccccaggagaatgaaccagc

SEQ ID NO: 94991 - DNA, 90 bp, Homo sapiens
gaaagaagttgcaaaacactggttgatcatggccttgccaggttggtgacagtatattgtgagcatggtcataaagctgccaaaatcaac

SEQ ID NO: 94992 - DNA, 76 bp, Homo sapiens
accaatgttcatataaatggtggcagaaataccagaagagtgctccaagctcccgaagccgaagtctcactttgct

SEQ ID NO: 94993 - DNA, 90 bp, Homo sapiens
atttaaacttgaattacctttgaagcagaaggggtaccttaacatggggaatcttcttaaagttttgacatgcacagaccttgagcaggg

SEQ ID NO: 94994 - DNA, 100 bp, Homo sapiens
ggaagctggacccagggctcataatggagcaggtgaaagtgcagatcgccgtggccaacgcgcaggagctgctgcagagctgccatcagtcatgctctta

SEQ ID NO: 94995 - DNA, 101 bp, Homo sapiens
cgccggtccgactgtcctcggcggttggtcagtgtgaatttgtgacagctgcagttgctccccgcccccgagcagccgagccatgaaccagagaatcagtc

SEQ ID NO: 94996 - DNA, 101 bp, Homo sapiens
gacctattatcagatcaaccaccaaagtgggaaacattgaaatcaaggtcttagtggtgcaatggctagtataagcgtgcgttcgagtaccccaggctctc

SEQ ID NO: 94997 - DNA, 50 bp, Homo sapiens
atccagaccagcaagctgctcggagataggcctcatcaggcttctccgcc

SEQ ID NO: 94998 - DNA, 100 bp, Homo sapiens
atttgatgaggtggatctgacagatgccagcgtagctgaatccagtaccaaaaacgtcaacaacagttttacggctgttgtccctggaccggcagagcat

SEQ ID NO: 94999 - DNA, 90 bp, Homo sapiens
gaaatcgggctgaagcgactgagtccgcgatggaggctcacagaacatttcctgcctgttgctcacactctgttgtccacagcatacccg

SEQ ID NO: 95000 - DNA, 90 bp, Homo sapiens
gccccacaccggctttgccaccacacaggctgttgaggcaggaggcggccgaattcagtatctggacccgggaagctggtgctggaggcc

SEQ ID NO: 95001 - DNA, 100 bp, Homo sapiens
caacacttaagaacattctcacgatgactgttgaactggaaaaactcggtacccaaacaggcaaacaacagctggatctgaacgcatgctatcacaaaac

SEQ ID NO: 95002 - DNA, 75 bp, Homo sapiens
agtgatgctggaaaatctcaggaatctggtctcattggccacaggtggaattaagaaatctggcaaaaagtaagc

SEQ ID NO: 95003 - DNA, 100 bp, Homo sapiens
aagaaacatctcaccaatttcaaatccgccctggaggagccgatggtggacctggacggcgagctgcctttcgtgcggcccctgccccacattgccgtgc

SEQ ID NO: 95004 - DNA, 100 bp, Homo sapiens
tgacggtggaggttcgcggctctaacggggctttctacaagacctgtcgcgaaatcgcctttcagaaattcctatagaagcatgtcactttgtttctctg

SEQ ID NO: 95005 - DNA, 101 bp, Homo sapiens
catcctactatgcttcctgagtgcttctttcttggagctgaccatggtaaccaaggagcagtgaacagcagctactacagtagtggaagccgtgcatctat

SEQ ID NO: 95006 - DNA, 95 bp, Homo sapiens
gtgagggaagagacaggaagatggtgcccagttattaccccattcaagttgacaactgaggcaacgcagactccagtctccaataagaaaccagt

SEQ ID NO: 95007 - DNA, 50 bp, Homo sapiens
gcggcgttggaggccaccgtttccaggttgtttacattcagagctctatc

SEQ ID NO: 95008 - DNA, 75 bp, Homo sapiens
cggagggacggcagtctcgcgcgatgcagaatcctgatacactatcagcaatgtcaaaccctagagcaatgcagg

SEQ ID NO: 95009 - DNA, 98 bp, Homo sapiens
ctctgcccgggttgcgtggatctccagtggaaaggcagttcaattaacctccagaagatggctgaacctgcaggaataccagagcaagaaactgatgt

SEQ ID NO: 95010 - DNA, 98 bp, Homo sapiens
tattaccagttactggtcacccggtctcaggtatggtcatttttctggaataaatcgtaaggttcagttgacctatctccctcatggttgtcctaaaa

SEQ ID NO: 95011 - DNA, 100 bp, Homo sapiens
atcagttacgagatgacaatctagaaacttattggcaatcagatggttcccagcctcatttagtgaacatccaattcagtttgcagacagtaggttgcat

SEQ ID NO: 95012 - DNA, 89 bp, Homo sapiens
ccctgaaaaagctaaggatatctttattgaagctcacctttgtctaaataagttctcgatgtgcggccacagtccagccggtacctccc

SEQ ID NO: 95013 - DNA, 49 bp, Homo sapiens
gccgtgtggcacgacacaaaaatcagatcctgtccattgatctccaccc

SEQ ID NO: 95014 - DNA, 83 bp, Homo sapiens
gtcctcatgtggggggtaaaccactcgacaatgcagatcttcgtgaagactctgactggtaagaccatcaccctcgaggttga

SEQ ID NO: 95015 - DNA, 97 bp, Homo sapiens
ctgctgcagggggacacgatagccaggctgccctgcctgtgcatctatcacaaaaggacagagcgggatgccaccagcttgtccaaagggaagttcc

SEQ ID NO: 95016 - DNA, 83 bp, Homo sapiens
aatgctgtcaggaactgtgaccaagcatttggccaagagacgaatgtccctttgaacaacttcagtgctgatcaggtaaccag

SEQ ID NO: 95017 - DNA, 101 bp, Homo sapiens
tgccgacaccctgacggccacgaacttccgagtgggtgaactggcacaaaggttaatctcaagatgccgctagtgaaaagaaacatcgatcctaggcactt

SEQ ID NO: 95018 - DNA, 83 bp, Homo sapiens
atgcggccgcgagaagcagcgggggggcaggcgatcgaagagcctggagaaagttcttgtggaattcagtcacaaggagttgt

SEQ ID NO: 95019 - DNA, 75 bp, Homo sapiens
ggaagccgggacgatgtccgcatgacaaccgacgttggagtttggaggtgcggctctatgagtggacaacagaga

SEQ ID NO: 95020 - DNA, 100 bp, Homo sapiens
tttgggacgtcctttttgcccttcctcctctgtgcggtgctgctcagtgcagttcaggaacagattatggcctttgcaagcaaatgagtactcctctcct

SEQ ID NO: 95021 - DNA, 102 bp, Homo sapiens
ccactttgggcaaaattcatcaagctatggatatgaaaaaaggcccccaagagttgatctctctaatgtattagatcttcatgcctttgatagtctctctgg

SEQ ID NO: 95022 - DNA, 75 bp, Homo sapiens
ggcacttcattggccacctacagaaacaaaatgtcaacaaattgatggaatatggacggagccttgaagatgaca

SEQ ID NO: 95023 - DNA, 100 bp, Homo sapiens
tccttccacgggccagatttcaagactctgacatgctggccgagacgcatccagagctttcgtgaccggggactgttctgaagcaggcctcgtggatgac

SEQ ID NO: 95024 - DNA, 98 bp, Homo sapiens
gaaaatctactgccatagttcacatacagctaagcatgatgcactctcctggctttgacgggaatagcagcctcagcttccagatgctgatgaacgca

SEQ ID NO: 95025 - DNA, 101 bp, Homo sapiens
tttagaagcggcacgagcaggtcaagatgatgaagttcgtattttgatggcaaatggagctccctttactacagactggattttccttggatcgccatact

SEQ ID NO: 95026 - DNA, 90 bp, Homo sapiens
tggtgccctcaacatctctcagagacgaaagatccatcacaaagcgaagtcatgggagagccacacttgatggtggaatataaacttggt

SEQ ID NO: 95027 - DNA, 90 bp, Homo sapiens
cggacccacggagccggcagcccagcactccgaggcggggtttcaccatgttgcccagactggtcttgaactcctgagcttaagcaatcc

SEQ ID NO: 95028 - DNA, 75 bp, Homo sapiens
gacccggcccgtagtgtggaagcagcttcaggaaagaccggcagagaccaatgccaatgtggacaactcggcgtc

SEQ ID NO: 95029 - DNA, 87 bp, Homo sapiens
gtgttgaatatgcatctaaagttgatgagaactttgactgtgtagagcaaagaatggctcaagaagtactgacacatttaaaggagc

SEQ ID NO: 95030 - DNA, 100 bp, Homo sapiens
aatggcacttcattggccacctacagaaacaaaatgtcaacaaattgatggttctttatagctccaagctctacagattcttcaaatatattgagaatag

SEQ ID NO: 95031 - DNA, 83 bp, Homo sapiens
ccgcagtatcatgctggccaagaagatcatcattaaggacggaggcacggtgtttgaggaactgtggaagagggaaggcaaga

SEQ ID NO: 95032 - DNA, 109 bp, Homo sapiens
tgagctgtgaggtcatcggaatcccgacacctgtcctcatctggaacaagatattctgcctccatggtggcctctctccatccatagacacactggatcatataagagc

SEQ ID NO: 95033 - DNA, 75 bp, Homo sapiens
tgggaaaaatggaccaacttctttggcaagtggacattttactggctcaagtggcagaaagagcactctattatt

SEQ ID NO: 95034 - DNA, 90 bp, Homo sapiens
ctggtgagcctcatcacacaggatccgcccctggacatggaggagaaggtccgcttcaagagctgaggacagggactggcggcaacagcg

SEQ ID NO: 95035 - DNA, 100 bp, Homo sapiens
ggggaatgcatgaaaggcgtgatcaccgtactatactggcaattgctggagaagattttgcaattgttgcttctgatactcgattgagtgaagggttttc

SEQ ID NO: 95036 - DNA, 75 bp, Homo sapiens
gcttcaggttatagatggagagacctataaaggagtcgaggatggccagaccgtgaggatgcctgtgggaaaaag

SEQ ID NO: 95037 - DNA, 100 bp, Homo sapiens
ccgagccccggccgcctgtccgtcgatgcaccgaaaaggaacgaatgcaggaatttgggaactgagctgtgcaagtgctgaagaaggagatttgtttgga

SEQ ID NO: 95038 - DNA, 75 bp, Homo sapiens
gagaagctgagcctttctggacagaccaacctgtcagtgctgcaaattgattttgtagcccatgatgatattcct

SEQ ID NO: 95039 - DNA, 74 bp, Homo sapiens
tatgagtcagatcatcctgtcagagattatttggaagctcggaagtgaaattctattttatcatcccaaaagca

SEQ ID NO: 95040 - DNA, 100 bp, Homo sapiens
ggaggaggccagctctacaggcgggtgataaaagaaaatgtggctgaagttacccgaagttcagcttgcagtgtaattcagaagagttaagaccagaagt

SEQ ID NO: 95041 - DNA, 73 bp, Homo sapiens
ctatgagcgggaccaccctgggcacagcaggcatcggaggtacatgtcccagagcaagcacacggaggcccgg

SEQ ID NO: 95042 - DNA, 100 bp, Homo sapiens
caacgttaacctaaggaacagtgactgggactcttcaattaatctgacatttcacaaatccaaaattgccgtggatgaactctttacttcacttcgggat

SEQ ID NO: 95043 - DNA, 82 bp, Homo sapiens
gcgaagcccagcaaccagagcccctccgcagcctcgtgccttacgtgaagtttagcaactgcaatggaaaaagaaaagtaca

SEQ ID NO: 95044 - DNA, 99 bp, Homo sapiens
gcagaggacgacatgttgcttttcgtggagggattaacatctgctcgtgcagctgagatcctggcgcgagatggtcccaacgccctcactccccctccc

SEQ ID NO: 95045 - DNA, 100 bp, Homo sapiens
ggaaatcggggagcttacccagcttaaagagctccacattcaggggaaccgcctcaccgttctgcccccagaactagtgagaactcaacagaggcaaaag

SEQ ID NO: 95046 - DNA, 75 bp, Homo sapiens
ccacgaccattatatgctggaatggttccttctcatgggcctcctgagtgacccagaattaggtccagcagcagc

SEQ ID NO: 95047 - DNA, 88 bp, Homo sapiens
caggaggaagccttttcaactggatagtgtcaattattccctgaatatcctatacacgataactttttagtaacagcatcttccagtg

SEQ ID NO: 95048 - DNA, 100 bp, Homo sapiens
tggaccttccggagcttctcagaagacagagggttttcttttgaggtgctggccgggatgaatgtctactcctctgaatttgaaaacatcaaggaggagt

SEQ ID NO: 95049 - DNA, 50 bp, Homo sapiens
taagcacttggaatcacgggttgaaggctggcaaaggaggaggtgagccg

SEQ ID NO: 95050 - DNA, 75 bp, Homo sapiens
tggggatctcttatccatggaatcagagggtgcattcaaaattagcctgaggcctgctcagtcgttcctaatgaa

SEQ ID NO: 95051 - DNA, 100 bp, Homo sapiens
tgcagggcggtaaggatttcaacatgcctctgacaatctctagtttgctgtctctgctggccttcatctgtgaagaagttgtatcacaatgtactttatg

SEQ ID NO: 95052 - DNA, 117 bp, Homo sapiens
gtgtgtcggtcgcctagtctggagaactagtcctcgactcacggcagaagatgatgaaacacccgtggatttaaacaaacacctgtatcaaatagaaaaaccttgcaaagaagccat

SEQ ID NO: 95053 - DNA, 75 bp, Homo sapiens
tcgggatttacgtggagatcaagcgcagcgatgtaagactttgaccccgacgcaggcttcagtgattgccgcgga

SEQ ID NO: 95054 - DNA, 83 bp, Homo sapiens
gtgggagcggagagcgcaggcgtgtggtgaccatcatcaaggggaaggtggaggaggtggagctcccagtggagaaggtggac

SEQ ID NO: 95055 - DNA, 100 bp, Homo sapiens
tctgtctttgtgtcctgagatcaaatggcacttcattggccacctacagaaacaaaatgtcaacaaattgatgggtaggcgaaaaccaagagtacatcgg

SEQ ID NO: 95056 - DNA, 100 bp, Homo sapiens
gaattctgggcttccacacaactccagtgctaactcaacaggactgagcagggggaggaacatttaagctgatggaagtggaagtggaagttgctgtaca

SEQ ID NO: 95057 - DNA, 50 bp, Homo sapiens
atttcaccacaagaagggctgccaggatctgaagaagctgaagaaaaaca

SEQ ID NO: 95058 - DNA, 83 bp, Homo sapiens
cagctacccaagctccaggagcttccggttctcccagcagagatgtgggtccttccctgggtctgaagaagtcaagctcgttg

SEQ ID NO: 95059 - DNA, 50 bp, Homo sapiens
cacctccaaatactggtcccacggcgcatattaaatttcctattgactac

SEQ ID NO: 95060 - DNA, 50 bp, Homo sapiens
gctgaggcgggtggatcacgaggctggaccagatgatatcagaaactttg

SEQ ID NO: 95061 - DNA, 74 bp, Homo sapiens
aacagattcctctgtggaagccagggagaagaggagcaccaaggatgacattgatcttgatgccttggctgcag

SEQ ID NO: 95062 - DNA, 90 bp, Homo sapiens
aatctcccaaaatattctagaaggggaaaagctacttcaaggctgaccccgcactacatctacccaccagccatcgtgcagcccagcgtg

SEQ ID NO: 95063 - DNA, 101 bp, Homo sapiens
tggttttgcaggaaatgtgaatctcaggagagagcagccagagtggcagcctgcttctgcaaagtggtacgatcgaagggactatgtcttcattgaatttt

SEQ ID NO: 95064 - DNA, 83 bp, Homo sapiens
cgcagggcctgcagcgggagctggacggcgagcgcgagcggcgcgagaaacatcaagatggtgctcatgtggaccagtggtga

SEQ ID NO: 95065 - DNA, 100 bp, Homo sapiens
ggaaatgtcattatttgggacactaacagccggagaattttcatccttgggccttctcatcatgtgcccctctctcgatgtgcactttccagtgtggata

SEQ ID NO: 95066 - DNA, 50 bp, Homo sapiens
taagaagtacaatagcattcgcggtgacttaagagattaaaattaatttg

SEQ ID NO: 95067 - DNA, 100 bp, Homo sapiens
ctgggagagaggtacctctccttttccctctccctttccctaagaaaccaggcgatgcggaagaagctaatcttgtacttcaagaggaggaatcacgctc

SEQ ID NO: 95068 - DNA, 100 bp, Homo sapiens
tgcacttggtgcagcgctacctggctgacggcaggctgtaccatcgccactgcttccgctacatcatggagaaagcagatcttgtcatagttggtgctga

SEQ ID NO: 95069 - DNA, 75 bp, Homo sapiens
aaatcaaacaacttggaaatcgatcacaaccaggcattaagttcacagacatgaccgataatagcaacaatcaac

SEQ ID NO: 95070 - DNA, 75 bp, Homo sapiens
catggcctgccactgcgtgctttggtgccctggttgtcagatgttggaaagcagtaggacggaacatactcttcg

SEQ ID NO: 95071 - DNA, 82 bp, Homo sapiens
gcgcaggacagcgccttcctcaacgacgcggacatggtcatgagctttgtgaacctgggtagatgacattaatgctgataag

SEQ ID NO: 95072 - DNA, 96 bp, Homo sapiens
ggagattatgttgacagaggatattattcagttgaaacagttacactgcttgtagctcttaagtactatactggcaattgctggagaagattttgc

SEQ ID NO: 95073 - DNA, 101 bp, Homo sapiens
ttcaggaccaaaattgtggaaaagtcactctgagaatggatcttggagaatgtctgaaagtccatgacctggctttaagagcggattatgaaattgcatcc

SEQ ID NO: 95074 - DNA, 98 bp, Homo sapiens
gtttgattgtcctgaggatgccaacacatatattcacagagcaggtagaactgccagaataaaggttctcttcagtttgaagacaaatgggattttat

SEQ ID NO: 95075 - DNA, 80 bp, Homo sapiens
aatgcgctcgggctggaccagcaggagaactacgatgacccgcacaaaacccctgcctccccagttgtccacatcagggg

SEQ ID NO: 95076 - DNA, 100 bp, Homo sapiens
cgccgcagcccgggcccaggccccggcagcgcctgggacaagcttccttcaaaatgtctactgttcacgaaatcctgtgcaagctcagcttggagggtga

SEQ ID NO: 95077 - DNA, 100 bp, Homo sapiens
cggcctcaggacatcaaggagcgccgagcagtcatcatcctcaggaactatggtgcacctggcgtggagttcacaggcctgcaccgggatgcagccactg

SEQ ID NO: 95078 - DNA, 96 bp, Homo sapiens
cagaagggacgtgagcccagccgaggtaccgctgaagaggaatcaattttggatgattatttcagaaactggaatcccaacaagccctttgaccaa

SEQ ID NO: 95079 - DNA, 83 bp, Homo sapiens
gcagaagatctgggtgcccgtggaccacaggccctcgttgcccagatgaggaacccctctcccagatcactgcctactgcaat

SEQ ID NO: 95080 - DNA, 75 bp, Homo sapiens
cgggaaaggagaggatcccggagccggtgaatcacaagcctttgagaacagcctgagccttcagccctcacagat

SEQ ID NO: 95081 - DNA, 100 bp, Homo sapiens
ctctcagtggtcctacctggggatattatcaaatctactactgttcatggcagtattggtaaaggttttcaaggtgtcatgaaaagatggggatttaaag

SEQ ID NO: 95082 - DNA, 83 bp, Homo sapiens
cgtgccgcgagcgcggcctgcaggaggtgaaaccagcccagagaagttacgggatttgcccccggggctcctgcccagcaagc

SEQ ID NO: 95083 - DNA, 90 bp, Homo sapiens
ccgcgccgcgcctcagctctggttgcagattttaaagatgcccttgccagagtatatggagtgatacccaaaatccagtgccttccacca

SEQ ID NO: 95084 - DNA, 100 bp, Homo sapiens
caatgtcagtgtttacactgtcaaggatgacaaggaaagtgtccctatctctgataccatcatcccagcatccttcccactgctttcatgggcacggcaa

SEQ ID NO: 95085 - DNA, 100 bp, Homo sapiens
ccggagccgcctgggatgttcagacgctgtgcagagctgcaagtccgtatcactgaggctgtggccacagccactgagcagagagagctgatcgcccgcc

SEQ ID NO: 95086 - DNA, 75 bp, Homo sapiens
cgccgaggcatcagagccgctgcgacggtgacgccagacaatgcagatcttcgtgaagactctgactggtaagac

SEQ ID NO: 95087 - DNA, 100 bp, Homo sapiens
aaatacccctttgaattaattatggctgagctgggatggtggtggactgggagcaggagaccggcctcctcatgagctcaggagacgtgcggatcgtccg

SEQ ID NO: 95088 - DNA, 98 bp, Homo sapiens
tgcccgggagcggaaggtgcctgtgacgaggattggccggctggccaacttcggagaggcagaagaggcctggaccttggcgcacacagacccaggaa

SEQ ID NO: 95089 - DNA, 96 bp, Homo sapiens
ttttgtatctcgacactctgcaagattctctcctgaagtcccagcactattcctgatcagagaactccagttgcttcaacacacagtatcagtagt

SEQ ID NO: 95090 - DNA, 100 bp, Homo sapiens
ctatattctcattttttgctgagcagaggatgccagcccccatcagattgcgggagctgatccggaccatccggacagcccgaacccaagctgaagaacg

SEQ ID NO: 95091 - DNA, 74 bp, Homo sapiens
caacgccgcttcggggctcctagtggcatccagcagctggagggtctgtcagccatggaggtggaagtcaggtg

SEQ ID NO: 95092 - DNA, 95 bp, Homo sapiens
atcgtgcacatccaggctggtcagtgtggcaaccagatcggtgccaaggtttgttgataagccggggcccttcgtgggaccctgcggtcactgga

SEQ ID NO: 95093 - DNA, 74 bp, Homo sapiens
gttaaaccatgttaaggaggattttacagaggaggacaagaattttgggcagatttgaatgccatgaacgtgta

SEQ ID NO: 95094 - DNA, 100 bp, Homo sapiens
tgaagattcatacgcagctggcagatattatcatagttgctgcagagagagatcatcattgcctgaatttagctttgtgactgcaagagcaagaccagtt

SEQ ID NO: 95095 - DNA, 74 bp, Homo sapiens
ggggagatgctcttcggcctagtgcgccagggcctcaagtgcgatggcgcagacggggaagcggagccaacatg

SEQ ID NO: 95096 - DNA, 50 bp, Homo sapiens
aggagatcaagaaggagaccggctgactaatggctgaaggataaatcaac

SEQ ID NO: 95097 - DNA, 74 bp, Homo sapiens
tagctctgctaattgggccaaatgctcctttaatttttgaacgagctggttatattctgggcactaaatgaagg

SEQ ID NO: 95098 - DNA, 51 bp, Homo sapiens
aaatacctggatgaggaagatgaagaggcctgatcttttggccagaaggag

SEQ ID NO: 95099 - DNA, 75 bp, Homo sapiens
aatgaatgagatcaagaaagagaatggagaagtaaagattttgctgaaaagtaatttcatctgtgccaaagcctc

SEQ ID NO: 95100 - DNA, 82 bp, Homo sapiens
agctgttttgcaccttcatagtatgaaaaggattgaactggatgacaggtatattgagatcttcagaagtagcaggagtgaa

SEQ ID NO: 95101 - DNA, 100 bp, Homo sapiens
aaaagagcaggtggaaaaggaaaggactttttttatgaagacatggagtccttgacgcagatgcttagggccttggcaacagatggaaataaacaccggg

SEQ ID NO: 95102 - DNA, 116 bp, Homo sapiens
caagaaacacaaaaagaatgcggcaagagttgctttgttagaacaactggggacaaccctggatatgggggaactgagagatctaaatcggaaggtagcacacagacatatgccag

SEQ ID NO: 95103 - DNA, 71 bp, Homo sapiens
aagcaggaaaagcagacggcacggtgttacagcacatgaaggccgtgcaggcagatcaggagcgggagagg

SEQ ID NO: 95104 - DNA, 119 bp, Homo sapiens
gaagaccgcgcgcagggcctgcagcgggagctggacggcgagcgcgagcggcgcgagaaatgcccttcactctctgaagaacagccatgcctgaatcagagtctgcagacagcctggtg

SEQ ID NO: 95105 - DNA, 74 bp, Homo sapiens
tgtggtcaataacccagatttgttgatgttttgtgaccaagatacgtgcttttcaacatgccttcagcactaat

SEQ ID NO: 95106 - DNA, 89 bp, Homo sapiens
gcccaccatgagccatggccatgtccgtgagcgccgaggacgacgactatgaatcggagccggaccagattttaacctttgagaccaag

SEQ ID NO: 95107 - DNA, 90 bp, Homo sapiens
ctgttcctacaccttgcatcatgccagctttgtcaacgggatctgggagtgacactgagagaggatgcaagccatggagaaacagattgc

SEQ ID NO: 95108 - DNA, 75 bp, Homo sapiens
aggacatctgggggccacaaatgctccttctcctggagacgcaactcaaggtctacttccccagcaggacagcat

SEQ ID NO: 95109 - DNA, 83 bp, Homo sapiens
agttcacactgatggtggtcggtggtaaagactatcggcctccgggaagtgtggtactttggcctccactatgtggataataa

SEQ ID NO: 95110 - DNA, 100 bp, Homo sapiens
gccctcagcatctcccttcatgtctgggtcatggacgtgagcctgcacttcgtgctctggggctgcctgcacgtgtaccagcgcatgatcgacaaggcgg

SEQ ID NO: 95111 - DNA, 100 bp, Homo sapiens
ggaacctcttccagttggaattgaagaatattcccaagtccttcacccggatcatggaagggaagtggttgctgtgtatgttactggtgcttggaactgc

SEQ ID NO: 95112 - DNA, 99 bp, Homo sapiens
ggcagtggcgcttgagttggtcgggggcagcggcagcatgcttttcacttccactgcatctctcgctggctcaaaacacgacaggtgtgtccattggac

SEQ ID NO: 95113 - DNA, 100 bp, Homo sapiens
ccgcggcccccagcagagcccgcctgcccggctgaggtgatttcctcacctttctgagaaggaagaaggatgaactaaaactcaaacagttagtgaaatt

SEQ ID NO: 95114 - DNA, 82 bp, Homo sapiens
ttgtttgtggatcgctgtgatcgtcacttggaagcggggagaggtggtgagagatgacccctgttgaggatttcattggtgt

SEQ ID NO: 95115 - DNA, 74 bp, Homo sapiens
ccagtggcttccagatgtaaccaggtatctgtaattcttgcccaccaaacaagcctgcagaatctgttcagtca

SEQ ID NO: 95116 - DNA, 100 bp, Homo sapiens
catgatcctcatcttttatacactcttagtgctgtccaggtttatgaaggcgagcgtgccatgacaaaggataacaacctgcttggcaagtttgaactca

SEQ ID NO: 95117 - DNA, 80 bp, Homo sapiens
cgcgccgctgcccgcgccacagggttctccaaaaaatgtggaatcctttgcatctatgctgagacattctcctcttacac

SEQ ID NO: 95118 - DNA, 50 bp, Homo sapiens
aggctctcccaagggacagactgatacattaattgtttggtcagaagcag

SEQ ID NO: 95119 - DNA, 95 bp, Homo sapiens
cccagtgattcagaaccctgagtacaaggctttatcctgtggataaacgcagagtgaacgagtttggggagtcctacgaggagaaggccacgcgg

SEQ ID NO: 95120 - DNA, 98 bp, Homo sapiens
gctgtggaagatgctcccagctacagagggtaccgggatgcctgcaccattactggtctgtgactcttatcctactgaactgtacgttcccaaatcgg

SEQ ID NO: 95121 - DNA, 73 bp, Homo sapiens
ccttgctacggcacattgtgaaggagttcaagagagagtcccttaagctcctaggatttttagatgttgaaaa

SEQ ID NO: 95122 - DNA, 96 bp, Homo sapiens
cgagaggccgtgcgggacgcgggcgccaggaccggccgaacgcagaggttctgaagaaagtctccaaatacattcaagagcagaatgagaagatct

SEQ ID NO: 95123 - DNA, 96 bp, Homo sapiens
gcgagggagcgatgcggtgcagcgcggaggactggaatgaaattgaccccattaaaaagaaagaccttcatcacagcaatggagaagagaaagcac

SEQ ID NO: 95124 - DNA, 97 bp, Homo sapiens
aagtcccttcatcctttcattggttggtggacaggcagctggctaagagtcttgggcaggctggtgaaattgagcctgaaacagaaggaatactaac

SEQ ID NO: 95125 - DNA, 100 bp, Homo sapiens
tccaaactgatctaacagggcaaaaaaagggctggaaacttcgctatcatggagatcgccctggccaacgtcaacattgggagcctcatctgcaatgtag

SEQ ID NO: 95126 - DNA, 101 bp, Homo sapiens
cggagagatgctgggcgtggcggccgggatgacccacaggtcgtccttggtggaaggaaccatgaactggcatctccccctcttcctcttggcctctgtga

SEQ ID NO: 95127 - DNA, 82 bp, Homo sapiens
gacgtccctcaaaccttgcttctaggagataaaaagaaagtttcctacactactgaggtttaggggcactgtgaagcaaaag

SEQ ID NO: 95128 - DNA, 100 bp, Homo sapiens
tagcaaaaataaagacccaataacgattgttgatcttcccaagctcttccttcagtcccacgactacagtctgtattccttggatgtggaattcatcaat

SEQ ID NO: 95129 - DNA, 100 bp, Homo sapiens
gaggaggaaggttttggaacagactcccgtttacaggtccttggctggaagaggctggataaaatactgcattgtatgatctcgtgaaatcttgagagaa

SEQ ID NO: 95130 - DNA, 85 bp, Homo sapiens
gctgccccaatccccggcagctctctcagagcgatcgtcttctgatcaaaggaggtaaaattgttaatgatgaccagtcgttcta

SEQ ID NO: 95131 - DNA, 100 bp, Homo sapiens
gaggctgccatggacgacgaggaggagacgtaccggctctggaaaatccgcaagaccatcatgcagagacgggatttcaccgtgttagccaggatggtct

SEQ ID NO: 95132 - DNA, 76 bp, Homo sapiens
cggctatgtcgatcgaaatcgaatcttcggacttctcagatgaccaagatggtgctgcagatggtgctgaggatgg

SEQ ID NO: 95133 - DNA, 99 bp, Homo sapiens
gttgaggctgcggtcatggagggagcaggagctggatccggcttccggaaggattggctaaaagatgtgtgtgaaaagaataagtggagtcacaagaat

SEQ ID NO: 95134 - DNA, 90 bp, Homo sapiens
ccccggaccagaagtcgccgaacgttctgctgcagaacctgtgctgcaggatcctgggcaggagcgaagttgctctaggtcgtaaccagc

SEQ ID NO: 95135 - DNA, 49 bp, Homo sapiens
gcaatatttcgagcagtttggcaagggggggctgtcggggggctgttag

SEQ ID NO: 95136 - DNA, 83 bp, Homo sapiens
agtatcagcatttaataacaaatagctttgtagagaacctatctacaagacctcttgtgctttgactattcatgctattggac

SEQ ID NO: 95137 - DNA, 75 bp, Homo sapiens
catgctggccaagaagatcatcattaaggacggaggcacgatctgacagacatccctgaatcttggtgtttggac

SEQ ID NO: 95138 - DNA, 100 bp, Homo sapiens
ggcctctctcctgatacagcaggcgctcaccatgttccctggagagcccaaggtggtgtttgctaaggagcagctggcacgcaggaagctgcaggcagag

SEQ ID NO: 95139 - DNA, 100 bp, Homo sapiens
aactcttggcatttggctttgcctttctggacacagaagtatttgtgacagtctgagggaaaaggccataccaatgctggagatgcaatatatgaggtgg

SEQ ID NO: 95140 - DNA, 99 bp, Homo sapiens
tgaagatcccaggtgggcgagggaatagtcagagggatcacaatctttcagctaacttattctactccaaaataccagagcagagtgttcttcttctgc

SEQ ID NO: 95141 - DNA, 96 bp, Homo sapiens
cgccgccgccgccgctgccaccgcctctgatccaagccacctcccgccaggctctgtgtgctccgggatggagcaggtgtgcagagggtgagaacc

SEQ ID NO: 95142 - DNA, 101 bp, Homo sapiens
gccaaatggtttagcaccgaatggagcatgacatcacagcgattttcgtcagttgatgaacaagcaaaacttcataagactatgtctcaaggagagattac

SEQ ID NO: 95143 - DNA, 100 bp, Homo sapiens
agattgctgtaaatgagaactttcaattgaaacaagaggctctcccagaaaagagctgtgctgttagcaacttgaagaaagtttcccttgagcttggtgg

SEQ ID NO: 95144 - DNA, 101 bp, Homo sapiens
gggcttcctggcccgaaaggagagcctttctttatagctccaagctctacagattcttcaaatatattgagaatagggatgttgcaaaaacagtgttaaag

SEQ ID NO: 95145 - DNA, 100 bp, Homo sapiens
atcattgttttccactccttgcttactgggtcctacgccaacagatatgggaggaatatcgataacttgatgaccccagaaggagttggccttaccactg

SEQ ID NO: 95146 - DNA, 75 bp, Homo sapiens
actgcttgatcgaaatcgtccacagtgacctcttcacacagcatgcattgtcttcagtgttaagaaatgtggact

SEQ ID NO: 95147 - DNA, 77 bp, Homo sapiens
gtcatttggggagttttgccattacgagggttcttgggaatagcaggaatggagatgcagcagcttcactgactgtg

SEQ ID NO: 95148 - DNA, 99 bp, Homo sapiens
agctctcgaggctgctaagagactaagtcctgcaaccctggttccagtctggcaagcattgtagacctggctgctgaagactgacggggcccagggtcc

SEQ ID NO: 95149 - DNA, 98 bp, Homo sapiens
ggatcgccgcgctcagcgacaaacaaggtgaggtggctttgaccccgggttgcccggccagcacgaccgaggaggtggctggacagctggaggatgaa

SEQ ID NO: 95150 - DNA, 100 bp, Homo sapiens
ggaggcggcgggacagagcgcctgcgaccccagtcggtgctccggggaggtcacctgacgaggaggatttaagaggggtgcagatcccggaatgcctgaa

SEQ ID NO: 95151 - DNA, 108 bp, Homo sapiens
ggctcggacgccagcggacacgcgggcgagccgcttacaaacacgcagatggcaagaagattgatggcaggagggtccttgtggacgtggagaggggccgaaccgtga

SEQ ID NO: 95152 - DNA, 74 bp, Homo sapiens
ctcaggggctgaagtttgtgaggttcgagaaatggctgctactaccttaagcggtctgctacagtgtaactttc

SEQ ID NO: 95153 - DNA, 74 bp, Homo sapiens
gattccagccccgagcgggacagcgcggcggggagcgacgagttgtagatgagcatgagagtgtggagcagagt

SEQ ID NO: 95154 - DNA, 75 bp, Homo sapiens
ctcatggatgttcttcttcgagtatttgtagaaggaacctcaagaaggcatgaagccagcccctgcagtgccgtc

SEQ ID NO: 95155 - DNA, 100 bp, Homo sapiens
acaagctaagggatccagcagtccaaagcctcttacagcctggggagtgcgagagaaacccagccgaagcatttaaaagcaagtaactggcagaagtttt

SEQ ID NO: 95156 - DNA, 100 bp, Homo sapiens
ggaggcttcattttagaagaggaagaagaagaagaacagaaaattggaaaagttgttcatcaaccagggatttcagtcataatcggttgtctaactggaa

SEQ ID NO: 95157 - DNA, 79 bp, Homo sapiens
ccatgctgctgaaagagtaccggatctgcatgccgctcaccgtagacgaggacctgcaagcgcaggaccgagcccaccg

SEQ ID NO: 95158 - DNA, 100 bp, Homo sapiens
ggaaattgttggattgccagaagaagaagaaatcccagcaaataggaaaattaagtttagtagtgctcctattaagggatttcccagatgacccaggcat

SEQ ID NO: 95159 - DNA, 95 bp, Homo sapiens
tcgcaggctccctgcctactcccccaccggggatttcagacaatgcagatcttcgtgaagactctgactggtaagaccatcaccctcgaggttga

SEQ ID NO: 95160 - DNA, 76 bp, Homo sapiens
gcgcggtcccagcccggccactgcggatccctgaaaccaagcgagaaccactgtctctgatcaacgtgcggaagag

SEQ ID NO: 95161 - DNA, 100 bp, Homo sapiens
ggagaggctgagctgctccaggacttggggccctagcaacagaccacctatcagagccgaaggcagaaacttccccttgccacttccaaacaaacctcgg

SEQ ID NO: 95162 - DNA, 82 bp, Homo sapiens
tgtggagcccgaggagatgctggatgttaaaatggaggacatcaagaaaagagtctccatggtgcccagctcgtctcgaact

SEQ ID NO: 95163 - DNA, 82 bp, Homo sapiens
gctgggcttcgtccagatcgggaagggagccttcacgtaaatgggtccagtcatgcctcccagtaagaagccagaaagctca

SEQ ID NO: 95164 - DNA, 100 bp, Homo sapiens
cctgactctgggagcacgcaggagaagaaatgggtgaccgttggtgacacatccctacgaatctacaaatgggtccctgtgacggagcccaaggttgatg

SEQ ID NO: 95165 - DNA, 75 bp, Homo sapiens
gatatgttaaacagaagatacctttgtatggagagtcggcttgactacactgtgtggagcaagttttaaagaagc

SEQ ID NO: 95166 - DNA, 100 bp, Homo sapiens
ccaacgggccaggtaggatttccgggagaggctgctgtggaggctgaggaggcggcggcggagatctggtttgtgaagcctggagctgagaattcaagag

SEQ ID NO: 95167 - DNA, 89 bp, Homo sapiens
gccccctacccgcttctcgtagtcctgggagcacagcagaagtgttgtgggcccacctggtacaggcaaaacagatgtggcagttcaga

SEQ ID NO: 95168 - DNA, 82 bp, Homo sapiens
tgaagaggaggatccacctggagctgaggaaccggaccccggcagctatatggctcgtggacagcagaaaattcagtctcag

SEQ ID NO: 95169 - DNA, 101 bp, Homo sapiens
gggtattctcacagctctgcggcccaggcccaagctcttcacagatggaatcacaaataaacttattggctgttacgtgggaaacaccatggaggatgtag

SEQ ID NO: 95170 - DNA, 75 bp, Homo sapiens
gaagataaacgaggggctggaacacctcgccaaagcagagaaatagttcgccaagcagcttttcagtctctggga

SEQ ID NO: 95171 - DNA, 74 bp, Homo sapiens
gtctccatccagatcagctgaatcagagtttgcattgttaacaaggtaggagcattgcttttcgtggtgaaaga

SEQ ID NO: 95172 - DNA, 100 bp, Homo sapiens
cggtttacagcgaagtccacccagcgtttccgaggtgaaggcgccgcgccaggccgggcgggcgaatgaagactattctcagcaatcagactgtcgacat

SEQ ID NO: 95173 - DNA, 98 bp, Homo sapiens
cagaggaggtgtcttctatggttctgacaaagatgaaggaaattgcagaagcctaccttgggaagtctgtagatggacggcagatccgagtagaccag

SEQ ID NO: 95174 - DNA, 100 bp, Homo sapiens
catcagaagaaattcaacagagagctcaccagattactgatgaggcatagaatgtcaagctaaccaggcgtccgctacttcagaagagtgtactgtcgca

SEQ ID NO: 95175 - DNA, 83 bp, Homo sapiens
acaagacaggcaggattcttgcttgccattattcctgcagctgcgctagacttatttgattacatgcttgccttggatcctag

SEQ ID NO: 95176 - DNA, 97 bp, Homo sapiens
gaccagagatggacggtcactcagcctatggagttggagaacatcaattaacaggccataaagtggcagttaaaatcttaaatagacagaagattcg

SEQ ID NO: 95177 - DNA, 98 bp, Homo sapiens
ctttaaaggagtttggggtttcgggagcagggaaatcacggtgacatattcgatgccatgttccctgtcactcacatcgctggggagactgttataca

SEQ ID NO: 95178 - DNA, 100 bp, Homo sapiens
catgacagcaggagcgatggccgggatcctggagcactcggtcatgtacccggtggactcggtgaaggccagagatcctcagcaggagcctatggaagag

SEQ ID NO: 95179 - DNA, 75 bp, Homo sapiens
gcgcctgcgacctgcccgcctggacctgcctagagctggaacgttacctccagagcgagccctgctatgtttcag

SEQ ID NO: 95180 - DNA, 74 bp, Homo sapiens
ctccgcctgccttctgccgccggccggcgcgtcgtccccacaggccatgttttatggatgagtatgagaagact

SEQ ID NO: 95181 - DNA, 75 bp, Homo sapiens
tgaagaacagtgtcatggagctgattgcaaatgtggttatcactaggctaaaactggacaaagaccgcaaaaaga

SEQ ID NO: 95182 - DNA, 50 bp, Homo sapiens
ccgaaggttcaattatgtggtcaaagtacggaatggccacatcaaaagaa

SEQ ID NO: 95183 - DNA, 97 bp, Homo sapiens
ctgggaggccggccggtgccagcacctttcggcttctgagacggcggcagcagcggcattcagtctctgctggatgaaccgaatcctaacagtccag

SEQ ID NO: 95184 - DNA, 101 bp, Homo sapiens
ggaagatcgcgatcctgggctaccggtctgtggtccagttacaacacagggatcacaacaaacacaaccgccacagaagcactatggcattacttctccta

SEQ ID NO: 95185 - DNA, 90 bp, Homo sapiens
ccttgtgacagaatatgccaaaaatggagaaatttttgactaaatgtgttaaatgggcttgccaacaatatggatgatttgaagataaac

SEQ ID NO: 95186 - DNA, 82 bp, Homo sapiens
agactagaagccttattcactaaaattcaggaggaatttgaagaacatgaagatttagatgtagatgtagatcaacccaaag

SEQ ID NO: 95187 - DNA, 75 bp, Homo sapiens
aggacactatgcaatcacccgaaaggagtggattagaacaagatgacatgagaattttatacaaataccttacca

SEQ ID NO: 95188 - DNA, 82 bp, Homo sapiens
tgaagaatttctcaaaaccagggctccaggggaccatcagttttataagcaggatagtggctacccagagacgctggtcaac

SEQ ID NO: 95189 - DNA, 152 bp, Homo sapiens
aggacacccccgtgccccgaagacataaatccctgagtgcccgggaggagccttaacaagcgcacggagccctcaagaaccaattcaggcattggaaaccctaattgttgatctcgtgagctgcgggaaggagcactccctggctgtgtgcc

SEQ ID NO: 95190 - DNA, 100 bp, Homo sapiens
ccagtcacggcggccctcgtcctggcggcaggagaagatcacccggaccaaggaggaggccctggagctgatcaacggggacggcaaaacagaacagaaa

SEQ ID NO: 95191 - DNA, 74 bp, Homo sapiens
agacacggtggctactctgcctcggggacgaaagcaggttgattcacaaaaggctgcaacaaagcaagtcaaca

SEQ ID NO: 95192 - DNA, 83 bp, Homo sapiens
aggaagcacagctgtggtcagaagcatttgacgagctgctagccagcaaatatgttgaaagtgtgatgaacagtgtggtatcc

SEQ ID NO: 95193 - DNA, 120 bp, Homo sapiens
gtgtcctggttctccatcattgtcaccctggccctcgcggtggctgcctttaggacaggagagagtggcaagagtacgtttatcaagcagatgagaatcatccatgggtcaggatactct

SEQ ID NO: 95194 - DNA, 100 bp, Homo sapiens
actccagagaagccgatccccatttttattgaaagatgtattgagtacattgaagccacagattggattatggaagtgggaagtgaagaagaaaaatggg

SEQ ID NO: 95195 - DNA, 113 bp, Homo sapiens
tctacctgaccatcatcctgctcctgggtgccgtggcatgtcgatttgtccttcactacaggcgccaagcccatctttgtgtgcttgcatccaactgtgatgagcctatgtat

SEQ ID NO: 95196 - DNA, 73 bp, Homo sapiens
ggagacaccctctgggggtcctctctgagtcaaatccagtgggcggcgactggcggcgcgatggacctgaccg

SEQ ID NO: 95197 - DNA, 75 bp, Homo sapiens
cccggggctaatgttgacaacaggctcgagagatggaatttcaccgtgttgcctaggctggtctggagctcttga

SEQ ID NO: 95198 - DNA, 98 bp, Homo sapiens
aagcggacacgggaatatatccgaagcctgaagatggttccaagtattccctatctagggagttgaccacatttggccatttcccagaagggccccac

SEQ ID NO: 95199 - DNA, 100 bp, Homo sapiens
ccaccacagttactttatcccttcatctgtggatgggcagaattttccagttcatatgaagaggtgatctctcaaataaatacgtcattacctgctcccc

SEQ ID NO: 95200 - DNA, 80 bp, Homo sapiens
ggcgggagaacggaaaactcccaacttcctgtttgaacgccatgaccctgtggatgggagaattactgagaggcagtttg

SEQ ID NO: 95201 - DNA, 100 bp, Homo sapiens
agaagtgatcgctcagctggagaacgcggctaaagttctgatgcaccttgcagagtgaagtcaagcccatcctagagaagctgacccaggaccaggatgt

SEQ ID NO: 95202 - DNA, 119 bp, Homo sapiens
cgccatgtccacgttcaggcaggaggacgtggaggaccattatgagatgggggaggagctgggcaggtagctcgtaagctggtcatcctggagggtgagctggagagggcagaggagcg

SEQ ID NO: 95203 - DNA, 100 bp, Homo sapiens
tgaaaagggccaaccagatgaggagctcaagcccaagaagaaagtcttcgagaagttgcagattccttgacaaggatatcctagcggcgaaacaacaccg

SEQ ID NO: 95204 - DNA, 100 bp, Homo sapiens
cagcggacttctggagttagcctttgcttttggaggactgaatttgttgttcgtggatagaattatttatattattactgtaatggttgattgcattgac

SEQ ID NO: 95205 - DNA, 83 bp, Homo sapiens
cctggccgctgtgtggcactggcgcaggggacgtcggtgggcgcaggacgagcaaggtgagaagccctaccactgcaactggg

SEQ ID NO: 95206 - DNA, 83 bp, Homo sapiens
cgtggaggagctgtgcagccgcgaggaggcgcgggaggtgttcgagaacgaccccgagacgttcctccgtgtcacaaagcagt

SEQ ID NO: 95207 - DNA, 50 bp, Homo sapiens
aggaccagtacctgcccaggaaactgagcagcagaggtgagaactcagaa

SEQ ID NO: 95208 - DNA, 87 bp, Homo sapiens
tgctggccaagctgcaaagctgggagagactggaccagaccatgggcctgagcatcaggttgtcttcaaccaccttactcctccacc

SEQ ID NO: 95209 - DNA, 100 bp, Homo sapiens
cagcaacctgaatctcaaacctggagagtgccttcgagtgcgaggcgaggtggctcctgacgctaagagatgaagtggaaagggaaggacctctttgatt

SEQ ID NO: 95210 - DNA, 96 bp, Homo sapiens
gctgtgggtgctgggacttcccgtccgcggcgtggagggatttttagactctgaggagcagttggagctaatccacattatggaaatggaaaccac

SEQ ID NO: 95211 - DNA, 74 bp, Homo sapiens
taatgaatccaaaatccttcatttacagaatgaggaaaatggggagcaggaggctgacaatgaggtagacgaag

SEQ ID NO: 95212 - DNA, 83 bp, Homo sapiens
attggatttaaaagacagtcctcgtcagcactgactttcagctatggaatcggtgagccgttctccaaccctttggcccccga

SEQ ID NO: 95213 - DNA, 100 bp, Homo sapiens
ccggaagatcggcagcggctccttcggagacatctatctcgatccggaagaccacggccagccaggtgtacgagacattgctcacctacagtgacgtcgt

SEQ ID NO: 95214 - DNA, 87 bp, Homo sapiens
gtcgccgccgcctcgggaccggctgtatgattaggccacaatcttcaatgagtaaacatattccttcaaaccggcacgatgtccagg

SEQ ID NO: 95215 - DNA, 89 bp, Homo sapiens
cgcaaccccagatccatttacactttacacaaaatgatgcttcaacacccaggccaggtctctgcctcggaagtgagtgcttctgccat

SEQ ID NO: 95216 - DNA, 100 bp, Homo sapiens
aagatatgacacttacaaggtggacaggcatgattattgggccaccaaggagttcgcagtatgtgcagtgcgtggccgggtgtttgcagctgatgctccg

SEQ ID NO: 95217 - DNA, 75 bp, Homo sapiens
ggagtttaatgagaggaatatactcatcatcagtctatttagaagagtgtcactactccatccagaagggagctg

SEQ ID NO: 95218 - DNA, 131 bp, Homo sapiens
taaagcagtggtgaatgccgcaattccagcctatcacctaagagaccttatcaaaagtctttcatgaatgtagaatggaattttccagaggctacatcacgtgcaacactgtgccagaccaaaagcagaag

SEQ ID NO: 95219 - DNA, 49 bp, Homo sapiens
tggtgctgctgctgtagctgctcctggccaggcagcagcgttcaacgtg

SEQ ID NO: 95220 - DNA, 82 bp, Homo sapiens
gaaggtggcggcggcagcagcggcagcggctatgccgctcctacgaggactgctgtggctccaggtgctgtgtgcgggccct

SEQ ID NO: 95221 - DNA, 89 bp, Homo sapiens
acactgggaaacatcattaaatcctctggtagctgaagaacatctcacagtggacgccagggtctattcctacgctctagcactgaaac

SEQ ID NO: 95222 - DNA, 50 bp, Homo sapiens
ccgggctgccccgcaggatcatcaagtctgaaaacttagagaatacagta

SEQ ID NO: 95223 - DNA, 75 bp, Homo sapiens
caggcagcccccaaatcccggcccagatacagatccacgggttttagaaaaacaagaattacagcagccaaccta

SEQ ID NO: 95224 - DNA, 75 bp, Homo sapiens
tgggcagacgggaggcaccatcgggctgctctatgtgtttggacagattgagaggatccagaatccagatctctg

SEQ ID NO: 95225 - DNA, 100 bp, Homo sapiens
ggcattctcttcaatcatgagagtcccagaagagagctggtgatgctgctggagtggtggtcgggcacggaatgcaccatcttcacggacccgcgcgcct

SEQ ID NO: 95226 - DNA, 82 bp, Homo sapiens
cttcagtcgccatcatgattatctaccgggacctcatcagccaaagaagcttccggttctgaggtcctggaggtgccatttc

SEQ ID NO: 95227 - DNA, 90 bp, Homo sapiens
aggctcgggactttgcagccggccttagtgctcgcgcaggaagacaactgttagttttgtggcttactgctgctccacccagtgtctgca

SEQ ID NO: 95228 - DNA, 100 bp, Homo sapiens
tgtgtgtgcaggttaaagatgatagcacggagcctggcttgtgatgacttcctgggaactcttctgggagtgaatgttatcagcaaattcccaaaacaac

SEQ ID NO: 95229 - DNA, 100 bp, Homo sapiens
ccctaaagagagagtagaggccgggccttcagcgtttctcactggttcgaggaaggcggcctcagaggagagggaagttttcatggagtgataatgaaag

SEQ ID NO: 95230 - DNA, 82 bp, Homo sapiens
ttagctgtgctcgcgctactctctctttctggcctggaggctatccagcggctgtgactccctgacgcagatccagtgcggc

SEQ ID NO: 95231 - DNA, 82 bp, Homo sapiens
gcaagatgatccaccagcggttccatcctacacttgggcctgtcaactacttggtcccagaattcccgatcccagcatagga

SEQ ID NO: 95232 - DNA, 100 bp, Homo sapiens
gaagatgaagcaaaagaacaaattcagtcccttctccatgaaatggtacacgcagaacatgctgatttcatgccaatattgggaaccaacctaaatccag

SEQ ID NO: 95233 - DNA, 76 bp, Homo sapiens
ggaggactacctgcagggttgtcgagctgctctgcagggagcatcgagtacagctgtccggcctccaacgagtgtg

SEQ ID NO: 95234 - DNA, 96 bp, Homo sapiens
cccgggccgccacgctctcgggctctgcctcggaatatggctgggaccatccctgactctcttttttccttgaatgtgaacacatgagtgaagcat

SEQ ID NO: 95235 - DNA, 100 bp, Homo sapiens
agctttgtcaacagcattgctacatccaaggccagataaacacttactgccagaacatcaaggagttcactgcccaaaacttaggcaagctcttcatggc

SEQ ID NO: 95236 - DNA, 75 bp, Homo sapiens
gcaaaggccaatgttggtgctggcaaaaagaaattccaacagaatgggtttcctgaaacggatttgcaggaattc

SEQ ID NO: 95237 - DNA, 101 bp, Homo sapiens
cagccccgacgaacatttctgggtgacactcaacaggattcccgaatgtgacagtgatgataacatgggtgccaaaaatacttcaataggagaagaattta

SEQ ID NO: 95238 - DNA, 97 bp, Homo sapiens
gggggcccgtactgcacatcgtggtggtcggatttcaccacaagaagggctgccagcggggatctgatgagcttctttcttctggcatcattaacgg

SEQ ID NO: 95239 - DNA, 100 bp, Homo sapiens
gaagctggccaagaaggcggagaaggactccaaggcggagcaggccaaagtgaagaaggagagaagatgactgaggaggaggtggagaccgttctggcag

SEQ ID NO: 95240 - DNA, 100 bp, Homo sapiens
ccaagtcagcttcccatctttggctgagacaaggagaaccctgctgggctaggggacccaggctgctttgctggctctgcaagaaaatggactagacgca

SEQ ID NO: 95241 - DNA, 100 bp, Homo sapiens
cccgttgtgtttgtgaaacagagaaagataggcggccatggtccaaccttgaaggccatttcataattctgaatcatgtctgataacggagaactggaag

SEQ ID NO: 95242 - DNA, 127 bp, Homo sapiens
ccgcccaaggtctctcgcgggcgggagaacggaaaactcccaacttcctggactcagcccaggagagtgttattactcgagatattcatcgtacatttcccgcacatgattactttaaagatactgg

SEQ ID NO: 95243 - DNA, 74 bp, Homo sapiens
gcatctgctcaacgacgaggacctgacgcagaggttgacggatatattcagacgttacgacacggatcaggacg

SEQ ID NO: 95244 - DNA, 80 bp, Homo sapiens
ccattgacgccatgtcgggttattcgagtgaccgagaccgcggccgggaccgagggttctgggccggagaaggggcgacg

SEQ ID NO: 95245 - DNA, 75 bp, Homo sapiens
ggagacgggagtattatgaaaagatcgaattgaatgatctggcacgggaccctccagcacagtgttcagcaggtc

SEQ ID NO: 95246 - DNA, 75 bp, Homo sapiens
ggaagaagcctgggtgattggcagtgtggttgcacgagctgaaggctttatcctgtggataaacgcagagtgaac

SEQ ID NO: 95247 - DNA, 74 bp, Homo sapiens
agaagaacgctctcatccggaggcaggaccagctgcagctgctgccctgtgcaccaaggtgccggaactgatca

SEQ ID NO: 95248 - DNA, 101 bp, Homo sapiens
accttaaggtgttaagtgtaaggatcttcatgatgaaatttctgtaaatggtgctggagaatctggtaaaagcaccattgtgaagcagatgaggatcctgc

SEQ ID NO: 95249 - DNA, 82 bp, Homo sapiens
gagctaaagcagcgtgcgttcagccctgggtgtccttgaatccgacccctactttgggtttgaagaagcaaagaggaagtta

SEQ ID NO: 95250 - DNA, 50 bp, Homo sapiens
ctgacagctctgcggctcgggccctgagaagggacttcctcgcccgaaga

SEQ ID NO: 95251 - DNA, 90 bp, Homo sapiens
cgatgcttgtgaccctgcagctcctcaaagtgatgacaatgggaagaaggccaacaaccccaaccactgcaactgcatcatagaccagat

SEQ ID NO: 95252 - DNA, 50 bp, Homo sapiens
gtgaccagaagtcccgccgcttaaaggcatttctggattaaaagtggtgg

SEQ ID NO: 95253 - DNA, 75 bp, Homo sapiens
tgagagctccccaggggagttctctgtgtctgtgaagcgccaagcccatctttgtgtgcttgcatccaactgtga

SEQ ID NO: 95254 - DNA, 100 bp, Homo sapiens
tctcttggcaagagagctctgcatcaatgcgccggccatagtgagttctctggtgatgttgatagcctggaactgggggacatggtcgagtatagcttgt

SEQ ID NO: 95255 - DNA, 83 bp, Homo sapiens
gtgccggaccccagcacacagaagccgagacgacatctttccaggaacagcgtgaggaggacagaagcacccaacaggactgc

SEQ ID NO: 95256 - DNA, 82 bp, Homo sapiens
ctcgacgtcttgcctgtgtcccacttgttcgcggcctatagaaagaagatgctgatatgctacaacacggatgaacctggag

SEQ ID NO: 95257 - DNA, 98 bp, Homo sapiens
ctatgttctcagcacactggcatttagcaaacagaatgaagccagcagccacatccagaccctgctctcagcggcccacgaggtggagttgcagcggc

SEQ ID NO: 95258 - DNA, 98 bp, Homo sapiens
aggagcgcggccagccctgctcgcagaattaccgcctcttctttagattcgataccagcatcttgccaatttgcaaggactcacttggctggatgttt

SEQ ID NO: 95259 - DNA, 97 bp, Homo sapiens
atcctcgccttttacctggtccacctcttccgcttctaccgcgtgctcacctgtatcagctggcccctgtcgagacagggtctcgctctgtcgccca

SEQ ID NO: 95260 - DNA, 82 bp, Homo sapiens
cggcgcagcggtacagcgcccgactgctgcaggccggctacgagcccgagaggtccggtgtttgtggagctgcccgttgacg

SEQ ID NO: 95261 - DNA, 88 bp, Homo sapiens
cctgtggtttttgattcaagtcctgttctacctactgccaattggaaagggtgttgaaagcagcaggggcctagaagacattaaaccg

SEQ ID NO: 95262 - DNA, 83 bp, Homo sapiens
gtgcaagtacctgccagagaacgacctgaagacaatgcagatcttcgtgaagactctgactggtaagaccatcaccctcgagg

SEQ ID NO: 95263 - DNA, 80 bp, Homo sapiens
cgaagagaaggtggtgatcaaagggaaacccttttccaaagagaaatgaagaagaaaactgtatgtaccctaaatatggg

SEQ ID NO: 95264 - DNA, 75 bp, Homo sapiens
aagaaatctgctgcaccactggtagcgctggtatatggtcaaatgaatgaaccacctggtgctcgtgcccgggta

SEQ ID NO: 95265 - DNA, 50 bp, Homo sapiens
caagattacagacgttatcttactcagttgccaccttccagagaagaggt

SEQ ID NO: 95266 - DNA, 100 bp, Homo sapiens
aggaaagccccagccacccatcaaatcagagagaaggaatccaccttcttacgctatggcagctcctgcccctcctaaagctgaagccaaagcgaaggct

SEQ ID NO: 95267 - DNA, 83 bp, Homo sapiens
cggaggaggaggaggtggagttgctgcccttccggagtccgccccgtgaggagaatggcattttttactgtctacagaaactt

SEQ ID NO: 95268 - DNA, 100 bp, Homo sapiens
ctgttttggaactgtcaggtacctcaaagcaatgttatggaacagttcaatcctgggctgcgaaatttaataaacctggggaaaaattatgagaaagctg

SEQ ID NO: 95269 - DNA, 50 bp, Homo sapiens
taaagacggaaccgccacagcactcaaatgaaggatttgggggcagagca

SEQ ID NO: 95270 - DNA, 75 bp, Homo sapiens
tgaagcagcagaaccccaggctggtgtacgggagaccctcacgcagggcttagagttctgtcggcggcagcagag

SEQ ID NO: 95271 - DNA, 82 bp, Homo sapiens
cagaatcaggggaggcatgcttcaggtgtggacactgccagcggctgcagccgacttggaatgacctgggagacaaatacaa

SEQ ID NO: 95272 - DNA, 75 bp, Homo sapiens
ggcgtgcatcatccacggggtgctgcagatcctgttccagaacatccagtcatggataaaaatgagctggttcag

SEQ ID NO: 95273 - DNA, 100 bp, Homo sapiens
acaacctcatcatctaccacctttggtgctttcagaatcatgactctcaatgttgaagaatgggctactgcatggaagattcgccatgaagtcagcgtaa

SEQ ID NO: 95274 - DNA, 74 bp, Homo sapiens
cccaggtgtaagcgcagaaagcaggcgaacccgcggcgcaataacgtcatccgtccttggctcaggatttggag

SEQ ID NO: 95275 - DNA, 101 bp, Homo sapiens
caaaaaagcttctagatggatcctttccaaacttggtgtcttttctacaaactctgtgcctcaacaaccatttctaagtgatatttggagttcttacaaca

SEQ ID NO: 95276 - DNA, 88 bp, Homo sapiens
cgccatgtcgggttattcgagtgaccgagaccgcggccgggaccgagggtgctgaaggtcgccatcctggctgagaagtacgcggtgg

SEQ ID NO: 95277 - DNA, 100 bp, Homo sapiens
atggcctgagctaaacatctaactagaagggatacccttccatttcaaagaacagaatgctaaggaagctgtggcaagttcgatacaagaggctgttttc

SEQ ID NO: 95278 - DNA, 96 bp, Homo sapiens
tgcgtcaagtacactgaaattcatcctgagatgaggttgctgaatgctataaagccaggacttgttaaaaagatcaatagattgcctacccccatt

SEQ ID NO: 95279 - DNA, 85 bp, Homo sapiens
agatggaaccctccttttactcctctcggaggccctggcccttacccagacctgggcggacaatgcagatcttcgtgaagactct

SEQ ID NO: 95280 - DNA, 80 bp, Homo sapiens
ctccttcggcagtccacccaccgccgccgcctcccagtgatcccagggcaccgccgtgtgaatataaagattggctgaca

SEQ ID NO: 95281 - DNA, 75 bp, Homo sapiens
ctcatggcccaccagctagaaaggacatggatttgattgacatactttggaggcaagatatagatcttggagtaa

SEQ ID NO: 95282 - DNA, 74 bp, Homo sapiens
ttgggggcagccccttcaaggccaaagtcacaggtggcaaatatgttcctcgtgccatcctggtggatctagaa

SEQ ID NO: 95283 - DNA, 82 bp, Homo sapiens
ggacagcgccttcctcaacgacgcggacatggtcatgagctttgtgaacctggctgttaaacgtttaatgaaagaagcggca

SEQ ID NO: 95284 - DNA, 100 bp, Homo sapiens
gccatttcgcctttatcgtggtggagtccaccctggctgtggggtatgatatcagctttctgatcaccaacttccacacagagcagatgtacaaacacaa

SEQ ID NO: 95285 - DNA, 98 bp, Homo sapiens
gcttcgtcccggagtctcctgatggccaggaaaagaaggctcaagacattgaaacgctaaagaaatttctcctgaataagaagcctcatgtagtgaca

SEQ ID NO: 95286 - DNA, 75 bp, Homo sapiens
cctccgggtcggagctggacgggagatgaagggcgccctaatggagatcatccagctcgccagcctcgactcgga

SEQ ID NO: 95287 - DNA, 100 bp, Homo sapiens
ccagaatcaacgacgggctccccggctcggctctcgctgcggcagacgggctcccccgggatgatctacaggcaccgggagcctggccgctgcagtggag

SEQ ID NO: 95288 - DNA, 97 bp, Homo sapiens
tgtaaattatgtgaaacctccaaatgtggggttcttgaagcttttgagattaacaatggcaggaaaatcatcactttttaaagtaattctccttgga

SEQ ID NO: 95289 - DNA, 100 bp, Homo sapiens
ttattgagaaagtgaaacctgagatccggctgttgattgagaaatgtaacacgccttcctacagcaacttcccactccaggtggccagacgggagttcca

SEQ ID NO: 95290 - DNA, 51 bp, Homo sapiens
cggggctccaatggcgctttctacaagggcaccatgccggtggaaaggatg

SEQ ID NO: 95291 - DNA, 83 bp, Homo sapiens
tggcatgtgccttatgaccctcatttggagtcagcatatgaaaataagagtttacctacagaaaaaaacattcatgaaataag

SEQ ID NO: 95292 - DNA, 100 bp, Homo sapiens
gaggatttaatgttgtttcttccaactctggaaacaattccactagaaggctcaatagttcaggttcaattcccatgaaagtgcagcacatgcaattgtt

SEQ ID NO: 95293 - DNA, 100 bp, Homo sapiens
cacaggactcggccacctgcccttcctgcaccgactggccagccaccaaaaccctcaacaggggcatctctgagttcatcgtgatggctgcagacgccga

SEQ ID NO: 95294 - DNA, 51 bp, Homo sapiens
gcaacctttataggtttagataaggaattacatgaatgacagtcttcgaac

SEQ ID NO: 95295 - DNA, 100 bp, Homo sapiens
gcgctactgaggccgcggagccggactgcggttggggcgggaagagccggggccgtggctgacatggagcagtaattcgccaaaatgacgaacacaaagg

SEQ ID NO: 95296 - DNA, 82 bp, Homo sapiens
cggagagccacgcatgcgcactgaacgagaggagctgaaggccttgagctgcctgcgctgtggcaaacagttcacagtggcc

SEQ ID NO: 95297 - DNA, 100 bp, Homo sapiens
cttgggtggtctgtaagccgcggagctaattggagatggtttcacagcacgcagtggcttcggggccaatggtggcagagtctacatagaactatgcttc

SEQ ID NO: 95298 - DNA, 97 bp, Homo sapiens
tggcccgcgccggcggcatcgagactatcgctaatgagtatagcgaccgctgcacgccgcatcagcttctggtgatgtgagctgtgtggatgaaatc

SEQ ID NO: 95299 - DNA, 83 bp, Homo sapiens
actcctccaagaaccaacccccaaattggctgggacagacgaaggggaggaccaggctggcgatgaagatgaagatgatgaat

SEQ ID NO: 95300 - DNA, 83 bp, Homo sapiens
cgcggatctcaccgccgctcaggggcaggatagcgtgtgccaatgtcctcagtgacctctatgcaatgggggtcacggaatgt

SEQ ID NO: 95301 - DNA, 75 bp, Homo sapiens
tgacagagctttgatagtcgtaccatatgcagaaggtgaccctggcagcaaccccaacaaacgccagaggcagcc

SEQ ID NO: 95302 - DNA, 82 bp, Homo sapiens
aagattagacatactgaaaatccatgcaggtcccattacaaagcatggtgaaatagggaagacatgtaaggaatttgcataa

SEQ ID NO: 95303 - DNA, 50 bp, Homo sapiens
ccgggcccagagctcctgtctctcagggagaagaaatgggtgaccgttgg

SEQ ID NO: 95304 - DNA, 100 bp, Homo sapiens
gatcaagaacttcttctgaggacagacaggtgctgtctctagcatcacctctcagcacgattttcccgagagttcacagagtttatgtggccgaggcaga

SEQ ID NO: 95305 - DNA, 83 bp, Homo sapiens
gccaactttcacgctgcctcggcggcccggcccggctcgacgccaatggacaatgcagatcttcgtgaagactctgactggta

SEQ ID NO: 95306 - DNA, 75 bp, Homo sapiens
gactggaaagcaatgtgtcaaccgcattattactgaaaagaaaacctttccaacctatgagagaaagagatgtga

SEQ ID NO: 95307 - DNA, 100 bp, Homo sapiens
ccgctgccctccgcgcctgtccccgcgcggcccccacgccagacggccctccctcggggcgcgctcgcagacggaggtctcctctgagcctccggcctcc

SEQ ID NO: 95308 - DNA, 100 bp, Homo sapiens
gtgaccgagaccgtgaccgagagcgtgaccgagagcgcgaatatcgtcatcgttagaagtccctggtcttcagaatgaacagaaacgattccaactggaa

SEQ ID NO: 95309 - DNA, 82 bp, Homo sapiens
gcagccccggcccggccctgcccggcggccctatgccgggggtgccgctcagcccccaaatacatcaagatgtttgtactgg

SEQ ID NO: 95310 - DNA, 100 bp, Homo sapiens
agaaggtctcctactttcactgcaccctcatcggatactttgtagcacaagtgcatacaccttgatagcaccaaatataaaccggagaaatgagatacaa

SEQ ID NO: 95311 - DNA, 100 bp, Homo sapiens
gttgccatggcattcgccagctggtggtacaagacggagtcttttagtcctgctatacagctgcaccttgtacatcaagctccatgtaatgttcctcctt

SEQ ID NO: 95312 - DNA, 90 bp, Homo sapiens
gcagactgtggagccgggagccggcaggttcacttatgtagttcccatttgttacttcgacgagcagctgtggcatgtcttcggcaactt

SEQ ID NO: 95313 - DNA, 74 bp, Homo sapiens
agtgaatctacagggacgccatcgaatccgctggatcagctcctttgtggcagtaaagcagacacttgggatgc

SEQ ID NO: 95314 - DNA, 100 bp, Homo sapiens
cgcagctgcggaaagccgaggcggtggcgctcaagtaccagcagcaccaggagtccctctccgcccagttacaaggtgaatctggattgggaaagtcgac

SEQ ID NO: 95315 - DNA, 83 bp, Homo sapiens
aagcaatatttcgagcagtttggcaaggatttccctagagattatgacgttgcagccccgctgcgaggacgtagagacggccg

SEQ ID NO: 95316 - DNA, 100 bp, Homo sapiens
ctcacggcctttgttctcatctcgctgcaggaggctaaagatatttgcgaggagcaggtcaacggcctgtccttgatagtggtcgggaagcgaagtcccg

SEQ ID NO: 95317 - DNA, 125 bp, Homo sapiens
gctcgcgctccaagctccctgcggggaagaacgtgctactgctgggacccagatgatgtggtaccagttggccaaagaagagcctggtgttggtgcatgtgctttggactagcatttatgcttgc

SEQ ID NO: 95318 - DNA, 100 bp, Homo sapiens
ggccttgaatggcaactgatacataataagacacaatctattctgctgattcacaattatggagactgtgatcacttcatttccccttctgcgtttggag

SEQ ID NO: 95319 - DNA, 100 bp, Homo sapiens
ctaccagctaactgaagagggcacctttaaggtggtggatgaagaggccatggagaagggagaggctgtcgatgctgaggcacgagagaatttgctcctg

SEQ ID NO: 95320 - DNA, 89 bp, Homo sapiens
gaagtgcccgctgccgggcgcgggcctcaggagccgggtgtgggctgagccctgcctgattgatgctgccaaggaggagtacaacgggg

SEQ ID NO: 95321 - DNA, 97 bp, Homo sapiens
gacactatcctggccgagggccttcacttcagagagaagaagaaggaggttcctgctgtgccagaaacccttaagaaaaagcgaaggaatttcgcag

SEQ ID NO: 95322 - DNA, 82 bp, Homo sapiens
tgtgtggttgcaacggagataaattcccggaaccgcgattcggcgtgtcaggtgacttaagagattaaaattaatttggttg

SEQ ID NO: 95323 - DNA, 100 bp, Homo sapiens
atttgctcgttcttcagatcctcgatcaccaaaatttttcagttatgggacaaaaatattatatcaaaacactgaagctttgcaatctaaattcttttca

SEQ ID NO: 95324 - DNA, 100 bp, Homo sapiens
gcccgggatgtattcgtccccgctctgcctcacccagctgtgagccgtgagctttgaggcggtgggatgtgtcagcagaatgtctcctgcccccgagagc

SEQ ID NO: 95325 - DNA, 78 bp, Homo sapiens
gccccgggaggccgaggttcgggaagctgaatatggtgggcatgatcagatagatttgtatgacgatgtcatatctcc

SEQ ID NO: 95326 - DNA, 75 bp, Homo sapiens
gggactacggcatccgcgccggcctcgtccagaacgtggtcagcaaggtaagaatgattgatgttggctgatatt

SEQ ID NO: 95327 - DNA, 90 bp, Homo sapiens
gccaaattaaagttttacaagatttaacctgtcatcaagacctgggattttggtgatgtgtctgggaagctgaggatctgggataccacg

SEQ ID NO: 95328 - DNA, 100 bp, Homo sapiens
cgattacagaacccgggtcagcggggtcacccctcagcacatggtgggggccacaccatttgccgtggccaggctagagaacatggtccaagacaattcc

SEQ ID NO: 95329 - DNA, 100 bp, Homo sapiens
gttttgatggatatatcttccttgacagcaaagatagacgatcagctgaacactctcttgaaggagttccagctaacagaggagaacactaagctccgat

SEQ ID NO: 95330 - DNA, 50 bp, Homo sapiens
gtgaaacaccactgaagcattgccaaggaaaatggttcctcaagccagca

SEQ ID NO: 95331 - DNA, 75 bp, Homo sapiens
gcgggcgcactgggaggtggaacgggccgaactgcaggcgactgagtcaaagaccaacaccagaagaactagaac

SEQ ID NO: 95332 - DNA, 97 bp, Homo sapiens
tgttctgagattgcatcaggatattaatgattataaccggagattctcagggcaacccagatctttatttacagagtatggaagacttgcgatggaa

SEQ ID NO: 95333 - DNA, 82 bp, Homo sapiens
cgaggatatcgtgtctggagcagtggagcccaaagacccctggagacatgtgcggcatcgtcctgggggcgctgctcttggt

SEQ ID NO: 95334 - DNA, 100 bp, Homo sapiens
tcagcctggtcaccagcttttcggaacagcagagacacagagggcagtcatgaggttgaaatcacaaagattagacacctttttagataggtgttcttca

SEQ ID NO: 95335 - DNA, 100 bp, Homo sapiens
cagcgacctcagccacaggaactagagacagcttgctttctgtcgtggcaatgttttgaaactggcaaaatcagaaagtgacttcagtgatgattttagt

SEQ ID NO: 95336 - DNA, 99 bp, Homo sapiens
attaattcgagagtatttagaattcaacaaatataagtatacagcatctgtcctcatagcagagttgctggagaatgtaaccctaatccataaaccagt

SEQ ID NO: 95337 - DNA, 90 bp, Homo sapiens
gctcttaactttacacaaaatgggtatcaccactgctacttttcccattttgcagatgcctttgagtaatggacagatgggccagcctct

SEQ ID NO: 95338 - DNA, 98 bp, Homo sapiens
ctggacccacgacggcaggaattattggaggccaggtttactggagtaggtgttagtaaggaaccatcactgttgctggaggcacctgacaaatccta

SEQ ID NO: 95339 - DNA, 83 bp, Homo sapiens
cagcgcccgtcaggggggcaccgcggagcaagggactttgaacatgtcggggatcgccctcagcagactcgcccaggagagga

SEQ ID NO: 95340 - DNA, 100 bp, Homo sapiens
gtgcaggcctgcaggatttggtttcagcatgtccttctctgaatgatgaatacttttactactgtgacaacattaacggatctcactctgtcacccaggc

SEQ ID NO: 95341 - DNA, 100 bp, Homo sapiens
acggcgtcaccgcggacgcgcgcgcgctgctggcgggacagcgccacctgctgacggcgcaggacgagaacggagacaccgtggtgatggtggatgaggc

SEQ ID NO: 95342 - DNA, 90 bp, Homo sapiens
cgggaaggccgaccgactgccgcgcactttcagaccatgctgaagtctaaattgaatgtcttaacactgaaaaaggaacctctcccagcg

SEQ ID NO: 95343 - DNA, 82 bp, Homo sapiens
tgcccggtgcccgaggaggcagccaagctcgtagcctgccactccgtgcgaacttgctactaccagcaccatgccctaccaa

SEQ ID NO: 95344 - DNA, 88 bp, Homo sapiens
gtgtgaccccatatatgattttctttaaggatggtttagaaatggaaaaatgtagctcccagctcctccagcagccgacaggaggccc

SEQ ID NO: 95345 - DNA, 75 bp, Homo sapiens
cgagggcgccgggggcggggagcagctggtggaccagctcatccgcgacctgataatgttaattcaagactctcg

SEQ ID NO: 95346 - DNA, 101 bp, Homo sapiens
ccccttgcccctaaccacctgggaggaagaagcagtacttttttgtctcatagcattagtaaccaagctaatgttcaccagtctgtcattagctcctggct

SEQ ID NO: 95347 - DNA, 101 bp, Homo sapiens
tcatggtagttgccttcctgggctgcatgggctctatcaaggaaaacaagtgtctgcttatgtcgttaaacacagtgggaatatcacttttgatgagattg

SEQ ID NO: 95348 - DNA, 98 bp, Homo sapiens
tggtcaagagcgtgccctacttcaaggataagggtgacagcaacagctcggcgggctggaaggtaaatggtcttaaaatggttgatgagccaatggaa

SEQ ID NO: 95349 - DNA, 75 bp, Homo sapiens
catcacctctcagcacgattttcccgagagttcacagtggagtacgacaaggagttctcccctcgtcagcgacac

SEQ ID NO: 95350 - DNA, 100 bp, Homo sapiens
gccccgctcccccggacccatcggcgcgctgcccacacctccaggcgaccggatgggcaccagttgcgtcttgaagtgccatcagctgtaaccaaagttc

SEQ ID NO: 95351 - DNA, 98 bp, Homo sapiens
ggagttcgactgcgagggcctgagacggctgcttggcaaggtaatgagagatccaaacaccaagcgctccaggggctttgggtttgtcacatatgcca

SEQ ID NO: 95352 - DNA, 90 bp, Homo sapiens
agcgggtcagcctggccctccagctccctgaacacggcagcaaggacatcggaagttatgaagacagtatggagtttccagaccatagta

SEQ ID NO: 95353 - DNA, 75 bp, Homo sapiens
ggaagacctattatcagatcaaccaccaaagtgggaaacattgaaatcaagttcctggtccagaactttacacag

SEQ ID NO: 95354 - DNA, 100 bp, Homo sapiens
ttaccaaccacggccgcaggatccccaaggacgtggttgaggaattcagcgatttatacaacgaggattgggtgcaaggagttggtgttgatggaggagc

SEQ ID NO: 95355 - DNA, 90 bp, Homo sapiens
tactggtcaaaaggtcaactaaaagcattgtttctagaacatgagcataagcagtactataatggatgtagacagcacaatttccagtgg

SEQ ID NO: 95356 - DNA, 75 bp, Homo sapiens
gagctgggcgcggattcgccgaggcaccgaggcactcagaggaggctgaagtggagagatcgcctgagcccagga

SEQ ID NO: 95357 - DNA, 100 bp, Homo sapiens
cagatggcggatgccctgcagtacctgcagaaggtctctggagacatcttcagcagtggctggatctctgctctggtggtgccgaagggcaacacagcag

SEQ ID NO: 95358 - DNA, 100 bp, Homo sapiens
ctgcagcttgttacttctaaagcaggcagccaatcctttctttaagttgttgactatgctaatggagtttgctggtggacctccaggaatgcctcccttt

SEQ ID NO: 95359 - DNA, 90 bp, Homo sapiens
ctaccagccggcagctccggagctgcccgcgccatgtccgcgcacaatcggggcaccgagctcgctgttgaaaatggacagatagatgtg

SEQ ID NO: 95360 - DNA, 88 bp, Homo sapiens
gtgtgcgacgaccctacagttgtggcctccaatatcatgctctggtagctgaagaacatctcacagtggacgccagggtctattccta

SEQ ID NO: 95361 - DNA, 100 bp, Homo sapiens
cgctgctgggcacccacggagcctccggggctgcgccccccagagcctgagaccggtgagagtgcgggcacatcccgggctgccacgcccctgccctctc

SEQ ID NO: 95362 - DNA, 83 bp, Homo sapiens
ctcggggcgggcgccgcgggacctctccgggccatggttactgtaaaatggggaaaggagaaatttgaaggtgtagaattgaa

SEQ ID NO: 95363 - DNA, 90 bp, Homo sapiens
cccgagtgcagacctgcatcaacctgatcaccagccaggagtacgccgtcaagatgaggacggggacttggttgccttttccagtgacga

SEQ ID NO: 95364 - DNA, 117 bp, Homo sapiens
ttcaaagattctttgtagcagacactgcaaatgaagctctcgaggctgctaagagactaagtggatttgccgctgcagtcaccacccctctagacgtggcaaagacaagaattacgc

SEQ ID NO: 95365 - DNA, 101 bp, Homo sapiens
gccttccagctgtttgaccgaacaggtcacaaacatgtcagacaaaagtgaattaaaggctgagttggaacgtaagaagcagcgactggcccaaatcagag

SEQ ID NO: 95366 - DNA, 87 bp, Homo sapiens
gtctgatcccttgctcccatccctgcagcatgaacaagaacaagaggaaagtatggggaaggagccaagcaggagacgttcaccttt

SEQ ID NO: 95367 - DNA, 51 bp, Homo sapiens
gccaaccggccagaggacgagtgtgctgccaaggctgtcagctttcctcag

SEQ ID NO: 95368 - DNA, 120 bp, Homo sapiens
agcagccacaccacaaccaggcgaagcaggtagtggcgctgaatcgctcctgccgcggggataagttctgaacgtcgaaaagaaaagtctcgagatgcagccagatctcggcgaagtaaa

SEQ ID NO: 95369 - DNA, 100 bp, Homo sapiens
agtgggccacgggctccggactccagaactttccaagcgggggaaacttggcggcggaaaccagcaaatatcctagtaatgggagaaggtcctgagaggg

SEQ ID NO: 95370 - DNA, 50 bp, Homo sapiens
gctacatacaccagtgggaggaggggctccatgggccttaccccttcggc

SEQ ID NO: 95371 - DNA, 89 bp, Homo sapiens
ccaaggggaagctgaagattaacatgaaaaagtactgcaagaaggactatggaaggaagcagccaccctcgccatggcctccccgcccg

SEQ ID NO: 95372 - DNA, 90 bp, Homo sapiens
ggaggtgacagagctgctggcccgatatttgatacaaccaagtcggatgggcagtttaagaagacagccagtaacagcaagctgaggacc

SEQ ID NO: 95373 - DNA, 75 bp, Homo sapiens
ctatagagctgtttgatgtcagcactccttttccagctctgctcgccccccatctcaccccccaagcggatactg

SEQ ID NO: 95374 - DNA, 75 bp, Homo sapiens
gtccacagggcacgcaagaccatgccgaagtccgtcgtgggcctggctttgtccagggatctgaaaccactttgc

SEQ ID NO: 95375 - DNA, 100 bp, Homo sapiens
ccctttagccgccgctggcccaacggtttccccagcagtagcctctgcgaccagatcatggaagggaagtggttgctgtgtatgttactggtgcttggaa

SEQ ID NO: 95376 - DNA, 74 bp, Homo sapiens
caatagctgaaataatagaggaatgtggaggttactatgggcaaggcggcatgagtggaggtggatggcgtggg

SEQ ID NO: 95377 - DNA, 90 bp, Homo sapiens
tgtatatggctgcgccccaaatcaggcaaataagggcgagactgaaaaatcaagtcactcagttgaaggagcaagtacctggtttcacac

SEQ ID NO: 95378 - DNA, 100 bp, Homo sapiens
gaggtgccggtggccgcgctcggacccggaagttctactacatcaccctgctacgagaccccgtgtcccgctacctgagcgagtggcggcatgtgcagag

SEQ ID NO: 95379 - DNA, 98 bp, Homo sapiens
accaggtcccctgtgggaggagatgctgcaggccagaaaaaggagggtcttctttgtgatccgcctcattgctggccctgctgccaactccctgcctc

SEQ ID NO: 95380 - DNA, 76 bp, Homo sapiens
cctgctcctcttctacttggcctacatccatgaagacagtgcaccaattccagctggacatcactgtgaaaatggg

SEQ ID NO: 95381 - DNA, 50 bp, Homo sapiens
gcgccgtgtaactgtgaatctttcaaagaggaggaagatgactatctctt

SEQ ID NO: 95382 - DNA, 100 bp, Homo sapiens
agaatggaaaagaaccattgaagcttgagagaaaagcccccaaaagcagctattcaggagttgaactgaatgaccgactcttgggcagccaacttttggc

SEQ ID NO: 95383 - DNA, 90 bp, Homo sapiens
ctctgtgctgatccccaccgacaattcgaccccacacaaggaggatctaagcagcaagctgacggcccagagggtgggtgccaattccac

SEQ ID NO: 95384 - DNA, 83 bp, Homo sapiens
agcacagccaaggaacagaattagaagaaaaggaaccctggcctgagacaatgcagatcttcgtgaagactctgactggtaag

SEQ ID NO: 95385 - DNA, 93 bp, Homo sapiens
cgcggcggggctgaggcggccgcggggcccgagcgcagagacacctatggctgccgatgaaggctcagcagagaaacaggcaggagaggccca

SEQ ID NO: 95386 - DNA, 100 bp, Homo sapiens
aatgtagaggaggtggacaccgctctgcagaactttgcctctactttctgctcagatgctgatggaaagttaagcgtgaaatttggggtcctcttccgtg

SEQ ID NO: 95387 - DNA, 100 bp, Homo sapiens
tcttcttgaaaggagggacttagcagtagacttcattttttgtttagttttagttgaagttctaaagcaggaaagatgaatgggagggctgattttcgag

SEQ ID NO: 95388 - DNA, 100 bp, Homo sapiens
tcgctgcaaatctccaacctctggtcagaagagatcaattctacagaaatttccagtggttctgttgaggctttatggaattcagcatgtcaaaattcac

SEQ ID NO: 95389 - DNA, 75 bp, Homo sapiens
catcgccctggccgacaagcacgcaaggttgtgagtcccggcccagcccctccacccccctgcccccccgatgcg

SEQ ID NO: 95390 - DNA, 118 bp, Homo sapiens
ggtgggctccaccctgtacactaaagctaatcttatcctttgtcgcagagactatctgaggttcgatacaagaggctgttttcctagcgtggcttgctgcctttggtaagaacatgtc

SEQ ID NO: 95391 - DNA, 74 bp, Homo sapiens
ctggaccaccgggcgctggtctgctcccagccgaacactctgctccagccaaggtggtgagggcagctgttcct

SEQ ID NO: 95392 - DNA, 50 bp, Homo sapiens
atttcttaccaaaagacactttcaggcaccatactggacataccttttat

SEQ ID NO: 95393 - DNA, 75 bp, Homo sapiens
acccactggacaccttcgtcccctttgatccctgtgtgctgaagagttctccaatatccccttcttcatcttcgg

SEQ ID NO: 95394 - DNA, 75 bp, Homo sapiens
agctctaaggccctggagccccagctgtcagcttttcctccgcaaccatgtctgacaaacccgatatggctgaga

SEQ ID NO: 95395 - DNA, 89 bp, Homo sapiens
atcatcctcatcatcatcataggctctaagcagaataaattccctgaaaaaagaaaaaggaactctgtggactcagatctgaaaagcac

SEQ ID NO: 95396 - DNA, 78 bp, Homo sapiens
acctatctggaaacaacaggcgagacctggagatggacctgtgatctggcctccacagctttccttgctgatagccag

SEQ ID NO: 95397 - DNA, 75 bp, Homo sapiens
cctcatcctgaccatctgctccctggctgccatctttccccgggtagatgacattaatgctgataagaatatctc

SEQ ID NO: 95398 - DNA, 88 bp, Homo sapiens
tgaagcaactgaagaaaatgtttgaagcaacaagattgcttgcaacaattgttatgcttctattggatgaactcccaatgatatacag

SEQ ID NO: 95399 - DNA, 75 bp, Homo sapiens
cccccacctcagcccagcaattcggtagatgacattaatgctgataagaatatctcttctgcacagattgttggt

SEQ ID NO: 95400 - DNA, 100 bp, Homo sapiens
cctgcctgtggacagcaggatgattgagatcttactgtgccgagatcgctcacaatgtttcctccaagaaccgcaaagccatcgtggaaagagctgccca

SEQ ID NO: 95401 - DNA, 100 bp, Homo sapiens
caaagacctgcggaccaagggcttcagcctagagtcgtgccgcagcatggtgaacctcatggatatatatcagctacttcagtgggctgctatctggctc

SEQ ID NO: 95402 - DNA, 50 bp, Homo sapiens
tactggttccatcgtatggctcatggcagctgttgtgctgtgtatggacg

SEQ ID NO: 95403 - DNA, 51 bp, Homo sapiens
ggattccaagtaactcttatttggttggaggcatcaagcctgggtgcttta

SEQ ID NO: 95404 - DNA, 100 bp, Homo sapiens
gaagacctccatgatgagccatctccacttaatgactgtctcacattggccggcaacttgttccagggaacaacctatcttcagcactcgagctcatgtc

SEQ ID NO: 95405 - DNA, 102 bp, Homo sapiens
cccgaaccagagccggaggcgggaggacgggctgccgcaggtattgttgcagcatctggcagtgagactgaggatgaggacagcatggacattcccttggac

SEQ ID NO: 95406 - DNA, 75 bp, Homo sapiens
gctcgatccagcaccatggggaagcgggacaatcgggtgccaacaagtcccaaatttggaaaagctgactcatat

SEQ ID NO: 95407 - DNA, 75 bp, Homo sapiens
cggaaggtgatgcccaagatggaccagctcaccatggatgatgatatcgccgcgctcgtcgtcgacaacggctcc

SEQ ID NO: 95408 - DNA, 100 bp, Homo sapiens
ttgaggcagctgagaaacagattaaacatttagagattgaaaagaatgctgaaagtagcaagggcaattgaaggaacagactaaaaatcgtgtcctggaa

SEQ ID NO: 95409 - DNA, 83 bp, Homo sapiens
aacaagtgtgtgcatctggctgttagaagaattcatgctcatccggattctgtttctggcgtctgcatacgcaagtccccaac

SEQ ID NO: 95410 - DNA, 100 bp, Homo sapiens
tgggtgggcttggccatggtcagcgtgaacgcgcccctcggggctccagtggagagttcttacggccttcaaacaagctagaaatatgggaggatctgaa

SEQ ID NO: 95411 - DNA, 75 bp, Homo sapiens
aaggattccaagtaactcttatttgttgaatccttggcctgaatatatttacacacgtcttgagatgtataatat

SEQ ID NO: 95412 - DNA, 96 bp, Homo sapiens
gcagtgtaacacacatgcttgtccacacgacgctgcatggagtactggcccttggagctcgtgattcgcctttgccagtctcatctcgtgtctgct

SEQ ID NO: 95413 - DNA, 75 bp, Homo sapiens
cttccgcagtgattgaagctttgataaatgaaatcttcctaagtataggaaatgcaacctcaccacaagtacaaa

SEQ ID NO: 95414 - DNA, 83 bp, Homo sapiens
ctgcaggaggagaaccgcgacctgcgcaaagccagcgtgaccatcggggatatgagactttctactcggaatatcctgagtgt

SEQ ID NO: 95415 - DNA, 100 bp, Homo sapiens
tttcacgaacagatggcactgtggaaatttataacttgtcagcaaactactttcaggagaaagaccctgatgctcccataagacagaaaatgccccttga

SEQ ID NO: 95416 - DNA, 89 bp, Homo sapiens
gagaaatgagatgatagccaaaccctcagttcatgccgtggaggaagtggtgaaggaggtggtgggacatgccaaggagactggagaga

SEQ ID NO: 95417 - DNA, 97 bp, Homo sapiens
aggcaactaacactgcggcttcctgaggatgaaaactttcggaagagaaagttgcctgtggtaagttcagttgttaaagtaaaaaaattcaatcatg

SEQ ID NO: 95418 - DNA, 83 bp, Homo sapiens
cctggtccactgaaaaattcttcagattggaaaataccacaggatggagactacgagtttactatagaatctaactggcggtg

SEQ ID NO: 95419 - DNA, 90 bp, Homo sapiens
ggaccgggagaggcaccaaatctggcctgggggcccgagaagcttcctctcagatttcacagagatgatgagagccctgggataccctcg

SEQ ID NO: 95420 - DNA, 74 bp, Homo sapiens
aaaagagccctgcaatttgaagatacatgagacagcagccaaacccccagctcagatttcttttatccaagata

SEQ ID NO: 95421 - DNA, 96 bp, Homo sapiens
tggatggtatgaattacctgcgatacagcttggagggaggacgatctgacaggttctcagaggcactgtgactgacttccctggatttgatgagcg

SEQ ID NO: 95422 - DNA, 120 bp, Homo sapiens
caacttcgctgtggtgaagctggggcggcaccggatcaccaagacggagatcttcaaagctgctgcgggcattctatgtccccttcctgtcagatcagtatacagtgtacgtaaactaca

SEQ ID NO: 95423 - DNA, 90 bp, Homo sapiens
ccgctgggctggccctgcagggaccatggaatccagagctgatcacaaggacatagtagctgaggggttgcgccagctgctgggggagga

SEQ ID NO: 95424 - DNA, 100 bp, Homo sapiens
gactgtgaaaaatgataactcatctcgttttaaaactgtcgctgaaaagcaggagaagagaaatcaggatcgcttgaggaggagagaggagagggaacgg

SEQ ID NO: 95425 - DNA, 102 bp, Homo sapiens
atggtgcagaagaaaccagccgaacttcagggtttccaccgttcgttcaagacaatgcagatcttcgtgaagactctgactggtaagaccatcaccctcgag

SEQ ID NO: 95426 - DNA, 83 bp, Homo sapiens
cagcaatctcctcctccactgccactacagggaagtgcatcacatgtcaggcagcctgcttctgcaaagtggtacgatcgaag

SEQ ID NO: 95427 - DNA, 133 bp, Homo sapiens
cggcagtggtggaggtggaggttggaggtggtgctgctggggaacgggagctggatgagtgaagcgtgacattcaggaaaacgatgaagaggcagtgcaagtcaaagagcagagcatcctggaactgggatct

SEQ ID NO: 95428 - DNA, 83 bp, Homo sapiens
gtctgctctgtgtgccatggacgggtgcagaggccaagaccgttttgcccaagaaggagaaaatgaagctgaggcgtgagcaa

SEQ ID NO: 95429 - DNA, 90 bp, Homo sapiens
ggccaatggcacggaggcctgcgtcttcgagagctgtgcccaggagtgaacaaccagccctacctctgtgagagtggtcactgctgcggg

SEQ ID NO: 95430 - DNA, 75 bp, Homo sapiens
caatctttttgaaataaagaaacttcgagaactggaaggctatgataagggtcatgaaatggctgtgaatttgtc

SEQ ID NO: 95431 - DNA, 101 bp, Homo sapiens
aacccagctgaagaccactttagaaactcaattaagttggcgtgcagtggtgtgatctcagctcattgcaacctctgcctcccggactcaagcaatcctcc

SEQ ID NO: 95432 - DNA, 75 bp, Homo sapiens
tgattctggaactgggagaagatggctttaaagaatacacttcaagtctcagcggcggtggcagccgaggtgcag

SEQ ID NO: 95433 - DNA, 100 bp, Homo sapiens
acgaggtggacatcaagccggataagtgtccccgtagagtcaaccggtccagacatcatctgtcggtggtggacgtctgcaatcactgtggccatcagct

SEQ ID NO: 95434 - DNA, 100 bp, Homo sapiens
ctcccagagtgctaggattacagtatcctagaaggaaaacatcaccatggctacagaaattggttctcctcctcgttttttccatatgccaaggttccag

SEQ ID NO: 95435 - DNA, 100 bp, Homo sapiens
gccgggagggagttgtcggcgccgcggccgctgcggacggacgctcgcctgccggctgaggcacaagtgatccttatgtgaaatttaagctgaatgggaa

SEQ ID NO: 95436 - DNA, 100 bp, Homo sapiens
ccgctcagcgtcccccacaccacagacccgcgccgccgacgacccagcagccgccatggctctgctccgaggtactccaaagattcaggtttactcacgt

SEQ ID NO: 95437 - DNA, 50 bp, Homo sapiens
gcgccgcccggcagcctcggcagggcgtctctggccgagcctctttttgt

SEQ ID NO: 95438 - DNA, 83 bp, Homo sapiens
tggttgcaaaatttctccataagcatgatttggatcttatatgtagagcccatcaggctggaggacacacctaaacatgtgga

SEQ ID NO: 95439 - DNA, 88 bp, Homo sapiens
gtgaaggagcagatttacaaactggccaagaagggccttactccttcacagatcggccggaaggtggtggtcgtacgctgtgaaggca

SEQ ID NO: 95440 - DNA, 100 bp, Homo sapiens
actgccccgtctgtcaggaggtgctcaaaacgcccgtgcggaccacggcctgtcagcacgtgaatgctccaaaatgggaagaagtttgattcatccagag

SEQ ID NO: 95441 - DNA, 100 bp, Homo sapiens
cacactcagccactgcgggcgaggagggcacaaggccaggttcccaagagctcaggggctgggtgaccgatggcttcagttccctgaaagactactggag

SEQ ID NO: 95442 - DNA, 75 bp, Homo sapiens
ccctggctgaacttcaccttttggctttcttggcctgatgctgaactctcgaggtgaatggacctgagtggaccc

SEQ ID NO: 95443 - DNA, 101 bp, Homo sapiens
tctttaataggcccaggatagagaccttgcagaaagaaaaagtgaaaggagttaccaatcagactggacttaagatcaataagatggagtggtggagccgc

SEQ ID NO: 95444 - DNA, 100 bp, Homo sapiens
gttgggagatttggatatcgaatcccagacctgtgcttctgactatcttctcttcaccagctcttcagatcaatatgagtttcgctcttgttgcccaggc

SEQ ID NO: 95445 - DNA, 75 bp, Homo sapiens
ccgggcccaggccccggcagcgcctgggacaaggtactttagattgattgccgagcggggcagttttgtgagcct

SEQ ID NO: 95446 - DNA, 100 bp, Homo sapiens
cttggttacctgcctgtccagacagttcttgaaggtgacaacttagagaccccccttacccaggaatggaacaacctccacaccatccttactatcagca

SEQ ID NO: 95447 - DNA, 100 bp, Homo sapiens
tggttccagcctccggagctcgcccaagccgcgtccccagagagcgccctgagagaacagggtggccgcttggtccagggtctcactttgtcacccaggc

SEQ ID NO: 95448 - DNA, 100 bp, Homo sapiens
aattctaatttgaaccatgtttggattgaagccgcctctgtattacttaccagagctgcagcagttctataacagccagggccggcttcctgacggcagg

SEQ ID NO: 95449 - DNA, 98 bp, Homo sapiens
cgtcaagcagcatgtgaaggagaccaaggactggattcgagaccagctcaacctcttcatcaacaacaacgtcaaggcctaccgggacgacattgacc

SEQ ID NO: 95450 - DNA, 97 bp, Homo sapiens
ctgaactagccatgatcgcctcatgtggagggcaaagttgcgccggggaacttgtgagcctgcggtgaaagatattgatgatgttaagaagttcaaa

SEQ ID NO: 95451 - DNA, 73 bp, Homo sapiens
gccttccggcagaagctggtcagtcaaattatccggctgctttgatgaacctgggagccattctgcacctcaa

SEQ ID NO: 95452 - DNA, 100 bp, Homo sapiens
tggcagccaaaagattgaaggaaggtgatacaatgatggggcagcaagtggccaaggggcaatggcggcttcctgtgttctactgcacactgggcagaag

SEQ ID NO: 95453 - DNA, 74 bp, Homo sapiens
ccctgactaaagcttgaaatgctacatttccaagttttttgtagcatcagatccaacagttaaaacagatcgac

SEQ ID NO: 95454 - DNA, 50 bp, Homo sapiens
acagatgtccaagctgccaactggatcatcattgaactaaaacacaaagc

SEQ ID NO: 95455 - DNA, 119 bp, Homo sapiens
tgcatgtgaagctcaccgagacggcgatccgggcgctcgagacttaccagagccacaagctcaccatggatgatgatatcgccgcgctcgtcgtcgacaacggctccggcatgtgcaag

SEQ ID NO: 95456 - DNA, 100 bp, Homo sapiens
ggacctgcgggccaggggcgtggatccagtgggccgcctgctgctggtgcgcgtgggggtgatcagcttcgcccagaagcggatccgaggtcgcaaagcc

SEQ ID NO: 95457 - DNA, 73 bp, Homo sapiens
aaggggaggtgccagcccgcgaatccggccggagttccagaaagctgagtctgatctggattacattcaatac

SEQ ID NO: 95458 - DNA, 100 bp, Homo sapiens
ggcggcggtggcgccggcggcgggacaggatgacaattgtgttgtgtaaagagttgtcctctctgtctaaagagttcactacctgcctaacaactgctgg

SEQ ID NO: 95459 - DNA, 108 bp, Homo sapiens
gggggagcggggccttccacaccccctccgtgggtgtgtggacgctgtgcagagctgcaagtccgtatcactgaggctgtggccacagccactgagcagagagagctg

SEQ ID NO: 95460 - DNA, 80 bp, Homo sapiens
cgacacacaaagaatagagttgagcctgtgggacacttcggcccccaaatacatcaagatgtttgtactggatgaagctg

SEQ ID NO: 95461 - DNA, 100 bp, Homo sapiens
ctgggacagtgggagatttggaacagctttgagaagagcaagaagttggtgagatggcaaagcagtatatagagaaaagtcttttggttccagaccatgt

SEQ ID NO: 95462 - DNA, 80 bp, Homo sapiens
ggactgtcttgggcagcatgcagtgctttctggagatcctgcatattttgatgaaaattggctaaacagaatcaaaactg

SEQ ID NO: 95463 - DNA, 103 bp, Homo sapiens
gcgggctgagcggcgagtttccgatttaaagctgagctgcgaggaaaatggcggcgggagctcaccatggatgatgatatcgccgcgctcgtcgtcgacaacg

SEQ ID NO: 95464 - DNA, 75 bp, Homo sapiens
ctcactattgatggtgtagcgctttaggggaagtgacaaccatgagtggaaaaaactaattatggttcagcactg

SEQ ID NO: 95465 - DNA, 50 bp, Homo sapiens
gttcctgtggtctctgcacctcctttctgcagacagccaagtggacctgg

SEQ ID NO: 95466 - DNA, 98 bp, Homo sapiens
ccgggggtattgccgagtgcttcgtgcagagggctgctctttggcgtaaattgcaatcgattagggatcgtttctcagaatcaagttagaagtgagag

SEQ ID NO: 95467 - DNA, 75 bp, Homo sapiens
gggcccaggccccggcagcgcctgggacaaggctgaaaaagcttctgatcctgcaagttctcttcgagttgccaa

SEQ ID NO: 95468 - DNA, 90 bp, Homo sapiens
gtccccctaattagaagagcctgggaacttggtttaatgaacacacacattccagagaactgtgaatatgtaatggatgtgttgatggat

SEQ ID NO: 95469 - DNA, 97 bp, Homo sapiens
aacacgagtggaaaagattgaatgtaacaagaggcataaaacagttctcactgaactacagcaaagtgtgggatgctgtctcaggagatgaattgat

SEQ ID NO: 95470 - DNA, 82 bp, Homo sapiens
tcccactgatggttctggtttgacagcaccaggaatcctccatcatcaatgaggacacagacgtcgagggcgaggcccccag

SEQ ID NO: 95471 - DNA, 100 bp, Homo sapiens
cgtcggtgggcggccgcagctgcgaggagctcactgcggtcctaaccccgccgcagctcctcggacgcagggtggccattcagggcaactggggccttcg

SEQ ID NO: 95472 - DNA, 125 bp, Homo sapiens
ttacccgaggccgctgctgtgcggagacccccgggtgaagccaccgtcatcatgtctgaccaggttctaaatgagaagaaacttcaagaggttgatagtttatggaaagaatttgaaactccaga

SEQ ID NO: 95473 - DNA, 156 bp, Homo sapiens
agaagttaagagaatttgaagaaggcctggttagccaatacaagttttatttggaaaatctggaacaaatggttaaagggagacttgcagctcctctgctgaaacgtttaagcctctccacatccaaattgaacagcctggccatcggtctgcgac

SEQ ID NO: 95474 - DNA, 75 bp, Homo sapiens
ggaacaaactggttttctttgaagtatctcctgtgtcctttcaccagaaatatggctacacacacctttctgcag

SEQ ID NO: 95475 - DNA, 75 bp, Homo sapiens
caggactgaacagggagccaactgtttctttgaacagtaaatcagtgccctgcaggagtcattaaatcaaaactt

SEQ ID NO: 95476 - DNA, 100 bp, Homo sapiens
aatgaccacaacaagcaagcatgcagcttactgcttgaaagggaatgatgacaacaatctcaattccattttttatgaacacttgacaaggaccctccag

SEQ ID NO: 95477 - DNA, 100 bp, Homo sapiens
atgaaaaatggctctgtcggcagtgtgtttttgcaacaacaacaaagattgcttatgcccgtatagagggggatatgatagtctgcgcagcgtatgcaca

SEQ ID NO: 95478 - DNA, 111 bp, Homo sapiens
ggcgtccaaagtcacagatgctatagtctggtatcaaaagaaggcctgatcaaccccgtataaccaaagatgtaatttgttttcatgctgaagatttcttagaagtagttc

SEQ ID NO: 95479 - DNA, 119 bp, Homo sapiens
gtggtgcgctgtcttcccgcttgcgtcagggacctgcccgactcagtggcatccgtgtcattctggaccttactcccaactaccggggtgagaactcgtggttctccactcaggttgac

SEQ ID NO: 95480 - DNA, 82 bp, Homo sapiens
gctgggtacgacgacttcaactgcaacgtctgggatgcactcaaagccgaccgggcagaacaccttccaccatgaccacctc

SEQ ID NO: 95481 - DNA, 97 bp, Homo sapiens
ggcgccgtgagttcgccgctggtggctccgggcaaccactgagaaaacggaaccgaatagtcaagaggacaagaatgatggtggaaaatcaagaaaa

SEQ ID NO: 95482 - DNA, 75 bp, Homo sapiens
aaaagccaagaggaggacagttcgctacacagcaatgcatcgagcggacaaggcaaaatctcagcaagttcggac

SEQ ID NO: 95483 - DNA, 75 bp, Homo sapiens
cagacctgccaatttaccagagataattgataacaccctgtaacagctgagtggaggagaatgagattgagtgct

SEQ ID NO: 95484 - DNA, 91 bp, Homo sapiens
cgcacccccgccccgctcaccttagccccgcgcccgagaaactatgttccaacttcctgtcaacaatcttggcagtttaagaaaagcccgg

SEQ ID NO: 95485 - DNA, 98 bp, Homo sapiens
gagatcctgcaggagcgcgagtacaggacgagcctgtggagtgggagacacctgacctttctcaagctgagattgagcagaagatcaaggagtacaat

SEQ ID NO: 95486 - DNA, 90 bp, Homo sapiens
gcgaagggcgacgccaagccggaggcaaagccttctagacaagctcagtggaatctgaagggcccaccccatggaggaatgctgggtgac

SEQ ID NO: 95487 - DNA, 50 bp, Homo sapiens
ggattccaagtaactcttatttgccaagctacatcagtgatgtgggaccc

SEQ ID NO: 95488 - DNA, 75 bp, Homo sapiens
gccgcagccactgccacacggccgggaggccgagggcgcagaaggtcttctcgtgggcaccctggacgtggtgct

SEQ ID NO: 95489 - DNA, 83 bp, Homo sapiens
cgatacagcaccaaacaggaggcggccaaggcccaaactgcactgcacataaatgagccgtcagactgctacagcattaccta

SEQ ID NO: 95490 - DNA, 99 bp, Homo sapiens
ggtaccacccagttcctctcccaagcctctttcatcccatgccccgtagacaccagtcaggttccctggttgtgaaaatacatgagataaatcatgaag

SEQ ID NO: 95491 - DNA, 80 bp, Homo sapiens
aactaaatgggcagctgaaatattaccagtcactcttgcaggactgatcctttgaaatactccagccatgactaaaagag

SEQ ID NO: 95492 - DNA, 75 bp, Homo sapiens
atgagctcggttttcttatgcttataagagtggaacagctacagagggccggagctggagatgtggtctctggga

SEQ ID NO: 95493 - DNA, 82 bp, Homo sapiens
agctgcggggaggggaggggaggcgcggtcccgcagcgcccccaggctcatgtcccagttgctgatgtatattcaagatgag

SEQ ID NO: 95494 - DNA, 100 bp, Homo sapiens
gagtgatcactctcaatcccgggtacatcaggaacgtctctatcaagaatacaatttcagcaaggctgagggccatctgaaacagatggagaagatatat

SEQ ID NO: 95495 - DNA, 75 bp, Homo sapiens
ctgctcatccttgggacctccctggaggttgaaatcaaggaagcaggtggtactactacaagtaataatccggaa

SEQ ID NO: 95496 - DNA, 113 bp, Homo sapiens
cagcagcgcctgggccgcgcgctatggcaccttcgcctggcccaccactcccagaggtgagaagccctaccactgcaactgggacggctgcggctggaagtttgcgcgctcag

SEQ ID NO: 95497 - DNA, 83 bp, Homo sapiens
agggaaccctggtcaccgtctcctcaggccccctcttctctcctggaggtcagccggccccttgtggctctcaggccagctgg

SEQ ID NO: 95498 - DNA, 133 bp, Homo sapiens
gttcgtcgcctccttgcccgtgaccgtcgctagaactcagttgtgcgttgcggccagtcgccactgctaaattacagaagacatccccgtgaagactttgaatatgaagactgtgtatgtttctgtgttacca

SEQ ID NO: 95499 - DNA, 98 bp, Homo sapiens
cctcaggcgtgcgcggacggtgtgcgggaggcagtgtcgcattgccctgaagaaggccaactggcccgaatccaaaatgttatccaggagcttcctcc

SEQ ID NO: 95500 - DNA, 100 bp, Homo sapiens
aagtatcattggccttgaggaagaagacatgctctacagtgctcagtctttgagacttaattcagtgcacaaatgagatgaatgtgaacatcccacagtt

SEQ ID NO: 95501 - DNA, 100 bp, Homo sapiens
cagaatttcctgcgctgttccacctcattcaacttcaggagggagccatggatttgctgcgggagctgaaggccatgcctatcacgctgcacctgctcca

SEQ ID NO: 95502 - DNA, 100 bp, Homo sapiens
aatctgattagcatctctactgatggaaaaatttgttcatggagtctggacatgctttcccatccacaggctgaccaactgactgaagagcagattgcag

SEQ ID NO: 95503 - DNA, 75 bp, Homo sapiens
gctccacgcagtctgcttcagtgcagtgaagctggtgcaactattatctcagccactggagcctctgcactgcca

SEQ ID NO: 95504 - DNA, 75 bp, Homo sapiens
aagctcatctctgagacccggaggaggttcgaagctgagtatgtgacagcattcctctgaatattgatttgctga

SEQ ID NO: 95505 - DNA, 75 bp, Homo sapiens
acaacatccagcccatcttcgcggtgaccagtaggatggtgaagacctacgaggagggtgtgaagacagagaatg

SEQ ID NO: 95506 - DNA, 98 bp, Homo sapiens
gcgctcgcccgggctgcgctgggcgctgccgctgctgctgctgctgctgcgcctgggccagggaccattgcaatttagagatgtggccatagaattct

SEQ ID NO: 95507 - DNA, 89 bp, Homo sapiens
tggtgagtaggttggtccgaagtttgaaccggacagaagcgctggtcggcgtctggcgatttcatgcagaaagagctattggtatcatt

SEQ ID NO: 95508 - DNA, 90 bp, Homo sapiens
cggctggcccgggagcgacgtgaggaacgggagaaacagctaggtgtcagaatttatacagagcttacctgggtgtgaagaacatggaaa

SEQ ID NO: 95509 - DNA, 100 bp, Homo sapiens
ttcctgctggggctcatgtttgagctcagtgtggaggctgctggccctgccatctgtaagaagatgtcatacggatccatcgcccgtggaggtggcctgg

SEQ ID NO: 95510 - DNA, 50 bp, Homo sapiens
tcggctttcctggtcagcagcgacttggtttggagcaggtatgttaagaa

SEQ ID NO: 95511 - DNA, 102 bp, Homo sapiens
ggcagaggtggaggcgctttgaaagatcaggatcctcatgaccagccaaagagaagaagaattaggaagcataaatcaaagaaaaaatttaaaaatcccaat

SEQ ID NO: 95512 - DNA, 100 bp, Homo sapiens
gcaaaagtccattcagaaaagacaagagccctgtgagaattcctcagagagagaagactgtaataatggcgaaccccctaggaagataataccagagaag

SEQ ID NO: 95513 - DNA, 95 bp, Homo sapiens
tccaccccgctgagctggtcgccacctggcgacccttcccctccagtcacctgggtacctactgtcaacaacgggaagtggaggccattactgaa

SEQ ID NO: 95514 - DNA, 90 bp, Homo sapiens
gcggcggcggccaggtccctgctgaatcacacgccgccatccgggaggcccagggaagttaagtatgagagagaagctagtaaatactgg

SEQ ID NO: 95515 - DNA, 102 bp, Homo sapiens
tacgtcattcacaacaacaagtgcatccctgagtgtccctccgggtacacgatgaattccagcaagttccttgtggagaagcactggtataagcagtgggag

SEQ ID NO: 95516 - DNA, 75 bp, Homo sapiens
gaaaatcaaattcaggagttcaagaaacgagatgcacagcttcctgcctgacacagctcacttcaagaagtgcac

SEQ ID NO: 95517 - DNA, 75 bp, Homo sapiens
gcattgcaaggtacattgagcaggctacagtccactccagcatgaagttgcttgatagatttgactatgatgatg

SEQ ID NO: 95518 - DNA, 80 bp, Homo sapiens
ggaagcccgggaccgtttaaaaaactgttgattatggaagattcccacaagagtaccacgtcagagacagcacctcaacc

SEQ ID NO: 95519 - DNA, 75 bp, Homo sapiens
cgtgggcaccttcacctgggtctgcacgccctttctggtgggaatggaagtggccccacatctcaaagaaaccct

SEQ ID NO: 95520 - DNA, 100 bp, Homo sapiens
cggcagttgcgcgctgggattgttgcggtgcgctggagccgattctctaaccatggcacaggtagagaaacgtggaggtttgctccggaaatcttcagcc

SEQ ID NO: 95521 - DNA, 103 bp, Homo sapiens
ggttgaatgagaaccctacttgcctaaatgaggaatgtctttcctaccatctaaaatacgaaggtttctggctgggaattgaatgatctggcacgggaccctc

SEQ ID NO: 95522 - DNA, 75 bp, Homo sapiens
gggtgatttctgcatttccatctgaggacaagtgttggacagccggagtcagtctccatggagattatctttgat

SEQ ID NO: 95523 - DNA, 100 bp, Homo sapiens
ggacctgccggcacgcgactccccccgggcccaaacttgccttgcgccatggactggcagccagacgagcagggcctgcagcaggtcctgcagctgctca

SEQ ID NO: 95524 - DNA, 95 bp, Homo sapiens
tgatcgacgccgttctgaatctgtgcacctaccatcaccctgaaaacatccagctcccaccgggtatgaacggtgccttagcgtttgtggacact

SEQ ID NO: 95525 - DNA, 100 bp, Homo sapiens
gccgcttcagtccgaaggaggaagggaaccaacccactttctcggcgccgcggctcttttctaaaagtgtgccactgattaatgaacttgaatcagcaat

SEQ ID NO: 95526 - DNA, 75 bp, Homo sapiens
ccgggaatgggctacctacacctgtgtgctgggctttcacgtctacgaattatatccagatcgagagacagaaga

SEQ ID NO: 95527 - DNA, 99 bp, Homo sapiens
ggcggcgccgctcccaagatgtcgcagacggccatgtccgaaacctacggggaaggtgctattaacctggctttggctcagaaccgaagccaagatgtg

SEQ ID NO: 95528 - DNA, 78 bp, Homo sapiens
ctgctggcctttgtgagcctcagcctgcagttctttgtggtcagaaatgagaagacatgaaatgttgagggaggagct

SEQ ID NO: 95529 - DNA, 100 bp, Homo sapiens
tatgcaatgaagccctggtagatcaactttggaaacttatgaattctggttttcaaatggaacattttgatgcatcacttagtacctatttcaaggcatt

SEQ ID NO: 95530 - DNA, 100 bp, Homo sapiens
ggagacgctccatctggagtactttgaagaagccatgaactacttgctcagtcatcccgagcaccactgccggaactgtggccacatcttctgcaacacc

SEQ ID NO: 95531 - DNA, 87 bp, Homo sapiens
cacagttcctaccttatgagctcggttttcttatgcttataagagtggaacaggaagctcttcgtgggcggtcttgactggagcacg

SEQ ID NO: 95532 - DNA, 100 bp, Homo sapiens
gtcatcaacaacgacgccgagctctggggcgtcttgcagccctatgagcatctcatctgcggcaagaacgccaatggtttggttacaaaagtacggctac

SEQ ID NO: 95533 - DNA, 104 bp, Homo sapiens
tcacgctcctacgggacgaggagagggaggtgaatccgtggcagaggtttggtttaagaataaaagggccagatgtaggcgacatcagagagaattaatgctcg

SEQ ID NO: 95534 - DNA, 120 bp, Homo sapiens
cctggtccactgaaaaattcttcagattggaaaataccacaggatggagactacgagtttgacatcaccttgaagatacagtttttgaggcttcttcagagcttcagtgaccaccacgag

SEQ ID NO: 95535 - DNA, 51 bp, Homo sapiens
agcaaagaagcgctggcagtttcaaacacatatctgaagagatggattaag

SEQ ID NO: 95536 - DNA, 101 bp, Homo sapiens
acaagccccatgttctgcagcgtggcttcctttggtgccagctctttgtctaggtcagtaaaatcagcttggtggatctagcaggaagtgaacgagctgat

SEQ ID NO: 95537 - DNA, 90 bp, Homo sapiens
gccaatgtctcgctgactaagggtggacgtgatcgggtgcactccctctaccgacggacaggggccagcttccagcaggcccaggaggag

SEQ ID NO: 95538 - DNA, 51 bp, Homo sapiens
cccacacctccggaccgagggacgcgggttttcctggcaaaggagcctttg

SEQ ID NO: 95539 - DNA, 50 bp, Homo sapiens
ggaactggcccggaaacaggaggacgacagaggctgatgggaaatcctac

SEQ ID NO: 95540 - DNA, 75 bp, Homo sapiens
agccagcccgccagcatgccccagtccaaagatcaggatcctcatgaccagccaaagagaagaagaattaggaag

SEQ ID NO: 95541 - DNA, 75 bp, Homo sapiens
tcacgtcacctggcccctcaccatcaccatcctcatctctcttggaaacatgttccaaatcaagtatagatattg

SEQ ID NO: 95542 - DNA, 100 bp, Homo sapiens
aagatgtctgacatggaggatgatttcatgtgcgatgatgaggaggactacgacctgaatgcgtaatcctggatctcttgttcgcaaatcgacagcctga

SEQ ID NO: 95543 - DNA, 96 bp, Homo sapiens
cgggagggtcgaaaaaataagaaggaacccaaagaaccatctcccaaacaggatgaacatccagtcatggataaaaatgagctggttcagaaggcc

SEQ ID NO: 95544 - DNA, 100 bp, Homo sapiens
atgggagaccaccgggatgggcaggagccctctggcacaaatggaagaagaaagaagggagcaagtagctaaaattaagaagatggagatggagatggag

SEQ ID NO: 95545 - DNA, 75 bp, Homo sapiens
cctcgactccaaatggttgaaaacagatatacaggttttgcactgctgtgtgtgtggctcaagcacgtacaccca

SEQ ID NO: 95546 - DNA, 74 bp, Homo sapiens
ctatcccaggaatacagctttgcattaggttctggctccttggcagcaatggctgtatttgaagataagtttag

SEQ ID NO: 95547 - DNA, 100 bp, Homo sapiens
cccaggtcaagagcctctgcgagaaggccgctgtgctcgctgtggagaaaacgtagttggggaaggtacaggatgcactgccatggatcaggtcttccac

SEQ ID NO: 95548 - DNA, 82 bp, Homo sapiens
atccggtcctggtccctgctggttggtttggtgcacctcgatttggaggaagtagggcagggcccttatctggaaagaagtt

SEQ ID NO: 95549 - DNA, 73 bp, Homo sapiens
ccatcgtcaccgtgtgggagcgggagctgcggaaaggtgacttaagagattaaaattaatttggttgctgttg

SEQ ID NO: 95550 - DNA, 90 bp, Homo sapiens
caacgactcctggaggaaagctgtcactgccttcagcagcaccgagactggctctgcggagagcttccttctcctacatctgcttgctgc

SEQ ID NO: 95551 - DNA, 90 bp, Homo sapiens
catggaagttgattactcagtctctaaaaagctaagatcaacctctagaatcccgtagactctgcaacaagccaattcagagcttgccca

SEQ ID NO: 95552 - DNA, 75 bp, Homo sapiens
aaagacccagaatatgccaagtatctaaacccagatgacttactcaatgccttgaatgagggtatcagtcgtgct

SEQ ID NO: 95553 - DNA, 83 bp, Homo sapiens
aggatttcaacatgcctctgacaatctctagtatagctgatcagcttccttgggttttgctgatgacacaagagagctttgcc

SEQ ID NO: 95554 - DNA, 101 bp, Homo sapiens
tgtcgatgccgctgaatgggctgaaggaggaggacaaagagcccctcatcgagctcttcgtcaagccctgtatgatgagattcgtcagtttcgcaaggcct

SEQ ID NO: 95555 - DNA, 50 bp, Homo sapiens
gatgtccccaaggactaggccacgcaggtttgtggtaaatatgccagctc

SEQ ID NO: 95556 - DNA, 82 bp, Homo sapiens
tgcctcactgagcaaccaagaccaagaaggatcaagaaggtggagaagaaaagaaatctgtgcaaaagaaaaaagtaaaaga

SEQ ID NO: 95557 - DNA, 74 bp, Homo sapiens
agttgcagagctacgtggacgcaggaactccaaaaataaacagagttgtctttgttggaaactttttacgtgtc

SEQ ID NO: 95558 - DNA, 75 bp, Homo sapiens
gaaaaacactatctcttctatgacggagaatccgtttcaggaaagcaaactgaaaccgtgtcagttcagtcttcg

SEQ ID NO: 95559 - DNA, 74 bp, Homo sapiens
gaagaggtggcagcgcgagctgggaccagcgtctcggaggcgccgcaggtaaatgagctggatggtatcccgtt

SEQ ID NO: 95560 - DNA, 100 bp, Homo sapiens
cgggagggttcgaggccaatgatgggagaccaccgggatgggcagaatcctaatgtacctggctagctggtggtgagtaggggctttggggccaacttgg

SEQ ID NO: 95561 - DNA, 100 bp, Homo sapiens
tggcacagtggagaaaccgcctcgaaaacggagaagcaggaacctggcggaccgaggctgtgttcagcgaggaagcactgatccaagttccgagtgacat

SEQ ID NO: 95562 - DNA, 100 bp, Homo sapiens
caaggagaggggccatggacattggaaggggaagccccacatcagagctgttcagggctcatcgttggggtgatcctgaggtatggtacccctgctacca

SEQ ID NO: 95563 - DNA, 99 bp, Homo sapiens
agcgctcaggatggaggaagactcgatccgcctgcctgcgcacctgcattggcggcagtaagcacacaatgaatgatcacctgcatgtcggcagccacg

SEQ ID NO: 95564 - DNA, 78 bp, Homo sapiens
agacaaaaggagattctgatgaagaagttattcaagatggatcttagaaatgaagttgaaaaattacgcaatgaagtg

SEQ ID NO: 95565 - DNA, 82 bp, Homo sapiens
caaaatctacaagatgatgcagggaggagcgctcctggttgcagccagaatgcatgacttcaggaggactgtgaaggaggtc

SEQ ID NO: 95566 - DNA, 100 bp, Homo sapiens
gtgtctcccagtgatcaaaaagagagtggttgtggtgtttcccattaaacactaccaggacaaaatcaggccttacatccagctgccatcgcacagcaac

SEQ ID NO: 95567 - DNA, 98 bp, Homo sapiens
gaagaataagactaaagaaaacattttggaagaattcagtaaagtcacaggagcgagaacccgagcagcgccatgagcaacactaccgtcgtccccag

SEQ ID NO: 95568 - DNA, 90 bp, Homo sapiens
gttttgtttgactccagtgttaagagaagaaatgaggacatatcagtatcgatgttgttattcatgaggaccaatggattggcgagacag

SEQ ID NO: 95569 - DNA, 98 bp, Homo sapiens
aaggagtgcagaggcatcacctgaaaggactatcggacaaaacctttctgctgcagcgcttgtccattttcctcaaaattcttctctgcctacaaaag

SEQ ID NO: 95570 - DNA, 95 bp, Homo sapiens
cgggccggttgctaagacttggcgaagcgctgcgctcgcgcccggatccctcaggtatcacctcttctgggctcaagatggacaacaagaagcgc

SEQ ID NO: 95571 - DNA, 75 bp, Homo sapiens
ccccctgtactttgtggacttgcaggatgacttagacgactcttcctggacaagatcgacgtgatcaagcaggct

SEQ ID NO: 95572 - DNA, 100 bp, Homo sapiens
agcagccaggcagtatcgggagcaggaaagccagtgttgtggaccctagcacagagaatgctatgctggactttgtgttcacagtagatgaccctgtcgc

SEQ ID NO: 95573 - DNA, 100 bp, Homo sapiens
ggaccccaagaagaccattcagatgggatctttccggatcaatccagatggcagccagtcagtggtggagttcaacctggtgtgtgctgactcctggaag

SEQ ID NO: 95574 - DNA, 100 bp, Homo sapiens
ctattttcacgttttaatgccgagagaagaagcctgagaagatgatgcacagatagagaggcaccaggacttgagaggcaccaggacttgggaggcatgt

SEQ ID NO: 95575 - DNA, 82 bp, Homo sapiens
cgcgcctggctgagcttgccgccctgtaggcttggcgctgggctctcggtgtgtgatgagattaagagcaagcttgcctccc

SEQ ID NO: 95576 - DNA, 83 bp, Homo sapiens
ggaagcaatacatccagtatgagtttgctggcctagacctgaactcttcagataatcagagtggaggaagtacagccagcagt

SEQ ID NO: 95577 - DNA, 83 bp, Homo sapiens
cttctgcagtccctcgtccagccacccccagactgtgtacagtgccctgggcctgagggatgcctgccgctccctgccgcagt

SEQ ID NO: 95578 - DNA, 75 bp, Homo sapiens
aacagtatgtttagcaagcactgctatgaagactgagaattgtgtggccaaagcagtatttggcagtcgtattca

SEQ ID NO: 95579 - DNA, 87 bp, Homo sapiens
caattggataatatcttggctgctgtacatgacgtgcttaatgaaagggacatccaacgggctcatagagtggtagctgagcttcag

SEQ ID NO: 95580 - DNA, 74 bp, Homo sapiens
caacgctgcgctctgggctgacaggtgtcctgtggccaggcggaaagcagtgagaagcccaacgctgaggacat

SEQ ID NO: 95581 - DNA, 117 bp, Homo sapiens
caaccattgacgccatgtcgggttattcgagtgaccgagaccgcggccgggaccgaggggggatatgagactttctactcggaatatcctgagtgttgcgtggatgtaaaacccatt

SEQ ID NO: 95582 - DNA, 98 bp, Homo sapiens
ccatggacaccagcgacctgttcgccagctgcaggaagggggatgtgggccgagtgcggatcatccacgaggatggctactccgaggaggaatgccgg

SEQ ID NO: 95583 - DNA, 138 bp, Homo sapiens
aaaaagtttgccccggtagttgctccaaaacctaagtacaacccatacaaacaacctggaggtgaggaactgttcattatgaaggtggcgctgtgtctgttcatgcacgttccctttggagactagagacgctaagag

SEQ ID NO: 95584 - DNA, 124 bp, Homo sapiens
ggagagtaatgcaaagggtggcgtatggaagatgaaagtccccaaggacagcacgtgtcccagaagcttttgttgacaattccagtttccgaacaaaacatttcggcaatggtgagggcttcga

SEQ ID NO: 95585 - DNA, 90 bp, Homo sapiens
caaaggtcacctggaaattgccttattggaaaaacatttcttacaagtcggccagagcagcatgtggatctccactgatgccgccgcctc

SEQ ID NO: 95586 - DNA, 98 bp, Homo sapiens
ggagagccgccggaagtattgacggaaagcttgaattacctacatgggtgactatgaccagagcaggaccaaagtgctgcacatgagcctgaacccca

SEQ ID NO: 95587 - DNA, 74 bp, Homo sapiens
gctacagaaacaaggtcgtcggctggcggagcggcttggccctcatctttgtgtcccatggagccggagagcac

SEQ ID NO: 95588 - DNA, 100 bp, Homo sapiens
taacccgtgtgactttgactggggcagcccaatggatccaatggtgatgaagagacctcagttgtatggcatgggcagtaaccctcattctcagcctcag

SEQ ID NO: 95589 - DNA, 80 bp, Homo sapiens
gtgttcaccatcctggccccggaaggattatatctgtccaagatgcgagtctggttttatcgaggagcttccggaagaga

SEQ ID NO: 95590 - DNA, 75 bp, Homo sapiens
gggaaacgcagaggcagaaaccaggaaattctgaaacagccacacctacaaatgtagacttgcctcaggtcatcc

SEQ ID NO: 95591 - DNA, 82 bp, Homo sapiens
tcgggttattcgagtgaccgagaccgcggccgggaccgagggcaatgagaagcacgaccttcatgttacctcccagcagggc

SEQ ID NO: 95592 - DNA, 90 bp, Homo sapiens
cttctttgtgactcagctggccatcacagattctgaagggagtggtaatggaagtgaagatgcttcaaaggacagtggagaaggttcctg

SEQ ID NO: 95593 - DNA, 100 bp, Homo sapiens
cggcttcctagtgagtcggcggctgatttagaaggaggttcaggctacggtgagccgaaggcccctgtgtccgtctgggatgaggaggaggatggtgccg

SEQ ID NO: 95594 - DNA, 75 bp, Homo sapiens
tggacagatggacttcaaatgctgtttgtattccagagactagtaatccagtccctcatagcactggtgaatgac

SEQ ID NO: 95595 - DNA, 75 bp, Homo sapiens
agtgtctcctttgtctactatcaacagactcttcaaggacggtatgccctggtagttgcaggagatattgctgta

SEQ ID NO: 95596 - DNA, 82 bp, Homo sapiens
aattttctacagataccaaaggaaaaccaacttctcggacacaggtggtattggtttgccttaaaaaggggttaccatgcag

SEQ ID NO: 95597 - DNA, 82 bp, Homo sapiens
gtggtgagcctttttgtcactgaaaatgcatccgatgcagatttatggctcctgaacagttgcactgtaaaaaacccagctg

SEQ ID NO: 95598 - DNA, 82 bp, Homo sapiens
acacattttatgttgtgtcatttcgaaggtggatccaaacttctacagcaaaaacttacttcttttaggaaagacatacttg

SEQ ID NO: 95599 - DNA, 100 bp, Homo sapiens
cccacgcagacatcttcagccgctgccagcctgtcctgggagctggagaggatgtcagcgagcctgacattgccctccctgaatgcatcaaatactcttc

SEQ ID NO: 95600 - DNA, 98 bp, Homo sapiens
gaaaactcgatcagaagtcatttgcagcatccactttttagatggcgtggtacagacctttaaagttactgctacctcggacctgaacagctgcctga

SEQ ID NO: 95601 - DNA, 100 bp, Homo sapiens
aggaagaggctctgggctggcacatgtcctgtgggccaaagctgaccaactcccccaccgtcatcgtcatggtgggcctccccgcccggggcaagaccta

SEQ ID NO: 95602 - DNA, 74 bp, Homo sapiens
gagcgcggaatcggggagcgtccggagctagctggatcctctaggcaggtttttggattcaaagcataaaaacc

SEQ ID NO: 95603 - DNA, 100 bp, Homo sapiens
ggtgactggtgatcacatccccaccccacaggatctgccccagagaaagtcctcgctcgtcaccagcaagcttgcggggctccagggagcagtgtcaggg

SEQ ID NO: 95604 - DNA, 100 bp, Homo sapiens
ctacgatgtgatcgccaaccagcctgtcgtgatcgacaacgtctcaagattctgccctccaagaaagtcttgccatgattggataggacccccagataaa

SEQ ID NO: 95605 - DNA, 91 bp, Homo sapiens
aaaagtaaatgggaagctatttcctttgcctttggctggggaacagaccagggaattggtggatttggagaagagccgggaattaaatcac

SEQ ID NO: 95606 - DNA, 100 bp, Homo sapiens
agaattttactgcgaagttttgctcctggatgaatccaagttaacccttaccacccagcagcagggcatcaaggatctgggattggcacaagactctgct

SEQ ID NO: 95607 - DNA, 100 bp, Homo sapiens
ccagagctggtcgccgagattgtactggtcgacgacttcagtgatcgagtcgggaacatgccctgtgtgccgccgtcatttcccacctgcggttattgaa

SEQ ID NO: 95608 - DNA, 90 bp, Homo sapiens
ctggagatggtggagtccgtcagcattgaatgccccagaggagcccgaaacctcccaggcttggtgcaggaaggagagcccttcagcgag

SEQ ID NO: 95609 - DNA, 100 bp, Homo sapiens
gcagatcaaaggataaacttgaccaggtttccagtgaaataaagacgagttgtactgctgtcacaggaaatggacgctggattacaagcatggcagctca

SEQ ID NO: 95610 - DNA, 89 bp, Homo sapiens
tacacccacttctacttctgttatcgctggttcctgctggattttaagagaggcgggcagggctgggcagcggcctgagtctcagcgga

SEQ ID NO: 95611 - DNA, 50 bp, Homo sapiens
gggccatccctcgaggaagtttcatcagtgggtgtataacattctcgaca

SEQ ID NO: 95612 - DNA, 75 bp, Homo sapiens
gccaaaccaaccgcacccctgaatttctccgcaaatttcctgccggcaaggtggattacaaagctgacgagtggc

SEQ ID NO: 95613 - DNA, 75 bp, Homo sapiens
aaaagaggagcagcatggcatttcagtcactggtttgcagagtccagcctgatctagttgaatctgaagatgtgg

SEQ ID NO: 95614 - DNA, 95 bp, Homo sapiens
tcaccagtgtggactttgacccctcggccgccatggcatcagatgaaggcaaactttttgttggagggctgagttttgacaccaatgagcagtcg

SEQ ID NO: 95615 - DNA, 74 bp, Homo sapiens
ctgtagaacatgcaagaaaaaattccattcagcctgcttggtcatagaaggttatgaaatagcctgcagaaaag

SEQ ID NO: 95616 - DNA, 82 bp, Homo sapiens
cagtgccactcacataagaagtgcccggtataattgaaatcctcaaaggaatgcaagaattgggagtacatcctgatcagga

SEQ ID NO: 95617 - DNA, 101 bp, Homo sapiens
aaagaacagcagatggtaatgaggggccaccgagatacctctatggttcatgagcttaatagggaccggaagagtccttgaaccaaaatagctcggcgggc

SEQ ID NO: 95618 - DNA, 83 bp, Homo sapiens
ggagcatcaaggagaaaatgaaagctggctcacgaacaggcaaaccacaggctgccccctcggtcactctgttcccgccctcc

SEQ ID NO: 95619 - DNA, 75 bp, Homo sapiens
ggcagcgcccgcggagacgtgaagaggggcagaaagcgttttgtaagcgaaggagatggaggtcgtcttaaacca

SEQ ID NO: 95620 - DNA, 101 bp, Homo sapiens
gaaacttcctggcttacacggcggtccccacggtcctggtaacccccctgggcgcccttggagtaccgttcgggcagttgcagtggtgcagaatggctgac

SEQ ID NO: 95621 - DNA, 90 bp, Homo sapiens
gctagcagagatgtacttttcagacttcagcaaacccagaccgcaacagatgaccaaggaagtttgggattatgttttcttcaaggaggc

SEQ ID NO: 95622 - DNA, 98 bp, Homo sapiens
ggaaatgcacaacaagatctacgccattcctattgaaatcatgcagggcactggggaagagaggttggaaagaaccatgactgtattcaggaaggcac

SEQ ID NO: 95623 - DNA, 90 bp, Homo sapiens
cggaggcttggtgactccagtggcccagattttcgacaatgaagccaaagacgtggagagagaagtttgctttattgatattgcctgcga

SEQ ID NO: 95624 - DNA, 100 bp, Homo sapiens
acgcgctcactgttcaagggaaacttttgggttgcaaaagcttctcatttcagagagatgccaggatcctaagtgcctgccaaacttaccaattctaagg

SEQ ID NO: 95625 - DNA, 100 bp, Homo sapiens
cttatggagaagtacctgaagctgcaggatacctgccgtactcaggttgaaggggcccggccaggactcggggaagggtggcctgagagcagcgatgacc

SEQ ID NO: 95626 - DNA, 97 bp, Homo sapiens
cgagctccagccgaaggagaagggggtgacttctgacagctctctccatggaaggaggcggcggccgcgatgagccttcagcctgccgggcagggga

SEQ ID NO: 95627 - DNA, 74 bp, Homo sapiens
ggggaaagaagtccgagatgcaaagagctccactggttcaacagcctctcctccagtttcgaccccagtcacag

SEQ ID NO: 95628 - DNA, 117 bp, Homo sapiens
ggaacctcctgagggctgtgaaagggtcaaagtctttgaggaatgctcacccggtcagggggcctggggcagccccgggacctcctcctcctgtggagacaggccgtggtgctgggg

SEQ ID NO: 95629 - DNA, 75 bp, Homo sapiens
cgctgctgctgctgctgctgcgcctgggccaggtctattctggataagcaggttttgtgaagacatttattcttt

SEQ ID NO: 95630 - DNA, 75 bp, Homo sapiens
agcatttaaccagcatggctacttcatattttggaaagcagtttttaagacaaggattaatgaaaatcaagttcc

SEQ ID NO: 95631 - DNA, 90 bp, Homo sapiens
cacgtaaaacgctttcaggtcggcgtctcgtttcatcctcacaacagccagagtgaagacaaggtcaaggccattgccaacctgtacggc

SEQ ID NO: 95632 - DNA, 98 bp, Homo sapiens
gctgccgaaaacaagccggaaggcccagttcaatctgctgagcagcaccatggaccagatgagcagccgcgcggcctcggccagcccctacaccccag

SEQ ID NO: 95633 - DNA, 50 bp, Homo sapiens
ctctcgtgaacatagctttaataggctacatccgatactcccagatctgt

SEQ ID NO: 95634 - DNA, 75 bp, Homo sapiens
aaacaaactacccattttcttttttggaactcatgagacaatcttgtggaagaagaatgaagttgctgattatga

SEQ ID NO: 95635 - DNA, 100 bp, Homo sapiens
caactgaagattcatacgcagctggcagatattatcatagttgctgcagatgcaatgaacctcattttacttttagtcactgaaaaattggaagatgtag

SEQ ID NO: 95636 - DNA, 83 bp, Homo sapiens
ctttctggcctggaggctatccagctttgactttttaaatgacagagaagagcatgagcctgggaggacatcccaacacccgg

SEQ ID NO: 95637 - DNA, 100 bp, Homo sapiens
ctgagaacggccaacaggctctttggagagaaaacttgtcagttcctctcattctgggagatgattggtgaggaacacgggatcgacttggctgggagcg

SEQ ID NO: 95638 - DNA, 90 bp, Homo sapiens
caggaacctgggcgagcagcggcgggggcccgagggatgccatggacaatattaccaggcagaaccaattctacgatacccaagtcatca

SEQ ID NO: 95639 - DNA, 98 bp, Homo sapiens
tgccaactacacctgtgtggccatctcctcgctgggcatgatcgaggccacagcccaggtcacagtgaaagaccacagcaccgggaagtccagtcagc

SEQ ID NO: 95640 - DNA, 74 bp, Homo sapiens
gcggtggtgaagatggattactgaaagttttgaaattagagacgcagacagatgtgttcagagcaacattgttt

SEQ ID NO: 95641 - DNA, 97 bp, Homo sapiens
aagccagttgctactgctcctattcctggtactccatggttatcaatagtctggctgtctatcgtcatcgtgagactgactttggtgtaggagttcg

SEQ ID NO: 95642 - DNA, 100 bp, Homo sapiens
gcgccctcggctcctgcgcgaaggcaacacggttcgcagctttcgggcggcagcagcagacggttgatgatgaagcgccggccgtgtaaatgaagatcgg

SEQ ID NO: 95643 - DNA, 74 bp, Homo sapiens
ccaaccaaaaccgtgaatggtgtctggaggagtgagagccggcaggtggaagattgctctgctgtgaatcgtgc

SEQ ID NO: 95644 - DNA, 74 bp, Homo sapiens
ccgaagcggggaagtgggacaagatggtttacatctcgaacggtggctgcagtgctgactctaccctttgacgt

SEQ ID NO: 95645 - DNA, 50 bp, Homo sapiens
aacagtttatagtcacttcagggtcagcatccctaggccaacacccccag

SEQ ID NO: 95646 - DNA, 82 bp, Homo sapiens
ggcgaaagcgaaggcggctgctgggcaggcagccgaatccggctggagagccgagctggtacatgtcccagagcaagcacac

SEQ ID NO: 95647 - DNA, 122 bp, Homo sapiens
cgggccgagatgtctcgctccgtggccttagctgtgctcgcgctactctctctttctggcctggaggctatccagcaggctgtggccaggccagctgggctcggggagcgccagcctgagag

SEQ ID NO: 95648 - DNA, 95 bp, Homo sapiens
gtggatattgggcttgacagctgcaaggagttactgaaggaagtaaaaatgttgagtagttcaaaatctatgaaggaactcactgaagaacagca

SEQ ID NO: 95649 - DNA, 100 bp, Homo sapiens
aacatgtattggttattctaacagacatgagttcttatgctgaagcacttcgagaggtaagccaagatgggtgcatacaagtacatccaggagctatgga

SEQ ID NO: 95650 - DNA, 100 bp, Homo sapiens
aaaaatgacatcagtttctggaagaagaagaagagcatgatcggcatgtccaccaaggcagtctgaccagtgcacaggacttcagggcttcctggtgttc

SEQ ID NO: 95651 - DNA, 97 bp, Homo sapiens
ctttaaccccaaaattgagtcctacgctgctgtgaatcacatatcccaactgtcagaggagcagggcggcgactggcggcgcgatggacctgaccgg

SEQ ID NO: 95652 - DNA, 51 bp, Homo sapiens
gcagtggtcgcttcttctccttgggtctcactgtgcgggcctgtttagcac

SEQ ID NO: 95653 - DNA, 100 bp, Homo sapiens
acaagcagaactggattccaaagttgaagttttgacctataaaaaggcagatactgatctggaccctgctttctcggctgtgattcacgacaaactccag

SEQ ID NO: 95654 - DNA, 87 bp, Homo sapiens
ttcttccagcttctgctgtccttctttgtggagagcaagcgtatccagtatgccaagaccgactcagatatcattgccaagatgaaa

SEQ ID NO: 95655 - DNA, 100 bp, Homo sapiens
ggtcttccaggaggccgaggacacaccgctggatcagtgtaagggaaggcagagaaaatccatcaagttgtaccctacccaccctttggtgacttttcca

SEQ ID NO: 95656 - DNA, 51 bp, Homo sapiens
gtcggggatcggtcgcctgagagagctccacgcaggagatcggtgaggagc

SEQ ID NO: 95657 - DNA, 74 bp, Homo sapiens
gaactcttactaatgtctataaagccagtatgatagcaatgatggcagggagctgcttccctacctggaaggag

SEQ ID NO: 95658 - DNA, 83 bp, Homo sapiens
cgacggccccgcccccttggccagccaactggacagcggagcacgatgattgatagctggaccagctattccttctgttgtgg

SEQ ID NO: 95659 - DNA, 90 bp, Homo sapiens
aatgatgatgtgaaaacagaagctgtggctggatggtctcactgtgttgctgatcttgaactcctgacctcaagcaatcctctgtcttgg

SEQ ID NO: 95660 - DNA, 75 bp, Homo sapiens
gctgagtggtttttcggatcatgtctggtggctccgcggattataacaggctcttgtcaggatggtgaagctgtt

SEQ ID NO: 95661 - DNA, 83 bp, Homo sapiens
accggtccccaacgcatcatgccagggagccaagcgtcctgcccggccgcttcttccccgggagctcgcagggctgcgacgcc

SEQ ID NO: 95662 - DNA, 75 bp, Homo sapiens
gtcggacctgcacgagctgtctggccgccatggcatcagatgaaggcaaactttttgttggagggctgagttttg

SEQ ID NO: 95663 - DNA, 102 bp, Homo sapiens
cgcggttaaccacgtctcgtccacgacctccctagctacagagggccggagctggagatgtggtctctgggagtcactctgtacacgctggtctttgaggag

SEQ ID NO: 95664 - DNA, 75 bp, Homo sapiens
cccgggcgccaccgctgccacctccgcgagctcattgctatggacagtgctatcaccctgtggcagttccttctt

SEQ ID NO: 95665 - DNA, 96 bp, Homo sapiens
tcttgtctcgctggcctgcgacccagccagccagcaacctggaccggtgagaagccctaccactgcaactgggacggctgcggctggaagtttgcg

SEQ ID NO: 95666 - DNA, 83 bp, Homo sapiens
atagtgcaaccacttcactgaactcaaaggtctgaagaactgttgcccaattcaacagtgccagcattccaactttgttaaac

SEQ ID NO: 95667 - DNA, 100 bp, Homo sapiens
gcctttgccatcactgccattaagtggaagacctggagcggaacaacggctccctggaccggccctactacatgtccaagagccttctaaagattctggg

SEQ ID NO: 95668 - DNA, 98 bp, Homo sapiens
tttgtactatcctcggtgctgtggtgcagagctagttcctctccagctcagccgcgtagggatcaacgagcaagggctgtatcgaattgtgggtgtca

SEQ ID NO: 95669 - DNA, 75 bp, Homo sapiens
ggccgggagcggagcccctgtggaacctgtctgagaaactctctgaacaagaattacaatttcgtcgtctcagtc

SEQ ID NO: 95670 - DNA, 80 bp, Homo sapiens
agaatctaccagtccaatatgctaaatagatttttggaagtaccagcacagtgacgcttcctgaaaccttgttgtttgtg

SEQ ID NO: 95671 - DNA, 100 bp, Homo sapiens
aattggaatccaccctgtctgtgcagagggtcttactacatattgcaacagaagataatattggaggtgaagagggtaacatgaagtttggcactaccct

SEQ ID NO: 95672 - DNA, 75 bp, Homo sapiens
agctgttggcctctcaagagaccgtgcagtatgtgccaagagttgtaacctctgcacaacagaaagcaggaagaa

SEQ ID NO: 95673 - DNA, 80 bp, Homo sapiens
gagcgagtcgccgctgcagccctagtgactgcggcctgcatcccgaacacacgcaggacttgaaagatgttactaataat

SEQ ID NO: 95674 - DNA, 90 bp, Homo sapiens
ctggagatggcccgacagaagaaggagagtgaggctgtggagtggcagcagaaggccccggtgtttgagttcgtggagcagctgaggaag

SEQ ID NO: 95675 - DNA, 98 bp, Homo sapiens
tctccatccagatcagctgaatcagagtttgcattgttaacaagattgggaaaatgaggtacgttagtgttcgcgattttaaaggcaaagtgctaatt

SEQ ID NO: 95676 - DNA, 50 bp, Homo sapiens
catcaatgcttcattcatcaacatggcagctaccattgacatgaatttcc

SEQ ID NO: 95677 - DNA, 75 bp, Homo sapiens
cgaatcttcactcccgctgtctcagcagtctacagcacgataaggagtcaggccagggcgggatgacactcattg

SEQ ID NO: 95678 - DNA, 50 bp, Homo sapiens
ggaggagtggattaagtgcattaagcctctccttccgatgaaaagagaaa

SEQ ID NO: 95679 - DNA, 89 bp, Homo sapiens
ccaaattcttcgttctgtgcggcgacctcatccacgccatgccagggagaagacatttttttggacatgtttgaagatgagtataggag

SEQ ID NO: 95680 - DNA, 74 bp, Homo sapiens
gaagtccgaggcccttcgcaactggcaagatggcggctcagcggcagcgggcgctggccatcatgtgccgcgtc

SEQ ID NO: 95681 - DNA, 100 bp, Homo sapiens
tggacgttgtctaaatttcggtagccatggcacaagaatataatacaaggtctcgctgttctacctaggctgttctagaactcctaatgtcaagctatcc

SEQ ID NO: 95682 - DNA, 75 bp, Homo sapiens
ccgtgtcggagatccgctcgcgcgccgaagattattcagagctgggagagcttcccccacgatctcctttagaac

SEQ ID NO: 95683 - DNA, 90 bp, Homo sapiens
gatgatggaactctggtggtttcaggaaggcatagaatgtcaagctaaccaggcgtccgctacttcagaagagtgtactgtcgcatgggg

SEQ ID NO: 95684 - DNA, 100 bp, Homo sapiens
gacatctgctgccggaaggggtcccgaagccccctgcaggaactctacaacccaatccagaaagaaggggatcaacctgaaagagtccaaccaatcgcat

SEQ ID NO: 95685 - DNA, 75 bp, Homo sapiens
gatctctctcgctgtgagacatgtctgagactcctgctcagtgtagcattaaggaccagtcctgcctctgttgta

SEQ ID NO: 95686 - DNA, 100 bp, Homo sapiens
agaaaagtggatgctgccccctcaaggtgctatctcagagaccaggtggagccatcgaagcccccacccacaggctgacagaggcaccgttcaccagagg

SEQ ID NO: 95687 - DNA, 88 bp, Homo sapiens
ttctatgtttccacatcggtcagaaaaagatttcctctgtgacgagggtgcaggtatctctggggactacatcgatcgcgtggacgag

SEQ ID NO: 95688 - DNA, 75 bp, Homo sapiens
gcttggtgtggtgtgcggaggagctccaggcccgtcggcgcggagccgccccgggggaaggtgcggaggacgcag

SEQ ID NO: 95689 - DNA, 98 bp, Homo sapiens
atagctgttctccagcctttctggagggatgcagagcctttccttaggacaaacaagaaaagtcctccatacattttctccccaattccattccttgg

SEQ ID NO: 95690 - DNA, 100 bp, Homo sapiens
ccggggttcgaggcagctgaggggaacaccaagtgccgagcatctgtgttttgtgtgagcctggaccccaagaccaataccttggcagtgaccgggggtg

SEQ ID NO: 95691 - DNA, 83 bp, Homo sapiens
ctcatccattctcctgccacccccagacctcctcagctccaggaagctgaatatggtgggcatgatcagatagatttgtatga

SEQ ID NO: 95692 - DNA, 75 bp, Homo sapiens
gggatttacgtggagatcaagcgcagcgatgtggccacagatgtctttaattccaaaaacctggccgttcaggca

SEQ ID NO: 95693 - DNA, 97 bp, Homo sapiens
gccagaaaggattctaataactcggtgtcaaagccaagacataaactcaaccccttctcttccaaaagccagagactgctgctactttgaaacgtac

SEQ ID NO: 95694 - DNA, 98 bp, Homo sapiens
cgaagttgaaggtgacaaccggtatattgcaaataccgtagagatcctgttcatcttcatcgacagcgaccacaccgacaaccagcgcatcctcgagt

SEQ ID NO: 95695 - DNA, 128 bp, Homo sapiens
atttggccttcagtggcatcacgccttatgggtatttcttaatcagcgcttgcaaaggatcagattttattaagacctctactggaaaagaaacagtaaatgccaccttcccggtagctatagtaatg

SEQ ID NO: 95696 - DNA, 74 bp, Homo sapiens
attggattcgttactgctttgcaacgcgcacctaactccagacggtgatcgttggctcctacttgattgcacac

SEQ ID NO: 95697 - DNA, 83 bp, Homo sapiens
gaagccgcaaccagagccgccgccacgatcaatgtccgagttaccaccatggatgcagagctggagtttgcaatccagccaaa

SEQ ID NO: 95698 - DNA, 98 bp, Homo sapiens
gaacatcttcccctggaagtgttagaagctgggattaaatctggacgctatatccagataagacaaaacccctggcttctgtaactaatgccaacact

SEQ ID NO: 95699 - DNA, 100 bp, Homo sapiens
gtgcgagtggggaagctgctaacccgacccggattggcgctgaggtggcccgtggggcagaaatggtggagtcaatgaagaaagtagcagggatggatgt

SEQ ID NO: 95700 - DNA, 100 bp, Homo sapiens
cctggggaatgcttttttatctcatattagtgcctgtgatggcatctttcatctaacacctccagtcagcccggtcaagcatgacagcaactcaaactcg

SEQ ID NO: 95701 - DNA, 51 bp, Homo sapiens
gcctcccaagtagctgagattacagcgtgagtgcatctccatccacgttgg

SEQ ID NO: 95702 - DNA, 100 bp, Homo sapiens
gcctcttcgagcgccgcggacgcgtcatcgagtgtgacgtggtgaaagatgctggaatgggagatggctgtgagagagaaggaggtggaggcaatccagg

SEQ ID NO: 95703 - DNA, 96 bp, Homo sapiens
atttacatcaacaggagacatctccatttactatgatgagaaagcaatgaagcttggagatacatgggtggctttgcaaagagtgtttccttttct

SEQ ID NO: 95704 - DNA, 116 bp, Homo sapiens
agattggagacctcggtctggcaaccctgaagcgggcttcttttgccaagagtgtgataggatagcattgaagctgaacttacaagaagagtagacatgatggaactgtgacaaaa

SEQ ID NO: 95705 - DNA, 76 bp, Homo sapiens
ttttgccggaggagcccctcaggccaatattccaacccgggaccggctagagggcatggcagccttcagggagaag

SEQ ID NO: 95706 - DNA, 75 bp, Homo sapiens
ccaggagctgcggccccgtccggcccgggctggtcagcccaaggccaaccccactgtcactctgttcccgccctc

SEQ ID NO: 95707 - DNA, 100 bp, Homo sapiens
cgacccgtccttcactcacgccatgcagctgctgacggcagaatccacacaggcgacagaccctacaagtgcccacatcctggctgcgagaaggctttca

SEQ ID NO: 95708 - DNA, 110 bp, Homo sapiens
ggaagagttgtggcgaggcagatcctgccccgtggccgcggccgtctcgttgcctgcggacacgctgggcctctgtcctgatgctgctgagctccctggtgtctctcgct

SEQ ID NO: 95709 - DNA, 99 bp, Homo sapiens
tctcaaaccgcttagcgaggaaagggccaattcctgtccccccagcagcatggcatcgtgtgctgaaccctctgagccctctgccccactgcccgccgg

SEQ ID NO: 95710 - DNA, 75 bp, Homo sapiens
ccgccattttgctaccaagaaagccaaaggactgaatttgctcttaaagaaatcatgtcctctggaggtgctgaa

SEQ ID NO: 95711 - DNA, 115 bp, Homo sapiens
gccgagtcaagccgccgcctcgacccagggcccgcgggccaggagagcgctcggcggacaatgcagatcttcgtgaagactctgactggtaagaccatcaccctcgaggttgagc

SEQ ID NO: 95712 - DNA, 73 bp, Homo sapiens
ttgacgaggctgcggtgtctgctgctattctccgagcttcgcaatggccaggtcagagcagcccaccatggga

SEQ ID NO: 95713 - DNA, 100 bp, Homo sapiens
cgggacgtgcggcccagcgagttggtcggtcccggggtcacccgctacgggaagcaggcctcgccacagtgagaaagatcagtctaaagaaaaggagaag

SEQ ID NO: 95714 - DNA, 98 bp, Homo sapiens
cgtgctgggcaccggcctgacgataacagcccgccgtcagtggaaacatatttatgatgaattaggcggtaatcctgggagcaccagcgctgccactt

SEQ ID NO: 95715 - DNA, 75 bp, Homo sapiens
accgtctattgtcattcagagaaagtctctcggactttttccaaaagctaaaccagccccagaaatatttgaaaa

SEQ ID NO: 95716 - DNA, 75 bp, Homo sapiens
gactcgggccaaatttgaagagctcaacatggtgtttggagaagagggattgaccctgaatcttgaagacgttca

SEQ ID NO: 95717 - DNA, 85 bp, Homo sapiens
gaaaaattaatcaacagagtgggacctaatggtgagagttccgccatggagtcatagttgcagctgactccagggctacagcggg

SEQ ID NO: 95718 - DNA, 83 bp, Homo sapiens
gtcggcggctcagttgtccatgaccctgaaggtccaggagtacccgaccctcaagatgatgtctttctacctaaagatattga

SEQ ID NO: 95719 - DNA, 97 bp, Homo sapiens
agcactgaaacaacacaaaaccctatctcaagaacttgttaacctccggggagagctagattgagaggatccagaatccagatctctggaatagcta

SEQ ID NO: 95720 - DNA, 98 bp, Homo sapiens
tgacatctttacacgggatgcttgtgccctcctggggctctccgtggagtcccctctcagtgtcagaaatgtggatctgagagaatacttgtctgaag

SEQ ID NO: 95721 - DNA, 50 bp, Homo sapiens
gcgaaaaccagcgtctggtgtctcagtgatatggagaatgcagaaaacat

SEQ ID NO: 95722 - DNA, 83 bp, Homo sapiens
cgaggagtgcgtcaaggactccccgcgcttcagggcagcgggtggcatgagacgtgggaacatgggccacctcacacggatcg

SEQ ID NO: 95723 - DNA, 100 bp, Homo sapiens
ctcacctccacctacctgaagcagatgaagcttcgagtgatgaattcccaggagcaggcagaggtggaggagacactgaagcgactgcagagccagaagg

SEQ ID NO: 95724 - DNA, 75 bp, Homo sapiens
acctcggagtggcggaccacaaggaatcccgttctgcttccagaagtggaagtgctcacggatcggggaaatctg

SEQ ID NO: 95725 - DNA, 82 bp, Homo sapiens
ggagaccctcacggagctgggcgacgagctgaccctgggagacatcgacggcatcctgggctccccatcccaggaggacctg

SEQ ID NO: 95726 - DNA, 78 bp, Homo sapiens
cgcctgccagaggtgcaaagggatgtgcccaagtcagagaaacttgcccaggccaaagaagagaacgtgggcttacat

SEQ ID NO: 95727 - DNA, 87 bp, Homo sapiens
actgtgtgcacttggaggcttcaaagagacaatcaagataggatccgaggttcaggaatgtatcctgtcaggtataatgtcagtgaa

SEQ ID NO: 95728 - DNA, 100 bp, Homo sapiens
tgaagctttgcagccttgcagtccttgtacccattgttctcttctgtgagcagcatgtcttcgcgtttcagaggtttctgggtggagcggacccctgtgc

SEQ ID NO: 95729 - DNA, 90 bp, Homo sapiens
atcgacctgtccgccctgcgggtcgcctgcgaggccgctggccaggcctgagcctctgccaccatggccattgtgcagactctgccagtg

SEQ ID NO: 95730 - DNA, 75 bp, Homo sapiens
gctttgggcggggcggagccgagagccacactttcaagtaaaccagggcgaccattgacgaggtggagacggacg

SEQ ID NO: 95731 - DNA, 82 bp, Homo sapiens
aagcagccaggctaaggccattaacaccctggagactcggggggatatgagactttctactcggaatatcctgagtgttgcg

SEQ ID NO: 95732 - DNA, 50 bp, Homo sapiens
ccagaaatggcaaatgtgtggaccccatgccacagctggatgtgactgag

SEQ ID NO: 95733 - DNA, 100 bp, Homo sapiens
ccgcccgccagccatgagctccacgcagttcaacaagggcccctcgtacgggctgtcggccgaggtcaagaaccgggatgcagcaccgaggcttcctcct

SEQ ID NO: 95734 - DNA, 75 bp, Homo sapiens
cgcggcggcaccgggaggccgggccgagcgggcatttgatgtagaactactgtacatagcacagttctttaaaat

SEQ ID NO: 95735 - DNA, 100 bp, Homo sapiens
ggcggctggactaaacaggtcacctgcagcgggacgaccctgggacagtctccactggggcagatccagctgaccatccggcacagctcgcagagaaaca

SEQ ID NO: 95736 - DNA, 90 bp, Homo sapiens
ccatgaatcaatgtctggtagccaccggcactcacgacaaaacctgctacaaccccctcttcaactacgaggacatgcaggagatcaccc

SEQ ID NO: 95737 - DNA, 51 bp, Homo sapiens
ggtggagagctggtggtttcacaagttagcactctacgtatatgaatatct

SEQ ID NO: 95738 - DNA, 100 bp, Homo sapiens
tccacttcttacaagaccgctacatcgtcgtgggcgtggagaagtatgaagaggagatcaacaaacgcacagcagccgagaatgactttgtggtcctaaa

SEQ ID NO: 95739 - DNA, 75 bp, Homo sapiens
tgcagatgcctgcacacctcctgtaggttcagctgcagcccggaaagaaatcataagaaacaaaattcgagcaat

SEQ ID NO: 95740 - DNA, 74 bp, Homo sapiens
ctgctccagctggagtttggagaggtgcgatcacaactgaaactcagttacaggtcggttcacccagaagccag

SEQ ID NO: 95741 - DNA, 74 bp, Homo sapiens
cagccaagaagcagtgcctgctgcggctgggggtgctgcgccaggtctcagtgctgtgccccccccagagccta

SEQ ID NO: 95742 - DNA, 100 bp, Homo sapiens
caaaggctttgatgaatacatgaaggagctagctggaccagctattccttctgttgtggcgtatccgaaaaggagtcagaccagcactgcagatagtgac

SEQ ID NO: 95743 - DNA, 100 bp, Homo sapiens
cagagatgctgagcgaagactgtaaggagaacccttcctgacacagctctccctgaggagcagccacattccagctcccagtgcgcccctctccactgtc

SEQ ID NO: 95744 - DNA, 100 bp, Homo sapiens
atcttctcctgctccagcacacaggtggcgcttctcacctggggcgggtgggttctgcaccaccctcccaccctccttcctccgtgtggacgatagagcc

SEQ ID NO: 95745 - DNA, 82 bp, Homo sapiens
ggctcatcgtgatcccggcgacatactacctctggccccgagatcagaatgccggttaatgactccagagagtaagatcaga

SEQ ID NO: 95746 - DNA, 100 bp, Homo sapiens
ggaaaacacactagagaactgctaccaggagagcctgacaaggagctgaatcctaagaagaagatttgggagcagatccagcctgatcttcacactaatg

SEQ ID NO: 95747 - DNA, 100 bp, Homo sapiens
cccagctcggcccgcgggggagccccgggagccgcacgggagatcttgtgcgaaaactcaaagaagataaagcaccccaagtagacgtagacaaagcagt

SEQ ID NO: 95748 - DNA, 82 bp, Homo sapiens
ctatagcaatctggttttcttggttaagtgggcagaccaacatccacctcagcaaaaacttcttcctgacgaatcgcgccag

SEQ ID NO: 95749 - DNA, 78 bp, Homo sapiens
gcggatcgcgtggactggaagtcacactgcggcgaggctgggaggcggcagaatgcagccagaggagggcacaggctg

SEQ ID NO: 95750 - DNA, 50 bp, Homo sapiens
cccttctctcccctccactttctcccggacttcccaagtaagaagcggaa

SEQ ID NO: 95751 - DNA, 51 bp, Homo sapiens
ccggctgccttccacctccagtgctgccactgtagtctgcagatcaaagct

SEQ ID NO: 95752 - DNA, 88 bp, Homo sapiens
accagtggaagcaggagaagcagcaattatcgtccgagcaggcctatatgaacccaatagcaatggcgagatcaaggggtccaatcca

SEQ ID NO: 95753 - DNA, 100 bp, Homo sapiens
ctggaccacggcgcagacgcgggcgagctgcggctcggacgccagcggacacgcgggcgaggtgcccccacttgactctcgccccagctccccagccctc

SEQ ID NO: 95754 - DNA, 75 bp, Homo sapiens
cggacagattgaccttcagagcgaggcgagggctgcattgcccttcggttagaggccacagaaacgcagctgccc

SEQ ID NO: 95755 - DNA, 100 bp, Homo sapiens
ctggaaagcaagggattgctggctacagcttcagaagaccgaagcgttcgtatctggaagaacattaaccaggtggtatttgttggaaatttcttgagaa

SEQ ID NO: 95756 - DNA, 75 bp, Homo sapiens
tcctcagggctcccgtgtctgctcgccctccgacgctgctcagtgaagccatgtccctggagggagatgaatggg

SEQ ID NO: 95757 - DNA, 98 bp, Homo sapiens
gggcttcccttactacctgaagatcaactactcctgcgaggaaaagatgatgaacaacatgggtggtgatgaggatgtagatttaccagaagtagatg

SEQ ID NO: 95758 - DNA, 75 bp, Homo sapiens
tggaagatggacgtactttgtctgactacaatattcaaaaggagactacctaggtggagaagcgtactgggccgg

SEQ ID NO: 95759 - DNA, 100 bp, Homo sapiens
gacgccaggacccactggaagcctagaaatgaatactacaacacatctttgcaggattctttgcaaattctgccattcctggatctccacaccctttttc

SEQ ID NO: 95760 - DNA, 82 bp, Homo sapiens
gccgagcctcccaagatggcggtgtgcatcgcggtgattgccaaggagcagcggaagatgtcggacagcgaggacagcaact

SEQ ID NO: 95761 - DNA, 90 bp, Homo sapiens
cgaaaacggaagcgcagggagaaggaagaggtgtttgaaaaggtatgcgagaccacccacccatccccatcaccgacctggcggacaaca

SEQ ID NO: 95762 - DNA, 82 bp, Homo sapiens
gtccccgggggcgccatggcgaccggagcgaacgccacgccgttggcagcccctgtcaaagggaacaggaagcagtccacgg

SEQ ID NO: 95763 - DNA, 74 bp, Homo sapiens
aacgtgaacgaggtcattgagatcctcatggaagtccctagagcgtccaagatttttggtttcaaaccaatttc

SEQ ID NO: 95764 - DNA, 74 bp, Homo sapiens
tggcaacctcactgagttagaatcagagcggctatgtgactacgtttgtgacctcctcttagaagagtcaaatg

SEQ ID NO: 95765 - DNA, 106 bp, Homo sapiens
ctttgtgtcatcctccacagctccagggaaggcactcaaaagtggggggcaggaaaggatttatgagcagcttccagaagtacagaaaaagagagaagaagagaag

SEQ ID NO: 95766 - DNA, 100 bp, Homo sapiens
aatacgaggcgcaaggtggactggctgactgagaagatgcatgccagagacttcacagtttctgctctggttgataatcagttaccaggtgcaatgttcc

SEQ ID NO: 95767 - DNA, 90 bp, Homo sapiens
ctaaaatacgaaggtttctggctgggcatgtcagagcgggagcgacaggtgatgaagaagctgaaggaggtggtggacaaacaacgcgac

SEQ ID NO: 95768 - DNA, 75 bp, Homo sapiens
cgaggccacagacacttctgatagtgaagaatcttcagctacttggagcaacagccattgaggataaattacaag

SEQ ID NO: 95769 - DNA, 87 bp, Homo sapiens
cagcccccacctgccaaagtcagcaagctaatagctcgatttgaagaagaaacaagttccgtgggacgagaacaagtaaataaggcc

SEQ ID NO: 95770 - DNA, 101 bp, Homo sapiens
tttttggagggaaagaaagagccctggactgtgaagagtgaggagaccatagctgcacagccaggagctgcgggagcgagtactcagagggaagtaccggg

SEQ ID NO: 95771 - DNA, 132 bp, Homo sapiens
ctggcctacgcctctcgggcctctgtggcctcagagcgtctgggccacactgtctgggaagaggaattctcacactcaagaaagcaaatgaacttcttctgagcacaggcatgcccggcagttttctcatcc

SEQ ID NO: 95772 - DNA, 90 bp, Homo sapiens
agaaaagggctatgaacgattaaaagaagaactcgcaaaagctcagagggaagctgaatatggtgggcatgatcagatagatttgtatga

SEQ ID NO: 95773 - DNA, 99 bp, Homo sapiens
acatgctagaattacctggaacttcatcatcatctacttcacaggaattgccatttgtgatttgatgaaggctgctgcaggagagttcgcagatgatcc

SEQ ID NO: 95774 - DNA, 100 bp, Homo sapiens
gcacgattggatttgccgaagattaggaagaatccactgatagaaatcatttccatcaataccggaaatacactttcgggaaatggcctctaaatcctgg

SEQ ID NO: 95775 - DNA, 100 bp, Homo sapiens
gctgtaattgctgaacttaaaaagcagtctaaacctgtgaccacccctgaagaaattgcacagatgggaaagggctccttcaagtatgcctgggtcttgg

SEQ ID NO: 95776 - DNA, 73 bp, Homo sapiens
tcgaagaacagctgtggaaagaagttgcaaaacactggatgatgattattctccaccgtctaagagaccaaag

SEQ ID NO: 95777 - DNA, 100 bp, Homo sapiens
agtcagcatgagcaaaaactccaaactcctctccaccagcgccaagagggggcagtgcccaaaggaaatgccactaaagaattcatcgagagtttacagt

SEQ ID NO: 95778 - DNA, 90 bp, Homo sapiens
gagagataaaaaggagacccctcttccgctcctgttttatactgcttccatatttacagtcaaaatgcagatcttcgtgaaaacccttac

SEQ ID NO: 95779 - DNA, 96 bp, Homo sapiens
taagacaagaaacacaagaatggaatcaacagttctgggcaaaccagaatttgacttttagtaagtgtcggagatgtatgcagtgtgacgccaagt

SEQ ID NO: 95780 - DNA, 75 bp, Homo sapiens
caagatggacggtttcgccggcagtctcggttacggcctccgctgccacagggccatcatcaccatctgccggct

SEQ ID NO: 95781 - DNA, 75 bp, Homo sapiens
cttggatgaattgcttgctttggagcgctgtgcttcgccgtgagccgctcgctgctgctgacgtgcctggtgccg

SEQ ID NO: 95782 - DNA, 102 bp, Homo sapiens
ttgcaaaaaaacttgatcctcgaagagaaggtggtgatcaaaggaatgagtccctggaacgccagatgcgtgaaatggaagagaactttgccgttgaagctg

SEQ ID NO: 95783 - DNA, 49 bp, Homo sapiens
tgtaacccagcctgtttcacttcttggatctcactctgtcacccaggct

SEQ ID NO: 95784 - DNA, 96 bp, Homo sapiens
gtccaggccatgaagagtcctgaccacaatggggaggacaacttcgcccgggacttcatgcggccctccaggcactgaagcgtaagaagaggtatg

SEQ ID NO: 95785 - DNA, 100 bp, Homo sapiens
cctcagcgtggaaggctcgacgctgcgagaagccctgacacacaggaagatcatcgccaagggggaggaggacattcaccatggcaatggcacccagcag

SEQ ID NO: 95786 - DNA, 101 bp, Homo sapiens
tgccctggctgccttgagaggtcacttctgcctttccagtgacaaaatggtgtggatgaaagtcaaacttctgcatcctcttgtgatgagactgagataca

SEQ ID NO: 95787 - DNA, 90 bp, Homo sapiens
ggagaagatggattaggaggcgcctctcttccctccccgcgtcaaaggtttatttgcaagatgggtttgagggaattaaggataaagtct

SEQ ID NO: 95788 - DNA, 100 bp, Homo sapiens
acctcgctcctcggcgccatgaccacaaccaccaccttcaagggagtcgaccccaacagcaggaatagctcccggtacatgtcccagagcaagcacacgg

SEQ ID NO: 95789 - DNA, 89 bp, Homo sapiens
gcggagctggacgccgcgatcgtggggcccgcgaggcgggcagccggggcgtccagacagccagctaaaggtgtggatgagcaaatacg

SEQ ID NO: 95790 - DNA, 100 bp, Homo sapiens
aaggtgatgaggttgaagatctctatgagcttttgaaacttgttaaggaatttagataatgggctgtgtgcaatgtaaggataaagaagcaacaaaactg

SEQ ID NO: 95791 - DNA, 75 bp, Homo sapiens
ccgagactgacaacgcggtcccacagtatccatatattcctgcacatattacaaagcctaaggaacataagaagt

SEQ ID NO: 95792 - DNA, 100 bp, Homo sapiens
cttcatttctctgaacatactgccttatgggacagatcaattgaatgcaatgataacagaaagcaagagaagtgtgagaactctgaaagaagaagttcaa

SEQ ID NO: 95793 - DNA, 100 bp, Homo sapiens
gacctgtggagacacggccagatctgccctccagcacagttggtggatctgaaatctgaactgacagaaacccaagcagagaaagttgttttggagaaag

SEQ ID NO: 95794 - DNA, 75 bp, Homo sapiens
tccactggcgtcttcaccaccatggagaaggctggggcccactgctcagtggagcgtggaggacgaggaggaggc

SEQ ID NO: 95795 - DNA, 75 bp, Homo sapiens
agcccagggcgacggtcagcttgttaattcctggctgcagggtatttgaagtataccatacaactgttttgaaaa

SEQ ID NO: 95796 - DNA, 96 bp, Homo sapiens
attgggtactgcatctacttcgaccgcaaaagacgaagtgaccccaacttcaagaacaggcttcgagaacgtttttctattgggaaagctactgat

SEQ ID NO: 95797 - DNA, 100 bp, Homo sapiens
ctggactcatggaggctgagcatttattcaggtacccggaaattaaagaggagctggaggagctggaccgcatcacagagcagacgctctttgacctgta

SEQ ID NO: 95798 - DNA, 99 bp, Homo sapiens
aaaccagttgtgatgctaccaatatggcgagaatctttaggacataccagacttttcccaggtccctcgtatcaaaacattaagagtataatggaagat

SEQ ID NO: 95799 - DNA, 50 bp, Homo sapiens
cagtggctaaatggctccctgattcatgttggagtcattcgttgcccagt

SEQ ID NO: 95800 - DNA, 100 bp, Homo sapiens
gctgccgcgagcagccgtgctgtgccggcctgcgaggaatgattcctcctaaaccattaatgagaagagaccagatggaagggtcaccgaacagttctga

SEQ ID NO: 95801 - DNA, 71 bp, Homo sapiens
gcttccgagatacagcagtctggttgccaagtaacaacatgctgtaccccaaggaagacaaggagaaccgc

SEQ ID NO: 95802 - DNA, 100 bp, Homo sapiens
gagaagtttctggtcactccccaggattatgcgcgtttagaagaagaatgtgaatcctctctttgcacatctgcgttaagagccaggaatctagagctgt

SEQ ID NO: 95803 - DNA, 98 bp, Homo sapiens
ttgagctccaggagttcgtctcttacgtctgcggaagtgcagctgcctcagttcttagcgcaggtttgagaaatttctgtggttcattagctcagaga

SEQ ID NO: 95804 - DNA, 75 bp, Homo sapiens
attccactggattgggaaagaccatggcaggaaggaatgcagctcatttcagaaaagcctgagacggaagctgtg

SEQ ID NO: 95805 - DNA, 88 bp, Homo sapiens
aaatgtagttgctttcttaacctcatcaaattcatgaagatttagccgaggcccatggcagttatttggcagaaaagcagagtatcag

SEQ ID NO: 95806 - DNA, 88 bp, Homo sapiens
attaaaagcagcgaacctcgagaccaacgtggaggagctgtgggtggaaggtatcagcggcagggaaggaggctttgccatcttggct

SEQ ID NO: 95807 - DNA, 90 bp, Homo sapiens
ggaaactgctcacctatgtcatggaggaagagagtgatggcagttcctgccacagttatttattttacctgctatgatcaattaagtgct

SEQ ID NO: 95808 - DNA, 75 bp, Homo sapiens
aagccgggctcggcccgaggcccccaggacctccatctcccaatgttggagaaaaatggctacaaacttcctagc

SEQ ID NO: 95809 - DNA, 82 bp, Homo sapiens
aggagactgaccgcaacggcaggctgcctgtggaggaaccgattgtgtccacagatgaggtcatcttcccactcaccgtttc

SEQ ID NO: 95810 - DNA, 50 bp, Homo sapiens
cagagttagttgccatgttggagaatgcaatttgcgtgggagcaggggac

SEQ ID NO: 95811 - DNA, 100 bp, Homo sapiens
aaaccacctcctctgtatgaagaacgatccccacctttgcctcagaaagacctatttcagggccgcaagcttcttatcattgggaccactagccgcaaag

SEQ ID NO: 95812 - DNA, 90 bp, Homo sapiens
tcttgctggctcagaccactcagcttcattaacaggtggttccaggaaagaaatcactgaacactgggaatggcttgagcaaaatctctt

SEQ ID NO: 95813 - DNA, 100 bp, Homo sapiens
gtggtttcagctggcgctgtgcttcggccctgcacagctcacgggcgacaactaaactggtaggtggcagcagaggaaggaattcttcagattgatggct

SEQ ID NO: 95814 - DNA, 51 bp, Homo sapiens
ctacacagtatataaggtcaccgcccggggactactggcattcagtgatgt

SEQ ID NO: 95815 - DNA, 74 bp, Homo sapiens
acaccggagtttgacgaagaggtggtttttgaggtatattacagctaatactgacacagaagaacagagttttc

SEQ ID NO: 95816 - DNA, 75 bp, Homo sapiens
cgagaacatctactctttcaactacaccagccagcccgaccagatcgaacggttggaagtaagcagccttgccca

SEQ ID NO: 95817 - DNA, 90 bp, Homo sapiens
ttgcggtccacttgatggcattttacttcagcaagctgaaggaggaccagatcaagaaggtggccaagactaagcagcagattgaggagc

SEQ ID NO: 95818 - DNA, 51 bp, Homo sapiens
aaaacattgaagacgtcattgcccaggatgcctgaggaagtgcaccatgga

SEQ ID NO: 95819 - DNA, 75 bp, Homo sapiens
gatcaaaagaaagctcatcaagccagagctggagtatctcagccctataagcagtacaacatgctgaacgcggac

SEQ ID NO: 95820 - DNA, 100 bp, Homo sapiens
gatcatgcatccaacgtcaagtacaccatgcacaaggtcttccagtttctgaacctaggtcctatggcagcgtatacaaagctattcataaagagaccgg

SEQ ID NO: 95821 - DNA, 75 bp, Homo sapiens
aggctggaatcctggagaaccccaagcaatggccaatgtacatggtggactatgccggcctgaacgtgcagctcc

SEQ ID NO: 95822 - DNA, 100 bp, Homo sapiens
attcacccttgtagagtcattcctgcctttgagcggactcccttttaaggatgctcacaactgtattcctgagctggacagtgagacagccatgttttct

SEQ ID NO: 95823 - DNA, 74 bp, Homo sapiens
tgggatcagatgatgaggagcaagaggaccctgcggactactgcaaaggaggaagaacgtgcaaaacgtgagga

SEQ ID NO: 95824 - DNA, 90 bp, Homo sapiens
gtttggacgccggcggagacgcgggcgagtttctccttggaccaagatgactgatggaaaactctccacctctacaaatggcgtagcctt

SEQ ID NO: 95825 - DNA, 50 bp, Homo sapiens
cagtacggtagtcaaacccccagaaaaattggaagctccaccacccaccc

SEQ ID NO: 95826 - DNA, 100 bp, Homo sapiens
tgcccgaggactcttggagtttgagcatcagagggcccctagggtctcgagtttttcggagctgtacacgctgtcgctgcaggagcctagccggcggggg

SEQ ID NO: 95827 - DNA, 94 bp, Homo sapiens
cctgacccggcctcaccatgttggtgctgtttgaaacgtctgtgggttacgccatctttaagcagcctcccgcgacgatgcccctcaacgttag

SEQ ID NO: 95828 - DNA, 82 bp, Homo sapiens
aaagttgatggagattacctttggcttctcaataggtttggcatggacaagatctatgaaggccaagtggaggtgactggtg

SEQ ID NO: 95829 - DNA, 75 bp, Homo sapiens
ctccccagccacgtgaaactgctcacttatctaaagaatatgaggaggctaatttcagagctatatgtgcgagat

SEQ ID NO: 95830 - DNA, 100 bp, Homo sapiens
gggaccctctgccgccagcacacaccggcacctaccgcacgagcacaggtatctctggagacaaagtagagatagaccctgttacgaatcagaaagccag

SEQ ID NO: 95831 - DNA, 98 bp, Homo sapiens
tccctgattgctctcttcacaaacttctacattcagcggatgcagtggtgcagtatgacgtggagctgattgcactaatccgagccaactactggcta

SEQ ID NO: 95832 - DNA, 101 bp, Homo sapiens
cgtaaagccaacccccaagacaaagtccattttctgaatttccagatcccatgtggggttcagattatgtgcagttgtcaaggacaccaccttcatctgag

SEQ ID NO: 95833 - DNA, 98 bp, Homo sapiens
gcctcattgagaatggaggggaatcaagcaagaaaagaaagagaacaaatactccttcaggaagatgtagattccttcatgaaacagcctgggaatga

SEQ ID NO: 95834 - DNA, 90 bp, Homo sapiens
agaaacccggagggcgccgggactgtgagctgcttgtccccatcctgcggccgtcctggggacacagagccctccgtggtgcccggggat

SEQ ID NO: 95835 - DNA, 100 bp, Homo sapiens
actttaagaagtttcctggatactatgttacaggagatggttcccctcttccaagacgggtgccaagtgatgagtatcaggtgtctatggtgagatttgg

SEQ ID NO: 95836 - DNA, 100 bp, Homo sapiens
gtttgaaccatcacctcaagtcactgctacccatgatgggggatttttaagtttggaggtgatgatgaacagtctacacagatggctgcaagttgggaag

SEQ ID NO: 95837 - DNA, 98 bp, Homo sapiens
tcttgatctggagaaaaactggatgttggtagaaaaagcaagagtttgttatatagcaaaaatttcccaggaacgagaaaaatttgctgatgaaggca

SEQ ID NO: 95838 - DNA, 90 bp, Homo sapiens
atgagatcaaaggtcacctggaaattgccttattggaaaaacatttcttaccccaatattggccacctgggcctgccccatgggccgtcc

SEQ ID NO: 95839 - DNA, 75 bp, Homo sapiens
cagagaaaaatcggcagatgttacagctgctcatgaaccacttggcaaaacctttccaaagtgaaactgatgaga

SEQ ID NO: 95840 - DNA, 98 bp, Homo sapiens
atctaaaggagctgtcagatggagaaataaaagtggccattagtactgtgagcatgaaccttgagaggaattcagaaaagcagctcagcaacaggaag

SEQ ID NO: 95841 - DNA, 74 bp, Homo sapiens
caatggtctcgttcccttacccgtcaaagtctgcttcacgtgtaacagagccaacacagatctatagatttctt

SEQ ID NO: 95842 - DNA, 87 bp, Homo sapiens
ccactgaaatctcttttaggggattctgcaccaacactgcacttaaataagggcacacctagtcagcctcggaatgctgctcgaata

SEQ ID NO: 95843 - DNA, 100 bp, Homo sapiens
ctgacggataatttccaagccagcagggtttccaggcctgaggtgcccgccctggccccaggagaatgaaccagccgcagaggatggcgcctgtgggcac

SEQ ID NO: 95844 - DNA, 100 bp, Homo sapiens
aagaaacagaggatgacacgcagatcccttcctggtgaacaagaacaggaggtggctgggctggagtgagacagctctacgtacagattgactttgcagc

SEQ ID NO: 95845 - DNA, 100 bp, Homo sapiens
ctccaaggacaactgcaagggggaagtagagagataacaaaagctgctcagagtctcaatgaacttgggggaaatttgcagtggtgagaaaatgtataaa

SEQ ID NO: 95846 - DNA, 128 bp, Homo sapiens
atggtcagctgaagatgctagctgcgtggtgaccttcaaaggtcacaaaggagcagccagactgccttccgggtcactgccatggaggagccgcagtcagatcctagcgtcgagccccctctgagtca

SEQ ID NO: 95847 - DNA, 51 bp, Homo sapiens
agacagagggttttcttttgaggtcactgcagccagaggggtccagaagag

SEQ ID NO: 95848 - DNA, 73 bp, Homo sapiens
ctccccgccgctcccgggggccgtgacgagattcgtcagcgaactgcagctcaaagaaacctttctccaacac

SEQ ID NO: 95849 - DNA, 51 bp, Homo sapiens
catctggaggaggcgttgccgtgaggagctgcgggtggaagtggagcagcc

SEQ ID NO: 95850 - DNA, 74 bp, Homo sapiens
attgcaggaagtggatgagttccacctcattttagagtatcaagcagatgattactgtgaatgcttccttgttt

SEQ ID NO: 95851 - DNA, 100 bp, Homo sapiens
gatcctctgaccgctgggacaaaatagccagatgtgtcccgtccaagagcaaggccaaagaactgccaactctgaaagataatgatttcattaatgaggg

SEQ ID NO: 95852 - DNA, 100 bp, Homo sapiens
gatgatacaccagttcatttctgtgacaagtgtggattgcctattaaaatctatgggagaatggagaactgcgacacatcaccaagctgaagccctggag

SEQ ID NO: 95853 - DNA, 75 bp, Homo sapiens
aggcgttttgcaatgcagatgtagcaaattgtggctactaatttgccccctgaagatcaagatggctctggggat

SEQ ID NO: 95854 - DNA, 75 bp, Homo sapiens
actctggagtaattggagccaagaaatgagtatagctcaagtcactatagaagaaatcactcctcttgtcccccc

SEQ ID NO: 95855 - DNA, 100 bp, Homo sapiens
ccgaattccgggagccggaccgggaccaggaccgggccccactttccaagagcaatgtggtgttaaaaatgatgaaagtagcagctcatccattatcttt

SEQ ID NO: 95856 - DNA, 75 bp, Homo sapiens
cttcctgaaatgctgcaacaccaccaaatgcaacgagggcccaaatgacagcatattaaagtgagtgaccctgcg

SEQ ID NO: 95857 - DNA, 75 bp, Homo sapiens
gccaaattatctgagactggataagatgaccttcagtgtgctgctcaaaaacagatgctgaagaataccagcctc

SEQ ID NO: 95858 - DNA, 100 bp, Homo sapiens
ctggccgctcgcggagggagaggctgcagagcgagggcaggagagttgtggaaagtaaaaatgtagccctaccaaaaggaactattgtactggcttctcc

SEQ ID NO: 95859 - DNA, 100 bp, Homo sapiens
aaggacctgaagcctgaaaatatccttgttgataatgacttccacattaagagtgttgaatatctcatgtaagagtattttactgcatatcaccagtctg

SEQ ID NO: 95860 - DNA, 90 bp, Homo sapiens
ttacgtctgcggaagtgcagctgcctcagttcttagcgcagaacatgccagatccccacaaccttccaatagtggctggttggaagaaat

SEQ ID NO: 95861 - DNA, 75 bp, Homo sapiens
actatttgaaacttttatctcatctggcttggcgcctgaggttctcccattagactggatacacgtctgtttaac

SEQ ID NO: 95862 - DNA, 83 bp, Homo sapiens
cggcgggatggaggcggcggccgagacctgtcggccatggagcctaatgatagtaccagtaccgctgtggaggagcctgacag

SEQ ID NO: 95863 - DNA, 75 bp, Homo sapiens
agagcgcatcagggagaagagccggctcttcgacaccaagcacgatgtatacagtgcacagccagagaacaacac

SEQ ID NO: 95864 - DNA, 83 bp, Homo sapiens
gaggaccggcctgccggcccccagaacaagcgtgagtgcatctccatccacgttggccaggctggtgtccagattggcaatgc

SEQ ID NO: 95865 - DNA, 100 bp, Homo sapiens
ttccaagtggcagattatggaatagttgcagatttatttaaggaccccgcagggatctttgaattggtggaacttgttggaaatggaacatacgggcaag

SEQ ID NO: 95866 - DNA, 90 bp, Homo sapiens
ttctgctcgtgttccaaatcatcgcctttctggtgggaggcttgattggatttcctaatggaaacattcatcatgtttaagaacctcatt

SEQ ID NO: 95867 - DNA, 100 bp, Homo sapiens
taccaggcgaagctggccgagcaggctgagcgatacgacgctgagtcagtgctgattctctcaaatagagcttgaaggataaatcttcatttttgtttca

SEQ ID NO: 95868 - DNA, 99 bp, Homo sapiens
agagggagtcaccactggacctccaaggaagccacgtgcagacatctacaaccttcgatctcctgacgaatgggaatgatgaacaaccccaatccttat

SEQ ID NO: 95869 - DNA, 98 bp, Homo sapiens
attccaagtaactcttatttgggttcaggataagtttgaggtgctgaattacacaagcattcctatctttctcccggaagtcaccattggagctcatc

SEQ ID NO: 95870 - DNA, 75 bp, Homo sapiens
ccatatgacactcctcccggacccctggacacacacagccctggagactggagagccaggctactgccctgtgag

SEQ ID NO: 95871 - DNA, 100 bp, Homo sapiens
ggagccaaatccctgctgtgattttaaggaagaccggcagtgtgatggggttggggtggacctgagcaacatcttcctggaaggcattgccattctcaac

SEQ ID NO: 95872 - DNA, 74 bp, Homo sapiens
gcatggtggtattctatggaggtggacactttacttcggccgaagacttaaacctgttgattgccaaaaacacg

SEQ ID NO: 95873 - DNA, 126 bp, Homo sapiens
ctggtgcccacataacgatcaggtcattgccagcggttcagaggactgcacggtcatggaagaatcctgtaagtacaatcccaagtattctgttgctaatgacaccggctttgtggacatccctaa

SEQ ID NO: 95874 - DNA, 51 bp, Homo sapiens
ctgagatcagagtcacgcccttggccacaagtatatggttatgatgacttg

SEQ ID NO: 95875 - DNA, 83 bp, Homo sapiens
ccttcggcatgaccccagtgctgcctgcattcgcggggcatgttcccgaggctgtcaccagccattgagacccagagcagcag

SEQ ID NO: 95876 - DNA, 130 bp, Homo sapiens
ggggccgcccgccgcagacacgggacccgcttcgaggccgctttggcgccaaatcctgagaaagcaaggagatggccaccaaggagaagctgcagtgtctgaaagatttccacaaggacatcctgaagcc

SEQ ID NO: 95877 - DNA, 82 bp, Homo sapiens
tggagcctcggccaggaccggcgcgagaggcggtctcggcgcggaagatggccggcggcgtggacggccccatcgggatccc

SEQ ID NO: 95878 - DNA, 75 bp, Homo sapiens
cccggtctccttcagcaaacgttgctctatatgcaatcagtgctgtctactttgctggagtgatggtgcgactga

SEQ ID NO: 95879 - DNA, 100 bp, Homo sapiens
catatttggcttcaatgtcatattttgggagattacctggggcaattgatgttatcggtcagactataactatcagccgagtagaaggcaggcgacgggc

SEQ ID NO: 95880 - DNA, 75 bp, Homo sapiens
ataagatcacccaagaggaaagggacagggtaggcaccccagatatgctatgactgtctggtactttgatgctga

SEQ ID NO: 95881 - DNA, 138 bp, Homo sapiens
cggctgaggaggggccccagcagcccccgaaggccctatcaggacatggagtatgaaagacggtgtcatggagaaactccagctgggcccagagattctgcagcgggaaaatccaaggcttatttatgccaggctgag

SEQ ID NO: 95882 - DNA, 75 bp, Homo sapiens
ggggtggggcagcattaataaacttgaattgaagagcagtttatacttacttgacctcagcaatggagaatatcc

SEQ ID NO: 95883 - DNA, 83 bp, Homo sapiens
cttttgtctgcccctattgtaagtgcagatggaacacaacaggaactaccaggttgtttttcaaagcagcggcactattttgc

SEQ ID NO: 95884 - DNA, 100 bp, Homo sapiens
tcaagatgtacagtttctacaaatatcagacaccccgaagaactttctctcttaaagaaacccagagatccaacaaagaaaaaaaagaagaagctagatg

SEQ ID NO: 95885 - DNA, 88 bp, Homo sapiens
cggccgcgtttcccgggtaaaggggttagaattgcccctactgtcactacctggagtaacaaaactcctactgcccttcccagccatc

SEQ ID NO: 95886 - DNA, 115 bp, Homo sapiens
accacctaaaatccccaaaattgagaccactcatccaccgttgcctccagcccacccacctccagggcccttatattctcaagaccgaatccttcaagccatgggaaacatcgca

SEQ ID NO: 95887 - DNA, 98 bp, Homo sapiens
tgtgccgtatggtccaattcctgtggactttcaggaaccagcagcacaaacactgttggggcaacagtgaacagccaagccgcccaagctcagcctcc

SEQ ID NO: 95888 - DNA, 71 bp, Homo sapiens
ctacatcagcaacgaatttaaggtggagggaacgcagctgttgttctccggagtcggctgaaggtcagggt

SEQ ID NO: 95889 - DNA, 83 bp, Homo sapiens
gtgggtgcctggagatgaagctggaaagggggatatgagactttctactcggaatatcctgagtgttgcgtggatgtaaaacc

SEQ ID NO: 95890 - DNA, 89 bp, Homo sapiens
gatcacagcagtgttccaagttctaaagagctgaagaaatcaggggagaaacccctgcttggtggaagcctgatggaatatgcaatctt

SEQ ID NO: 95891 - DNA, 80 bp, Homo sapiens
acaaacaagtcgttgacctgatcagatcgtccggaaacctgctaacgagacgaaaccagacagagggtcaagtttacaga

SEQ ID NO: 95892 - DNA, 82 bp, Homo sapiens
cagcacctcatcccctggatgggggaccacaagatcctcatcgacaggaagagctaaagatggctgaatttctagatgacca

SEQ ID NO: 95893 - DNA, 82 bp, Homo sapiens
ccacctgagtcaccagttaactatggtagcccacccagcattggcctttgtggaggcccagaataagattactgtgccattt

SEQ ID NO: 95894 - DNA, 83 bp, Homo sapiens
gtccacgccgagggcaggacgaacttcaccaggtgaaaggtgtagcagtcactcggcctacacccacagcatcgaccttgtga

SEQ ID NO: 95895 - DNA, 74 bp, Homo sapiens
tgaaatggtgctggccattgactccatccatcagcttcattacgtgcacaggttgggtggcccagaccccttgg

SEQ ID NO: 95896 - DNA, 98 bp, Homo sapiens
ggggagccgtccagtcttcgaatcccattgcatccaagaattgatgcccggagagctgatgaaaaccttggaatgcttcttgtagaattttttgaact

SEQ ID NO: 95897 - DNA, 75 bp, Homo sapiens
gccaccagaggaccttcgtgctggaagtgatgggccggcactgcggccgcagcaatggcgctgagttcctctgct

SEQ ID NO: 95898 - DNA, 100 bp, Homo sapiens
atttgatcgactgtgtaaacaactagagaagattggacagcaggtcgacagagttattcctgatgaagctaaagctttgtctctgttggcaccagctaat

SEQ ID NO: 95899 - DNA, 98 bp, Homo sapiens
acaggccaagtgcaggggccagaagacaaagtcaattccatcattcgggtgtccacctggaacagactgaactacctaaagaatggtgtgctaaagtc

SEQ ID NO: 95900 - DNA, 100 bp, Homo sapiens
gaaccccaaggccaacagagagaagatgactcagctgaattcagcgagatctgccctagtggaaaaggctacattcctgtggaaggagcctggacgtttg

SEQ ID NO: 95901 - DNA, 75 bp, Homo sapiens
gcagccggagtggggccgtgagaattctgcttggtcagaatcgtgatggcattgtgttcagcactgatgactatt

SEQ ID NO: 95902 - DNA, 101 bp, Homo sapiens
ccttcagccaacatgatggtactgaaagtagaggaactgggtgtccgcaatgttgccagtgtctgtctgcagattggctacccaactgttgcatcagtacc

SEQ ID NO: 95903 - DNA, 78 bp, Homo sapiens
aggaacagccccgtgccccccacaaagaaaggcaccgtctgcgtcctgctgtccttccccttcatcttcagcccctgc

SEQ ID NO: 95904 - DNA, 108 bp, Homo sapiens
gacggcggcagcagcagcagcaggcgaggaggaagatggcgggacggctgccggcctgtgtggtggactgtggcacgggatggcaccgaaagcgaaggaagctcctgc

SEQ ID NO: 95905 - DNA, 100 bp, Homo sapiens
aggaaaaccttgagaccctgagactttcagaaacttattcacagttaccaaagctgacgtccggacaaccacagccctggagatgcctgaccgggagaac

SEQ ID NO: 95906 - DNA, 75 bp, Homo sapiens
aaaggaggattgaggaggatcagatcaataatggaggcaatggatccaggtgaatgatctcctggtggaggtgga

SEQ ID NO: 95907 - DNA, 100 bp, Homo sapiens
ccagagcctggagtctgcgaaggccgggacccggttccccggcccacagtgggggtgtgcaaacccgagagaactggattttgctaaacatgttgacttt

SEQ ID NO: 95908 - DNA, 50 bp, Homo sapiens
aaggattccaagtaactcttatttggtgctggtgtttgtccactcccgga

SEQ ID NO: 95909 - DNA, 75 bp, Homo sapiens
accatgggaggccgcgtctttctcgacctgcctagagctggaacgttacctccagagcgagccctgctatgtttc

SEQ ID NO: 95910 - DNA, 76 bp, Homo sapiens
tacttggaatgaatccttctagagacgtccacggctctgcagaacattgctgccatcagcctggccatcaactacc

SEQ ID NO: 95911 - DNA, 93 bp, Homo sapiens
ggttccccaacatgcctcaccctcatctatatcctttggcagctcacaggtcacttggtacatatgaccgtggtctccggcagcaacgtgact

SEQ ID NO: 95912 - DNA, 100 bp, Homo sapiens
aatgccacagcatcctccagcacctcaggtggatccttttcataccttatttggaattgctggattgtcacttttgggagaagaacagattaaacctgtt

SEQ ID NO: 95913 - DNA, 80 bp, Homo sapiens
cagccagctcaccgtccacctgcgatctcacacgggaaggatgaaggggaggcctggctgagctgtcatcccccaggtaa

SEQ ID NO: 95914 - DNA, 82 bp, Homo sapiens
tgcctgtggcatttattactttgaagtgaagattgtcagcaaaggaagagatggctgataggaagatgtcttcaggaaatgc

SEQ ID NO: 95915 - DNA, 89 bp, Homo sapiens
gactataccaaccagctgctccaggcaatgcagcgcgtctatggagcccaggctaggcagctggaagagaaagaccgagtgctaaagaa

SEQ ID NO: 95916 - DNA, 100 bp, Homo sapiens
gaaatcatgtcaagcgaagccttgaaaaagctgccctgagacggtgtcccgccgaaagtcttagagtttgaaagagtctatcttgataatctccccagtg

SEQ ID NO: 95917 - DNA, 96 bp, Homo sapiens
aacaaacatgaagtaaagatgtttgtgagacatccacagttatttcaggaaattcttctagtgccagcgtttcctcgtcagtaactagtggcttaa

SEQ ID NO: 95918 - DNA, 100 bp, Homo sapiens
tctgaactagatgaagaatacctaatagaactggaaaaaaacatgtcggatgaagagaaacagtacagctattggaatcagatgcaaagatggtgttgtc

SEQ ID NO: 95919 - DNA, 83 bp, Homo sapiens
taaaagctttgggagtaggtggaggaaacctgcatctttacccagcaatccaggtactccaaagattcaggtttactcacgtc

SEQ ID NO: 95920 - DNA, 100 bp, Homo sapiens
ttctcggtactcttcagggatgagtcatgtggcagtggaaaatgcgctcgggctggaccagcagagtcgacttcaatgttcctatgaagaacaaccagat

SEQ ID NO: 95921 - DNA, 80 bp, Homo sapiens
aggcggtttggatggtgcaagcggcgcgccgggacaccaggaatcagagatcattgatttcttcctgggggcctctctca

SEQ ID NO: 95922 - DNA, 101 bp, Homo sapiens
gatttccttgcggaaaggatgttggcggtccctgtgacctgtggagacacggccagatctgccctccaatggactcaccctgtcacccaggttggactgca

SEQ ID NO: 95923 - DNA, 50 bp, Homo sapiens
ccgtggtccttctccatattcgaggcccgacaacaagctcaaatacgtca

SEQ ID NO: 95924 - DNA, 75 bp, Homo sapiens
ggttgatgtacgcatccctcaactagcacctccagctaggaagaaggtagataatgactataatgcccttcgaga

SEQ ID NO: 95925 - DNA, 51 bp, Homo sapiens
gcatcctagtggaggacgcccctgtgcatttgacaactttattggcttcct

SEQ ID NO: 95926 - DNA, 96 bp, Homo sapiens
ttctaactatgtggaaaggaaaaacagtgctcggaaagcatctattgtgaaaaacctaaaggataccttaggaacaagagtttgttcagaaacaac

SEQ ID NO: 95927 - DNA, 97 bp, Homo sapiens
cggatagctccaaactgggatatggcaagtgtccagagaatggctgggatgaaagtacacttgaactctttttacatgaacttgcaatcatggacag

SEQ ID NO: 95928 - DNA, 96 bp, Homo sapiens
ttcatcatggacgaggccacggcttccattgacatggccacggtatctgtgatggagatgcagccaatgaccttaccctgaaggatggctcagtgg

SEQ ID NO: 95929 - DNA, 75 bp, Homo sapiens
ctcctatgtcttccatccagacaatgctaaatgggatccagttgaatgttaatggagagtgtaacagtatcatct

SEQ ID NO: 95930 - DNA, 75 bp, Homo sapiens
caaccttcgatctcctgacgaattagtgacaagagctggggttaggatccggttggactctgacatcggatgccc

SEQ ID NO: 95931 - DNA, 82 bp, Homo sapiens
cgcagggaaggagggcgtccgagtcaacaaccgcttcgagctggaacaagatcactcaaggtgaaggataatctactaatac

SEQ ID NO: 95932 - DNA, 100 bp, Homo sapiens
cggtccgcgccgacccttggggctgctccagagtcctgggctaccgacaggctctacagctccgcagaattcaaggtgtattgccaggaatggcccctcc

SEQ ID NO: 95933 - DNA, 90 bp, Homo sapiens
agaattcatgattgaagaaatgcaggatgggatcagtcagataagtttgtgaaaatctacattaccttaactggagttcatcaagttccc

SEQ ID NO: 95934 - DNA, 136 bp, Homo sapiens
aaatatcggagaataatttctttctcgctgatcgcctaacttctactgacgaagcttggaagttgcagaaggttatgcaatggtctctgcaagatggtttattcttgaattggacctttttaagactgacaaatgc

SEQ ID NO: 95935 - DNA, 74 bp, Homo sapiens
ctgcaccgggacaagacacccctgcaccagaaacatgctgccatctggttttgtagcctggatgtgtctgctag

SEQ ID NO: 95936 - DNA, 100 bp, Homo sapiens
aactctatttagatgctaatcagattgaagagcttccaaagtatgaacggtgccttagcgtttgtggacacttcggactgcacggtcatgaacatcgcag

SEQ ID NO: 95937 - DNA, 100 bp, Homo sapiens
ctctgatctacgaaagtcatgttacccaacaccggcatatgtaagtggaactcagaaggcaacattccctgaacatactcttccaccagaatctcctcta

SEQ ID NO: 95938 - DNA, 84 bp, Homo sapiens
tctcctgcctcagcctccggagtagctgggattacaggtcgaggcttgaagagtggagagaactttaagttgttatatgacttg

SEQ ID NO: 95939 - DNA, 100 bp, Homo sapiens
ttatgatggacctaggactgctggtggggtggaatggctgcaaataaaggataatgatttctcctatcgacccaacatgatttgtaactttctacatgaa

SEQ ID NO: 95940 - DNA, 100 bp, Homo sapiens
tcggcgcaggcccagatgcgcgcgatgctggaccagttgatgggcacctcccgggacggccgaggagtcttgtaaatgtaatggctggaaaaaccctaac

SEQ ID NO: 95941 - DNA, 100 bp, Homo sapiens
agctgcagcagagggagcttgccttgaaggacaagaacagcgccgtcaccagcaggattttttatcaagcagaaatgcatcgaacaacgagaatcaagat

SEQ ID NO: 95942 - DNA, 100 bp, Homo sapiens
gtgaatggagatgcagctcagcagggtttggacagaggagccaaaggccaaatttccactttcagcagttttatttcagctgttagcccgaagaaagaag

SEQ ID NO: 95943 - DNA, 98 bp, Homo sapiens
aaagataaatccaaatactgcatatcagaaacaacagataacaacgaacttgatgcaagtgataggtttgccaaggtcagacctctcatcatccggat

SEQ ID NO: 95944 - DNA, 51 bp, Homo sapiens
attcgcagtggtcgcttcttctccttgttgaagactgggatagtttccaag

SEQ ID NO: 95945 - DNA, 98 bp, Homo sapiens
gcagcttcaagcttaggaccacccaccatgcctatccagctggatgctgacaaatatgagaatgatccagaattagaaaagatccgaagagagaggaa

SEQ ID NO: 95946 - DNA, 83 bp, Homo sapiens
cgtcccccgcgggtctgctctgtgtgccatggacggagcctcagctcaaaggcatcgtcaccaaactgttctgccgccagggt

SEQ ID NO: 95947 - DNA, 99 bp, Homo sapiens
aagaagcagtatcactgtgaaaactgtggaatttgtagacagaagcattaaaatgcgtggctcaggctagcaagaacagatcactggcagattttgaaa

SEQ ID NO: 95948 - DNA, 96 bp, Homo sapiens
tgccctgatgtctgctttcagtcctgaaaagctgaacgagatgatgactttgaccagtttgataagcctggcgcggaacggtcgtggagaagaaga

SEQ ID NO: 95949 - DNA, 100 bp, Homo sapiens
ggctacgagcgtctcctgaagatgcaaaaccagcgtggcggccgcgctctcttccaggacatcaaggaagaaatgttggctatttggcgatgagaggtgg

SEQ ID NO: 95950 - DNA, 83 bp, Homo sapiens
gtgaggcctcctcagccacgtggaactgaactgtggctgcaccatctgtcttcatcttcccgccatctgatgagcagttgaaa

SEQ ID NO: 95951 - DNA, 90 bp, Homo sapiens
cgcctgcgtcccagaagtgcctgcagttcagacccttctctcccctccactttctcccgggtaaactgtcttgagccccaccctcacctg

SEQ ID NO: 95952 - DNA, 99 bp, Homo sapiens
tttttctccctgaggacaacctgaggtggtggacataatgcgagttaacgtggacaaggttctggaaagagaccagaagctctctgagttagacgaccg

SEQ ID NO: 95953 - DNA, 90 bp, Homo sapiens
tgttggtctggtcacccaatcaaaatctgtcagaagcaaagtatgatgttgaatttgaagtatcatcggaccgacggactgggaaaccca

SEQ ID NO: 95954 - DNA, 100 bp, Homo sapiens
ggatctggtgtaccaggcgaagctggccgagcaggctgagcgatacgacggtacggacattgctgcaggagaagaggttgccatcaagcttgaatgtgtc

SEQ ID NO: 95955 - DNA, 100 bp, Homo sapiens
gtcctactacgcgtacgtggtggagctctgcgtgtcaaactctggcctgttctattctgactgcgctattgagtgaattttcaagttcaagtaaaactag

SEQ ID NO: 95956 - DNA, 100 bp, Homo sapiens
ggaggatgcaagtcctgacagattcagcaacactgtgacaagccaggacaaggctccaagtgtcatcagtcgtgtccttaagaaaaacaatcgtgactct

SEQ ID NO: 95957 - DNA, 74 bp, Homo sapiens
tttgatcctgattctacccaagtacatatgatttcagctgcaatggcagggtggttctcttcccaaagtggaag

SEQ ID NO: 95958 - DNA, 75 bp, Homo sapiens
catttttcttccttctgtcacatcacacccaatgctctggattaatcgaattacagctgctagccaggaacatgg

SEQ ID NO: 95959 - DNA, 108 bp, Homo sapiens
gaaaaagtgaagtccctatttgaagaacttggaagtagtcgagagaagtttgctgaggaatgccttcaagcacaaagtgatgaatgactgccttcaagtctcaagaaa

SEQ ID NO: 95960 - DNA, 100 bp, Homo sapiens
cggaccgcgcccgccgggcacacaagaatggtcactaggagaaggcagagcccccccaggctatgaatgccctgatgcggttgaaccagctgaagccagg

SEQ ID NO: 95961 - DNA, 98 bp, Homo sapiens
aacgaagagaccacctgtccttcgagcagggagagatgacatgctggacgtggagaccgatgcctacatccactgcgtcagtgccttcgtcaagctgg

SEQ ID NO: 95962 - DNA, 90 bp, Homo sapiens
cgccccgcgcccccgccgcgccctcaggatgacatctgaactggagagcagcctaacgtctatggactggttaccacagctcaccatgag

SEQ ID NO: 95963 - DNA, 95 bp, Homo sapiens
cttcgagctgaagcacctctccagcggggacctgctccgggacaacatgctgcggggcacaggcgccatgtcagaaccggctggggatgtccgtc

SEQ ID NO: 95964 - DNA, 50 bp, Homo sapiens
caggaaactaccttgcagtaacaggctatcagttgagggatttgcagttg

SEQ ID NO: 95965 - DNA, 51 bp, Homo sapiens
tgctgaagggggctctttatataatgcaaataaagcatgagctgttggaat

SEQ ID NO: 95966 - DNA, 100 bp, Homo sapiens
attctgtctttaaaactgatgtccatgaacttgatgctttcattggatttggaggaaatgtgatcaggcaacaagtcaaggataacgccaaatggtatat

SEQ ID NO: 95967 - DNA, 75 bp, Homo sapiens
aagaaggaagtgcctatccaccgtgttgcagatatatctggggtcagcagcaaggacaagatggagtaaaagtcc

SEQ ID NO: 95968 - DNA, 96 bp, Homo sapiens
cggcagctgccggcggcgcggcgagagagcggctgacagaggggatgcgaggtgtcatggagaaactccagctgggcccagagattctgcagcggg

SEQ ID NO: 95969 - DNA, 75 bp, Homo sapiens
catggttgccggctcccctctcaggacaacccagatgtgcaacaaagtgcgatgcatttgcaagtgaggaagcag

SEQ ID NO: 95970 - DNA, 82 bp, Homo sapiens
ggaagcaccgcacatttttcagcatgaatacaactttgtctgagagccccttcaagtgtgatcctgatgctgccagagccat

SEQ ID NO: 95971 - DNA, 100 bp, Homo sapiens
agggctggaagatgtggcagccggccacggagcgcctgcagagtgcagcagctgccccgagccccgtgcttggcaacattccccccaacgatgggatgcc

SEQ ID NO: 95972 - DNA, 90 bp, Homo sapiens
cgatgcggggctgctggaggcggagaggcacggaggagccgctggggctgccgccacggccgcccggagatatcgcaaacggcaccagtt

SEQ ID NO: 95973 - DNA, 75 bp, Homo sapiens
tgccaacatcttcatcatcaaatgcagccgagagacagagaagcaatgagtcggatgtggtcgagagcctggatg

SEQ ID NO: 95974 - DNA, 80 bp, Homo sapiens
agagcggcaactcgcgcactcaaagtacctaggtgctgatatggaagaatttcatggcaggactttgcacgatgacgaca

SEQ ID NO: 95975 - DNA, 100 bp, Homo sapiens
cgaagacgccgacctcttccactccgaggaaatcaaggttacgaagtgacagtgctggtgcgggactcctccaggctgccatcagaggggccccggccgg

SEQ ID NO: 95976 - DNA, 74 bp, Homo sapiens
ctgcatcagagccagaatatatggaagacgaagagagaagggcacagttacctaagtatcaacgtaatcttcct

SEQ ID NO: 95977 - DNA, 74 bp, Homo sapiens
ctcattgaaagccactcaacaactctttatgtgacaggtctgcaattaaggccttacgtcctggagggatactt

SEQ ID NO: 95978 - DNA, 83 bp, Homo sapiens
cgacatgttgcttttcgtggaggtggccagcatcgaaatgttcagccttttagtgatgaagatgcatcaattgaaacaatgag

SEQ ID NO: 95979 - DNA, 100 bp, Homo sapiens
gaggaagcggaaaccagtggccacagcatctttgtctagccccagtgcagaacctgcacttgttgccaagtcttccatcttactagatgtgaaaccttgg

SEQ ID NO: 95980 - DNA, 100 bp, Homo sapiens
caagagagacatttctggctctgaaggcgaacgcttcgctggccatttaggagctctgctcaaagccagacggttttaaaatcaaagatgggaaaatcgg

SEQ ID NO: 95981 - DNA, 100 bp, Homo sapiens
tacgactaccgagagaagcgagcccggtatgatctcgtgaaatcttgagagaaactgaatgacgaatgaaactattgttcctgtttcacacagaagaaaa

SEQ ID NO: 95982 - DNA, 75 bp, Homo sapiens
cagttttactgtggcgacactgaagggaaaaagagggtctccccagacacccgagcacccacccgcttcgtggat

SEQ ID NO: 95983 - DNA, 100 bp, Homo sapiens
tcatcagatgatgatgaagaggtttcagggagcagcaagacaatcactgcagagataccaggccccttcacagatgtagtcactacaaatcttaaattgc

SEQ ID NO: 95984 - DNA, 100 bp, Homo sapiens
ttagaaaggagacccgactgcaactgctggattgctgcaaggctgagggacgagaacgagatgatgctgtgtatctggacaatgagaaagaaagagaaga

SEQ ID NO: 95985 - DNA, 100 bp, Homo sapiens
tgaaacgtcagctgcgctcccctaggagtgctgagcccgcggaaccgcagccatggttcatctgcagaagccagcggacgcctctgttcaacttgtgggt

SEQ ID NO: 95986 - DNA, 88 bp, Homo sapiens
ggaattcttttaccatcttattaattcactctgttcctcctaagatatatgacatctcaaatgatatgaccgtcaatgaaggaaccaa

SEQ ID NO: 95987 - DNA, 50 bp, Homo sapiens
ccgaagtgagcgtggacctgccgaactgccctcatgctaggttgcgaata

SEQ ID NO: 95988 - DNA, 100 bp, Homo sapiens
gtacaacttccccgcaggcggcgtgggcatgggcatgtacaacaccgacgaggtgtttgcgagtaaaccccaaagggttagatgaagaaagcaaagatta

SEQ ID NO: 95989 - DNA, 100 bp, Homo sapiens
catggtgaaagacctttcaaacccctcgagatacttgtgcaatgaatggtagtgtctagaaagggtatgtcccttcaagagagaggtgccaatgtccaac

SEQ ID NO: 95990 - DNA, 98 bp, Homo sapiens
cgaaatgagactccctcagatccagtgataattgacagctttcccatggtttggcatggacattgggggaactctagtaaagctctcgtactttgaac

SEQ ID NO: 95991 - DNA, 83 bp, Homo sapiens
ggatgaaagataaagcccttaaggacaaggtacactggcatgaggcccacaagttcctgaaggtggagttccctgctcgcgtg

SEQ ID NO: 95992 - DNA, 83 bp, Homo sapiens
gtgggcaaaaagttattggagtggtttaatgacccgagcctcagggataagaaactaatctggattcactccctctggttgat

SEQ ID NO: 95993 - DNA, 100 bp, Homo sapiens
ccgagcccaaggcaattgatcccaagttgtcgacgaccgacagggtggtgaaagggggtgcactatagccatctggagctgagccctggggagccagtgc

SEQ ID NO: 95994 - DNA, 74 bp, Homo sapiens
cggaagggtgatgtggctgcggcatcgccggcctcgctatgttgatattcactgatggactccaaagaatcatt

SEQ ID NO: 95995 - DNA, 75 bp, Homo sapiens
atggggcacccagagataggagatgctattgcccggctcaaggagctcagctgtctccagtactacacgggaccc

SEQ ID NO: 95996 - DNA, 103 bp, Homo sapiens
ctccttcttcctcaactatctcgctgacacgcagagatcctgaaggagctagacgagtgctacgagcgcttcagtcgcgagacagacggggcgcagaagcggc

SEQ ID NO: 95997 - DNA, 90 bp, Homo sapiens
atttgaaaatagaaactgaattagtatgtgttacaactcattttaaagatcttggaaatcctccattagctacaagcctatcgtggaatt

SEQ ID NO: 95998 - DNA, 95 bp, Homo sapiens
cctgggttcaagcaattctcctgcctcagcctcctgcataactgggactacaggaaggtgtcttgctgcaggtaactaatgaagaagtggtcaac

SEQ ID NO: 95999 - DNA, 100 bp, Homo sapiens
ccaagctcctgctagacaccttcttgcccagttccagtgcccatgtattctggttctgtctctggaagctcctgtggcagctctccatcttgtcgttttg

SEQ ID NO: 96000 - DNA, 95 bp, Homo sapiens
gacgccatgtcgggttattcgagtgaccgagaccgcggccgggaccgagggtcacaccgacaaatctgaagcgggtttgccaggggagtgtaccc

SEQ ID NO: 96001 - DNA, 96 bp, Homo sapiens
gcatccaagttccagtttgtggcctcctaccaggagctcatggttgagtgtacgaagaaatgatcaggaagtgtgctgcaccactggaatgaaatc

SEQ ID NO: 96002 - DNA, 104 bp, Homo sapiens
ggtttagtatcagccaaacttgcagctgttcagaccgcgctccgccgagggccaagaccagcttcaagtctccatggtaccagaaaacaacaacctcacagcac

SEQ ID NO: 96003 - DNA, 101 bp, Homo sapiens
agatagacacgtacctgaacgccgccttggacctcctgggaggcgaggacggtctctgccagtataaatgcagtgacgtaactctcaggagccttctccgc

SEQ ID NO: 96004 - DNA, 100 bp, Homo sapiens
caatcaacagctctgggctgggtttgttgaagaggaccatattccttacataaatgcttttcagcattttccagaacagatgaaattatatggacgtgac

SEQ ID NO: 96005 - DNA, 99 bp, Homo sapiens
tttagggatatgagcatctcaaacacaacgatggatgaattcaggcaacatctacaggcaactggtattgagattggcgatggggcagagctgacggca

SEQ ID NO: 96006 - DNA, 82 bp, Homo sapiens
cagacctgcaagctctttgacacacagcagttcttgtcagggactttcatcacggagtggaatgaagggggaaggctctgtg

SEQ ID NO: 96007 - DNA, 98 bp, Homo sapiens
tcctgcttctgggacagctctactgacggttgaaatcacaaagattagacacctttttagataggtgttcttcagcaccactgacaacacggttctga

SEQ ID NO: 96008 - DNA, 98 bp, Homo sapiens
catcaagaaccacaaggaaacagacattgacccaacatgagtgaagtttcctgcaagaaacgggacgactatttggaatggccagagtattttatggc

SEQ ID NO: 96009 - DNA, 100 bp, Homo sapiens
agcagcctctgtctccatctctgccctttgaaacaaaagggtatttcttttctctcttcagcccccaacccagtggaggaaccatcactgttgctggagg

SEQ ID NO: 96010 - DNA, 83 bp, Homo sapiens
aacatgcttgctcaagaacttatggtctaggtgacaagtcagcagcaggagatggctgtcttggacaggcagttagggcataa

SEQ ID NO: 96011 - DNA, 87 bp, Homo sapiens
ttttgtggagtggtttgaatatcgtaagcgcacgtttaaacatctcaaggtgctagaaagcttcaagatcatggattatagccttct

SEQ ID NO: 96012 - DNA, 98 bp, Homo sapiens
ggagcgcgagtacagctgcaccgtgcggctgctggacgacagcgagtacacctgcaccatccaggttcgatacaagaggctgttttcctagcgtggct

SEQ ID NO: 96013 - DNA, 82 bp, Homo sapiens
gatattaaatatacgacacatccaggagtttattggagcgcagactgatggcgcaaaggggggatatgagactttctactcg

SEQ ID NO: 96014 - DNA, 75 bp, Homo sapiens
ccatcaacccgagtgcagtttcgatggaaaatgaaggtgcaagtgaaagtgtaggaaaacatatgcttgaagcgt

SEQ ID NO: 96015 - DNA, 83 bp, Homo sapiens
ggtcctacctcctgccaccgccccagtatatgactctcaacccttctactaagaggaagaatactggatccccagacaggaag

SEQ ID NO: 96016 - DNA, 75 bp, Homo sapiens
agttgaacatatagttgaccagattaaatgcagcaaacatccaggagtgttaggttgccctcggacatgccttca

SEQ ID NO: 96017 - DNA, 100 bp, Homo sapiens
atccatgtttctggacgcggatttttggcctcatactctgttatagataaacaagggacaggccttcagtatttggcatcacctttacatggagcacaaa

SEQ ID NO: 96018 - DNA, 102 bp, Homo sapiens
gctgaagctcctcttcttgatgactttgtcatgtcttacctctttgctcagaaatggtgtcaacctccaacaacaaagatggacaagccttaggtacgacat

SEQ ID NO: 96019 - DNA, 87 bp, Homo sapiens
accacaagatcctcatcgacagacctcctgccccccgaggtctgcagtctcctgaacccagcagccatctacgccaacaacgagatc

SEQ ID NO: 96020 - DNA, 143 bp, Homo sapiens
ctgtgacctggccgatgaggaagtactgagcctgttggaggaactggcccggaaacaggaggacataaggatgacattcggctgctgccgtcagcattgggtgtgaagaagagaaaacgaggacccaagaagcagaaggagaa

SEQ ID NO: 96021 - DNA, 75 bp, Homo sapiens
gagttgagtacttggatagacttatacctcaggaacaagttccagttccagtctaccacccaacacctagccaga

SEQ ID NO: 96022 - DNA, 50 bp, Homo sapiens
gcaggtgtggcaggttgcagaggacagtgaggccatgtggaagtgttaca

SEQ ID NO: 96023 - DNA, 98 bp, Homo sapiens
ctgacatggcttccagaatcactgagctgtaacaaagcactctgtgctagtgatgtgagcaaatgcctcattcaggctgttcggctcttgaatcccag

SEQ ID NO: 96024 - DNA, 82 bp, Homo sapiens
ggtccactggtagcccccacccctctccgtccatggccccagatgacacttcagatggagcagttcatccagtaccttgacg

SEQ ID NO: 96025 - DNA, 98 bp, Homo sapiens
gcagcggtgctgacggaccgggcccagcacccagtttggccttctctgaggtcagatcggaacaactcacttgaaaaaaagtcaggtgggggaatgcc

SEQ ID NO: 96026 - DNA, 50 bp, Homo sapiens
aatttttaaacttggtttgaaaggtaatggtaactcgggatttgaaggac

SEQ ID NO: 96027 - DNA, 83 bp, Homo sapiens
gtcctcacctcgctactcgcttgcctacccgccggcccgcgggtctacttcctcaaaggagctctttgttcaatgcctagcca

SEQ ID NO: 96028 - DNA, 100 bp, Homo sapiens
ccggcgggaactcgactcttggcgccaccgcctcatgcactgtgtagaggcagaggaggtggacacggtggacgtctccggcgtgcccgcagaggtgctg

SEQ ID NO: 96029 - DNA, 75 bp, Homo sapiens
aattgccggtctgggagttgggggcaaggagaagatcctgccttgcccctcttgctcgccttgaaaatggaaaag

SEQ ID NO: 96030 - DNA, 51 bp, Homo sapiens
cagaagcccagtggtatcctggagtaactattcccagtcagaggcgctatg

SEQ ID NO: 96031 - DNA, 76 bp, Homo sapiens
ccacgagataggcaatacgaaaggtaggaggtgtgcaatctttggggggaacaggtgcacttcgaattggagctga

SEQ ID NO: 96032 - DNA, 82 bp, Homo sapiens
agcccggctttgcggctgggtcctaaactgcggattttttatcaagcagaaatgcatcgaacaacgagaatcaagatcactg

SEQ ID NO: 96033 - DNA, 113 bp, Homo sapiens
gagtcttctggcaaacagtgtttgcctctggttcagctcatacaacagcttcttagcctgtcctgggggaacagagaggccctgcggtggctacgggcagtgtgaaggagaag

SEQ ID NO: 96034 - DNA, 75 bp, Homo sapiens
cagtggtcgcttcttctccttggaaatgaaggaccatatggtcagcccaacagccgtagcatttttggagaggaa

SEQ ID NO: 96035 - DNA, 98 bp, Homo sapiens
tgggcgtcagcgagccgtgagatgcgtggtccaccatcggtgacctcaccgcctcggttcgccctcagccgccccggctggagtgcagtggcatgatc

SEQ ID NO: 96036 - DNA, 100 bp, Homo sapiens
acccaaatcctcttctccaagaagggagtaactattcccagtcagaggcgctatgtgtattattatagctacctgttaaagaatcatctggattatagac

SEQ ID NO: 96037 - DNA, 83 bp, Homo sapiens
aaaggcaggagcagcttctggatgaaatacatcgtgagaagagaggtcagcccaaggccaaccccactgtcactctgttcccg

SEQ ID NO: 96038 - DNA, 88 bp, Homo sapiens
gaacatgaccaccccagtgtatacaactttgaaggggcacttttccttgttgacaatcaccacgaggtgtacctctggcaaggctggt

SEQ ID NO: 96039 - DNA, 82 bp, Homo sapiens
gcagtggtcgcttcttctccttgggcgcaaaccagaagaagagggtgtggaagataacgggctggaggaaaactctggggat

SEQ ID NO: 96040 - DNA, 100 bp, Homo sapiens
actactgcgagcagttttaccgcgacctccggaggccggcgtgacaggctctgtcactaaaatagattctgtttctggcgtctgcatacgcaagtcccca

SEQ ID NO: 96041 - DNA, 74 bp, Homo sapiens
cttatcatttaggaaatcaaaatcaccatttgcagtttgcaagcatattttggatgtcctcctcgcactttctt

SEQ ID NO: 96042 - DNA, 50 bp, Homo sapiens
ggccgagtggcacagctggagcaggtatggaacctggctaactgcaagct

SEQ ID NO: 96043 - DNA, 96 bp, Homo sapiens
cgcgggccgggaggggacggccgccggagccgcgaggccaaactgcctctgtcaccgggtccctccacccttgtctcctgtgcggccagcgtcaga

SEQ ID NO: 96044 - DNA, 82 bp, Homo sapiens
ggaaacaatggcatttacagaaagagtcaacagcagtggcaacagcatgtagagcgcatgaagtacaggacaataaagcttc

SEQ ID NO: 96045 - DNA, 75 bp, Homo sapiens
tgaccccactttgctctttgccaatgcaggcatgaaccaggatgtcttccaagcgaccagcctctccgtatgggg

SEQ ID NO: 96046 - DNA, 75 bp, Homo sapiens
tgtcttcccggtccggcccgctgcccgcggcgccagcaccatggcaccgcatgcgtggggagaccaccctgtgga

SEQ ID NO: 96047 - DNA, 73 bp, Homo sapiens
ccgccgctcgcgccgggcccgtggccggggattaaagcctgtggtttccacagaagcaccacctatcatattt

SEQ ID NO: 96048 - DNA, 100 bp, Homo sapiens
tgacaaccagcatgccgagatgatgctgcacttaaaaggatgcttgttttgatgtcctgctcattgttttccctatgaagtatcagtaatccatcctaga

SEQ ID NO: 96049 - DNA, 100 bp, Homo sapiens
gtcgtctcatgggagaaagacactgtttcacttgtctcagctagttatgtatcaaatcccatttgcaagggttgtttgtcttgttcaaaggacaatgggt

SEQ ID NO: 96050 - DNA, 100 bp, Homo sapiens
ggcaccggcaccctgtcggtattcggcatgcaggcgcgctacagcctgagagactggggcagcacctactccgtgtcagtggtggagaccgactacgacc

SEQ ID NO: 96051 - DNA, 51 bp, Homo sapiens
tgatggagcaggcttgcaatattaaaatggagtgaaggtacctgagcgcag

SEQ ID NO: 96052 - DNA, 100 bp, Homo sapiens
gtgggggaggaagccctttctcctcggcactgtattctttacctgcttcccaatcccactgatgaggatcagcccatgagctcaggccccggggcctcca

SEQ ID NO: 96053 - DNA, 75 bp, Homo sapiens
atggtggtcgccgcggcggcgtgtgcgcccctcaggctagcttgtcactttctgcaaaggtttccctcagggagc

SEQ ID NO: 96054 - DNA, 98 bp, Homo sapiens
gcagggagaaggaagaggtgtttgaaaagacctgtcatttactccatcctttatagtgatgctacaggacgaagaggaatggataaaaacattggcga

SEQ ID NO: 96055 - DNA, 82 bp, Homo sapiens
tgttgccaatgtctcgctgactaagggtggacgtgatcggatgtctttggtggacttgggaaagaggttgctagaagcagca

SEQ ID NO: 96056 - DNA, 98 bp, Homo sapiens
ggcggtccctgtgacctgtggagacacggccagatctgccctccatgaaagccctgtgtaaggaatgtgtagtagaacgttgtcgcatattgcgtctg

SEQ ID NO: 96057 - DNA, 143 bp, Homo sapiens
aataagagtcaaaacaaataagttatgctatgaggatgacaaactctggagtaattggagccaagaaatgagtatagagtgtgaacatggctacgcctcttcattcccgtccatgccgagcccccgactgcagcattcaaagc

SEQ ID NO: 96058 - DNA, 100 bp, Homo sapiens
gagcctccagagtagacaagccctcaaggatgcccggtccccatcaccggcacacattgtctctaccctgatgggagagtctgcatttccatcctccacg

SEQ ID NO: 96059 - DNA, 82 bp, Homo sapiens
aaggaggttgccgacgccatcaggctcaacgaggaactcaaagtggatgaggaaagccgccatggcatcagatgaaggcaaa

SEQ ID NO: 96060 - DNA, 49 bp, Homo sapiens
attttattcccaacgcatggcagggtatttaaaggatccacgataccag

SEQ ID NO: 96061 - DNA, 96 bp, Homo sapiens
gggggcgccccgatgagccccgagtgcgaggagccgccgccccccctcgcaggactatggtgcagccctgcggggcctgtgcgaagacgccctgga

SEQ ID NO: 96062 - DNA, 100 bp, Homo sapiens
tttcaagaccaaaaaacacaataccaggcatacatttggcagaataaatgaaccagcaaagaatggctcaagaagtactgacacatttaaaggagcatcc

SEQ ID NO: 96063 - DNA, 75 bp, Homo sapiens
aacccgcaccttgtgttccggaagttccagttggaatcgaagcctcttaaaatggcagatgacttggacttcgag

SEQ ID NO: 96064 - DNA, 75 bp, Homo sapiens
cctgcctatcatttgaagacgttccttgaggaggtttgaaaaacctcgtgtgcaagctgaacacaaggaccacca

SEQ ID NO: 96065 - DNA, 90 bp, Homo sapiens
atccatgccatcttctccagccaccccagccagtggaaccaagaaggtgatttactacctctgcatcttattgaaagatccagtggaacc

SEQ ID NO: 96066 - DNA, 76 bp, Homo sapiens
caaacattcgtctcggaaaccccgcctcttacagtcacgagctttggacatcagacagtgcaggagaagaatgtga

SEQ ID NO: 96067 - DNA, 50 bp, Homo sapiens
ctgggcctcccggtccgcaagcagaagctggcagggcggagatgctggac

SEQ ID NO: 96068 - DNA, 100 bp, Homo sapiens
tttatggaattccactgagtggtaatggatgatgcagttcaaataactaagccaaaacctattgatgtacaagtcattacacaccacatgcagcgatatg

SEQ ID NO: 96069 - DNA, 74 bp, Homo sapiens
gttaatcaacttggtgatgcccatgactggaaccagaacagaggcctccccatggccacccatggaccagtcgg

SEQ ID NO: 96070 - DNA, 83 bp, Homo sapiens
ccaagaaccaaccctgccagcacctggaccttggacattcagacttcagaatggaataatgtatttgtggccttggacatgag

SEQ ID NO: 96071 - DNA, 100 bp, Homo sapiens
caatttgcaagaattagaggcgtatagagacaaattgaaacaacagcaagctgcactgcaggaatacagatgaatcaaattgttggtcttggcatttcaa

SEQ ID NO: 96072 - DNA, 75 bp, Homo sapiens
gtttcagagcgcagccatcggtgcgctgcagctgcccccctccctggcttcagtgcagtggtggtcagctcagtg

SEQ ID NO: 96073 - DNA, 75 bp, Homo sapiens
gaatcgagctcagctaacctttgaatatctgcacacaaattcgtaatctgtaagtcagatgctccaacaggggat

SEQ ID NO: 96074 - DNA, 96 bp, Homo sapiens
tctaaaggagcaattctccaatacttacagtaatctcatattaacagttggttgaatctggcgatgtggaacccatggatatggagggctgactat

SEQ ID NO: 96075 - DNA, 100 bp, Homo sapiens
aaagaaggggaaatttgattacatactgttagagaccactggattagcagaccctgctatttgtcgtagatgtccagacaagccagatcaccaagatccc

SEQ ID NO: 96076 - DNA, 50 bp, Homo sapiens
aaattttgttgctctagcaacaggagagatgggacacgagtgggtttggc

SEQ ID NO: 96077 - DNA, 74 bp, Homo sapiens
tcataagtggaattttggagatattcaaagggtgatcagcccatgacctaaacctccagacaaaataaaacgga

SEQ ID NO: 96078 - DNA, 83 bp, Homo sapiens
ggaggtcagaggccctttcatcatcagatgatggtggtgctaccccagtacaggatgaacgggattcagggtcagacggtgag

SEQ ID NO: 96079 - DNA, 98 bp, Homo sapiens
gcggctgcagcggcaccgaacatcgggcggatcctcagtcttccacaatgaaccctgtttacagccccgtgcagcctggggctccttatggcaaccct

SEQ ID NO: 96080 - DNA, 100 bp, Homo sapiens
acattttacagaaagcacagtgtttccaagagattgccttgcaacaggtttccatgttcttccgatcagaaccaaagtgggaggtggtggaacctttgaa

SEQ ID NO: 96081 - DNA, 100 bp, Homo sapiens
ggaaagacccaggagaagccgcccaaagaactgtgcaggtcgtaatctgaaggagtggctgagggagcaattttgtgatcatccgctggagcactgtgag

SEQ ID NO: 96082 - DNA, 100 bp, Homo sapiens
agaaaacttcatcctagaccaagtgataaactgaaccctaaaacaattaatccgtgtttgggaaatgggaagtaatgacagctggcacctgaactaagta

SEQ ID NO: 96083 - DNA, 75 bp, Homo sapiens
aggatcgctgcaaatctccaacctctggttgcagattatattcctcaactggccaaattcagtcccgatttgtgg

SEQ ID NO: 96084 - DNA, 100 bp, Homo sapiens
tggggatggctataatggatttggtaatgatggagtttgtggaaaacagtaggaaagcaatgaaagaagctggtaagggaggcgtcgctgattccagaga

SEQ ID NO: 96085 - DNA, 82 bp, Homo sapiens
tttttaccgcagaagagttggaggctgaaattggcagatacccatttaaggaatcttttgggtgagttgtgaggctggcacc

SEQ ID NO: 96086 - DNA, 101 bp, Homo sapiens
cgacaagccgctggcagccgcggatctcaccgccgctcagggttggaagtactccatgacacacactcggagaaagtcccttcccatgctgagttcgggcc

SEQ ID NO: 96087 - DNA, 100 bp, Homo sapiens
catcgacatggtttccgaagtcaacatgtgtctaaaaagcacggcaagctcattacgttcttacgaacattcatgaagtctcgtccaacaaaacagaagc

SEQ ID NO: 96088 - DNA, 50 bp, Homo sapiens
acccagccagccagcaacctggaccgcctcttccatgagtggggagcccg

SEQ ID NO: 96089 - DNA, 78 bp, Homo sapiens
tgcccatcaggagtcaccgcagctccaccgtattgtcctgggtcacataatgccagctgagcgtaaaaagccagcaag

SEQ ID NO: 96090 - DNA, 100 bp, Homo sapiens
agacagagctattccagcaccagcagaggtctcctggaacacggccgcaactggtcggccatcgcccggatggtgggctccaagactgtgtcgcagtgta

SEQ ID NO: 96091 - DNA, 74 bp, Homo sapiens
agaacactattcacaaagattgcctgcagtttattggtgattttacaacgagatgctgctctccatagggatgc

SEQ ID NO: 96092 - DNA, 82 bp, Homo sapiens
gaacagggacagcacctcatcccctggatgggggaccacaagatcctcatcgacagtgagaaagatcagtctaaagaaaagg

SEQ ID NO: 96093 - DNA, 74 bp, Homo sapiens
ggggccttctacagtgacggggagatcagcatttgcatggaacacatgggacacctgtgaaccgcatccccatc

SEQ ID NO: 96094 - DNA, 100 bp, Homo sapiens
ggcctcgccccgaggcccggccctgggtgtggggaaccgcgctgaggagctggaaactttcccggcaggcgaggattaaatccaccacacagggtgaaat

SEQ ID NO: 96095 - DNA, 75 bp, Homo sapiens
cggagatcatcacgtttgccgagtcaggcaacgcggtaaaaatattgcttcggtgggtgacgcggtacagctgcc

SEQ ID NO: 96096 - DNA, 74 bp, Homo sapiens
gcagctggcatctgaccttggcactcgaactgacctcaagctcagactccactccacttggctgtgatcaccaa

SEQ ID NO: 96097 - DNA, 100 bp, Homo sapiens
tctgatgaagaagttattcaagatggaaaaaggtcactggtcagaacagcaagaagaaagtagctcttgaagacaaaagttaaaaacagactttaaaaat

SEQ ID NO: 96098 - DNA, 100 bp, Homo sapiens
ctgattaccttaaccatattacatggaaatggcgaaaagtcttttgaagacagcctctctgtctggaaggacaaaattgctacatcaaacaggattgtca

SEQ ID NO: 96099 - DNA, 82 bp, Homo sapiens
cgctgccgctgccgctgccgcacctccgtagctgactcgaacaagttgaaatcatcgcagaaggataaagttcgtcagttta

SEQ ID NO: 96100 - DNA, 100 bp, Homo sapiens
gggagcggcgccgagaggccgtgcgggacgcgggcgccaggaccggccgaacgcagaggttgccaacttggcctgttccatctcaaataatgaagaaggt

SEQ ID NO: 96101 - DNA, 51 bp, Homo sapiens
tggtgacattgtatcattggtggagtgcctgcagggcaccatccgcaacag

SEQ ID NO: 96102 - DNA, 100 bp, Homo sapiens
cgagagcagcgggcacacaatgcccacctccgcggcccaccaccaaagctcatccctgtctctggaaagctggagaagggtgattctgggggtccacttg

SEQ ID NO: 96103 - DNA, 89 bp, Homo sapiens
ggtgataaaggccatgaccaaggctcgcaattttgagagagttttgggaaaggcctgtcccctcagttcccaggtgccatgaggaagcc

SEQ ID NO: 96104 - DNA, 107 bp, Homo sapiens
ctttgcacaacaaaatgtttgagtcaattctgaaagctccggtattattctttgatagaaatccaatagagggtgatgagacaggagtgatggataatctgctggag

SEQ ID NO: 96105 - DNA, 88 bp, Homo sapiens
tcatgagcgacagcggcgagcagaactacggcgagcggaaacttgaggagaggctggagttctggatggagaaatacgataaggacac

SEQ ID NO: 96106 - DNA, 83 bp, Homo sapiens
cctctccagctcagccgcgtaggttgatgaaaagcccagaaccttgatgacagattgtctggttataaagcattttttacgta

SEQ ID NO: 96107 - DNA, 87 bp, Homo sapiens
ctctgctgcttcctcgtcctagtgatccacgcgcagttcctcaaagaaggtttaactatagatcaacacatcatcttgcatctcatg

SEQ ID NO: 96108 - DNA, 90 bp, Homo sapiens
aacctcacaacacaatccaggacaacatggaaaactacaggaagctgctctccctcgaccattcctcaagaattttgtatccaaggccca

SEQ ID NO: 96109 - DNA, 97 bp, Homo sapiens
ttacaatctatgatgatgatgatgtgtctccattcctggaaggtcttgaagaaagaccacagagaaaggcacaggatgggcaacactccagattcag

SEQ ID NO: 96110 - DNA, 98 bp, Homo sapiens
gatgttcttcttcgagtatttgtagaaggaacaggacgcaggccttgatgccctttcctctatcataagtcgccaaaaacaaatggggcaggaaattg

SEQ ID NO: 96111 - DNA, 100 bp, Homo sapiens
tggcaacagagaccggatgaaactgaccgattttaacttcctaatggtgctggggaaaggcagctttggcaagcgtggctttgtgacaggtggtgcagat

SEQ ID NO: 96112 - DNA, 100 bp, Homo sapiens
ggaagctgcaaggtcttcttcaaaagagccgctgaaggtttgcctgaatccatcattgcagctgcatgttcaagaagtggccggagagttctgcatgttg

SEQ ID NO: 96113 - DNA, 75 bp, Homo sapiens
ccgccgagctggacccggaccggttttggcaaagtgcagaggaaagttccacttccagaaaaagaactacagaag

SEQ ID NO: 96114 - DNA, 99 bp, Homo sapiens
gggtgcgcctgcagggatcggaagccggttggggtgtgagaggttttctcgctctaggtgtttcccattaaacactaccaggacaaaatcaggccttac

SEQ ID NO: 96115 - DNA, 90 bp, Homo sapiens
ttctcatatttcaccaataaaggtcctgggaactccaacaagggagcaaatcagagaaatgaacccaaactacacagaatttaaattccc

SEQ ID NO: 96116 - DNA, 90 bp, Homo sapiens
gtctctgcacctcgcgccccagcagaaagaagattggcccatgcacaagctggaatgttctcccatggttgtttttggggaaaactggaa

SEQ ID NO: 96117 - DNA, 49 bp, Homo sapiens
tcgccgtggtcaagttcaccatgagaggagggagaaccgaagattacag

SEQ ID NO: 96118 - DNA, 108 bp, Homo sapiens
gcgggaccccgagcaccgggccctctgcgacctggggccctgggtgaagtgctccgccgcccttgcctccaggattgacatgtacgtggaggggacactggatctgct

SEQ ID NO: 96119 - DNA, 100 bp, Homo sapiens
acatgagtgatgtggaggaaaacaacttcgagggcagagtggagctgatcagaataatgttcagcatcaaccccctggagaacctgaaggtgtacatcag

SEQ ID NO: 96120 - DNA, 82 bp, Homo sapiens
ctgcaccgacctcgacgtcttgcctgtgtcccacttgttcgcggcctatagcttcgttccagagcccagcatgaatggatac

SEQ ID NO: 96121 - DNA, 75 bp, Homo sapiens
cttgttggagaccccaatccgcatgagcgtcctttcgaggatgtccggcttccagatcaacctcaacccgctcaa

SEQ ID NO: 96122 - DNA, 100 bp, Homo sapiens
atttggccacctccagacgctaccacactctgggacagtgggagatttggaacagctttgagaagagcaagatgacatgtgaaaaagtccttgatttgat

SEQ ID NO: 96123 - DNA, 74 bp, Homo sapiens
gttctgatcactactgacttgttggtgtatgagtttagagtcaaagaatctagcatcatagctccagctcccgc

SEQ ID NO: 96124 - DNA, 98 bp, Homo sapiens
ctgctctccagaatgttgagattgcccgagaagtgaccccagcaaaagaaaaatattgctgtacctaaattcaatgaaagctggtggaatgcgaattg

SEQ ID NO: 96125 - DNA, 101 bp, Homo sapiens
ttgtattcatcaataatgaaatgctgactaaggaacaaggtgcaacaatcgaacacagtgtatagtagttactgggtcagatgtgtttcctgatccatgtc

SEQ ID NO: 96126 - DNA, 95 bp, Homo sapiens
actgagtgagaacgaaattatatgtaatgctctgcagagacagaaagagagattggaaggagaaaatgatcaggaggatgcattagcacaacagg

SEQ ID NO: 96127 - DNA, 76 bp, Homo sapiens
atctgtggtttctaacggagactgtggcaaggctttactggggacagggagatactaacatctccatcatgctggc

SEQ ID NO: 96128 - DNA, 75 bp, Homo sapiens
ggagaggggccgcggaaacctggagtggaaggaagcccggtggcgcctgtccgtctttgtcaataacatggtgcg

SEQ ID NO: 96129 - DNA, 74 bp, Homo sapiens
ctgaggactataataccttgggatgtggacacaatttgtaagaaacctgctccaccaaaacctgaacccaaacc

SEQ ID NO: 96130 - DNA, 75 bp, Homo sapiens
ggaaaatggccttgtctccggtcgttcccgttcaggagcagattacggaacttaatttcggattctatgaaggcg

SEQ ID NO: 96131 - DNA, 100 bp, Homo sapiens
cagccgcctccaccatgccgccgaagttcgaccccaacgagatcaaagtcgatggtggatgcttccaaaagcatcgaagctgtccatgaggacatccgcg

SEQ ID NO: 96132 - DNA, 98 bp, Homo sapiens
ctgactcgtgatctgcccatcttgttactccctagcagtgtggtaagggaggactcaccaggcttgtggccaggggcaggtaccatccgcctagagca

SEQ ID NO: 96133 - DNA, 98 bp, Homo sapiens
tggaacagggactcactgggggcaggggaaatggaaggtgatgcagtcgaagccattgtggaggagtccgaaacttttattaaaggaaaggagagaaa

SEQ ID NO: 96134 - DNA, 75 bp, Homo sapiens
ctccagaatctggattggggcgtgctgatccaccttatactcatactatacagaattggcagagggggtcgattt

SEQ ID NO: 96135 - DNA, 75 bp, Homo sapiens
ggtccaattcctgtggactttcagaggatgaagcatcttcccaaactgatttaagccaaacgatctcaaagaaaa

SEQ ID NO: 96136 - DNA, 75 bp, Homo sapiens
gaaaaattacagcacatctcagtgaatttgcaagtgcttacaaaacactacacagcaaaataatgatctgctaga

SEQ ID NO: 96137 - DNA, 100 bp, Homo sapiens
atcctgtcgggtggataagccctctgagatagtagatgttggagataaagtgtgggtgaagcttattggccgagaggtagtgttcaagacagcctcaagg

SEQ ID NO: 96138 - DNA, 100 bp, Homo sapiens
ccatttggacaaataatggaaattcgagtctttccagataaaggatattcatttgttcggacgaaaaggaggttgtgctaaagggaaaggaggatcgatg

SEQ ID NO: 96139 - DNA, 90 bp, Homo sapiens
ctggttagtgtgctctgagggagggtccgagccagccgctgttttgccggaggagcccctcaggccggattgtgggactttaccaaatcg

SEQ ID NO: 96140 - DNA, 75 bp, Homo sapiens
cggcacccagacaggtggcgacggcagaggatctcggaagggtgctgacctggaccgggagaagaaggctgccga

SEQ ID NO: 96141 - DNA, 82 bp, Homo sapiens
atttaaacaagagatttccacagaaggaactgtggctgcaccatctgtcttcatcttcccgccatctgatgagcagttgaaa

SEQ ID NO: 96142 - DNA, 100 bp, Homo sapiens
cactgtgagcctcagcagctccagccagcggacccgacggctgagaggacacattcagctaacgtattttagcaggtggagtgaggttgaagattcctgt

SEQ ID NO: 96143 - DNA, 75 bp, Homo sapiens
gcgcggtcctggcgctcagccatacaggtgtggacactgccagcggctgcagccgacttggaatgacctgggaga

SEQ ID NO: 96144 - DNA, 100 bp, Homo sapiens
tatgaacccagaggtcgtggaggtggccgtggaggcagaggtggcatgggttttaaaccatctggctggatctcgtggccttccccctcagactacccat

SEQ ID NO: 96145 - DNA, 100 bp, Homo sapiens
ttaaacaagagcaagcaaaaatcattcgattcgagagacaagcagaagaattcctcaatgcagtcttttatagaaaaggaagggatgagaccatgcagcc

SEQ ID NO: 96146 - DNA, 82 bp, Homo sapiens
ctgctgctgaagcacatgcagcatgagaacgcagatcttgtctggactaccagactcaagagaccaaatcaagcctttctaa

SEQ ID NO: 96147 - DNA, 89 bp, Homo sapiens
ccgatcaggtttagttgcttacccagcaggaaatcttcccaaggctgcagacaccgacggatttgctttgggagccagagtagctgccg

SEQ ID NO: 96148 - DNA, 96 bp, Homo sapiens
tgacatgcatgaaaggcacctttgttttacaggtttgcagcctggtcctttacccaatcaagttcattgaaactgtgagcttgaaaatttaccatg

SEQ ID NO: 96149 - DNA, 83 bp, Homo sapiens
ccaactgcaattcctacctccagatcatggaagggaagtggttgctgtgtatgttactggtgcttggaactgctattgttgag

SEQ ID NO: 96150 - DNA, 75 bp, Homo sapiens
agtgaagtgtgctgatgaagtcctctataaggttcctctcctggctgaaatttatggtatagaaggaaacatttt

SEQ ID NO: 96151 - DNA, 51 bp, Homo sapiens
agatggcattacgaacctttggccacttggatccgagccaggagacactga

SEQ ID NO: 96152 - DNA, 96 bp, Homo sapiens
aaaaaaatcattgatcctcttccccccattgatcattcagagggccgagatggacgaaaaaatgtggttccttgtgttctctctgtaaatggggac

SEQ ID NO: 96153 - DNA, 100 bp, Homo sapiens
aacgttggtcgagagagtcattcagcagttggctaaagaattacctccaaagccattgtcaagaccacagcagtcatctgcaccagtccagctgaactct

SEQ ID NO: 96154 - DNA, 78 bp, Homo sapiens
tttaaaacttcgccagaatttgcactgaaaatgaagatgctggaagtgactatcaaagtgataatcaagcaagttgga

SEQ ID NO: 96155 - DNA, 82 bp, Homo sapiens
tattaaaaaactggaacaccagctcctttataatgcatgtcaggttcagaggtccaaagaggtgacattttatggatagcca

SEQ ID NO: 96156 - DNA, 100 bp, Homo sapiens
cgccaaaagatgttattggagctattttgtaaggaaaatcctgccttgcttcgttgggcctatgcaagaacaataaatgtctatcctaatttcagaccca

SEQ ID NO: 96157 - DNA, 75 bp, Homo sapiens
gtactgcaggcccctccacgggcgttctctggccaaacgtaccaagaaagtcgggatcgtcggtaaatacgggac

SEQ ID NO: 96158 - DNA, 75 bp, Homo sapiens
gagtccattcacactggtttggaagttgcaatcaaaatgtggacgtgatgctgaatccaggcagtgccacttcga

SEQ ID NO: 96159 - DNA, 74 bp, Homo sapiens
gtttttctcaggtgaaaggagcagtagatgatgatgtagcagaagatatttggagttcttacaacatggcagac

SEQ ID NO: 96160 - DNA, 97 bp, Homo sapiens
tttgtgcctcagtggtatgtgcagcagatgaagagagggccagaggtgctgataagactgtgaaaggcccagatggactgaccgcctttgaagccac

SEQ ID NO: 96161 - DNA, 101 bp, Homo sapiens
acgccaccgggcgctgacagacctatggagagtcagggtgtgcctcccgggccttatcgggccaccaagctggtcctacatcgccaatcgagtgactgaca

SEQ ID NO: 96162 - DNA, 75 bp, Homo sapiens
gctgcaatcgcttgggagagctcctgggccacccctcctttcaggtcaagcgtgagtgcatctccatccacgttg

SEQ ID NO: 96163 - DNA, 98 bp, Homo sapiens
tcaaatcctgcacacggcggaaaacagactccattgagaagaggttttgctttgatgtggaagcagtagacagcttgtgaacaccttcttcagcttcc

SEQ ID NO: 96164 - DNA, 124 bp, Homo sapiens
cgcacaggccgtcgctatgagcgggaccaccctgggcacagcaggcatcggaggtgtccctggccagtgtccttccacctgtccacaagcatggggaacatcttcgccaacctcttcaagggcc

SEQ ID NO: 96165 - DNA, 82 bp, Homo sapiens
ccgcctgccgctcgtggtggaggacttcgtgaaggattcgggcgcctgcttcagtggtgagaagccctaccactgcaactgg

SEQ ID NO: 96166 - DNA, 74 bp, Homo sapiens
cttatccagacccaatggaacatcagcaatgcttctggctggagggttgttttgccgttgtgttgagcacgtca

SEQ ID NO: 96167 - DNA, 90 bp, Homo sapiens
cgattcttcccgcccacacggcagatgggactcctgttcacctggggttatggttttgtgaaattcacagatgaactggaacagaagcga

SEQ ID NO: 96168 - DNA, 50 bp, Homo sapiens
cgcgggggagccccgggagccgcacggtggcatttttcaactccgctgga

SEQ ID NO: 96169 - DNA, 100 bp, Homo sapiens
ccaaaccaaatgtctggacaccatgattcaaaccgccaggttaccatgaggaggatttctggccttcgagaatccccttctggtcgaaggaaagctcttg

SEQ ID NO: 96170 - DNA, 130 bp, Homo sapiens
ccaagtttaaaaagaaatggtgtaaaagttcctggtgaatatcgaagaaaggagaacggtttaagtgggcagaccaacatccacctcagcaaaaacttcttcctgacgaatcgcgccagggagcgctcag

SEQ ID NO: 96171 - DNA, 92 bp, Homo sapiens
actacatgcagcagcttcctgtggatatcttgatattgcagaccccatctgctttgatatgattgaagaagcatacatgacaaaatgtggcc

SEQ ID NO: 96172 - DNA, 83 bp, Homo sapiens
ctcgctgggatcttgatgcttgctttattagtgtttatactatggaaggaaggatttgatgccctggatccctttattcccat

SEQ ID NO: 96173 - DNA, 83 bp, Homo sapiens
tccagcaccctcttcttcgtgttcacgtgaaatgacaatggatgctctgttggctcgattgaaacttctgaatccagatgacc

SEQ ID NO: 96174 - DNA, 101 bp, Homo sapiens
ctccgagttctcggtactcttcagggatgagtcatgtggcagtggaaaatgcgctcgggctggaccagcagacatccacgacagcgatggcagttccagca

SEQ ID NO: 96175 - DNA, 118 bp, Homo sapiens
agctcaggacagggctgaggaaccatgtctccatccccgaccgccctcttctgtcttggtgagactgctgctcctcgggccattttgaccggccatgactatgaggtcacatgtgctg

SEQ ID NO: 96176 - DNA, 83 bp, Homo sapiens
ctcagctccgagtccagggcgagatgtgacaagccgaggcggtgagccgggcaggaggaaggagcctccctcagggtttcggg

SEQ ID NO: 96177 - DNA, 75 bp, Homo sapiens
gatgccagcgtagctgaatccagtaccaaaaacgtcaacaacagttttacgaatcttaagaagaaggtatttgaa

SEQ ID NO: 96178 - DNA, 98 bp, Homo sapiens
gaaagagtggatttcagcctgcacggatggtcttgaaacacaaatggtttttgaaaacaccacagggatggcgagaagtatttgttgacattgatcca

SEQ ID NO: 96179 - DNA, 100 bp, Homo sapiens
cgtcttctttgcctgcactaatggtatctcagatgaagacatcatcaacattactcttcctactggagtccccattcttctggaattggatgaaaacctg

SEQ ID NO: 96180 - DNA, 75 bp, Homo sapiens
ataaaaacaaggtggaagattcttccaaggaaccagtgcgaaggagtctactcttcatcttgtgttgagacttcg

SEQ ID NO: 96181 - DNA, 98 bp, Homo sapiens
ggggtcccttttgcctcagatactattttgaaggtttctaagcatgaattgaggaacagaagaagcagagcagatgatcggagcagcatttgtttctc

SEQ ID NO: 96182 - DNA, 97 bp, Homo sapiens
atatgtgcatcagtggtttatgccaacacatgccaaaatttaattcaatttcaattagtggataccatatgcaggaagcaggggctgatgccattct

SEQ ID NO: 96183 - DNA, 96 bp, Homo sapiens
ctgactctgagaacaccccccagaaggctgacaaggatgccggcctggcccagtccaagaggccagcgtgcagcccccatgcagggccagccaccc

SEQ ID NO: 96184 - DNA, 120 bp, Homo sapiens
acatatttttggacctgaaacagaaattctggaatacctatctgatcagctggacatcatctccatggcggagacaaccatgatgccagaggagattgagctggagatggcaaaaattca

SEQ ID NO: 96185 - DNA, 90 bp, Homo sapiens
aaaatactgtcctggcaacgtggcagccttacactagattacagtttaaagacaatttctgtgatcaagttgtcatttggaagattaaac

SEQ ID NO: 96186 - DNA, 73 bp, Homo sapiens
ctgccgatcctaaatcaacatcaggttatgatgtgattgctcaagcccaatctgggactgggaaaacggccac

SEQ ID NO: 96187 - DNA, 75 bp, Homo sapiens
cagacattaacagtatttactgagagctcatcaggtgctggagaatctggtaaaagcaccattgtgaagcagatg

SEQ ID NO: 96188 - DNA, 83 bp, Homo sapiens
ttgacacgggctgggcgcccccagaagcccgggaacaaacagattcagttgtggaaattctttttgaacaagataatgaagag

SEQ ID NO: 96189 - DNA, 100 bp, Homo sapiens
tgtggcttcagtagtttcaaaaggtggcctttccactggagttgcttcacttagctctacaatcaacccatgtggtagcaatgtacagataaagagtact

SEQ ID NO: 96190 - DNA, 80 bp, Homo sapiens
tgaagagcgacaagccgctggcagccgcggatctcaccgccgctcaggactgtgccctgtccacggtgcctcctgcatgt

SEQ ID NO: 96191 - DNA, 100 bp, Homo sapiens
gagtactcaacaccaacatcgatgggcggcggaaaatagcctttgccatcactgccattaagagttcacccagggcatgatcttacctacaatgaatgga

SEQ ID NO: 96192 - DNA, 75 bp, Homo sapiens
gaagtgcagaggtttttttctggtcagaatggcggcagtggagcatcgtcattcttcaggattgccctactggcc

SEQ ID NO: 96193 - DNA, 100 bp, Homo sapiens
agcagctgcagccgcagccgcctccgaagatgggggatttctacgacccggagcacccgacccctgacaataagagctaactgccatcaagagccatcag

SEQ ID NO: 96194 - DNA, 98 bp, Homo sapiens
tttttacctgccaatcaaactgctacaagacaacaccctgatctggcatggacatgcctcaggagtgcaagtagctgatgaagtatgtcgcatttttt

SEQ ID NO: 96195 - DNA, 101 bp, Homo sapiens
agaaggaagaaactctgaacacatctgaacatcagaagggacagactccagacgcgccaccggaaatcctcattgacgattcaatttgttgaaggccaatt

SEQ ID NO: 96196 - DNA, 50 bp, Homo sapiens
catggtgttgctgctgtactccttctccgcttcctgcagatttcacaaaa

SEQ ID NO: 96197 - DNA, 51 bp, Homo sapiens
tgaatttccatgtcaacatagtcctgctcctggctaaatacaaaagcttgc

SEQ ID NO: 96198 - DNA, 75 bp, Homo sapiens
ctaacatgtatcctggagcgaatcctaccttccaaacagataaacttctgcactggaggggcctctcctcccctc

SEQ ID NO: 96199 - DNA, 100 bp, Homo sapiens
ctggacaactactacacgcagccgctgtgcacgccgtcgcggagccagctgctcactggccgctaccaggctcacagaacatttcctgcctgttgctcac

SEQ ID NO: 96200 - DNA, 82 bp, Homo sapiens
aatttcagtgaacccaacccagattatcgaggacagcagaacaaagggattttcctgagagaactgatttcaaatgcttctg

SEQ ID NO: 96201 - DNA, 100 bp, Homo sapiens
agcgcctgaggaccggcaacatggtgcggtcggggaataaggttgaaaggattgttgacaaaaggaaaaataaaaaagggaagacagagtatttggttcg

SEQ ID NO: 96202 - DNA, 90 bp, Homo sapiens
aaagcagcgaacctcgagaccaacgtggaggagctgtgggtggaaggtttaccattgcttgttcagagaacaattgcgagaactattgtg

SEQ ID NO: 96203 - DNA, 110 bp, Homo sapiens
cttcacccccgtggtgcggcagcgcacgctgcagtccaaggacctggtgcagatgcctccgacgccccccagcagccatggcagtgacagcgacggctcccagagtcccc

SEQ ID NO: 96204 - DNA, 100 bp, Homo sapiens
gacctctacctgatcccgctgagcgcccaggaccctgttccatccaaactcttgccctttgagggaccaggagttctaccgtaaagaaaaacgcccagtc

SEQ ID NO: 96205 - DNA, 74 bp, Homo sapiens
aaggctgcaattctgggttttacatcaccggtctgggcaattcaagatggaaaaggtgatgtaaccattacaaa

SEQ ID NO: 96206 - DNA, 75 bp, Homo sapiens
acggagtcttgggacccagcatcagcccctcccacagccagctgcgccagggccccgcggggctggggcccaaaa

SEQ ID NO: 96207 - DNA, 100 bp, Homo sapiens
ctaaaaatggtatcaaagtaacagtggaaaatgcaaagtgtgtgcaagcaaatgcttttattcagatctccaagaaggagaagcttctctcgcagccgga

SEQ ID NO: 96208 - DNA, 99 bp, Homo sapiens
tgtcgtcagtaatgcctggaatgatgatgtctcatatgtctcaggcttccatgcagcctgccttaccgcctttgaagaagatggtggagagaattcgca

SEQ ID NO: 96209 - DNA, 75 bp, Homo sapiens
agatgtgaggctttgagccaaaggcatatgatctatgaagaattatatccagatcgagagacagaagattctgaa

SEQ ID NO: 96210 - DNA, 50 bp, Homo sapiens
tgctacaggactctactatggagaccctgtattcagtggatcagctggca

SEQ ID NO: 96211 - DNA, 74 bp, Homo sapiens
gctgaagcattgcttcaaagcatggggctaactccagaatcccccattggtgttggagcgggccggagagaagt

SEQ ID NO: 96212 - DNA, 101 bp, Homo sapiens
ataatcctgctgcccttcagactcaagttaaacgagaattacatgaatgacagtcttcgaaccaatgtgtttgttcgatttcaaccagagactatagcatg

SEQ ID NO: 96213 - DNA, 83 bp, Homo sapiens
taattttgcaaccccaatgacaccaggagccaaaacacagctcctctgcaaggaccctgccgaacgcctggggtgtcgtgggg

SEQ ID NO: 96214 - DNA, 129 bp, Homo sapiens
caaagatttgcatcagccatctcttagtccagcaagtcctcatagccagggtcctactgctctgttggctcatgaaataggttttggaagtaaagttacaacacaccctcttgctaaagacaaaatgat

SEQ ID NO: 96215 - DNA, 115 bp, Homo sapiens
gttccttgtggagccggagctgggcgcggattcgccgaggcaccgaggcactcagaggaggccaccagcttgggctccccacggagggcagcaagtgggacttggggaacccggc

SEQ ID NO: 96216 - DNA, 100 bp, Homo sapiens
gcgggagcggcgccgagaggccgtgcgggacgcgggcgccaggaccggccgaacgcagagaaaaatggctactggacaggatcgagtggttgctctcgtg

SEQ ID NO: 96217 - DNA, 87 bp, Homo sapiens
ggcccaacaaactggagagagaccagacctgcaagctctttgacacacagcagttcttgtcagcctcccgcgacgatgcccctcaac

SEQ ID NO: 96218 - DNA, 83 bp, Homo sapiens
aaaaggacttatgagttacaggataattacagaaaaagttacgtcgatcacaacacgctcgcaaagaaacagagttcttacgg

SEQ ID NO: 96219 - DNA, 121 bp, Homo sapiens
gcttcgccagcaagcggcggagctgcgcctcggcccgctcttctccctgcttaacgagaaccataggtttgatctgtggatgaaatgaatcatgattttcaagctcttgcattagaatctc

SEQ ID NO: 96220 - DNA, 97 bp, Homo sapiens
tctgagctggtcagcacagcctgcggtttccggctgcaccgcggcatgaatgtgcccttcaagcgcctgtctgatctttgtagaatttgatggctgt

SEQ ID NO: 96221 - DNA, 100 bp, Homo sapiens
tttgtaaatcgtcccgataagaagaaaatacttttcttcaatgataagagctgtcagttttctgtggatgaaggccccttcacagatgtagtcactacaa

SEQ ID NO: 96222 - DNA, 75 bp, Homo sapiens
ccgcctcgctgtccctgcggcttctggggcaaagtacccacgtttgttcgaatgctggccccagagggagccctg

SEQ ID NO: 96223 - DNA, 75 bp, Homo sapiens
gcgctcctgagaccctccagcgctgcctggaggagaatcaagagctccgaggttctgggccggagaaggggcgac

SEQ ID NO: 96224 - DNA, 75 bp, Homo sapiens
catctttctggatgatggagtggatgaacaagtactgatggaactaaaaactagattggtacaagcgcaattttg

SEQ ID NO: 96225 - DNA, 51 bp, Homo sapiens
ctcgaccagttgcctgacgagaccgagccgctgccgctcatggatttgtgc

SEQ ID NO: 96226 - DNA, 89 bp, Homo sapiens
cgacctggccgagctgcccagcgagatcctcggggccccagaggccgcggacaccgacctggaggagtgagctgttgccgcagaatggg

SEQ ID NO: 96227 - DNA, 107 bp, Homo sapiens
tccacattggtctgttagagttcgaaaagctgagaatcctcagtgtttgctagataatatcgtctactgcattatttttggctgcaaaagtggaagaacaggctcga

SEQ ID NO: 96228 - DNA, 100 bp, Homo sapiens
gcgtgcagctcagcttctccggggcatttttttctacacggtctgctgagaacagacccagtccctgaggaaggagaagatgttgctgccacgatcagtg

SEQ ID NO: 96229 - DNA, 75 bp, Homo sapiens
cagcccctgcctaggattgtcactattcagatgtccagctcgccgctgtccaagaaacgtcgcgtgtccgggcct

SEQ ID NO: 96230 - DNA, 100 bp, Homo sapiens
tcggaggcgttcagctgcttcaagatgaagaaatatggctacacacacctttctgcaggagagctgcttcgtgatgaaaggaagaacccagattcacagt

SEQ ID NO: 96231 - DNA, 75 bp, Homo sapiens
ctctctctgttcaagggaattttgatctaaatagtattcgaaggacccaagtcattgatgatgagtcagattact

SEQ ID NO: 96232 - DNA, 51 bp, Homo sapiens
ggccctcattcaggcccagccctggtaaacagtgttgacctcagagctgct

SEQ ID NO: 96233 - DNA, 111 bp, Homo sapiens
ctgtgcatcccggccgtctgggcggccgccgcgcttctgctctcagtgtcccggacttcagacaatgcagatcttcgtgaagactctgactggtaagaccatcaccctcga

SEQ ID NO: 96234 - DNA, 100 bp, Homo sapiens
gcggccccctggagggggcagtcccgggagaacctgcggcggccggagcgttgctgccaaacaaggtgaatccgacccagagaggaaagaaacaaggcag

SEQ ID NO: 96235 - DNA, 75 bp, Homo sapiens
gattcgcagtggtcgcttcttctccttgatgaagacaaaatttggcccccatgtattagagtaattgtcattaga

SEQ ID NO: 96236 - DNA, 96 bp, Homo sapiens
cggctctcggagcccggcgggtcaggtgtctcgactgcattgtgagagtgaatctttcaagatggatctaatcttagatgtaaacattcaaattta

SEQ ID NO: 96237 - DNA, 90 bp, Homo sapiens
cgacatccaggcgaactcggcctatcgctaccctccgaagtccggtgtgaatgacagaggtggtgccatccagcgcgctcagcgaggtca

SEQ ID NO: 96238 - DNA, 76 bp, Homo sapiens
accgtcacattcagttaaagttcacacagttcctaagccagaatatcctccgaatcctaaatctagagctccaagg

SEQ ID NO: 96239 - DNA, 74 bp, Homo sapiens
gctgagctccccactggctttggctggggacacccgacttgacattcagggacgtggccatcgaattctctcaa

SEQ ID NO: 96240 - DNA, 96 bp, Homo sapiens
ctggagaacgcagtgctcttcgaagtggcctgggaggtggctaacaaggcctccccacctgcccccgcaaggcggcatctgctggtcctgctgctg

SEQ ID NO: 96241 - DNA, 99 bp, Homo sapiens
gtggagagagcgagctgagtggttgtgtggtcgcgtctcggaaaccggtagcgcttgcagcatgttttccaagagataacttcaccaagatgtccagtg

SEQ ID NO: 96242 - DNA, 100 bp, Homo sapiens
atttgggagaagaaaatttcaaagccttgttagatggagtcagatttgaaaatgaaaaaattaatgttattgccaagaacactggtaataaactgaagct

SEQ ID NO: 96243 - DNA, 96 bp, Homo sapiens
tggagttgcttcacttagctctacaatcaacccatgtgtccctaaaagataagttagtacaagagaaaaagctgtccaatatgtaccaagagcagt

SEQ ID NO: 96244 - DNA, 101 bp, Homo sapiens
gtctgcgagccaggattcccggaggcatacacggaatacctgaggagcatccactatatctcccaggtgttactagaagaagtggaaaccactaaaggtac

SEQ ID NO: 96245 - DNA, 75 bp, Homo sapiens
ctggaggtgaagatgaacctggaagagcagagccagcagcagtgtaaagagaatggcgctttcactgtgcttgtt

SEQ ID NO: 96246 - DNA, 75 bp, Homo sapiens
agcattctcatcagcaacggctcaagggactttgaacatgtcggggatcgccctcagcagactcgcccaggagag

SEQ ID NO: 96247 - DNA, 100 bp, Homo sapiens
tctgaatttgaaggtggaaaatcaacagtgaattgtaggttaaagaactgaatcattatctggaagctgagaaatcttgtaggactgatctagagatgta

SEQ ID NO: 96248 - DNA, 101 bp, Homo sapiens
gctgaggcgccgcggtaccatgaggcgccgggagtgttgacattcagggatgtggctgtagaattctccccagaagagtgggaatgcctggactctgctca

SEQ ID NO: 96249 - DNA, 104 bp, Homo sapiens
ctggagcctcagttggaagcagccgatccagcctgcggagcctgtggggcaggaatggtcctcgtccgaagtgagaatgggcagttgttaatgattcctcagca

SEQ ID NO: 96250 - DNA, 82 bp, Homo sapiens
agtcatcggacgccagaatctggcccctggccccaacatggcccgtcgctctcagagctcctcgcagggggacaacccactg

SEQ ID NO: 96251 - DNA, 83 bp, Homo sapiens
ctggcagccccgctctctgcatcctggtacctgggataaaagttgcagcgtcccaccatccaccagacagaccacctgacccc

SEQ ID NO: 96252 - DNA, 100 bp, Homo sapiens
gaagtgtccaaaccacaagttctcaaaactctctgaaaaatggctccctccgagttaagtgaagcgtgacattcaggaaaacgatgaagaggcagtgcaa

SEQ ID NO: 96253 - DNA, 90 bp, Homo sapiens
ctggccacaggcagtacggcatggtgctcgaaagttcgtcgctgcttcctgtgctccaggagaggacatctcctgtattcctgtccagcc

SEQ ID NO: 96254 - DNA, 88 bp, Homo sapiens
cgcgacaccgccccccgaccgggtgcccgctgtgtgccaggccgggtgctgggcacggtcccgcgagagatggggtctcgctatgttg

SEQ ID NO: 96255 - DNA, 75 bp, Homo sapiens
agctaagacgctgtttcagagcgtttgggtcctctgaggccccttgaccagtcagtactgctccccagcctaaac

SEQ ID NO: 96256 - DNA, 101 bp, Homo sapiens
aacattccagttttttaagaagggacaaaagcggtcagatagcatcagacctgcattgaacagtcctgtggaaaggccaagcagtgaccaggaagagggag

SEQ ID NO: 96257 - DNA, 100 bp, Homo sapiens
gagaggaacctctatgccgacatcgacgccgcctggcaggccctgcgcaccaggctctttggtgtaacgggaaactgcgctgcctgtagtaagctcatcc

SEQ ID NO: 96258 - DNA, 100 bp, Homo sapiens
agccgatcccggcctgagcaagcggccgcgcactgaggaggcggcggccgacggtggcggcgggatgcaggacaagaggaccctgccttggtgtgagagt

SEQ ID NO: 96259 - DNA, 50 bp, Homo sapiens
agccaatcccaggaggaaaaacgcttcctgtctccaaggggattttttcc

SEQ ID NO: 96260 - DNA, 101 bp, Homo sapiens
ggcgccaggaccggccgaacgcagaggtgacctcaaagcagaagctctgaattcacctctcatctgacgactgacagctgctgccaccgccagcctctgtc

SEQ ID NO: 96261 - DNA, 97 bp, Homo sapiens
gagtccagttcggagtcctgagtccggatgaactggttttgaacgaagaatgtgatcagaactggtacaaggcagagcttaatggaaaagacggctt

SEQ ID NO: 96262 - DNA, 101 bp, Homo sapiens
cctgcctcagcctcacaagtagctgggattacagttactaaaagatgtaactgaactgcagatccttggtgaaatatctttcaacaaatctctatatgagg

SEQ ID NO: 96263 - DNA, 105 bp, Homo sapiens
gaaaggatgacatatttttggacctgaaacagaaattctggaacacctatatggattttttatcaagcagaaatgcatcgaacaacgagaatcaagatcactgag

SEQ ID NO: 96264 - DNA, 75 bp, Homo sapiens
ccggaacctcaagaaggaggtcagccgggtgctgtgcaagcggtgcggaggagagacttcagcatgcaaaccttc

SEQ ID NO: 96265 - DNA, 100 bp, Homo sapiens
gaaaactcgaggcaactattgtgcacaaatgaagatgtttccagccctgcctcggcggaccaaaggcgatgtgacattggggatgcttccaggggaagtt

SEQ ID NO: 96266 - DNA, 82 bp, Homo sapiens
catgcctctagtatcaaggatctcaccaaacaacttcagcaaggtgtgatgaatgcagactctgctaccattttggctgttt

SEQ ID NO: 96267 - DNA, 50 bp, Homo sapiens
ttccccgctgctcaacgccatacagcaggagcctgatcaggtgtacgagg

SEQ ID NO: 96268 - DNA, 75 bp, Homo sapiens
gacctgttcaccagcactgtctccaccctagagattcctcagttccttttagatgattgctttaaaaatggtatc

SEQ ID NO: 96269 - DNA, 50 bp, Homo sapiens
ctttggccctgtatcaggagcacagcttaagtgagagctttttcatggtg

SEQ ID NO: 96270 - DNA, 51 bp, Homo sapiens
cgcaagatggcagccaccacgggctcggtagggacggggtttcaccgtgtt

SEQ ID NO: 96271 - DNA, 100 bp, Homo sapiens
ctccatctctaagccccgtaagtcctctgtcaccaacatcatctgaggctgaatttgataagaccactcgggctacattgagagacctcagctgattcga

SEQ ID NO: 96272 - DNA, 100 bp, Homo sapiens
cagtcacacaagcttatcatctttgatgctcgacaaaacagtgtcgctgataccaacaagaaattacagaagacatccccgtgaagactttgaatatgaa

SEQ ID NO: 96273 - DNA, 75 bp, Homo sapiens
ccatcgtgcctctttgggcttccatgggcaactacatcaccagagtcttgctctgtcgcccaggctggagtgcag

SEQ ID NO: 96274 - DNA, 100 bp, Homo sapiens
ctcagattgaaggacccggtggaccttgggagtgaagatgaagctggatgtagctcagttgatgaagaaagttacaagactctgaagcagcaggaagaag

SEQ ID NO: 96275 - DNA, 73 bp, Homo sapiens
ccccatgtgccagaaggagttcgcccccagatgttacatcctgtccactgcagacaacgtattgactttgtcg

SEQ ID NO: 96276 - DNA, 74 bp, Homo sapiens
cagaaggctcagcgagtttcagaatttacaccggaaactcagtgagatgcagctgtcttctcctcagtgctggc

SEQ ID NO: 96277 - DNA, 94 bp, Homo sapiens
ctcagttggaagcagccgatccagcctgcggagcctgtggggcaggtttggcagttctctaccagtggaccaatcttttcatccccgtgtacct

SEQ ID NO: 96278 - DNA, 82 bp, Homo sapiens
gggtgttcgactgctagagccgagcgaagcgccgctacctgtctgaggaacccgagccctacctggcagtctacctgcactc

SEQ ID NO: 96279 - DNA, 100 bp, Homo sapiens
caatatcccagccgtccaggagaagctccaccaggatcttctcttagaaatctacagaagtataggggagccagatagtttgtatggctgtggtggaggg

SEQ ID NO: 96280 - DNA, 50 bp, Homo sapiens
tttactaacttttcatcatttgcaccagggacagagtggactgaagcatg

SEQ ID NO: 96281 - DNA, 101 bp, Homo sapiens
accacactctacgaaggcacctggcggcgggggagcaccgcggggggctgccgaaactacccagtattgactcggagacaaaaagaggccaagaccaagag

SEQ ID NO: 96282 - DNA, 99 bp, Homo sapiens
ctgcaagcgagttatgtggagtttagacccagccagggtaaccaggagccgacaacaactcctgacgcaatggttcagccttttactaccatcccattt

SEQ ID NO: 96283 - DNA, 74 bp, Homo sapiens
ttggaatcaaagataaatccaaatactgcatatcagaaacaacaggagaagatggtataaactggtccatcagt

SEQ ID NO: 96284 - DNA, 97 bp, Homo sapiens
cgccgaggaggctttcctgctggtggcaaccgcctacgagacactcaagtatgaagtgaaggctcctgttccttctgcctgtttcaggaatatttgt

SEQ ID NO: 96285 - DNA, 112 bp, Homo sapiens
gccgctgatgacacctggcagaaggcagccatggagggcgatggctcagattcgccgtttggtgccctggttgtcagatgttggaaagcagtaggacggaacatactcttcg

SEQ ID NO: 96286 - DNA, 98 bp, Homo sapiens
gagctcattgaaagattggagcagtgggtgattattgaacaaggatgctttgcttattcgatggtgatcgttccactttatgatacccttggaaatga

SEQ ID NO: 96287 - DNA, 101 bp, Homo sapiens
cagcctctctcatcttgggaatctgcgtcagaagtcactcgcagtcccgtcagcccagcttagaccatgctcagcctccaagcagccttgtcatcgacaaa

SEQ ID NO: 96288 - DNA, 88 bp, Homo sapiens
gtcccccaaaacccctcgcctggctcggacccacggagccggcagcccagcactccgtgccggtggtggtgtgcacattgagccccgg

SEQ ID NO: 96289 - DNA, 75 bp, Homo sapiens
ggcatcgtggacatatctattcttactacgggaaggtgtcttgctgcaggtaactaatgaagaagtggtcaacca

SEQ ID NO: 96290 - DNA, 83 bp, Homo sapiens
gttgctgtgaaaataatagacaaaactcagctaaatcctaccagtctacaaaaggattccagtggaatgacactggtgatgct

SEQ ID NO: 96291 - DNA, 50 bp, Homo sapiens
cacagaatcttatcacagtgaaggtttctagagccatctgggctttccgg

SEQ ID NO: 96292 - DNA, 100 bp, Homo sapiens
tgcaaagctgtacaagagatcatgcagctggaagacccaggagaaggcggaggctcaggtgcccacatgatcagcacagccagggtacctgctgacaagc

SEQ ID NO: 96293 - DNA, 51 bp, Homo sapiens
cccacggtagcgcagccgctctgaggttgaaatcacaaagattagacacct

SEQ ID NO: 96294 - DNA, 96 bp, Homo sapiens
cctgcagtacctgcagaaggtctctggagacatcttcagcaggtatctcaggagattacatttcagcttgaaaaagggtcggtggaatttaaaaga

SEQ ID NO: 96295 - DNA, 75 bp, Homo sapiens
gctggagcgaccccttgttctttggtggcgctgattcatgatgttgctatcaaaagttgagaaattgtcagaaga

SEQ ID NO: 96296 - DNA, 82 bp, Homo sapiens
tccagcggcggcggcggccagcagagatgccctgtatccaagcccaatatgggacaccagcaccgagtccgggaccccgtga

SEQ ID NO: 96297 - DNA, 100 bp, Homo sapiens
cccgactcaacgtgagacgcaccgcccggactcaccatgtggaaaatgaaaaccactgtgactttgtaaagctgcgggaaatgctcatttgtacaaatat

SEQ ID NO: 96298 - DNA, 75 bp, Homo sapiens
ggccattcactgcccatgctgagcgcctctcacacagggtctttttggagttcctgagctgagtgccccagaagg

SEQ ID NO: 96299 - DNA, 100 bp, Homo sapiens
gaaatgatggccacgcgtcggactggtctgtctgagggagatggtgacaagctcaaggcctgcgagttttttggagggtcgggtgtgtccagaattgctg

SEQ ID NO: 96300 - DNA, 75 bp, Homo sapiens
gcccgcctcgccgaggaggccttcttccgtggggttagccagctttggacatcagacagtgcaggagaagaatgt

SEQ ID NO: 96301 - DNA, 74 bp, Homo sapiens
cgaggagtctctgtcatcgcaggccagcggggctggcttgggaggcgatggagccggagttcttgtacgacctg

SEQ ID NO: 96302 - DNA, 75 bp, Homo sapiens
ctatgtacgccctcttcctcctggccagcctcctgggcgcgggaggatcccttttcccccagaaattactcaatg

SEQ ID NO: 96303 - DNA, 100 bp, Homo sapiens
gctgggtgcagatgcagtgtggctctggatagcaccttatggacagtgtctttctcgagaagcaggtggaaacatgagcattcagtttcttggtacagtg

SEQ ID NO: 96304 - DNA, 100 bp, Homo sapiens
acgggctccgtggctggttcccggcgagctacgtgcagttgctggagagataattgacgaccttgccaacctagtggagaacacagatgaaaaacttcgc

SEQ ID NO: 96305 - DNA, 89 bp, Homo sapiens
cgatctcccatatttctgcagtttgttgattgtgtttggcaaatgacaaggcagggtattgcaggttccgacggtcttcctggggataa

SEQ ID NO: 96306 - DNA, 98 bp, Homo sapiens
ccctgcatggagcaagtctgtcagcaccatctttctaacatggagaacatgcagctgaccctgaacctgcagacggagaacaaaggcagcgttgtctc

SEQ ID NO: 96307 - DNA, 74 bp, Homo sapiens
ggcgctggtctgctcccagccggtctggaggcggctggtggaaatccaattccccgcggagcatggctggaagg

SEQ ID NO: 96308 - DNA, 74 bp, Homo sapiens
acaacatggcagacattgacaattttactgctcggattacagaattaatgcaagtactgaaggatttaaatcat

SEQ ID NO: 96309 - DNA, 82 bp, Homo sapiens
cagcatgaagaggagagctggcctggggggcagcatgaggccactcgaccggatatgatcaggatcttgtcagcagcccttc

SEQ ID NO: 96310 - DNA, 100 bp, Homo sapiens
gccagtgactaccaacgtttggaccagaaggaccttttttctatcagtgcttatgtttatgctcagaaaccacaaatggacattcacagtttcgaaggca

SEQ ID NO: 96311 - DNA, 88 bp, Homo sapiens
gggtcccgagccaagccggtcgtgagtgacgatgacagtgaggaggaacaagaggaggacaataacggtgtgattggactgttggagc

SEQ ID NO: 96312 - DNA, 89 bp, Homo sapiens
atggcaaatcacatcaaaagagattaaaacaactcagcaatgggacgctgaaaaatgacaatgactctttttgatcagaacaatgctgc

SEQ ID NO: 96313 - DNA, 50 bp, Homo sapiens
gagctgaggactgcctgtttgcaggatgaacgtgaagccagagaaaatgt

SEQ ID NO: 96314 - DNA, 87 bp, Homo sapiens
ccggggcggtccctggctgcgtgcacagcgccttgttccagcagggcctgatccagaatgttgtaccatctttgggtaggcagactt

SEQ ID NO: 96315 - DNA, 98 bp, Homo sapiens
ggtcgtgggtgttgaggcggagaggaaggcgtggtgtggcgtctccagggaacccttccaaaacacagaggagccatatgagaatatcaggaatgaag

SEQ ID NO: 96316 - DNA, 75 bp, Homo sapiens
gataaagtcttggttgctgccaacaaggtcttgggtggtgcctatgatgagttcatctttgctcctcggctggac

SEQ ID NO: 96317 - DNA, 80 bp, Homo sapiens
ctgtcggcttcaaagagaaaaggcaacatcctgtcacaggccatgctctggcaaaaacagtgcacatttggccatgatcg

SEQ ID NO: 96318 - DNA, 90 bp, Homo sapiens
catcagacacatgatccgcaagaacaagtaccgccccgacctgcgcatggatgatgactttgagttcactggcagccacctgacagtaag

SEQ ID NO: 96319 - DNA, 100 bp, Homo sapiens
tgcttcctcctcttcaacatcatggactggctgggacggagcctgacctcttacttcctgtgggatggccaggccatgttatgggatctcaacgaaggca

SEQ ID NO: 96320 - DNA, 75 bp, Homo sapiens
gatctggaggcacagctgcagtctgacgagagggtgtactaatggtcacttgatgtgcgctggctgttttatcca

SEQ ID NO: 96321 - DNA, 90 bp, Homo sapiens
gcggctgggaggagggcttcacggaggagggcgccagctacttcatcgaaaagacccaaatgggaccagtagtttgccaactggaagttc

SEQ ID NO: 96322 - DNA, 75 bp, Homo sapiens
cttcatttacagagcaacttgatgaaggtacacccaatagagagcaatggctgccatccggaagaaactggtgat

SEQ ID NO: 96323 - DNA, 100 bp, Homo sapiens
cagctattggatttcccacccagaatctttaggtaaatgaggtgctggagaatctggtaaaagcaccattgtgaagcagatgaggatcctgcatgttaat

SEQ ID NO: 96324 - DNA, 50 bp, Homo sapiens
cagaactgagtggcaacttcgagcagaagtttgcctgcaatggtactgta

SEQ ID NO: 96325 - DNA, 83 bp, Homo sapiens
caaggaagggcaggatgtacccctgaaaccggatgctgagtaccctgaatgtggctcacaggcccggggcattcaaagctgag

SEQ ID NO: 96326 - DNA, 75 bp, Homo sapiens
gacgtacctggacaagcacatggaggctcagcgggccgaggagaaggaaggggagttcaccctgcacggccgggc

SEQ ID NO: 96327 - DNA, 75 bp, Homo sapiens
agggaaagagccctggatggttggcagagagcttacaagaggcctgtgttcaggcccctggatcctcctggaatc

SEQ ID NO: 96328 - DNA, 103 bp, Homo sapiens
ggccgagcgggcggcttcctggcctgggcgctccggtggcggcggagttggaatcgaagcctcttaaaatggcagatgacttggacttcgagacaggagatgc

SEQ ID NO: 96329 - DNA, 104 bp, Homo sapiens
gacgtaccggctctggaaaatccgcaagaccatcatgcagatcatgatgctgccgccaccgccgccaccacggagcgagaagcccagatagacgccccggcggc

SEQ ID NO: 96330 - DNA, 75 bp, Homo sapiens
gccgccgccgcagagctgcagctcggggccgagggacccgtcgccatgggccgtgtgatccgtggacagaggaag

SEQ ID NO: 96331 - DNA, 100 bp, Homo sapiens
cgagaacgtgaacaaggccaggagctttgctgcgggcatccaggccctgggagttgagaatggagagaatgttacctctcctggctctggggctcttggc

SEQ ID NO: 96332 - DNA, 99 bp, Homo sapiens
caagagcagcctcacatggtgtgggccgacatcaagagctgcgagatccaacagagggagcactatgtctgcggaagtccccgaggcagcctccgcgga

SEQ ID NO: 96333 - DNA, 82 bp, Homo sapiens
ccagcggcaaagccaggctctccccaggacaagaggaccctgccttggtgtgagagtgagggaagaggaagctggaacgagg

SEQ ID NO: 96334 - DNA, 71 bp, Homo sapiens
aagctggaggccggcaaagccaagccatgtgaagatgtgcttgcttcccctttgccttctgccatgattct

SEQ ID NO: 96335 - DNA, 82 bp, Homo sapiens
gccggttcttggtgggatctgagcaggctcttgtcaggatggtgaagctgttcatcggaaacctgccccgggaggctacaga

SEQ ID NO: 96336 - DNA, 75 bp, Homo sapiens
cttatttatccagaagattgatcatcatatgggtttgccctgcaggagtcattaaatcaaaacttcatgctgatc

SEQ ID NO: 96337 - DNA, 90 bp, Homo sapiens
ggaaaccatgcaacagtcaaccttctgagctttcttcagagacctcagtacctcactgtggaccgaaatcgtctatggtatgtgccgcgc

SEQ ID NO: 96338 - DNA, 75 bp, Homo sapiens
gcgaggaggctccacacggccgttgcagctaccgcagccagctgtcggaaaaggtaacagaagatggaactcgaa

SEQ ID NO: 96339 - DNA, 83 bp, Homo sapiens
ctgcggccaattcggtggaacgaggacgcggactgcgaaggcaggtgtcgtgaaaactacccctaaaagccaaaatgggaaag

SEQ ID NO: 96340 - DNA, 76 bp, Homo sapiens
ccctggacctggtcagagcgcggatggccgtaaccccgaaggaaatctgagatctgtatctgtggacctgaatgtt

SEQ ID NO: 96341 - DNA, 100 bp, Homo sapiens
ggagtctccgcgtcccgctcgctgggagagagcaatggcaccagcatgatatcattgatcattcctcccaaagaccagatttcacgagtggcaaaaatgt

SEQ ID NO: 96342 - DNA, 75 bp, Homo sapiens
tggctaccctgccaagcgcaagagaaagtgaacttgtaatagctggcatcgttgagaatgaatggaaaagaacgt

SEQ ID NO: 96343 - DNA, 96 bp, Homo sapiens
gaacaattagggtgacgtgtgcattgagtaaacgtaagaaggtgttttaccctgtggtgttcagtctttacaatcctgccattgtttatgccaacc

SEQ ID NO: 96344 - DNA, 99 bp, Homo sapiens
cggcggccctggaacctggatatcgcgcgagtgacaccaggtgaaagcagcaaaacctggggcaggagctcagtcgtcccaaaggaggaaggggaggag

SEQ ID NO: 96345 - DNA, 75 bp, Homo sapiens
agatcttcggcctagactgcgaggaggctctaattgagaaataaccagacgtcctgggtcctctccagcatggca

SEQ ID NO: 96346 - DNA, 94 bp, Homo sapiens
aacaccagcaccgcagatgttgtcaaggtggcctaccaggaggccaggggtgtcgccatgcttctgcagaaagccgtcattacacctgattttg

SEQ ID NO: 96347 - DNA, 82 bp, Homo sapiens
tgacaaccttggaacagaacaagaggacaggaggtgtcgttccaggcaggccagaaagcagacccagggaggatagcacatg

SEQ ID NO: 96348 - DNA, 96 bp, Homo sapiens
aagcagtgaaggagtgcagaggcatcacctgaaagctgcccagagcccagaccaagcatggacgccgtggatgccaccatggagaaactccgggca

SEQ ID NO: 96349 - DNA, 100 bp, Homo sapiens
gcagggccagtccggccccgggcagcggacaccctgaaggtcccggtgctcacttggacatgaaacagtatctcacctccctaaactggttaatagtggc

SEQ ID NO: 96350 - DNA, 90 bp, Homo sapiens
gaaatttgcagagtatgggatatgtcaatggatgagtgaagtaagaactctgctagagaggaaatggctgcttcatcatcatcctcctca

SEQ ID NO: 96351 - DNA, 97 bp, Homo sapiens
tgcccatcctgaaggacgtggccactgtggccttctgcgacgcgcagtccacgcaggagatccatgagaagtggttcctctggagattaaatgtact

SEQ ID NO: 96352 - DNA, 100 bp, Homo sapiens
ctcagagggacttatatagggatgtaatgtgggagaactacagcaacttcatttcactaggacttggatgttgtgggtgatggtatgcagtgtcctcctt

SEQ ID NO: 96353 - DNA, 58 bp, Homo sapiens
tttcttctttgagaaaaacctgaaagatgtctcagactacaaagctgatgaagaccca

SEQ ID NO: 96354 - DNA, 151 bp, Homo sapiens
attatggctgctgttgtccaacagaacgacctagtatttgaatttgctagtaacgtcatggaggatgaacgacaggtttttcgttggaatatacgttgcacatttatggcgattctgagtgtgagggcagacttctgccaggctcagcaca

SEQ ID NO: 96355 - DNA, 83 bp, Homo sapiens
ggacaagtttgcagatcgggagcgcaaggtcgccctcaaggccatgatcaaaacgtattatcgggggacccacggggtcattg

SEQ ID NO: 96356 - DNA, 90 bp, Homo sapiens
gcactctgcgctttgagctactgggctgtgagctgaacgtgtttaccaagaatctgtgcagtcagatgtcggcagtcagcgggcctctcc

SEQ ID NO: 96357 - DNA, 122 bp, Homo sapiens
atttgatgacaattttattgaggaaagaaaacaagggctggagcagtttataaacaactgaagaaaaggtgactggtctcatgagccctgaagaatgaactcagaggaggttgtttacatga

SEQ ID NO: 96358 - DNA, 101 bp, Homo sapiens
cgcgtgtctaggtgagtcgcggtgggtcctcgcttgcagttcagcgaccacgaatgacagggtccagaaactggcgagccacgagggacatgtgtaggtat

SEQ ID NO: 96359 - DNA, 96 bp, Homo sapiens
cgctctgcacgcttgccagcgcggtggagtggagcaccagcaactgttagacctcgcccagaagcacctcggtggcatcccatggacatatgcaga

SEQ ID NO: 96360 - DNA, 100 bp, Homo sapiens
cttgaacacctgggctcaagctgtcctcttgcctaagcctcccaaagtgtttgaattacaggaaacctctctgaggtctggtcagattccaaccctggac

SEQ ID NO: 96361 - DNA, 83 bp, Homo sapiens
catttaacgatttacaagacctgagagaacagattcttcgagttaaagacactgatgattgcacagccagagaacaacacatc

SEQ ID NO: 96362 - DNA, 50 bp, Homo sapiens
ctcagagtctcaatgaacttgagaatggatcttggagaatgtctgaaagt

SEQ ID NO: 96363 - DNA, 95 bp, Homo sapiens
aacggctttccagtacatcattgataacaagggcatcgactcagacgcttcctatccctacaaagccatggtgtgggcagaagaaaaagctagtg

SEQ ID NO: 96364 - DNA, 82 bp, Homo sapiens
taaattgaaaatattggggccatttagtaacttctttgcaaggtgctggagaatctggtaaaagcaccattgtgaagcagat

SEQ ID NO: 96365 - DNA, 121 bp, Homo sapiens
ctctacatgtaaaaggccactgactcctacttcctctgtatagagcaactgttgaactcagctgcctgtagggccatgtgaaactttctgactttggtctttgcacaggactgaaaaaagc

SEQ ID NO: 96366 - DNA, 87 bp, Homo sapiens
acaggcgttcgaggagatcatcctgcaaccatcatcaaagaggggatgctgaccaaacagaacaattcattccagcgatcaaaaagg

SEQ ID NO: 96367 - DNA, 100 bp, Homo sapiens
aacctcaccgaggcgagagtgcagcatccacctccagatcgacaggcagtacctggaagaccaggcccctttccctccaagcagcaagtagctgatgaag

SEQ ID NO: 96368 - DNA, 102 bp, Homo sapiens
tggcgcactaccgccgctggggggactccgtactcctcgtggacttaagcctaaagaaactgttccaactcttgctccaaaaactctttcagtagcagcagc

SEQ ID NO: 96369 - DNA, 100 bp, Homo sapiens
aaatacccctttgaattaattatggctgtgcaacaatcgaacacagtgtatagtagttactgggtcagatgtgtttcctgatccatgtcctggaacatac

SEQ ID NO: 96370 - DNA, 100 bp, Homo sapiens
tcaacttctgccgacaacttttctcctgatttgaggtactgccaaatctgtcgaaagggagataatgaagaactgcttcttctttgtgatggctgtgaca

SEQ ID NO: 96371 - DNA, 83 bp, Homo sapiens
cggctgccccaatccccggcagctctctcagatctccaggacttcaagttagatgtgcagcacgtgattgaagtggatgaggg

SEQ ID NO: 96372 - DNA, 78 bp, Homo sapiens
gagtcgtagggaggacgccgggacacctggaagccgagaaatgtgtgtctctatgcatggagtaagaaagaaaccatc

SEQ ID NO: 96373 - DNA, 115 bp, Homo sapiens
gacattaagaatgggacaatcttacaactggctatctccccgctccagaaacgcttcatcctgaatctgccaaccttcagtgttcgaatcattgacaaaaatggcatccatgacc

SEQ ID NO: 96374 - DNA, 80 bp, Homo sapiens
acactgggatcctgtaacacagagataattgacgaccttgccaacctagtggagaacacagatgaaaaacttcgcaatga

SEQ ID NO: 96375 - DNA, 90 bp, Homo sapiens
gctgctaacccgacccggattggcgctgaggtggcccgtggggcagccaacttctctttgcctgaaaaatgcgactatatggatgaggtg

SEQ ID NO: 96376 - DNA, 75 bp, Homo sapiens
gaaatggcacctatggacaagtctataagttccagtgtctcgccccatcctcaccctcagggttcccagggccca

SEQ ID NO: 96377 - DNA, 50 bp, Homo sapiens
ctttcatgtgctttacctaactacaggcccaattcccaccggactctgcc

SEQ ID NO: 96378 - DNA, 82 bp, Homo sapiens
agaagctgggattggagattccacccaaacttgctggtcactgggagataacgaaggaggcccaacttcattcaataaggag

SEQ ID NO: 96379 - DNA, 100 bp, Homo sapiens
agaaaaggttcgtttggaagtatagaccatctccagacattgcctaagatactgagccatatcgccccagcattttgcatgagcagctgtagcttcgtag

SEQ ID NO: 96380 - DNA, 75 bp, Homo sapiens
ttacttgaaatgaaaggagattccaacctacttcaggttccagcaacagatagaaatgctttaagttcactctgg

SEQ ID NO: 96381 - DNA, 90 bp, Homo sapiens
tctacttctcctcaaataggagataagcttccagttccaaccatcagtgccccgagtcgctgggtgtgggatcaagaggaggagcggaag

SEQ ID NO: 96382 - DNA, 74 bp, Homo sapiens
tgggatagcgttgcaaatccttaaaagagtcttaacgccttcaaatgtttatctggtgtgactgtattatgccc

SEQ ID NO: 96383 - DNA, 75 bp, Homo sapiens
acaagcatctgaagagagttttcctgatagatctcaacagtagtctcaagtattcccatgtgttttaaaagcctg

SEQ ID NO: 96384 - DNA, 100 bp, Homo sapiens
caaagctgatagagaagattcttctcaacatttctgcagactgcctcaacagagtgatagcttggatttacactgggcaacgtggttggaatgtatctgg

SEQ ID NO: 96385 - DNA, 100 bp, Homo sapiens
gcgccgggctcttcgtggctcaggcggggggagcggaccctgacaagttccagctggcaaacgcccttctggaaaaggaagtgataaactatgaggacat

SEQ ID NO: 96386 - DNA, 75 bp, Homo sapiens
cgtgatcctgttagatatcgaaggtaccacaaccccgattgctttcgtgaagcctacttctgcttcctcctggcc

SEQ ID NO: 96387 - DNA, 100 bp, Homo sapiens
gcctgttggaggaactggcccggaaacaggaggacgccgtcctcatcgtcagcgggaacctcagcttcctgaactggctgactatggtgcccagcctggc

SEQ ID NO: 96388 - DNA, 75 bp, Homo sapiens
gaccatcctttctacagcaacatcagtaagtttggatttaggtggcgagtagaaaaagaagtaatttcaggaaaa

SEQ ID NO: 96389 - DNA, 75 bp, Homo sapiens
aagtccagagctgaggactgcctgtttgcaggtgtatgagcaccaagatggcagcaaatcactgaagctgggtga

SEQ ID NO: 96390 - DNA, 75 bp, Homo sapiens
atcagacgtgctccaggaggccagaaggaaatacgaggaagtgaggaaggcagccccaagctgcagcatgaactt

SEQ ID NO: 96391 - DNA, 101 bp, Homo sapiens
gaaggatttcagcaaatttggagcagggtgttactgcggaaatgcaaaacttagtccatcggcggatttatccatttttactgatggtcgtggtattgatg

SEQ ID NO: 96392 - DNA, 100 bp, Homo sapiens
caagagtctcttcattaaccatacagcccacctgaggatattgaccataaggactcatatctcattacaagaagcatcatggccgagccagactacatag

SEQ ID NO: 96393 - DNA, 50 bp, Homo sapiens
agcctctcgaatgggcacacctgtgtagacatccacgacagcgatggcag

SEQ ID NO: 96394 - DNA, 83 bp, Homo sapiens
ggagcagaaggactcggacacagtgtactaatggtcacttgatgtgcgctggctgttttatccacctactagcagatgcccgg

SEQ ID NO: 96395 - DNA, 100 bp, Homo sapiens
tggatgaacaggctcttgcacacaaagaagagacatgatgtatttgcatccttccctgcttcagccagggattgctgtgcctgtgggcgaggcccaccgc

SEQ ID NO: 96396 - DNA, 101 bp, Homo sapiens
ttttggggaccggagagcccaggactccctttgttggagttttgcccacgcgttgtaattaagcctcgcacaatatgttgttgacctcctgtactggagag

SEQ ID NO: 96397 - DNA, 76 bp, Homo sapiens
cgccagcgagccctggctctggatgaagccgtgtcccagtccacacagagaagaaaactacgcctcagccctgagc

SEQ ID NO: 96398 - DNA, 100 bp, Homo sapiens
agaaaagatacttctgcaatcctggacatgaaatgggacatcatacattatgatccaacgaagcaagaccatgccacttacgaaagaaaaagagatgata

SEQ ID NO: 96399 - DNA, 74 bp, Homo sapiens
cagctcctcaagtgcaacaagtcccacttccgaaaccacaagtttgccgatatgcaccagcaaggaatactgaa

SEQ ID NO: 96400 - DNA, 80 bp, Homo sapiens
ccagagactgtactgcttagggggtggcccagttgaaatccttcccttcctctaccttggaagtgcctaccatgcatcca

SEQ ID NO: 96401 - DNA, 75 bp, Homo sapiens
ctgaagagggaagacacgcggaaacagggttctctataaaggtgtcttaaaaaggttgattttgttatatgagcc

SEQ ID NO: 96402 - DNA, 101 bp, Homo sapiens
tttttcagaagtatccattccctattcttatcaattctgcattcctaaagttagctgatgttttcagagttggcctccagggtcgtatagacctccccctc

SEQ ID NO: 96403 - DNA, 100 bp, Homo sapiens
ggctgccgaaaacaagccggaagatgtgttttcgcattataacaaggacctgttgacagagcactgcacagaagcttcattccaaaaagtgatatcgagg

SEQ ID NO: 96404 - DNA, 48 bp, Homo sapiens
cctcaatagcactggctaccggacagaaactggcgatggaatatgaga

SEQ ID NO: 96405 - DNA, 75 bp, Homo sapiens
agaagagacatgttgaccctttcatgggcaaaatcctgacagatgactttgcagacaaggagggtctggaaatgg

SEQ ID NO: 96406 - DNA, 83 bp, Homo sapiens
ccgccatcaaccgccagatcaacctggagctctacgcctcctacgtttacctgtccatgaattcacagatggattcagtggaa

SEQ ID NO: 96407 - DNA, 73 bp, Homo sapiens
gatgccctgcagtacctgcagaaggtctctggagacatcttcagcaggcagtagaagatggtgaaagaaacaa

SEQ ID NO: 96408 - DNA, 83 bp, Homo sapiens
aggaagtcatcatgggccggcctggaacagccatggccatgcagaaaatctttgcccgggaaatcttggactccaggggcaac

SEQ ID NO: 96409 - DNA, 83 bp, Homo sapiens
ctgagaagcccggcgacggaggaacgcaggtctgctgccagttgatattcactgatggactccaaagaatcattaactcctgg

SEQ ID NO: 96410 - DNA, 90 bp, Homo sapiens
cctccctagccacgtggaactgaggtatttaactgaaaggaatatctgcttcactgttgcaaccaaaccagatgccttcttccacttcac

SEQ ID NO: 96411 - DNA, 100 bp, Homo sapiens
tggatacaactcagatcttaagtagtgatatttctcttttgtctgcccctattgtaagtgcagatggaacacaacaggctgagtcatcactagagagtgg

SEQ ID NO: 96412 - DNA, 73 bp, Homo sapiens
actgcgcccccgggagcgggcgcccagaggttcctaaatatttgtcacagcaatgggctaaagcctctggaag

SEQ ID NO: 96413 - DNA, 75 bp, Homo sapiens
cagaagcgtctatgattccttcagataccagggactggccaggccgtgcagcatcgaagacaggaggaactggag

SEQ ID NO: 96414 - DNA, 100 bp, Homo sapiens
gctacttatggaagatacaaagggaaactctgatgaggaagaaagtgcttcagaatctgaactttggaagggtccactaccagagacagatgaaaaatca

SEQ ID NO: 96415 - DNA, 98 bp, Homo sapiens
cgccgcccgactgccatcgcccggcccggccgcgcccgcggaaccagaccagatttcagccttccaagttctgatgtaacaaacaacttaaaacccag

SEQ ID NO: 96416 - DNA, 100 bp, Homo sapiens
ctcggggcaagagcccgcaggctaccttccccgggcaggggcgctcaacccaaccggctccagggcactggtatgcaggtgccttgagagcttcagggga

SEQ ID NO: 96417 - DNA, 99 bp, Homo sapiens
ggacctttcccgctggcgcgcagcctcagctaggtgactagcatgcagatacccatgctctgactttctgcccctccactgacatggcccaccggggtg

SEQ ID NO: 96418 - DNA, 96 bp, Homo sapiens
ccagaatggactgattaaaatagaatggcctaattggaaagaatttcaggatcaccggtttctcctgcttcatctttctgaaaaggatatgagcat

SEQ ID NO: 96419 - DNA, 74 bp, Homo sapiens
taagctcaactctagccagctaggttcctggtgctttggggagatcatgatgcagccgtccttttggatttctt

SEQ ID NO: 96420 - DNA, 98 bp, Homo sapiens
ggaaaggccagagctggagacctagcacccagaagatgagaccgcaattcgagaatcaaagggccgggagcgatgacgatcctgaagatcctcgtctc

SEQ ID NO: 96421 - DNA, 97 bp, Homo sapiens
agctccacgcccgtaccccggcgtcacgctcagtggcgagctttcctgcccggcctgaagttcgaggtcatcagctctgctcacatctccctgtaca

SEQ ID NO: 96422 - DNA, 75 bp, Homo sapiens
cctggatctgcgatctgtttgtgggaaaatactttgaaatccagttcagtccaggtggggaaccagatggtggaa

SEQ ID NO: 96423 - DNA, 90 bp, Homo sapiens
gatttacacagacgtggggcgatgcttgtgaccctgcagctcctcaaaccagggaaagaatagttggctggtaccacacaggccctaaac

SEQ ID NO: 96424 - DNA, 98 bp, Homo sapiens
tggggctcgccttgtatctcaacaccctgagtgcggatttctgctatgatgacagactttgtgtggacagtaatgacctcacgtttccgattgcctgc

SEQ ID NO: 96425 - DNA, 75 bp, Homo sapiens
agcgtctggccaagaatcagaggaagtggatttctcacattggcaaactgagagattttcttctggaacacagga

SEQ ID NO: 96426 - DNA, 100 bp, Homo sapiens
ggaggaaaccatgtccagtttaaggggaactcaggttacacacagagctttcattgttgaggttcctcagtgctgaactaacaagagggtacttccttga

SEQ ID NO: 96427 - DNA, 98 bp, Homo sapiens
ccggagacagcccaaatatcctcggaagagcgctcccaggagaaacaagcctactgaacttgacgcactggtatttggccatctatacaccattctta

SEQ ID NO: 96428 - DNA, 100 bp, Homo sapiens
cttcccatacactctgcagacccaacagtcccgcattagctctagcaatgaggttcactggatacagctggatactgggctttaccgatttgttacaact

SEQ ID NO: 96429 - DNA, 100 bp, Homo sapiens
cagctgcctgcccccggaggtgcccacgcagctgcctggacaagtttttgccaatccagaagactgtgtagcatttggcaaaggagaaaatgccaagaag

SEQ ID NO: 96430 - DNA, 74 bp, Homo sapiens
ggctctttagctgaaatacttctgaagacacagctccgaattgattccttctttagattagcacaacaggagaa

SEQ ID NO: 96431 - DNA, 100 bp, Homo sapiens
caggtgtatgatcttttggaggaggaggatgaatttgatagagagtctgctccatctggacacaagcatctgacggtagaagagttatttggaacctctt

SEQ ID NO: 96432 - DNA, 50 bp, Homo sapiens
ggtagcgcctgctgcccccaccaggatttttacctcctataactccacca

SEQ ID NO: 96433 - DNA, 71 bp, Homo sapiens
ccggtgagggacctgcccagacctggaggaaccaccagctgctgcatcccatggccaggggtggcgtccag

SEQ ID NO: 96434 - DNA, 100 bp, Homo sapiens
aaggtcaactaaaagcattgtttctagaacatgagaatgccgggacattctgcttcctgtcatcaccaaagagctgaaggagctgctggagcagaaggat

SEQ ID NO: 96435 - DNA, 100 bp, Homo sapiens
ggggccgtcccagttcgcaatgagaaagaaagtggatctcttcagcctgggaattatcttctttgagatgtcctatcaccccatggtcacggcttcagaa

SEQ ID NO: 96436 - DNA, 100 bp, Homo sapiens
gaactctatcccaggaatacagctttgcattagatcttgcaggagagagagttactgcctgtgaagaaatttgaaagtgagattctggaagcaatcagcc

SEQ ID NO: 96437 - DNA, 90 bp, Homo sapiens
gacatgagatgattgccaaacccccaggcagcggaggaggagaaagagatggacctcccggactcggcctcgagggtcttctgcggccgc

SEQ ID NO: 96438 - DNA, 75 bp, Homo sapiens
cttggcctatggaaaacggggatttccaccatctgtcccaggtgtttcagtcacctccagtaacacgggcgtgcc

SEQ ID NO: 96439 - DNA, 96 bp, Homo sapiens
cccattgccacctccaaatgaggaagtgccacctcctctcccacctgaggaaccccaggattgccaaggatccaagatttgaacgattaccatgta

SEQ ID NO: 96440 - DNA, 102 bp, Homo sapiens
acctgacaattctgtcgtgtcccgattgggagtatgtatttaaaaacagtgaattttcatcaaagcaagagacatatgaagaatcatccaaagttgtgacag

SEQ ID NO: 96441 - DNA, 97 bp, Homo sapiens
gcgatgtgaatactgctacagaagtagagccaaaggatggtgagattgttggcctttcaggaagagtgcttaagaacttgttggagaaagtggcaca

SEQ ID NO: 96442 - DNA, 83 bp, Homo sapiens
agtccacccagggccaccggagctatttgctgctttaccgatttgttacaactcaagcaagggccagcagaaattctcttttg

SEQ ID NO: 96443 - DNA, 83 bp, Homo sapiens
ccaaaccccagctggaactccggccacagccagcatgcagagagcgcctgctcgctgtgcccccgggttatgacgacccccaa

SEQ ID NO: 96444 - DNA, 75 bp, Homo sapiens
gcttctgaaccatccacacatcataaagctttaccaggaagtgggaaaactcttgcctttgccatcccaatgatt

SEQ ID NO: 96445 - DNA, 98 bp, Homo sapiens
ctacaatagcagattctaatcaaaatatgcagtctcttttaccagcagtagttggcaaaaaaggagaaagccactaaggtacaaaagacactggacaa

SEQ ID NO: 96446 - DNA, 89 bp, Homo sapiens
agggtaaacttcacaacatgatagttgatctggataatgtggtcaaaaaggcttttgaacacttgcagcaattagaattaataaagccc

SEQ ID NO: 96447 - DNA, 82 bp, Homo sapiens
cttacgacgggttggggatggcgtgcagcgcaaccacgagacggccttccaaggtggatcagtacaagggaaagcgggattt

SEQ ID NO: 96448 - DNA, 95 bp, Homo sapiens
ttcatcgggggacaggaatcagcacttcctctgcgggagatcatccgtcggctggagtgagatggaagattttcgaggtatagcagaagaatcat

SEQ ID NO: 96449 - DNA, 82 bp, Homo sapiens
tagcactgcattaagtgatgcatacagcttaccacagtgcggagactcctttctgaaaaggccactcacgtgaacactaggg

SEQ ID NO: 96450 - DNA, 100 bp, Homo sapiens
ctactttgactactggggccagggaaccctggtcaccgtctcctcagacggtgtgaagggagacctgctgattgacatcggctctggccccactatctat

SEQ ID NO: 96451 - DNA, 75 bp, Homo sapiens
gctgaatcagagtttgcattgttaacaaggtgaaaggtgtagcagtcactcggcctacacccacagcatcgacct

SEQ ID NO: 96452 - DNA, 50 bp, Homo sapiens
gttttgtgcagattgccagtctaaaggacacaggttgaacatcacggcgg

SEQ ID NO: 96453 - DNA, 99 bp, Homo sapiens
attgtgactgaggagctgcacctgatcacctttgagaccgaggtgtatcaccaaggcctcaagattgacctagaggccataggaaaaggatacagagta

SEQ ID NO: 96454 - DNA, 75 bp, Homo sapiens
acagccatcatggaacccaaacctcagaagagtccagatatgaagcaacagcatgtcatagaaaccttgattggc

SEQ ID NO: 96455 - DNA, 100 bp, Homo sapiens
gaacaagatcagaaatggcaggatgttcgagaacttgtcttggacaattgcaaatcaaatgatggaaaaattgagggcttaacagctgaatttgtgaact

SEQ ID NO: 96456 - DNA, 75 bp, Homo sapiens
ccgggcgctggtctgctcccagccgtttgatgaaggccggaacaactttgaaggggaggtcaccaaggagaacct

SEQ ID NO: 96457 - DNA, 110 bp, Homo sapiens
agagagacatttctggctctgaaggcgaacgcttcgctggccatttaggagctctgctcaaagccagacgaataagaagatctacttggacattattcacacatacatgg

SEQ ID NO: 96458 - DNA, 83 bp, Homo sapiens
caagccaagaacagcccaatctcctttctgggcaaacgttccaagagaatggaggtgttgtccaagttggagaattgttacct

SEQ ID NO: 96459 - DNA, 100 bp, Homo sapiens
ggagatcaaccacaaccgggccctgctgcgcaatgacctctgtgccctggagttattcctgatgaagctaaagctttgtctctgttggcaccagctaatg

SEQ ID NO: 96460 - DNA, 90 bp, Homo sapiens
ccgtgattgtgaggcctcctcagccacgtggaactggcgccctgcgtccggcagaggaggcgagcatcccgctcaggtgatgaggaaccc

SEQ ID NO: 96461 - DNA, 98 bp, Homo sapiens
ctgtgcctctctcgcccacattttccccaagcactctcaggaacctggcaacagagcaacaagatatggatttggatatagaatttgatgtacacctt

SEQ ID NO: 96462 - DNA, 51 bp, Homo sapiens
attgaagccgcctctgtattacttaccagcgccatcatgaccgggtcctat

SEQ ID NO: 96463 - DNA, 75 bp, Homo sapiens
tgagcttcagcggaattcgaaatgtgtcccagaagcttttgttgacaattccagtttccgaacaaaacatttcgg

SEQ ID NO: 96464 - DNA, 76 bp, Homo sapiens
attctctacatttgtgaaagtcagtttctgaggaatttcatcagactgaacattcttcacgatctgaaaggaaaag

SEQ ID NO: 96465 - DNA, 75 bp, Homo sapiens
tcaccaggataatattctctcattgattaatgtcaatgtatgtgccaagagttgtaacctctgcacaacagaaag

SEQ ID NO: 96466 - DNA, 95 bp, Homo sapiens
acctcaaagcatggctaagagtgttcagtagaaatgggatctagtttgaagcactaagaagaataagacatcagtttgaaaagaggctctatcag

SEQ ID NO: 96467 - DNA, 105 bp, Homo sapiens
tcttcctcttcctcggccggcgggcgtgcatcatccacggggtgctgcagatcctgttccagaggtggggctggtgtccgagcacttctcgcaggccccgcagag

SEQ ID NO: 96468 - DNA, 75 bp, Homo sapiens
cgccagcctgcgaaggtggcggcgctgctgctcgggctgctcttggagaggatgtactgagtaaagatgctgggg

SEQ ID NO: 96469 - DNA, 82 bp, Homo sapiens
agattaaaagagcgaataaagtttatcacgccgggcgctgcaaactcctgcccctccagcccccggggagcggggtcttcag

SEQ ID NO: 96470 - DNA, 90 bp, Homo sapiens
gcccgatggccctgggtcctcgctgtggggcaatccgggcttgcagacgagatgtccggtctgtgctacgacagcaaaatgttccaggtg

SEQ ID NO: 96471 - DNA, 80 bp, Homo sapiens
gtgaacacaacatgctcccttggtctctgcaaccatcgattcctaacagcctagagatgaaattgtgctccaagtgtttt

SEQ ID NO: 96472 - DNA, 75 bp, Homo sapiens
gggcgagagcggccccatgggcaacatcatggtgctggacgtcattgctcctccttatacctctgacttcgtgca

SEQ ID NO: 96473 - DNA, 80 bp, Homo sapiens
gagggaaaagggacgtaggaagaagggcaggacctgggcggaggccgccaagacggtgagaagccctaccactgcaactg

SEQ ID NO: 96474 - DNA, 75 bp, Homo sapiens
gggaagagaagatcatcgagcatttcaaacgggtctaggtgctggagtgcgcacggaggccgatgtagaggagga

SEQ ID NO: 96475 - DNA, 90 bp, Homo sapiens
tccggcctcgtcctcggcgccgccctgcgtggagccgccgccggccacccggacagccctcagcgcctttttccaggagaccaacatccc

SEQ ID NO: 96476 - DNA, 51 bp, Homo sapiens
gagcagcagccccgcggtgctgggcatttccggagagttcttttgaagtca

SEQ ID NO: 96477 - DNA, 101 bp, Homo sapiens
ggccggccggtgccagcacctttcggcttctgagacggcggcagcagcggcattcagtcactgattggctggaggaatgttacacggctgctggtgttttc

SEQ ID NO: 96478 - DNA, 82 bp, Homo sapiens
gagctgggcgcggattcgccgaggcaccgaggcactcagaggagaactggagaaccaggagtctcgggtctctgaaatccac

SEQ ID NO: 96479 - DNA, 100 bp, Homo sapiens
gcccgttgtgtttgtgaaacagagaaagataggcggccatggtccaaccttgaagtattctaccttgtaaatactgttatttgtatatactgtaaatgat

SEQ ID NO: 96480 - DNA, 100 bp, Homo sapiens
catgggcttcccgcccggggccgcgcaggccttggtgctgcagatcaccagaagctggagagagaggctcggatctgccgccttctgaagcattccaaca

SEQ ID NO: 96481 - DNA, 98 bp, Homo sapiens
tcgacggcgggagattgaggacaagctgaagcagtgatccccccaggggtgcccgatgcccaccccagggaaggagacctgccagtgttccaggacca

SEQ ID NO: 96482 - DNA, 100 bp, Homo sapiens
ggaggcttgggcttgcgccgttgaaggtaccccctgtaccggctgggtggcccacaacttcgggtgttccgaaccaacttcttcattcagctggtgcggc

SEQ ID NO: 96483 - DNA, 74 bp, Homo sapiens
gcagcctcactgacatcagccaggcacgtctgagaatggtggatgtggtggagaaagaagatgtgaatgaagcc

SEQ ID NO: 96484 - DNA, 100 bp, Homo sapiens
gccatattttccgtcgggggtatgatcggctccttttccgtcggactcttcgtcaaccgctttggcagagtgacctccattgcagacaggctgaatgtgg

SEQ ID NO: 96485 - DNA, 100 bp, Homo sapiens
ccgctctcgcttcgtcctacacttgcgcaaatgtctccgaaaataaacagagttgtctttgttggaaactttttacgtgtcaataccctctcaatgaaac

SEQ ID NO: 96486 - DNA, 100 bp, Homo sapiens
atcaagttctcgtggagtcagacaatgagcagcagcagttgcaagctcagcatctttctcatggccacggacccccagttccccttacgcctcacccttc

SEQ ID NO: 96487 - DNA, 97 bp, Homo sapiens
acagagttagagagagggatggtgacgatgttaatatttcaagttttcgaggccatattattgcggacagcaagtgatctttcacatttccatgttg

SEQ ID NO: 96488 - DNA, 76 bp, Homo sapiens
tggggccacttgtggtcgccgggaggaaagtgtgctgtgttgtcattcaaggacttcctctcctgcaggccaactg

SEQ ID NO: 96489 - DNA, 100 bp, Homo sapiens
agaaagcaggatggactatcattactcctccaacaccaatcatcccagacgatgcggaaaacgccatgcggtacataaatgggacgcgtctggatgaccg

SEQ ID NO: 96490 - DNA, 75 bp, Homo sapiens
aagagctcgcctctgattgagaagcttcaggcccagctagaaaaaaagcgggatgacttttgtaaacagaatcag

SEQ ID NO: 96491 - DNA, 51 bp, Homo sapiens
atccagagaacatgctggctacaactaatatctccagtgccatggagcagc

SEQ ID NO: 96492 - DNA, 96 bp, Homo sapiens
ctggcgaggatgcaccttcccctgccttggaaagtgtgatgccattagtgtattggagaaagaacatgactacagagatgaacattttgattttat

SEQ ID NO: 96493 - DNA, 76 bp, Homo sapiens
cagagttcaaggaggccttccagctgtttgaccgaacaggcgcctgtgtctggcagagctggtgtgagacgagaca

SEQ ID NO: 96494 - DNA, 100 bp, Homo sapiens
gtcagaacaggcgctgcggctgatcatctccatcttcctgggagtggaagctggacacactatgtgacttgtatgaaaccctgaccatcacccaggcagt

SEQ ID NO: 96495 - DNA, 74 bp, Homo sapiens
gagtcttgtccacagctggcaaattcagtgcagatcagtgagttctctggtgatgttgatagcctggaactggg

SEQ ID NO: 96496 - DNA, 98 bp, Homo sapiens
aaaaccatgtccaaaccaggaaatggacaggatgatgatgctgaagctatccttgctgcagacttcgaaattggtcactttttacgtgagcgtataat

SEQ ID NO: 96497 - DNA, 75 bp, Homo sapiens
ccaaagaccttgaaatgtttgcaagatggaattttgctcgtatcgcccaagctggagtgcgtggcgcgatctcag

SEQ ID NO: 96498 - DNA, 83 bp, Homo sapiens
gtgtgcgcttctgcagcttccgcagggccagtgagcaggtgtggcatgtgctggttatgatggagggtggtcgcagcaaaggg

SEQ ID NO: 96499 - DNA, 97 bp, Homo sapiens
cccagctccatcaacctcacgctgcacctggatgagtataggatcaaaccagtggaagaggtcaaatacatgaaaaatggggcagaagaagagcaga

SEQ ID NO: 96500 - DNA, 96 bp, Homo sapiens
caaacccccacagaacataccagaaggtatgaacatgctaatgatgataagagcagtttgaaatcagatcccgaaggggaaaacatccatgctgga

SEQ ID NO: 96501 - DNA, 100 bp, Homo sapiens
ggcttctcccctacgcgctacacaagtggagctccttttcctccacctaccttcccgatcagagcaccataacatggtgtgggaagtgaagacaaatcag

SEQ ID NO: 96502 - DNA, 100 bp, Homo sapiens
attgaactgggcacagcatgcggaaaatactacagagtgtgcacactggctatcattgatccaggtcgtcaaagtcctacattttagctttcagtgctga

SEQ ID NO: 96503 - DNA, 98 bp, Homo sapiens
aggagtcatgagcgacagcggcgagcagaactacggcgagcggctgaagacttacagtgagaaactggacaaagagcaagcagccctcgagaagatag

SEQ ID NO: 96504 - DNA, 75 bp, Homo sapiens
gaagttggaaaataaattgccatctgaatcctaatgtacctggctagctggtggtgagtaggggctttggggcca

SEQ ID NO: 96505 - DNA, 100 bp, Homo sapiens
caagaacagctaaaatgaaagccatcattcatcttactcttcttgctctcctttctgtaaacacaggagataatcttggccaacagtacaatagcccaca

SEQ ID NO: 96506 - DNA, 100 bp, Homo sapiens
agaggaagtaacctcaagaatagaattccttttggggaagaaagagtgatgatggccaaagagaagccaccgataactgtagttggagatgttggaggcc

SEQ ID NO: 96507 - DNA, 100 bp, Homo sapiens
cccgggtcatctccagatgctagggttatgggcagcctggcatcctcgctacaacctcattgttgtgggccgatacccagatcctaatttcaaaagttgt

SEQ ID NO: 96508 - DNA, 75 bp, Homo sapiens
cccgcaagcccagacaatgccggtggaggaatttgtggctggctggatctctgaagtacaggcatgtggacaata

SEQ ID NO: 96509 - DNA, 100 bp, Homo sapiens
gaaagagtggaagagaaaattgtgaactaaggccccctgcccccttttcctggtgcatgtgaagttatcaaaaacaggtttcccaggcagctgcagactt

SEQ ID NO: 96510 - DNA, 87 bp, Homo sapiens
taaagttaggcggcactccagccccagctcgcaacaggataagacctcgtctaacctacatgaagctgcttcggactgtgtatgctc

SEQ ID NO: 96511 - DNA, 50 bp, Homo sapiens
caacattcgcaccgtcatggtcacagatatgagggaaggcaccattggag

SEQ ID NO: 96512 - DNA, 100 bp, Homo sapiens
ctgctcatctcacctatgggaagctgctagctctaacatacaaatggtgatgatcatcaggtcaaggatagtctggagcaattgagatgtcactttacat

SEQ ID NO: 96513 - DNA, 82 bp, Homo sapiens
ctgcagtcgcccgggcgacggcggggtccgcgcggccaggctcctggcgacctccctgctgcagggggccctcccagcgggg

SEQ ID NO: 96514 - DNA, 100 bp, Homo sapiens
gtttggagcccagaatgaagagatgttacccagtatcttggtgttgctgaagagcagcctgtggtagctgttcctcttgttatgccagtttgtagaagga

SEQ ID NO: 96515 - DNA, 75 bp, Homo sapiens
gcgccacattctcaacaccacggaattccatgatccctgctgccttggtgatcccgggctgacagccagagagca

SEQ ID NO: 96516 - DNA, 88 bp, Homo sapiens
tttggcccagagctggacaccctcctggactcgctggacactttgccaccatcaccttgaccttcatcgacaagaacggagagactga

SEQ ID NO: 96517 - DNA, 96 bp, Homo sapiens
agtatttggatttgaagaaaagactatggacaaaatattggaatcaagcatattcctgcaacccagtgtggcatttgggttcgaaccagcaatgga

SEQ ID NO: 96518 - DNA, 74 bp, Homo sapiens
ttcctcttccctaacgccctttccaccagtgcggactgcaggtttttggattcaaagcataaaaaccattacaa

SEQ ID NO: 96519 - DNA, 115 bp, Homo sapiens
attgacgccatgtcgggttattcgagtgaccgagaccgcggccgggaccgagggtgatgtgtccaatctagatcccaacttctcatttgaaggcaccaaactggatgtggggaac

SEQ ID NO: 96520 - DNA, 100 bp, Homo sapiens
cgggttcaggaccgcggatcggaaggcagcgctcgccatcgaatgacttccaggtgctccggggcacagagctacagcacctgctacatgcggtggtgcc

SEQ ID NO: 96521 - DNA, 100 bp, Homo sapiens
cgtcttcgagctgccctttgtcccggcggccgtgcggaagaactggaccatcacccgcctgaacgcattcacagctctgatggagggcaaaatcaataag

SEQ ID NO: 96522 - DNA, 50 bp, Homo sapiens
acaacccatgtgactctgccagtttagtaacaggagtatgggaaggcaaa

SEQ ID NO: 96523 - DNA, 74 bp, Homo sapiens
ggcaagttctgtagagaaactcgggcaacctttggacatacagcagctcctccagctccagcagctggtgcttg

SEQ ID NO: 96524 - DNA, 82 bp, Homo sapiens
tttggagaatgatatcaaaccatgcgaaaatccaaagcagctgatgagaagagacgctccttggctaaacaagcacgagaag

SEQ ID NO: 96525 - DNA, 82 bp, Homo sapiens
cgcattcggccccggacgaaggtactcgcagcacttggagcgcagaaccggccgcgcccgtctgtagatggacggcagatcc

SEQ ID NO: 96526 - DNA, 89 bp, Homo sapiens
gctggcagatattatcatagttgctgcagcttagcagtgtctgcaaaaacgaatcttttcctacaacctgttaactgactggactgttg

SEQ ID NO: 96527 - DNA, 101 bp, Homo sapiens
ccgtttgttggtggaggaggtggcaggcctcggcgaccaatctccagttcaacaacaacaagtactatctgattcagctattagaagatgatgcccagagg

SEQ ID NO: 96528 - DNA, 83 bp, Homo sapiens
atgagcgatgctgggagataattgataatattaagggtactgaatatacactatcagcattaggtggtctcttcagtcagcct

SEQ ID NO: 96529 - DNA, 100 bp, Homo sapiens
ggacgtgccgcccctttgcggtacctttgtgttggatgaatttaagcgcaagtactccaatgaggacacactctctgtggcactgccatatttctgggag

SEQ ID NO: 96530 - DNA, 99 bp, Homo sapiens
ggtgtttcaaagggtggtgaagaactaaggtggtggctaatgccgtagcggcattatctgaaatcagtgagtctcacccaaacagcaacttacttgatc

SEQ ID NO: 96531 - DNA, 75 bp, Homo sapiens
cttcgggccattgggaagggcagctttggcaaggcactaggaagcttttattttcttcatgagtccttaaaaaac

SEQ ID NO: 96532 - DNA, 50 bp, Homo sapiens
tctgtcccaagcaggagaacattgcagacttaattcagtgcacaaatgag

SEQ ID NO: 96533 - DNA, 96 bp, Homo sapiens
aaaacaacatcatgcagtggaatgcagttatatttgggatgcccaccccctcctcctgtcctggatggtgaggacgtgcttcctgacctggacctc

SEQ ID NO: 96534 - DNA, 75 bp, Homo sapiens
actgtgcccattacttctgcctggactgcattgtcgaatggtccaaggtacatccagacactgaaggaccacagg

SEQ ID NO: 96535 - DNA, 74 bp, Homo sapiens
ccagttgggtatcctcctcagtatccaccgacagcattccaagattcatgcccaagcacaaaacaacccattta

SEQ ID NO: 96536 - DNA, 101 bp, Homo sapiens
tccatcaaaaagtgattaagcagagaatggagaagaaggttgattccagctggcaaacttccccagactctgcgaggaaacggaaaggattgttgctaacc

SEQ ID NO: 96537 - DNA, 100 bp, Homo sapiens
gctggcggccttgtgccgctgggggctcctcctcgccctcttgccccccggagccgcgagcacccaaggattaaagcaaggagagccaatcatgactggc

SEQ ID NO: 96538 - DNA, 100 bp, Homo sapiens
gataacgcgcttttgctcctcctgaagtgtctttggtccaacgttgttccagttggttgaatctggcgatgtggaacccatggatatggagggctgacta

SEQ ID NO: 96539 - DNA, 98 bp, Homo sapiens
agagcgtgaccgagagcgcgaatatcgtcatcgttagaagcatgattatgatatgagggtggatgatttccttcgtcgcacacaagctgttgtcagtg

SEQ ID NO: 96540 - DNA, 75 bp, Homo sapiens
acttcgtgcagggcatgggatacagtgaaagaccttttatgtgtgaaacatgtggcaagagttttgcttctaagg

SEQ ID NO: 96541 - DNA, 75 bp, Homo sapiens
gcgggaatcccactgttgaggttgatctcttcacctcaaaaggtcctactgctctgttggctcatgaaataggtt

SEQ ID NO: 96542 - DNA, 100 bp, Homo sapiens
gagagcgccaaaccattactgatgatgtggaggttaacagctatctttctgtgctgctgctaacatctgcagaagatttggactgcactcctggatttca

SEQ ID NO: 96543 - DNA, 83 bp, Homo sapiens
gatgccacaaccataatagaatgtctacattcctaaccatatttatttagagtcagaatggagcgatttgtagtaacagcacc

SEQ ID NO: 96544 - DNA, 101 bp, Homo sapiens
cgcgcgggctgcggggccgaaccccggttgtcgccgtgatcctgaaggcgctgacctacgacgagaagcggggtgcctgcagcgtgggcaccaacgtcagg

SEQ ID NO: 96545 - DNA, 83 bp, Homo sapiens
gttctgccgcttatcttcaggagcgaagagctgcttctgtatcttaagacaatgcagatcttcgtgaagactctgactggtaa

SEQ ID NO: 96546 - DNA, 82 bp, Homo sapiens
gaaatgctacgaccaacttttcgttcagtgggacttgcttcacgagtttattaaccacttaacctctcagaactgaacaaag

SEQ ID NO: 96547 - DNA, 100 bp, Homo sapiens
cgtaaggccaagaccatccccgtgcaggcctttgaggcccggggctcaagcccagtgtcactagacctcatcattcccttcctgaggccagggtgctgtg

SEQ ID NO: 96548 - DNA, 83 bp, Homo sapiens
aaaacaaaagctgctacttatggaagatacaaagggtgattctcatctaaatgttcaagttagcaactttaaatctggaaaag

SEQ ID NO: 96549 - DNA, 100 bp, Homo sapiens
cttggcaggagtagctgatcaaaccaaggatggttccgccatggagtcatagttgcagctgactccagggctacagcgggtgcttacattgcctcccaga

SEQ ID NO: 96550 - DNA, 50 bp, Homo sapiens
cccaggtggagtacacggcagactttaaagtccttgggctatctatgtgg

SEQ ID NO: 96551 - DNA, 100 bp, Homo sapiens
tggagcagaaggtgcaggaggtgctgaaggccagatgtggacgagtgctcactagcagaaaaaacctgtgtgaggaaaaacgaaaactgctacaatactc

SEQ ID NO: 96552 - DNA, 100 bp, Homo sapiens
aggaacctctatgccgacatcgacgccgcctggcaggccctgcgcaccagacatcacagtcatctgcccttgggaggccttcaaccacctggagctgcac

SEQ ID NO: 96553 - DNA, 100 bp, Homo sapiens
gcggtggcgtggggactccctgaaagcagagcggcagggcgcccggaagtcatggagtcatcagaacccactgtgaggaagtgacttctccttgaggtca

SEQ ID NO: 96554 - DNA, 74 bp, Homo sapiens
atgctttgacagcaagtggactccgagtccagggcagagcctcagttaggagcagcaagatgggcatggaggcg

SEQ ID NO: 96555 - DNA, 97 bp, Homo sapiens
ctgtgtgctaaatcttcagtgggacaatgggttcagacaaaaggaattacatgaatgacagtcttcgaaccaatgtgtttgttcgatttcaaccaga

SEQ ID NO: 96556 - DNA, 122 bp, Homo sapiens
gaaggaggacttgcagaagtaccacaacagggacacctggttccagctgcagcacgtggacgctgactcggaagtgcagagttgcatgctgagaatttgaaaaatgaagatgatgtagacac

SEQ ID NO: 96557 - DNA, 51 bp, Homo sapiens
ggttgcaggtgaacatggccttgaggttattcaaggacacggaaaagccaa

SEQ ID NO: 96558 - DNA, 50 bp, Homo sapiens
cgcgctgccgaggagaacccagcggcttataggctttatactgtggtgcc

SEQ ID NO: 96559 - DNA, 75 bp, Homo sapiens
cgcggagcccggctcccgcaccatggaggaggacgacagctacggactcgggcagccgcaagtagctcctccagc

SEQ ID NO: 96560 - DNA, 100 bp, Homo sapiens
gtgcgagtggggcggacgcgcgcagcccgcccgcccggcgaccagcaaggtctccggataactgtgctcctgacatccttccttatggttttgggaactg

SEQ ID NO: 96561 - DNA, 101 bp, Homo sapiens
agagacgacggaggcggaagcaacccgatcccggaggcggcggcggcggggggagccggagccgcctgggatgttcagcccaacagcgccctggaatcctg

SEQ ID NO: 96562 - DNA, 90 bp, Homo sapiens
tgagatacgccgctctgaatcttgccgccctgcactgccgcttcggtcactatttttggctttcacccccaaccagtgaccaaagacttg

SEQ ID NO: 96563 - DNA, 75 bp, Homo sapiens
tgagcggggaagagagaggcctctggtccacggactcagccgaggaggaatatattaaaggaatctgtgaacctg

SEQ ID NO: 96564 - DNA, 96 bp, Homo sapiens
cagctccacgctaaggagggtgctggagtgagtcccccacttatcactcaggacagtcattttgtttactcattcagccctgttgcaggtcccaat

SEQ ID NO: 96565 - DNA, 100 bp, Homo sapiens
aaaaacttcagcatgtgccaggaacacaacctcaccttgatcaggtgggctctgttgtgtctgttggctggctccggtccaagaaggctgttgactggcg

SEQ ID NO: 96566 - DNA, 75 bp, Homo sapiens
ggattcccagccatggcagattcctccgggcagcagggaggtgctcctgtaccctggccacagcccaatcctgcc

SEQ ID NO: 96567 - DNA, 83 bp, Homo sapiens
caggcgggcagctgtgcccgggcggcacggccaggagaaggaccgtccccacgaggggacccggcccgtgcgtgcagtgttcg

SEQ ID NO: 96568 - DNA, 100 bp, Homo sapiens
taactacaatcacctaatgcccacaagcattagtgccagcagtagttcccaagggctgtctcagccatccacccagacgactcagtatctgagagcagac

SEQ ID NO: 96569 - DNA, 114 bp, Homo sapiens
ctggtgtgatggcgtgtcacactgccccggcggggaggacgagaatcggtgtggagtttgtcttgggatgcaactagcagtgatagagtttgcaagaaactgccttaacttgaa

SEQ ID NO: 96570 - DNA, 101 bp, Homo sapiens
gaatttctctgatagagtcttcaaagctgtttctgacatctgtaagacttttagtggattttcggaaaagacatatgaatggagctcagaagaggaggagc

SEQ ID NO: 96571 - DNA, 97 bp, Homo sapiens
ggtccgcggtccaggctgctgccgcgacggggccggcggcggggcagctgccaggaacgagggtagcagcctggagcattggtaagcgtcacactgc

SEQ ID NO: 96572 - DNA, 97 bp, Homo sapiens
tcaatgctgttgagtatatcaataccctgttcccaaccgagcaagtgcttttcagtgggaagaattggaagaagatatcaggaagaagttgaaagat

SEQ ID NO: 96573 - DNA, 100 bp, Homo sapiens
atcaaagacaatatcaatgacaaactgacggaaaaggagagagagacttccttcgctgggcatctggctgggattcttgttggactaatgtacactcaag

SEQ ID NO: 96574 - DNA, 50 bp, Homo sapiens
ggagactgcatcaggctctcgctcttgggaccagaactgagtacaaggag

SEQ ID NO: 96575 - DNA, 83 bp, Homo sapiens
cccgcgcagccccgcacggcccgggcccacgtaatgtaatccagggaagtggaaaagaagaaatctgcaaagataaatcccag

SEQ ID NO: 96576 - DNA, 80 bp, Homo sapiens
gaaggtctctggagacatcttcagcagagtctgtagaagaggcgacaccagggcttccaaatgaacaaccgaaaggaaga

SEQ ID NO: 96577 - DNA, 90 bp, Homo sapiens
gcgctgcgcggcgcggcggccgggccctcgagacggggacggtaccaaccaagaagctgaagaaatatgagaaagaatatcagacaatgc

SEQ ID NO: 96578 - DNA, 88 bp, Homo sapiens
tgaggagaagaacaccgtggagctgctaacagatcgggtgaatcgtggccgggaccagatggaatacttcggcactatctccattggc

SEQ ID NO: 96579 - DNA, 75 bp, Homo sapiens
gccaggctgatggagagctgaacattactcttccagaagaggagttgtaagacgttcatcgccgtgttatccttg

SEQ ID NO: 96580 - DNA, 100 bp, Homo sapiens
tttgaaagggaaagtgatgtccctctgaaaactgaggaatttgaagtgaccaaaacagcagacgcatcttctctccagactgccgatcccagaaagccag

SEQ ID NO: 96581 - DNA, 90 bp, Homo sapiens
cggtaccaggcagacatcaccgacttgttaaaagaagattttggctatggaaaggggaaatgttctaagcagagcccgtcaggagcccac

SEQ ID NO: 96582 - DNA, 82 bp, Homo sapiens
tccaggagcagttgctggtgctgctgaagtccctagggaaccaccaattcttcccaggcctgatcaaccccgtataaccaaa

SEQ ID NO: 96583 - DNA, 97 bp, Homo sapiens
gggaaggtggtgatggccaaggtggatattgatgaccacacagacctcgccattgagtatgagactgctggagttaataccaccgacaaagagatgg

SEQ ID NO: 96584 - DNA, 75 bp, Homo sapiens
aagctgcggcctgtatcaccagaggagattagacgtagcagattagatgatcacagtcgtgttaaactgcaaaat

SEQ ID NO: 96585 - DNA, 100 bp, Homo sapiens
cgccgctgccttcaggtttccgaggggtcctgtcccaggtgcagctacagcagtggggcgcaggactgttgaagccttcggagaccctgtccctcacctg

SEQ ID NO: 96586 - DNA, 74 bp, Homo sapiens
gctttgtgttcaagcggaaaaccaattggtttaaaagaagagccagctatttgatcggctgaaacttcaagatt

SEQ ID NO: 96587 - DNA, 83 bp, Homo sapiens
cacacaacgcttgttatgttttcatcacttctctccagaagaattaaacaaccaccatgtcgagcaaaaaggcaaagaccaag

SEQ ID NO: 96588 - DNA, 99 bp, Homo sapiens
attatcgcctgggcagactcaccttctgccagctgaaggaagagagaatggattctgcaagaccatgtctacacagacaacaccatcttctgaatgaca

SEQ ID NO: 96589 - DNA, 98 bp, Homo sapiens
gaggggctaacttcagcggtggcaccgggatcggttgccttgagcctgacaagttggatggcttgaggactggtactaaaaggaaacgtgactgggag

SEQ ID NO: 96590 - DNA, 90 bp, Homo sapiens
cagaaatccgaccggaccgggctcgggggagcgtgagttgcagatgatcagtagaattgaatatgtgcatacaaagaattttatacacag

SEQ ID NO: 96591 - DNA, 85 bp, Homo sapiens
agcagagctctccgggttccccggctcgcggggcccggcgaagggcagaggctgggaggcggcagaatgcagccagaggagggca

SEQ ID NO: 96592 - DNA, 50 bp, Homo sapiens
tcagaaaatgtgtccagagattacaagtgcggaaacaggaaattataaaa

SEQ ID NO: 96593 - DNA, 100 bp, Homo sapiens
gatggctttggtcacggtccagcggtcacctacccccagcaccacctccagcccctgcgcctcgatcagaccaaacattgtctggcttgcactgtaaaac

SEQ ID NO: 96594 - DNA, 100 bp, Homo sapiens
ctttgaccatcagtctgtgacctgccccttctctttacatctgcgatttccttctggttggctgtcctgcgtgggtgccaagttccacacatgatttaat

SEQ ID NO: 96595 - DNA, 98 bp, Homo sapiens
gcacgtggatgagtacgaccccgaggacacgtggcaggatgaagagtacttcggcagctatggaactctggaaatcaaagagcaggaggttgtggaca

SEQ ID NO: 96596 - DNA, 101 bp, Homo sapiens
ggttttcggccggacgccgggagggagctccaggctgtgagataagatttgtgaccaaatcagtgatgctgtccttgatgcccaccttcagcaggatcctg

SEQ ID NO: 96597 - DNA, 101 bp, Homo sapiens
agccactttgcattgactggaaacaatggcatttacagaaagagtcaacagcagtggcaacaggtttttcgttggaatatacgttgcacatttatggcgat

SEQ ID NO: 96598 - DNA, 90 bp, Homo sapiens
ggtgtcctgttacttccaagtcatcaccagaaaggtctcaacatatgcactagtggaagtgccacctcatgtgaagaatgtctgctaatc

SEQ ID NO: 96599 - DNA, 82 bp, Homo sapiens
ccaactcagcccgggctgcttctgtcctcctctggggaagtgcccaccgcgtgccccgattggagaggggaccttctgcagg

SEQ ID NO: 96600 - DNA, 75 bp, Homo sapiens
agccccctgtggctgaggctacaccccggagccaggaggagatcctgcagatcattcagctggacctagacctga

SEQ ID NO: 96601 - DNA, 99 bp, Homo sapiens
cttatggcatattcagatcagtagaagcagatttcttttggatagtgatgggaaaagggcctgccttaagtgtgaaagtaatgactgatgaaagtggaa

SEQ ID NO: 96602 - DNA, 100 bp, Homo sapiens
ggggccgcgctacaccaacctctcgtacatcggcgagggcgcctacggcatggtgtggtggaagttgatgggtcgaaactaaatgtgaccagcacgtgga

SEQ ID NO: 96603 - DNA, 83 bp, Homo sapiens
agtatcgcttccctgaagaactcactcagaccttcatgagctgcaatctcatcactggatgactgtcttaggtcattgacgag

SEQ ID NO: 96604 - DNA, 50 bp, Homo sapiens
gccggagcccaccaagttctgggaagttcgatacaagaggctgttttcct

SEQ ID NO: 96605 - DNA, 100 bp, Homo sapiens
tctatgtgctcgtgacttcctatgatcctcttgtcatctatctctatgaagaaggattggctagtgaaaccagcagtgtgtgtagcagcagtgacactgg

SEQ ID NO: 96606 - DNA, 75 bp, Homo sapiens
cacagtgacacacaaacaacttacagacttccacaagcaagtcactaggaaacttcgagccacgttagatgaata

SEQ ID NO: 96607 - DNA, 50 bp, Homo sapiens
gtggaagttggggagctttgaggggtggccgtgactggggagagcacaac

SEQ ID NO: 96608 - DNA, 100 bp, Homo sapiens
ggcgggcgcggcttcggcgggcggcagccgctgcagacgagctgcgggtcttgggcgtctttggtactggcttttttaggggtctgcctggggattaccc

SEQ ID NO: 96609 - DNA, 100 bp, Homo sapiens
gggagtaggagactcagaatcgaatctcttctccctccccttcttgggtcacagaatgatcatactcaagatcttcctggggagtcaatggcaaatttca

SEQ ID NO: 96610 - DNA, 96 bp, Homo sapiens
gaccgagagcgtgaccgagagcgcgaatatcgtcatcgttagaagggtgaagttgaacaaattgctatgatgaaaccaaaaggccagactgaacac

SEQ ID NO: 96611 - DNA, 100 bp, Homo sapiens
gggagatgctcacagcccaccgctgatgaccttccagagttcgtctgcctgagccgtgggtactgccacctgctcacccactctccctagccccagagcg

SEQ ID NO: 96612 - DNA, 75 bp, Homo sapiens
gcctgatggtattgaatggagaaataaatacatctgtgtagaagtatctggcaccaattctgacccagtcatttg

SEQ ID NO: 96613 - DNA, 98 bp, Homo sapiens
ggtgatccaaattctcatatgggtcatgtaggtacaacagcaaccaagaagatcgatgtctacctccctctgcactcgagccaggacagactgctgcc

SEQ ID NO: 96614 - DNA, 83 bp, Homo sapiens
atctgatcaagccaacaacagtgacggaatgcctccatacataatgtatgacaacatgtccacaatggtgtacataaaggaag

SEQ ID NO: 96615 - DNA, 95 bp, Homo sapiens
aggagtgtctcaacaacattggcgatgcctcctcgctcatccgagccaccattgctgtccctttccccccaacacatcgcttgacatctgaagaa

SEQ ID NO: 96616 - DNA, 89 bp, Homo sapiens
ccgagagattttactaccaagccctgtcagtagctcctcagattgaaaaagcttgtggtgaaggggggcaaaaaaaagaagcaagttct

SEQ ID NO: 96617 - DNA, 75 bp, Homo sapiens
aaggggtctgcgggcgcaggagctggggtccgcggtctggggccggctgccccaggccctgtgcagacacaccag

SEQ ID NO: 96618 - DNA, 89 bp, Homo sapiens
ccttctttaccagatgctttgtggtattaaacatctgcattcagctggtataattcatagaccttccttgcaggtcaacaagatagaag

SEQ ID NO: 96619 - DNA, 98 bp, Homo sapiens
ctcattatccgctatgatgtggaccgggccatctccgggggctccattcagctccaacagacagaagcagagctcaggaaggtggatgaggccatcgc

SEQ ID NO: 96620 - DNA, 90 bp, Homo sapiens
cgccggatgagttgcttttaggcttgctggcccgcggggctgtccaggcacgcgaggcccctcagactgcttttcaggaagccttggacg

SEQ ID NO: 96621 - DNA, 100 bp, Homo sapiens
tggcccctgccatggacatgcctgaggtcctcaagtccctgctggagcactctctgccttggccagagaagagaacagcggtggtgtctgtggatgggcg

SEQ ID NO: 96622 - DNA, 100 bp, Homo sapiens
gctcctggcgcggcaagtggttcttcctcagctctctcctgcagttgtgttggtgttgaagaggagaaggctgctgacattgacctctaccactgcccca

SEQ ID NO: 96623 - DNA, 100 bp, Homo sapiens
taagaaagctttggctttggatgagacttttaaagatgcagaggatgctttgcagaaacttcataaatatatgcaggcttctttgctaaagaatgatgag

SEQ ID NO: 96624 - DNA, 100 bp, Homo sapiens
agaaactttaactacagttttagctccctgattgcctgtgtggcaaacagtgatatcttcagcgaaagtgaaaccaggtcttcagccaatgacttgcttg

SEQ ID NO: 96625 - DNA, 75 bp, Homo sapiens
gtggctgtagctgccctttccgtttccagggttccgaccagggttttgacccaccacatcagagtgacacaagaa

SEQ ID NO: 96626 - DNA, 100 bp, Homo sapiens
cctgttcacggtgaccttcgcttggtgtcctcctggcctcagcaacctgacaattctgtcgtgtcccgcaacagcggcgggagcgggagcagcggaagct

SEQ ID NO: 96627 - DNA, 75 bp, Homo sapiens
gttagaactcgcgtttccacttcagagatctgattagcctgaggcctgctcagtcgttcctaatgaataaaaatc

SEQ ID NO: 96628 - DNA, 83 bp, Homo sapiens
atccaagtctctacagttaactggcaaagaagaatcctcactatggatgggctcattgaggacattaagcatcggcggtatta

SEQ ID NO: 96629 - DNA, 95 bp, Homo sapiens
gaaggtagaagttccttgaaagaaatagaaccaaatctgtttgctgatgaagattcacctgtgcatggaacttagtgatttggcccgtgaccctc

SEQ ID NO: 96630 - DNA, 96 bp, Homo sapiens
attgataaagtcacatatcaagaccaaccatcctgacttttcccaggtccctcgtatcaaaacattaagagtataatggaagatagcacgatcttg

SEQ ID NO: 96631 - DNA, 98 bp, Homo sapiens
aacccggaaatatttctccaacctcgttgcgagaaagaatcaaagctggcaaaggtgtgacttcagctattgacctgtgtcgttaccatggaaacaag

SEQ ID NO: 96632 - DNA, 98 bp, Homo sapiens
tttaaatccggagggggaaaaaatcccaaggtctgcaaaggtgacctctggatataaagcgaagacgattgttactgcactgccagggtctttcctgg

SEQ ID NO: 96633 - DNA, 100 bp, Homo sapiens
gatgtgccttagaggattatggaattccaggttaccgagttggttgttattactgccttttccaaaatgaaaaactgcttcctgaaacagtaacgataga

SEQ ID NO: 96634 - DNA, 97 bp, Homo sapiens
gttcttgctttttactccttgttcatttgtctgttggtacagaccactttatggagctttcagggccagctctcaatgttgcaagaaaaaatagacc

SEQ ID NO: 96635 - DNA, 100 bp, Homo sapiens
agaagatgaagataaatcagaatcatttatgcaaaaatatgagcaaaaaatcagacattttgttggataacagggcaagattcagaggaagaaaaggata

SEQ ID NO: 96636 - DNA, 95 bp, Homo sapiens
ccactccgtcccccgcgggtctgctctgtgtgccatggacggatgaaggatttgggggcagagcacttggcaggtcatgaaggggtccaacttct

SEQ ID NO: 96637 - DNA, 99 bp, Homo sapiens
gaagaagcagcgcaagtttgaccaggtgactttggcaggctatggcttcgccttccgctattgcccaagtggcaaacacgtggcctacgtggaaggcag

SEQ ID NO: 96638 - DNA, 75 bp, Homo sapiens
acaagaacatgtctgtacacctgtccccctgcttcaggtttgttgataagccggggcccttcgtgggaccctgcg

SEQ ID NO: 96639 - DNA, 50 bp, Homo sapiens
ccaggagtcatcggacgccagaatctgacccagccgatgcccaatcctgt

SEQ ID NO: 96640 - DNA, 90 bp, Homo sapiens
atcgagcccagcgtcaacttcctcaagtcgcccaaagggagtcgtcgcatggtggatgtcatggacgtgaacacacagaaaggcattgaa

SEQ ID NO: 96641 - DNA, 75 bp, Homo sapiens
atcatcgaaaagatgctgaacagtctgcgctcctcagaccaccggcaggtgaacagcctgatgcagaccgaggag

SEQ ID NO: 96642 - DNA, 98 bp, Homo sapiens
agcaagttcattggatcaaacatgtcacaagagtcggacaatacctggagtagaacagaaaaattattatgtctgtgttcccttgggactcattggaa

SEQ ID NO: 96643 - DNA, 99 bp, Homo sapiens
gctgggatcggttcctccaggagaagttagcttcagagttctttgtggatggacttgattctgatgagaggagagcgacttgcagttgtggaggtacag

SEQ ID NO: 96644 - DNA, 82 bp, Homo sapiens
taattttagggtcctttatatagaagggagagtagattctgagaacaataactccacaatggcgtcggcctcggagggtgaa

SEQ ID NO: 96645 - DNA, 50 bp, Homo sapiens
acccactcgagaattggctcagcagctcatgggcctcctgagtgacccag

SEQ ID NO: 96646 - DNA, 82 bp, Homo sapiens
ttccctcaacctgacccagtatgtagaagccagtctctgcaggcggccagcggccctgaccctctattctgcaccctgtgag

SEQ ID NO: 96647 - DNA, 83 bp, Homo sapiens
aggagagcctccgctgggctttcaagttgggcaagaatatcacggcatgggcatgagtagcttgaaactgctgaagtatgtcc

SEQ ID NO: 96648 - DNA, 75 bp, Homo sapiens
gaactcacctaacccaagtcctggaggttgttatgacacaaaggtggtttttattcacagaaagttacaactaat

SEQ ID NO: 96649 - DNA, 100 bp, Homo sapiens
agaagaccacccgaagaatgtacaacctcttctggaggcacttccgccactcagagaaggtcaagagcaatctgaatccaaatgcaaaggagtttgttcc

SEQ ID NO: 96650 - DNA, 51 bp, Homo sapiens
aggaattggccttctctagaagactcttgttggaagtgtatcctcccttct

SEQ ID NO: 96651 - DNA, 83 bp, Homo sapiens
acagcacagttcctgggaaggtggagccaccagcctctccttgctcatcagaaccgggtgtctgcgattatcttcagcttggc

SEQ ID NO: 96652 - DNA, 100 bp, Homo sapiens
attccaagtaactcttatttgttgctgatagtccaactccaccgccaccacctccaccagatgacattcccatgtttgatgactctccacctcccccacc

SEQ ID NO: 96653 - DNA, 101 bp, Homo sapiens
gagaagccccagctgcactacgcgctctctgatccttctgacttaccaaggaatgccttcagaatttttaccattcttgtggaatttttatgtattgagca

SEQ ID NO: 96654 - DNA, 87 bp, Homo sapiens
tgccggcggcatgatccgacacgccggggcgcccgcgcgcggggaccccacggggtcagccatgtcatctgagcctcccccaccacc

SEQ ID NO: 96655 - DNA, 83 bp, Homo sapiens
ctaaccagggccaggagcagactgtcccatgtactgctggtatctgagtcagaaatggaatctatttggaatttgcagaagca

SEQ ID NO: 96656 - DNA, 100 bp, Homo sapiens
gtggagctccggcagccgccctgaggactttatcagctcagactccaaggtccgcgcagccacccgggaacagtcagaatataaaaaggaagcagcagga

SEQ ID NO: 96657 - DNA, 72 bp, Homo sapiens
atcaacaagatgttgtcctgtgctggggctgacagccacaagctttggaattgccctgccagcttggatagt

SEQ ID NO: 96658 - DNA, 80 bp, Homo sapiens
tgagaacttgaagcatattgttaaccatgatgatgtttttgaggaaatctgaaatagagtactatgctatgttggctaaa

SEQ ID NO: 96659 - DNA, 75 bp, Homo sapiens
ggggacgacgcgtgcttcgtggcccggcaccgttccgcggacgtgctcgcttcctgatttctcccgattccttcc

SEQ ID NO: 96660 - DNA, 99 bp, Homo sapiens
gctagagctccagggccggcttcaggaggcccaagacaccacagaagccctccgagcccaggcgggcagggctgggcagcggcctgagtctcagcggac

SEQ ID NO: 96661 - DNA, 100 bp, Homo sapiens
tcatactcctttccgtgcaagtaaactcactcaggtgttaagagattctttcataggtgaaaactctcgtacctgcatgaatctacctgttactcgtatt

SEQ ID NO: 96662 - DNA, 80 bp, Homo sapiens
gcgggaggtgaagttgctgctgttggatgaaggatttgggggcagagcacttggcaggtcatgaaggggtccaacttctc

SEQ ID NO: 96663 - DNA, 98 bp, Homo sapiens
tggaaaggactccggaaaggccaagacaaaggcggtttcccgctcgcagagagccggcttgcaggctgaaggggatgctaagggagataaagcaaagg

SEQ ID NO: 96664 - DNA, 100 bp, Homo sapiens
acggagtttgatgaggatttcgaggaggaacccacatcccccataggtcactgtgtggccatctaccactttgaaggcccaaccgcttgcttatcctcca

SEQ ID NO: 96665 - DNA, 82 bp, Homo sapiens
gggctgcggccggagcgggcggctgagacaaaggcgacgggcgaactttctgaccaagtatacaactacccagagggcctag

SEQ ID NO: 96666 - DNA, 100 bp, Homo sapiens
gaagttccagcgcttcacacctttcaccctgggcaaggagttcaaagaaggacacagctactactacatctgttactggtaaaaagctactagaaagggg

SEQ ID NO: 96667 - DNA, 89 bp, Homo sapiens
tgccccttgaaggtgaaattttccaaagttttaacaaaaggttctttatagagttggaagcaagacatcagaataatatcttcatagat

SEQ ID NO: 96668 - DNA, 100 bp, Homo sapiens
gatatcgtccatctccctagaggggtgagcccctccagactccgaataggagatcaagagtttgattcattgcctgctttactggaattctacaaaatac

SEQ ID NO: 96669 - DNA, 75 bp, Homo sapiens
tcaacttctatttaaatttagtagtcgatatccttttgactctcctcagcaatcatcctcttccagtggtagcgt

SEQ ID NO: 96670 - DNA, 82 bp, Homo sapiens
agacaaacagcccgcccgaccccgtcccgaccctggccgccccgagcggagcctggaggtactaccattaaagataccttct

SEQ ID NO: 96671 - DNA, 93 bp, Homo sapiens
caaatgtctgactctgactctcggactgagaaacgcaagataacgaaggaggcccaacttcattcaataaggagcctgacggatttatcccag

SEQ ID NO: 96672 - DNA, 100 bp, Homo sapiens
aaaaaagccaagatgcaggaatcaggagagcaaactataagttggagaaggaggagcagatacacagtgtggacattgggaatgatggctcagctttcgt

SEQ ID NO: 96673 - DNA, 111 bp, Homo sapiens
ctgtgccccaactctacttccctctgctccttcccagcttcctgatttctcccgattccttccttctccctggagcggccgacaatgtccaccacggtcaatgtagattcc

SEQ ID NO: 96674 - DNA, 89 bp, Homo sapiens
tagagatatagttggcaacctcactgagttagaatcagaggtgtaccttcagttgaatttttagaatctcccattacggcagtagacag

SEQ ID NO: 96675 - DNA, 100 bp, Homo sapiens
aagagaggtatcagaagcttaaaaagtccactggggatcaggcattagaagttctacagtacctcttctccaatgacctggatgtgcctgtgggccacat

SEQ ID NO: 96676 - DNA, 50 bp, Homo sapiens
cagagccaatggcttggaatgaggtcgcatcctgagtctcagctggcatc

SEQ ID NO: 96677 - DNA, 96 bp, Homo sapiens
caacacggtgcaccggaccctgccagctcctgccctccactgactccagagagggagatccccagtacttgactccatcacgcagatgggagcagg

SEQ ID NO: 96678 - DNA, 50 bp, Homo sapiens
tgttgaacaacttggaattccagtacgagtggctgctttacagaatctgg

SEQ ID NO: 96679 - DNA, 82 bp, Homo sapiens
tgctaaaagatgacagacttggacaacatgtcccaacattacatcccagtgttcattgaggatgtcagcagggagtttgtgg

SEQ ID NO: 96680 - DNA, 100 bp, Homo sapiens
aaaaaaccttcgactatgcagagacatgagatggtagccaacccctcagagaggagccttcaggggaagtagaggtggccgaggttggggcacacgagga

SEQ ID NO: 96681 - DNA, 100 bp, Homo sapiens
ttattctggctattgactcctcatcggtctacatggtggccatacattctggatatagtcatctggggacctggagaatgatgagcaggcagccagtgcc

SEQ ID NO: 96682 - DNA, 100 bp, Homo sapiens
tttgctgcaagcaacaaagttactgtgaatgtgtactggggcaagattcttgccaagagaattaatgtgcgtattgagcacattaagcactctaagagcc

SEQ ID NO: 96683 - DNA, 110 bp, Homo sapiens
ttccgtggtgtgtagccggcttggcgtgaccctcgcctgatccagattggaggtggacacaaaggaagaggcagccagacagctacttcagcgtcctcaacgcattcatc

SEQ ID NO: 96684 - DNA, 100 bp, Homo sapiens
ctatgtggcgaatatcttcccttacaagggttatatatggaattatggtaccctccctcaggtttattttaggacagtggaacttatagaagagcctata

SEQ ID NO: 96685 - DNA, 75 bp, Homo sapiens
gtttatgctttcctactctccaaagagaaaaatattctgacagcccagttacaggaaatgaagaaccagagtatg

SEQ ID NO: 96686 - DNA, 74 bp, Homo sapiens
cgacctcgacgtcttgcctgtgtcccacttgttcgcggcctatagacgacaggatctgctcgccacccttcatg

SEQ ID NO: 96687 - DNA, 74 bp, Homo sapiens
gactaaggacaagcaggagctgggagccccagggaaacctgtttgacttcttacgcttgacggaatggcgtggc

SEQ ID NO: 96688 - DNA, 100 bp, Homo sapiens
gacttctgctggtgtgtggacaaagatggcagagaggtgcagggcacccgctcccagccaggcaccacccctgcgtgcatgaagaccccgtttggaaagg

SEQ ID NO: 96689 - DNA, 100 bp, Homo sapiens
actgaagatgtttttccgggagctgcctgagccgctcttcccttacagtttctttgagcagtttgtggaagcgatcagtgcaaattgagcatgacccaga

SEQ ID NO: 96690 - DNA, 75 bp, Homo sapiens
atgcagttggatggcggtgactgcgtgatggactcaccctgtcacccaggttggactgcactggcctcaacctcc

SEQ ID NO: 96691 - DNA, 100 bp, Homo sapiens
cctaccactggaccctctgctgcctctccaggtcttgggcgtctttggtactggcttttttaggggtctgcctggggattacccttgctgtggatagaag

SEQ ID NO: 96692 - DNA, 100 bp, Homo sapiens
gcccgatgagcggcggcctcggcctccggcgcagcccggaaatgtccggcaagatcgagaaagcaggtggattctccacagttttcctcgtgcgtactca

SEQ ID NO: 96693 - DNA, 90 bp, Homo sapiens
atcgggtggagtgtaggtcatatcgccgcggccgtcaccgatgggttgtatatactactgaaatgaatggcaaaaacacattctgggatg

SEQ ID NO: 96694 - DNA, 99 bp, Homo sapiens
gggcaagaccaccttcgtcaatgtcatcgcgtcttattgttacaggtatcgctgtgctgctcggagccagaacacacctgatagctctgcttcgaatct

SEQ ID NO: 96695 - DNA, 75 bp, Homo sapiens
gtttaacagcatataccatcttcctatgcatggaaactcattatgagaagatgaaatgtggcaactgtggtgaga

SEQ ID NO: 96696 - DNA, 80 bp, Homo sapiens
ccccgccccaaatggccccggaggatggctgcaggccaggtttggggggcctcaaccctctcctggagcgcctgtgagat

SEQ ID NO: 96697 - DNA, 74 bp, Homo sapiens
agcccggggacggcgaggccctcatgtaccacacggtgtatgcaacagcgttattgcaacaggctaacgaaaac

SEQ ID NO: 96698 - DNA, 75 bp, Homo sapiens
tggtgtggaatgacccagaaggactacatcacagcaaggtatgttcgcaattcgtgctgatcatgattttgtagt

SEQ ID NO: 96699 - DNA, 75 bp, Homo sapiens
acaactccagtgctaactcaacagttctcttgcaactagcaagtgaagccttgccaaatgacatgaccttggctc

SEQ ID NO: 96700 - DNA, 74 bp, Homo sapiens
acaaaccctgaatttataactgatgaactaaatgttgctgctgttgatacaaacctcacattagctgtgtcaaa

SEQ ID NO: 96701 - DNA, 100 bp, Homo sapiens
accggcaaattaaagcaattatgaaagaagtcattccttttttgaagggcggcgactggcggcgcgatggacctgaccgggctcctgctggacgaagaag

SEQ ID NO: 96702 - DNA, 75 bp, Homo sapiens
tccttggcagaaagtgaggaggaaaacacccccattgaggctggtggcatgttgtcctcaatctcgacactacta

SEQ ID NO: 96703 - DNA, 75 bp, Homo sapiens
cgcgagccccagggcgccctggagcgccccccaggggaaggtgtggctcattgactttaatccatttggtgaagt

SEQ ID NO: 96704 - DNA, 75 bp, Homo sapiens
atagtacggcaaaaaactgtcgacctggaatggccaaatatcaaggtgaagttcaaagtttgaaactggatgatg

SEQ ID NO: 96705 - DNA, 50 bp, Homo sapiens
gggcggggaccttgccttgcccggggtatttcaggacagccaggaggggg

SEQ ID NO: 96706 - DNA, 82 bp, Homo sapiens
gccgggctggctgcggccgccctgggccgggccccaccggacggtgacttaagagattaaaattaatttggttgctgttggt

SEQ ID NO: 96707 - DNA, 100 bp, Homo sapiens
gaaaaagaagaatttattcactcaagactaaaaactaaaggcctgggcctgagaactgaatcaggagtctgccgtgcacccgagggagattttcaagcag

SEQ ID NO: 96708 - DNA, 100 bp, Homo sapiens
ccagcctcggaaatacctcaatattcttccttgccaggtgcctgtctggaaggccagatacacagtgaccagcacccatgcagaaactacctagaagttg

SEQ ID NO: 96709 - DNA, 100 bp, Homo sapiens
tctgccgagcctcggtcccggcccccatcctccccgccccatcggttgttgtctgggcgggaaatgagtggcttatactctcctgtcagtgaggatagca

SEQ ID NO: 96710 - DNA, 98 bp, Homo sapiens
gaaaggagactaccagaaggcttatgaggatggctgcaagactgtcgacctaaagcctgactggggcaaggtttcattgaaaacagatcctgcaaaag

SEQ ID NO: 96711 - DNA, 119 bp, Homo sapiens
aggacgtgaaggggaagaggcccaccctggagtaaccctcactggagaatccagagacctggagtggaagatcatttatgttggctcggctgagagtgaggaatttgatcagatcctag

SEQ ID NO: 96712 - DNA, 97 bp, Homo sapiens
cttgagtgctttggacgatcttcagctggccaacagcaccatcattgcatttacctcggatcatgccccaggaccaaattaccatcacagggtacga

SEQ ID NO: 96713 - DNA, 76 bp, Homo sapiens
ccgcgcccaccgcctgccagttcacaaccgctccgagccagcagcagcagcagcagcagcagcagcagcagcagca

SEQ ID NO: 96714 - DNA, 90 bp, Homo sapiens
gcggagcagtggtcggagatgtggcgaccggcccgggggatgctccagaaccgcgtgctgctgtggaaggagcagtctgaggccagccgc

SEQ ID NO: 96715 - DNA, 50 bp, Homo sapiens
tcacagacatgcggaatttgagttggatatgtcaagtgaccagatagctg

SEQ ID NO: 96716 - DNA, 74 bp, Homo sapiens
gaagcttgggctcacttccacaaatgacagctgggaagtggtggaaggactgaggggggagatgaattacaccc

SEQ ID NO: 96717 - DNA, 97 bp, Homo sapiens
tgtggcccgccatgttcttctccgcggcgctccgggcccgggcggctggcctcaccgcccactgggatgcctttgtggaactgtacggccccagcat

SEQ ID NO: 96718 - DNA, 96 bp, Homo sapiens
tccagtgccacgtgcagcgctgatgaggatgtggatggagagccagagaggcagaggctgtgacaaaccctgtgcccacgctgcctccactgccgg

SEQ ID NO: 96719 - DNA, 51 bp, Homo sapiens
agagaagcttgatcagttgagggataatgttgtctgtctgtctccaaaact

SEQ ID NO: 96720 - DNA, 101 bp, Homo sapiens
cctgcggaagggcagctgggcacgccttccagaccgagacattgctacaagtggttggtgtggtctctgtggctgtggccgtgattccttggatcgcaata

SEQ ID NO: 96721 - DNA, 100 bp, Homo sapiens
gttgcgatggcgcagaaaccccgttgacaaggcactgctttttcatgacgggaaagcaggcaggatgggagagtcgccgatagaaccacctcttccctgc

SEQ ID NO: 96722 - DNA, 51 bp, Homo sapiens
gggcaaatccccacaggagaaggagatttgtacacacagatatgacgaaag

SEQ ID NO: 96723 - DNA, 100 bp, Homo sapiens
ttccctcggcgtgctactgtgcgctcgatccagcaccatggggaagcgggacaatcgggtgacctatgagcagaggaaaatcgtggagttcacctgccac

SEQ ID NO: 96724 - DNA, 100 bp, Homo sapiens
ctgcatgccgctcaccgtagacgagaaagccaaacttggccctgctggcaacaaagtcatcagtccctctgaagacaggaaacaaccttccaacaacctt

SEQ ID NO: 96725 - DNA, 82 bp, Homo sapiens
ggtgcccgtggaccacaggccctcgttgcccagatcacagacgcagtcttcagcaaggaagtgctgggaacgccctggagtg

SEQ ID NO: 96726 - DNA, 100 bp, Homo sapiens
tgaactccaagccaaaatcacagctttgagtgagaaacagccctggaagaaagcgggacttttcccctgttccttggagtcagtattttgagtccatgga

SEQ ID NO: 96727 - DNA, 100 bp, Homo sapiens
atcaagggaaaatggggtgaggaagattttgaagacaatcgtcacttatacagcatccgcacttccactaatagccaagtagacaagctgaccctgtcag

SEQ ID NO: 96728 - DNA, 51 bp, Homo sapiens
aagatggacaccgcggaggaagcccatgactgaagagttgctgaaacaaca

SEQ ID NO: 96729 - DNA, 50 bp, Homo sapiens
ccgccgccatgaaccccgaatattaagtgggcagaccaacatccacctca

SEQ ID NO: 96730 - DNA, 100 bp, Homo sapiens
cgaagatttccaatcatttctaaagtatgtgccctggaactttcatgagccctggccaggacagtaccagttttctgaggaccatgatgtggaatatttt

SEQ ID NO: 96731 - DNA, 75 bp, Homo sapiens
cggctgtaaataatacccgagaggaaataggcccggcagtatttttcagtgctgtacaagcgtcttgaattactc

SEQ ID NO: 96732 - DNA, 75 bp, Homo sapiens
atattttggaaagcagtttttaagacaactccagggttccttgaaaagaaaacaggtagttaacctatctcctgc

SEQ ID NO: 96733 - DNA, 98 bp, Homo sapiens
aggatgcagtggaggccatcaggggccttgataacacagagtttcaagacttaattcagtgcacaaatgagatgaatgtgaacatcccacagttggca

SEQ ID NO: 96734 - DNA, 90 bp, Homo sapiens
cggagttgcgtcccggggacttggggccgcagggaggaaggaagcagccaccctcgccatggcctccccgcccgcctgcccctcggagga

SEQ ID NO: 96735 - DNA, 101 bp, Homo sapiens
atgaaggagtaggacttgtgcattcaaacatagcaactgaggtattgatgaagatgaccctactgctgatgataccagtgctgctgtaactgaagaaatgc

SEQ ID NO: 96736 - DNA, 100 bp, Homo sapiens
tgcctgacaacaccgatcacagaccaacaaagctgcaggagaatatctggcaaggtgcatttaatatttggaaaaaagatatgaccagtaacctacttta

SEQ ID NO: 96737 - DNA, 102 bp, Homo sapiens
gagacttcgtgtgcggacagtgtgtgtgcagcgagggctggtatcttggagatggccgcttccatctggagtctgtcatgattgccaaccccaatgtccccg

SEQ ID NO: 96738 - DNA, 101 bp, Homo sapiens
cggccagccatgaactatgacaagctgagccgctctctccgctattactatgaaaagggcatcatgcagaaggtggtaagttttcttcatacagttctttt

SEQ ID NO: 96739 - DNA, 74 bp, Homo sapiens
cgagaccagacgcggagccatggccgaggtgttgcggacgctggccgaggtgctgatactcaaagaaggtttaa

SEQ ID NO: 96740 - DNA, 90 bp, Homo sapiens
cttcaaaattaaaagaggagcagcatggcatttcagtcactggtttgcagagtccaggtcaatgatgccttccttcatgtgatacagggg

SEQ ID NO: 96741 - DNA, 80 bp, Homo sapiens
ggagccgctggggtcccttttgcctcagatactattttgaaggtatctcagatgaagacatcatcaacattactcttcct

SEQ ID NO: 96742 - DNA, 74 bp, Homo sapiens
gcggaaaatgatccagtcacagccaacaaatggaattttcttgagcatgtttctaatcgttttgccattggaat

SEQ ID NO: 96743 - DNA, 100 bp, Homo sapiens
gtttgaaaatgccatgcgcagcgacagtggcagccagtgccccttgctgtggaggatgtatttgaactttctgtggtatgtgtgcaacagagagaaatta

SEQ ID NO: 96744 - DNA, 97 bp, Homo sapiens
tgttctccaaataccagctcgacaaagatggggttgtcctctttaagaaggtgagtgatgaaatggtagtggagctcattgagaagaatttggagac

SEQ ID NO: 96745 - DNA, 97 bp, Homo sapiens
cgagtcacccgttctacgacgtggccagacatggcattctgcaggtggcagtttgcagatggcgtgtacctggttctgctcatgggccttctggaag

SEQ ID NO: 96746 - DNA, 49 bp, Homo sapiens
gggaaccctggtcaccgtctcctcagagcgggaagagagagagcgcgcc

SEQ ID NO: 96747 - DNA, 90 bp, Homo sapiens
atgaggcgaggctagggaggacctcacttccccggggtgtaataatgttaactgagtaagaagccattaatggttattcatcacctggag

SEQ ID NO: 96748 - DNA, 90 bp, Homo sapiens
cgccaagatgccggcctattttcagaggccggaaaatgccctcaaacgcgccaacgatactgcaggcaaacagctcgccgaggtgtccca

SEQ ID NO: 96749 - DNA, 75 bp, Homo sapiens
ctttgacctcttcgatgtgcgagactttggaaaggtctgtgggaggcatccgggcctctctgtataatgctgtca

SEQ ID NO: 96750 - DNA, 100 bp, Homo sapiens
ggtaatagaggacttgaagcagaaagcaagtgaatacgagtcagaaggtgcctttcctgaagactatcttctggtctcgaaatggacatgatagatccag

SEQ ID NO: 96751 - DNA, 100 bp, Homo sapiens
gtttgcttctgaggaagctggaagctgcagccacaatgtgcctttgcaggggagcctgagagccacagatcactggggtgatcctgctggctgttggagt

SEQ ID NO: 96752 - DNA, 106 bp, Homo sapiens
caatatctgtcttcggtggactccttcggcagtccacccaccgccgccgcctcccaggcggctatgagaggttttcctccgagtacccagaattctgttctaaaac

SEQ ID NO: 96753 - DNA, 75 bp, Homo sapiens
ggcgtcagccgccaccggcagcagcagcaccaccggacggatgttaatgcaggcgagggcagtgagtttgcagac

SEQ ID NO: 96754 - DNA, 82 bp, Homo sapiens
cgacgccggggacgcccgcgcgacgagcaggtggcggcggctgcaggtctgcgaggaacagaagtgcgaggaggaggtcttc

SEQ ID NO: 96755 - DNA, 74 bp, Homo sapiens
agcaacttaagaaccagattcgaatcaagactggtgccccgtgccgttctgaacgtctggctaaatacaaccag

SEQ ID NO: 96756 - DNA, 90 bp, Homo sapiens
caacaattggcattgactttttatcaaaaactatgtacttggaggatcgaacaggctcagtaaagagacaagcactatatgcctgtagta

SEQ ID NO: 96757 - DNA, 90 bp, Homo sapiens
agccactaaccctggagctagtggaggaaactgtgcaggctatggaggaggaggagaacggggctgaggaggaagaagaagaaactgccg

SEQ ID NO: 96758 - DNA, 100 bp, Homo sapiens
ttccagtaatggtggatgaagttgttcattgtttgtcaccacaaaaaggacaggggaagaagatgctgcatacaggatggaatatccaggggaagacgtc

SEQ ID NO: 96759 - DNA, 75 bp, Homo sapiens
ggggccttccacaccccctccgtgggtgtgtggatggtgattgctcacaccaaagccttggacccctcccagcct

SEQ ID NO: 96760 - DNA, 75 bp, Homo sapiens
gctcggtggccgcggttcgactcccgtccctgcttccagctgaggtggaagccctatggggcggatgacttcctg

SEQ ID NO: 96761 - DNA, 100 bp, Homo sapiens
actgactcttttgcattatgatccagttggcgcttcctcccatcaacacagtcggcggagacaaggttggctaaaggagatccgaaagcttcagaagagc

SEQ ID NO: 96762 - DNA, 83 bp, Homo sapiens
ctgtcctccagcaggaagtagcaagtccccagtcactgcaaaacagcagctataaccactttgctgccatttattacctcctc

SEQ ID NO: 96763 - DNA, 100 bp, Homo sapiens
ggagagtgtgcggctccaggtgggctcacgcggcaccacactgtaactcgaggcatcaccaaaggcgtgaaggaggactttcgcctggccatggagcgcc

SEQ ID NO: 96764 - DNA, 100 bp, Homo sapiens
ccccgttacctgcaggtattgggagatccacagctaagacgccaggactccctggaagcctagaaatggctcaaactgtccaggttgctgaagttgaacc

SEQ ID NO: 96765 - DNA, 80 bp, Homo sapiens
cgaacgaccaagagggtgttcgactgctagagccgagcgaagcgaggctactcacagtcgaactacaactccccggggtc

SEQ ID NO: 96766 - DNA, 100 bp, Homo sapiens
ctggatactcttgttaccagaattccaaaggttctggatggtgccatgacaatggtgtgaactacaagattggagagaagtgggaccgtcagggagaaaa

SEQ ID NO: 96767 - DNA, 98 bp, Homo sapiens
gggcagagctcatctgacgtggcatcagatggagtcccctgtttccacaccagcagtgctgccaatacaccttttggtgccagtggtcaacaatgaca

SEQ ID NO: 96768 - DNA, 75 bp, Homo sapiens
tggagatccgaaggaatgaaatccgggatgtagctgagctgattcgggccagagcctgccagagggtggtggtca

SEQ ID NO: 96769 - DNA, 100 bp, Homo sapiens
ctgaactctagggagccgggttgatttttaaagcttcaaaatcctaagactcagcactgttgcggggacttcttaattactcaaatgactggaaaagagc

SEQ ID NO: 96770 - DNA, 101 bp, Homo sapiens
ctcctccccaccaccaccatctccatcacccaccaacaacaccacaataatccacagccaaggtactaggttttgacaagcttgcatcatgcgtgagtata

SEQ ID NO: 96771 - DNA, 74 bp, Homo sapiens
ttatccagtcggttcgtggagaggagaggctgttactgaggcggagacacgggtgatgattggctttctgggga

SEQ ID NO: 96772 - DNA, 89 bp, Homo sapiens
atgcagatatgtatgatcttcccaagaaagaggacgctttactctaccagagcaaggagccagaggccaagaagagtaagacggccgca

SEQ ID NO: 96773 - DNA, 83 bp, Homo sapiens
gtcccgggcgctgtgcatccacactggacgcgagctgcgctgcaaggatcagtttgacaacttagaaaaacacacacagtggg

SEQ ID NO: 96774 - DNA, 75 bp, Homo sapiens
tacgaaggatggaatcttcaatcaatcatatttcacaagcagcaaatatgaagtctatggaccctgcctcaggtt

SEQ ID NO: 96775 - DNA, 75 bp, Homo sapiens
ctgttctgccggaatttgaaaagtgcctgaactgactcagcgcaagaagacagcttcgactccttgtgatttcat

SEQ ID NO: 96776 - DNA, 130 bp, Homo sapiens
tggaactgataaaccaacagaacctgacagaatggatagaaattttaaagactgttgtgaacagggatgtacctaatgatatattttggagaagttcagctgagtggcttaggagaaggtatgtatcaac

SEQ ID NO: 96777 - DNA, 90 bp, Homo sapiens
ctttatcgtctgcaacaacatgttaagatgaacaagagaactgggcaacccatgatccacatctacctggacaaggaaacaggaaagccc

SEQ ID NO: 96778 - DNA, 74 bp, Homo sapiens
gttggagaactacaggaacctggaggctgtggagcccccctccatgcgcctgaaggcccgacccagcagccctg

SEQ ID NO: 96779 - DNA, 74 bp, Homo sapiens
gagaagggagactacaaggacagcagcgactttggggcccgtcaccctcaggagtggcaaaattctattcagaa

SEQ ID NO: 96780 - DNA, 97 bp, Homo sapiens
aagtgacaaacgtacctgtggtccctggatccagtgctactgctacaaataagacatgcaagaaagcacttcagccaagcagaagggagccagctgg

SEQ ID NO: 96781 - DNA, 100 bp, Homo sapiens
caagcggcagcggaaccggtgccagtactgccgctaccagaagtgcctggccatgggcatgaagcgggaagcttgcgggaagttgacgggcatcagtgac

SEQ ID NO: 96782 - DNA, 75 bp, Homo sapiens
caccaaaccctgggttagagcaaggtctccaggaaacctagagaaaaaccgttatggggatgtaccctgcctgga

SEQ ID NO: 96783 - DNA, 101 bp, Homo sapiens
acggccacgacctgggagcagcagaaactggcgatggaatatgagaggagccctctggaaagaaaaggacagaccctgtgctttcatgaaagtgaagatct

SEQ ID NO: 96784 - DNA, 100 bp, Homo sapiens
caggacagcacccacacacggctgctggtagagggagatcaaagacgctggccttcagacctgatcagactcccaggggcagccaccacatgtatgacag

SEQ ID NO: 96785 - DNA, 100 bp, Homo sapiens
cagctgtaactgcaagacctggacaagggccatcgatgcacccctcggagctaatagcggagatgagaaacagtgggtttgcactgaaacgaaatgtact

SEQ ID NO: 96786 - DNA, 76 bp, Homo sapiens
tttctgctcctaaccaaccccgacaaaaggaggagatgttaaagtaacccatcttgcaggacgacattgaagattg

SEQ ID NO: 96787 - DNA, 100 bp, Homo sapiens
ccgacctctacaactgggaggtggccatcttcggaccccccaacaccctctacgaaggcggctacttcaagcctcctacgtgatcacagacctgacccag

SEQ ID NO: 96788 - DNA, 98 bp, Homo sapiens
cacgacgcgctcgacacgcgggtgcggggcgacctcggtggcccgcagaacctgaatggtgtgccctcgatcaccaaccccatcaaaactgcaaacca

SEQ ID NO: 96789 - DNA, 90 bp, Homo sapiens
catcttcagcaagttcacctccaagtttgtacgcaggacagagcgggatgccaccagcttgtccaaagggaagttccaggagctcctggt

SEQ ID NO: 96790 - DNA, 75 bp, Homo sapiens
agcagctctgatgacgatttggatgaatatacccttagaaaaaatgtggcagtgcagctggctaagagtcttggg

SEQ ID NO: 96791 - DNA, 75 bp, Homo sapiens
cacgagctgtcaaccaagataaaaagaacatgctgttttctctgtcacagcttctatagcaaacgctactcccgg

SEQ ID NO: 96792 - DNA, 90 bp, Homo sapiens
tggcgaaggagccggctccaaggaaggaagcagccaccctcgccatggcctccccgcccgcctgcccctcggaggaggacgagagcctga

SEQ ID NO: 96793 - DNA, 74 bp, Homo sapiens
cttggcaattcctgctgaacaaataatttttcatggcgggctatggaactcagtcaactccccagggatatggc

SEQ ID NO: 96794 - DNA, 98 bp, Homo sapiens
catttcaagaaatagataatatcaaggacatcaggacaccgggagtgggagagattggactgggagactcagcagctccttcgagaactcatagaacg

SEQ ID NO: 96795 - DNA, 71 bp, Homo sapiens
ttttgtattaatggatcacattttgaatttgaagtttgcctatctggggcgcctggctcacgaggttggct

SEQ ID NO: 96796 - DNA, 75 bp, Homo sapiens
gtgtaatcatctgaagaaattggtcccaagcttgactcatggtatgttattttaaacggcactgtggaaatcagt

SEQ ID NO: 96797 - DNA, 50 bp, Homo sapiens
cgtgcctgatgtgttttataaggtttggggacgacatccctggaatggaa

SEQ ID NO: 96798 - DNA, 90 bp, Homo sapiens
ggaggttcttcagtgtatgcctgctcaaactttggaacaaataccgaatttccaacattccatcactaatattcctcgacgccaccactg

SEQ ID NO: 96799 - DNA, 50 bp, Homo sapiens
aggctctgcaccctggatggaaagcagtcagcagataagcagagagccct

SEQ ID NO: 96800 - DNA, 100 bp, Homo sapiens
cggcgccgcggccgctgcggacggacgctcgcctgccggctgagatttgtcaaagatgaaagtgaccttatcagctttggatacttctgagagttctttc

SEQ ID NO: 96801 - DNA, 73 bp, Homo sapiens
aggagtcgggcatcctggtgctgggcgccattgctgagggtttgcagacaagccaggatgcacgcttttatgc

SEQ ID NO: 96802 - DNA, 100 bp, Homo sapiens
ccagatcgacgtcccctcgttcccactttggggatcggcgctctggctgtttcgtgaaggagagagaggtcccctcttgctgttggctgcacatcaggaa

SEQ ID NO: 96803 - DNA, 100 bp, Homo sapiens
ccgggctccgggaaaactacactggccagttacagaatgtctgaaggggacagtgtgggagaatccgtccatgggaaaccttcggtggtgtacagatttt

SEQ ID NO: 96804 - DNA, 99 bp, Homo sapiens
caagaatgagaaattgtgcaaaacaggctccttctcctgaaaaagccgaggaggagagtgagaggcttctgagggaactctatttgtttgatgttctcc

SEQ ID NO: 96805 - DNA, 100 bp, Homo sapiens
aagtcgagtggcagcctggtctgcatgggcagccgaccaaggggactgcttcctgttggataaaaaaattggagtaaatcaaccaaaacgaattgaaaat

SEQ ID NO: 96806 - DNA, 106 bp, Homo sapiens
gggacagctctctagaaactcgctctaaagacggaaccgccacagcactcaagtttttctatatgagtggagaagacagctgttaccagggaggtcatacaacatt

SEQ ID NO: 96807 - DNA, 100 bp, Homo sapiens
atggcctacaacatgacgtttttccctaatctgatgggtcattatgaccagagtattgccgcggtggaaatggaggttgggataattcttcactattcca

SEQ ID NO: 96808 - DNA, 50 bp, Homo sapiens
cgccatccaggactccctgactcgatggaataagtttgtggagtttgaca

SEQ ID NO: 96809 - DNA, 75 bp, Homo sapiens
agaactatgacatggtcagtgggatctactcatgaggttggcgatttgaaggagctgcagacactagacatttct

SEQ ID NO: 96810 - DNA, 80 bp, Homo sapiens
tgcatctggctgttagaagaattcatgctcatccggaaactaatctggattcactccctctggttgatacccactcaaaa

SEQ ID NO: 96811 - DNA, 100 bp, Homo sapiens
cagctcctgggtcatttttctccctgaggacaacctgagctttggaatcttctaatgcccacgaagaagttaaacgctagaatctccaagcagtgggctg

SEQ ID NO: 96812 - DNA, 82 bp, Homo sapiens
cttttgagtgcaactgccttccaggactgaatgtgggcccagttggcgtcattctgctttgacctaaacattcccatctgat

SEQ ID NO: 96813 - DNA, 103 bp, Homo sapiens
acagccccatccaggttcccatggttgccggctcccctctcaggacaacccagatgtgcaacaaagtgcgatgatggaattgtcagccacttgaagaagcagg

SEQ ID NO: 96814 - DNA, 76 bp, Homo sapiens
actatccgtttgttcaggaaccaccagtgacagaagaatggatcttggagaatgtctgaaagtccatgacctggct

SEQ ID NO: 96815 - DNA, 100 bp, Homo sapiens
accattattctcagtgcctaccagcgaaagtgcattcagtccatcctgaaagaggacgagttgaatgccaagtcgaaggagttacacctgcagatttcag

SEQ ID NO: 96816 - DNA, 83 bp, Homo sapiens
ctcaatatctgtcttcggtggactccttcggcagtccacccaccgccgccgcctcccaggctggcctgccactcctcctgcta

SEQ ID NO: 96817 - DNA, 126 bp, Homo sapiens
tcttgataaaaagagatgtggggggattctcgacctgctaacagaactggaccttttcggagagctcaaaggatggctactgacatgcagaggaagagaagcagcgaatgccttgatggcacattg

SEQ ID NO: 96818 - DNA, 51 bp, Homo sapiens
ccctggacccttccctgcctgtcggtaacctctattgaagaacgaacaagg

SEQ ID NO: 96819 - DNA, 101 bp, Homo sapiens
tggccgcccccgccagcgccggcccccgctcctgctgctgacggcgcccaggtgcccagcagagtgccaccgtggccaacccagtgcctggtgccaacccg

SEQ ID NO: 96820 - DNA, 75 bp, Homo sapiens
caaaaactaagcatccagaggccctgagcagctttcagcactggagagtgatagattcgtgtggcctttcaaatg

SEQ ID NO: 96821 - DNA, 82 bp, Homo sapiens
gaagaagactcccccacatctggcttcgttccagagcccagcatgaatggatacgcggaatttccgcccagccccagtaacc

SEQ ID NO: 96822 - DNA, 83 bp, Homo sapiens
aggaatctgagggtgccctcaatgagcacatgaccagcttagcttctgtcctaaagaactgccattggatgtccagaatcccc

SEQ ID NO: 96823 - DNA, 100 bp, Homo sapiens
caggagcagttgctggtgctgctgaagtccctagggaaccaccaattcttcccagctgccccagagcacatcagctatgtgccccagctctcaaacgaca

SEQ ID NO: 96824 - DNA, 75 bp, Homo sapiens
tgacaaggaggcctgagtagaccgcagattcttctactcaaaacaaaagagccaacagaacagaagaaaatgttt

SEQ ID NO: 96825 - DNA, 100 bp, Homo sapiens
gcaccgcggcgccgacatcaattacgccaatgtggacggactcactgccctgcaccagggcgtctctggccgagcctctttttgtggaaaacgacagcag

SEQ ID NO: 96826 - DNA, 83 bp, Homo sapiens
gtggcgctggatccggcagcagctggcaaacccaccacgagtagctcagaagcatgtcgcttctgtggttccaggagtggaac

SEQ ID NO: 96827 - DNA, 76 bp, Homo sapiens
cagacagcatatttgagtcatttccttcgtacccacagtgcttcatgagagatataattgaccctgcaatcctgcg

SEQ ID NO: 96828 - DNA, 83 bp, Homo sapiens
tctgaggagccgttcgaactgtctcaccacttccctgcagctcccgtctggatgtaccgactgcttttggaataaaaagattc

SEQ ID NO: 96829 - DNA, 101 bp, Homo sapiens
tacacatttccagcaggctgcagatacgagtggacaagtatcagcagatgttgcacacaaacttggtataccttgctacaatagcagattctaatcaaaat

SEQ ID NO: 96830 - DNA, 50 bp, Homo sapiens
gctggtggggctctactgcgacaagaatggatttgccatcatccggcccc

SEQ ID NO: 96831 - DNA, 96 bp, Homo sapiens
tattcatctcaaaaacaaaattctgaactcaggacttggcaaggtcatctagtagcaggcacccaaatcaggcaactcccaagaaaagtggtttaa

SEQ ID NO: 96832 - DNA, 74 bp, Homo sapiens
ccagacctgcagttgctctacactttcagttatcaggaactgttgccgttattacatcagatgggagaatgatt

SEQ ID NO: 96833 - DNA, 75 bp, Homo sapiens
agcagatgctccagtttgagaaacctggatctgcgatctgtttgtgggaagacatgtaaggaatttgcataagac

SEQ ID NO: 96834 - DNA, 100 bp, Homo sapiens
tgtgaaaggacgcatctatcaactgcttgccaaagctagttacaataagactttgaccccgacgcaggcttcagtgattgccgcggatcagaagcctgag

SEQ ID NO: 96835 - DNA, 101 bp, Homo sapiens
atccgcagcaggaagcttgggacaatgcagatcttcgtgaagactctgactggtaagaccatcaccctcgaggttgagcccagtgacaccatcgagaatgt

SEQ ID NO: 96836 - DNA, 101 bp, Homo sapiens
tacatcaacttggctgaccattggaaaggaaagcagatggtggagctgaatatgccacttaccagactaaatcaaccactccagcagagcagagaggctga

SEQ ID NO: 96837 - DNA, 138 bp, Homo sapiens
cttccagaatcactgagctgtaacaaagcactctgtgctagtgatgtgagcaaatgcctcattcagggaggttcccctgaaggatgctaaggaatacgctgaatccataggtgccatcgtggttgagacaagtgcaaa

SEQ ID NO: 96838 - DNA, 100 bp, Homo sapiens
gatggcaccccctgtgaccagaacggcacggccatctgtgtgtctgggcagtgcaagctgccgcagcgggaaccgcaagagcttggtggtaggaacgccc

SEQ ID NO: 96839 - DNA, 100 bp, Homo sapiens
gagggaagtcgtgcacgaacaccaaggcgaatctggctttgggggaagaggaagaaaagtcggattacaagatcaaccaccaccaacaacaataaaaacc

SEQ ID NO: 96840 - DNA, 96 bp, Homo sapiens
tcccagcctggagctgtgccagcctgacatggtggaactgtcaccgctgttcccagacacacttattctgggtctggagatccgggtgaaggtctc

SEQ ID NO: 96841 - DNA, 75 bp, Homo sapiens
ggttccatgccgcagtaggacagcaggcccaagtctgcacatcccaggtgcctggcaggctgatgacaatgccgt

SEQ ID NO: 96842 - DNA, 75 bp, Homo sapiens
cgcgcacttcgtcatgttcttcgcgccctggtgctgactgggttacttttttaaacactaggaatggtaatttct

SEQ ID NO: 96843 - DNA, 83 bp, Homo sapiens
gaacaggaggaaaccattcagagactgcggttgttcagaagctcttagtttgtgggctgtccttgttatttcacttgaccatc

SEQ ID NO: 96844 - DNA, 99 bp, Homo sapiens
accctatggaagcagaagaagctgaggatgaagaagatgaaatgactgctgtccatgcaggcaacataaacttcaagtgggatcctaaaagtctagaga

SEQ ID NO: 96845 - DNA, 51 bp, Homo sapiens
gtcctcctgttgcctgcaggccagtgaagcagccgacacgagtcgttgttc

SEQ ID NO: 96846 - DNA, 100 bp, Homo sapiens
atgccaaagaggaaagtgaccttccaaggcgtgggagatgaggaggatgaggatgaaatcattgtccccaagaagaagaactgatagtgcatcagctgac

SEQ ID NO: 96847 - DNA, 51 bp, Homo sapiens
ctaatgaagatgctattaaggaggcttaactggcatgggctgagccccttg

SEQ ID NO: 96848 - DNA, 98 bp, Homo sapiens
actacctgtacaactccttcaccacggataagtgcaagaaggctgcttccagctccaaagcacctaagaatggaggtaaagcgaaggattcagcaaag

SEQ ID NO: 96849 - DNA, 98 bp, Homo sapiens
attatcccctcctcggtggaggcgtacatcactgtcgtctcatgggagaaagacactgtttcacttgtctcagcggacaaggcaaaatctcagcaagt

SEQ ID NO: 96850 - DNA, 100 bp, Homo sapiens
ctcagcctcctgagtagccgggattacaggtggtgatctttgtgaagtctgtgcagcggtgcattgccttggcccagctactagtggagcagaacttccc

SEQ ID NO: 96851 - DNA, 74 bp, Homo sapiens
agttatttactttcccatcaggtttcctgatgtgagcagcaagatgagaagatgaagtgaatttatggattctg

SEQ ID NO: 96852 - DNA, 98 bp, Homo sapiens
tgtaggtggaggaggaatgcttgctggaatagcaattacagttaagaattaaccagcgcttagatatggtgccgcatttggagacagacatgatgcaa

SEQ ID NO: 96853 - DNA, 82 bp, Homo sapiens
tcagcgatgacatccctttccgagtcaactggcccggcaccgagttctctctgacagtcagtcggatgcggagactgcagcc

SEQ ID NO: 96854 - DNA, 88 bp, Homo sapiens
agcgtgggtgagcggcgcagcggcggcagcggagagcgagagaggggagcaggaaaggcagcaacaggtggaagctgttgagttggag

SEQ ID NO: 96855 - DNA, 80 bp, Homo sapiens
gtcctatggcttgaacattgaaatgcacaagcaggttcgagaacttgtcttggacaattgcaaatcaaatgatggaaaaa

SEQ ID NO: 96856 - DNA, 76 bp, Homo sapiens
cactttcccctgagcctcagcacctgcttgtttggaagggagttgaccacatttggccatttcccagaagggcccc

SEQ ID NO: 96857 - DNA, 73 bp, Homo sapiens
ggcagcaggcgctgctgcagcactggagcgagtacatcaaggctattactccaaagcgactcctcacatctat

SEQ ID NO: 96858 - DNA, 100 bp, Homo sapiens
cccgtttccatcacgagtgccgccagcatgtctgacaaactgccctacaaagtcggttcaagcactgtcttcctgttggccctgacaatcatagccagca

SEQ ID NO: 96859 - DNA, 88 bp, Homo sapiens
tggaagttactgccgcgccaccgagtccggaccggagactttggggcctaactagtgtctagtgaactagaaaatcacccaatgaatg

SEQ ID NO: 96860 - DNA, 88 bp, Homo sapiens
ccggctcccgggccgccttcgccgcgcggtttccctgaaacctgggctcttgaagacgcatcactggagcagatggataatggagact

SEQ ID NO: 96861 - DNA, 50 bp, Homo sapiens
tgaagaggaggaaaaagaggttggctcagtctgttcccagtattctagag

SEQ ID NO: 96862 - DNA, 99 bp, Homo sapiens
taaactcaaaaactgacactcgattcagctattggaaagtttttttaatgtggttggaacaactgaggaggctattctgcagaccatcctgttattaag

SEQ ID NO: 96863 - DNA, 100 bp, Homo sapiens
acctttggtttcacagaagatctctgccaggcaaggccatcttagagacttaattcagtgcacaaatgagatgaatgtgaacatcccacagttggcagac

SEQ ID NO: 96864 - DNA, 51 bp, Homo sapiens
gcccgatcaagcctgacttctagccaaggattttttatcaagcagaaatgc

SEQ ID NO: 96865 - DNA, 51 bp, Homo sapiens
ggatatggagagaaaatcaattgtgagtacgtggaagacaacctgggggtg

SEQ ID NO: 96866 - DNA, 88 bp, Homo sapiens
tcatttgcaacttatatcgccagtccagcagctaaggatattttgtgcagacttagaaggttttgactccgtggtatcatctactgag

SEQ ID NO: 96867 - DNA, 51 bp, Homo sapiens
aatgaatgccaaatgggacacggaacgagttgaagcagttaatatggctga

SEQ ID NO: 96868 - DNA, 82 bp, Homo sapiens
gagagaggtggacagatctgagagatactgaggttcgtgctggccgtgggcagcgccgtctttgatgccatgttcaacgggg

SEQ ID NO: 96869 - DNA, 87 bp, Homo sapiens
gaacatctcgtggcagcctattcctgtgcacactgtgcccatcactgaggacaggcctggtccgacccccagtggcactaacgtggg

SEQ ID NO: 96870 - DNA, 75 bp, Homo sapiens
gagactcacctgctaatgttgatgctgcggatcaagcgtgctttccttatcgaggagcagaaaatcgttgtgaaa

SEQ ID NO: 96871 - DNA, 100 bp, Homo sapiens
taccatcgtcttcacacagcgctgccatgaccagctcacggggctggactcggagaagcacttgacccctgacaagatctaccacgtcacagtgatgccc

SEQ ID NO: 96872 - DNA, 100 bp, Homo sapiens
gcccggggcctcgcgctggggacgttgcgtctgcagctgcggcgcgggtgtccgcaatgttgccagtgtctgtctgcagattggctacccaactgttgca

SEQ ID NO: 96873 - DNA, 82 bp, Homo sapiens
gcctgatcagtgctgtcccatctgcaaaaatggattttgacacttcatgacatgtcattatttagagcaataatgaatattg

SEQ ID NO: 96874 - DNA, 98 bp, Homo sapiens
ggtccacgccgagggcaggacgaacttcaccagcatcaagatggtgctcatgtggaccagtggtgacgccttcaagacggcctacttcctgctgaagg

SEQ ID NO: 96875 - DNA, 75 bp, Homo sapiens
aggagctgtggttgtaacactctacaagatgggttttccggaagccgccaggttgtctgcattcaaaagagcatt

SEQ ID NO: 96876 - DNA, 76 bp, Homo sapiens
agcacctagtacctcctaccattgtcaactggaaatctactttcttcaatgtgttaaccaatagtcaggcttcagc

SEQ ID NO: 96877 - DNA, 82 bp, Homo sapiens
gctggatcttcacggtctctacaccagagtcactactttaggcggattcgcgaaggggacggcaaaacagaacagaaaggcg

SEQ ID NO: 96878 - DNA, 75 bp, Homo sapiens
caaagaacagaatgctaaggaagctgtggcaagccctggccaacgtcaacattgggagcctcatctgcaatgtag

SEQ ID NO: 96879 - DNA, 100 bp, Homo sapiens
catcattgcatgggttaatgacatagtatctttaaactacacaaaagtggaacagctttgttcagtgtgcaggagaagagaattgggtggacagcaggac

SEQ ID NO: 96880 - DNA, 100 bp, Homo sapiens
ttgatgcactgagtaaaagaagcaaggaagctgaagcagctttcttgaatgtctacaaaagattgattgacgtcccagagacggagtttcaccatgttgg

SEQ ID NO: 96881 - DNA, 76 bp, Homo sapiens
cgggcgcccgccgccgagccgtctcctgcagcggcccccgccgggtggtatggtcaggaaaaagactacaatgtac

SEQ ID NO: 96882 - DNA, 75 bp, Homo sapiens
tgaagacgcacggtgccaggaccaagtatctgggtgtgggccgaagatatgctcatgtggtgttgaggaaagcag

SEQ ID NO: 96883 - DNA, 100 bp, Homo sapiens
caaaggaaggacaaaacctgaaagagctatatttggtgtcctgtaaaatcacagattatgctacaagtggaccttctagtgcagttgttcctaatacctc

SEQ ID NO: 96884 - DNA, 99 bp, Homo sapiens
gaggccacagcccggactccatcgactcccccggctcttagactaattccaaatcctttatttgatctggctggaataacgtgtggacactttctggta

SEQ ID NO: 96885 - DNA, 99 bp, Homo sapiens
ggccaggcgggactaagagagccgaggtcgctccccatccactctcacaaggtggccaccgagtactaaattcacttgggaataaaagaaaaacataag

SEQ ID NO: 96886 - DNA, 100 bp, Homo sapiens
gagagctgcctgcagggctacttcctcctggacgggaagtgcaccaagacccttgaacatctgtgaagaaatgactattctgcatggaggcttcttgctg

SEQ ID NO: 96887 - DNA, 75 bp, Homo sapiens
aggaaaataattaaatattcttaccgagatgagtttgatgcctacatcattgtgtctttcgtgaatgccacccta

SEQ ID NO: 96888 - DNA, 100 bp, Homo sapiens
gccgctggtcgtgttcgtcctcggcggccccggcgccggcaaggggacccagtgcgcccgcatcgtcgagggcatttgtttacctgagcaatctgctgta

SEQ ID NO: 96889 - DNA, 85 bp, Homo sapiens
agtgggggtgtgcaaacccgagagaactggttcctccgtgtcacaaagcagtacctgccccacgtggcgcgcctctgtctgatca

SEQ ID NO: 96890 - DNA, 83 bp, Homo sapiens
taaaaaatgtcatttttaccaactgtgtaaaggatgaaaatgtcaagcaggtgctgcgagagatgtgcaagcagggataccgg

SEQ ID NO: 96891 - DNA, 75 bp, Homo sapiens
cgtggtgtctctacctgttcaactcggtctgtgtgccattgcccaggcagagtctctgcgttacaaactcctagg

SEQ ID NO: 96892 - DNA, 100 bp, Homo sapiens
aggggagctcgtaaggtccctcaaagcgggaaatgcgtcaaaggtgtggcagagaagacacagcttctgaaattgagtgtacctgctacttttatgcttg

SEQ ID NO: 96893 - DNA, 75 bp, Homo sapiens
agcgaggtcgcggcaggttcgagatgccatggacaatattaccaggcagaaccaattctacgatacccaagtcat

SEQ ID NO: 96894 - DNA, 90 bp, Homo sapiens
tcgtgtgcctgatgatcacgcagctggctggcttcagtggaccaggctcctttcggatctaccctctgccggatgaccccagcgtgccag

SEQ ID NO: 96895 - DNA, 100 bp, Homo sapiens
ctcagcaacctgacaattctgtcgtgtcccgcaggcttatggctatgggccatacggtggtgcgtacccgccaggaactcaagttgtctacgctgcgaat

SEQ ID NO: 96896 - DNA, 99 bp, Homo sapiens
cttgtctgctgccatgtgagacgtgcctttgaccttctgccatgattgtgaggcctccccagccacgtgaaactattttctggcatccttaaatcttgt

SEQ ID NO: 96897 - DNA, 101 bp, Homo sapiens
cttggtctcaatgtccacaacatgaccccagctacctccccaataggtgcatcaggaccttaaaggctttgatccaggagagaaatactttcataacacat

SEQ ID NO: 96898 - DNA, 50 bp, Homo sapiens
ctatgacttgctaaacaatctgttggtttctggcatttgaagtcaaagag

SEQ ID NO: 96899 - DNA, 74 bp, Homo sapiens
agcgggcagccttccaggtggacaggttgggggccgtcccgctcctaaggcaggaagatggtggccgcaaagaa

SEQ ID NO: 96900 - DNA, 96 bp, Homo sapiens
aacgaactttatattttaccacttccttgaatagcaagtgaaagggaactttgctaggttgcagacctgcatctcagaactccgcatgttacagag

SEQ ID NO: 96901 - DNA, 101 bp, Homo sapiens
agggttgctttgtttttaagccaaactccaaaaagagaaagatctctctgccaatagaaaactgtcgctgaaaagcaggagaagagaaatcaggatcgctt

SEQ ID NO: 96902 - DNA, 74 bp, Homo sapiens
gaacttttgacacggctttggaaacgacgtcatgtgttagaaacgagatcctgcgttcacttatgaagtgatag

SEQ ID NO: 96903 - DNA, 98 bp, Homo sapiens
aaacaattacagcctttgtagaaccttttgtaattttactcatattagtagccaatgcaattgtgggtgtatggcagaatgtttctccatcccagaga

SEQ ID NO: 96904 - DNA, 82 bp, Homo sapiens
ctcccgaagtgctgggattacagaataacctgggtatcttgtggtctgaaagagaagaaattgaaactgcacaggcttacct

SEQ ID NO: 96905 - DNA, 78 bp, Homo sapiens
tcatcatggagctcattggtggcgtggtggccttgaccttccggaaccagtctaaatgcccagccgaaagtgtcgaca

SEQ ID NO: 96906 - DNA, 103 bp, Homo sapiens
actactaccactttgggctgatggcaactggctcttgtcaggatggtgaagctgttcatcggaaacctgccccgggaggctacagagcaggagattcgctcac

SEQ ID NO: 96907 - DNA, 118 bp, Homo sapiens
ctagaagcagagacaccaggacagaaaagacagtgttctgctttcatggagttcacagaagagtcgaggaggaccgtataatagacgctggccccaaaggaaactactctcgatttat

SEQ ID NO: 96908 - DNA, 88 bp, Homo sapiens
agcagatgcggacgcttttttccttcctaggagaaatcgaggagctgcggctctaccccccggagaatctgaagaactttcttctgat

SEQ ID NO: 96909 - DNA, 90 bp, Homo sapiens
gtatccgggatccagttaggaaccttcacccccccaaggatgaaggacccaagggttacgaagtgacagtgctggtgcgggactcctcca

SEQ ID NO: 96910 - DNA, 100 bp, Homo sapiens
ctggacctggcagatccttcagcaaaagctgtccttacagatctgcaaagcccctgagcccaaaacagtctcctactgcagcccgtccgtgcccgtgcac

SEQ ID NO: 96911 - DNA, 75 bp, Homo sapiens
ctctcttccaaatcctgtagccataaatgtctggctaatggcatttacaggagctgtcttgtcgacggtctcact

SEQ ID NO: 96912 - DNA, 100 bp, Homo sapiens
tataagcgagggaagtcgtgcacgaacaccaagaatgtggcagatcagattgcatttcaagctgctggtggattaacagcccttgaacacatccttcaag

SEQ ID NO: 96913 - DNA, 100 bp, Homo sapiens
ctggccgacgccatcaacaccgagttcaagaacacccgcaccaacgagaaggtggagctggctctgtgggacacagcagggcaggaagactatgatcgac

SEQ ID NO: 96914 - DNA, 75 bp, Homo sapiens
cggagctggcgcggcccctagctttctccttctggtgtggggcccgaggagaactatgccatttttgggtcagga

SEQ ID NO: 96915 - DNA, 100 bp, Homo sapiens
gccagagcagagaaagtgaaactgatcagacgaactacgaacccctggacgggagagtctgccggcggagaatataagagagctggcggtcaccatggca

SEQ ID NO: 96916 - DNA, 114 bp, Homo sapiens
tgggccactggagtcaaggcttgaagatttctatgcaggaccccaaaatgcagaaactcaatgagatatgttgtcatcttccctgttttatggatgaagttctaagtagaggtt

SEQ ID NO: 96917 - DNA, 82 bp, Homo sapiens
gccgccaccacccactccggacacaggtaactaggatttctacctcaaccgcgagacctatgcaaggacggtgtggaccaac

SEQ ID NO: 96918 - DNA, 74 bp, Homo sapiens
gcgagctgcgctggttcaccccgtggtcgaggagtcgaaacctgctcctccaaagccagagcccaagcctaaaa

SEQ ID NO: 96919 - DNA, 90 bp, Homo sapiens
gcaatgaatacaagaagtgtgccactgggggtggcactgaatcaacaagacaagcaactcaattgattaatgctttgatcaaggatccag

SEQ ID NO: 96920 - DNA, 97 bp, Homo sapiens
ctgaggatgaactggcgggtgtggacgccactacagttcatcaacatcaactacgtccctctgaaggagttgcaggagaacccctgccagtggatag

SEQ ID NO: 96921 - DNA, 100 bp, Homo sapiens
ttcaccagtgacccagtcagtgcccttcagttaaagaccaccaggagcacacttgcaagacatctgtatagattctgcttcatccgtgagagagaataag

SEQ ID NO: 96922 - DNA, 75 bp, Homo sapiens
ggagacggcggcagcgctggactaggtggcaggaagtgagctcacaatgactcaagctgccacatagtgttgatt

SEQ ID NO: 96923 - DNA, 75 bp, Homo sapiens
aaagcagttgctgttcgaaagcatcttgagaggaacagaaaggtgtgcctaccgcatgttgccgctgctgtttct

SEQ ID NO: 96924 - DNA, 83 bp, Homo sapiens
cgaagggagaatgacagaagttaaaaacaaccaaacaaaagccaggttgaggcctctaggtaagaacaagagagttggaaagc

SEQ ID NO: 96925 - DNA, 100 bp, Homo sapiens
gaatcgtaggccaggctgatggagagctgaacattactcttccagaagagtataaggatgcatttatgaaagcaaatcctggctacaaatggtgtcctac

SEQ ID NO: 96926 - DNA, 51 bp, Homo sapiens
attcaaacttcaacagaatgtggcaaccagttccgatgaagttaaattccg

SEQ ID NO: 96927 - DNA, 83 bp, Homo sapiens
attctttacctgcttcccaatcccactgatgaggatcagcccatggaagatgagaatgtgcctactgctcctgatcctccaag

SEQ ID NO: 96928 - DNA, 100 bp, Homo sapiens
cagtcaaggaagacccactggagagctgccaggatatcgcagatgaattcagagcacaggagattgatggacaggcccttctcttgctgaaagaagacca

SEQ ID NO: 96929 - DNA, 82 bp, Homo sapiens
attcgagtgaccgagaccgcggccgggaccgaggcaaagactcttggaactgtaacgcccagaaaacctgtcttatctgtca

SEQ ID NO: 96930 - DNA, 50 bp, Homo sapiens
cccaaccgcacggtcaccctgattttttatcaagcagaaatgcatcgaac

SEQ ID NO: 96931 - DNA, 100 bp, Homo sapiens
aaggacatcatcgcctgtggctttgacatcaacaagactttcatattctctgacctggactacatgggtcttgtgaaaatgccattgtgtgctggaaacc

SEQ ID NO: 96932 - DNA, 82 bp, Homo sapiens
catccattctcctgccacccccagacctcctcagctccagctgagcgggctttggacaccatgaactttgatgtgattaagg

SEQ ID NO: 96933 - DNA, 100 bp, Homo sapiens
gaaagaagtgaacgagcttttaagctaacccgggatgctattgagttaaatgcagccaattatacagtgtggtctatgttaacaatgaatgggcaaccag

SEQ ID NO: 96934 - DNA, 75 bp, Homo sapiens
agttcagtgtcatcgtcgcacagtcaggccgaatacatcaagcaatggtaacatctttaaatgaagataatgaaa

SEQ ID NO: 96935 - DNA, 100 bp, Homo sapiens
tgcctccacttctacacggaactgtcctcgacccgtgggtacatcgagtgaaagcattcctcaaactgccacacaaccagccatttctccaccaccaaag

SEQ ID NO: 96936 - DNA, 97 bp, Homo sapiens
gaaaagtacattaaagaaggaaagattgtaccagttgagataaccatcagtttattaaagaggttaagtgggcagaccaacatccacctcagcaaaa

SEQ ID NO: 96937 - DNA, 90 bp, Homo sapiens
ctgcgtctccatcaaccgggccgtgccccagatgcccaccgggatggagaaggaggaggaatcggtatacaaaactaggatatgctggaa

SEQ ID NO: 96938 - DNA, 50 bp, Homo sapiens
ttacactgttggaccaagttttgccagatgagaccctttttgctcttcct

SEQ ID NO: 96939 - DNA, 100 bp, Homo sapiens
ccccaccctgggcagtatagagacgtcggacttcacgggtctcctatggacagaagtgcgggcaaggagctttgttcctccccgatgtcaccctcccaca

SEQ ID NO: 96940 - DNA, 100 bp, Homo sapiens
gtgggggccgccgggctgcggcaagggtgtgaaggagctgtgtctgctgctgcttaaccagtccctcctgcttccatctctgaaacttctcctcgagagc

SEQ ID NO: 96941 - DNA, 90 bp, Homo sapiens
gtgagacacacgccatgctgccctatgaccagtacctgcaccgctttgctgcgtacttccagcagatcaccggcgtaatcaacccagcgt

SEQ ID NO: 96942 - DNA, 100 bp, Homo sapiens
aaggctggtttgagcgagtgttcataggagagtttgcttacacttacgctgccatgtatgacaaaggacccttccgggccattgcaatcatggaagtagc

SEQ ID NO: 96943 - DNA, 89 bp, Homo sapiens
ggacattattgcgcgtggaacggctgcttttggaagatttcaacactacacttgcacaatgtctttgaaaccaagagtagtagattttg

SEQ ID NO: 96944 - DNA, 75 bp, Homo sapiens
cccgcgcacagctgctcccttcgccttcgccctttccacctcgcggcagttcgcgtgagtgcatctccatccacg

SEQ ID NO: 96945 - DNA, 50 bp, Homo sapiens
ttctgaggcctcctcagccatgtggaacttagagacggggttttaccatg

SEQ ID NO: 96946 - DNA, 100 bp, Homo sapiens
agcaagcggcgtggacgaccgttgctgagctggtgtggaacgtctgtgatcagggaggttcagagaaaaggcttcaattctccacaagatcgccaagaag

SEQ ID NO: 96947 - DNA, 75 bp, Homo sapiens
tatagttcttttgtaaatctctttcgttttaacaaaggcttagaagacaatacgtcaggaaatatgaaggagaag

SEQ ID NO: 96948 - DNA, 131 bp, Homo sapiens
gcaccgccccgcccccgcgcggccggcgcccgagctcccctcccctctccagcacgcgagtgtcgctgaagaaaaggtgactggtctcatgagccctgaagaatgaactcagaggaggttgtttacatgag

SEQ ID NO: 96949 - DNA, 74 bp, Homo sapiens
gcaggcgagattgcctgacccaggcctgctcggccctcacagggtatttgaaatatctcaccaaaaaatatttg

SEQ ID NO: 96950 - DNA, 75 bp, Homo sapiens
cgtctgcgagccgtcctcaagcgcagccgcatccccatgaacctatgaacgggaagccctgaagaaaaagtttat

SEQ ID NO: 96951 - DNA, 75 bp, Homo sapiens
tggtgacattgtatcattggtgtctatcagtcttggaaatctgtcttataatagcaatgaaacatttaaatgaca

SEQ ID NO: 96952 - DNA, 50 bp, Homo sapiens
accagccagcagctccattgacaagactgggccagtgccattcgcgtcgc

SEQ ID NO: 96953 - DNA, 98 bp, Homo sapiens
aacccatggtcaattaacgaggcagtttctagctactgcacgtacttcataaagcaggactctaaaagctttggggagactcatgcatctgtatgccg

SEQ ID NO: 96954 - DNA, 95 bp, Homo sapiens
tggtgatggagattttgatgtggatgatgccaaagttttattagtgtgtgttttaatagaaaagttgtcactttccaaaatgccctttagaggtg

SEQ ID NO: 96955 - DNA, 75 bp, Homo sapiens
gacggtgtggccaagatgagccccaaggacctgtttggtggcagtgctccttttggacttttctctaggtttggc

SEQ ID NO: 96956 - DNA, 100 bp, Homo sapiens
ggttctgtcaacaaaatggtccacaaaccaagtgggcaaataatggcagttaaagcagagatcctacaagaatccaggatgatgatcccagattgccagc

SEQ ID NO: 96957 - DNA, 50 bp, Homo sapiens
ccagcacacactgcaaggagatcagagctgaagccatttattggtatctt

SEQ ID NO: 96958 - DNA, 101 bp, Homo sapiens
cgtgtcaggcggagagacccgccgccaggatttggtgctatggagaaatttttggtagaatataagagtgcagtggagaagaaactggcagagtacaaatg

SEQ ID NO: 96959 - DNA, 75 bp, Homo sapiens
gacttcttgaaaggcaacattaagaaggagctgtttaaggacctgaagaagtacggggctaccactgtggtgcgt

SEQ ID NO: 96960 - DNA, 98 bp, Homo sapiens
aaaactctatgaaagccttttaccctttgctactggagaacatggatctatggaggccaagatcaaggctcgagatcttcgcgggaagaagaaggagg

SEQ ID NO: 96961 - DNA, 123 bp, Homo sapiens
gtcttgaatgactggaaactgattggaaactctttgggaaagccactcgaaaaggatgtacagttacccagcacgtgtacctcctcctcctcctattgctcgggctgtagtgccctcgaaacg

SEQ ID NO: 96962 - DNA, 50 bp, Homo sapiens
tcatttttcttgaaaaaggacaaggtgctaaagtcagagcagaaatttat

SEQ ID NO: 96963 - DNA, 75 bp, Homo sapiens
gctgcaacatagagctgacattaactgtcaggaatatgaagacaaggctggaagacctagcaagccaccctctcc

SEQ ID NO: 96964 - DNA, 100 bp, Homo sapiens
ccagccaacgatgaccagtccaggcccagcctctcgaatgggcacacctgtgtagaatcatgtcaaccctgccatggacttcacgcagactccacctggg

SEQ ID NO: 96965 - DNA, 96 bp, Homo sapiens
gcccctacgggagcgacaagccttggcctagcctcctcgacaaggagagggaggagagcctgcggcagaaatattgatgatgttaagaagttcaaa

SEQ ID NO: 96966 - DNA, 98 bp, Homo sapiens
gtcttcccatctcaaccttccaagtagctggaactacagaggaatcctagctcgtaatattccagaagataatgctgacatggccagacttgatttca

SEQ ID NO: 96967 - DNA, 90 bp, Homo sapiens
ctcagcctctgcccaaagaaagaaggaggcactaaccaggctgtatctggacaaggccaccttaatatggaatggaaatgctgtttcagg

SEQ ID NO: 96968 - DNA, 100 bp, Homo sapiens
cgcaggcccaggccgccccgttccccgagctgtgcagataaactcatcctgaaagtcgctgttgttctcctgctgagcaagaatggaggccccactggtg

SEQ ID NO: 96969 - DNA, 73 bp, Homo sapiens
acccgctcagaagatcctcaccaagttcaaacaatgacctgagaattaatttatggcacttagaaatcacaga

SEQ ID NO: 96970 - DNA, 75 bp, Homo sapiens
ccaaaattatcaacaccaaaaagctttctgctaggggtgtgattggagacattatgtgggcaaagaatatttcag

SEQ ID NO: 96971 - DNA, 50 bp, Homo sapiens
tggagcccaaagacccctggagacatggccgccatggcatcagatgaagg

SEQ ID NO: 96972 - DNA, 92 bp, Homo sapiens
agacgcagccgtagacaccagctccgaaatcaccaccaagacctgcctagagctggaacgttacctccagagcgagccctgctatgtttcag

SEQ ID NO: 96973 - DNA, 82 bp, Homo sapiens
ctccggcgcatcatggcggctggccgggcccaggtcccttcctccgagcttactccacgggaacagcctctagataatctga

SEQ ID NO: 96974 - DNA, 98 bp, Homo sapiens
gggagccggagcgagagcgcgcgggcgcggccgacagccttggcccctccgttgtgggtttggctcggtactcccatgtctcccagcacagcccgtcc

SEQ ID NO: 96975 - DNA, 100 bp, Homo sapiens
cgcagagccgagtgcagaagatctgggtgcccgtggaccacaggccctcgttgcccagatgttgatgataattagaagcatgctttccactgaacttccc

SEQ ID NO: 96976 - DNA, 75 bp, Homo sapiens
cgtctgtgcggctgcgtggggctcggccgcgcggactgaaggagactgaagcggaaggcagacagattgctgcca

SEQ ID NO: 96977 - DNA, 90 bp, Homo sapiens
ggagacgccgtggcagcctgaacggagtgtgcgacggattgggagacggaatcagtccccaatgcctggaaattcctcattggattactg

SEQ ID NO: 96978 - DNA, 100 bp, Homo sapiens
ctgtggctaccatgttctctcgcgcgggtgtcgctgggctgtcggcctggaccttgcagccgcaatgttgaaaatgacccacatttcatcatttatctac

SEQ ID NO: 96979 - DNA, 100 bp, Homo sapiens
tgccagttcctggtgccgcagcagggcagcccgcactcgctgccgccgccactcacgctccactgcaacatcacggcatctctcgggacaactggcacaa

SEQ ID NO: 96980 - DNA, 51 bp, Homo sapiens
gcccgtggtccttctccatattcgagtgaaaatgcctcgtgtaaaagcagc

SEQ ID NO: 96981 - DNA, 51 bp, Homo sapiens
ctctcttgatttcacacattgtgcaatgaccctaatcgactgcattatgac

SEQ ID NO: 96982 - DNA, 75 bp, Homo sapiens
aaaattcacccttgtagagtcattcctgcctttgagcggactcccttttaaggacatggacatcttccagcaaca

SEQ ID NO: 96983 - DNA, 50 bp, Homo sapiens
cgggacccgcccgcccgcgggaggctaaagatacttcaagtgaagaagtt

SEQ ID NO: 96984 - DNA, 100 bp, Homo sapiens
tccatgctacctgattgcccccgggtctcagcagaaggagcccagcgaagtgccaacacctaagagacctcggggccgaccaaagggaagcaaaaacaag

SEQ ID NO: 96985 - DNA, 101 bp, Homo sapiens
caacagtttacagcccttccagatacagctaccaggaatgttacgttcataacttactaaggattagtgtatattttccaaccttgaggcatgaaattctg

SEQ ID NO: 96986 - DNA, 98 bp, Homo sapiens
cacaccctgcgctgccctgtcctgcgcgagtggagctctgaagaagctctgagcggagttgtgttcttccccaggttaccttgaggatagttttgtaa

SEQ ID NO: 96987 - DNA, 74 bp, Homo sapiens
ttcagggaagatgggaggcgaggagaagccgaggagaccttgcctattttgatggacttagtgagactattctt

SEQ ID NO: 96988 - DNA, 90 bp, Homo sapiens
aaactggaccaccatcctgaatggtttaacgtgtacaacaagatacaagaggaggaagtagctgtcgtggcctgaagaaattcatggggg

SEQ ID NO: 96989 - DNA, 83 bp, Homo sapiens
gacatcatcaagcacccgatggacctcagcaccgtgaaagtctgtgcagacttttgcagacaaatcaaaacaagaagctctga

SEQ ID NO: 96990 - DNA, 98 bp, Homo sapiens
taagtccctcaccagcaagttcatgaccacattcagtcagctccgagatatcaatgatgtcaaacggctgaaacctggctacttagaagctactgtgg

SEQ ID NO: 96991 - DNA, 101 bp, Homo sapiens
tcattgcacctatctcccccatctcattgccacggctgaaccctccttctcaatcttggaacagcacccccttctttaagatgatgaggagtctgatgagg

SEQ ID NO: 96992 - DNA, 100 bp, Homo sapiens
ccctaacccacccaacctcaccaagaagatgaagaagattgtggatgccgtgatcaagtacaaggacagtttgtttcgacgccggaccgcgtaagagacg

SEQ ID NO: 96993 - DNA, 75 bp, Homo sapiens
cagtggtcgcttcttctccttgggagcactcaacatcagtgatagaaccatacctcagccccccattcttcagct

SEQ ID NO: 96994 - DNA, 82 bp, Homo sapiens
tccacaccttcatccggcacaagcggaccatggtcaagactccatcaagaatgctggaggaagggtgtttgtccactgccag

SEQ ID NO: 96995 - DNA, 50 bp, Homo sapiens
tccggagcagccggggtcggagcggatatgaggccccaggattcctggcg

SEQ ID NO: 96996 - DNA, 100 bp, Homo sapiens
aaaaaatctgggaggttgaacttattaattacctggagtagaacagaaaaattattatgtctgtgttcccttgggactcattggaaattgtacagtgaca

SEQ ID NO: 96997 - DNA, 100 bp, Homo sapiens
cgaaagacccggctttacgtggatcagacactgcgagagcgggaggctggcaccgagattgttgacgggaacctgaagatgaccctgggcatgatctgga

SEQ ID NO: 96998 - DNA, 101 bp, Homo sapiens
caacgaaatcccctcgcttatcctgtgggggccgccgggctgcggcaaggaggcccagaagattaacaatggctcaagccaggcggatggcactctcaaac

SEQ ID NO: 96999 - DNA, 102 bp, Homo sapiens
acgtgcaaatgtggccgtggtttctggtgcaccacttcaggggcctggtctgccacctcagaacttttcaatgtctgtcacagttccagtgaccagccccaa

SEQ ID NO: 97000 - DNA, 100 bp, Homo sapiens
gagtgcctcaaagtctacctgagcgcccaggtggtgcccaggcaacatgggtgactggagcgccttaggcaaactccttgacaaggttcaagcctactca

SEQ ID NO: 97001 - DNA, 71 bp, Homo sapiens
tgtattgttgagaccagcacaagccaaaggtgctcctatcagtcgcagatatggccagtacactatgaacc

SEQ ID NO: 97002 - DNA, 75 bp, Homo sapiens
tgagggtctccagggttctttggggcccgaggacatggatttgattgacatactttggaggcaagatatagatct

SEQ ID NO: 97003 - DNA, 75 bp, Homo sapiens
aagaattcgtcatcacgcatcacaggccgcgtctttgacggtggagccgccaccaaaatgcagattttcgtgaaa

SEQ ID NO: 97004 - DNA, 96 bp, Homo sapiens
ctccgagctcgatccgctgctcgcacgggagccagctgggtggtgttggagagcacaatggctgaacaagtccttcctcaggctttgtatttgagc

SEQ ID NO: 97005 - DNA, 90 bp, Homo sapiens
cggcagaagggaggcacttgagcgttacatccttactattcaaagtgccatccacagacctgctgatgggcagcatgagcatcacctggg

SEQ ID NO: 97006 - DNA, 83 bp, Homo sapiens
ggtgaaactacatgttcagaaaatgatctcaatgccacccaccaacactgtgttttggccggttcacaacctcggtttagttc

SEQ ID NO: 97007 - DNA, 100 bp, Homo sapiens
ctttgggaaagccactcgaaaaggttgacctgacagttcaagaaaaggagaaatatcttaatgtgtctcgctggttttgtcacattcagcattatccagg

SEQ ID NO: 97008 - DNA, 90 bp, Homo sapiens
gtttccttgcccggggccgcgggaaggccgaccgactgccgcgacagttgatattcataaagagaaagttgcaagaagagaaattggtat

SEQ ID NO: 97009 - DNA, 89 bp, Homo sapiens
cttcagcaagctattgtcacacctttgaaaccaggtggagttggcatgaacttaacagcagcagatactgtgatttttgttgacagtga

SEQ ID NO: 97010 - DNA, 75 bp, Homo sapiens
cctcctccacctccggcttttgggggatcactgtcctctctcggcagcaggagccaagccgccatggcctaccac

SEQ ID NO: 97011 - DNA, 58 bp, Homo sapiens
ctggtggggctctactgcgacaaggtattgttgcagcatctggcagtgagactgagga

SEQ ID NO: 97012 - DNA, 75 bp, Homo sapiens
gtaaagcacagcagcacatcgagacttgctggaagcagcttgaatctgtgccaggaccattgacaccagaaatgg

SEQ ID NO: 97013 - DNA, 83 bp, Homo sapiens
acctatcaaaaagaaacatttgtttgagaattccaggcttctgcagcctccaaaagtttggtgccctggttgtcagatgttgg

SEQ ID NO: 97014 - DNA, 100 bp, Homo sapiens
caccagatgaaccacagcatggacgcaggttaccttccgaacaagaatctatcactgtaatattaacagccaaggtgtgatctgtctggacatcttaaag

SEQ ID NO: 97015 - DNA, 117 bp, Homo sapiens
ggagggcgagcgaggaggatggcggagtcggggctcctgacgcttagaccatgctcagcctccaagcagccttgtcatcgacaaagaatctgaagtttacaagatgcttcaggagaa

SEQ ID NO: 97016 - DNA, 98 bp, Homo sapiens
tgcagatcggcgccgttacagacgtggctactatggaaggcgccgtggccctccccggaatgtggaaaaggattattcatacctgaaggagatatgtg

SEQ ID NO: 97017 - DNA, 75 bp, Homo sapiens
tccagcttctgctgtccttctttgtggagagcaagtctcttcaagaaaatgaggaggaggagattgggaacctag

SEQ ID NO: 97018 - DNA, 100 bp, Homo sapiens
gccattttgagcaatggggaacgctcacggactgtgtgccctgtgaagccagaggagatggactggtctgagctatacccagagttcttcgctccactca

SEQ ID NO: 97019 - DNA, 78 bp, Homo sapiens
atggaccaacttctttggcaagtggacattttactggctcaaagtcctgtgaagataaatcagattagcttggatgaa

SEQ ID NO: 97020 - DNA, 100 bp, Homo sapiens
ctgaacaggaggagcggcagggcatgaaggtccaggcgctggccaggtacaccaggggttggaaaaaccacactaggcaaagaacttgcgtcaaaatcag

SEQ ID NO: 97021 - DNA, 100 bp, Homo sapiens
cttcaaacgggccagcaacgcatttaagacctggagcaggccgggcacaacttctacaacgtggacatgagctacttgaagaggctatgtggtaccttcc

SEQ ID NO: 97022 - DNA, 100 bp, Homo sapiens
ctgcgatccgcgcatataacggcccaacacagagatactttcattgaagaacgctatggaaaatataacatcagtgatcctttaatggctctacagagag

SEQ ID NO: 97023 - DNA, 100 bp, Homo sapiens
tgtggacgttgtctaaatttcggtagccatggcacaagaatatagttatgaagacagtatggagtttccagaccatagtagacatttgctacagtgtctg

SEQ ID NO: 97024 - DNA, 88 bp, Homo sapiens
aggccaagtatccgccagtcaataggaagtacgagttacctccctgcacttggctattcaaaacgggtccatctgatgaatcctatgg

SEQ ID NO: 97025 - DNA, 87 bp, Homo sapiens
ttgccaatgtgcaaagctgcagaaaccacagtggtagagcttaccgtgacaatcagagctttgttgcagaacctgaaggaaaagatc

SEQ ID NO: 97026 - DNA, 75 bp, Homo sapiens
ttcacgctgctcacgggccaggaacccgcccagcgctgctccatgatcctcggggaggaagttgccttgtactgt

SEQ ID NO: 97027 - DNA, 100 bp, Homo sapiens
cctggcttctcaggcagacctggtgtctccagctgatgatttgtccctgtctgaaggtccccagtctatgtgaggatctcctgtcttctgttgaccagcc

SEQ ID NO: 97028 - DNA, 100 bp, Homo sapiens
gtgagacaacaccggggggcactggggccacagctgctgctcaactggggagtacaaattgccaaggtcatgccacctcagaacctggaaagggcagatg

SEQ ID NO: 97029 - DNA, 75 bp, Homo sapiens
agcaaagtcagaggaattcagatttggaatcaaggctgcagaggagcgagctggacgccactgtggggctctgag

SEQ ID NO: 97030 - DNA, 80 bp, Homo sapiens
tcttgcctgtgtcccacttgttcgcggcctatagacccaacatgagtgaagtttcctgcaagaaacgggacgactatttg

SEQ ID NO: 97031 - DNA, 100 bp, Homo sapiens
cttacccctggtgcagaacgatcctcgaattcagcacagctctgcagtccttcatccaagcctacgccacctaccccagggagctgaagcacatcttcca

SEQ ID NO: 97032 - DNA, 122 bp, Homo sapiens
cttgtatgcctcaatttgctggatttaagcactgctgcactttatgagatttggagcaagaggtggtggtggccttcccccgaagaaatttggtaatcctggggagcgtttgcgtaaaaaaa

SEQ ID NO: 97033 - DNA, 100 bp, Homo sapiens
cacgtctcctccacttacgtggaggagctcaaggggatgtcgctgctggttcgggcagagtccgacggttcttgcacgcattgcaaatgccacgaggcca

SEQ ID NO: 97034 - DNA, 98 bp, Homo sapiens
aaaggagtcagggatggctcttcctcaggacgccaacaaggagagcagcaagacctccaagccacacaaggtgaccaaggagcaccgggagcggcccc

SEQ ID NO: 97035 - DNA, 100 bp, Homo sapiens
aggattagaaagaggatctttaataatcctgaacattccttgatgggcctagaacagttttctcatgtttggatggatctttatttcacgaacagtccaa

SEQ ID NO: 97036 - DNA, 100 bp, Homo sapiens
gctttcctgtaccgaacagatttgcttgttgggtcgaacttgtggctattcatttattctcaccaggggcatgctgttgaagcgaagtggcaaatcgttg

SEQ ID NO: 97037 - DNA, 49 bp, Homo sapiens
ctgctagacctcccagatactatagattgtatccagccttcagtcatca

SEQ ID NO: 97038 - DNA, 120 bp, Homo sapiens
catggcataaggaactctatcccaggaatacagctttgcattagaatctccctggaaaaggagacatgaatgtctgcaatgatacttcctgacaagaagttgatacaagaaaaggaaagg

SEQ ID NO: 97039 - DNA, 75 bp, Homo sapiens
gatgaggatgaagacctttatgatgatccacttctacttattaaatacgagaattagaactgcagcgtcagcgtg

SEQ ID NO: 97040 - DNA, 75 bp, Homo sapiens
cttaccttaaaccttttaagcaaggaaattgaactaagaaatggagaggtaagaactcagggccctatcctcaca

SEQ ID NO: 97041 - DNA, 100 bp, Homo sapiens
ggagagtatgtccagctacaggaaaaacaagtggattgttgaaggccggctccggagtttttccagaaaggaggagtcaaggaagcccttagtgaacgag

SEQ ID NO: 97042 - DNA, 100 bp, Homo sapiens
aaggaagccacgtgcagacatctacaaccttcgatctcctgacgagaaccactcgttttgactattattttatcactctttgtgaaacttcacaatgttc

SEQ ID NO: 97043 - DNA, 82 bp, Homo sapiens
taccgcaactctcagttcgagagtaaagggagtggggaaggccagggccagattctgcagcgcttcccagagaaggactggg

SEQ ID NO: 97044 - DNA, 82 bp, Homo sapiens
cctgggccgggccccaccggacgcagttggaattgatcacaccttttcagttgtacttcaatcctgaattaatctttaaaca

SEQ ID NO: 97045 - DNA, 75 bp, Homo sapiens
ggaggctcagttcaaagacctgttcttaaaaaaaggccccttcacagatgtagtcactacaaatcttaaattgcg

SEQ ID NO: 97046 - DNA, 83 bp, Homo sapiens
atctgtcttcggtggactccttcggcagtccacccaccgccgccgcctcccagtgccctctggtggtcagaagatgctgtgct

SEQ ID NO: 97047 - DNA, 74 bp, Homo sapiens
cctccatcttcaacactctgaagagcatactaaataagcttactcctgaaaagtttgacaagctatgccttgag

SEQ ID NO: 97048 - DNA, 74 bp, Homo sapiens
caagctgagcttgccgcacaaaaagctagagaggcatgtggagaccccaaggcaaaaccatcctatcttatcga

SEQ ID NO: 97049 - DNA, 75 bp, Homo sapiens
gcggcggtggcgagaggtgcggcgaaggaggcagaggcacttatgcttgtcagcaccagcaggcagctggctccg

SEQ ID NO: 97050 - DNA, 99 bp, Homo sapiens
gaaatcactgatggcatccacagctcctcagacattaatattttatataatgatgcagtagaatcctgcattcaggtgtgtttccattgtagaaaacct

SEQ ID NO: 97051 - DNA, 90 bp, Homo sapiens
atgaactccaagccaaaatcacagctttgagtgagaaacagacttaattcagtgcacaaatgagatgaatgtgaacatcccacagttggc

SEQ ID NO: 97052 - DNA, 82 bp, Homo sapiens
tgtcctcaactttctgggcgttcatgatcctggccagcctgctcatcgcctactgcaggggatatgagactttctactcgga

SEQ ID NO: 97053 - DNA, 101 bp, Homo sapiens
ggcgagcccagcgaagtcttcatcaaccgggaccgtggcttcggcttcatccgcttgacaatgcagatcttcgtgaagactctgactggtaagaccatcac

SEQ ID NO: 97054 - DNA, 100 bp, Homo sapiens
ccatgttgtttttaaggatttgcgtattactcagcaaaaaatcaaatacagtagaggacccttttcactcttggagccacaagtatatggttatgatgac

SEQ ID NO: 97055 - DNA, 82 bp, Homo sapiens
atttaaccaacctcagctttacaaaccctgaatttataactgaaatccacattcatctcaatggaaggatcctgccttaagt

SEQ ID NO: 97056 - DNA, 50 bp, Homo sapiens
ggggactcgatggaccgcggctggcaaatatgaggccccaggattcctgg

SEQ ID NO: 97057 - DNA, 95 bp, Homo sapiens
attagcctaacaagatggaagcaggtttaaaattttacataagaagttacctttttcaggaaacagatattgatgacagatatggagatttggat

SEQ ID NO: 97058 - DNA, 75 bp, Homo sapiens
ctggaccggaccggacagcaccaggaagcccggcaggcaccctggaggagaagaggttctgctggaacaagctgg

SEQ ID NO: 97059 - DNA, 51 bp, Homo sapiens
actccacctcctggtgaagaaagcaaacatgggacttctcctcttgcatgc

SEQ ID NO: 97060 - DNA, 82 bp, Homo sapiens
tcaagcagaatgtgatttgcttgaagatatgaggtaatcatagcctcctggtgtcgcacatccatgggaataatgaatttat

SEQ ID NO: 97061 - DNA, 105 bp, Homo sapiens
ctacagttaaccagccagctgatagcagatgcatgagtgagcccagctgagagcagaacactgatatttgcatttaatggggaacaaaagatgaagaaggaaaag

SEQ ID NO: 97062 - DNA, 90 bp, Homo sapiens
cctgccccggcttcaggatttacacagacgtggggcgatgcttgtgaccctgcagctcctcaaagttctgggaacactttttatttatgt

SEQ ID NO: 97063 - DNA, 95 bp, Homo sapiens
tgttggagactatgcaaaacaagtttatcaggcaccgaggaagagaaccaatggcagaggccacatgtgcaagcaagatgggagtctggagagcc

SEQ ID NO: 97064 - DNA, 51 bp, Homo sapiens
agtataataccaagaaagccccacttggaatttgctgacacaatatcttcc

SEQ ID NO: 97065 - DNA, 95 bp, Homo sapiens
agatcagtggcacggaagctccatccatatggggttccagaaactttagcagttgcagtgcagaggactttgagaagttaactttaaataaagga

SEQ ID NO: 97066 - DNA, 83 bp, Homo sapiens
cttcgacttgagcgaagttttatgcaagaatccacattcatctcaatggaaggatcctgccttaagtcaacttatttgttttt

SEQ ID NO: 97067 - DNA, 50 bp, Homo sapiens
tagaactccaaggagaaaggcggcgagcttgtggacaaatgtataggatc

SEQ ID NO: 97068 - DNA, 82 bp, Homo sapiens
cgcgcggcccctcctccccggcgcctcccagacttcccaagtaagaagcggaagaggagccgctggaaccaagacacaatgg

SEQ ID NO: 97069 - DNA, 100 bp, Homo sapiens
gatggaggggccggggctgggctcgcagggtaagatgatcatgcaggataaactggagaaggagcggaatgatgctaagaacgcagtggaggaatatgtg

SEQ ID NO: 97070 - DNA, 75 bp, Homo sapiens
ctccgagccctaccagtacaccttggccagcactggtgtggatgaggtcaccattgtcaacattttgaccaaccg

SEQ ID NO: 97071 - DNA, 75 bp, Homo sapiens
ggccgagccgggatctcaggtcctcgggggcggcggccacgccaaggacggtgttctcaggcgctgtggtctcac

SEQ ID NO: 97072 - DNA, 100 bp, Homo sapiens
agaagacgctttacccgactctttgggccgttatctcacctgcgcaaaccatgcaggatgatttactgatggacaaaagcaaaacccagccccagcccca

SEQ ID NO: 97073 - DNA, 135 bp, Homo sapiens
gcctgttcagtactgtgggtgatatttgcctttagtgcactcttctccttcacagtaaagtggctggttttagctaaagaagatactgaggcagctattcaatcaatattatacaaagaaaattctgtaattaag

SEQ ID NO: 97074 - DNA, 80 bp, Homo sapiens
taaccttagccacaaagtcaaagatctattccagaggggagcttcaccacttcattgacggctttaatgaagagaaaagc

SEQ ID NO: 97075 - DNA, 100 bp, Homo sapiens
tcaactgagagagatgcttaaaaatcaccagttactttaatgatgattccgtataggtcagtgatcatcccaatcaaaaagctgagcaatgcaataatca

SEQ ID NO: 97076 - DNA, 100 bp, Homo sapiens
gccaaggtggatattgatgaccacacagacctcgccattgagtatgaggtacatcaggaacgtctctatcaagaatacaatttcagcaaggctgagggcc

SEQ ID NO: 97077 - DNA, 100 bp, Homo sapiens
agagaactactcaaacaggtcgcagcattatcaaagggttaatttggagtggcccctggagtcagtttcctacaccatccgaggccccacccagcacgag

SEQ ID NO: 97078 - DNA, 126 bp, Homo sapiens
tccatcttcacttcagggagcactcaaaaagagatcagcttttgaagatctcactaatagagagatcatcattgcctgaatttagctttgtgactgcaagagcaagaccagttcctgtctggagac

SEQ ID NO: 97079 - DNA, 100 bp, Homo sapiens
cttcggcgcgggactcaagtacaactcccggcacgaggctcttgtcaggatggtgaagctgttcatcggaaacctgccccgggaggctacagagcaggag

SEQ ID NO: 97080 - DNA, 99 bp, Homo sapiens
cgggccggagtacgtcgttcccgctgcgctaggggaagcgggcaggagtgtttctcaggagctatcagaaactatcctcaccatggtagccaattgcag

SEQ ID NO: 97081 - DNA, 100 bp, Homo sapiens
ggcaacctgaacttgcctaaacctcagcagatagggacttgtacagcaaaagcacagcagccatgagcacttacacaggcatttttactgaccaagttct

SEQ ID NO: 97082 - DNA, 90 bp, Homo sapiens
agggcctcaccaccgaggagaccaagtaccttcgagtggccgaagcactccacgatctcattgactcagatgagctgctggatccagaag

SEQ ID NO: 97083 - DNA, 75 bp, Homo sapiens
cagcattcctgaaatacatccaggaaagacatggagattctcttaaaaagaggtttttcattagtcaatacagtg

SEQ ID NO: 97084 - DNA, 100 bp, Homo sapiens
actactttgacctgccaggagctcttctgtgtgccagggtggtggactatttaacaaaagttgggaagagcggacattcctctgtggaagatgcccaggc

SEQ ID NO: 97085 - DNA, 83 bp, Homo sapiens
cgaggcggcgccgccgggctgtggaggcacgtcctcgacctcagttgccacgtgcacatgctggtgccttccaggtcggtctt

SEQ ID NO: 97086 - DNA, 76 bp, Homo sapiens
tttgcattggataaagcagccccaaagcctccctttcagtcacacttctgtggaaatactcttaattctaaggaaa

SEQ ID NO: 97087 - DNA, 100 bp, Homo sapiens
gaagattttgaagacaatcgtcacttatacagacctgcaggctgggacaatgaaaagaaaatagctattttacatgaaaattttacaaccgtgaagccgg

SEQ ID NO: 97088 - DNA, 97 bp, Homo sapiens
caggccagcatccttcagaaaaagcatccccgaggaggaagacgaatcgttaaacatctgaaagggtcagactcggggtctaaatgtgagaccaaga

SEQ ID NO: 97089 - DNA, 50 bp, Homo sapiens
cgggagtctgagctcaggttcatgttggacacgagttgccgctggttgtc

SEQ ID NO: 97090 - DNA, 80 bp, Homo sapiens
aacgcaggagacacaagaagcggatccagtataaggatgcatttatgaaagcaaatcctggctacaaatggtgtcctacc

SEQ ID NO: 97091 - DNA, 100 bp, Homo sapiens
tttggttgaagttggagaagtatccaatagggatattgtagaaactgtctttaacctggtcaaaatgcagatcttcgtgaaaacccttaccggcaagacc

SEQ ID NO: 97092 - DNA, 101 bp, Homo sapiens
atggtgcagaaataccagtccccagtgagggtgtacaaatacccctttgaattaattatggctgagacgcaggtcagaatggaaatgggctgcagaccggg

SEQ ID NO: 97093 - DNA, 83 bp, Homo sapiens
cggcggcgctgagccagcggggccgggactttgaacatgtcggggatcgccctcagcagactcgcccaggagaggaaagcatg

SEQ ID NO: 97094 - DNA, 88 bp, Homo sapiens
catttgccgaagagcttcagaaagaaaaggggaagatagtgatgtactcagtataaatgcagatgcttatgacagcgacatagaaggc

SEQ ID NO: 97095 - DNA, 75 bp, Homo sapiens
cccctggagggggcagtcccgggagaacctgcggcggccggagcgcagcccctgtcaaagggaacaggaagcagt

SEQ ID NO: 97096 - DNA, 75 bp, Homo sapiens
aggggaggcagaagtcatgacaggcgaggtgggttctgagaatgaactctggaagcccagccagggacaatgcac

SEQ ID NO: 97097 - DNA, 82 bp, Homo sapiens
gatttctccgcctcagcccaacggggaggtacaccaggggttggaaaaaccacactaggcaaagaacttgcgtcaaaatcag

SEQ ID NO: 97098 - DNA, 74 bp, Homo sapiens
ggaacaggtaatgagaatcttcgccttgcggagggtgtgaagacagagaatgaccacatcaacctgaaggtggc

SEQ ID NO: 97099 - DNA, 100 bp, Homo sapiens
agcagactcagaatgagctcaccagggagctgaaactcaagttcagctctatgaagattttgctaagtctcgtgccaagtgtgatgttgatgaaacagtt

SEQ ID NO: 97100 - DNA, 100 bp, Homo sapiens
agcagcaccaggctctgcagcggcaacccccagcggcttaagccatggcggggggccctcagcctcttggccttgaacgggctgttcatcttgattcaca

SEQ ID NO: 97101 - DNA, 51 bp, Homo sapiens
attcgtgtctacctcatgcaaacttcagagtatgcccagctttttgcagca

SEQ ID NO: 97102 - DNA, 100 bp, Homo sapiens
cacaaaaattccacctctgagtcctcaactgctgaccccggggtcagtgtgggactacaatactggcagagtgggagcaccattagtttgctgtgaaatc

SEQ ID NO: 97103 - DNA, 80 bp, Homo sapiens
cagcagtcggctgacaggtgttttctttgtggacatctgatcatggacatggccttgtacctaatagcaactaatggaac

SEQ ID NO: 97104 - DNA, 75 bp, Homo sapiens
tcgccctaatcccccaacgaggaaggaaggagcagttggttcaatctctgggaccatggccaacctggagcgcac

SEQ ID NO: 97105 - DNA, 100 bp, Homo sapiens
ttcgctgccgactgcatttcctcagtcacgggcctagaactccaaggagaaaggcggcgggtgacgagaacaagtcagtgcgcgaccgtttcaacgcccg

SEQ ID NO: 97106 - DNA, 100 bp, Homo sapiens
tgttatcagtgatggctcttctctggaagatcttgtggttgccaacttggcctgttccatctcaaataatgaagaaggtgtaaagcttgttcgaatgtct

SEQ ID NO: 97107 - DNA, 75 bp, Homo sapiens
cggaaagcagcgtcaggagccatagtacctacagcagcactccagatgagggttactaccagggtggaaaatttc

SEQ ID NO: 97108 - DNA, 82 bp, Homo sapiens
gtcccgaccctggccgccccgagcggagcctggaggacactcatgaggaccatgatacttccactgagaatacagacgagtc

SEQ ID NO: 97109 - DNA, 96 bp, Homo sapiens
gtttgctcgagggaacgtggtcggaggccgattcgacacagacaaggctgcccaggctttgctgaggttctgcagaccttcagcacctgcaagggg

SEQ ID NO: 97110 - DNA, 100 bp, Homo sapiens
agttcattgcaaatctgcaaggggtaaatgagggtgttgatttctccaaggatctgctgaaactcaacatgaactctgctcctacattcatgcattttcc

SEQ ID NO: 97111 - DNA, 50 bp, Homo sapiens
aacactggaatcctactttttctgcttgcattgatgacaatgttgatatg

SEQ ID NO: 97112 - DNA, 74 bp, Homo sapiens
gtgagggtgtttgatctcatgggaagtgaactctttgtcatttccccgggcagcggtcttaattctttttatga

SEQ ID NO: 97113 - DNA, 98 bp, Homo sapiens
tggagggctgagcagtcaactcaaatgcaagtccaagaggaggaggaggcggaggtccaagcggaaagatttattcaggagattgagcatgctctggg

SEQ ID NO: 97114 - DNA, 100 bp, Homo sapiens
agctcgccaagcataatatgtatgccaaagcagcagccttctcgacagccttttactgtgaacaggtcctatgcacagtcaattggaatccctgagtgac

SEQ ID NO: 97115 - DNA, 75 bp, Homo sapiens
ttatggataataatggaatatcttggtggaggctccgcactagatctagagcagcagccaagctggacagatgac

SEQ ID NO: 97116 - DNA, 51 bp, Homo sapiens
aactgccccaaggatttgcaaggagtcagtggatcggtggggaaaatgctg

SEQ ID NO: 97117 - DNA, 100 bp, Homo sapiens
ggcagatggtagtgacagtctagagggccctcaaggtacaccagggctgataggccagccaggagccaagggggagcctggtgagttttatttcgacttg

SEQ ID NO: 97118 - DNA, 95 bp, Homo sapiens
acgggaggagcgtctgagcaggagacagagtgcaagacgatgacttgcaaaatgtcgcagctggaacgcaacatagagaccatcatcaacacctt

SEQ ID NO: 97119 - DNA, 98 bp, Homo sapiens
tgcaaactgcagtcaccaagtaaaacaagttgtcaggggagtgtccattggcagcacctgcctcctgagtgtctcccaggccatcaccatcagcccca

SEQ ID NO: 97120 - DNA, 88 bp, Homo sapiens
gccaatttctaaaaagccttggccttgaacaccttcgggatatctttgaaacagaacaggaagatgagtgtgcaggctgtacggatgg

SEQ ID NO: 97121 - DNA, 98 bp, Homo sapiens
gacgaccggttcgtcgcctccttgcccgtgaccgtcgctagaactcagttgtgcgttgcggccagtcgccactgctacttaattcagtgcacaaatga

SEQ ID NO: 97122 - DNA, 101 bp, Homo sapiens
ggaggaccgaggcacgggcacggtgggccgagcacagaactaccagaagcgcttccagaacctgaactgtttcttgcagaacataaattattaggaaacat

SEQ ID NO: 97123 - DNA, 51 bp, Homo sapiens
gcgagggcgccgagcaacttcgggggacttgatctcatcttcatgccaggc

SEQ ID NO: 97124 - DNA, 90 bp, Homo sapiens
tgggaacatgcggcaagaggccattgaccgcttcaatgaggtcatgacgccagtcagatcacactagccttgggcacagctgcctcctac

SEQ ID NO: 97125 - DNA, 100 bp, Homo sapiens
cccgcactgactgtgatgtagtttcctgacctctgacacgtattgtctcaagattaaagatgcagacagacatgctgaactatctggaagtccactgaaa

SEQ ID NO: 97126 - DNA, 80 bp, Homo sapiens
cgaggccagagagaaaagactgcgaggtggccgcagctgtggccggagagaagaagcagactacagtgcctttggtacag

SEQ ID NO: 97127 - DNA, 73 bp, Homo sapiens
gaggagctaatccctgaatatctgacttcgacaaaatttggatgccctcctgaaccagctgaaaagcttccct

SEQ ID NO: 97128 - DNA, 80 bp, Homo sapiens
gctcggagaaacaggcgccgcgggctccgcgcccggccggacccgggcccgaggctgaaggtgatgtggccgccctcaac

SEQ ID NO: 97129 - DNA, 83 bp, Homo sapiens
gttccatctgtggaaggacctaccaaccaggtgtctactatgaaccatcctgtactcagaatgtgaatcatggtgtacttgtg

SEQ ID NO: 97130 - DNA, 109 bp, Homo sapiens
ggaagaagaagttaaaacttgaaaaggagaagagaggagcagtattgacaacaacacaatatggctcctctggtgcaagtgtggtagctattgacaacaaaatcgagca

SEQ ID NO: 97131 - DNA, 100 bp, Homo sapiens
aatacccttctcaatggggctgccatcttctttcctaatcgacagacccgacggaaccatctcttcaccatgatgacttcctcttcaaattcctggtgat

SEQ ID NO: 97132 - DNA, 95 bp, Homo sapiens
cagaagatgatgatgaaagtgtgaaggtgctaaaggagaagatagaagctgagaagggtcgtgatgccttccccgtggctggacagaaactcatc

SEQ ID NO: 97133 - DNA, 100 bp, Homo sapiens
aagaagagccgagagggaggaaagggaggcaagaaggaagcagaatctctaggactgcgtagtaaagtgctgaggaaaattgaagagctcaggaccaagg

SEQ ID NO: 97134 - DNA, 75 bp, Homo sapiens
gctgcctccatcctgggcaaacctgcggaccgccctgcccacccttggagccaggcacacagtgacgactcggag

SEQ ID NO: 97135 - DNA, 100 bp, Homo sapiens
aaaacagcagatttcccaagagcagcggaaaatgatccagtcacagggaaattcaactactgaggaggttacggcacaaaaatgtcatccagctggtgga

SEQ ID NO: 97136 - DNA, 101 bp, Homo sapiens
gtcactgcctgcgcagctccggccgcctggctccccatactagtcgccgatgctgagggttggaaaagcaaaagcagatgtgtggcccaaaactgctccaa

SEQ ID NO: 97137 - DNA, 89 bp, Homo sapiens
cccaagcctaggacaaaagcctggaggctccgacttcctcatgaagagactccagaaagggattgctcgctgtaagcagctcatctgtg

SEQ ID NO: 97138 - DNA, 137 bp, Homo sapiens
tcgctggtgcagctcaacgagctgctggaggacgagggccagctgacggagatggtgcagaagatggaggaggacccattccaacaatctcgtaaaacatggtggattactatgaagttctaggcgtgcagagacat

SEQ ID NO: 97139 - DNA, 90 bp, Homo sapiens
gagccagcggctgaggaggggccccagcagcccccgaaggccctatcaggacatggagtatgaaagacgagtacaggggctcaggtccag

SEQ ID NO: 97140 - DNA, 85 bp, Homo sapiens
caaggcttctgtcatcactcaggtagcccgggaccctcgctttgatgatctgtcaggggaatataatcctgaggtgtttgacaaa

SEQ ID NO: 97141 - DNA, 100 bp, Homo sapiens
ttcatcctcaacgccctcacctgccacccgtgggaaactgttacaacagctgcaatgcagaaatacccaaaccctatgaacccaagtgtggttggagttg

SEQ ID NO: 97142 - DNA, 100 bp, Homo sapiens
ccaccagcaagaagtcagccaagagatgtgttaaaggagccctgcagattgaaagcagtgaggaaaccgaccagggcaaatatgagtgtgtggccaccaa

SEQ ID NO: 97143 - DNA, 100 bp, Homo sapiens
tctacgagtggatggtgcgttgcgtgccctacttcaaggataagggcgacagcaacagctctgccggctggaagatgaacacaatgacgtacagaagaaa

SEQ ID NO: 97144 - DNA, 75 bp, Homo sapiens
gaaagacaaagacccagtgaacaaatccgggggcaaggccaaaaagaaggcagaagcatccaccagccacattgg

SEQ ID NO: 97145 - DNA, 100 bp, Homo sapiens
agaaatcccactgggcagagcttgaaataagtgttaagtatgagagagaagctagtaaatactgggacacattttacaagattcataagaataagttttt

SEQ ID NO: 97146 - DNA, 75 bp, Homo sapiens
ggcgagcggagcgcaacactcgcttggttggggagatcggcgcttggccggtaagtaaggaggtctctgtaccat

SEQ ID NO: 97147 - DNA, 98 bp, Homo sapiens
ggaggtttcagaggttgagcaagaactggcctgtcaaaatgaccattctagtgctctccaggtaatgaatttgggcatcctgaatggttagacttccc

SEQ ID NO: 97148 - DNA, 98 bp, Homo sapiens
caggtgctgcaggcacagcccgagaaaccgcagcactacactttccaggagactgacaaggcgtggcatgggggatgtctggcgctggcagagctggg

SEQ ID NO: 97149 - DNA, 100 bp, Homo sapiens
aaggattccaagtaactcttatttggtctggtgccctatgtctcctgaattttaccgggaatatgtggcaatcaaaaccaagaaacgaatcttgctgtac

SEQ ID NO: 97150 - DNA, 100 bp, Homo sapiens
aactgcacataaggattttgagactttgagaatcactacaagaaaaactccttgtggtgaaggttctaagacgtgggatcgtttccagatgagaattcac

SEQ ID NO: 97151 - DNA, 100 bp, Homo sapiens
gctaccggcccaaggccatctacctggacatcgatggacgcattcagaaggtccctgtgcgttttattgcgacctgccggtgggaactttgtctccgagt

SEQ ID NO: 97152 - DNA, 90 bp, Homo sapiens
ctggagtctgccccattctgagagcagcagcctggctcctggtggctccagcagcagatttgcttgtaaatgcatcacgaagaggcagcc

SEQ ID NO: 97153 - DNA, 102 bp, Homo sapiens
gctgcaggatgggggactccaaagtgaaagtggcggtgcggatacgacccatgaaccggcgagtaagactttgaccccgacgcaggcttcagtgattgccgc

SEQ ID NO: 97154 - DNA, 100 bp, Homo sapiens
aaggaggtagacatccttatcagcacagcacttattccaggagacttgaatgaaaattctgtggagaatcttcagcagaaaacacttcaggatctgttac

SEQ ID NO: 97155 - DNA, 83 bp, Homo sapiens
gtcacgaggaccaataagatcagggacagttcgatatctcaatgcctatactggaatagtgctacttcgatgcagaaaagaat

SEQ ID NO: 97156 - DNA, 80 bp, Homo sapiens
gtttactgggcagctgttacggtgtttcccattaaacactaccaggacaaaatcaggccttacatccagctgccatcgca

SEQ ID NO: 97157 - DNA, 100 bp, Homo sapiens
acggtatttgcgggctgccattcccctgcatatctgtactgatagcaaagccattgtggatgggaacctgaagctcatcttgggtctggtgtggacgctg

SEQ ID NO: 97158 - DNA, 75 bp, Homo sapiens
gccaccgaagaacgctgcggacccagctcgctcctggtagcaagacccgaactggtaaagcatcaagtcgaatat

SEQ ID NO: 97159 - DNA, 82 bp, Homo sapiens
cgaaactcaaagttaatggagccaaatttaataaagttgtacaatggtagatggagtgatgattcttcctgtgcttatcatg

SEQ ID NO: 97160 - DNA, 104 bp, Homo sapiens
ttccaaaacagcaagcatagggagagccgccggaagtattgacggaaagcttgaattacctacatggtggcagtgctccttttggacttttctctaggtttggc

SEQ ID NO: 97161 - DNA, 83 bp, Homo sapiens
ctcagaccttcattgctctgtgtgccaccgacaggggcaagtgtccgagtggtgaatcagctacttacagagatggatggtct

SEQ ID NO: 97162 - DNA, 89 bp, Homo sapiens
gacgaactacgaacccctggacgggagagtctgccggcggagaatataaggggatttgtggggccctttgatcctttgtgtgacactcg

SEQ ID NO: 97163 - DNA, 75 bp, Homo sapiens
taaagtgcaagagtaatatgctatgactgaggtgttgctgcctatgttggctggcaaagctcctcaattctcaag

SEQ ID NO: 97164 - DNA, 75 bp, Homo sapiens
gcggctgatttagaaggaggttcaggctacggtgagccgaaggaacccaagacagaccaggatgaggagcattgc

SEQ ID NO: 97165 - DNA, 87 bp, Homo sapiens
ctatgagatgtcctatggcttgaacattgaaatgcacaagcagttacagatgtagagctaaaacgactgaaggatgctttcaagagg

SEQ ID NO: 97166 - DNA, 100 bp, Homo sapiens
ttcttccttctgtcacatcacacccaatgcctcttagcaatgcataccacgagttagcacaagtgtattcaaccaacaacccctcagaactccgaaacct

SEQ ID NO: 97167 - DNA, 100 bp, Homo sapiens
gggcgcagtcggcgccgctgcccatggagggagtggacatcagccccaaacaggacgaaggcgtgctgaagccctgggcgctgcctatggcacagccaag

SEQ ID NO: 97168 - DNA, 96 bp, Homo sapiens
cttcaagtgctgtgctgctgccatcattgtgctgaccacaactggccgatgccgcatcctcgaaggtaccactcctcagagcgaggcagccggggg

SEQ ID NO: 97169 - DNA, 75 bp, Homo sapiens
tgaagaacactttcaagaaccagatcttcttcagcagtatcgttctgctgtgtgcaaactagacagtgtgaataa

SEQ ID NO: 97170 - DNA, 95 bp, Homo sapiens
ttgaagatacatgagacagcagccaaacccccagacaagttggatggcttgaggactggtactaaaaggaaacgtgactgggaggccattgccag

SEQ ID NO: 97171 - DNA, 98 bp, Homo sapiens
tacaaatcatggagccgctggggtcccttttgcctcagatactattttgaagctttgtcacccgaaagaaccgccaagtgtgtgccaacccagagaag

SEQ ID NO: 97172 - DNA, 100 bp, Homo sapiens
tccctctcttcgcggagcggcgccgcgtagcttccatccgccagctgccatgagcgagcgcctccgtcccaggtcgcgatgagggcccagcgagcgagcc

SEQ ID NO: 97173 - DNA, 100 bp, Homo sapiens
aaggaagaaaaaggaagccccttaaatgccgcaccctacggcatcgaaaggtggagccgccaccaaaatgcagattttcgtgaaaacccttacggggaag

SEQ ID NO: 97174 - DNA, 90 bp, Homo sapiens
acaccgtcacgctgctggaggagcttgcacctacaaaaaccaggagtgccgtttgaccatacattatgagaatggattttctattaccac

SEQ ID NO: 97175 - DNA, 82 bp, Homo sapiens
gcttgaagcctgaatgcagtactgaagaactgctttcaattctaagtgttattggagtgatgagtaaagaatacataccaaa

SEQ ID NO: 97176 - DNA, 75 bp, Homo sapiens
tgcagcgctcgcccacgcccagcgccgcctcctcctcggccagcaacagcgagaaatgaccatggttgacacaga

SEQ ID NO: 97177 - DNA, 100 bp, Homo sapiens
caacccctgtgcttctccccaggtccagccaatgcattcagaagccaaaatggagcccagtttcctccaattgcagcacaagaccttccttttgttctaa

SEQ ID NO: 97178 - DNA, 100 bp, Homo sapiens
gctaagactccaggacacccctgaagccgagaaatggatgataatgaagataattcaaatgatgggacccagccatccaaaaggaggcgaatgggctcag

SEQ ID NO: 97179 - DNA, 50 bp, Homo sapiens
tcgttgctgacagtcagaaaatcccagatgcagtgactggttactacctg

SEQ ID NO: 97180 - DNA, 75 bp, Homo sapiens
gacttcagggattacataaacctgtgtaccatgcactgaggacttcactgtgactttgcttgcctgatgttccaa

SEQ ID NO: 97181 - DNA, 82 bp, Homo sapiens
tgcaccatgagctggggcaccgagctctgggtaactaggatttctacctcaaccgcgagacctatgcaaggacggtgtggac

SEQ ID NO: 97182 - DNA, 83 bp, Homo sapiens
aatgcaatggtctcaatctctggaaaaacttcttgccaaccaaacaatatcaagatgctattcgagcacaccgagcaggacgg

SEQ ID NO: 97183 - DNA, 100 bp, Homo sapiens
gcgctacgggcttgactcccccaaggccgaggtccgcggccaggtgctggcgccgctgcccctccacggaggtgtcatggagaaactccagctgggccca

SEQ ID NO: 97184 - DNA, 90 bp, Homo sapiens
gccgatcccggagcccgagccgggagagggagccgccgcagccgccggcgctgtggaggttgaaaggattgttgacaaaaggaaaaataa

SEQ ID NO: 97185 - DNA, 75 bp, Homo sapiens
gaagcagaaagcagagttaatggtaatatgcacgtgtcactagctgaggccctggaggttcggggtggaccactt

SEQ ID NO: 97186 - DNA, 75 bp, Homo sapiens
ctcctgcgtcctccgacttttcatgagtacaggggctcaggtccaggtggcaggggatatgctacccaactcaac

SEQ ID NO: 97187 - DNA, 101 bp, Homo sapiens
accagaagaagtatttgatgtcttagagaaacttggagaaggagagacaagagagacacctccaacttcgacaaagagttcaccagacagcctgtggaact

SEQ ID NO: 97188 - DNA, 100 bp, Homo sapiens
atgccagggagatctttgactctcgcgggaatcccactgttgaggttgatctcttcacctcaaaagggatgcttggagttcactgggtgatatgaccaaa

SEQ ID NO: 97189 - DNA, 74 bp, Homo sapiens
atgcaccgagtccagcccaggaaaatggagagaggagctgatcacgcagtacctggctgagcttcggaaccccg

SEQ ID NO: 97190 - DNA, 75 bp, Homo sapiens
caggaaactcaacgcctttggcaacgccttcttgaacaggtctccgggccagggcaatgttccgcacggcagtga

SEQ ID NO: 97191 - DNA, 75 bp, Homo sapiens
gctggatagataccgaattcttatcacaaagacagagtctcgttctgtcacccagcctggtgtgcagtggttcaa

SEQ ID NO: 97192 - DNA, 100 bp, Homo sapiens
gccctctcagcaagaacgggaacaaaactctgttgccaccttccagagaagaggtacgagatgacaagacaaccataaagtgtgaaacctccccgccttc

SEQ ID NO: 97193 - DNA, 88 bp, Homo sapiens
tcaagatggcggacaaaacgccaggcggatctcagaaggccagttcaaaggggggacacagcgattgccacgcgccattggaatgtcc

SEQ ID NO: 97194 - DNA, 75 bp, Homo sapiens
atagttgagaatttatcctcaagagtcagctggcaggtgtctttcctgaagactatcttcccgtctcaaaatgga

SEQ ID NO: 97195 - DNA, 82 bp, Homo sapiens
atactactttgaccttccgagtgcagtgtgtgctgttggaacaactggccagaaatctatctctagagtgattgaatatttg

SEQ ID NO: 97196 - DNA, 100 bp, Homo sapiens
attggacacagagaagccccaccacaattgcatctgtgtaaaatcgagagaaagatcgtgaaaacagccatggcagagtctcgctctgtcgcccaggctg

SEQ ID NO: 97197 - DNA, 50 bp, Homo sapiens
tatatgggactccttcacagggagtccttcaataatgttaaacagtggct

SEQ ID NO: 97198 - DNA, 99 bp, Homo sapiens
gaggtagaggacgatactctgaccgttttagtagtcgcagacctcgaaatgatagacgatgatgattattccccaccttctaagagacaaagaccaacg

SEQ ID NO: 97199 - DNA, 100 bp, Homo sapiens
gaacccagagaagaatgaggcctttctgccgcacactcagagcctggagacgctgaacctgggccacaaccccatcgggaacgagggtgtgcggcacctc

SEQ ID NO: 97200 - DNA, 83 bp, Homo sapiens
tacgcagaaggacctggccacgcagcaatgcagagtccctggacaggctcctgccacctgtgggcactgggcgctctccccgg

SEQ ID NO: 97201 - DNA, 50 bp, Homo sapiens
ctctgctcttcagtacaatcctgttctacatgaaacattttctcaacaca

SEQ ID NO: 97202 - DNA, 97 bp, Homo sapiens
gggcaaagttgcgccggggaacttgtgagcctgcggtgaaagtaatctatgccagcaattatgacaatgttagcagaccatgcagctcgtcagctgc

SEQ ID NO: 97203 - DNA, 100 bp, Homo sapiens
gcctctgggagcagaagggaggctccaagacctcatcaacaattaagggaaatcctcattgacgattcaatttgttgaaggccaatttgtggactcctac

SEQ ID NO: 97204 - DNA, 83 bp, Homo sapiens
gaacccgcctggctagccggcgagttgagtggcgagagccttcacgtaaatgggtccagtcatgcctcccagtaagaagccag

SEQ ID NO: 97205 - DNA, 100 bp, Homo sapiens
ggttctggacaagatgaagtctttctgccaggtgttggggcgatgtttcctgactgtggtgcaagtccatttccagtttttgactcatgcgttacagaag

SEQ ID NO: 97206 - DNA, 100 bp, Homo sapiens
ctgacttcttctggcatgagagggtgtgtgagagtaaaaggaggcagctagccccgtgccgggagacacgctgaccccgcactacatctacccaccagcc

SEQ ID NO: 97207 - DNA, 101 bp, Homo sapiens
gtgtcaaaagagcttctctccagagtagaaaggacttaaccaccaccatgtcgagcaaaagaacaaagaccaagaccaagaagcgccctcagcgtgcaaca

SEQ ID NO: 97208 - DNA, 100 bp, Homo sapiens
ctggctccctctttgggccaagtagttttacagctgctcctactgggactactattaaatttaacttccatgccattgcagtgtcaactaggcctcagtt

SEQ ID NO: 97209 - DNA, 82 bp, Homo sapiens
ggcctgcaccatgagcgtcccggccttcatcgacatcagtgaagaagatcagctgcatcttcctcccgtgaggctggccgag

SEQ ID NO: 97210 - DNA, 82 bp, Homo sapiens
ctaaaatgaaagaaaccgctgaggcttatttgggaaagaaggctccgtgtgtttgacagtggcgtcatggtaattgagcttc

SEQ ID NO: 97211 - DNA, 75 bp, Homo sapiens
ctatggagttgtacttaaatgcagacacaaggactgcatcgacgtaggctggtgggaaggagagctgaacggcag

SEQ ID NO: 97212 - DNA, 88 bp, Homo sapiens
agtccctttgtggctctatgtggaccctgcggaatccaccggcgcagtttcatctagcgactggaatgggtagctctcgagaatctag

SEQ ID NO: 97213 - DNA, 100 bp, Homo sapiens
tggaacgcggtggccatgtggagctgggacgtggagtgcgatacgtgcgccatctgcagggtccaggtgatggcatatactttagaagaacagaagaacc

SEQ ID NO: 97214 - DNA, 90 bp, Homo sapiens
gatattttggaaactatattgatagacagctgtatcttcccaagtaccacaatagacttctgtaacgataagagttatatttcagaagag

SEQ ID NO: 97215 - DNA, 83 bp, Homo sapiens
tgaacattactcttccagaagagaatttatccagttggcgaaggactttgaggatttccgtaaaaagtggcagaggactgacc

SEQ ID NO: 97216 - DNA, 100 bp, Homo sapiens
tccgagggaagtgcacgagcctgctgcagctctatgatgcctccaacagcgagtggcagctggggaagaccaagtggagtagggcgaaactggggctggg

SEQ ID NO: 97217 - DNA, 98 bp, Homo sapiens
catctttacagaggaatagtctacaaaggaagacttgtaacctggagaagaggtacagagccagatggactccttcggacaaactacagttctgtgtt

SEQ ID NO: 97218 - DNA, 75 bp, Homo sapiens
ggcacgatgccctttgacttcaggaggagccttcacgtaaatgggtccagtcatgcctcccagtaagaagccaga

SEQ ID NO: 97219 - DNA, 100 bp, Homo sapiens
cggcggcggccaagcccaacaacctttccctggtggtgcacggaccgggggacttgcgcctggtcctcagaatggttggaatgaccctccagctttgaac

SEQ ID NO: 97220 - DNA, 96 bp, Homo sapiens
cttcccacaggctctctccgctcgattttgtcaccgttatgtgggaagcgaatccagtatctgaaaaggtttaaagtgatgaagatcaaagttcta

SEQ ID NO: 97221 - DNA, 90 bp, Homo sapiens
cctcccaagtagctggtactacagggtgtccttctgtgctgaacatgtccgtaggaatgccctggcacttcatgctcaaatgaagaagac

SEQ ID NO: 97222 - DNA, 75 bp, Homo sapiens
cacatccgatgcaccctttttgtcagattatcaggatgaggtagagacggggtttcatcgtgttagccaggatgg

SEQ ID NO: 97223 - DNA, 74 bp, Homo sapiens
agaaaatggccagggggaaggaaagatagctgatcagcttccttgggttttgctgatgacacaagagagctttg

SEQ ID NO: 97224 - DNA, 87 bp, Homo sapiens
tagaaaaaacacaaatgaattctataagaccattccccggttttattataggctctctgatgtaaaggatggagtaaatcaagcagc

SEQ ID NO: 97225 - DNA, 50 bp, Homo sapiens
caaagatgaagatgaaaccaagcccttgacacgttggtcgtcattgcctc

SEQ ID NO: 97226 - DNA, 80 bp, Homo sapiens
cagacatctcgaaccaaaatgacagaaaatgtttataggaggccttagctgggacactacaaagaaagatctgaaggact

SEQ ID NO: 97227 - DNA, 100 bp, Homo sapiens
tgactaaagtgcaggccgaactagatgagaccaaaatcattctggagtctgccgtgcacccgagggagattttcaagcagaaggagagggccatgtccac

SEQ ID NO: 97228 - DNA, 115 bp, Homo sapiens
gctggccaaaacacatccgtataatcctctttgggcacagctggcaaccatgtccaagggacctgcagttggtattgatcttggcaccacctactcttgtgtgggtgttttccag

SEQ ID NO: 97229 - DNA, 100 bp, Homo sapiens
tatctgcccgtcaactcataatatggatgtccccaacatcaaaaggaatgacttccaggtcatactccctgtcacaaactccagctgaactaacttggag

SEQ ID NO: 97230 - DNA, 100 bp, Homo sapiens
cttgcttaagtcctccaggagggcgatggaggagccggcattccaaccaggctcacggatgccaagattgctgagctgaaaagaggtgctgaaattattg

SEQ ID NO: 97231 - DNA, 100 bp, Homo sapiens
tggtctgttggacgtttttacacctgcaaggtctctggaggaattcaatgatgtctgaactgtcccaagcaataaacagtggtacattgttatcaaaacc

SEQ ID NO: 97232 - DNA, 82 bp, Homo sapiens
ttcaagcagcgccgcaccttcgctagacttcgggctccttgaggatattcagttttgtatgtttgaatatcctctcaccatg

SEQ ID NO: 97233 - DNA, 98 bp, Homo sapiens
acagaagaaaaagtgggactgaagtacactgaagcaggaagcgagcagctgcaaagcatctaatagaacgctactaccaccagttaactgagggctgt

SEQ ID NO: 97234 - DNA, 100 bp, Homo sapiens
agaagcagcatggggcccagatccctggacacttgctgggggagaggccctgagaggcatgtgcacagggctgttgataatcaggtgtatgtggccacag

SEQ ID NO: 97235 - DNA, 73 bp, Homo sapiens
caaaatatgtgtggattgctgagtatttttaccaaggttttaagcgatggatcttatggttggtgatgaggca

SEQ ID NO: 97236 - DNA, 75 bp, Homo sapiens
cgggagcacggcgacgccagcggcgggatccatcagttacacaagtgacaagaaatgttccaccaggacttgatg

SEQ ID NO: 97237 - DNA, 88 bp, Homo sapiens
acctcgtgagaaaagctttacgtctcattcaagaaaccgaagtgatttccagaggatttacactaacatcatcaagaaggtgatcggg

SEQ ID NO: 97238 - DNA, 126 bp, Homo sapiens
gcagttcctaagaggagctggcgcctcaggccatacctgggctatgactggattgcaggccacctggttcttagtcccccacctccgcacacgggccctgccctcatcagtgctctcaacatcctg

SEQ ID NO: 97239 - DNA, 95 bp, Homo sapiens
gaatatccaaagccattcactacctgcacaacgttcaaccatgctcggtcatctgtggcagtatatcaaggtggtggaggagtcatccttcctga

SEQ ID NO: 97240 - DNA, 100 bp, Homo sapiens
cctgtgagatgtgtccagcccagcctcagccctgccgacggggtttcatccccaacatccgcactggagcttgccaagcagaaaaagtcctacctggagc

SEQ ID NO: 97241 - DNA, 98 bp, Homo sapiens
aagctggccaagcacaaagagcttgctccctacgatgagaactggttctacacgcgagctgagaggaggttcagatgagcccctgctgacttgagaga

SEQ ID NO: 97242 - DNA, 90 bp, Homo sapiens
caaaggaggaatttgcctcttctacagatagagctgttaaggggaaggtgtggctcattgactttaatccatttggtgaagtcacagatt

SEQ ID NO: 97243 - DNA, 96 bp, Homo sapiens
ttccccccggcccatggtgcgaggctgggagccgccgcccgggctggactgcgcagttcgacagaagtgtacagaggcttctggcaacacggattg

SEQ ID NO: 97244 - DNA, 51 bp, Homo sapiens
gatcgggagttgctggaccatcaggaagatttcatccaggatcgagcaggg

SEQ ID NO: 97245 - DNA, 100 bp, Homo sapiens
aactgaaacatgaaaacatcgtggccctgtacgacttccaggagctggccctcagcgcactcctgaagttcgtgcagctggaaggagcgcaccccctgga

SEQ ID NO: 97246 - DNA, 100 bp, Homo sapiens
aaaaataccagtagtgtgtgctttaactcaagaagaatcttcagcccagttatcaaatgaagagaatgctgtcagaagggtatctcagtggacttgagta

SEQ ID NO: 97247 - DNA, 82 bp, Homo sapiens
cgggaggccgaggactcggagttcacctgcaggttttaaaatcaaagatgggaaaatcggagaaaattgcccttccccatgg

SEQ ID NO: 97248 - DNA, 100 bp, Homo sapiens
cccgcccgggagggccggggccgcgctcagttttcggctttgtgagaaaccttaccatcaaacacgatggccagcaacgttaccaacaagacagatcctc

SEQ ID NO: 97249 - DNA, 48 bp, Homo sapiens
aaggattccaagtaactcttatttggaaatttggtgagcggcctccac

SEQ ID NO: 97250 - DNA, 90 bp, Homo sapiens
gggccctctcagcaagaacgggaacaaaactctgatgcagacagacatgctgaactatctggaagtccactgaaaagcaaaagcactagg

SEQ ID NO: 97251 - DNA, 113 bp, Homo sapiens
gcccgagtccgcgggaagatggcggcgccgctcatccccctctcccagcaggtttttcgttggaatatacgttgcacatttatggcgattctgagtgtgagggcagacttctg

SEQ ID NO: 97252 - DNA, 75 bp, Homo sapiens
tgtatacaactgtagatgcaaatgggtatctgaaaaatggatcaggttttccctgatgaatttcacctccagact

SEQ ID NO: 97253 - DNA, 100 bp, Homo sapiens
ctgtccagagttgcttcctgttgacgacagctctcctcaggctccccacaggtgcaggaagccgccgcccagccatggacggggaggagcagcagccacc

SEQ ID NO: 97254 - DNA, 100 bp, Homo sapiens
agggaattccggtcagggtcaagtcgtgttctgatcactactgacttgttggactggagtccagagttgccaccagatgggatattcaaaaatacgccag

SEQ ID NO: 97255 - DNA, 100 bp, Homo sapiens
atggcaaagactggcaaaagcacaaggattctcgctgtgacagagacaacaccgagtatgagaaaaaggggatgtttgggctgaaggtgaagaagaagag

SEQ ID NO: 97256 - DNA, 50 bp, Homo sapiens
ccttctaggagagaggtgaaaggtactccaaagattcaggtttactcacg

SEQ ID NO: 97257 - DNA, 82 bp, Homo sapiens
gatgccaccaatccagacagaatgtacgaccttgttgctgttgtggttcactgtggaagcgatctagggcagccctgcagag

SEQ ID NO: 97258 - DNA, 98 bp, Homo sapiens
gtccacggccaggtgaacaatgatgaggagcgggaaggcctcctgcaccctggagaccgtgtgggaagacaagcacaagtatgaggaggccgagcggc

SEQ ID NO: 97259 - DNA, 132 bp, Homo sapiens
ggaggccgtccagcagatggcggatgccctgcagtacctgcagaaggtctctggagacatcttcagcaggtgtcatggagaaactccagctgggcccagagattctgcagcgggaaaatccaaggcttattt

SEQ ID NO: 97260 - DNA, 51 bp, Homo sapiens
gttggggagatcggcgcttggccgacaccaaatcctactgcaagcgagttt

SEQ ID NO: 97261 - DNA, 101 bp, Homo sapiens
ggggagcgcctcgtcgacatgagtgatgtggaggaaaacaacttcgagggcagaggtcgacatgttaaaacgggtcagttggcagccatcaaagttatgga

SEQ ID NO: 97262 - DNA, 75 bp, Homo sapiens
ggcggcggcggcggcggcggagcagaaatcccttccctgcgacatatgcaaagacgttgtcaccgcagctggtga

SEQ ID NO: 97263 - DNA, 50 bp, Homo sapiens
gtggatggtcacgatgtagttatagggaagcagctcgagagtgtcgtaga

SEQ ID NO: 97264 - DNA, 101 bp, Homo sapiens
ggctgcggcagttgcgcgctgggattgttgcggtgcgctggagccgggggatatgagactttctactcggaatatcctgagtgttgcgtggatgtaaaacc

SEQ ID NO: 97265 - DNA, 95 bp, Homo sapiens
gtcctgccgggatcggacccaggagtttctgtctgcctgcaagtcgctgcagacccgtcagcctatggaggctccagtcatgctgtgggatgagt

SEQ ID NO: 97266 - DNA, 101 bp, Homo sapiens
agctgcttacagcgagaaggggttggtttacatgagcatctgtggggagaatgaaaactgccctcctggcgtgggacacagcattgttggttttgccatgt

SEQ ID NO: 97267 - DNA, 98 bp, Homo sapiens
ctcaagttgtttggctaaattcttcagccgttcttggaacacctcacagcttgccacatctgatgaatccatccatctctcctgcatttttacatttg

SEQ ID NO: 97268 - DNA, 73 bp, Homo sapiens
aacattccaataaagtctttgtggtgaagggactgtcaagttgtggtcagaaatgagaagacatgaaatgttg

SEQ ID NO: 97269 - DNA, 100 bp, Homo sapiens
aaaagcatgcacatcttacagatacagagatcatgactttggtagatgagactaacatgtatgaaggtgtaggaagaattttccaggaatatggatctac

SEQ ID NO: 97270 - DNA, 100 bp, Homo sapiens
gccctgctgggtcctacctgtcagagccccaaggttggactggtgctacaataaccagtcaccagtgcgattctggataaagccactgaaaattcgaacc

SEQ ID NO: 97271 - DNA, 96 bp, Homo sapiens
ctgagcaagcggtctctgagtcggagtccactccccagagcattggggagtcagcaatgtccgttgtgttaaatcagctgctgcccatgattaagc

SEQ ID NO: 97272 - DNA, 94 bp, Homo sapiens
ctctcgcctcgggtctcgggggccgctctgggatcccggccaccagcaattgtccgtctccggagtagagatgaagagagaatttctaaacctg

SEQ ID NO: 97273 - DNA, 74 bp, Homo sapiens
aggattccaagtaactcttatttgaggaattccagggaagaaatgtggtacaatcatacttacagcagaggaat

SEQ ID NO: 97274 - DNA, 83 bp, Homo sapiens
gcagcatccgctctccgctctggcgaggagtgggatgctgatgaacaggcatttaacacaactgtgaagcagctgctgtcacg

SEQ ID NO: 97275 - DNA, 75 bp, Homo sapiens
ttgctactcgctgctcggcgtggaactgtcagctgtgatgcagatccatccgccctagcaaaatatgttctggct

SEQ ID NO: 97276 - DNA, 74 bp, Homo sapiens
tgcagacaaggtcccaaagacagcaggtgagagaacgccgagccgtcgccgcagcctccgccgccgagaagccc

SEQ ID NO: 97277 - DNA, 83 bp, Homo sapiens
cagaaggtctctggagacatcttcagcagtccagaatgacagggtccagaaactggcgagccacgagggacatgtgtaggtat

SEQ ID NO: 97278 - DNA, 100 bp, Homo sapiens
cttcagctggccaacagcaccatcattgcatttacctcggatcatgaatttttccctagattggtgtaaacagccagacgtgggccttcccaaacccgac

SEQ ID NO: 97279 - DNA, 100 bp, Homo sapiens
catggacgaagccttcaaatccatcaagctcatcaaaagccatccgggtgacctgcataggttcctgcggggtctccaacaaggctaatgacacagcgtg

SEQ ID NO: 97280 - DNA, 100 bp, Homo sapiens
atgcccttgttcttgaggatgccaggactaaaagaagtggtagaatcctgtcgaggaaaaaatctttttttttctaccaatattgatgatgccatcaaag

SEQ ID NO: 97281 - DNA, 100 bp, Homo sapiens
gcgctaaccctttactcgcgacctttcgcttcaccttcacagcagccctgcgaggtgcctcaggaaccctgaagctgggctgagccatgatgctgctgcc

SEQ ID NO: 97282 - DNA, 100 bp, Homo sapiens
cgccggacccggtgtggagagcggtgctgaggctacgcgggctggagactcaggatgcagagcaaagcggcagtccccggacagggatgggctctgacca

SEQ ID NO: 97283 - DNA, 75 bp, Homo sapiens
gtttgcactttttaagcggatacacaaggacggacaagaataagaaagccttgagttttgtgaaaaaccggagaa

SEQ ID NO: 97284 - DNA, 90 bp, Homo sapiens
ggctacgctgaggaacacgaaccccaactttgtccgctgcatcatccccaaccacgagaagaaggggccattaagtttaatgatggcctg

SEQ ID NO: 97285 - DNA, 98 bp, Homo sapiens
actgtataagcctttaaaagcagagggaaccaacttcagaacagttttagataaagctgtgcaggcagatggacaagtgaaagaatgttaccagtctc

SEQ ID NO: 97286 - DNA, 83 bp, Homo sapiens
cagatttcgtcgatgcctgtggctacagcgacccggaggatgagagcaagggggatatgagactttctactcggaatatcctg

SEQ ID NO: 97287 - DNA, 83 bp, Homo sapiens
tcaccgaggagaagtaccaggaggcgttggccaagggggttatggttttgtgaaattcacagatgaactggaacagaagcgag

SEQ ID NO: 97288 - DNA, 98 bp, Homo sapiens
aacatatttactgctgttcttagtgcactaaagaaatttaagatccgcattgaagacccaccccgcagaaagcacatggtattcctgggtggtgcagt

SEQ ID NO: 97289 - DNA, 76 bp, Homo sapiens
caacagtgacggaatgcctccatacatgtattctctgaaaccaaatgaccaaatcttggctgaagacaaacacaag

SEQ ID NO: 97290 - DNA, 76 bp, Homo sapiens
aggttatagatggagagacctataaaggtaagaatgattgatgttggctgatattggagtgctcattcacatgaag

SEQ ID NO: 97291 - DNA, 100 bp, Homo sapiens
ggcgctatctctgccctcagtatcaacaatgattgctcaagacttctttgtggctttgctaaaggacagatgtttccagccctctgaagcttcatcgaac

SEQ ID NO: 97292 - DNA, 82 bp, Homo sapiens
agccggcagcccgggcgggtcccggggtgcgagcagcgcacttccggaagtcctgacggccacgctggatctggaggacgtc

SEQ ID NO: 97293 - DNA, 100 bp, Homo sapiens
ctcattcagacagaatctattaccttggtatttacttatgggatgtagaaggcagaaaatattttgacttcctgagttcttacagtgctgtcaaccaagg

SEQ ID NO: 97294 - DNA, 51 bp, Homo sapiens
cagaatacttcaagaatagcagaggagcagagagatgcaggtcagctcctc

SEQ ID NO: 97295 - DNA, 100 bp, Homo sapiens
gccgaccttgagctccaggagttcgtctcttacgtctgcggaagtgcagctgcctcagttcttagcgcagaggctgaggggatctggcggtggagcgcta

SEQ ID NO: 97296 - DNA, 99 bp, Homo sapiens
aagcaggactcggggcacttgggcaccacactgtaactcgaggcatcaccaaaggcgtgaaggaggactttcgcctggccatggagcgccaggtctccc

SEQ ID NO: 97297 - DNA, 75 bp, Homo sapiens
cgggcctctggaatttagcgctcgcccagctagccgcagcacccatatatctcccatcagcatcctaccagcctc

SEQ ID NO: 97298 - DNA, 90 bp, Homo sapiens
ggactggaaggactggaagatcggcttccagctgggacagccctgccatcaaggaagacagcacaggactgggacccacccatgaaccct

SEQ ID NO: 97299 - DNA, 100 bp, Homo sapiens
ggctgcgcgggggctgtggctccgggactgcgttgaagactgggatagtttccaagctattttggatcatacctacaaaatgcatgtcaaatcagaagcc

SEQ ID NO: 97300 - DNA, 75 bp, Homo sapiens
ccgaggtctgatagtgaagaaagtggctcagaagaagaggaagaggaggtgaacacagaaaagctgacagccttt

SEQ ID NO: 97301 - DNA, 83 bp, Homo sapiens
gagaggctcggaggaccggtagctcccagcaaagcggcccagcggtttggtgccctggttgtcagatgttggaaagcagtagg

SEQ ID NO: 97302 - DNA, 50 bp, Homo sapiens
aacaggagcacctgctggcgctaaaaggactctgagagtgtttccaaagt

SEQ ID NO: 97303 - DNA, 88 bp, Homo sapiens
gcttgaaaagactgggcttgtccttgctggtgcatgcgtcgtcggcctctgggcagcaggagttagccctgcgtagccagttaccaac

SEQ ID NO: 97304 - DNA, 83 bp, Homo sapiens
gactgactggggttctgagactccctgtcccggaccgcagactggtgtcgttcagtatttctacattgaagactggcaattcg

SEQ ID NO: 97305 - DNA, 88 bp, Homo sapiens
ggaacgccacagaagtatgatcccactttcaaaggacccatttacaataggaactgtggaaggtgcatcagtgaagaaatggaccaat

SEQ ID NO: 97306 - DNA, 75 bp, Homo sapiens
cgcggattcgccgaggcaccgaggcactcagaggaggaaggtgggagtcaatcattttgacaagtctcctgaaag

SEQ ID NO: 97307 - DNA, 100 bp, Homo sapiens
tagaagaggccaagactgcgttcctgctcaacatccaggatcttacacatttgttccatggcttctcagctttaaaaggggaagtgccctagaagaaaaa

SEQ ID NO: 97308 - DNA, 100 bp, Homo sapiens
ggcacttagaaccgcagcagggacgtcggtttgctatcgggactcggcgaggacggccaagtgcaggaacatggagcatgcactgcgggagaaggccaag

SEQ ID NO: 97309 - DNA, 100 bp, Homo sapiens
cctcggtgctgtggtgcagagctagttcctctccagctcagccgcgtaggtggatcatccatgccatggagtatgaacttcagatccgtggcggagacaa

SEQ ID NO: 97310 - DNA, 98 bp, Homo sapiens
ctgcgccagcgctatgcccgctggatgatctatgagtctactcttcatcttgtgttgagacttcgtggtggtgctaagaaaaggaagaagaagtctta

SEQ ID NO: 97311 - DNA, 75 bp, Homo sapiens
cttggactgagtcctgcaggacacaggctgaagagatcactttaacaattggccaagcatttgacctggcataca

SEQ ID NO: 97312 - DNA, 50 bp, Homo sapiens
cttctgcatccttaactgagaatgagaggatggcattccctgtggatatg

SEQ ID NO: 97313 - DNA, 99 bp, Homo sapiens
acagaggccacggaaatgatgggtgcccttgtggccagtaggcaatcacctgaaggatctgacttccagaagaagttatttctggacagtctacgaaaa

SEQ ID NO: 97314 - DNA, 100 bp, Homo sapiens
ccagtgcctactctgggccaccgcaacccatgggtggccagggattctgggatctcaagggcatttccctttgcccacctcaccttttcatatttggtaa

SEQ ID NO: 97315 - DNA, 83 bp, Homo sapiens
cattcccctccaggggctgcaagttcccatccataaatcaggccaaacgtaccaagaaagtcgggatcgtcggtaaatacggg

SEQ ID NO: 97316 - DNA, 75 bp, Homo sapiens
gccgctgccgctgccgctgccgcacctccgtagctgactcggccgactcgcgggccgctgcacccaccgccaagg

SEQ ID NO: 97317 - DNA, 50 bp, Homo sapiens
accccacatggcccacgtacctcagacacgatgaggcgagtggtacgaca

SEQ ID NO: 97318 - DNA, 75 bp, Homo sapiens
tgcacccagaggccggggaccttgccaaccctcccaagaagttcagaggcactactgcagtcttcagttaagcaa

SEQ ID NO: 97319 - DNA, 89 bp, Homo sapiens
gacaactatgggtccacagctgaggacattgtggagtggctgaagaaaaacgatcttcaagacacagaaataagtccaagacagaatcg

SEQ ID NO: 97320 - DNA, 75 bp, Homo sapiens
ggccttcagcggttcccaggctccctacctgagtccagacttggatgttgtgggtgatggtatgcagtgtcctcc

SEQ ID NO: 97321 - DNA, 89 bp, Homo sapiens
gccagcggagccctgggctggggcaggagccggtgtggccgacgacgatgccctcgctgaggagcgcatgcggagaggccagaacgccc

SEQ ID NO: 97322 - DNA, 100 bp, Homo sapiens
ctgctcttctgcggcgcctacctctacaaacagggctttgccatccccggctccagcttcctggcttctcatcagttgaaattggaactcaattcaatgc

SEQ ID NO: 97323 - DNA, 75 bp, Homo sapiens
ctctatgaaaaacagaatggaaaagagtcttctggttattcagcgatagttatgacctcccggttacgtgcgttg

SEQ ID NO: 97324 - DNA, 83 bp, Homo sapiens
cgagggttatgctgactgcgccacctacctggcagggcaaaataacatggcagccagacgaattacacaggagacttttgatg

SEQ ID NO: 97325 - DNA, 74 bp, Homo sapiens
cgatccagcctgcggagcctgtggggcagagccagtcttggtgctctgtgttcacctggttcatctgaggagct

SEQ ID NO: 97326 - DNA, 100 bp, Homo sapiens
cgcagtggtcgcttcttctccttgggcattttagattatctggataacatatcccctcagcaaatacgaaaactcttctatgttctcagcacactggcat

SEQ ID NO: 97327 - DNA, 50 bp, Homo sapiens
gggagttcaagaagaacactccagaggagtcagaaataccatcagaggag

SEQ ID NO: 97328 - DNA, 83 bp, Homo sapiens
tggttatgctactgtgttctcagggtgcatctgagaaagacatcgtgcactctggcttggcatacacaatggagcgttctgcc

SEQ ID NO: 97329 - DNA, 75 bp, Homo sapiens
caggcggtgacagagtggagccatggctagagcagcccctgtcaaagggaacaggaagcagtccacggagggtga

SEQ ID NO: 97330 - DNA, 89 bp, Homo sapiens
agacaggctagcctcaatgaagcagctgagaagtattatgatctggcagccaggctgaggcctaattccaaaccaggttgcagagaagg

SEQ ID NO: 97331 - DNA, 98 bp, Homo sapiens
tgagatccatctgcaccacggtgctgggtcatggaggacgctggcggcggcgaggagaccccggccccggaggccccgcacccccctcagctcgcgcc

SEQ ID NO: 97332 - DNA, 90 bp, Homo sapiens
agacctggtgaaggtggaacggggctcccaggacctccactaatcaccagaacaaaatgtgcaggtctagtgacggagcccgcgcgcggc

SEQ ID NO: 97333 - DNA, 100 bp, Homo sapiens
ctggtcctcatggccccgtgggtcctgctggcaaacatggaaaccgtggtgaaactgttggtgggacaagtgatgttgaagtgaatgaaaagaaagacag

SEQ ID NO: 97334 - DNA, 82 bp, Homo sapiens
gtgaatgctttccccgcccagaacaactacgggagtgcatccgccccaacccttttccccctcgtctcctgtgagaattccc

SEQ ID NO: 97335 - DNA, 89 bp, Homo sapiens
ccaggaagcttcggccccgcagctcggcttgctgcggtctcaggtgatctttagacagtgactgagtatggatcatttgaacgaggcaa

SEQ ID NO: 97336 - DNA, 75 bp, Homo sapiens
ctcagactcagtcttcctatgcaagaaacgcaactgtgcacagaccccacaggctcctcggacactgggtccatc

SEQ ID NO: 97337 - DNA, 140 bp, Homo sapiens
gttggaagtccagagatagttgtgcttttacacggttttccaacatccagctacgactggtacaaggcgcagatcaggcctctataaccgccaggaatcacattcagctggtgaaactgcaggtggaagaggtgcaccag

SEQ ID NO: 97338 - DNA, 89 bp, Homo sapiens
gatggggaggaggttcttcagtgtatgcctgaccggaacatgaacattttgcagtactgcccctcttccgacatgtggacgctctttga

SEQ ID NO: 97339 - DNA, 116 bp, Homo sapiens
atcaataagccatggcatctaagaaatttgctgttaaaggatgcttgaagatggaaagaaatttgattcctcccgggacagaaacaagccctttaagtttatgctaggcaagcagg

SEQ ID NO: 97340 - DNA, 100 bp, Homo sapiens
gcatttgtcactgaccactgaagtgtatgtttgtgcaagcttaaagaaagtggttattgtacaggtcatgaaccagattccctggagttcagtactgtag

SEQ ID NO: 97341 - DNA, 83 bp, Homo sapiens
ctttgacacacagttcaccagcgagcccgtgcagctgaccccagacgatgagagcatcagatccatgctgctgctgactcgga

SEQ ID NO: 97342 - DNA, 55 bp, Homo sapiens
ggaggccgaggcgggcagatcacaaggtcaggagatcgagaccatcctggccaac

SEQ ID NO: 97343 - DNA, 90 bp, Homo sapiens
gcccgcagccacgcggaggcggcggggagccgcgcgcggcaggtactgtccaagaagctggaacattattatccagcaagaatgttcgtg

SEQ ID NO: 97344 - DNA, 76 bp, Homo sapiens
ctgctgaactgggtgctttatatagggggtttgccaacttgttaataagatggaggagaatactggcaaggttaag

SEQ ID NO: 97345 - DNA, 83 bp, Homo sapiens
cgccgcccagcccggccccgcccgcgccggaagagccacgccgggagtgcatccgccccaacccttttccccctcgtctcctg

SEQ ID NO: 97346 - DNA, 89 bp, Homo sapiens
gcctcagtctcccaaagtgctggaattacaggggtggccagtctgatcttggatataattcattatctaaagatgaagttagaagaggg

SEQ ID NO: 97347 - DNA, 98 bp, Homo sapiens
gtctgctgtagagtgtatcgcagtgttggattgaagctggacagtactgcacttttgtcatttctacggatggctctgttagagcttgcgggaaaggc

SEQ ID NO: 97348 - DNA, 95 bp, Homo sapiens
gacttcgatgatcgtgtgtcggatgaggagaaggcatcctctggtatcacgattccaaaacccccaaagccaccagataagccgctgatgcccta

SEQ ID NO: 97349 - DNA, 100 bp, Homo sapiens
tcaaagacggcaacgcgcttatcagcgctatgagaagaaatgtgacacctgctcactatgatgagcagcagaacttttttgctcagataaaaggttacaa

SEQ ID NO: 97350 - DNA, 75 bp, Homo sapiens
agagcccccaacagagagtgcctgggaacgaggactccggcatgcaaaggaggtgtgatccctcacatccacaaa

SEQ ID NO: 97351 - DNA, 100 bp, Homo sapiens
gatgtagacactggactattagccaaaattgcctggaaaagagcagtgagaggagtccgggagatgtgtgatgcatgtgaagcaacattgtttaacattc

SEQ ID NO: 97352 - DNA, 75 bp, Homo sapiens
aaaacatcaaagaggtctagcaaagccatggattgcaaagatagaccagcttttccagttaagaagttaatacaa

SEQ ID NO: 97353 - DNA, 83 bp, Homo sapiens
cttacactccaagttcctgcatttttgcttcagagtaatccatatgtaaaggtgttggagcgggccggagagaagtagagtgg

SEQ ID NO: 97354 - DNA, 82 bp, Homo sapiens
cgggggcgccatggcgaccggagcgaacgccacgccgttggggaccttaaaccggaaaacattttgttaaatgaagatatgc

SEQ ID NO: 97355 - DNA, 90 bp, Homo sapiens
aggacatacctttggttaaaggagctgccgtcagataattctgaaataatcagcagaaacggaatggaatgccaagaatctgcattgaga

SEQ ID NO: 97356 - DNA, 100 bp, Homo sapiens
tgctgaaacgcctaataagaacttgcttggctcaggaacaacagaagagaataaagaaaatgacctcagaccttccttacctcagtcttatgcagcgacc

SEQ ID NO: 97357 - DNA, 99 bp, Homo sapiens
aatcgctttcagtccttgtggacgattcgcggcttgtggggccgaggacagacacttttagttactatccagcagaaaacttgatagagtacaaatggc

SEQ ID NO: 97358 - DNA, 82 bp, Homo sapiens
gaggaggcaactacattgaatatcagaatcttgttgactacataaagccgagagacacacaagattgcagtattttatgttg

SEQ ID NO: 97359 - DNA, 114 bp, Homo sapiens
gtgggctgtgtcctcaccatctgtgctgtgctgggcctgctgtgctggaggcgggtgaaggggcagagggacctcagcatgaacaacctcacagagcttcagcctggcctcttc

SEQ ID NO: 97360 - DNA, 90 bp, Homo sapiens
gttcttcaggaatggagacacggcttcccccaaggaatatacaggtgacaacatccgggaattcttgctgagcctcagatactttcgaat

SEQ ID NO: 97361 - DNA, 82 bp, Homo sapiens
gggcggacggcgacgcagcccgcggcagaaggtgaaatgacaatggatgctctgttggctcgattgaaacttctgaatccag

SEQ ID NO: 97362 - DNA, 115 bp, Homo sapiens
cggggctactcgactgctctggaggtagcggccgcggtgaggagagccatgggacgggcagtcaaggtgctggagaatctggtaaaagcaccattgtgaagcagatgaggatcct

SEQ ID NO: 97363 - DNA, 75 bp, Homo sapiens
ctgcagagaccccgctatggctactgatttccgattctactggatgcattcaaagttaccagaagaagaaggact

SEQ ID NO: 97364 - DNA, 98 bp, Homo sapiens
ctatggatgatcgagaggatctggtgtaccaggcgaagctggccgagcaggctgagcgatacgacggatgttgagaaagagaaggaaacccacagtta

SEQ ID NO: 97365 - DNA, 90 bp, Homo sapiens
taactcaggatttacttgaaacaaaaggagaccctaatcttcagtggtcagtatatatccgagccgctgtccgaaaagagaaaggcctgc

SEQ ID NO: 97366 - DNA, 99 bp, Homo sapiens
cagcattctgcggggcaggcggtgaatgaaaactttgccattgatttgatagcagagcagcccgtgagcgaggtggagactcgggtgatagcgtgcgat

SEQ ID NO: 97367 - DNA, 75 bp, Homo sapiens
gccagaccggtcctcgtttgtaccgtccctcttcagacatatgtagagtgtgtcggtcagaaggaacacctgaga

SEQ ID NO: 97368 - DNA, 74 bp, Homo sapiens
gctgactttactacctggaagacccatctgcttacttcagatagccaaggagtgtctgagtgctatgaagattg

SEQ ID NO: 97369 - DNA, 51 bp, Homo sapiens
aaaggaagtaccaggacttgcacagccactgagtatcatctgggcctgctg

SEQ ID NO: 97370 - DNA, 100 bp, Homo sapiens
tttctcctcattgaagctatgcagtatttctttggcatcactgcagctagtaatttgccttctggattatctgccccctggaggagaagacgagcgtctt

SEQ ID NO: 97371 - DNA, 75 bp, Homo sapiens
gacgcctttctgggagaccccgacaccggtgctggagaatctggtaaaagcaccattgtgaagcagatgaggatc

SEQ ID NO: 97372 - DNA, 75 bp, Homo sapiens
ggcggcggcagcgggtcttgggtcctccgagagcagcagcgatgctgttgatggagtaatgaatggtgaatacta

SEQ ID NO: 97373 - DNA, 90 bp, Homo sapiens
tgccctgagaactaccgccgctccgcagccactgccatggtctccatgaactgatttttttgtgcagtgggcaggaagaacccatcgggc

SEQ ID NO: 97374 - DNA, 90 bp, Homo sapiens
tggggctcccggacctggaggtcaaggactggatgcagaagaagcgaagaaagttcaggagccctggaaaggagaaggaataagacggca

SEQ ID NO: 97375 - DNA, 50 bp, Homo sapiens
ctgggccagatgctgagcatccaggcaatggcaccagcatgatatcattg

SEQ ID NO: 97376 - DNA, 118 bp, Homo sapiens
cggcgccggcctcttggagtcggagcttcgcgacggcagcggcaagaaggtggttagctcaaccaatggagagctgaatgttgatgatcccacgggagcccactccaatgcaccaatc

SEQ ID NO: 97377 - DNA, 51 bp, Homo sapiens
ctcggagatgcctggaatacagtaagatggcagctgaatggaagtgatatt

SEQ ID NO: 97378 - DNA, 75 bp, Homo sapiens
ctgagtcccagagtcggcgcggcgcgccttcatctcctcgtcctccaggcagcacaagccattgtggaatctcca

SEQ ID NO: 97379 - DNA, 90 bp, Homo sapiens
agtccctggatcaccgacagcacagacagaatccctgctaccagcgcattggagtgactgtctggcatcaccaagatgacactccacgcc

SEQ ID NO: 97380 - DNA, 98 bp, Homo sapiens
gctccccgagcagtttgagtccccttgcccgctccttcaggtgctggagaatctggtaaaagcaccattgtgaagcagatgaggatcctgcatgttaa

SEQ ID NO: 97381 - DNA, 100 bp, Homo sapiens
gtcccggtgctcacttggacatgaagcatcagatggtgaaggagaaggagacacagaagtgatgcagcaggagacagttccagttcctgtaccttcagag

SEQ ID NO: 97382 - DNA, 75 bp, Homo sapiens
atagagatgtgatgttggagaactacagaaacctggtctccctagtgcactgacaggcagaactcaccagtcaca

SEQ ID NO: 97383 - DNA, 98 bp, Homo sapiens
gcgaaacaaccatcgagatttccaaagggcgaacagggctgggcctgagcatcgttgggggttcagacacgctgctgtccttgctgagaagcagattg

SEQ ID NO: 97384 - DNA, 98 bp, Homo sapiens
ccgaggctcgcgggcggcgggcccgggcaggtgacagcagggacatgtctcgggagatgcaggatgtagacctcgctgaggtgaagcctttggtggag

SEQ ID NO: 97385 - DNA, 83 bp, Homo sapiens
gaaccatccacacatcataaagctttaccagcccgtgcagcctgccaggactcttccagacacgggatttgtcggtgaacaac

SEQ ID NO: 97386 - DNA, 96 bp, Homo sapiens
atgtcgcctgccaccgagccgggcccacctccccaccaaggaagggcacagactccatcaagatggagaacgggcagagcacagccgccaagctgg

SEQ ID NO: 97387 - DNA, 100 bp, Homo sapiens
tacagatagatgttaaggacatctgcaaatctttcaccaatgttgggataattcttcactattccacccttgccacagtactatgggtaggagtgacagc

SEQ ID NO: 97388 - DNA, 90 bp, Homo sapiens
gaagcggccccagcactcccagctgcgcagggcctgccaggtggcgctcgatccagacatttaatgtggatgcaccatgccagaccgtgg

SEQ ID NO: 97389 - DNA, 75 bp, Homo sapiens
cgaacggggggagattctgctcacggaactgcagtgtggcgtgtggaaagaagaggaaccagaaaagaatgtttg

SEQ ID NO: 97390 - DNA, 90 bp, Homo sapiens
ccggcggcggcggcggcggcgcgcgggggcgacgcgcgggaacaacgcgagtcggcgcgcgggacgaagagactctccaacatgtgcctt

SEQ ID NO: 97391 - DNA, 106 bp, Homo sapiens
tgtactactcccagactccgtacgccttcacgtcctcctccatgctgaggcgcaatacaccgcttctgggtcagagctccttaataagcatttatagtcagttttt

SEQ ID NO: 97392 - DNA, 100 bp, Homo sapiens
cctccgcctcctgggttcaagtgattctcctgcctcagcctcccaagtagctggattacaggacctccatgttcccaatgaggaccgcatcaagcagctg

SEQ ID NO: 97393 - DNA, 73 bp, Homo sapiens
aaattcgcctccatctgtaccatgaccctcaaactgacacaagacctacagagaaaaccctttgccaaatctg

SEQ ID NO: 97394 - DNA, 75 bp, Homo sapiens
ctggcgctagtctgaccctccgccaggcaaaaggaagtttcaggtttagctgtgcctcccagtgactataatgac

SEQ ID NO: 97395 - DNA, 83 bp, Homo sapiens
cacaccccacccacctgtggccagttgttgacctcctgtactggagagacattaagaagactggagtggtgtttggtgccagc

SEQ ID NO: 97396 - DNA, 50 bp, Homo sapiens
ggcatcttggctggcttgcagaaaaggacagtctccgtaagaaggatgac

SEQ ID NO: 97397 - DNA, 90 bp, Homo sapiens
tcccatcattgatgtggtgcgatcggcttcctgtgtccagtaccggttagtggtccgggatgtgaacacccttcagatccttcagctgta

SEQ ID NO: 97398 - DNA, 83 bp, Homo sapiens
ctaccagttcctcggggtgcagcagatgtccagctcgccgctgtccaagaaacgtcgcgtgtccgggcctgatccaaagccgg

SEQ ID NO: 97399 - DNA, 100 bp, Homo sapiens
tcttcctcctcctcctccccaccaccaccatctccatcacccaccaacaacaccacaataatccacagccaagaccccaggcaggcacagtcttccccgc

SEQ ID NO: 97400 - DNA, 80 bp, Homo sapiens
cacagacacagccggggtcgggagccgcccggggcagggctcgggagagcgggagccaaggaggtcctgctgctggcccg

SEQ ID NO: 97401 - DNA, 83 bp, Homo sapiens
gtggtttttcggatcatgtctggtggctccgcggattataacagagtccctgtgaagcaggaagagtgagggcaggttcactg

SEQ ID NO: 97402 - DNA, 95 bp, Homo sapiens
ctacttttgcttcacctgagactgctccagaagtggagaccagcagaactccaccagtttgtgtttaaggagaaactaacaatgaaaacggcctc

SEQ ID NO: 97403 - DNA, 75 bp, Homo sapiens
cgcgccatggcttctggagccgaatgctgtgggccctgagggaaaggatcacagaggcgctgagccgggatggct

SEQ ID NO: 97404 - DNA, 51 bp, Homo sapiens
cctggttctggaatcctcagttcaagaaaatgcttggacagaagagatgag

SEQ ID NO: 97405 - DNA, 74 bp, Homo sapiens
cacagggcctcctgccagccccagcccctggagaggatgcaggaggctgaaccgtctgagcccagaagtgctga

SEQ ID NO: 97406 - DNA, 75 bp, Homo sapiens
caattgaaccctataaaaaagttatcagccatggggcattttgaaagcgaagcagaagccgtagaatcagcggcg

SEQ ID NO: 97407 - DNA, 90 bp, Homo sapiens
gacgaagcttggaagttgcagaaggtgaccaagaatatggcccaggtgaccaaagccctggacaaggccctgagcaccatggacctgcag

SEQ ID NO: 97408 - DNA, 150 bp, Homo sapiens
gtcggggtcggggctgcagccgtcatgccggggatagtggagctgcccactctagaggagctgaaagtagatgagatctcttccctgaagaacaggctgaaaaaggtctccacaaccactggggatggtgtggccagagcgttcctcaag

SEQ ID NO: 97409 - DNA, 90 bp, Homo sapiens
gcgagctgagtggttgtgtggtcgcgtctcggaaaccggtagcgcttgcagcatgctgtggtcgccaggacccccccagagccaagacct

SEQ ID NO: 97410 - DNA, 100 bp, Homo sapiens
gaccacatcaaagacagctttcacagtttgcgggactcagtcccatcactccaaggagagaagtgcatacatagagacgtgaagccagaaaatatcctca

SEQ ID NO: 97411 - DNA, 74 bp, Homo sapiens
atcattctgcaagcaggcaacctgaatacaggcaattcttcagttagatagtcctgaatctgctcagtcaatgt

SEQ ID NO: 97412 - DNA, 100 bp, Homo sapiens
tccttggtcgccgcgtccttggctggcgtctgccaaggggccaagggatgagctggggccctccttcccaatggcatctccccctggtctggaactgaag

SEQ ID NO: 97413 - DNA, 83 bp, Homo sapiens
agtggatatagcacaccatccccagccagcccgcctgaactgtaagcactgtgggaagccggtgatcgacgtgaggatcggga

SEQ ID NO: 97414 - DNA, 82 bp, Homo sapiens
agtgatggaccgtgctagtgacctgactgatgccttcgtggaggatcaaaaccattcaagtgcaagatatgccattttgcaa

SEQ ID NO: 97415 - DNA, 75 bp, Homo sapiens
ctctttgacacacagcagttcttgtcagacttatcagatgtagacttcctagatgattcttcaacggagagtttg

SEQ ID NO: 97416 - DNA, 75 bp, Homo sapiens
ttgataacaccctgtaacagctgagtatcatgatattagctggtttgacatcaagtcatttgtgagtcatcagat

SEQ ID NO: 97417 - DNA, 82 bp, Homo sapiens
atatcttcctgtcatggttccccttctactacatgctgaaggtcttgagtcagacagagcaccagccttggggaccctggac

SEQ ID NO: 97418 - DNA, 82 bp, Homo sapiens
aggtcctgccgtccatgcggaagatcgtcgccacctggatgctggagagacgtctcccacaacctgctccgggcgctggacg

SEQ ID NO: 97419 - DNA, 90 bp, Homo sapiens
acattctcctaggctctcccggaagtgaatactctggcaatgcctatggccacaccccctactcctcctacagcgaggcctggcgcttcc

SEQ ID NO: 97420 - DNA, 100 bp, Homo sapiens
atcgactgggctcttacagcggccccacctcggtctcccgccagcgcgtcgaaagcctgaggaaaaagcggccgcgattccagacagcattggaaaagac

SEQ ID NO: 97421 - DNA, 98 bp, Homo sapiens
gtcctcattgcaacgtggttgggtgaggcaatggaacaaggtttacgagactgctgtcgatccatacgaattggaaagatcctgattcagagtgatga

SEQ ID NO: 97422 - DNA, 83 bp, Homo sapiens
ctggaaggtgcgtgtggggctgggtctcggagtgggagacgtggagtgcaggttgctccttgagggcaggacagttcttatgg

SEQ ID NO: 97423 - DNA, 101 bp, Homo sapiens
cgcgctgacaggggggcctggccgcgcagccgagttgctggagaatgtaaccctaatccataaaccagtgtcgttgcaaccccgtgggctgatcaataaag

SEQ ID NO: 97424 - DNA, 99 bp, Homo sapiens
aaagacgtggaccggacgagactggaggcaaatctaagtaggtctttgagagacacagcagtcaggctttctgagttgggatggttgcataataaaatc

SEQ ID NO: 97425 - DNA, 101 bp, Homo sapiens
ctgccctgcgcgctgctggctgaacgacaaatcctccacccctgggctcaagtccaacacaccaaccccaaggaacgacgccccaactccaggcaccagca

SEQ ID NO: 97426 - DNA, 71 bp, Homo sapiens
ctctggcagagcaccgaaccccagatgtgctcaagaaatgccagcaggcctccaagactgcagagaatgcc

SEQ ID NO: 97427 - DNA, 90 bp, Homo sapiens
tgctggcacatccgaggcgttctcccgactctggaccgacgtgatgggtatcctgaaccaactggattaaagagtacttggatactgccc

SEQ ID NO: 97428 - DNA, 98 bp, Homo sapiens
tcagtcatcgcagcaacagccgacgcctgtgcacgcccagcctcctggcacaccggaatcagagatcattgatttcttcctgggggcctctctcaagg

SEQ ID NO: 97429 - DNA, 100 bp, Homo sapiens
cagggggaacaaaagcatctccatgagtgtggctgggtcacgacaagaactgaaaagctccatcattggcaagaagaagccagcagcagctaagaaaggg

SEQ ID NO: 97430 - DNA, 100 bp, Homo sapiens
ctcccgcccaaggagaatgcgctcttcaagcggatcttgcatgtgtttgatgatctcagaggctcagtatccttgtcctgggttggagatagcactgggg

SEQ ID NO: 97431 - DNA, 75 bp, Homo sapiens
tggggaaccccgagctgtcattttacctgtggcaacaaccttcgggctgcaggggccgaggctctgggaaaactc

SEQ ID NO: 97432 - DNA, 75 bp, Homo sapiens
gatcagtcatacgggaagagagagtaagagtccctctccaagatcctggatgtggccagtttggaggtgctgaac

SEQ ID NO: 97433 - DNA, 87 bp, Homo sapiens
gaatgatttatagctaagactccaggacacccctgaagccgagaaatgtacactaccagaagatcatccaccgtgacatcaaacctt

SEQ ID NO: 97434 - DNA, 101 bp, Homo sapiens
gcaagaccgaattcagaaggatatcgacgtcgtgatccagaagtccagagctgaggactgcctgtttgcagcaaaagctgatgaagcattgaaagccaaag

SEQ ID NO: 97435 - DNA, 101 bp, Homo sapiens
agatgagcaaagaatgacagcaagaggcaaaacttcggacatagaggccaaccaacctttggaggtggtcgtgtgatggtaacagatgctgacaggtcaat

SEQ ID NO: 97436 - DNA, 100 bp, Homo sapiens
tgcacccagaggccggggaccttgccaaccctcccaagaagttcagagcagacaactaaactggtaggtggcagcagaggaaggaattcttcagattgat

SEQ ID NO: 97437 - DNA, 134 bp, Homo sapiens
cagagcacagcatcgtcgggaccagactcgtctcaggccagttgcagccttctcagccaaacgccgaccaagctggcgttgcagacggggcgtgaacccccacccatctggcgagtccagaaggcccttctgca

SEQ ID NO: 97438 - DNA, 99 bp, Homo sapiens
ggacaaatttcccatggaaggaggacagaaggaccccaagcagcggatcatcccctttctgccagtgacttctgacagctctctccatggaaggaggcg

SEQ ID NO: 97439 - DNA, 101 bp, Homo sapiens
accgaatacagctgtgacctggaggaaatttatcagtggtgtggttcctcgtgcaacaaatatgaacgtctgaaggcaaaccaggtagctactggcattcg

SEQ ID NO: 97440 - DNA, 50 bp, Homo sapiens
atgtacctgttaccactttcaaaaatggagtcatcagaacccactgtgag

SEQ ID NO: 97441 - DNA, 100 bp, Homo sapiens
gcttctctacgcagaacccgggagtaggagactcagaatcgaatctcttctccctccccttcttggtgtcgtgaaaactacccctaaaagccaaaatggg

SEQ ID NO: 97442 - DNA, 90 bp, Homo sapiens
gggagatcccaggcggtgacagagtggagccatggctagagatgaggaagtgctggctgatgtccgcaccatcgtgaaccagatcagcta

SEQ ID NO: 97443 - DNA, 119 bp, Homo sapiens
agggaccaggggggcggcagcgctggacacccagcctccagcaaggaactagcttcatctgagcagaataaaaatcatataaataatgaactaaaaagaaaggaagagcagttgtccag

SEQ ID NO: 97444 - DNA, 75 bp, Homo sapiens
cggacctctctgggctggctattaagattcaaccctatgaaaagataaaggccaggggcttgcctgataatatat

SEQ ID NO: 97445 - DNA, 82 bp, Homo sapiens
cggggacaccacctcccaggacgactgtgtcagcaaagagcgcagctcctccaggcgcggttgacctgcccctgctgtaaca

SEQ ID NO: 97446 - DNA, 94 bp, Homo sapiens
cgaggcaaggagctaaagcagcgtgcgttcagccctgggaaattccgggtagatatgcctggctcaggcagtgcattcatccccaccatcaacg

SEQ ID NO: 97447 - DNA, 100 bp, Homo sapiens
agtttctacagaaatgagatccgcttcctgcccaacggaacaagcacaagccatttgcaaggttttatccaccgcttttgactctgtattaacatctgag

SEQ ID NO: 97448 - DNA, 74 bp, Homo sapiens
actttggtggacgagttggagtcatctttcgagggttaccctggataccccgatgaacaggaaatcaatgcctg

SEQ ID NO: 97449 - DNA, 96 bp, Homo sapiens
tttgccatgctgctggcaagaatcaaactgaagggcaccgtgggaagatgctcatgaagcagcaggaccggctggaggagcgagagcaggacattg

SEQ ID NO: 97450 - DNA, 82 bp, Homo sapiens
gagattctcagaatcctcttctgagtgatggagatttgtctaccatgattggcaagggtgatcagcccatgacctaaacctc

SEQ ID NO: 97451 - DNA, 75 bp, Homo sapiens
cttaacccagaagtagctgaatgtgttactccattgctgaggagtgatacctttgtctggatatggaggaacaag

SEQ ID NO: 97452 - DNA, 90 bp, Homo sapiens
ttcgactccgaagacttctctacgtcggaggaggacgaggactacgtgccgtcgggctgcggggtccccgccatccaccctgtgctcagc

SEQ ID NO: 97453 - DNA, 51 bp, Homo sapiens
gttaaagtaacagatgatttagttcaacatctgaatgaattgatgacgaag

SEQ ID NO: 97454 - DNA, 83 bp, Homo sapiens
agaaaacaaagtgtcaattatttcaagaattaccatagacatctttccaggaacagcgtgaggaggacagaagcacccaacag

SEQ ID NO: 97455 - DNA, 98 bp, Homo sapiens
tggagcttggtttcgggatctcggtgctgcagacggcgagacctcctgcacaggaagaggagcaggacttggatggtgagaaggggccatcatcggaa

SEQ ID NO: 97456 - DNA, 82 bp, Homo sapiens
cggagatcctgatgaagttcgagcactaatatttaagaaagaagatgttaactttcagggagatgcacttatttacatggaa

SEQ ID NO: 97457 - DNA, 73 bp, Homo sapiens
cactggaagaagatgaagaggaactttttaaaatcttaatcgaaccctgaagaagatgggacagagaccttga

SEQ ID NO: 97458 - DNA, 80 bp, Homo sapiens
ataggaaaaagtgttaaaacttctcctactacacaatctaagggtgtcagtgtggaggcagttgatccagtgttccaagc

SEQ ID NO: 97459 - DNA, 96 bp, Homo sapiens
agaagtggagatcctgatgtttctcagtgccattgtgatgatgaagaaccgcagatccactgaggagtacctgtcatttgcctttgagcattgtca

SEQ ID NO: 97460 - DNA, 82 bp, Homo sapiens
ccggccttggtgcggcgagccgagcgaggcagctctgagccgcgcggagtccaaaactacttacctggaagaccttccacca

SEQ ID NO: 97461 - DNA, 100 bp, Homo sapiens
cctcctaagtagctgggaccacagcctccagatatgggctttgagactgcgcttgccccacagcacacctccttagatgaaattatcttttttgcatatg

SEQ ID NO: 97462 - DNA, 83 bp, Homo sapiens
gaccacggcgcagacgcgggcgagctgcggctcggacgccagcggacacgcgggcgagttaccggtattgtaagaacaagccg

SEQ ID NO: 97463 - DNA, 101 bp, Homo sapiens
cgacggcgtactttgggcttcatcatggaggactacctgcagggttgtcgagctgctctgcaggattgcaagtcaagtagctgctttggaccttggctata

SEQ ID NO: 97464 - DNA, 50 bp, Homo sapiens
gcctcctgatagcacacagaaagcaggaagaagatgagccttaggtctga

SEQ ID NO: 97465 - DNA, 101 bp, Homo sapiens
ctcggggtcccggtcgcgaggaggaggaggatgtggcgcgcggaggggaaatggctgccgaaaacaagccggaaggaaacttggatttaactggccagaag

SEQ ID NO: 97466 - DNA, 73 bp, Homo sapiens
gctgacgacacccctggtggatggcgaggatgagaggctgggatatgaagaacaacagcctgaggttccaatt

SEQ ID NO: 97467 - DNA, 87 bp, Homo sapiens
tgtgctacctgacgccaattctcggagctcttatcgccgactcgtggctgggaaagttcaaattgtctacaacctgttgtctctgcg

SEQ ID NO: 97468 - DNA, 75 bp, Homo sapiens
gtctgcggaagtgcagctgcctcagttcttagcgcagggtgtgagatggcagacaggtttgcaggaaaccctcag

SEQ ID NO: 97469 - DNA, 100 bp, Homo sapiens
tggcggaggcggcaggaaccgagagccaggtccagagcgccgaggagccggtctaggacgcagcagacaaagaaacagccttggtataatagcacgttag

SEQ ID NO: 97470 - DNA, 75 bp, Homo sapiens
cagaaattatagaagatttggccttctactctagtacagtagtatctctattggatttaggtcctgaatatgaag

SEQ ID NO: 97471 - DNA, 100 bp, Homo sapiens
attcggaaagacacctggccagcggtccagagctgatgcagctacaaggctttggccgaccaagtgtgtaccatgctgctattgtcatcttccttgaatt

SEQ ID NO: 97472 - DNA, 98 bp, Homo sapiens
tggatgattcgtagctaagacttcgcgacacccttgaagctgagaaatgggcagctggtggaatttttgaagaaaatggaatctcgaggccccctttc

SEQ ID NO: 97473 - DNA, 125 bp, Homo sapiens
ctccagcgaagaagtagacatggcgagcgactccccggctcgaagcctggatgaaatagatctctcggctctgaggaaaacctcggatcaattctcagctggtggcacaacaagtggcacaacag

SEQ ID NO: 97474 - DNA, 75 bp, Homo sapiens
cagagaccaagatcactgataagaaatgttctcgacagcaagggagtgagttttccgggagtccctacagccacc

SEQ ID NO: 97475 - DNA, 113 bp, Homo sapiens
tgtgtggggccggaggagtcagctgtgtgtccagaacgtgccatggagacgcttaacggaattgcattttgtgaaaaaagaacaagaattttctgcaaggatcatatctaagt

SEQ ID NO: 97476 - DNA, 87 bp, Homo sapiens
atgagaaaaagcaggttttcacttctgagaaattcctggtcatggcttcagaggatgattcaattagcagagcctcacagacaatgg

SEQ ID NO: 97477 - DNA, 100 bp, Homo sapiens
gggccggacacgctctgcttcgacaaggacgagttcatgaaggctccatctactctttgaagcttctgcccagcttgcattgtttctaggagaacctgcg

SEQ ID NO: 97478 - DNA, 100 bp, Homo sapiens
atgaattgggtagagagaccaaagatcttgatgaggctctcggactctaacaaggagaacgcgctgcacagctacagcacccagaagggccccctgaagg

SEQ ID NO: 97479 - DNA, 100 bp, Homo sapiens
gataaacttttggagccagttgtttccatgactgacttccttttggtagtactgcgtgatgttgttcaggcttatcctgaagttcgcattgttcttatgt

SEQ ID NO: 97480 - DNA, 75 bp, Homo sapiens
gaatccaagttaacccttaccacccagcagcagggcatcaaggatgccggaccagatctctgtctcggagttcat

SEQ ID NO: 97481 - DNA, 122 bp, Homo sapiens
ggacaagatgaccacactccaggaatgccagtgcatcttttgcacagctttggccagtcagtgctgaaagatgtaagcaaagtgaagaagctgaagcaatctggagagcccttcctgcagga

SEQ ID NO: 97482 - DNA, 95 bp, Homo sapiens
atctataacctccttgaaaaactgggatacatggatctggcctcaagactggtggttctaaggcccagcagctactacaaggattgcaagccagt

SEQ ID NO: 97483 - DNA, 90 bp, Homo sapiens
cgggacatctgaaagccaggaaatgcatgcttttcacttccactgcatctctcgctggctcaaaacacgacaggtgtgtccattggacaa

SEQ ID NO: 97484 - DNA, 74 bp, Homo sapiens
caacagcggcctctagtgtctggaggaggaagtgtcagcgctactgccgcagccttatttagtgtctctgacaa

SEQ ID NO: 97485 - DNA, 100 bp, Homo sapiens
ggatataccgccccaccactggggccctcctgctgctcactgcccttcagctctgtgaccagatgaagagacttccagtgatgtgaaaagtagttgcagc

SEQ ID NO: 97486 - DNA, 98 bp, Homo sapiens
cgaaaccctcccgtcaactcaggcccgatgagagaaagggaaagttaaggatgctggagcagaacaatggatttctctttctctttcatgcaagggat

SEQ ID NO: 97487 - DNA, 75 bp, Homo sapiens
tttcaaagcaggatgatgtggttcagcttgaattacccgttacagagtgtttgaacgtcactcagttattaaaat

SEQ ID NO: 97488 - DNA, 105 bp, Homo sapiens
agattacagagaaaaaaccaacaccttcctgtgcagtcctgttggaatttgaaaacgggccttactatacatcatatcccccatcaccagatttgtgacctgcca

SEQ ID NO: 97489 - DNA, 100 bp, Homo sapiens
agaaaaagactcgctatgacagtggacaggacctagatgaggagggcatgaatatgggtggctctgctgccatgaaggtgaagattaagtgctggaacgg

SEQ ID NO: 97490 - DNA, 50 bp, Homo sapiens
cctgctctgtcctcatccccggcttaggttctgccacttgctgggaaaac

SEQ ID NO: 97491 - DNA, 97 bp, Homo sapiens
aggaggcagaggcacttatgcttgtcaggatgtcagctgcaacgagatcacagcgttgccccagcagataggtcagttgaaatctctacgagaactg

SEQ ID NO: 97492 - DNA, 85 bp, Homo sapiens
ccaatgtggacggactcactgccctgcaccaggcatgcttccagaagagtggtgcatcagtggttgctattcgaaaatacatcat

SEQ ID NO: 97493 - DNA, 74 bp, Homo sapiens
ccttagctgtgctcgcgctactctctctttctggcctggaggctatccagcaaataagaatgtctaagcccctg

SEQ ID NO: 97494 - DNA, 82 bp, Homo sapiens
gtggtttttcggatcatgtctggtggctccgcggattataacaggtattaatctctggagaagacacatccacagttagcac

SEQ ID NO: 97495 - DNA, 76 bp, Homo sapiens
cccgagccgttccccggacacctggccaggttctgcggcatgaggaatttgaagaaggctgcaaagctgcctgtaa

SEQ ID NO: 97496 - DNA, 75 bp, Homo sapiens
tccatttgtgccacagatgggtgatgagatcggacagctggcttttaaaggaatgaagagactcaatagaatcca

SEQ ID NO: 97497 - DNA, 100 bp, Homo sapiens
tctgttgactgtaaaggtgctggtaagatttcttctgtgcctgtcaggcagttctgatgggacaattcgcctttggtcccttggccagcagagatgtata

SEQ ID NO: 97498 - DNA, 97 bp, Homo sapiens
ggaacttgctcgactgagagactcaggtgctggagaatctggtaaaagcaccattgtgaagcagatgaggatcctgcatgttaatgggtttaatgga

SEQ ID NO: 97499 - DNA, 90 bp, Homo sapiens
gttagtttctgcgacttgtgttgggactgtgctacagttgaaactccagcagcgccggacccgggaagaactggtgagccaagggatcat

SEQ ID NO: 97500 - DNA, 99 bp, Homo sapiens
gttcatctactgggtggatgggcgccagaacatcaagcgagccaaggacgacgggacccagggtaagcttgatgattaccaggaacgaatgaacaaagg

SEQ ID NO: 97501 - DNA, 134 bp, Homo sapiens
tttaggaacactacagcggggcaaagaggagaacatttcttgtgacaatctcgtcctggaaatcaactctctcaagcatttgcccccagcacagcaaacgtttcctgagagctctaaccaaagacaaacttttg

SEQ ID NO: 97502 - DNA, 100 bp, Homo sapiens
ccagttcctggccaagtttgagatcgccctgcccgtcgccaatgacaggtgatgatgaacagtctacacagatggctgcaagttgggaagatgataaagt

SEQ ID NO: 97503 - DNA, 90 bp, Homo sapiens
ccccgtttccagcctccggtgctcaccggctgttcgtggtcagttatatttgtggatctcgatgctcacaatcgcaacaggcaaactttg

SEQ ID NO: 97504 - DNA, 83 bp, Homo sapiens
caagacccttgtgctcgttgtcgccgcggtcctgctgttgacaatgcagatcttcgtgaagactctgactggtaagaccatca

SEQ ID NO: 97505 - DNA, 101 bp, Homo sapiens
agctgctggaggacgagggccagctgacggagatggtgcagaagatggaggagtgactgtcatgtggcatgggtctctgcccaagctcgtaatgagactat

SEQ ID NO: 97506 - DNA, 99 bp, Homo sapiens
tgaagaattggtatttcaaatgaccaccatgttgcaaaagcacgaaagcaagagattatcaaagtcactgaacaactgatcgaagctatcaacaatggg

SEQ ID NO: 97507 - DNA, 78 bp, Homo sapiens
ggaagtctgcatccacattgcacataaagttggaatatttcactgctacatggagtactcccgactgcgtggtgaggc

SEQ ID NO: 97508 - DNA, 100 bp, Homo sapiens
gttggtgtgattagcttcgcagtctggaaagctttaggagttcacagtcttctgcagaaagccgtcattacacctgattttgaaaaaaaccactgtgttc

SEQ ID NO: 97509 - DNA, 82 bp, Homo sapiens
cttagttgatgatttagttgattctctgaagtcgttccccatcaggaagtcctcgcagaagtgcaagtcctgaaagaatgga

SEQ ID NO: 97510 - DNA, 86 bp, Homo sapiens
ggcattgaccccttgtccagttactctaacaagtctggagtgtctcaatttaaaatggtgaattactcctatgatgaagatctgga

SEQ ID NO: 97511 - DNA, 75 bp, Homo sapiens
cttgaggatcgaatcttcactcccgctgtctcagcagtctacagcacggttataagcaatgccttgaaagtttgg

SEQ ID NO: 97512 - DNA, 100 bp, Homo sapiens
cgtactttctatgagaagcgtatggccacagaagttgctgctgacgctctgggtgaagaatggaagggtgcagaagctgccaatgtgactggcccggatg

SEQ ID NO: 97513 - DNA, 100 bp, Homo sapiens
tgcagctagagaattagaagatgatgagcagtttgtttctctgtatggcacagaagaatatttgaggaagccagatcgctgagggtccggtctccagttt

SEQ ID NO: 97514 - DNA, 100 bp, Homo sapiens
cggaaggacccccagcggtgcacgctgctggtcagccagttccgctcctgtcagaaatgcactcggtgatggaaagagagccactattctgaagaacact

SEQ ID NO: 97515 - DNA, 50 bp, Homo sapiens
ggaagttttgcctgaggattactatgcagaatttctgtttctgggactct

SEQ ID NO: 97516 - DNA, 73 bp, Homo sapiens
ggtgtgccggcacctaggccgagatggtggatgcttccaaaagcatcgaagctgtccatgaggacatccgcgt

SEQ ID NO: 97517 - DNA, 101 bp, Homo sapiens
aaccgatctgcccgttgtgtttgtgaaacagagaaagataggcggccatggtccaaccttgaaggaagaaggagagacgaccatcttgcaactagaaaaag

SEQ ID NO: 97518 - DNA, 100 bp, Homo sapiens
tccaattaaagtaacactggcaactttgaaaatgtctgtacagccaacggaccgtttacctcttgctgtggtaggtagtaatactatcattgaagttaat

SEQ ID NO: 97519 - DNA, 82 bp, Homo sapiens
cacggccaccctggggttcaggatcgagggaatcaagccttatgccagcctggaccatcttggaggcagtgtaggatcatgg

SEQ ID NO: 97520 - DNA, 83 bp, Homo sapiens
gaactctgtgatgtcacactcaaggctggtgggcttaaactggatggccggcagctcaaggttgacttggcggtgacccgtga

SEQ ID NO: 97521 - DNA, 100 bp, Homo sapiens
tctacaaatatcagagccatggctcagatcagcctctgtggactcggtgcttctcctggcaagtaaaccccaaggaggactgaccagttcttgaatttct

SEQ ID NO: 97522 - DNA, 86 bp, Homo sapiens
ggaagcagccgatccagcctgcggagcctgtggggcaggttatacattggctcttcaaagacgttcacctcatcagagaaatccct

SEQ ID NO: 97523 - DNA, 75 bp, Homo sapiens
tattacttcagcaacagtccttcaaagattccgaaatttttaacctctgaagctgtgccttcacatgatctagga

SEQ ID NO: 97524 - DNA, 82 bp, Homo sapiens
cagcgagccgccgacccgccgagcaaaatggctctttattgagaaactaccaaaacatcgagattacaaatctgctgtcatt

SEQ ID NO: 97525 - DNA, 50 bp, Homo sapiens
ctgcacatttgaagagctgtgtgagagaacaaatcttcctattttcaagc

SEQ ID NO: 97526 - DNA, 80 bp, Homo sapiens
cgaagcacgagcagatcctggtcctcgatccgcccacagacctcaaattcaaagggtacccagtgtgttgaacaaattca

SEQ ID NO: 97527 - DNA, 100 bp, Homo sapiens
ccggagccaaggtccgctcgggcatcagtgtttttctgaccgaagttctcatttcctgacaatggaaatggaacaagaaaaaatgaccatgaataaggaa

SEQ ID NO: 97528 - DNA, 101 bp, Homo sapiens
ctcaggacagggctgaggaaccatgtctccatccccgaccgccctcttctgtcttggtgctttgaagaagagtctcacagccaagcaggtccaggcggatt

SEQ ID NO: 97529 - DNA, 82 bp, Homo sapiens
cgaaggtgaagagttgtcccagctcggcccgcgggggagccccgggagccgcacggctatgacttctgccaggtcctgcagt

SEQ ID NO: 97530 - DNA, 100 bp, Homo sapiens
ggattatggggactgtatatggtttgtgaatcatccactgttgcagacatgctacatgttgttcaaaaagaatgtcgtgatgagaggagatggattgaaa

SEQ ID NO: 97531 - DNA, 100 bp, Homo sapiens
aggaagcacaccctgtcctatgtggacgttggcactgggaaggtcttgatgactgtttgcagcagtatattaagaactttgagagggagaagatcagtgg

SEQ ID NO: 97532 - DNA, 100 bp, Homo sapiens
cagaggaagaggaaggaaaagacaatcattgcttcaagaatgctgacccttgtagaatcaccttcaggccattcagaggaggaaagagaggggaatatga

SEQ ID NO: 97533 - DNA, 88 bp, Homo sapiens
ggctttttgagcggtcccgcatcaaggctctggcagaccccagttattaaagcttttggcatcttgaagcgagcggccgctgaagtaa

SEQ ID NO: 97534 - DNA, 100 bp, Homo sapiens
gccatggacgtcatgtgctgcacggcctcgatcatgaccctgtgcgtgatcagcattgacaggcagcttcaaaagatggtccatgatattaaaaacaatg

SEQ ID NO: 97535 - DNA, 96 bp, Homo sapiens
tatggctaagcaagctcagattccattagctgctgtcatcaagccctttgccaccattccttcaaatgaggatatgaacgagactgccaaacaaga

SEQ ID NO: 97536 - DNA, 100 bp, Homo sapiens
cggcgcccacctggtgactctggagctgcacagcgagggcaccaccgtcctgctcttccagttcgggatgtggtcttgctgcggagcccgaggccccaat

SEQ ID NO: 97537 - DNA, 81 bp, Homo sapiens
gtgtgtctgccgtggcgctcttgtaatttgtgaggcaggctcctgaggaatgcagtgcgcacggtggctcacgcctgtaat

SEQ ID NO: 97538 - DNA, 74 bp, Homo sapiens
tggaaatagcagtgcttcaggaatagaaatcttggcaatcgaaaggtcagaagagatcaattctacagaaattt

SEQ ID NO: 97539 - DNA, 87 bp, Homo sapiens
tcttgcgagatatctggccgcctctgccgcagctggaggcctgaacttttccgattaagagttcttgagttaaatgcatctgatgaa

SEQ ID NO: 97540 - DNA, 100 bp, Homo sapiens
aaaatcttcgtgaaaagatctgctgcaaggaactgatagcttatggttctccattgtgatgaaagcacatggtacaggggtcttgctcctcagaacaaac

SEQ ID NO: 97541 - DNA, 100 bp, Homo sapiens
gaagcatttacaataagaagagaagatggacagtttcagtgcattacagtttcttaaacaattaggtctacatcctaactggcaattcgttgatgtatat

SEQ ID NO: 97542 - DNA, 100 bp, Homo sapiens
accggacctacctccatcatcacatgaccaaagcattcctcttctatggaccatggccaacctggagcgcaccttcatcgccatcaagccggacggcgtg

SEQ ID NO: 97543 - DNA, 82 bp, Homo sapiens
aaagaggaacaaagtcatcaagctagtggacatcacggacatccagaagcaggttcaggagaagtggcacctggtggaggac

SEQ ID NO: 97544 - DNA, 100 bp, Homo sapiens
tctgcattttgttaagaagcacctcatgcaagcgagggacctgggactgctcacagccaggctgatcttcagacaagttctcagcgtttaaatctttcag

SEQ ID NO: 97545 - DNA, 75 bp, Homo sapiens
aagctggaggtgcaaatggaaacatatcaaaacccccaactctggcaaaggtttctaagcatgaattgaggaaca

SEQ ID NO: 97546 - DNA, 90 bp, Homo sapiens
acacatccgcacccacacgggcgagaagccctacgagtgcaacatctgcaaggtccgcttcaccaggcaccatgactcctgtgaggatgc

SEQ ID NO: 97547 - DNA, 74 bp, Homo sapiens
agacctgaactcttcagataatcagagtggaggaagtacagccagcagtaatcctcctcttcccaatccttttg

SEQ ID NO: 97548 - DNA, 75 bp, Homo sapiens
attcgatggacatggacatgagccccctgaggccccagaactatcttttcgcaaccatgtccaagggacctgcag

SEQ ID NO: 97549 - DNA, 100 bp, Homo sapiens
ccaatgcccaagacattataaacaaatcagagcctcattcccttagtagtgaagcattgatgaggagagcagtgtctttggtaacagatagcacctctac

SEQ ID NO: 97550 - DNA, 100 bp, Homo sapiens
tgaagaagactatggcatcacaagtgtcgtaatgcggaaatctcatgaagcccgtgaaaaattgctccgtcttggaatttttagacaagtggatgttttg

SEQ ID NO: 97551 - DNA, 100 bp, Homo sapiens
aagcattacagtttcaaaagagtgtctgtgaggggagccttatgtttcataaacttagacctgtagatcaactgaggcatctacttgtgagtaatgtggg

SEQ ID NO: 97552 - DNA, 50 bp, Homo sapiens
gtgaggacacagcagccccatttcatccgcacttccactaatagccaagt

SEQ ID NO: 97553 - DNA, 101 bp, Homo sapiens
ctcctgaatagctgggattacagagatgggcttttgccatgttgcacagactggttttgaactcctgaccaagtgatctgcactccttggcttcccaaagt

SEQ ID NO: 97554 - DNA, 100 bp, Homo sapiens
ttggagaggccgagggtttgatgaaggtggaggcagcgcggctctcaggtattatcgggggacccacggggtcattgtggtttacgacgtcaccagtgcc

SEQ ID NO: 97555 - DNA, 100 bp, Homo sapiens
tttcttctcttggcaagagagctctgcatcaatgcgccggccatagttacagaatgtctgaaggggacagtgtgggagaatccgtccatgggaaaccttc

SEQ ID NO: 97556 - DNA, 97 bp, Homo sapiens
gcctgccctgaaaagagagtagatgacttctccttcattgatagaatgaacagccttccctcgtttggtttgacagaggaaagttttatttgacttt

SEQ ID NO: 97557 - DNA, 100 bp, Homo sapiens
tgtgatttatgacgacgtcccctgcgagagcccagatgcgcatcagcccggcagcgtgccgtccctggctgcagggctgctcttcggcagtctagccggc

SEQ ID NO: 97558 - DNA, 90 bp, Homo sapiens
gacgcactggcagttatcaatcagcaggaggattcaagcgaggtgcaccccagacatggatgtcatcctcaacattcctgtggaagagcc

SEQ ID NO: 97559 - DNA, 83 bp, Homo sapiens
ctcctgatacagcaggcgctcaccatgttccctggagtgcctccggagccagcgtggtggccatagacaacaagatcgaacag

SEQ ID NO: 97560 - DNA, 51 bp, Homo sapiens
cggagcccccagcgcagcggccgcgatgatgattattctccaccgtctaag

SEQ ID NO: 97561 - DNA, 100 bp, Homo sapiens
cgcatgtcatccacaagctctcctttggggacacgctacaggtcctggtgcttgatggtcgaggccatctcctgggccgcctggcggccatcgtggctaa

SEQ ID NO: 97562 - DNA, 100 bp, Homo sapiens
cttggagcctaggggcatcggcaggagagtgtgtgggcagccaaggccacctttgatgccatttctaagacctacagctacctgacccccgacctctgga

SEQ ID NO: 97563 - DNA, 50 bp, Homo sapiens
gtggaaagttccaaactgtctgatgctggtgaactttgaggcgctgatca

SEQ ID NO: 97564 - DNA, 50 bp, Homo sapiens
tccagaccaggactttgacaaagaggaggctgtaggagtgcaattggaac

SEQ ID NO: 97565 - DNA, 75 bp, Homo sapiens
ggactaatctgatcgggtcttccttcatacgttatgaagaggacatgtactggaggagaatggaggaagaacaac

SEQ ID NO: 97566 - DNA, 82 bp, Homo sapiens
cacccctacaccatgacaacgccttacccttcgctcccagcccaggtactccaaagattcaggtttactcacgtcatccagc

SEQ ID NO: 97567 - DNA, 75 bp, Homo sapiens
agctaggccagcggctcggcggtgagatcgtcagcgctgactccatgcagggtcccgggattcttgagctgtgcc

SEQ ID NO: 97568 - DNA, 83 bp, Homo sapiens
tccatccgcccactcagctatctgtttatcaaggtctggatgtaccgactgcttttggaataaaaagattcccaggatgtgag

SEQ ID NO: 97569 - DNA, 100 bp, Homo sapiens
gacgcagctgcggaaagccgaggcggtggcgctcaagtaccagcagcaccaggagtccctctccgcccagttacaagagcctggagaaagttcttgtgga

SEQ ID NO: 97570 - DNA, 82 bp, Homo sapiens
gacaagccgctggcagccgcggatctcaccgccgctcagggacatgtattcctctgagaaaccttggacagcagattttggt

SEQ ID NO: 97571 - DNA, 83 bp, Homo sapiens
cggcgcctgttctcgggctgtttggcgggctctgacgcccgctctgcggcttcggtgtttgaacaggccacagtccaggagcg

SEQ ID NO: 97572 - DNA, 100 bp, Homo sapiens
gccgcctgaagtgcgggcgcagctggcggagctggagctggagctctcggagggccatcagcatcagcaaagccatcaacacccaggaggcccccgtgaa

SEQ ID NO: 97573 - DNA, 100 bp, Homo sapiens
ctttgatgcgacctcaggaaggagatgaggacccccgcagcaaacacaagtttaagatccacacgtactccagccccacgttttgtgaccactgtgggtc

SEQ ID NO: 97574 - DNA, 100 bp, Homo sapiens
tggaaaccagctgcacatgctaaccaacaggcacgacaagtttctggacactctccgagaggtgaaggaccctgatgctcccataagacagaaaatgccc

SEQ ID NO: 97575 - DNA, 89 bp, Homo sapiens
gaagatgcctcgaactaaacaaattcatcccagaaatctaagagagcactgcagcctgtggtgttgaggctcacagcgatgccatccag

SEQ ID NO: 97576 - DNA, 80 bp, Homo sapiens
aggccgccctcagttgctgctccgacgcggaccccagtaccaagacaatgcagatcttcgtgaagactctgactggtaag

SEQ ID NO: 97577 - DNA, 51 bp, Homo sapiens
gctgacatggccaccaacacacgtggttgggataattcttcactattccac

SEQ ID NO: 97578 - DNA, 104 bp, Homo sapiens
caaaactcattgctcagctggagcgaggggaagcgccctggagagaggagagaaaatgtccactggacctctgtccagatttggagaccaagtatgagaccaag

SEQ ID NO: 97579 - DNA, 100 bp, Homo sapiens
cggtggtgggagggagagcggcctcctcctccctggtggggcctgtctgggtgaagcccctctgttcccggcgacattgactacagcaccgtgctcctcg

SEQ ID NO: 97580 - DNA, 82 bp, Homo sapiens
gaggacaccgggacacccagaagccgggaaatgaccaccgctgaaacttcacttctacacagaggctttctttcccagaaac

SEQ ID NO: 97581 - DNA, 100 bp, Homo sapiens
gctgagtcagctacgggcaagcgggcagctgaagatgatgaggtcattgttgtctgggtaggaacaaataaccacgaaaatacagcagaagaagtagcag

SEQ ID NO: 97582 - DNA, 82 bp, Homo sapiens
gtcccttgtcccagttgaagaacccatagttgtctggggccatcttgtctgctccttacagcacacatggctggcagagaag

SEQ ID NO: 97583 - DNA, 51 bp, Homo sapiens
agctgctgaggctcgggggcggaagaactctaagaaggagctgatgtggag

SEQ ID NO: 97584 - DNA, 75 bp, Homo sapiens
atgttactgtgggctgtgggattaatttcaacgagaaggcgatccataaggaggactaatggggagtcggggaat

SEQ ID NO: 97585 - DNA, 90 bp, Homo sapiens
tccggagcaagcgggcgagggcagcgccctaagcagagaggctccggggcggaagcagctccgtaagatatacctcgctgcagaggggag

SEQ ID NO: 97586 - DNA, 75 bp, Homo sapiens
gagattgatggggagcgcatcaaggatcgcaacaatgcaaggcaaattcatgaaggtgcaagtttaccgtttttt

SEQ ID NO: 97587 - DNA, 74 bp, Homo sapiens
cgtgggagggagccatgaagcattacgaggttccatcttagcccacatccagaagcaaaagcacttcaatgagc

SEQ ID NO: 97588 - DNA, 111 bp, Homo sapiens
ccgtccccagaacgcagatcagaggtagtcggacctttcccgctggcgcgcagcctcagctagatcaatgtaaccactgtgcgggaatatctgccagaaggagacttttca

SEQ ID NO: 97589 - DNA, 100 bp, Homo sapiens
gaagtgctatctggaaagagagcctcctgcccgaaggccacctgaacctaacggctccctgcaacgctgcctgcagctgccagccagaacactacagccc

SEQ ID NO: 97590 - DNA, 75 bp, Homo sapiens
agaggaggcagaactagaagacacactcaatcaagtggcatgttatttgaaagcaattgagacgcaaccgaactt

SEQ ID NO: 97591 - DNA, 100 bp, Homo sapiens
ctggcttctctggactttgcacacctccaggagaagaacccagaaaattgatcagttctaaaaaaccatgccccacgaatctgatgcttccaccagatgt

SEQ ID NO: 97592 - DNA, 100 bp, Homo sapiens
ccggtggcatcacagccaccacagcatctttctgaagccgggagagggcctgtagggtggcttttcatggcctgccactgaaaatcaagaaagaacccca

SEQ ID NO: 97593 - DNA, 83 bp, Homo sapiens
gtttatgttcaaagactctcagaatgtgcagaagtcacaggcacactccgcagacgctccctgacggcccattggccagtcct

SEQ ID NO: 97594 - DNA, 99 bp, Homo sapiens
cttcatctgcgatggacagaataactgtcaagacaacagtgatgaggaaagctgtgaaagttctcaagctgtggccagaagagctccgaagagacaggc

SEQ ID NO: 97595 - DNA, 75 bp, Homo sapiens
ccgggggcatcgagaccatcgccaatgagttcagcgaccggtgcaccccgcagttatacttaagcatgaacattg

SEQ ID NO: 97596 - DNA, 82 bp, Homo sapiens
ctggctgcttccagtgttcgccgagagatagcctgggctggaagctcttctacgtcacaggctgcctgtttgtggctgtgca

SEQ ID NO: 97597 - DNA, 100 bp, Homo sapiens
gaatcacgcccagaataaagccaagctcatctctgagacccggaggaggttcgaagctgagtatgtgacagatttttaaagagcgagaagaagatttgag

SEQ ID NO: 97598 - DNA, 50 bp, Homo sapiens
ggcgaatggggctcacgtcgagtcgttgaggacttccacatggagattgg

SEQ ID NO: 97599 - DNA, 76 bp, Homo sapiens
cccacctgccaccgaggccccctcttcgcctcctccaggctctgtacaactcaatcaagaatgagaagcttgaatg

SEQ ID NO: 97600 - DNA, 73 bp, Homo sapiens
aaagccatcatatatcagtatatggaagagggtcggcactcttcaccctcccgagccctgcccgtctcggccc

SEQ ID NO: 97601 - DNA, 80 bp, Homo sapiens
tgtggtctcgccatacaacctccagcaaattgtggctactaatttgccccctgaagatcaagatggctctggggatgact

SEQ ID NO: 97602 - DNA, 75 bp, Homo sapiens
gacgcagatctccgggccacctgccttgaaggttaaaaataagaagttggttgagctgctgagaaggaaagttcg

SEQ ID NO: 97603 - DNA, 100 bp, Homo sapiens
gatgagattgctgtaaaaaaggacaatattcttgttcgatctttcaaagatggaaaattgtttacaaaagatactgcaaggttcaaggatgagttagata

SEQ ID NO: 97604 - DNA, 82 bp, Homo sapiens
tcagggtgccagacctcatcatgcttgtggttggtggcatcgaccgggtttatgaaattggacgccagttccggaatgaggg

SEQ ID NO: 97605 - DNA, 100 bp, Homo sapiens
catcatgaaagggggaaccctgagctggagcagcaggccaggctcggagacctttccccccgcagggcggcgactggcggcgcgatggacctgaccgggc

SEQ ID NO: 97606 - DNA, 100 bp, Homo sapiens
ggattggaccgacgcagccatggtttgtctgccattgtggatttcctgggcagagtggagtgaaggtgccaaaagccaagaagacactgaggcagtcttt

SEQ ID NO: 97607 - DNA, 50 bp, Homo sapiens
gcaggagactgaccgcaacggcaggaatttcgctaaggagtttgtgatca

SEQ ID NO: 97608 - DNA, 98 bp, Homo sapiens
tcatacagaagtacctgcttcagagacatgagaagattcatactggtggtgcttcctacatttatcctagagaagcgttccttgctggaaatgtatgc

SEQ ID NO: 97609 - DNA, 100 bp, Homo sapiens
gtcggacgtggagatcaactactcgctcatcgaggtgagggttcagagtatggtgccagtggagaagatgcgctcagcaggatccagaggctgatggcgg

SEQ ID NO: 97610 - DNA, 100 bp, Homo sapiens
ccagtgtgtgttgatcttggcttgattcagtctgccttgtaacaggtcttcaaagcttcacctttctccaaaggcagatgtgaagaacttgatgtcttat

SEQ ID NO: 97611 - DNA, 74 bp, Homo sapiens
cgatattataagaccaagcgagtcctccctcccaattggaaatagtggtggagacactgccacttgctgtgcca

SEQ ID NO: 97612 - DNA, 100 bp, Homo sapiens
tgaaggggaggcctggctgagctgtcatcccccagtgtatgtggtagaagaccaaagaagagatgagctaggaccatccacctgcctcacagcctgctgg

SEQ ID NO: 97613 - DNA, 50 bp, Homo sapiens
ataaaaacagtcctttctactatggaaaaaacccttccctgccaaaggtg

SEQ ID NO: 97614 - DNA, 98 bp, Homo sapiens
gcgaacccacacgtggaagtctgataccgcttgcagaagggaattgaatagatgtctccctattgttctcagcacagatattctacacctcacgcctt

SEQ ID NO: 97615 - DNA, 100 bp, Homo sapiens
ttactatatttgaaagaagccatattttcagtggaagtatgcgagacttaagagctcaagtgactagtggtctcctgccatttccagaagtgactcttca

SEQ ID NO: 97616 - DNA, 82 bp, Homo sapiens
gagaatgagatagccgtcctgagaaaaggattccacagatgttggtgaggaggacagcttccttggtcagacttctattcac

SEQ ID NO: 97617 - DNA, 50 bp, Homo sapiens
aaatatgaactcttctgaagaaagaggtcctgctgtactagccaccaaag

SEQ ID NO: 97618 - DNA, 76 bp, Homo sapiens
cgcagaagccgagccgcgaggagcgcactccgtggccccgatggagcggtacaaagggaacgacactagccccgag

SEQ ID NO: 97619 - DNA, 75 bp, Homo sapiens
tattgcacatcaatgatatcatcccagtctgcatgaagaaatcagtgatttttatgaatacatgtctccaagacc

SEQ ID NO: 97620 - DNA, 75 bp, Homo sapiens
catctaatcacagactcctatttgaagtatttgacgaaaatagactggtatgtgacgcattcccagactcttcag

SEQ ID NO: 97621 - DNA, 97 bp, Homo sapiens
agagaagaaagacagctttgtggaagaggtggttggttctagctattgccatggtacgtttttatatggaaaaaggaacacacagaggtttatataa

SEQ ID NO: 97622 - DNA, 75 bp, Homo sapiens
cgcctttgtcctctgaacttctcaccagttctagcgagtaaaatttaacaaatgtggcaattattttggatctat

SEQ ID NO: 97623 - DNA, 100 bp, Homo sapiens
ttccgacggggcggccgggggctcagagatccaagtgcgcgccctggcgggtccggaccaagctctcctgccacagctcctcaccccctgaaaatgttcg

SEQ ID NO: 97624 - DNA, 90 bp, Homo sapiens
catgtgccgcaccctggccgccttccccaccacctgcctggagaggattatattccatcacaacaagatattctgcttgccagaagaccc

SEQ ID NO: 97625 - DNA, 74 bp, Homo sapiens
ggggcgccttctgcaatggccagcggctccgggtctccggggagacaggctcaacatgggaaaagacattccgg

SEQ ID NO: 97626 - DNA, 83 bp, Homo sapiens
aattgatttgctcttacgtatttgtgtgacttgactcttcaaacacaaaggagcactcactgtgggcctcgtgcgacagtgtc

SEQ ID NO: 97627 - DNA, 73 bp, Homo sapiens
gaactacagaaacctggccttcctgggtggtcgtcggttttctgagggtacttcagctgacagagagattcag

SEQ ID NO: 97628 - DNA, 100 bp, Homo sapiens
gccataatgtcgacctgccggagtcgaggattccagggtcgaacactcggtgctggagaatctggtaaaagcaccattgtgaagcagatgaggatcctgc

SEQ ID NO: 97629 - DNA, 82 bp, Homo sapiens
gatgaatgtagagagaaagtacttcaaggtttggtgcacctcgatttggaggaagtagggcagggcccttatctggaaagaa

SEQ ID NO: 97630 - DNA, 100 bp, Homo sapiens
agtgatcctcccaccttagcctcctaagtagctgggaccacagttgccatctaccttgggatcaaacggaaaccgccccccggctgctccgattcccctg

SEQ ID NO: 97631 - DNA, 75 bp, Homo sapiens
gaagggacacagtggagcagtgatggaattgcattacaacacagatggcaggcgtggaggaaccatggtaaccta

SEQ ID NO: 97632 - DNA, 75 bp, Homo sapiens
cgcggcgcgagggaggctacacgtgcgtctgccgcccgcgcttcaccggtactgctataaccagaatttggtaga

SEQ ID NO: 97633 - DNA, 89 bp, Homo sapiens
ccaacatggcggagagagaggtggagtccggcccccgaaagaggatcatgacaagatgtttaagatgagtgaaaagatattactcctgt

SEQ ID NO: 97634 - DNA, 74 bp, Homo sapiens
ctcagaggaggagaaaggccggagccagccgaggtgaaattcgatgctactgtgatgctgcccactgtgtagcc

SEQ ID NO: 97635 - DNA, 90 bp, Homo sapiens
ggcctttccactggagttgcttcacttagctctacaatcaacccatgtgataaaccacataatcctatggtaaatgctggagcaattgtt

SEQ ID NO: 97636 - DNA, 51 bp, Homo sapiens
ggaactctttccagcttgtgtctggccataggaaaaggatacagagtagag

SEQ ID NO: 97637 - DNA, 89 bp, Homo sapiens
cgggctgtagtgccggcgccgccgcgtcttcccggtctcctttcccggccgcacaggagagtcccacgaactggctgggtatacagaaa

SEQ ID NO: 97638 - DNA, 73 bp, Homo sapiens
tgttgacagcatcgatgctagacagacatcttcccatgcacaagatgattaatacagatcttagcagaatctt

SEQ ID NO: 97639 - DNA, 98 bp, Homo sapiens
tcctggccctggccctgatcatcctgctgggcttcgtccagatcgggaaggatgacgcactctggtgcagggtcaccaagccggtgcctgcgggggga

SEQ ID NO: 97640 - DNA, 90 bp, Homo sapiens
aaaatgcccaggaggaagcaggagcagcccaagcgccttccctcacatgccttcaattaagttgcagagttctgatggagagatatttga

SEQ ID NO: 97641 - DNA, 82 bp, Homo sapiens
cagcactgtggaggccgtcctcgggccgagaactactggtggcgtggccagaacacacggacgctgtgtgtggggcccttcc

SEQ ID NO: 97642 - DNA, 74 bp, Homo sapiens
accaccgtgaacggacagtcccccccagatgagattgtggggaacctgggtgaaggcacctttggcaaggtggt

SEQ ID NO: 97643 - DNA, 82 bp, Homo sapiens
ccagcagcactgtggaggccgtcctcgctgagcgggctttggacaccatgaactttgatgtgattaagggaaagccaatccg

SEQ ID NO: 97644 - DNA, 91 bp, Homo sapiens
cgaatgccagcgcctcttctaccggggcaagcagacaatgcagatcttcgtgaagactctgactggtaagaccatcaccctcgaggttgag

SEQ ID NO: 97645 - DNA, 101 bp, Homo sapiens
cggtgcccatgacctgggaccctgtggaccagaaccccaggctgctcacgctggaggtgcgacacatgattgcagatgggatgattcacctgtgcatctat

SEQ ID NO: 97646 - DNA, 121 bp, Homo sapiens
cccggccggcctgcacgatgcacacgccggacttcgcaggcccagacgacgcgcgcgcaacaatgcagatcttcgtgaagactctgactggtaagaccatcaccctcgaggttgagcccag

SEQ ID NO: 97647 - DNA, 75 bp, Homo sapiens
caggggcagagggaccactctgacagcccaagttcctctctaaagcagaacgagaggctgaagctctaaagcgac

SEQ ID NO: 97648 - DNA, 126 bp, Homo sapiens
gttaatcaaccggtcaggctggacgtgcacgcagcccggcgggaggataaagaccaccacgaaacctttcggggaatttgttttcttcattatctcaaggaacttttgattatcttgcgtcattac

SEQ ID NO: 97649 - DNA, 98 bp, Homo sapiens
aactacagcgtcaatggcaactgcgagtggctcatcgaggtaatctatgccagcaattatgacaatgttagcagaccatgcagctcgtcagctgcttg

SEQ ID NO: 97650 - DNA, 100 bp, Homo sapiens
tcataacaagcggttctctaccctgtaaagaaaggcctaaagaatgtatttgacgaagcaatattggctgccctggagcctccagaaccgaagaagagcc

SEQ ID NO: 97651 - DNA, 94 bp, Homo sapiens
gcggccgtcgcccaggagtcatcggacgccagaatctgccttatgccagcctggaccatcttggaggcagtgtaggatcatggaagaactttga

SEQ ID NO: 97652 - DNA, 104 bp, Homo sapiens
gacagaacagttaatcctcaatttaagcctgatctaacccctagaaacaggtgtcatggagaaactccagctgggcccagagattctgcagcgggaaaatccaa

SEQ ID NO: 97653 - DNA, 87 bp, Homo sapiens
tagtgccggcgccgccgcgtcttcccggtctcctttcccggccgcacaggaataagactgattttatgggaaaattaagcagatgct

SEQ ID NO: 97654 - DNA, 96 bp, Homo sapiens
cgagtcccggaggaggcactcaaggctttgcggtgggctgggggcccatcccctggctcctcatgtcagagatcttccctctgcatgtcaagggcg

SEQ ID NO: 97655 - DNA, 90 bp, Homo sapiens
ggcgggacagcggccccctggagggggcagtcccgggagaacctgcggcggccggagcggttcctgttgctagagcaagtattctttggc

SEQ ID NO: 97656 - DNA, 100 bp, Homo sapiens
tcctacacaaccatctgaacaaaaagctgctttccccccacctgaacagaaaactgcatttgacaaggttggaagcgaagtggaagcactgaacctccag

SEQ ID NO: 97657 - DNA, 83 bp, Homo sapiens
ggaatttgaagtgaccaaaacagcaggtagctcgtaagctggtcatcctggagggtgagctggagagggcagaggagcgtgcg

SEQ ID NO: 97658 - DNA, 75 bp, Homo sapiens
tcgggacaccccggaagctgggaaatgaagggagttaagccccaagccaaggcagccaaagctcctcctaagaag

SEQ ID NO: 97659 - DNA, 75 bp, Homo sapiens
aagaaggcatacaagcaagtgaagatcgaccagattgagattgtcagaagcttcagttctggtaaaagagaaggt

SEQ ID NO: 97660 - DNA, 50 bp, Homo sapiens
taccctggacctggaaaccatttttgtattatccaaagagatgagtcacc

SEQ ID NO: 97661 - DNA, 100 bp, Homo sapiens
ccccaggaaggaaggccttggatggaccctcagattgaaggacccggtggaccttgggatatggaatgtgcagatgtcccactattaactccaagcagca

SEQ ID NO: 97662 - DNA, 75 bp, Homo sapiens
atgtcatgcctctgaaaatgaagttagagatgtttatgattacttccgagctgtcctgcagcgtgatgaaagaag

SEQ ID NO: 97663 - DNA, 95 bp, Homo sapiens
atgaatggagcaaaatggcggatcatgtgcagctgctgatgcaaggaatcccctgggctcccgtccactccactgctgaccagcccattcgcctg

SEQ ID NO: 97664 - DNA, 83 bp, Homo sapiens
cttgctgttcgtgattatatttcttggagttgtgttggtaatgaagaaaaggtcaaaatgcagatcttcgtgaaaacccttac

SEQ ID NO: 97665 - DNA, 100 bp, Homo sapiens
gggagaagggataaccctacacccagaccccaggctgagcggaaggaggagaaaaaggcggctgcccctgctcctgaggaggagatggatgaatgtgagc

SEQ ID NO: 97666 - DNA, 80 bp, Homo sapiens
ggctccggggtggggggatcgggcctggatcggctgccggtgcctgccagtgggggagtgcatccgccccaacccttttc

SEQ ID NO: 97667 - DNA, 100 bp, Homo sapiens
cattggtaactccagtctctaacgttttagaaaatcataacaagcggttctctaccctgtaaagggacaacctaacagatgctgagaatggcaacattca

SEQ ID NO: 97668 - DNA, 100 bp, Homo sapiens
tggttgtcacatacccccagcttagaggtgcttcaccctgccccaaggcaagtctcctggcttgtgaaggcctagcaggtgtgagtttggttcccactgc

SEQ ID NO: 97669 - DNA, 100 bp, Homo sapiens
caaaatcacatgatccgcacccccagcatgaggcaggaggagcgctacctgatcaaaggtccatcatcaaaacaccaaagactcaagacacagaagatga

SEQ ID NO: 97670 - DNA, 95 bp, Homo sapiens
gggggcagaaacaattacccaactatacggaaaacattacgcctctggatggatgatgttaatgagcaattgctgctaaagatccagccaatggc

SEQ ID NO: 97671 - DNA, 100 bp, Homo sapiens
tacctgctcaagccgctcttccccacctgcccggtgcccgaggaggcagccaagctcgtggcctgcctctgcgtgcgcatagaatgtcaagctaaccagg

SEQ ID NO: 97672 - DNA, 90 bp, Homo sapiens
catgaagccagtcctgacaatgggcagaacgaattcagtgatatcattaagtccagatctggtaatatttgaagctgaagtctcaggagg

SEQ ID NO: 97673 - DNA, 100 bp, Homo sapiens
atgaagctatggaacagcagaccatatccatcactaaagcaggagtgaaggtggagccgccaccaaaatgcagattttcgtgaaaacccttacggggaag

SEQ ID NO: 97674 - DNA, 83 bp, Homo sapiens
cggacgctgaagcccaggagagcgatggagacgtatgcggaggttgggaaggagggcaagccctgggcgctgcctatggcaca

SEQ ID NO: 97675 - DNA, 101 bp, Homo sapiens
ctcagttggaagcagccgatccagcctgcggagcctgtggggcaggtacgctatttgaagaacaggtttccatgctcttagaggagcatcagaaaatgaac

SEQ ID NO: 97676 - DNA, 76 bp, Homo sapiens
gacggccccagggaggatgacgaacccaacctggtgcccggcccgcagatcaatgtccgagttaccaccatggatg

SEQ ID NO: 97677 - DNA, 50 bp, Homo sapiens
ctagaggagttcttccaaaaagggtaaaatatttggagtaccttttaatg

SEQ ID NO: 97678 - DNA, 100 bp, Homo sapiens
ggaaggaagaggaagtgagagcagcggcagccggcggtgcagcagccggccgacccagagtgatgataatgaagataattcaaatgatgggacccagcca

SEQ ID NO: 97679 - DNA, 100 bp, Homo sapiens
gcaccttgggaagagaaagaaaatgccgaaggcactcagacaggaggcggctttccggaaagtagtacaagcaactatggtacgcgatcgtcagcatggc

SEQ ID NO: 97680 - DNA, 75 bp, Homo sapiens
agctctgactgtggcagttgttggcttcagcaaccaggagggattgactgagatcttaacaacagcagcaacgat

SEQ ID NO: 97681 - DNA, 100 bp, Homo sapiens
cacggaagacttatgaacgccttgttgcccagttccccagttctggcagattctggaaactgtacattgaagcagaggctgcctttaatattggttggga

SEQ ID NO: 97682 - DNA, 83 bp, Homo sapiens
caccgctgccctcagctccgagtccagggcgagatgtgaagttcatttccaatccgccctccatggtggcagcggggagcgtg

SEQ ID NO: 97683 - DNA, 118 bp, Homo sapiens
tctggtatggacacagcttctagtgttgctttggatcttgtggaaagtcagaaaggacagaataacgggctcccagattcacaagccccaccaagaggatcaccccaggaacgcttgg

SEQ ID NO: 97684 - DNA, 75 bp, Homo sapiens
gtgggtactacacaaccgtctccagccttggtctgagtggactgtcctgcagaggagaaggcagagcccccccag

SEQ ID NO: 97685 - DNA, 100 bp, Homo sapiens
tggccgtgccctggggctgagccctcagattattttcgaaataccagtatttcgactccagggggatgttcatttctatagtattttcagccccactgct

SEQ ID NO: 97686 - DNA, 74 bp, Homo sapiens
ttgtgactgcctgcttgcaggctgtgtcacagaagagaagtttatggctacaaatgatttgatgacggaactgc

SEQ ID NO: 97687 - DNA, 100 bp, Homo sapiens
aaaggacaaggtaagaagaagacaagcgggcagaaggctggtgacaaggaattgaatgatctggcacgggaccctccagcacagtgttcagcaggtcctg

SEQ ID NO: 97688 - DNA, 124 bp, Homo sapiens
acccggcctcaccatgttggtgctgtttgaaacgtctgtgggttacgccatctttaaggaatcccttggcaccatgtcctgtgtgcattataaattttcctctaaactcaactatgataccgtc

SEQ ID NO: 97689 - DNA, 97 bp, Homo sapiens
gctgggtaatgaggatttgactgtgaaggtgcatacattcagagggccacactggtgtgaatactgtgccaactttatgtggggtctcattgctcag

SEQ ID NO: 97690 - DNA, 80 bp, Homo sapiens
cctttaagcagctggacgagaactatgtggccaagcttctaccgagtcttcccccacctcaatccctgttgctatggaga

SEQ ID NO: 97691 - DNA, 100 bp, Homo sapiens
ctggctggtgcggacacaacccaatagagccctaatttgtttagaactgtaatatgcacagttaaaacaacttgtcctctcaggaccttttgcagttagg

SEQ ID NO: 97692 - DNA, 100 bp, Homo sapiens
aggcaccgtctctccctgggaccaggcatattctcaagatgcctacctgaaaggcaacgaagcttatagcggcaatgcccgcaatatacctgaacctcca

SEQ ID NO: 97693 - DNA, 99 bp, Homo sapiens
tggccaacatcgcggtgcagcgaatcaagcgggagttcaaggaggtgctgaagagcgaggagctctcaagaggcagaatttatataataatcctttcaa

SEQ ID NO: 97694 - DNA, 74 bp, Homo sapiens
cgtttgttcaggaaccaccagtgacagatactgccaaatctgtcgaaagggagataatgaagaactgcttcttc

SEQ ID NO: 97695 - DNA, 83 bp, Homo sapiens
atgtgtgcagaaggaggtcctgccgtccatgcggaagatcgtcgccacctggatgctggaggagcttgaagaaatccgcaaat

SEQ ID NO: 97696 - DNA, 87 bp, Homo sapiens
caagagactcttcatttagattggattctgaatatcaggtcagtttaggggctggtgcaaaggatgagttgcacattgttgaagcag

SEQ ID NO: 97697 - DNA, 75 bp, Homo sapiens
ccacccgagagaaaccgcatcatatacctacgcccaatgcagcaggctggagctgtctccccctttgggatgctg

SEQ ID NO: 97698 - DNA, 100 bp, Homo sapiens
ctggagacagctgccccgagggtctcctccagtagacggtacagcgaaggcagagagttcaggacgagcctgtggagtgggagacacctgacctttctca

SEQ ID NO: 97699 - DNA, 100 bp, Homo sapiens
ctgtcttcgttattaattatccattaacactcaagcctttctacatgagggataatgaagatggccctcagcacacgtttggaaattttagcattcaggt

SEQ ID NO: 97700 - DNA, 75 bp, Homo sapiens
agacaatcaagataggatccgaggttcagaatctgaattatccagaacagaaagttgtgactgttggacagttca

SEQ ID NO: 97701 - DNA, 100 bp, Homo sapiens
ggagcttcctccctgggaaccaagaggacccacacaggacctggtgtccaagatgctacacgtggatccccaccagcgcctcacagctaagcaggttctg

SEQ ID NO: 97702 - DNA, 89 bp, Homo sapiens
tagctattgccttattttttctcatggatgttcttcttcgagtatttgtagaaggggctaccataaagctttggtcaaactaaaactga

SEQ ID NO: 97703 - DNA, 100 bp, Homo sapiens
gcgggaagtggcgtggccaagattcgcattgaagatgacgggagctacttccaaattaaccaagtcgagtttgagtggctgaggcagttttggtttcaag

SEQ ID NO: 97704 - DNA, 83 bp, Homo sapiens
gaagatccaggcctcagaggaggagaaaggccggagccagccgaggtacatgtcccagagcaagcacacggaggcccgggagc

SEQ ID NO: 97705 - DNA, 82 bp, Homo sapiens
ctgctgcccagctactttggacacagctcacccccgacagggggccgtcctgatacctggactacagacgagtgcccaacag

SEQ ID NO: 97706 - DNA, 87 bp, Homo sapiens
ggagctaaagcagcgtgcgttcagccctggggtattgccatcagagagtcagcaaaggtagttgaccaagctcaaaggagagtgttg

SEQ ID NO: 97707 - DNA, 108 bp, Homo sapiens
caatatctgtcttcggtggactccttcggcagtccacccaccgccgccgcctcccagacgagccaaactcaggctgtaccttgagcagctcaagcaactggtgcccct

SEQ ID NO: 97708 - DNA, 82 bp, Homo sapiens
ggtaaaggcaacagattctgacgtcatgcaagacaagataatctgccttccgaaaagagtgcagcctgctcagaaccactct

SEQ ID NO: 97709 - DNA, 75 bp, Homo sapiens
gacgttgacatttatgttaacagcattggtcctgtgtcatcaataaacatgctccagcggcgccatgagcaaatg

SEQ ID NO: 97710 - DNA, 74 bp, Homo sapiens
tcgatgatctggcagacctcagctgcctggtgcatgttatttgaaagcaattgagacgcaaccgaactttgcag

SEQ ID NO: 97711 - DNA, 100 bp, Homo sapiens
tacttcatattttggaaagcagtttttaagacaaaatccagcaactatcacaagaatactccttagccacttcaattgggataaagagaagctaatggaa

SEQ ID NO: 97712 - DNA, 98 bp, Homo sapiens
gaagcatggcactctggcgggcataccagcgggccctggccgctcacccgtggaaagtacaggtcctgacagctggggctactgttcccgtagacaaa

SEQ ID NO: 97713 - DNA, 75 bp, Homo sapiens
tgaaggacttcatctcccgatttgaggccctggccaacgtcaacattgggagcctcatctgcaatgtaggggccg

SEQ ID NO: 97714 - DNA, 75 bp, Homo sapiens
ctcttctgaaggaaaagacagtgtagtcctgcaaaacattttgaggaaattcacagtatggccaacagcaagatg

SEQ ID NO: 97715 - DNA, 75 bp, Homo sapiens
ttcgctacacagcaatgcatcgaggaaaatttctaccttgaaccgtatctgaaagaggttattcgggaaagaaaa

SEQ ID NO: 97716 - DNA, 100 bp, Homo sapiens
ccagatgtgccagaagcagtgccgggacgaggtaaaataccatgaagattttgaaaaaacaaaggggagaggctttactcccgtcgtggacgatcctgtg

SEQ ID NO: 97717 - DNA, 88 bp, Homo sapiens
aagagtctttggaggatgcggctttgatgggtgtggatgaggtcaccattgtcaacattttgaccaaccgcagcaatgcacagagaca

SEQ ID NO: 97718 - DNA, 105 bp, Homo sapiens
gaaggaacgaggcaaggagctaaagcagcgtgcgttcagccctgggaaaccaaggtgtatgttggtaacctgggaactggcgctggcaaaggagagttagaaagg

SEQ ID NO: 97719 - DNA, 100 bp, Homo sapiens
ctccaggctaaccaaaagtctgttctgctgctggagccagttctgcttctcggcaaggagcgatttgctggtgtagacatccgtgtccgtgtaaagggtg

SEQ ID NO: 97720 - DNA, 100 bp, Homo sapiens
acggcttctccgccatgcaaggctggcgcgtctccatggagcatgccaatgaagatgtggaaagaatgttactaggaaacaagtgtgatatggacgacaa

SEQ ID NO: 97721 - DNA, 100 bp, Homo sapiens
tgtcttctggcttcagtctggaagatccccagacacatgctaacaggatctacaggatgatcaaacttggtctggaattggcagagggggtcgatttggg

SEQ ID NO: 97722 - DNA, 88 bp, Homo sapiens
aagctgccaaggtggagagagggattacagaaaggagaacaccttatttcagtggactgcccctgatggtgattattcataaatcctg

SEQ ID NO: 97723 - DNA, 100 bp, Homo sapiens
aactatggcagcagcgtggcctccgccaccgtgcacatccgaatggtcagaaattggctttggaaaaatggaaacctacatcaaattggaaaagcttgga

SEQ ID NO: 97724 - DNA, 99 bp, Homo sapiens
tcttacgtctgcggaagtgcagctgcctcagttcttagcgcagtacaagccagctgccatgttgtgagcacataccacatagctccatggagatgccca

SEQ ID NO: 97725 - DNA, 100 bp, Homo sapiens
gcggtgcgccttctccacgctgggccgggtgttgcgcctggcctacagcgaggctggggccatctaccctgataacaccacagattttcaaagagcagat

SEQ ID NO: 97726 - DNA, 74 bp, Homo sapiens
gcggggcatgttcccgaggctgtcaccagaagggacttcctcgcccgaagagcgcgggcacagcaacgcagatg

SEQ ID NO: 97727 - DNA, 82 bp, Homo sapiens
acggcttcccccaaggaatatacaggagccttcacgtaaatgggtccagtcatgcctcccagtaagaagccagaaagctcag

SEQ ID NO: 97728 - DNA, 83 bp, Homo sapiens
ccctgcggtgtgcaagtccgactggaacagccattcaaactcctccccacgacactctgaagcagcgacggcacagcgggaag

SEQ ID NO: 97729 - DNA, 97 bp, Homo sapiens
ctttctcctcgagacattaccactattaaacttctcaatgaaactagagacatgttggaaagagttgttgcctgcaatctctatccctttgtaaaga

SEQ ID NO: 97730 - DNA, 50 bp, Homo sapiens
cacagccaagtgcgggagtccacgattcccaacttcttctggagcctggg

SEQ ID NO: 97731 - DNA, 100 bp, Homo sapiens
ccaccggcccaccctacatttagcgcatcatgtgatccgggtgaagccaaaaaccttccctcttacccggggccgagcaagatgagggattgctactgca

SEQ ID NO: 97732 - DNA, 101 bp, Homo sapiens
ctgctttcctttccctcagcacacagaggatgatgctgactttgatgaagtgggtgggcctgatagtcctgattcagtggatcccgttgaaccaatgccaa

SEQ ID NO: 97733 - DNA, 83 bp, Homo sapiens
ggctctgcgctggccgggggcgcgggcggcggcgccggcaggaagagttcggaatccagcattaagaagaaatttctcaagag

SEQ ID NO: 97734 - DNA, 98 bp, Homo sapiens
tggctgcagtcagtcttcccgagtgagggatttcgccgcccgctttcaggcccgtatggcctgatatgaaggagtcacgcctcccgcctcccggagct

SEQ ID NO: 97735 - DNA, 75 bp, Homo sapiens
gttccaggtcccggatagcgagggcggccgcgccggctccaggtgtgaatgacagaggtggtgccatccagcgcg

SEQ ID NO: 97736 - DNA, 82 bp, Homo sapiens
gaagctggtggaccagaacatcttctccttctacctgagcagcttccccgggcgctgcctggacaggcctgcctgcgtgctg

SEQ ID NO: 97737 - DNA, 75 bp, Homo sapiens
cgctcgcgagcggctgcgggacgcgaggtttccgggtgtgaacccacatccctgcccccagggccacctgcagga

SEQ ID NO: 97738 - DNA, 83 bp, Homo sapiens
ccgcttgggcgcacttgccgggtcaccttgtcccggaggtgagaagccctaccactgcaactgggacggctgcggctggaagt

SEQ ID NO: 97739 - DNA, 100 bp, Homo sapiens
ccaaggagtcacggatcggattcctcagctacgaggaggcgctgaggagagtttcacaataaggtgacctgcttcatgctgcatcacattgaagaaccct

SEQ ID NO: 97740 - DNA, 100 bp, Homo sapiens
gctggattgatctccaaagactggatggtatgggctgtctggagtttgatgaggagcgagcccaggtgcagcggaactgctgcctgacgctctgcaactt

SEQ ID NO: 97741 - DNA, 100 bp, Homo sapiens
gggcccgggcggagctcaatgacaaagtccacaagctgcaggagttcatgatcaagtgttgcccacaccaaatgcttcatccagagtcatagtacatgtg

SEQ ID NO: 97742 - DNA, 83 bp, Homo sapiens
agcacaccctgccaaccccaccgccgcggctgcccccaccgggaccgagagtcctgtgtatggaaactcacatgagtcagctc

SEQ ID NO: 97743 - DNA, 100 bp, Homo sapiens
ttcttgatgctttggaacaacatttagcttccttggaaggaaagaaaatcaaagattctacagctgcaagcagcacttttccagccattaactccaggct

SEQ ID NO: 97744 - DNA, 98 bp, Homo sapiens
atatttaatggaaaatcgcttggttaaaacctgacacttttaacagtactatactggcaattgctggagaagattttgcaattgttgcttctgatact

SEQ ID NO: 97745 - DNA, 100 bp, Homo sapiens
ggccagcaagagagccgtggaattccagaccctgcgggagattgtgattggcgtcctgcaccaattgaaaaaccagctttactgaccggttcttggaaac

SEQ ID NO: 97746 - DNA, 88 bp, Homo sapiens
aggtcgtcatcttcataggctcgctgctcggaagagagagaaaatccttcaaaacggagtagaattgaacgtgatatagataacaatt

SEQ ID NO: 97747 - DNA, 83 bp, Homo sapiens
ccgcagatgttgtcaaggtggcctaccaggaggccaggggtgtcgccatggggaaggagttcgagacacgactgaaggagaag

SEQ ID NO: 97748 - DNA, 82 bp, Homo sapiens
agatcatcacatatataagaagtttcttagatgagctgggattcctagaggcggcttacagggagaacacagttggcctcca

SEQ ID NO: 97749 - DNA, 96 bp, Homo sapiens
tatggagacagaacggatgatttatctggtgacagaatatgctagtggaggggaaatatttgacttaattcagtgcacaaatgagatgaatgtgaa

SEQ ID NO: 97750 - DNA, 75 bp, Homo sapiens
gccggccgccgcgccgcccggcagcctcggcaggagctgctgctcttcctccagaacctgcccacagcccactgg

SEQ ID NO: 97751 - DNA, 100 bp, Homo sapiens
gcgtgaccgagagcgcgaatatcgtcatcgttagaaggcgtcttcactcgaggacagctgggcctgatagacatcatcttccagtacattcactgtgatg

SEQ ID NO: 97752 - DNA, 74 bp, Homo sapiens
acttccacaggcacatcggtggccgcctccttctttgcacggacccagatgatgtggtaccagttggccaaaga

SEQ ID NO: 97753 - DNA, 101 bp, Homo sapiens
atacctttttcttggcgattatgtggacagaggttattttagtatagagctatgttagatactaaagaaggcttccccacaacccatatgcatctgctttg

SEQ ID NO: 97754 - DNA, 100 bp, Homo sapiens
gcgctgactggcttcaggaacaacaaaaatcccaagaaaccactgaccctttccttacacggctgggctggcacaggtgtcatggagaaactccagctgg

SEQ ID NO: 97755 - DNA, 51 bp, Homo sapiens
gtcatggtgtacttccagctgtgtgcagagaaggatgccctgcagtggtct

SEQ ID NO: 97756 - DNA, 100 bp, Homo sapiens
gcggcacagagagggcctgggagcttgctgcagcttcaggcatgtcgggccccaggcctgtggtgctgagcgggccttcgggagctgggaagagcaccct

SEQ ID NO: 97757 - DNA, 100 bp, Homo sapiens
cgcgacttcgacggcaaggtctactacatagaccacacgaaccgcaccaccagctggatcgacccgcgggacagactatctgttatagtccctgggtcaa

SEQ ID NO: 97758 - DNA, 100 bp, Homo sapiens
tggagggcttctacgtcatcttcgacagagcccagaagagggtgggcttcgcagcgagcccctgtgcagccaaaagaatgcaatggtgtaaagattccag

SEQ ID NO: 97759 - DNA, 101 bp, Homo sapiens
cctgatccctgcagcgcgggcaggcggcgtcgcagagcggagctagctggatgcgtccggactcctgcaggcaggatggggaagcagaatagcaaactggc

SEQ ID NO: 97760 - DNA, 75 bp, Homo sapiens
tccctgcagactggcaggagcagattccaaaggcacaggaagaagcttgcagggcccaccagctctgagcagatc

SEQ ID NO: 97761 - DNA, 100 bp, Homo sapiens
aagcccagcgatttcacctgaagaagcttgggaactcctgccaaaaattgtagcacttctcacattgcaatgtgtaaggcaaacattggtgggcaccgat

SEQ ID NO: 97762 - DNA, 84 bp, Homo sapiens
gccgctgtgtggttgcaacggagataaattcccggaaccgcgattcggcgtgtcaggtaagaatgattgatgttggctgatatt

SEQ ID NO: 97763 - DNA, 83 bp, Homo sapiens
catcccccaatactgcggctcctgctgggcccacgccagcaccagcgctatggcgggtttgttggcatccaaagctgttgggg

SEQ ID NO: 97764 - DNA, 141 bp, Homo sapiens
cttggtctccttgtccttcctaaaaaaccttcgcctcatcctaggagaggagcagctagaagggtcctcatcatcaatctctaaatgaagttacttgaagcaattcttgaaaccataataataatgtctccagaattggtg

SEQ ID NO: 97765 - DNA, 100 bp, Homo sapiens
ggagattcatgacaaaatcatggaggcgaggaaacgagacctctttcgttccttctagaaggtctggaggacgtagagttattgaaaatgcagatggttc

SEQ ID NO: 97766 - DNA, 75 bp, Homo sapiens
gcctggaaggtgcgtgtggggctgggtctcggagtgggagacgtggagtgcaggaggaagacagcgaacccctcc

SEQ ID NO: 97767 - DNA, 100 bp, Homo sapiens
agtggagatgctttccttgacctgaagaagcctcctgcctccaaatgcccccatcgctatacaaaagctaaagaattacctccaaagccattgtcaagac

SEQ ID NO: 97768 - DNA, 98 bp, Homo sapiens
cggaaccagcctgcacgcgctggctccgggtgacagccgcgcgcctcggccagggccgcctgggcagaatgtcacgatggacgagggcggcacgcccc

SEQ ID NO: 97769 - DNA, 82 bp, Homo sapiens
acccagtggcctgtactactgtttcaccagtgatcattaaagaatgggcagcttacaaaggaaagtctcctcaaaccccgga

SEQ ID NO: 97770 - DNA, 100 bp, Homo sapiens
gcaggcgcagccccttccgttatgatctttggaacctcaagaaacttacagcctatttagatcttaacctggataagtgctatgtgatccctctgaacac

SEQ ID NO: 97771 - DNA, 82 bp, Homo sapiens
tcgaaggctaccgggcccagcacagccagcaccgcacgccctgcaagggagacagtgggagtagctcaccgttacccaagta

SEQ ID NO: 97772 - DNA, 82 bp, Homo sapiens
ctcttagcagcgcgcggagaagaacggggagccagcttccccgggcgctgcctggacaggcctgcctgcgtgctgggacatg

SEQ ID NO: 97773 - DNA, 74 bp, Homo sapiens
cagcaagtcggctttcagatcaggtacttggtaatcaaataatgcctggatttcttaatatgaagataaagttt

SEQ ID NO: 97774 - DNA, 75 bp, Homo sapiens
ccacagtgctgcaggctgactctgcagcataccctgtaaaaagtgtgtggtggttggtaatggaggagttttgaa

SEQ ID NO: 97775 - DNA, 82 bp, Homo sapiens
gaagctgagcgttgtcgccgccgctatggggacaatgcagatcttcgtgaagactctgactggtaagaccatcaccctcgag

SEQ ID NO: 97776 - DNA, 98 bp, Homo sapiens
ggaagacctcactgaccccagagtggcagaaaggctgatgcagcagaatttcgctaaggagtttgtgatcagtgatcggaaggagctggaggaagatt

SEQ ID NO: 97777 - DNA, 75 bp, Homo sapiens
aattaaagagtaaagttgtgctcaacggcttctaaccctcctttatgtgactcagagaaaggagacctcattcca

SEQ ID NO: 97778 - DNA, 75 bp, Homo sapiens
tccatccatcgcataagagcaaagaatactattgttgccacaggaatgatctctgcctttcacaaagaccacctt

SEQ ID NO: 97779 - DNA, 50 bp, Homo sapiens
ccagacaccagccccccaccatggcaggcccccagcccctcatgtcagag

SEQ ID NO: 97780 - DNA, 100 bp, Homo sapiens
tgagagcgaatgtcgttgctgagtgtactctaaaagaaagtgcagctatcaaccagattcttggcagaagggagcaggggagagaagacagaagaggttg

SEQ ID NO: 97781 - DNA, 100 bp, Homo sapiens
tcggccctcattctgcacgacgatgaggtgacagtcacgtggttagcaggaagaagatgagccttaagtctgaacgccgaggaattcatgtggatcaatc

SEQ ID NO: 97782 - DNA, 75 bp, Homo sapiens
tcctagtgtgcctgtgtgtggttggtaatcagtggataaattacatatcattctgtggtcttagaacacatgcag

SEQ ID NO: 97783 - DNA, 90 bp, Homo sapiens
taggcgcgcggggcccgccatggctgcgtcggagctctacacaaagttccctgacatcgtggagttctgcgaggccatggccaacgccgg

SEQ ID NO: 97784 - DNA, 136 bp, Homo sapiens
cgacctgcaggcagcaccggaggcccaggtctccgtgcagcccaacttccagcaggacaagtgcttagcgaatgccacagacggcgtgcggctagcagcccgcatcgtggacacaccctgcaatgagatgaacacc

SEQ ID NO: 97785 - DNA, 100 bp, Homo sapiens
aagaggacccacctgtgggtgtcagtggcgcaccatctgaaaacaacatcatgcagtggaatgcagttatatttgggaaagattctgaagcttggcggag

SEQ ID NO: 97786 - DNA, 83 bp, Homo sapiens
ttcggaaaaagtcaaccaccatccgattcacctgcagcgagagccaagtgggagtgcatccgccccaacccttttccccctcg

SEQ ID NO: 97787 - DNA, 100 bp, Homo sapiens
tggtgcaggaaggagagcccttcagcgaggaagctacacttttcaccaaggaactggtgctgcagcgagaggtgaaagaacttgtcctggacaacagtcg

SEQ ID NO: 97788 - DNA, 98 bp, Homo sapiens
ggatcctactgtctcccagttgccttggaaaaattgccacccaactactccatgcattctgctgagattccacaccaaatcatccatcacaaacaacg

SEQ ID NO: 97789 - DNA, 88 bp, Homo sapiens
ggcattgctatttttgcacttcagttcacatactatttatggtgcttagatgagtacgaagatgatgaagcagggcagaaagagcgga

SEQ ID NO: 97790 - DNA, 88 bp, Homo sapiens
aggggcaactgaagacggaggtgcccaaggtcagaaggaagcaccacacagaggctactgcagcactggggtgtcagttgttggtccg

SEQ ID NO: 97791 - DNA, 100 bp, Homo sapiens
agtgggaggaggggctcaaggaaggatgctggcagcagtagtcatggggacgaccagccagccagcagaggtgactctgacatcattagaagcatgccag

SEQ ID NO: 97792 - DNA, 100 bp, Homo sapiens
gtcctcctgctcacagtgtgaataacaggctctattccgttcgctggttcgccacctcaggggaacgatggccatggagtccacagccactgccgccgtc

SEQ ID NO: 97793 - DNA, 83 bp, Homo sapiens
ggcgagttctcggtcaccatgtggtcctcagatcatggaagggaagtggttgctgtgtatgttactggtgcttggaactgcta

SEQ ID NO: 97794 - DNA, 88 bp, Homo sapiens
ggcgtgatgttgggcggccacagagagattggtgtttttgtgaggcagtgagacctaagtttagacactctgcaatatcaccaaaaag

SEQ ID NO: 97795 - DNA, 76 bp, Homo sapiens
ggcgggcgtgcatcatccacggggtgctgcagatcctgttccagctgatccaccttgagatcaagccggccatccg

SEQ ID NO: 97796 - DNA, 75 bp, Homo sapiens
gcgcggaaatctggaaccgggatggcgacgtctacactgagtcggaggcgaaggatctggagtgggagagcagga

SEQ ID NO: 97797 - DNA, 82 bp, Homo sapiens
ggagaagtttttatcaacaaaggcaaaggattcggatttattaagcttgagttattcctgatgaagctaaagctttgtctct

SEQ ID NO: 97798 - DNA, 74 bp, Homo sapiens
accgctgcagccgctggctgagcccaggctgcaagcacaaaggaagtttgctcagtctcagccgaatagtccca

SEQ ID NO: 97799 - DNA, 139 bp, Homo sapiens
actgcagaaaccacttcacctcatcccagccatgatggaagttcatttaagtcaccagacacacttcagcagactctcctgctaccgttgactcagaaacaataacactaaacagtggaacactacagacatttgagat

SEQ ID NO: 97800 - DNA, 101 bp, Homo sapiens
acacccttgagcctgagcccgacattattcctgagacaagcatgagacgaagctgaagggagtcatctatttccaggccattgaggaagtgtactacgacc

SEQ ID NO: 97801 - DNA, 98 bp, Homo sapiens
gtatgccttttgtgggttgcattctttgaatgttttgttattgcctggatatatggtcaccatcagaaaagctaagtttgctgtatagtgaggatcag

SEQ ID NO: 97802 - DNA, 100 bp, Homo sapiens
gaactttctcctgtcctcaatctctggaagaaactaaaccaggtgtgactgcacagaaaagttacaaaacaaatttgactttttgcgctcacagttgaat

SEQ ID NO: 97803 - DNA, 98 bp, Homo sapiens
tgctgaaaaggctaaatgtgaactctcctcatctgtgcagagtcttttatgacatcaagagaaatgatcccagaaagaaaaaatcaagaaaaagaatc

SEQ ID NO: 97804 - DNA, 100 bp, Homo sapiens
tgaagaccacaataaaagagacctctacttagctcagcaattcttaccttatgatgattattctccaccgtctaagagaccaaaggccaatgagctaccg

SEQ ID NO: 97805 - DNA, 136 bp, Homo sapiens
tcccctgcatcggatcaccggcgtgccccaccatgtcagacgcagccgtagacaccagctccgaaatcaccaccaaggtactccaaagattcaggtttactcacgtcatccagcagagaatggaaagtcaaatttc

SEQ ID NO: 97806 - DNA, 50 bp, Homo sapiens
gcctcggtacaccgtcccgcgggatggacgtgcacatcctccggcagcag

SEQ ID NO: 97807 - DNA, 74 bp, Homo sapiens
ctgggtctcggagtgggagacgtggagtgcagaatcatgtccctaaggaggaagctggagctccacgaggggag

SEQ ID NO: 97808 - DNA, 74 bp, Homo sapiens
ctcatagctgcaatttccacatcaagagtgtagtggccataaaatgcagtaaaaacaaatccagttcccaagaa

SEQ ID NO: 97809 - DNA, 85 bp, Homo sapiens
gctgaggcgtgagaatggcgtcccgcggccggcgtccggagcatggcggacccccagagctgagagaactcgatgccaccgcaac

SEQ ID NO: 97810 - DNA, 100 bp, Homo sapiens
tctaatggtatatgaagatgtcgtccaaatagtatcaggattccaaggtagtgaaaatggacacatccattcaacctctttgcaacacataaaaactgtg

SEQ ID NO: 97811 - DNA, 83 bp, Homo sapiens
tcatcgtcgcggttctgctgccggttcacgcctacatcatcagctccctcaagaaagagatgcccaatgtctttggtaaagag

SEQ ID NO: 97812 - DNA, 90 bp, Homo sapiens
cccgggcccgccggccctgagctcccggcggcgcaggttcatcatgcctagtggcgtataagaagaccccgccaccggtccctccacgca

SEQ ID NO: 97813 - DNA, 82 bp, Homo sapiens
gatcccggcgacatactacctctggccccgagatcagaatgccggtcaaaatgcagatcttcgtgaaaacccttaccggcaa

SEQ ID NO: 97814 - DNA, 98 bp, Homo sapiens
gatcgctgtcctgacagaagagatggtagtgaaaacctttatggatatggatcaggactcagaagatgaaaaacagcagtatctcccactagccttgc

SEQ ID NO: 97815 - DNA, 100 bp, Homo sapiens
ggccgggggcgtctttcagagcattacggtggtgaagaaggtgaagtccatgcagatgttccacatgcccatcacttcagccatgcaaggagaccggctg

SEQ ID NO: 97816 - DNA, 82 bp, Homo sapiens
tgttgtctccgatccagaggatctgcaagtacccgctcctccttaaggattttttatcaagcagaaatgcatcgaacaacga

SEQ ID NO: 97817 - DNA, 82 bp, Homo sapiens
ctgaacttccctggtcgaacagttttttctaatggctattcaaggtttactcctggcttgggggcattaggaagcactggag

SEQ ID NO: 97818 - DNA, 100 bp, Homo sapiens
taccaagtcttgaagagcttgctggagatcagggagcagagaaacatgaaggcacaggtcagtcctctgggatcactgatcaagagaaggagttatccac

SEQ ID NO: 97819 - DNA, 100 bp, Homo sapiens
acagtcctgtacggtggccagaattcttcatggtggcatgatccatagacaaggacacagcattgttggttttgccatgtactattttacctatgacccg

SEQ ID NO: 97820 - DNA, 82 bp, Homo sapiens
ttggagggtagacctgtgggcacggacgcacgccactttttctctgctgatccaggtctgtcgagttgcttatgaaattatg

SEQ ID NO: 97821 - DNA, 90 bp, Homo sapiens
gggatcgtgaccgagaccgtgaccgagagcgtgaccgagagcgcgaatatcgtcatcgttagaaggtgctggtctcagtgtcagtgataa

SEQ ID NO: 97822 - DNA, 100 bp, Homo sapiens
tggaaagagctggttccctggcaggctggagggcaggagctggggccacgctggtctgggatagttgggcagggaggctggagtgcagtggcgcgatctc

SEQ ID NO: 97823 - DNA, 100 bp, Homo sapiens
ggaagattcatcatgagtctccggaaagcagctatggcagagcccaacaccaagcaatatcatttatgctggctgaaatggcaatgaaagttgaactagc

SEQ ID NO: 97824 - DNA, 82 bp, Homo sapiens
ccagctctgccgaacagagcttcctgttctccagggaggaggcggacacgctcagggtttgccttcccggattgggcctaca

SEQ ID NO: 97825 - DNA, 100 bp, Homo sapiens
ggcagctgcacggagagacagcatcattactacctcagttacattgaggaatgctatcagttgagggatttgcagttgataaaatggctggagaggttaa

SEQ ID NO: 97826 - DNA, 89 bp, Homo sapiens
cgaggaggaagaggacgaggacgacgaggaggaggaggaggaggaaaaagagtgtgaacatggctacgcctcttcattcccgtccatgc

SEQ ID NO: 97827 - DNA, 100 bp, Homo sapiens
ggactggcttcgtggtccctgatgggagagcatgaacaggtggtatgtgcaagccttcaatgccacggctgtggtgcggcacatgaggaaactgcagctg

SEQ ID NO: 97828 - DNA, 100 bp, Homo sapiens
ccgccgatatcttcgccatcgccagcatcgccaacccggactggatcaacaccggggagtctgcgggctgtcattatttgtatcaaaaacaaagaatttg

SEQ ID NO: 97829 - DNA, 82 bp, Homo sapiens
atgtctttcctaccatctaaaatacgaaggtttctggctgggaagcctgtctagcagtccagaggagatgtctggagctgaa

SEQ ID NO: 97830 - DNA, 100 bp, Homo sapiens
taaggatggcccagaaggagaactcctacccctggccctacggccgacagacggagtctactcttcatcttgtgttgagacttcgtggtggtgctaagaa

SEQ ID NO: 97831 - DNA, 98 bp, Homo sapiens
cctcctccactggcaaagagtcacctaaagttaggcggcactccagccccagctcgcttctatatacctttgagaaagacttgcaagttttcagttgc

SEQ ID NO: 97832 - DNA, 100 bp, Homo sapiens
ggacgccactacagttcatcaacatcaactacgtccctctgaagaaccccgagatgcccctgtccttcacaataagccgaggattctgggtgctgctttc

SEQ ID NO: 97833 - DNA, 100 bp, Homo sapiens
gaccgtctttattctgtgggctctgattctccaatgggaataccaagggggcgagcctggagctgacggggaggcggggagaccagggagctcgggacca

SEQ ID NO: 97834 - DNA, 100 bp, Homo sapiens
gatgtctttatgtggttgaagcatgaagctacccgaggcaatgcagcagctcaggcacttcaggtggcaagacagctccttcttcagcagcaacagcagc

SEQ ID NO: 97835 - DNA, 74 bp, Homo sapiens
ttctgcctggtgctctgcgtcctcatcgggcttatgttcgagattccagttcttcagacaaacaatggtccaag

SEQ ID NO: 97836 - DNA, 99 bp, Homo sapiens
cactgcagtagaattccttgtagataagcaactggattttttaactgaagatagtgcctttcagccctaccagtaggttcagctgcagcccggaaagaa

SEQ ID NO: 97837 - DNA, 100 bp, Homo sapiens
tgatagaacaacttagcaaaatgttctttactactaagcaccgttggtatcctcatggacgtccctgcactaggtcagacaatcccctttggggtacagg

SEQ ID NO: 97838 - DNA, 100 bp, Homo sapiens
gcaggtattgggagatgcacagctaagatgccaggaccacctggaagcctagaaatgctgacaagctctctactgatgatctgaactccctcattgctca

SEQ ID NO: 97839 - DNA, 100 bp, Homo sapiens
accaaaaatggaaattttcaagacctggcatcaggctcctttctgtcaaggctgcattgcgtcagattactgataaagctcgtgaatttggagctggtcc

SEQ ID NO: 97840 - DNA, 90 bp, Homo sapiens
cagattcgcagtggtcgcttcttctccttgaacaaatcattcacatgtactttgttcatgccctttgaagagtttgaaaaacttctaacc

SEQ ID NO: 97841 - DNA, 75 bp, Homo sapiens
gaaaaactggatgttggtagaaaaagcaagagtttgttatatagcaggattaatgaaaatcaagttccatcctca

SEQ ID NO: 97842 - DNA, 50 bp, Homo sapiens
cgccgcccgtccacacccgccgccaggctgatcagctgaccgaagaacag

SEQ ID NO: 97843 - DNA, 98 bp, Homo sapiens
gctatccgggttcatcctacatttttgtgcaagagtctcttgcatggcaccaagaatgttaccaattcaagcagtttaagattgccaagacaaaatag

SEQ ID NO: 97844 - DNA, 100 bp, Homo sapiens
atctgttctgccctggctgcctcagccctaccagcactggtcatgtctaaagttggaagaggacacagagccagcaggggcttcaggagaattccagcgg

SEQ ID NO: 97845 - DNA, 76 bp, Homo sapiens
agggctcccagacatatataatgcaaaagcggcgccaggaaattgaacaaaaacttgaagttcaggcagaagaaga

SEQ ID NO: 97846 - DNA, 95 bp, Homo sapiens
taggagacatggacgaagccttcaaatccatcaagctcatcaaaagctattcctctacacagccgactagttatgatcagagcagttactctcag

SEQ ID NO: 97847 - DNA, 46 bp, Homo sapiens
acttgccgcgtcgaggactgtcggttctgccttcccaggaccctgc

SEQ ID NO: 97848 - DNA, 75 bp, Homo sapiens
caaacttaccatttcttcagaagagaagatttatcatagaatccccgactcagacccatcttctagcaaaacaag

SEQ ID NO: 97849 - DNA, 75 bp, Homo sapiens
ctccttctcaccgttccgggaacaaatgctagatacgcataccaatcccattgtggaaaatggacagactcatcc

SEQ ID NO: 97850 - DNA, 100 bp, Homo sapiens
gaacactatcctggatctgaatgtcttctatgccctttgccttctgtacgagagagaagcttccttggacagaatttgctgagtcagcagaggatgggcc

SEQ ID NO: 97851 - DNA, 90 bp, Homo sapiens
cttctaagctgaataaagctgttttggaactgtcaggtacctcaaagcgaatgacatctttgtgttcctgttaagcacacgagctggagg

SEQ ID NO: 97852 - DNA, 80 bp, Homo sapiens
ccaggtggacggcacggacgacagaagcgactttggtgagactctgagtttaaagaaacccattatccccaaagagtttg

SEQ ID NO: 97853 - DNA, 74 bp, Homo sapiens
ggcgccttgcggagggaccccaatcttcaaagctgctgcgggcattctatgtccccttcctgtcagatcagtat

SEQ ID NO: 97854 - DNA, 98 bp, Homo sapiens
gtttctgtagatggaaaagaagtctggtcagaagatccttggtgtttggctagcaatgagatttcggaatcagaaggatcctagagccaaccccagtg

SEQ ID NO: 97855 - DNA, 100 bp, Homo sapiens
ggacagtgtacgcttcgaggacttcacggagctctggagaaacatgaagttcgggactatcttctgggcacagaccatcatgaaggctcgtttaaaggga

SEQ ID NO: 97856 - DNA, 90 bp, Homo sapiens
gccgggtaccggccgtggaagcggccaccgactactgtcagcagctgtgccagtctccagagaatacagagggcaaagatggatccaaag

SEQ ID NO: 97857 - DNA, 51 bp, Homo sapiens
gtggccgccatgtttgagcgaggtggtcttcaagctgacagagaagctgac

SEQ ID NO: 97858 - DNA, 100 bp, Homo sapiens
tgggaaagctgtcgatgcccgttcaaagactcctggagagacacgccatagggccggagcctcaacagaaagctcctttagttcctcctcctccaccgcc

SEQ ID NO: 97859 - DNA, 83 bp, Homo sapiens
gccaatcaaactaagaccaaggtcaattgaagtagaaaatgactttctgccggtagaaaagtactgtaagattgatgttaaag

SEQ ID NO: 97860 - DNA, 75 bp, Homo sapiens
taatgctgcagtgaacatgggagtacatacatctgtttgaggggagagaccattctaacacaggtaccgtccaga

SEQ ID NO: 97861 - DNA, 50 bp, Homo sapiens
caatggaaagtcttgacttgactggtactgtgagaatagagatgtttcga

SEQ ID NO: 97862 - DNA, 75 bp, Homo sapiens
cggagtttcgtgagtttttactgactcgaggttatgatgtgattgctcaagcccaatctgggactgggaaaacgg

SEQ ID NO: 97863 - DNA, 100 bp, Homo sapiens
tacatctcacagcagaagacgggcgtgggaggtgtcagttgtacccgaggcgttctcagcagcagcaagtacctgtggtggatttccaggctgaactgag

SEQ ID NO: 97864 - DNA, 51 bp, Homo sapiens
gggatttggtcgcgagcggcgacggtttgtgttgctagttaagctagcttg

SEQ ID NO: 97865 - DNA, 100 bp, Homo sapiens
caagttccaaggttacgtttcaatatcttaatgcaattcagacaatgtgtccacacattcttcgctatttgactacagcagtcataacaaacaaggatgt

SEQ ID NO: 97866 - DNA, 71 bp, Homo sapiens
gaaatctaatgaaccgaaactttggatgatagtatttctgctgcaagtacttctgatgttcaagatcgcct

SEQ ID NO: 97867 - DNA, 101 bp, Homo sapiens
gcagccgggtggtgatcttcagcaagagctactgtccccatagtactcgggacttcagggccacaggtgctgccaagatgctccagggcacctgctccgtg

SEQ ID NO: 97868 - DNA, 100 bp, Homo sapiens
ctacacccctgaagtggggaaatggacctcagcagccatgtcgaagccccatagtgaagccgggactgccttcattcagacccagcagctgcacgcagcc

SEQ ID NO: 97869 - DNA, 100 bp, Homo sapiens
cgcgtccgccgattcctcctccttggtcgccgcgtccttggctggcgtgtctgtccacgttctctgtgggttcattgccggacttgagtctgagttcatg

SEQ ID NO: 97870 - DNA, 100 bp, Homo sapiens
atggaaccactcagtattgcaccatgaagagatgattgggaaagctgggggagtgtctctgtcaaatccggttccagttgttggcaaaggagaggaagag

SEQ ID NO: 97871 - DNA, 100 bp, Homo sapiens
gaagaaggacttcggaatgcactacaacaggaaaatcatattatagatggagtaaagaatgtactcaagactgatcttctaagttcactggaaatgattt

SEQ ID NO: 97872 - DNA, 110 bp, Homo sapiens
ggcggcggccgtggtcaccaggaaggggacgggacggacggtgatggtggtcgccgcggcggcgtgtgcgcccctcagggcgtctctggccgagcctctttttgtggaaa

SEQ ID NO: 97873 - DNA, 88 bp, Homo sapiens
ctaagtccttgtagttgagaaatctctaagaggctttcctctggacaaagctgttgcttactccaagcttcgaaacccctttcttatc

SEQ ID NO: 97874 - DNA, 89 bp, Homo sapiens
cctgggtgctgcaggtgttcaagtgcagggagttcccgttacaatcactagtgttgcaggatttaagtgccctgtatgctcaaaatttg

SEQ ID NO: 97875 - DNA, 99 bp, Homo sapiens
ctggagtctgcgaaggccgggacccggttccccggcccacagtgggggtgtgcaaacccgagagaactggaatcagatgggtgactcaaatatctccag

SEQ ID NO: 97876 - DNA, 75 bp, Homo sapiens
ggcaccggcttcgacgccctctgcccgctccagaagcagttacggcagtcccagtcctactgcacagacacagag

SEQ ID NO: 97877 - DNA, 50 bp, Homo sapiens
gtggcctgtaccctgtgtggcctcgtggacacagcgactcggactccgac

SEQ ID NO: 97878 - DNA, 97 bp, Homo sapiens
tggtttggctttggctacacagcactggttgtttctggtgggatcgttggctatgtaaaaacaggcaggccagaaagcagacccagggaggatagca

SEQ ID NO: 97879 - DNA, 75 bp, Homo sapiens
gttcagtgggaagcatgtcgtctttatcgctcagaagccagctgaagatgagtggggtaaaaccccagacgccat

SEQ ID NO: 97880 - DNA, 100 bp, Homo sapiens
acagccccacgggaagagtacggaaggttgtgcaggaccagcgttccctgtgcaggcgccactgcgtttcctgcagattccgaccggcactgcaacggat

SEQ ID NO: 97881 - DNA, 98 bp, Homo sapiens
aaggaggagcccccggagccattccagaaaatcgggccaacctcttcccgagaagtttgtggtaaaaggtgttgtggatcgtttttcagaagagtttg

SEQ ID NO: 97882 - DNA, 75 bp, Homo sapiens
cgagggctaccacgttctgcggagtgtagcttccattggcaatactttaaacagcgtccatcttgctgtggaagc

SEQ ID NO: 97883 - DNA, 100 bp, Homo sapiens
agccagcctgtcatgagacctccaaacccctttggccctgtatcaggagcacagaacagctttgctgagccatcaaggtctaatggaagcatggttcggc

SEQ ID NO: 97884 - DNA, 117 bp, Homo sapiens
ctctttactccatgtgtgggacattcattgcggaataacatcggaggagaaggagcagttggacatcatggagacaacttagtagagaagatcatttcagcacttccccagctccca

SEQ ID NO: 97885 - DNA, 90 bp, Homo sapiens
cctagtgcttcgttttgtgaaaggccaatttcatgaatttcaagagagtaccattgggggagattatttggtagcaattgaagagaaaaa

SEQ ID NO: 97886 - DNA, 74 bp, Homo sapiens
agagaagctgcaagagcaacatctttcctcaccccaagctccatcaagtatgatggtgaaggatgaatatgtgc

SEQ ID NO: 97887 - DNA, 98 bp, Homo sapiens
gagctcactgcggtcctaaccccgccgcagctcctcggacgcagggttatatcctgtgttgtgacctcatggtttaagtgggaataaagatgagtata

SEQ ID NO: 97888 - DNA, 99 bp, Homo sapiens
gggctgcgggagccgggctaggacgccgagcggtgactccccgccgctcccgggggccgtgacggtatggaattgtttgaagaggcattgcgtcgatgg

SEQ ID NO: 97889 - DNA, 100 bp, Homo sapiens
ctcgcccggttcctctccacttcgtttagttgcgctccatggacagatcaacgaacctggacattgaggagctcaaggttattgttgtgggtaatccagc

SEQ ID NO: 97890 - DNA, 88 bp, Homo sapiens
ttgttgagaaattggatcttacacttgaaatacagactgttggggaacaagagttctgttgagttggaagaattggcaaaatatctgg

SEQ ID NO: 97891 - DNA, 90 bp, Homo sapiens
gaaggccaaagctggtctggagagcggggccgagcctggagatgggagaacagcccatcttcaccacccgagcgcatgtcttccagattg

SEQ ID NO: 97892 - DNA, 88 bp, Homo sapiens
gaagatgacaacatctatcaacagaagatcaagagttaaacatgaagtttctggagagacagtggtatttcaagggggagctcttggc

SEQ ID NO: 97893 - DNA, 83 bp, Homo sapiens
gaaggagatgaaagtttccgggaattaagtccagtttcttttcaatatagggctcctggaccccgccaatacccagcaatttg

SEQ ID NO: 97894 - DNA, 100 bp, Homo sapiens
ttcaacatgcctctgacaatctctagtgttgtggcagcactgcctgaaggtatgagaccagattctaatctttatggttttccatgggaattggtgatat

SEQ ID NO: 97895 - DNA, 100 bp, Homo sapiens
gatatagacaaagtagccttcacaggatcaacagaggtggcgcctggactctcgccctcagagggaggcccgtcccacggtctgtggctacggatcccag

SEQ ID NO: 97896 - DNA, 83 bp, Homo sapiens
gagtggagcttggtttcgggatctcggtgctgcagacggcgagacctcctgcacaggtgtgggcaagagcagtttactgttgc

SEQ ID NO: 97897 - DNA, 100 bp, Homo sapiens
ggcggccctcggtgctctgaggcgctggcgcggcgggcgcggaaaggcctaaagaatgtatttgacgaagcaatattggctgccctggagcctccagaac

SEQ ID NO: 97898 - DNA, 74 bp, Homo sapiens
caaggtttatagctcggtgctgcagcagtgctacagcatgtacaagatacttggcatatcgaaattttatgatt

SEQ ID NO: 97899 - DNA, 96 bp, Homo sapiens
caagtacaatgatgacatccgtaaaggcatcgtgctgctcgaggtgaaactggaacgccaagctgaagaagaacgaatacggaagcacaaagcagc

SEQ ID NO: 97900 - DNA, 82 bp, Homo sapiens
gttcaactttcccagaagttgttctaacgctgcctttgctttaaaacagtattacttgcgattgtcagaagcttcagttctg

SEQ ID NO: 97901 - DNA, 50 bp, Homo sapiens
tgtgaaaactctgttactgaaggtgtttgatatcagctgctaccaggaat

SEQ ID NO: 97902 - DNA, 97 bp, Homo sapiens
cgacagaacgaaaagaagccctccgaggtattaatctctggagaagacacatccacagttagcactttcttcagatgctgacgctcggtgaacagtt

SEQ ID NO: 97903 - DNA, 50 bp, Homo sapiens
gggaaaagcgaggcaaggcaggcgggctgaccaactgactgaagagcaga

SEQ ID NO: 97904 - DNA, 120 bp, Homo sapiens
ctcagatcttaagtagtgatatttctcttttgtctgcccctattgtaagtgcagatggaacacaacaggcttgagtttgaagaaacagaagaacctgattttactgcattatgtcagaaa

SEQ ID NO: 97905 - DNA, 74 bp, Homo sapiens
tatttgatggagttgatgcaagatgaggaagccaaggcccagcagagctgagatgtgactgcagagccgtccaa

SEQ ID NO: 97906 - DNA, 83 bp, Homo sapiens
atggctgcttaaaatggtctatggtctgtctctgtgagccaccagctgggcagcatcatggacctcttcaccaccagcctggc

SEQ ID NO: 97907 - DNA, 75 bp, Homo sapiens
gaaactcaagatccccatggacaacaaggagtgcctgatttgagatggggtcccaggtctcggtggaatcgggag

SEQ ID NO: 97908 - DNA, 100 bp, Homo sapiens
gacactgccagagcccgctgccccgggaactgcagaagctacaagaaggccggcagtttgccagcgagtgaaaggtgtagcagtcactcggcctacaccc

SEQ ID NO: 97909 - DNA, 75 bp, Homo sapiens
gtgaaaaccaaactgatctctctgggttggcttcagatacactgcctctaggactgggacagatagccactgagt

SEQ ID NO: 97910 - DNA, 51 bp, Homo sapiens
cgtgatcctgttagatatcgaagggcagcagcgttctcggatgctagctac

SEQ ID NO: 97911 - DNA, 80 bp, Homo sapiens
agaccgtgaccgagagcgtgaccgagagcgcgaatatcgtcatcgttagaaggcacgtgcgctaagctgcggctaccccc

SEQ ID NO: 97912 - DNA, 99 bp, Homo sapiens
aggacatctgggggccacaaatgctccttctcctggagacgcaactcaagtactatactggcaattgctggagaagattttgcaattgttgcttctgat

SEQ ID NO: 97913 - DNA, 80 bp, Homo sapiens
aatggaagtgaatccccctaaacaggagcacctgctggcgctaaaagttggttaccacagagaagcgcttcctcaaagac

SEQ ID NO: 97914 - DNA, 98 bp, Homo sapiens
ttgttaaggattccaagtaactcttatttgtattcatgtgattgaacggcgtgctcttcctgagttcttcaatggaaaaaacaaatccaagactccag

SEQ ID NO: 97915 - DNA, 99 bp, Homo sapiens
cctcttgcagcagctgctggcctcggccacccagccgtctcctgtgaaggccatatttgataaacaggaacttgagaattgtggtggttttggactcca

SEQ ID NO: 97916 - DNA, 94 bp, Homo sapiens
gaaaaattacagcacatctcagtgaatttgcaagtgcaaaagctgatgaagcattgaaagccaaagaaagaaatgaggaagaagcaaagagaag

SEQ ID NO: 97917 - DNA, 98 bp, Homo sapiens
agtggacaagagaaagcagcggtcagttttcagagatgtcctgagggcagtggagattctgaaggaagatttccattaggtaatttgtttaatcagtg

SEQ ID NO: 97918 - DNA, 135 bp, Homo sapiens
ttggaatatcgaattcgtcagcaaacagacatttacaaacagatacgtgctaataaggttcgtgagccacacatctccccacaccaagctcctccatacaagacctcggactgcatcacgtaaatgctttttcag

SEQ ID NO: 97919 - DNA, 100 bp, Homo sapiens
aagagggaagacacgcggaaacagcctcctaattttccctacagagatgatgtcatgtcagtgaatcctacctgtttggtccttattattcttctgttta

SEQ ID NO: 97920 - DNA, 100 bp, Homo sapiens
aaggaatcaagatcttcctaataaaacagaatattctcttcgtgaagtcccaacatgtgttattatggagaacatcattgcaacagtaagagattccaac

SEQ ID NO: 97921 - DNA, 75 bp, Homo sapiens
cagacttaaatggaaattctgtttcagatgaacaggtacctgaaagaattccgcacagagcagtgcccactcttt

SEQ ID NO: 97922 - DNA, 82 bp, Homo sapiens
aaaaacctttccaagcaagcatgggacaccaagaagatcaatgaactgagccatgttcaaatccctgttatgttgatgccag

SEQ ID NO: 97923 - DNA, 100 bp, Homo sapiens
acttctacttcaactacaagaagaggcagaacctcgatgagatcttgcagcagcacaagctgaagatggaaagatctaggagagagggagaaattgatgc

SEQ ID NO: 97924 - DNA, 100 bp, Homo sapiens
cggaacggcggcgacaagggtgttcccgaactagagtgggtctgccatcatggatgttctcgcagaagcaaatggcacctttgccttaaaccttttgaaa

SEQ ID NO: 97925 - DNA, 51 bp, Homo sapiens
gcagtagatgacttgcaatttgaagggaggaatgatcaattggaatcgtct

SEQ ID NO: 97926 - DNA, 127 bp, Homo sapiens
ggatcctttgataatgaaggcattgctatttttgcacttcagttcacatactatttatggactatgtcttcagcagtggtgcagttatatgcagcagatcggaactgtatgtggtcaaagaagtgca

SEQ ID NO: 97927 - DNA, 100 bp, Homo sapiens
acactgtgttgagttaattaaccaaaaagttccccagtcagtgaccaactcagtgccaaaaccagttatgcagaaggggttaaaagataactttgctgat

SEQ ID NO: 97928 - DNA, 48 bp, Homo sapiens
ggacatcatctgtgtgttctcacagaagtggggataaatggtcaaaca

SEQ ID NO: 97929 - DNA, 98 bp, Homo sapiens
gtacttgaagccctacgccgtggacttccagcgcagtgctggacccaaaggagacaacatttatgaatggaggtcaactatattgggacccccaggat

SEQ ID NO: 97930 - DNA, 100 bp, Homo sapiens
cgagaacgtccactgcgggccggcgaaagctggtgcatgcctacatcatcagctacctgaagaaggagatgccaagtgtatttggaaaggaaaacaagaa

SEQ ID NO: 97931 - DNA, 100 bp, Homo sapiens
taacagactgcttttacacctactccacctggaaggccgctgtggtggaaggatgtttgactgcagagatgtggcattcactgtgggcgaaggagaagac

SEQ ID NO: 97932 - DNA, 100 bp, Homo sapiens
gcggcagcgacggcagcggcggcggctggactaaacaggtcacctgcaggcacttccgttccggcgcccctccggtcatcaacccgctgggcaccagctt

SEQ ID NO: 97933 - DNA, 90 bp, Homo sapiens
cttcaaccagcctttggtcatcaccagggtatcaaattgtagtggaaataatccaggcgactacaattagcagctttccccaactgaaga

SEQ ID NO: 97934 - DNA, 118 bp, Homo sapiens
agcgtcccggtggctttcatccttcacctttgtacatcctggccgtgtttgacatctttacggcctcaagaaaggagaactagttatgaaccgtttcatccaggcccatccccagtgg

SEQ ID NO: 97935 - DNA, 74 bp, Homo sapiens
ttcatcaatgactggcttcagtcccagtgcagggacctcaaggtatcgaaggatgatcgcagtgatgtggagag

SEQ ID NO: 97936 - DNA, 82 bp, Homo sapiens
atcgatagggatgcagaggatcagaaccggtacctggatggcatgggtgactcccacaagcttgactttcggaatgacctcc

SEQ ID NO: 97937 - DNA, 100 bp, Homo sapiens
gaggaaaacaacttcgagggcagagagacaaggagaaggccttaggatctactgggggagtccggaggagcagtctcttctgtcccgctggaacccatgg

SEQ ID NO: 97938 - DNA, 108 bp, Homo sapiens
cggccttccgacgtgggcggtgggccccagccccacagaccagcccagcattcagcaattctgtggtgttcttggtcacacatttatggagtttctgaagggcagtgg

SEQ ID NO: 97939 - DNA, 114 bp, Homo sapiens
caacctgctcactgctgttggcaccaccacccgagactccttaaccgagatcaacctgtctgctcattcttggaatcccagaacaggccttaagtcttctccacatggccatcg

SEQ ID NO: 97940 - DNA, 149 bp, Homo sapiens
tttaggaaaaaaagaagaagcttatgagtttgttcgtaaaggacttcgtaatgatgtcaagagtcatgtctatatggccagggtttataattgggatgtaaaaagaagaaacaaggatgactctaccaagaacaaagcataatgctggc

SEQ ID NO: 97941 - DNA, 110 bp, Homo sapiens
gaaacctcctagtagaaaaagttcttgggacaaacttcatttggaaacatctttacacagcagccaagttactacagtgacctggatgaaaccctgcctaccatccttca

SEQ ID NO: 97942 - DNA, 75 bp, Homo sapiens
cggaggggcgctgtgtgtacatcacccccatggaggccctggcagagcagaccccaccaacaactgaacgctttg

SEQ ID NO: 97943 - DNA, 114 bp, Homo sapiens
cctcgggcggctgcttggccaccgccaccgccgtccgaagggctcgagcccggacagcaatcagacctattgctttgagagctgtgacctccattgctcgtgctctgcctggat

SEQ ID NO: 97944 - DNA, 75 bp, Homo sapiens
gccagcatgcccaagctcttcctgcacctggaaaagagccataaaattttgagtagaaaaatccagaaatttgaa

SEQ ID NO: 97945 - DNA, 73 bp, Homo sapiens
aaacacgctcagagataacctggatgtgtatggggtgttgcttacagattgccagtaggaaaggaagaagaag

SEQ ID NO: 97946 - DNA, 74 bp, Homo sapiens
agatggtgctgtcccagagacaacgagatgaactgtggagccgccaccaaaatgcagattttcgtgaaaaccct

SEQ ID NO: 97947 - DNA, 83 bp, Homo sapiens
cacaggctccgatggcggcggccacgctgagggaccccgctcagatcatgacaagatgtttaagatgagtgaaaagatattac

SEQ ID NO: 97948 - DNA, 74 bp, Homo sapiens
aagttctgcagccagtgcggagagaggctgcctcctgcagcccccatagcaggagccaaaaacctgtatatcat

SEQ ID NO: 97949 - DNA, 100 bp, Homo sapiens
caggacttcggcactgcctatgcccactacctcctcgtgctcagcctggcgccggagctgaaacacgacgtgaagatgtgtcgtggaggccgaatgtttg

SEQ ID NO: 97950 - DNA, 82 bp, Homo sapiens
ctcaggacggacaagcacagtcttcggaaggacagagcgggatgccaccagcttgtccaaagggaagttccaggagctcctg

SEQ ID NO: 97951 - DNA, 88 bp, Homo sapiens
ctttgttcagctgcagcatggagagatagataaacgggcagaagctcctcctggggtagagacagatcttattgatgttggattcaca

SEQ ID NO: 97952 - DNA, 74 bp, Homo sapiens
ggagatgaagcctaagaatatgatcaggggttcaacagaaatatttggtggttacctgcaactatgaagctagg

SEQ ID NO: 97953 - DNA, 83 bp, Homo sapiens
gagggtgccttcgttccccccgagttcgacgtgaccgggaacacctttgagaagcctggctacagataagggaccaaaatgac

SEQ ID NO: 97954 - DNA, 100 bp, Homo sapiens
acatcatcctcccaatgttagccaaacagcagatccacagaccagcatggctgccactgctgctgtgagtcccagtgactacctgcagcctgccgcctcc

SEQ ID NO: 97955 - DNA, 100 bp, Homo sapiens
aaggatcactgtttatgaagcactgaatcacccatggcttaaggccatggtggcgtgttacccaggcaacgggctcgggtacgtaaggcacgttgacaat

SEQ ID NO: 97956 - DNA, 100 bp, Homo sapiens
gccaaggaaggaggcctgcaaattcatgacaggattattgagttgcatttgctggtctggcctttgcgtccttctacctggcagggaagttacactgctt

SEQ ID NO: 97957 - DNA, 74 bp, Homo sapiens
ctgaaacagaaattctggaacacctatatgctatatcgagaagtttactgactttcttcggctctttgtgagtg

SEQ ID NO: 97958 - DNA, 83 bp, Homo sapiens
aggccaacgccgtgttcgacatcctggccgtgctgcagctacgagttccagggagctctgtcctggtgaccgtgcccgggtta

SEQ ID NO: 97959 - DNA, 50 bp, Homo sapiens
gccgagcaggaggcgccatcatgattaacttcatctaccttgccaagagc

SEQ ID NO: 97960 - DNA, 88 bp, Homo sapiens
acggcttcccccaaggaatatacaggaggggctccgaactttgtgtgttgcttataaaaggctgatccaagaagaatatgaaggcatt

SEQ ID NO: 97961 - DNA, 101 bp, Homo sapiens
ctttcggcttctgagacggcggcagcagcggcattcaggcccgatgagagaaagggaaagttaaggatgctggagcagaacaatggatttctctttctctt

SEQ ID NO: 97962 - DNA, 106 bp, Homo sapiens
gagcagcaccagctcatcctatccaagcttctgagggaggaggacaacaagtactgcgccgactgcgaggccaaagtgcctttgttccattgaatgttcccaataa

SEQ ID NO: 97963 - DNA, 100 bp, Homo sapiens
tttgttctaaaattacctcataggacagatggtagtgaaaacctttatggatatggatcaggactcagaagatgaaaaacagcagtatctcccactagcc

SEQ ID NO: 97964 - DNA, 75 bp, Homo sapiens
gatcatgtctgcgagccaggattcccggagcgagcccagggcgtggtgctgaaagtgctcacaaacttcaagagc

SEQ ID NO: 97965 - DNA, 75 bp, Homo sapiens
ccggagtcagtcattttactgtcaagacatttcttcggcattctgcaacagttgctgtcatcctcacctaatcgt

SEQ ID NO: 97966 - DNA, 83 bp, Homo sapiens
atggattgcgaagcaacagagaatcaatttggatcggcttatcataaccaggatgttgtcttggagcttgaatttgaaggtgt

SEQ ID NO: 97967 - DNA, 75 bp, Homo sapiens
agtgagatgcgttatgggatcgagatcctgccgttgcctgtcatgggagggcagaacttcagtgcccgcagccag

SEQ ID NO: 97968 - DNA, 82 bp, Homo sapiens
cccgccacccgagaaagagacccaggcccctggcgagcaggacagcatgctgcctgagaggccatgtggaagtgttacatca

SEQ ID NO: 97969 - DNA, 83 bp, Homo sapiens
cagccatcgcttcggaggggaaggctgaggaaaggtgttatgtctggctgtagctgttggtcacgtgaagatgacagacgatg

SEQ ID NO: 97970 - DNA, 90 bp, Homo sapiens
ccacgttgcaggtggacagctggccagtgatcgagcgctaccctgcagccatcagagggttctcgcttcagcacaagatccggagttttg

SEQ ID NO: 97971 - DNA, 100 bp, Homo sapiens
ggaggagctcaaggggatgcagctgctgcgggagctgtctcagtgattcagtccattccaatattcaatgagaccggacgattcagtttcacattgccat

SEQ ID NO: 97972 - DNA, 100 bp, Homo sapiens
ctcctgggatgagtacagaaacgtgacttatggcacttacctggatgaagattatggaagagattcgggccctcccactaagaaaattcgatcatctccc

SEQ ID NO: 97973 - DNA, 90 bp, Homo sapiens
gcgagggcggccgcgccggctccaggggatcctcttggtgtatgacatcaccaaccgctggtcctttgacggcatcgaccgctggatcaa

SEQ ID NO: 97974 - DNA, 82 bp, Homo sapiens
cgggtggcgcctccctgcgactcctggaccaccgggcgctggtctgctcccagccgttggaatcgaagcctcttaaaatggc

SEQ ID NO: 97975 - DNA, 75 bp, Homo sapiens
ggagcttctcagaagacagagggttttcttttgagtgtaaacaggaacatcgataagtagtgtaaaaacttgcac

SEQ ID NO: 97976 - DNA, 75 bp, Homo sapiens
atcagcgaccgggagaacatagacgatggagttttaacattgaatgcggagaacactaattatgcctatcaagtt

SEQ ID NO: 97977 - DNA, 90 bp, Homo sapiens
ggcgttgggcggtttcccgaggagcttgggccgccgcaggttcgagaacttgtcttggacaattgcaaatcaaatgatggaaaaattgag

SEQ ID NO: 97978 - DNA, 80 bp, Homo sapiens
agcagctgccacaatgggacatgtgcaagtatcacaaagtcgtgaagaaaggaaaggccaagaaagccctaaaagagttt

SEQ ID NO: 97979 - DNA, 101 bp, Homo sapiens
acaagccagcagctcgctcagtacaagaggcaccgcctagaatccttcgatctcgcttcaggaagaaaagtacctcatcctcggccaccgaaaccacgtga

SEQ ID NO: 97980 - DNA, 100 bp, Homo sapiens
cctactttttcatgggccggctcccattgctccggcgcgttctcaagggcttgcagctggaatttgctgattcccttggaattccgtttttggaaaccag

SEQ ID NO: 97981 - DNA, 100 bp, Homo sapiens
aaactgaatgaacggcttgcaaaactttcagatggagtggctgtgctgaaggagggtgaggacaaaatcttcttaatcaacaagcttcactccatctacg

SEQ ID NO: 97982 - DNA, 83 bp, Homo sapiens
caccgcggcttaaatgatgtattttgtgatcgcagcgatgaaagataacgaaggaggcccaacttcattcaataaggagcctg

SEQ ID NO: 97983 - DNA, 75 bp, Homo sapiens
ggtacatcgcctcagggcattcatttcaggctccttctaaatggccaagctgtggtgctcccattcaagtttccg

SEQ ID NO: 97984 - DNA, 97 bp, Homo sapiens
atgagaagagcgtgtattccactcataattatgggaccactcagaggcatgggtgtcgaggactgccttatgctaaccgagattaagcgtagctcct

SEQ ID NO: 97985 - DNA, 85 bp, Homo sapiens
gggaggggggagcggcgttggaggccaccgtttccagttgtatatgaacacagatcaagattagagaaatccttgcaaaaagaaa

SEQ ID NO: 97986 - DNA, 83 bp, Homo sapiens
tggccgcgccgaccaccatcccggtcaccacgaggccgacgcctccccccagggtcagctgcgggctcccaggcctaggcgcc

SEQ ID NO: 97987 - DNA, 75 bp, Homo sapiens
cccggagggaaatccctcagctttttgagaaataggaaggttgttgattactcacagtttcaggaatctgatgat

SEQ ID NO: 97988 - DNA, 121 bp, Homo sapiens
cgcagagccgagtgcagaagatctgggtgcccgtggaccacaggccctcgttgcccagatggggatatgagactttctactcggaatatcctgagtgttgcgtggatgtaaaacccatttc

SEQ ID NO: 97989 - DNA, 50 bp, Homo sapiens
attcccaagccaaagctttccagtactatactggcaattgctggagaaga

SEQ ID NO: 97990 - DNA, 100 bp, Homo sapiens
ttcagggctgctatcaacgaagagatatcacggtctgggggtggtggcatctcccctaaaggaagtggtccctctgtggcaagtgatgaagtctccagct

SEQ ID NO: 97991 - DNA, 75 bp, Homo sapiens
ggaggcgtcacggtggggaacataggacgacagttagctatgacgccacaggtcatcatctggatcatcccattc

SEQ ID NO: 97992 - DNA, 97 bp, Homo sapiens
tgcgctctgcccggcgagtcgggctctggaggaaaagaaaggccaatggtggcagagtctacatagaactatgcttcgtggtgttctggggaaaacc

SEQ ID NO: 97993 - DNA, 75 bp, Homo sapiens
aaagttggaagaaagggtgtcatcacagtaaaggtggtaaaacagtgttgtgggacagatggtgtagaagcaaac

SEQ ID NO: 97994 - DNA, 90 bp, Homo sapiens
tccctgtatgcatggtgtggggttggtgtgattagcttcgcagtctggaaagctttaggagttcacagtttgcaggacgaggagcggagg

SEQ ID NO: 97995 - DNA, 100 bp, Homo sapiens
attgatggaatgtgctttagaagttaaaaaggtgacttctgggggaacagaaagcatactgatggcctgcaaagcatatcgggatctggcctttgagaag

SEQ ID NO: 97996 - DNA, 98 bp, Homo sapiens
ttgatcttctagactccatggcaccgggctgagcgggttaaacccatccagagtaatggctgcggccttacccaggaccctgggggagttgcagctgt

SEQ ID NO: 97997 - DNA, 51 bp, Homo sapiens
tgaccacccctgaagaaattgcacaggtcaaagagttagtggaagcagagt

SEQ ID NO: 97998 - DNA, 75 bp, Homo sapiens
tggaagcccgggaccgtttaaaaaactgctgaataccactagaaacatacctgtaaccagagacagctgattata

SEQ ID NO: 97999 - DNA, 75 bp, Homo sapiens
agtccttatgcgaatcgtcagggcattaggcctataatgaggaaatttctgtctgaccaatatcaggggcacatc

SEQ ID NO: 98000 - DNA, 82 bp, Homo sapiens
catcgtgttccgcttcctgcgtatcatccccagcatgaagttggaatcgaagcctcttaaaatggcagatgacttggacttc

SEQ ID NO: 98001 - DNA, 124 bp, Homo sapiens
aagagtgctgctgctaacgcggtccccggcacgcaccatctgttgccatcccggccggccgaggccattgcagggtgaaaatcctatttataagagtgccgtaacaactgtggtcaatccgaag

SEQ ID NO: 98002 - DNA, 75 bp, Homo sapiens
tcagctacttgaagatagccatcagccgctacgtgactcttttctccagctgagatctgtatctgtggacctgaa

SEQ ID NO: 98003 - DNA, 82 bp, Homo sapiens
gcagtgtgtgcaaaaaagcgccccccagcaaaatgatgcttcaacacccaggccaggtctctgcctcggaagtgagtgcttc

SEQ ID NO: 98004 - DNA, 82 bp, Homo sapiens
tgccctggttccgttgcgcgccccggatgtggcgcggctgcgcgaggagcaggaaaaggcctccggtgtggctgtctctgat

SEQ ID NO: 98005 - DNA, 83 bp, Homo sapiens
tggacttgggaccccctcaggggaacagcgagcagatcaaagatcagtcgcatcgaatacattcattcaaagaacttcatcca

SEQ ID NO: 98006 - DNA, 74 bp, Homo sapiens
gagtcatctggaacttctccgaaaataatcagcatgattcttcagaggctcttcaggttctcctctgtcattcg

SEQ ID NO: 98007 - DNA, 98 bp, Homo sapiens
acattctcaactcggatcagacgacttgcagaagtgctgctacccccgtatgatgatgccactgtgaatggtgctgccaaggagccaccgccacctta

SEQ ID NO: 98008 - DNA, 100 bp, Homo sapiens
ataaagcaaagaaacaaaagacaactctgcttttccagaaactgtgccaggatcacgtgcagtcattggagaaatcgatgaagaaacagattctgcgctt

SEQ ID NO: 98009 - DNA, 76 bp, Homo sapiens
acacctaccaggtggacggcacggacgacagaagcgactttggtgagactctgactatgagctcctctcagacccc

SEQ ID NO: 98010 - DNA, 75 bp, Homo sapiens
gaagaatttcgatctccgccctggggtcattgtcagatcctgagagtgagaagcctgactgaccccgcctagacg

SEQ ID NO: 98011 - DNA, 97 bp, Homo sapiens
taggacagagcctaaaatccccagcttccataagatcaaggagtgtatctgattcttcagttcctcgaagagcattaacacccttgtgaagatcagc

SEQ ID NO: 98012 - DNA, 100 bp, Homo sapiens
caggaggctgtgcgggccccgctccgcttcgaatgggctaatgtaatgcttgaatatgatattgatgaagctcaggcattgttggaaaagaatttatcga

SEQ ID NO: 98013 - DNA, 100 bp, Homo sapiens
gagatggcctgtctgataactgactctgatctcaacattttggctgaaatatatggtacatttgctggagttggctgtgactttcattgagagattagaa

SEQ ID NO: 98014 - DNA, 101 bp, Homo sapiens
gaagtgtactgccttaacgactttgaagaagatgacacagacttaattcagtgcacaaatgagatgaatgtgaacatcccacagttggcagacagtttatt

SEQ ID NO: 98015 - DNA, 75 bp, Homo sapiens
ctgatagttgttccttgtgcagaagctgattacctggctcaggcatttgattctctttgtttggacttgaagaca

SEQ ID NO: 98016 - DNA, 91 bp, Homo sapiens
ctggggccagggaaccctggtcaccgtctcctcagatgtgaagttcatttccaatccgccctccatggtggcagcggggagcgtggtggcc

SEQ ID NO: 98017 - DNA, 131 bp, Homo sapiens
ctggaaagatgttagaattgaagcctataatatttgtcacctgaactacttcacattttccccaatatatgaatgacagcccatatcaaggcggtgtattctttttgacaattcattttcctacagactac

SEQ ID NO: 98018 - DNA, 83 bp, Homo sapiens
gcccttagttggagctttgtctatcttcttccttaggaaaccacagtacttctggaatagaaattctaaacattagcctgccg

SEQ ID NO: 98019 - DNA, 100 bp, Homo sapiens
tcaagggagtcgaccccaacagcaggaatagctcccgctccagaacctgggtatcaacccagcaaacattggcttcagtaccctgactatggagtctgac

SEQ ID NO: 98020 - DNA, 96 bp, Homo sapiens
gggacatcgtgtccctgtacgcggagggctcggtcaacggcttcatcagcaccttgggatggatctgtctgtagaaactctgttcagcttcatgca

SEQ ID NO: 98021 - DNA, 75 bp, Homo sapiens
agaatttcctgcgctgttccacctcattcaacttcagctccgtgggcgaggtacagtgggaggccgagtttttcg

SEQ ID NO: 98022 - DNA, 98 bp, Homo sapiens
gcagatcgattttaccttggataccctgctttggattatctttctcaaggaatagatctttctggaatagaagtgatagaaaatgatctactttttat

SEQ ID NO: 98023 - DNA, 100 bp, Homo sapiens
cgccattcctattgaaatcatgcagggcactggggaagaggtccttcgattctatgcaatctgggatgatacagacagcatgtatggtgaatgtcggacc

SEQ ID NO: 98024 - DNA, 73 bp, Homo sapiens
gggaagcgagccgcgacccgagctgataagccaatggacacgtcagtgttatctgaagaaggaggagagcctt

SEQ ID NO: 98025 - DNA, 100 bp, Homo sapiens
gacaagatcatgggcaaaggacagatccagacggccgaagccctgcagcccacgctacagccggagatgcagctcgagcacggggccatccagattcagt

SEQ ID NO: 98026 - DNA, 75 bp, Homo sapiens
ctgatttcagagactctccgcaacagaaccatctcaagaagcggggagaggtggtgagagatgacccctgttgag

SEQ ID NO: 98027 - DNA, 100 bp, Homo sapiens
tatgttggctacacgagtctgtatctggatagtcgtaaacttcctatgatatctgcgctcctcagaccaccggcaggtgaacagcctgatgcagaccgag

SEQ ID NO: 98028 - DNA, 88 bp, Homo sapiens
cagttctctgaacgcaagaactacaagctgcaggagagttagcaaaggtgacatcttctcggggggagccgagactgcgcaaggctgg

SEQ ID NO: 98029 - DNA, 74 bp, Homo sapiens
agaacgtcactgagtttgatgacagattgtatctgaggaaaggaagaggggaaaccagaatctgcaaaatctac

SEQ ID NO: 98030 - DNA, 83 bp, Homo sapiens
gcctggctaagcaaaaccctgcagaacggctgcctaatttacagcaaccatgaggcacctgaatggacagaagaggacctcag

SEQ ID NO: 98031 - DNA, 100 bp, Homo sapiens
ctggcaagaggtgctgatatcaacacggtcaacgtggacggcttgacagccctgcaccaggtgctggagaatctggtaaaagcaccattgtgaagcagat

SEQ ID NO: 98032 - DNA, 100 bp, Homo sapiens
acggtacagcgaaggcagagagttcagggcagttgggtgagaagcagcttccatcttcaacctcggatgatcgggtaaaagacgagttcagtgacctttc

SEQ ID NO: 98033 - DNA, 75 bp, Homo sapiens
aaaactctccgtctttgctaatggagtcgtgacttcaattcagatgaggcctgcctgtgttaatacacctagtga

SEQ ID NO: 98034 - DNA, 100 bp, Homo sapiens
caactacagcgtcaatggcaactgcgagtggctcatcgaggcatcacaggacatggccccctcagccacctagctggggcccatctaggagtggcatctt

SEQ ID NO: 98035 - DNA, 75 bp, Homo sapiens
ctcaaagcgggaaatgcgtcaaagaaggacagaataacgggctcccagattcacaagccccaccaagaggatcac

SEQ ID NO: 98036 - DNA, 75 bp, Homo sapiens
gggcgttcatctaccacgcctacgtggccaattcctgtccccccagcagcatggcatcgtgtgctgaaccctctg

SEQ ID NO: 98037 - DNA, 83 bp, Homo sapiens
ctggagcgacgacggccgctgcctaagctggaaaaaacaagtgttgaaaatgttaaaggctgtgctgaagaagagccgagagg

SEQ ID NO: 98038 - DNA, 75 bp, Homo sapiens
tcgcagtttggagagatgggaggcaagtttatgaaaagccaggtttgaagatgccgcatttggattggatgaatt

SEQ ID NO: 98039 - DNA, 75 bp, Homo sapiens
cggacgcggcccggcgccgagccatggatgtcgccaccatgcagttctgtgccaacaagctggacaagaaagatt

SEQ ID NO: 98040 - DNA, 100 bp, Homo sapiens
cgccgccgccgccgcagagctgcagctcggggccgaggagtcttcggatgactcctacgtgtccgctggagaagagcccctagaggcccctgtgtttgag

SEQ ID NO: 98041 - DNA, 90 bp, Homo sapiens
cgctctggtcacaccaatactgttgcagattgatgtgctggtggacggacagccatgtgaccgcgaggctgtggcggcctgccaggtggg

SEQ ID NO: 98042 - DNA, 143 bp, Homo sapiens
ctcaagtttccaagtctcttaaggagcgattaggcatgtcagctgatccagataatgaggatgcaacagatcaggatcctcatgaccagccaaagagaagaagaattaggaagcataaatcaaagaaaaaatttaaaaatccc

SEQ ID NO: 98043 - DNA, 100 bp, Homo sapiens
cgccatggctgcgtcggagctctacacaaagcggagctggagtttgttcagatcatcatcatcgtggtggtgatgatggtgatggtggtggtgatcacgt

SEQ ID NO: 98044 - DNA, 76 bp, Homo sapiens
ctgattggctcttcctcaatgcttgtgtgggtctcagccaatttcttctccagtcatcctccagtttggtcatgca

SEQ ID NO: 98045 - DNA, 82 bp, Homo sapiens
tcgttaaagtctctcttcaccctgccgtcatgtctaagtcagagtgcctccggagccagcgtggtggccatagacaacaaga

SEQ ID NO: 98046 - DNA, 75 bp, Homo sapiens
atgcccatccgaaaggatgatgaagttcaggtagtagtggcaactgttgcatttggtatgggaattgataagcca

SEQ ID NO: 98047 - DNA, 100 bp, Homo sapiens
cacccaaggcccaaaagcgtcaaactcaccaaaaacaacatctttccagaaagagaagagtcaagtaccattggccaggatcaaacgcttatggaacgtg

SEQ ID NO: 98048 - DNA, 100 bp, Homo sapiens
atgatttaaacaagagatttccacagaaggttttgcactgattgcaaaaataaagtcctccgagcatacaatatccttattggtgaacttgactgcagca

SEQ ID NO: 98049 - DNA, 75 bp, Homo sapiens
tgtggagttcgatttcttgggagcactggacattcctaatgaggaaaatggggagcaggaggctgacaatgaggt

SEQ ID NO: 98050 - DNA, 98 bp, Homo sapiens
ccgtcctccaccgtttcctccaggacagcacctagtcgtggccggaggagtctcagagctgtcagaaaggtgatggctggaccggcggaggaggcggg

SEQ ID NO: 98051 - DNA, 100 bp, Homo sapiens
ctccatcaggaccccagatgtctgacagccctgtgtgacaccaagataagtaacccgaatctgtgacctctctgccatcccaaaacaatggaactaccag

SEQ ID NO: 98052 - DNA, 98 bp, Homo sapiens
gcagctaccagcagtgcataaacgaggcgcagcgggtgaagaaaaatgtccattccacaaggtttgtgacatatttctgtgagcaggttctccctaac

SEQ ID NO: 98053 - DNA, 80 bp, Homo sapiens
atcctctgctgcatagtttcggtcatctaaaggaggttttaaacagtataacaggtgtggaatccatagcatgttccctt

SEQ ID NO: 98054 - DNA, 100 bp, Homo sapiens
gcgcgggagcacctgggggaccgcttgcagcggggacgcgaggacccgggctgggctttcctcacccggccacagacccctttgcttctgtttttgggaa

SEQ ID NO: 98055 - DNA, 75 bp, Homo sapiens
gtggtatactcgcagacaacccaaccggtatacaatggaaaacctcacagcacgggtagctctgaacggattcag

SEQ ID NO: 98056 - DNA, 75 bp, Homo sapiens
gcaggagcccggccccggagccaccggtgtcccaccggccttccgggttccagcgccaggcctggtgcctgcccc

SEQ ID NO: 98057 - DNA, 78 bp, Homo sapiens
aggaactgctctataaagaacaaggctttgaaacattgcagcattccctgtattgaacactgatatacaaggaatgaa

SEQ ID NO: 98058 - DNA, 99 bp, Homo sapiens
cggagccgcggcgggagaggaacgcgcagccagccttgggaagcccagccctggactatgtgttagatgcggacacagaccggaggctccggggccagg

SEQ ID NO: 98059 - DNA, 75 bp, Homo sapiens
gatgttcctcccaggagacagctatatttgcccatgttattcaagaatcaggaaacccaggcccaacggcaggtg

SEQ ID NO: 98060 - DNA, 100 bp, Homo sapiens
cggagctgggcgcggagcccctcacagtgcaggtgctttacaaggccaagtacggtccaatgtggatgtcctacttagggcctcagatgcacgtgaacct

SEQ ID NO: 98061 - DNA, 76 bp, Homo sapiens
cctacccaaggacagggggacagggctctgtctcgcacttcccaggaggaggaagccaagaatctggtgagcgaag

SEQ ID NO: 98062 - DNA, 82 bp, Homo sapiens
gcgacttcgacaacttaaacggcttcaggcaaatatgggtgcaaaggtcaaaatgtgggtacagctcctgattcccaggata

SEQ ID NO: 98063 - DNA, 98 bp, Homo sapiens
ctgcttgatattggcggtggctttcctggatctgaggatgtgaaacttaaatttgaagagcactggatgtgtgtgagaagtggggagaaatgccacca

SEQ ID NO: 98064 - DNA, 82 bp, Homo sapiens
tcgcttgcctacccgccggcccgcgggtctacttcctcaaaggttatgaagacagtatggagtttccagaccatagtagaca

SEQ ID NO: 98065 - DNA, 90 bp, Homo sapiens
agaaatggaagtaccagcagaagacagcatgagtatctatgacgatattgatgctgacgtgctgcaaaattaccaagaatacaatctggc

SEQ ID NO: 98066 - DNA, 75 bp, Homo sapiens
tacaatggcccagtaccaggctatcagcaaacacctccccaagggatccaagtgctaagagatcagctgggttgg

SEQ ID NO: 98067 - DNA, 98 bp, Homo sapiens
tctcatcccccaaagatcattctgcctgggaaagaaatgaaagtctttccaatgcaggaagcagtcaattatagatttcttcaaaccagcttcaaaac

SEQ ID NO: 98068 - DNA, 87 bp, Homo sapiens
cacatcaatgcactgccaatggccctgaaagccattatcgccatggatacagcaggaatgatcctgggatggaaattttttgatcat

SEQ ID NO: 98069 - DNA, 73 bp, Homo sapiens
tgaaatcctcttctggataccttgccaagtccagtattgtggaagatggtcagtaggacagaaggtaacattg

SEQ ID NO: 98070 - DNA, 90 bp, Homo sapiens
gggatggagaaggaggaggaatcgccatccaacatattctttacaatggatgatgtggtcaaggttggagactttgggttagtgactgca

SEQ ID NO: 98071 - DNA, 75 bp, Homo sapiens
ctcagatgctgccagggtccctgaagagggaagacacgcggaaacagcccaagaagatgaaaggattgttcttgt

SEQ ID NO: 98072 - DNA, 75 bp, Homo sapiens
ggacagaggacaatggcttccatggagtctactcttcatcttgtgttgagacttcgtggtggtgctaagaaaagg

SEQ ID NO: 98073 - DNA, 88 bp, Homo sapiens
gacatcatcatcaacaaccagacagggcagcacgccgtcattgacatcaatgccttcccagatgaggacggggacttggttgcctttt

SEQ ID NO: 98074 - DNA, 83 bp, Homo sapiens
gcttcttacctacaaatgacttaagtcagcccacgggatttttagcccagcccatgaagtcattgaagactctccggaattca

SEQ ID NO: 98075 - DNA, 75 bp, Homo sapiens
tgagggaaagaaaacaatttctcctgctctgcagcttctgttcagcttgacagagccaattcgctattaaaccag

SEQ ID NO: 98076 - DNA, 82 bp, Homo sapiens
actgccgtcttctttgcctgcactaatgatcgatgctatagaagacaaacaagggaaggttttttttccttttgcatcatgg

SEQ ID NO: 98077 - DNA, 101 bp, Homo sapiens
cagaaatgtaatgcacgttggactacagaagagcagcttctcgccgtacaagttttgggaggtcatcagtgatgagcatgggattgaccccactggcagtt

SEQ ID NO: 98078 - DNA, 50 bp, Homo sapiens
cttatacagctaaagccatggaaagactcaccccacacagaccgcgtttc

SEQ ID NO: 98079 - DNA, 75 bp, Homo sapiens
aaaaatatccagcaaaaccgctgctaaattgtcaactagtgctaaaagaactgtcaagtaatccacctctggcta

SEQ ID NO: 98080 - DNA, 74 bp, Homo sapiens
gtgggagcaaaaccaacgcctggctcggagcagcagcctctgaggcctccggtgtggctgtctctgatggtgtc

SEQ ID NO: 98081 - DNA, 100 bp, Homo sapiens
accccagagcagcccacccatgccgtgtgtgtgctgggcaccttgactcagcttgacatctgcagttaccttatcccatatcacacaactggtcctcagc

SEQ ID NO: 98082 - DNA, 100 bp, Homo sapiens
aacagccaaaacagttcattcatattcagcgattgccacccaggacgatgagcggctgagatggagacgtctgcctcagccactgcctccgagaagcaag

SEQ ID NO: 98083 - DNA, 90 bp, Homo sapiens
ggctcatcctgtccatcgtgtgcctgatgatcacgcagctggctggcttcagtggaccatgtgctggaattgatgttcgtctgtgtgatg

SEQ ID NO: 98084 - DNA, 83 bp, Homo sapiens
caccggcctcagcccgcaccgaattccgttgatgcagcaaagccgctgctgcggaaggcgatccagatctcacagcagacccc

SEQ ID NO: 98085 - DNA, 58 bp, Homo sapiens
aatactaagggtgccttttaggagaaataaagaggtcctggacccaagccagaagcct

SEQ ID NO: 98086 - DNA, 75 bp, Homo sapiens
ctccgttgcctgctcccggagggagacgcgctgccgaggagaacccagcggatgaggtttatataactttccaag

SEQ ID NO: 98087 - DNA, 75 bp, Homo sapiens
tgcaagatggcggcccatcaccggcagaacacagcagggcggaggaaagtgcagaggacaagaattttgggcaga

SEQ ID NO: 98088 - DNA, 98 bp, Homo sapiens
atggccgcagccgctctggggcagggctcctcgcacctaccccagcaactcaaattcaccacctcggactcctgcgaccgcatcaaagacgaatttca

SEQ ID NO: 98089 - DNA, 135 bp, Homo sapiens
gcccgtccatcccaaaaagccaaagccacagataaaccagtggaagcaggagaagcagcaattatcgtccgagcagccctgggcatttccagctcgagagttccttcgaaagaagctgattgggaaggaagtctg

SEQ ID NO: 98090 - DNA, 101 bp, Homo sapiens
cggggcgacgctggctgcagggacccggtgacagcgtgagaggctgcaagaaagcgtaagattgccattcgaaaagcccaggggaaaaatgtggaggccat

SEQ ID NO: 98091 - DNA, 100 bp, Homo sapiens
gggcggtggcggcgggctcctgcgagaagcaagcggaacttcctgagacaccattcgcttttcacccaagatgatttgatgtcttataaaactctgatga

SEQ ID NO: 98092 - DNA, 100 bp, Homo sapiens
cgtagcagccagagacagctccagacatgtggctcttcttcgggatcactggattgctgacggcagccctctcaggagcagcatttctttctattactac

SEQ ID NO: 98093 - DNA, 74 bp, Homo sapiens
gtaaccacctcacagattccagcttcggaacaagagaccctgggagattggtggacggctcctcatggtagaaa

SEQ ID NO: 98094 - DNA, 100 bp, Homo sapiens
ccccagagcctcccgcggcccacagagcacagcatgaagaggaaccacctcagaatatgaaaccacaatcaggaaacgataagccattatcaaaaacagc

SEQ ID NO: 98095 - DNA, 74 bp, Homo sapiens
atcaacatgagtatggaccagaagaaaacctagaagatgacatgtaccgttatcgtcgtattcctctgttttcc

SEQ ID NO: 98096 - DNA, 100 bp, Homo sapiens
gaaccagccgactggagcaggcagcagcccagaaccatatttatttagagtcagaatggagcgatttgtagtaacagcaccacctgctcgaaaccgttct

SEQ ID NO: 98097 - DNA, 98 bp, Homo sapiens
gttggaacaagagaatgatgaccttgcccatgaactagtaacaagcaaaattgctctacggaatgacttggatcagggatgtgagctcatttcaactc

SEQ ID NO: 98098 - DNA, 74 bp, Homo sapiens
cagaacctcaagcttttcaggcatcctcatataattaaactcatggcctgtatgagaagaaaaagacctcaaga

SEQ ID NO: 98099 - DNA, 82 bp, Homo sapiens
gtcttctggcaaacagtgtttgcctctggttcagctcatacaacagcttcttaggaactgatgaatccccagaaccactgcc

SEQ ID NO: 98100 - DNA, 83 bp, Homo sapiens
cccaagcctcctctgcctggcattcgggtggttgataatagaccattgccctcttgaacatttaccgtaaccctcaaaactct

SEQ ID NO: 98101 - DNA, 131 bp, Homo sapiens
caaacaagtaaatatggaactggccaagatcaagcaaaaatgcccactttatgaagccaacggacaagctctttgagtcttggtttgacatcactagtctttctgaaactgctgaagatattattgctaaa

SEQ ID NO: 98102 - DNA, 75 bp, Homo sapiens
tgaaatcctgtcctgaagactgtaagaaactatggaggagtatatgttggcctaccatctgaagctgtcaatatg

SEQ ID NO: 98103 - DNA, 75 bp, Homo sapiens
attgttggaagaggccacaacagacgtggaaccggccatgcaagtaattggaaaatggcattcctatgaagaaag

SEQ ID NO: 98104 - DNA, 100 bp, Homo sapiens
tcatctctcccttcgcccagttccctgcatcctaagactcgaaggcagcacaggacctggaaaaattacatggtacatccgtccccagtatcaagggtcc

SEQ ID NO: 98105 - DNA, 100 bp, Homo sapiens
tggatgtctcctcttccttgagatcccagactgcccaagttaaaaggcgaactttctgaccaagtatacaactacccagagggcctaggagaagtgctgt

SEQ ID NO: 98106 - DNA, 88 bp, Homo sapiens
ttcgattccactctcttccgtttctgtcgctgcagtcgtccgcggaggttggaaagaaccatgactgtattcaggaaggcacatgaac

SEQ ID NO: 98107 - DNA, 100 bp, Homo sapiens
ctgactcggactgggacaatgacagcagctcggcccgcctctttgagaggtctcgcattaaggctctggcaggccatgtcatggtaaacggtccaaccac

SEQ ID NO: 98108 - DNA, 100 bp, Homo sapiens
tttcccctgtaccctgcattttcgagtaagattttttatacctgatcccaacacactgcagcaagaacaaaccagccaaaatgaagtttaatccctttgt

SEQ ID NO: 98109 - DNA, 75 bp, Homo sapiens
accgtgctgcccagaatgcccttcgggagatgaagatgacgccaacagactcggggagaaggtgatcctgcggga

SEQ ID NO: 98110 - DNA, 82 bp, Homo sapiens
agagggtgttcgactgctagagccgagcgaagctaatcaagatgattaccaactggttcgaaaacttggtcggggaaaatat

SEQ ID NO: 98111 - DNA, 145 bp, Homo sapiens
tcccatagaagctggtgacatgttcctggaagctctgggctacacctggcatgacacttgctttgtatgctcagttttgcgtgtgaagctgtgtggaaatgtgaaatactaccagtcacaccattatagtaccgtggtgccacct

SEQ ID NO: 98112 - DNA, 80 bp, Homo sapiens
cccgccgcagacacgggacccgcttcgaggccgctttggcgccaaatcctgaggatttatgagcagcttccagaagtaca

SEQ ID NO: 98113 - DNA, 98 bp, Homo sapiens
tctttgaggactttgtctctgatgagctgagaaacaaagccacccagccaatgaaggatgctcacaactgtattcctgagctggacagtgagacagcc

SEQ ID NO: 98114 - DNA, 83 bp, Homo sapiens
ggtggagtccaccctggctgtggtgagaagccctaccactgcaactgggacggctgcggctggaagtttgcgcgctcagacga

SEQ ID NO: 98115 - DNA, 80 bp, Homo sapiens
caaacagagactgcgaaacgatcctctcaatcaaaataaggatatcccagaagctcctgagagactgatgacagacacca

SEQ ID NO: 98116 - DNA, 100 bp, Homo sapiens
ctcccgctgtctcagcagtctacagcacgagaattttctctacatgtgcacccatttaaaggactcggcttcaagggaagcagcttccaccgcattatcc

SEQ ID NO: 98117 - DNA, 100 bp, Homo sapiens
gaaaagcgaggcaaggcaggcgggcgatatgagtctcatccagtctgtgctgatctgcaggccaaaattcttcagtgttaccgtgagaacacccaccaga

SEQ ID NO: 98118 - DNA, 100 bp, Homo sapiens
ggagcgcgaacgagcgacggcggaacccgtgggcctgtggactgcagcctcggcggtcagcagtaagactttgaccccgacgcaggcttcagtgattgcc

SEQ ID NO: 98119 - DNA, 98 bp, Homo sapiens
cagttcgctacacagcaatgcatcgagataaccagttcaggatgtccatcctggaacgactggagcagatggagaggaggatggccgagatgacgggg

SEQ ID NO: 98120 - DNA, 101 bp, Homo sapiens
ccggtcaaaggaggcaccaagtgcatcaaatacctgctgttcggatttaacttcatcttctgggctgttgaagctcaaatccgaagttttggacagactcc

SEQ ID NO: 98121 - DNA, 100 bp, Homo sapiens
cgccctcaaggccatgatcaaaacgaatagccaggtctggctgggtcggcacaacctgtttgagcctgaagacacaggccagagggtccctgtcagccac

SEQ ID NO: 98122 - DNA, 100 bp, Homo sapiens
ccagaccatttctctcacccggcctttccataatggagtgaagtgtcttgttccagaagtcaccttcagctcaccacgcgcagcgccatgaccagcaagg

SEQ ID NO: 98123 - DNA, 78 bp, Homo sapiens
tgtgattcaaggtgggaaatagccgcttcagattgcattctcacaacacaatacaatcatggaccttgtgcagttttt

SEQ ID NO: 98124 - DNA, 83 bp, Homo sapiens
ccgccggcccgcgggtctacttcctcaaagcctggtccgacccccagtggcactaacgtgggatcctcagggcgctctcccag

SEQ ID NO: 98125 - DNA, 76 bp, Homo sapiens
gggatcagaggtccctggagtttctgcttcctccagagccaggtgctgggtaggccaggtttcagcatcgcagaca

SEQ ID NO: 98126 - DNA, 75 bp, Homo sapiens
ttttgacctgagggctgctattgtatatcacactaaaggtggagccgccaccaaaatgcagattttcgtgaaaac

SEQ ID NO: 98127 - DNA, 75 bp, Homo sapiens
gtgaccgagagcgcgaatatcgtcatcgttagaaggtgataattgatgaccagttacctgttgatcacaagggag

SEQ ID NO: 98128 - DNA, 90 bp, Homo sapiens
aaactcacttgactaatcttcgggcagagagaaggaaacacttagaggaagttctggagatgaaccagatgaaaactcgctggatttttc

SEQ ID NO: 98129 - DNA, 98 bp, Homo sapiens
gaaaaggggctacagctctgagatgaagacggaggacgagctgcgggtgcggcacctggaggaggagaaccgagcttgcccagtttcgacaaagaaaa

SEQ ID NO: 98130 - DNA, 50 bp, Homo sapiens
ggggacttccccaatgcttatggtagtgggcagcagtcagtgacaggtgt

SEQ ID NO: 98131 - DNA, 76 bp, Homo sapiens
cgaggaagaggaggtttctgagggaatgggtactgttcaaaaaggaatgccccacaagtgttaccatggcaaaact

SEQ ID NO: 98132 - DNA, 83 bp, Homo sapiens
gagtggctcaacctcatcttcaagtggccattcctgtatcacgagactgggagctgcttcccagtgctgctgcctctgctgag

SEQ ID NO: 98133 - DNA, 83 bp, Homo sapiens
caccaatgccaccatcatggtcgtcagcgtcaccgcctccaccacccagggaatctgtgcggagaccctgggagaagaacagc

SEQ ID NO: 98134 - DNA, 100 bp, Homo sapiens
cgaaaacaacatcttggttagaccctcggtgcctaaacaagcagcagaagccactggaagagtgtgaagatgatggtggatttgccgctgcagtcaccac

SEQ ID NO: 98135 - DNA, 100 bp, Homo sapiens
gccgctgcaccttcaccgcgtacccgggacccgcccgcccgcgggaggttccaatacatatgaagaggcagctgcctatattcaatgccagtttgaagat

SEQ ID NO: 98136 - DNA, 100 bp, Homo sapiens
cttcctacaggaaaacaaacagcatcttgagaagacacctaaaccagagagagacagggaaaggatattgtcaatacaatcatcaaacactgctcacctc

SEQ ID NO: 98137 - DNA, 97 bp, Homo sapiens
gaagttggacataactttggatccccacttcagtatcagacacagcacagcagccatctgaagagcaaagcaagtctcttgaaaaaccgaaacaaaa

SEQ ID NO: 98138 - DNA, 75 bp, Homo sapiens
agacaacattgttcctggaacgccctctttttaaaaaagccatttaaagttttggcaactgaaactgtaagtcac

SEQ ID NO: 98139 - DNA, 51 bp, Homo sapiens
cggagtgaccagaggagggacacgggagctgacacgtttctcccagcacaa

SEQ ID NO: 98140 - DNA, 75 bp, Homo sapiens
gccctggctgcctcagccctaccagcactggtcatgtctaaagaacatgagcctttgactgctcctcagctcttg

SEQ ID NO: 98141 - DNA, 75 bp, Homo sapiens
ctcattttggatatctgtgataaagttggtcagtctcgcactggatgcatcatcccattcagatgaaacctgcag

SEQ ID NO: 98142 - DNA, 83 bp, Homo sapiens
ttgaggaagaagccacccgagcggactcccgagtttcttcactagttgaagaaggagaaaaacagaacaaacgttttaggccg

SEQ ID NO: 98143 - DNA, 82 bp, Homo sapiens
agaggaggatctcccacctttccaagcaaggccaggaggtggtccagctgctcacctgtgacctgctactgtcgctacggac

SEQ ID NO: 98144 - DNA, 100 bp, Homo sapiens
ctgactctggccgtgtggctccagagtctgaccgcctcccgcggaggggtggccgccgccgaccatcttggatgaggtggaaaaaagacgaggcatctct

SEQ ID NO: 98145 - DNA, 98 bp, Homo sapiens
ggggatggcgtcccccgggggcccgtactgcacatcgtggtggtcggatttcaccacaagaagggctgccagatgaataatacggcagctagtccaat

SEQ ID NO: 98146 - DNA, 76 bp, Homo sapiens
cctggcggtgccggatcctgacggcggccttcccccggggaactctaatgatccaggacaaagaagttaccctgga

SEQ ID NO: 98147 - DNA, 100 bp, Homo sapiens
gtgaaattccaccatggcgtaccgtggccagggtcagaaagtgcagaaggttatggtgcagcccatcatatatcagctacttcagtgggctgctatctgg

SEQ ID NO: 98148 - DNA, 50 bp, Homo sapiens
cgtcagggacctgcccgactcagtggaatgggtaccacagaccatgtcat

SEQ ID NO: 98149 - DNA, 99 bp, Homo sapiens
gtattatagacaacaagcagcctattatgcccagacaagtccccagggaatgccacagcatcctccagcacctcagaagaagctcattcacacagaaga

SEQ ID NO: 98150 - DNA, 100 bp, Homo sapiens
ggaaaaccaactacagaatgtactcttatgtcacagaggaggtccactcagctgttgaagaaatggatggattagatgatgttgaaaacagcatgttgta

SEQ ID NO: 98151 - DNA, 100 bp, Homo sapiens
ttcaggtgctggaaaggaatgaggagttacagagggccgagaaggacaggatcagaggtcctatacgttgcttgtggaggcgtgggattccagtaatgac

SEQ ID NO: 98152 - DNA, 100 bp, Homo sapiens
atagcaagtattcaggaatccattggagaaaccagttctcagagtgttgttgttgctgtagatagggaggagatatcaccaaacatgatggaacaggcgg

SEQ ID NO: 98153 - DNA, 100 bp, Homo sapiens
caggaaccaccagtgacagaggggaacacacctgaaactagaggaacagcttatgtggtctatgaggacatctttgatgccaagaatgcatgtgatcacc

SEQ ID NO: 98154 - DNA, 75 bp, Homo sapiens
agcgcgagcggcgcgagaaactcctgtccaaatatgacccccagaaggaggcagagctccgcacctggatcgagg

SEQ ID NO: 98155 - DNA, 82 bp, Homo sapiens
cctggccctggccctgatcatcctgctgggcttcgtccagatcgggaaggggaaatcctcattgacgattcaatttgttgaa

SEQ ID NO: 98156 - DNA, 83 bp, Homo sapiens
atcagggcatacatctttcttcgacaaagggagcatttagacagcacccgtggctcagttcattccttagatgcaggcttgct

SEQ ID NO: 98157 - DNA, 98 bp, Homo sapiens
agtaaaacttgctgctgatgaagatgatgacgatgatgatgaagaggatgatgatgaagatcgtgagatggagaataaagaaactctcaaagggttgc

SEQ ID NO: 98158 - DNA, 98 bp, Homo sapiens
gtctgctcctgacaaggacaagtggctaccgttcttccctaagaccaagaagaatagctgaaacctttggacttcaagaaaattatatcaaaattgtc

SEQ ID NO: 98159 - DNA, 83 bp, Homo sapiens
cccaaccagtcccagcgctgtcgtgctcctctactcgtacggtggggattgcagctgctgagcagggattctggaaagcattg

SEQ ID NO: 98160 - DNA, 112 bp, Homo sapiens
ctgtgcagccgcgaggaggcgcgggaggtgttcgagaacgaccccgagacggctttatcctgtggataaacgcagagtgaacgagtttggggagtcctacgaggagaaggcc

SEQ ID NO: 98161 - DNA, 80 bp, Homo sapiens
tcagcagcccgcgtctgccgcccacgtacatgcacgccatgtggaaagtctacagtttggtaccccaggactcgctggtc

SEQ ID NO: 98162 - DNA, 98 bp, Homo sapiens
ctataaccaagagagcgcacacaccaacaccaggcatctacatgggcagaccaactcagtgtttggagaagagggattgaccctgaatcttgaagacg

SEQ ID NO: 98163 - DNA, 80 bp, Homo sapiens
ctgatagcttatggttctccattgtgatgaaagcacatggtacagttgatattcactgatggactccaaagaatcattaa

SEQ ID NO: 98164 - DNA, 100 bp, Homo sapiens
gaacaaaaaagtggtgcagtttttgatgaaattgtagagaactattgccacggcagtgaagtttctacagaattcccgggtccgccagagcccacttgca

SEQ ID NO: 98165 - DNA, 125 bp, Homo sapiens
tttcaataactcctctcagtgaactggtgggactctgtaaaaacaatgatggcagtggacgtgactctggacccagacacggcctaccccagcctgatcctctctgataatctgcggcaagtgcg

SEQ ID NO: 98166 - DNA, 82 bp, Homo sapiens
cgggcgagaagccctacgagtgcaacatctgcaaggtccgcttcaccagaaataagaatgtctaagcccctggaggccgaga

SEQ ID NO: 98167 - DNA, 90 bp, Homo sapiens
tgcagaccggcctcgcggagcccgcgcgccgagccccacaattcagaaggagctggcggacatcactttagaccctccacctaattgcag

SEQ ID NO: 98168 - DNA, 51 bp, Homo sapiens
gcatctgtcgaccctggacaaagccagtccctgagacgaataggaccttgt

SEQ ID NO: 98169 - DNA, 99 bp, Homo sapiens
cgtgaccttttgggcaaggatcagacacaaaggttagagcctccagctctgagctttccaatccccagagtagcaaatgttgaaagaagttgcacaggt

SEQ ID NO: 98170 - DNA, 100 bp, Homo sapiens
gaagccatgcccctcaggctggaacttgccctgtctcctcgcagatgagatttacactgactgggccaaccactacctagcaaaatcaggccacaagcgg

SEQ ID NO: 98171 - DNA, 74 bp, Homo sapiens
gttcttcgacaacatctcttctgaactcaagaccaggtgctggagaatctggtaaaagcaccattgtgaagcag

SEQ ID NO: 98172 - DNA, 75 bp, Homo sapiens
gatcatgtctgcgagccaggattcccggagacagggcagaaggggcagagaataaaacaagtgacaaagccaaca

SEQ ID NO: 98173 - DNA, 74 bp, Homo sapiens
ataaatacaacttagcagtcacagacaagttgaagatgaccttgcatcaaagctaagccagaagatttatcaca

SEQ ID NO: 98174 - DNA, 101 bp, Homo sapiens
ttgcaggccagcgcaggagaaaacgaaaccttcgtgatgagattgactgtagccgagggttgtatttaaaaggtcacactgggacagcaggaaaacagagc

SEQ ID NO: 98175 - DNA, 99 bp, Homo sapiens
cattgccacggctgaaccctccttctcaatcttggaacagcacccccttctttaagagtccctgtgaagcaggaagagtgagggcaggttcactgcagc

SEQ ID NO: 98176 - DNA, 73 bp, Homo sapiens
gggaacgcggggcctccgtgttctgctgtcttcatcagcgtgggccgcgggcatccgtgtcattctggacctt

SEQ ID NO: 98177 - DNA, 75 bp, Homo sapiens
caagggtgttcccgaactagagtgggatctttcgaagatggtttggctgccttggagatttggagatctgatgcc

SEQ ID NO: 98178 - DNA, 51 bp, Homo sapiens
catccacactgcaatgatataggaatgagaaagctgccgtgtgggagatca

SEQ ID NO: 98179 - DNA, 74 bp, Homo sapiens
cacagaattattccagggtttatgtgtcagggagtggtacgggtatcactttccggagctggtgaagatcatca

SEQ ID NO: 98180 - DNA, 101 bp, Homo sapiens
tgggaatccgtttcattattatggtaacaatatggagtgctgtattcctaaactacgccacaggtcatcatctggatcatcccattctggttcccgttcaa

SEQ ID NO: 98181 - DNA, 75 bp, Homo sapiens
ttctgagcgagccttgaaagagataaaagcggaagtttgccacacgtctaaggttgtgggtgacagagagaacgg

SEQ ID NO: 98182 - DNA, 115 bp, Homo sapiens
ccgagcagcgccagcggccgagcgggcggcttcctggcctgggcgctccggtggcggcggagtgcctccggagccagcgtggtggccatagacaacaagatcgaacaggccatgg

SEQ ID NO: 98183 - DNA, 82 bp, Homo sapiens
ccaatgctgggattggctgcttttccagcccctgtcaaagggaacaggaagcagtccacggagggtgacgccctagacccac

SEQ ID NO: 98184 - DNA, 75 bp, Homo sapiens
ggagctccggcagccgccctgatatgttgatgatgtgatcagccgcattgacaggatgtttcctgaaatgtccat

SEQ ID NO: 98185 - DNA, 88 bp, Homo sapiens
tcgatatttgggcctttggacttgttttgtgggaagtggccaggcggatggtgagcaatgaggatgttaagcaagtttttggacagac

SEQ ID NO: 98186 - DNA, 75 bp, Homo sapiens
gttcctccccgggcccctgagccatgcccatcgcagccgccccgaaggagccagaaatgaagctgttgtcatttc

SEQ ID NO: 98187 - DNA, 97 bp, Homo sapiens
ttcaccacccacaagggtaacttccaggataaaaactggatatgcatctaaaacaagatgtaagtcactgaagatttttagaagaccaaggaaactg

SEQ ID NO: 98188 - DNA, 128 bp, Homo sapiens
cggcggtggcggcggcggcagctgcagtgacatgtccagcatgaatcccgaataaatatggctcaagcctggaagatgacgtggtgggggacacttcagggtactaccagcggatgttggtggttctc

SEQ ID NO: 98189 - DNA, 99 bp, Homo sapiens
gctgggggctggccgcgtcctcagcgcgaccctggagctgggggcatgaatcatacaaaactcaatatagagcaatgtttgtaatgaattgttctatta

SEQ ID NO: 98190 - DNA, 75 bp, Homo sapiens
cagcggcgcccctgaaagtgtgcatcgtgggctcggggaactggcactgaaagaggacatgagcggctacacaat

SEQ ID NO: 98191 - DNA, 83 bp, Homo sapiens
gccattgcagtacattgcaaagcactgttgcaagaattcaattccgtcttcctgatggttcttcctttacaaatcagttccct

SEQ ID NO: 98192 - DNA, 100 bp, Homo sapiens
ggcggcggcggcggctgcggcccaatataggtgcccggagcagtgcccaagctgactcgggttccagtgacgatgaggcagccagtgaggcccgcagcac

SEQ ID NO: 98193 - DNA, 97 bp, Homo sapiens
caaaattccctatttggattgttggcagtgagactcacctcaccgtattttttgccaaggacactgcccatctctaagataagaacctggaaagggg

SEQ ID NO: 98194 - DNA, 98 bp, Homo sapiens
tctctgttcgtcaggaacgtggccgacgacaccaggttcagaaacagcatatttagaaaacagatctaattctagacctttagaaagcaaaagatacg

SEQ ID NO: 98195 - DNA, 87 bp, Homo sapiens
gtacctgaaccggcacctgcacacctggatccaggataacggaggctggatgatctcaatgccacccaccaacactgtgttttggcc

SEQ ID NO: 98196 - DNA, 125 bp, Homo sapiens
acggaccagtttcagttcgccgatgggaaacccggagaccaaatccttgggtgctgataagactgtgaaaggcccagatggactgaccgcctttgaagccactgacaaccaggcaatcaaagctc

SEQ ID NO: 98197 - DNA, 100 bp, Homo sapiens
atacaaatttttggatgatgatggatccatttctcctattgaggagtcaacctatcagttgagggatttgcagttgataaaatggctggagaggttaagg

SEQ ID NO: 98198 - DNA, 100 bp, Homo sapiens
tgtggctgctcagctcgggccacggagaggagcagcccccggagacagcggcacagaggtgcttctgccaggtggtcctggctctgccatatgacacccc

SEQ ID NO: 98199 - DNA, 75 bp, Homo sapiens
gtgggcaaccgggcggccacgttcccgctgcagatctctggaaacatggctacagaacatgttaatggaaatggt

SEQ ID NO: 98200 - DNA, 96 bp, Homo sapiens
aatcataaagaaatccaacttaccttgtcattaagtgggcagaccaacatccacctcagcaaaaacttcttcctgacgaatcgcgccagggagcgc

SEQ ID NO: 98201 - DNA, 75 bp, Homo sapiens
gggctctggcgcctatggctctgtgtgaaatgttttagcaagtgcatcagctgacaacactgtaattctgtggga

SEQ ID NO: 98202 - DNA, 89 bp, Homo sapiens
ccgcttctcccgcttcaacgaagaccgagactttcagcggaaggcagacagattgctgccaacatgaggggtattgggatgatgcccaa

SEQ ID NO: 98203 - DNA, 90 bp, Homo sapiens
cagcttaaagagctccacattcaggggaaccgcctcaccgttctgcccccagaactagggaattattggaatgccgcctctttcccaaac

SEQ ID NO: 98204 - DNA, 90 bp, Homo sapiens
ccagcccagccggggtgcggcccggcgtctcggcccttgcctgcgcgcctaccaggctcgaccccaggagacgcaggtcagaatggaaat

SEQ ID NO: 98205 - DNA, 98 bp, Homo sapiens
gcctatacacagaattacactgaagaagtagagtatttcaaccataaagacatcttaattgggcacgaaagagttgattatggaagattcccacaaga

SEQ ID NO: 98206 - DNA, 95 bp, Homo sapiens
ggcgccctgcaccgcgcctcgcaaaattcaggggtcagtttacttcataaaaaatcattagaaaaggaagaattatgccaaagacttaaagaaca

SEQ ID NO: 98207 - DNA, 108 bp, Homo sapiens
agcccagtcccaacttcgggccccggccccgcgcgccccggcccggccccgcgaggtgagaagccctaccactgcaactgggacggctgcggctggaagtttgcgcgc

SEQ ID NO: 98208 - DNA, 100 bp, Homo sapiens
ttctggcatcagggaggctttcagccggagaagcgagtttcagctggtgtctgacttccagcaactgctggcctgtgccagggtgcaagctgagcactgg

SEQ ID NO: 98209 - DNA, 100 bp, Homo sapiens
accctgacctcagagcagatccagaagctcttagccagcactcgctatccacctccagaggagaaggcagagcccccccaggctatgaatgccctgatgc

SEQ ID NO: 98210 - DNA, 100 bp, Homo sapiens
tgtgatcaactactataccggatggatgcagacagtggccaagaacaaggaccagggcacctatgaggattatgtcgaaggacttcgggtgtttgacaag

SEQ ID NO: 98211 - DNA, 95 bp, Homo sapiens
aggcacgagatgccgcctcacatctacgccatcgcagacacggcctaccggagcatgcttcaagtttaattggttggggtcagataagaagagga

SEQ ID NO: 98212 - DNA, 50 bp, Homo sapiens
agttcaagaagaacactccagaggtccagagggggcaaacctctttattt

SEQ ID NO: 98213 - DNA, 91 bp, Homo sapiens
cgggatagacggggacaatgaggaggagacggagcacgccaaaggttggttgaatctggcgatgtggaacccatggatatggagggctgac

SEQ ID NO: 98214 - DNA, 86 bp, Homo sapiens
caacttattagataatgtggtgaattgcttataccatggagaaggagcccaggaggcctcatgggacctgtcaggatgatttcatc

SEQ ID NO: 98215 - DNA, 75 bp, Homo sapiens
tttctcaaaccaaggctgcttattcagaggatatgaagcacaagaccactcttctggagcttcagaaaatgttta

SEQ ID NO: 98216 - DNA, 51 bp, Homo sapiens
gcaatatctctgggctttcacagtttcaggtttagctgtgcctcccagtga

SEQ ID NO: 98217 - DNA, 51 bp, Homo sapiens
cgagcttttcctccaggcctttgagaaggagatttcaagtgatgaagagga

SEQ ID NO: 98218 - DNA, 100 bp, Homo sapiens
tgcagcggagatccgagagcagggggatggggcagaggacgaggagtggaagccccatgtgccactcccctgatctgcagcttcggtaggccggtggacc

SEQ ID NO: 98219 - DNA, 101 bp, Homo sapiens
ctccatccccgaccgccctcttctgtcttggtagctacagcaagctgggtagcaggcagatccaaaggatatcatgaagtttccagggcctttggaaaacc

SEQ ID NO: 98220 - DNA, 100 bp, Homo sapiens
ggcgtgcgcggacggtgtgcgggtcctaaactgactctggggactaaagaaaaaaagtataacttatcatggaagttgcttaagtgcaaaattaatcagg

SEQ ID NO: 98221 - DNA, 100 bp, Homo sapiens
gtcgctggagcacaaaagagtctccgcggtggaggtctgcgttgctcttgcttttcctcgctggggtgtacgatatccaggaatgattttcagagtattt

SEQ ID NO: 98222 - DNA, 51 bp, Homo sapiens
ttaatcattgagctctatgataggaggaatgtcgggtcctcacaattcaaa

SEQ ID NO: 98223 - DNA, 99 bp, Homo sapiens
tgcgctccagtcggcccaggcgccgcggcgaggagcgagcgctgcgaggtggcggcctgaggaacttgcttgctagaaaacaaagtgcaaggcttgaca

SEQ ID NO: 98224 - DNA, 75 bp, Homo sapiens
tcagggaagcagatattgatggtgatggtcaagtaaactatgaaggtatcgagaaccttccctgcgaacttcaga

SEQ ID NO: 98225 - DNA, 148 bp, Homo sapiens
tactttgtggctgcctttgttgctgctgcacattaggttgcagtatgtggccagttatttgcctcagtaaaagatctgtgatcaaaacagggcgactgctaatcagtcacgaggctcccttgacaggcggctttgcatcggaaatcag

SEQ ID NO: 98226 - DNA, 50 bp, Homo sapiens
tgactttcagctatggaatcgtttctccacagacactacccaaagcagtc

SEQ ID NO: 98227 - DNA, 116 bp, Homo sapiens
ccggtgtacacagccggtccaaggcggtgcgctgggggccggggcgcgtcgcagctttcaccttcttcgatcccaatgacccggcgtgccaggagatcctgtttgaccctcagacc

SEQ ID NO: 98228 - DNA, 50 bp, Homo sapiens
aagcatgctttctgatcatttgagaaagatcagtctaaagaaaaggagaa

SEQ ID NO: 98229 - DNA, 83 bp, Homo sapiens
acagcccgagtgcaaaaagcgcctcaatgaccggattgagatgtggagttacgcagcaaagcacatgcagatgacaatccagg

SEQ ID NO: 98230 - DNA, 100 bp, Homo sapiens
ggaggaaccctcgcaagggcagaaggttgaagaacaggaggtctcccatgtccgtatgcaggggatcctcttactggtctttgccaagtatcagcatttg

SEQ ID NO: 98231 - DNA, 50 bp, Homo sapiens
ggcgttgctggtgcgagtccttgagaataaaggcagccccgttgatgact

SEQ ID NO: 98232 - DNA, 100 bp, Homo sapiens
gaaagggagagagaaagggaaatgaggaggagtagtggtttgcgagcaggttctcggagggaccgggataggccgttaattaaggaaaagttgagccagg

SEQ ID NO: 98233 - DNA, 75 bp, Homo sapiens
ccaccgccctggccatctaccatgtggacctcagcagccatgtcgaagccccatagtgaagccgggactgccttc

SEQ ID NO: 98234 - DNA, 88 bp, Homo sapiens
acggcgtcgggagagcgcgcctagccggctcgcgatgtatgtggtagaagaccaaagaagagatgagctaggaccatccacctgcctc

SEQ ID NO: 98235 - DNA, 50 bp, Homo sapiens
ggagtctcagagctgtcagaaagtgtttctgaaagatctatccagcactc

SEQ ID NO: 98236 - DNA, 50 bp, Homo sapiens
ctgggagccacattcctcattgccgggccttcggaagcatgttgtgtgag

SEQ ID NO: 98237 - DNA, 100 bp, Homo sapiens
tatagggattttatatgctgtgttttacaggcgtttatcagaggaaatgacacaaagaagatgggagaatatgccagtttcccagtcattacaaacaaat

SEQ ID NO: 98238 - DNA, 100 bp, Homo sapiens
ggagcccggagggaaccggcgacgaggggaccatgtaccgggacccggaggcggccagcccaggccaccagcccctcgggttccaagatgcagctactgg

SEQ ID NO: 98239 - DNA, 100 bp, Homo sapiens
tgggaaggtggatcccgccgggaggtactttgctggtgtgtagctgggacggtgctggtctgagctggaccttgtctgatggcttcctccaaccctcctc

SEQ ID NO: 98240 - DNA, 100 bp, Homo sapiens
ccctgctgtggggctgtgcgctggccgcggccgcggcggcgcagggcaaggaagacctgttcacaagtgcccacaagaactgccccatgccccagggtgc

SEQ ID NO: 98241 - DNA, 80 bp, Homo sapiens
cccggctcgcggggcccggcgaagggcaggtccggcctctttggcctacccccgttggctccgctgccccaggtcgatga

SEQ ID NO: 98242 - DNA, 90 bp, Homo sapiens
ggatgacagatgtgtggtgcacccagaggccggggaccttgccaaccctcccaagaagttcagaggcaccatactggacataccttttat

SEQ ID NO: 98243 - DNA, 51 bp, Homo sapiens
acttgcctggaccagcttaatggttctgccattttgtacatctctgcctgt

SEQ ID NO: 98244 - DNA, 75 bp, Homo sapiens
cccctgcgttgtaccatccgcctgtgggacacctaccaggtaactgtgacatttgatgatgtggccttatatttt

SEQ ID NO: 98245 - DNA, 75 bp, Homo sapiens
ccgcggcggggggaaaatggagcccttcaccaatgatttggagcaagaggtggtggtggccttcccccgaagaaa

SEQ ID NO: 98246 - DNA, 74 bp, Homo sapiens
cctgcaccggcaggtgagaggcggatctacagacataggccactcttcacctccaccatgagcctggacatcca

SEQ ID NO: 98247 - DNA, 50 bp, Homo sapiens
cagacaaccttcttttggacagcaagaacactatgtggctgccgtgtaag

SEQ ID NO: 98248 - DNA, 100 bp, Homo sapiens
aacttggcagaaggtgatacaggtggttcagtcagaaattgcttcccaagaagaaggtgctactatacagtggatgtcatctgtagaagcaaagattgaa

SEQ ID NO: 98249 - DNA, 100 bp, Homo sapiens
gtttgaagacttgctagttaggattttattactggcagcatgtatatcttttgttatccagactactactcagattgccagctttaagactgatgaatgc

SEQ ID NO: 98250 - DNA, 100 bp, Homo sapiens
ggccggaggagccatggactgcagcctcgtgcggacgctcgtgcacagatacggagttttgaaaaataaatggtcaatactctacctcttgctgagcctc

SEQ ID NO: 98251 - DNA, 90 bp, Homo sapiens
gtttctagaagacatggaagcatatgctgaggggtgaccacggactcagtgagtatgagaacccagatgggaggggtgggcaggcgaggg

SEQ ID NO: 98252 - DNA, 106 bp, Homo sapiens
cgcaacccgataccatcggacaggatttctccgcctcagcccaacggggaggtgattgaattactcagatatgaagatcatcatctaggttttgtgtaaaaggccc

SEQ ID NO: 98253 - DNA, 100 bp, Homo sapiens
tgcaacctcaaactcctgggctcgagcgatcctcccacctcagtctcctgagtagctatgactacggatggcccactgcgtgaccttggttcagctgtcc

SEQ ID NO: 98254 - DNA, 100 bp, Homo sapiens
gagccgcccgggagcagggagggctccgctagcccggggggccctccccgcggggcagatggacaggcgacactaacaggtgaagatctcgggagaccat

SEQ ID NO: 98255 - DNA, 50 bp, Homo sapiens
gcctgaagggaccccgtttgaggatgctgctcaagatgaggaggtgcgcg

SEQ ID NO: 98256 - DNA, 83 bp, Homo sapiens
atggaggcggcggcggcggactggcgggtccatgactccagctcaggctgacttggagtttcttgagaatgccaaaaagttgt

SEQ ID NO: 98257 - DNA, 90 bp, Homo sapiens
ggccagtcagcgtcagagactgaggaggacacagtgtccgtatctaaaaaggaggtttcaccagaagtggttagatcaaaattgtccccg

SEQ ID NO: 98258 - DNA, 97 bp, Homo sapiens
tcattgccaatgggatcaccaaagcctgccgggagctagaactcaaggtgcccctggtggtccggcttgaaggtgtcatggagaaactccagctggg

SEQ ID NO: 98259 - DNA, 100 bp, Homo sapiens
ctgatcagaactatcagaactacatcttaagggttgaaaacaatcctcgaacaggaaatcttggtgcactaattaaggtcttcctttctagaaccaaaga

SEQ ID NO: 98260 - DNA, 100 bp, Homo sapiens
tggagaccttgacacttatatcctccctgggcactcaaggagttgcccctggtcctgtaattggacttcaggcaccatctactggtcttcttggcgcccg

SEQ ID NO: 98261 - DNA, 83 bp, Homo sapiens
cccggtgaaagccattcagagtccagccaggaggccgactttcctcctctgagaaacttgcccaggccaaagaagagaacgtg

SEQ ID NO: 98262 - DNA, 100 bp, Homo sapiens
ctgaggttgcagttggcgtgaagggtgtggggctggcctcgctcgtggcacctctgctgatctcacaggccatgggactggccctctatgtcctgccagt

SEQ ID NO: 98263 - DNA, 97 bp, Homo sapiens
gtcacaggttctgtgaaaagtgaaaggatgtaataatgaaacttcctggactattttggccaacaatgtctcaaacatcatcacggagatccactcc

SEQ ID NO: 98264 - DNA, 73 bp, Homo sapiens
gagaagtggagaagaaatcagtcagccgcagggttcagaaagacaggcaaaaactggagctactggacagcgc

SEQ ID NO: 98265 - DNA, 48 bp, Homo sapiens
ccgagaaccgtcagtttgagccagatgattctgttcattggagattca

SEQ ID NO: 98266 - DNA, 100 bp, Homo sapiens
tctgggggttcgcgcccgccgacccgcgccctgctccctctcagcacctgggcggacggaataagacgagttggaagaagacctgatcaacaacttcagg

SEQ ID NO: 98267 - DNA, 82 bp, Homo sapiens
catgacagaaatcacctatgtttacagcgacaggaaaatgtttataggaggccttagctgggacactacaaagaaagatctg

SEQ ID NO: 98268 - DNA, 83 bp, Homo sapiens
caggcggtgacagagtggagccatggctagaggatgatcggctgaatgtaacagaggaactaacgtccaacgacaagacgagg

SEQ ID NO: 98269 - DNA, 75 bp, Homo sapiens
ccaacgcagtggccgaggaagctgcctgcccggtgtctgcccctgaggaggtgtggaaacaggaagagaactaga

SEQ ID NO: 98270 - DNA, 100 bp, Homo sapiens
ccagtttgggcaggcagcaggggtcctcattcacaggaatccctttgcccacgtccagctgaagccgacagtgaccaacgacaggtctgcccccctcctc

SEQ ID NO: 98271 - DNA, 99 bp, Homo sapiens
agccaccatgaagacattctgtggcactccagaatatctggcaccagagatctgaaatagctcaactcagtcaagaaaaaaggtatacatatgataaat

SEQ ID NO: 98272 - DNA, 97 bp, Homo sapiens
gttctgtatccagagggcattcagactaaaatctacaaccttctcattcagacacacgctagtgagacctgcaacgacttccacccgatgttcttca

SEQ ID NO: 98273 - DNA, 98 bp, Homo sapiens
gatgaattccagcttcacactaatgtgtattatctaagtaccgcagtggaaaactgcccaaggcatttaagatcatccctgcactctccaactgggag

SEQ ID NO: 98274 - DNA, 83 bp, Homo sapiens
gttggaagcagccgatccagcctgcggagcctgtggggcaggtctgcctcagccacctccctgacgctgtcccactgtgtgga

SEQ ID NO: 98275 - DNA, 51 bp, Homo sapiens
cgtggagtgacggtcatgctgcggcgtggacacttgacattcagggacgtg

SEQ ID NO: 98276 - DNA, 74 bp, Homo sapiens
atcccccaggcttccccgcagcagaagatgggtgtgaacctgacacgcagcaacaaggagacggtgaagcacag

SEQ ID NO: 98277 - DNA, 83 bp, Homo sapiens
aaaatgccaacgccgtgtctgaagtgtggcaaaggagcagagaactttgacaagttcttcacacgaggacagcccgtcttaac

SEQ ID NO: 98278 - DNA, 76 bp, Homo sapiens
ctcaagcagaacactgctgggagtcctaaaacctgcgacaggaaggaataatgcaagatatctttggaaaagaata

SEQ ID NO: 98279 - DNA, 82 bp, Homo sapiens
cagttcctgcagcttccttgaggtgccctacgagacgctgaacaaacgctttcgcgccgctcagaagaacattgaccgggag

SEQ ID NO: 98280 - DNA, 73 bp, Homo sapiens
aggtgtatcaagtaatggtgcaaagcctgaaaatacgagctctgagaccaccatggaggaggagctggggctg

SEQ ID NO: 98281 - DNA, 98 bp, Homo sapiens
tctttgccagagaaattcacataatttgaaccagcagcaacgtgagaatcaggaaacccaggcccaacggcaggtggatgcaagaagaaatgttcccc

SEQ ID NO: 98282 - DNA, 99 bp, Homo sapiens
gtggattctgcttcccctgggacagcactgagcgagtgtggagagaggtacagccctcggcctacaagctctttagggaaaaccaagacccagacctgg

SEQ ID NO: 98283 - DNA, 98 bp, Homo sapiens
ggctccctcctgctgtcaggctacatcagcaaagggaggcatgccaggtggaagtgaggctgctgctggcctacaactccagtgctcgcattccaaaa

SEQ ID NO: 98284 - DNA, 90 bp, Homo sapiens
agtcaacataaacaagacaagaatagccagcagccctgttctaggtgctcagatggagttataaaacttattcgttccactaacattttt

SEQ ID NO: 98285 - DNA, 83 bp, Homo sapiens
ggaggagctgtgcagccgcgaggaggcgcgggaggtgttcgagaacgaccccgagacggtactggctgtgatcgaacttctca

SEQ ID NO: 98286 - DNA, 101 bp, Homo sapiens
aacagcatatttggcaacatctcggtgtccttatctgcagcttgaagaggacagaaccaagttgtattgttagacacactggaacaagagatttcaaaatt

SEQ ID NO: 98287 - DNA, 101 bp, Homo sapiens
tgaccttttgggcaaggatcagacacaaaggttagagataagctgtcattggaaggaatagtggtacaaagagctgaatgccgaccagctgccagtgaaaa

SEQ ID NO: 98288 - DNA, 95 bp, Homo sapiens
aaggaggcagaggcacttatgcttgtcagaacccttaggagaaatcttgagagtggacagcaattgtgaagatcgccagagagttctgtgtttca

SEQ ID NO: 98289 - DNA, 50 bp, Homo sapiens
atttcccaatattggatcctgggtctatgttaacaatgaatgggcaacca

SEQ ID NO: 98290 - DNA, 96 bp, Homo sapiens
cccgcttcgatcgcctcgcgccggctgctctttccggcaattctgtggtgttcttggtcacacatttatggagtttctgaagggcagtggagatta

SEQ ID NO: 98291 - DNA, 88 bp, Homo sapiens
cctcccggcgctcttcctcccggagtatgtgtaaacaggaacatcgataagtagtgtaaaaacttgcacaatgaaatccgaagccaag

SEQ ID NO: 98292 - DNA, 100 bp, Homo sapiens
gagtgcggccaccaagacttcaccacagtagctgcaatcaacccaaatcaccctcttgctcagatgcctttgcctccgtcgatgaaaaactgcatccagc

SEQ ID NO: 98293 - DNA, 100 bp, Homo sapiens
ccaggacatgtgtgcaaccattggcgtggatccgctggcctggcagagcggcttgggtaaatccaccttaatcaacaccctcttcaaatccaaaatcagc

SEQ ID NO: 98294 - DNA, 92 bp, Homo sapiens
tacaaattgctgcttgtccaaatcaggatccactgcaaggaacaacaggcatagaatgtcaagctaaccaggcgtccgctacttcagaagag

SEQ ID NO: 98295 - DNA, 83 bp, Homo sapiens
ccccccgggacccccacgccgccgccagaataccctctaccatctgctttggtcagggtgccgctcgaggatttaaaagcaac

SEQ ID NO: 98296 - DNA, 87 bp, Homo sapiens
ggacccagctgagcgggcggtcattcgcatcgcaggtacaccaggggttggaaaaaccacactaggcaaagaacttgcgtcaaaatc

SEQ ID NO: 98297 - DNA, 82 bp, Homo sapiens
aagctatccaaatgcgattagttgatgtggcctgcaagagctggactggccattatggaggaggagctgcagcattcccatt

SEQ ID NO: 98298 - DNA, 95 bp, Homo sapiens
acactaccagctatccttaatactttgttgacactgcaagagagtgcatcggatggcttctggaaatctgtggccactcgagtgcccaaggagcc

SEQ ID NO: 98299 - DNA, 75 bp, Homo sapiens
cccgcctggctgcgagatattaagactttgaccccgacgcaggcttcagtgattgccgcggatcagaagcctgag

SEQ ID NO: 98300 - DNA, 75 bp, Homo sapiens
gtgttggcggatggaagggaggagactcctgaccctcagaatggtggctttggctgaagcctaattccacagctc

SEQ ID NO: 98301 - DNA, 100 bp, Homo sapiens
ggaggatgagattcttccaaggaaagactatgagagaccatggcgagcccagggaaagacaattatcgaatgaagagctataagaacaatgctctaaacc

SEQ ID NO: 98302 - DNA, 100 bp, Homo sapiens
cctggtcgacttcgccggagactgccagttcttcaccaaaggacatggatgaaaatgaaagcaaccagtctctgatgacaagcagccaatatcctaaaga

SEQ ID NO: 98303 - DNA, 96 bp, Homo sapiens
cgaggctcggcacggagatggcggcgcgctcggcgcagcaagagtgagccatggagctacgtgtggggaacaagtaccgcctgggacggaagatcg

SEQ ID NO: 98304 - DNA, 75 bp, Homo sapiens
gaggattcctctaaacaggcacagccaccctctggttacagaatgtctgaaggggacagtgtgggagaatccgtc

SEQ ID NO: 98305 - DNA, 98 bp, Homo sapiens
tgagcggaagcttcgaggcatgatggtcgactacaagaagagggcggagcggagacgggagtattatgaaaagatcgcgttcgtggcattcagggatg

SEQ ID NO: 98306 - DNA, 90 bp, Homo sapiens
gccaggctgtgtgagcaggagcccgctgctcttccccactcaggttagagcctccacctggaaaacgtgaatgccgagttgggcagtatg

SEQ ID NO: 98307 - DNA, 90 bp, Homo sapiens
ctcaactccaaccacgacggggccgacgagacctcagtgaagatagtgatccggggagacaggaacacgggcaagacagcgctgtggcac

SEQ ID NO: 98308 - DNA, 82 bp, Homo sapiens
cccatcttatatagcaaaagatttgatgaaagtacttcagggagtcaacggtgaggtttgcagtatcttcagagtctgaatt

SEQ ID NO: 98309 - DNA, 100 bp, Homo sapiens
agtggatcacacgcgccggctgctgctactactaccactttgggctgatggcaactggctatttttatgattcccacaaatccaccaccaacattcagaa

SEQ ID NO: 98310 - DNA, 75 bp, Homo sapiens
cccagctcaagaacggcagccttgactccccagggaagcagggaaagaaatggagctggtatttggactatttat

SEQ ID NO: 98311 - DNA, 83 bp, Homo sapiens
cgtaagaagaggtcccaatcccccactctttccgccctaatggaggtctccagtttcggttcaaggtgtttgcagactatgaa

SEQ ID NO: 98312 - DNA, 87 bp, Homo sapiens
tcccagaagttgttctaacgctgcctttgctttaaaacagtattacttgcggcagcctgcttctgcaaagtggtacgatcgaaggga

SEQ ID NO: 98313 - DNA, 100 bp, Homo sapiens
cacctgagtcccggggtaggggtctcccgcgagggaggagctttatctttatatactgcccttaccacacagcagaaactggcaggtgtcactgcactca

SEQ ID NO: 98314 - DNA, 75 bp, Homo sapiens
aaaacaaaattctgaactcaggacttggcaaggactgttgacatttagggatgtggccatagaattctctctgga

SEQ ID NO: 98315 - DNA, 100 bp, Homo sapiens
ccgcccactcttcaaggatttctggcagcaattccttgacagtttaaaagccttggcagtcaaggtttgatattaaactgctctcagaattttcctcttg

SEQ ID NO: 98316 - DNA, 75 bp, Homo sapiens
ggagtatctggcctccatcttcggcaccgagaaagacaaattgagtttgtgacgggcaccaaaaaaggcaccacg

SEQ ID NO: 98317 - DNA, 90 bp, Homo sapiens
ccctgggcggccgtggacaacatgatggtcagaaaaggggacacggcggtgcttaggtattattctcactaaggttggttactatactat

SEQ ID NO: 98318 - DNA, 50 bp, Homo sapiens
cagcacttcatccagcagtgcacaggctgaccccgcactacatctaccca

SEQ ID NO: 98319 - DNA, 100 bp, Homo sapiens
gacaacaaccgcatcatcgaacgggctactacaaagttctgggaaagggaaagctcccaaagcagcctgtcatcgtgaaggccaaattcttcagcagaag

SEQ ID NO: 98320 - DNA, 99 bp, Homo sapiens
aacagaaaaagaggatacctctgcgatcccgggtcatctccagatgctagggttatgggtgctcctgacctctgataaagctgcagccaatttctcaga

SEQ ID NO: 98321 - DNA, 98 bp, Homo sapiens
ggcggcgaaggtcagcgccgacggcagccggcacctgacggcgtgaccgacccgagccggtgttggtaaatcatgcttattgctacagtttacagaca

SEQ ID NO: 98322 - DNA, 78 bp, Homo sapiens
cttggagtccggacatctgaaacttggtgtgatgaatgcagactctgctaccattttggctgtttggatcctcctttg

SEQ ID NO: 98323 - DNA, 100 bp, Homo sapiens
ggacttggagcgggtcaccgactatgcagaggagaaggagatccagagttccaatctggagacgggatcaaggtggtcggacattgtgtggtgtaatgag

SEQ ID NO: 98324 - DNA, 101 bp, Homo sapiens
ggaggattgatatgacagaaaggagccaaggatgactcaagtttttggccagatgacctgaaaaaaatgtctggatttctagagggcttgagatgctcaga

SEQ ID NO: 98325 - DNA, 101 bp, Homo sapiens
cctggcccacgccgctccgaggcctcgcgaccgccgagcctgcagcctgccccgcggccaacatgagcttcttgttgttgcactgctgtgatccatcctca

SEQ ID NO: 98326 - DNA, 96 bp, Homo sapiens
gattatgcagtgtatctactaacagtgttataccatgagtcttgggtaaatgcgaatgtaaggaacagacattaggaaatgccaaggcattctgtg

SEQ ID NO: 98327 - DNA, 51 bp, Homo sapiens
tgaaaccatccgaaactatgctcagcttgcattggacacacactactggac

SEQ ID NO: 98328 - DNA, 101 bp, Homo sapiens
tcatggcgtatttcgtcgagaatttttgggtcagcagccttgttttacatattgaagaagcccataaactcccagtaaaacattttactaatccatattgt

SEQ ID NO: 98329 - DNA, 101 bp, Homo sapiens
tgggtgctattgtgaggcggttgtagaagtttgaacgccatgaccctgtggatgggagaattactgagaggcagtttggtggcatgctacttgcctacagt

SEQ ID NO: 98330 - DNA, 75 bp, Homo sapiens
cggcagccgacggcaaaggtgtcgtggtggtcattaagcggagatccgggctgggacctgacggtgaagatgctg

SEQ ID NO: 98331 - DNA, 50 bp, Homo sapiens
ccattggggtgacagcggccatgagggacctgatgcccagaaccctggac

SEQ ID NO: 98332 - DNA, 74 bp, Homo sapiens
gcggcgatatggaagaggagggcaagaagggcaagaaggattcaggagcagttccagaaaaatcccgacagtta

SEQ ID NO: 98333 - DNA, 75 bp, Homo sapiens
ggaacactgaatcaacatgggcaatgagaacagcacctcggacaaccaggaggaggaagccaagaatctggtgag

SEQ ID NO: 98334 - DNA, 129 bp, Homo sapiens
gtaaagtgaatgactttttccagcaaacagaagatctctacaatgaaatgaagtggcagaagaaaatcaggactaatggcagcattagccgctgttgggcctcctaatcctcgggcagatccagagtgc

SEQ ID NO: 98335 - DNA, 100 bp, Homo sapiens
tgaacaagacaacttatttgatggctgtgggacagatgatgtctaccatgttctacccactggtcacctttgtcctcctcctcatctgcattgcctactg

SEQ ID NO: 98336 - DNA, 100 bp, Homo sapiens
ctccagtgtaatgattattgacaacagcgccgacaccatgtggatccaggttcggaccatggacgggaggcagacccacacggtggactcgctgtccagg

SEQ ID NO: 98337 - DNA, 75 bp, Homo sapiens
gaatgaagcaaagtcattctttgagaaaagggagttaagccccaagccaaggcagccaaagctcctcctaagaag

SEQ ID NO: 98338 - DNA, 75 bp, Homo sapiens
tcccgagtagctggtattacagccacggaagagctgaaggaattctttgccaaggcacgggctggctctgtgcgg

SEQ ID NO: 98339 - DNA, 101 bp, Homo sapiens
tggaaatcgtctcgaaactgctctcagagtgatgagccctcctcttcagctaggaaaatgacggtgttcagaaagttaaaacttcttcgctggaaggattt

SEQ ID NO: 98340 - DNA, 75 bp, Homo sapiens
ggaccccctagaagtctagaaatgattctggaaaccaaaatggaggaaatgatgataagactaagaatgctgaga

SEQ ID NO: 98341 - DNA, 75 bp, Homo sapiens
aaccagttagtggtgctcaacgtgtacgacatgaatctggaggtgaactggatattgtagtgacctcaaataaag

SEQ ID NO: 98342 - DNA, 78 bp, Homo sapiens
tctggaaccaaatgccttactgctcacttatctaaagaatatgaggaggctaatttcagagctatatgtgcgagataa

SEQ ID NO: 98343 - DNA, 83 bp, Homo sapiens
gaaagaagttatgcttgttggaattggtgacaaaatcagaggcatactttatagccatcactggtgcaagctatatttaacgg

SEQ ID NO: 98344 - DNA, 50 bp, Homo sapiens
gccaaggcgggcggatcacgaggtcagggccaaaactggaaccaaggatt

SEQ ID NO: 98345 - DNA, 101 bp, Homo sapiens
ccctcgtcatactcggtgttgggagaaaactggttgtcctggatgtttgaaaagttggtcgttgtcatggtgtgttacttcatcctatctatcattaactc

SEQ ID NO: 98346 - DNA, 98 bp, Homo sapiens
ccaaggccaacagagagaagatgactcaggatgactgggccacttggacctccttcctctcgggggtgaacatccagattgtgggggatgacttgaca

SEQ ID NO: 98347 - DNA, 101 bp, Homo sapiens
atggacgtgacagaggaatctttggtatagagaaaccgaaacttcattgccccttcaatgtgggaatccagccagaccctattcttggacagcatcagtga

SEQ ID NO: 98348 - DNA, 97 bp, Homo sapiens
ccccgccgagccgccaccgcaggtcgaggacggtcggactcccgcggcgggaggagcctgttcccctgaggaagagcgtgttgtgaatcacatggca

SEQ ID NO: 98349 - DNA, 76 bp, Homo sapiens
gcatatgtatgtgtttggagacttcaaagatgtattgtgtgtcaaggatgccacaatgccatcgacccagaagtgc

SEQ ID NO: 98350 - DNA, 82 bp, Homo sapiens
gccgaacttcagggtttccaccgttcgttcaagttttccaagagataacttcaccaagatgtccagtgataggcaaaggtcc

SEQ ID NO: 98351 - DNA, 115 bp, Homo sapiens
ggagcccacctttcttcttttttgctattagatgggcttgctgctcccgcccatctaattggctttggtctaggtgagaagccctaccactgcaactgggacggctgcggctgga

SEQ ID NO: 98352 - DNA, 100 bp, Homo sapiens
gttatttgatgcagcatttgttcactgtaaacttcataatgggataaacagagacagcagcatgactggaatacaaacagaagcttgcacgagtaaccca

SEQ ID NO: 98353 - DNA, 109 bp, Homo sapiens
acgagacttttctcagatgttggatatttgcttggaaaaacgtgtgggtacgaccttggtcagcccaaggccaaccccactgtcactctgttcccgccctcctctgagg

SEQ ID NO: 98354 - DNA, 100 bp, Homo sapiens
cgaagagaacaagaaggagcctctctgcaggcagaaaggtggagagattcaaccagttagcgtgaaagttggagataaagttcttctcccagaatatgga

SEQ ID NO: 98355 - DNA, 102 bp, Homo sapiens
cccagaccctggagcctcagttggaagcagccgatccagcctgcggagcctgtggggcagaggaacttcctgaagtgctccgaagacaacccgctctttgcc

SEQ ID NO: 98356 - DNA, 100 bp, Homo sapiens
atcccaaattagtgacatgtcaacactgctgagagaaatcaatgacgtgtttgaaggaagacgagcctgtgcctactacactggcacaagtggatagaga

SEQ ID NO: 98357 - DNA, 98 bp, Homo sapiens
cagagcagagaaagtgaaactgatcagacgaactacgaacccctggacgggagagtctgccggcggagaatataagagaattttctctacatgtgcac

SEQ ID NO: 98358 - DNA, 50 bp, Homo sapiens
ctgagccttgagctcccagtcgcagttaacaagcacaagccctggctgga

SEQ ID NO: 98359 - DNA, 90 bp, Homo sapiens
atttggagaaagagctttcaaagcatggagtccacaaattggccttcaacaaattgaatcgtcaatgaggatttccccacagaccggtag

SEQ ID NO: 98360 - DNA, 98 bp, Homo sapiens
cagcatagagccaatcacattttgcacaagggcagtcaccatgaaaggctgctgatactttggctgtgaggcaaaaaaggagaatttatgatatcacc

SEQ ID NO: 98361 - DNA, 50 bp, Homo sapiens
ctcttctctggaagatcttgtgattgcgcagtctctttgtggagaggact

SEQ ID NO: 98362 - DNA, 80 bp, Homo sapiens
acattcaggatcaacttgaacgaatatttctgtggtgttcgtccatttggagtttctttacttatttgtggttggaatga

SEQ ID NO: 98363 - DNA, 75 bp, Homo sapiens
gaggcgccctagacatcttctccctcccttgcctcagcgagtaaccagctcataaatcacatcgaacagtttttg

SEQ ID NO: 98364 - DNA, 82 bp, Homo sapiens
cgggatttgggtcgcagttcttgtttgtggatcgctgtgatcgtcacttgggaaaggcgtaggaggaggagcaggagttctt

SEQ ID NO: 98365 - DNA, 98 bp, Homo sapiens
catggcttcagtacttcagcattccacgatatggatttacggtgcgcctagtagatgggaaaggcgtccctataccaaataaagtcatattcatcaga

SEQ ID NO: 98366 - DNA, 100 bp, Homo sapiens
gcccgggaaggcctgagaagctttcggaagcaaggtggtttgctcgtgattgcatttgattgcaaggagacagggaatgttttaaaggaagttgggctac

SEQ ID NO: 98367 - DNA, 100 bp, Homo sapiens
cttcaagatcctgggtagaggctcacggtcttttcaaccatctttggcgaggccttgcttccttccactcgagaactcgaatcatttatgacagaaagtt

SEQ ID NO: 98368 - DNA, 100 bp, Homo sapiens
atcgattacacagttctggatgatgtgggccatggtgtcaagggtaaacttcatgatccagaaggcatgggaattattccaagaatagtgcaagatattt

SEQ ID NO: 98369 - DNA, 82 bp, Homo sapiens
taaatgtgttgtttgtggaactccattgtttaagattgtcagtggcttcgccccgaggagagctgactgccctgggctgctg

SEQ ID NO: 98370 - DNA, 74 bp, Homo sapiens
ggttcccaaacactaacttgtttccctgggaatttggaggtgggttcgaaaaacagtctctggtcccagcccac

SEQ ID NO: 98371 - DNA, 87 bp, Homo sapiens
aagcggaagctgcccttcaccgcgggcgccaatggggagcagaaggactcggacacaggtgaccccagggtttgaagaaaaggaggg

SEQ ID NO: 98372 - DNA, 100 bp, Homo sapiens
gcggatcgccgcgctcagcgacaaacaaggccatgaagcccccaggaggagaatcgagcaatctttttggaagtccagaagaagctactccttccagcag

SEQ ID NO: 98373 - DNA, 90 bp, Homo sapiens
gaggaggaagacgaatcgttaaacatcttaggtcagagctgaagaagcaggtggagagtgccgagctgaagaaccagcggctcaaggagg

SEQ ID NO: 98374 - DNA, 152 bp, Homo sapiens
aagcccatggtgctgggacatgaagcttcgggaacagtcgaaaaagtgggatcatcggtaaagcacctaaaaccaggtactccaaagattcaggtttactcacgtcatccagcagagaatggaaagtcaaatttcctgaattgctatgtgtc

SEQ ID NO: 98375 - DNA, 82 bp, Homo sapiens
atcgagaaatggccgcgtcggcagtatcctagaaggaaaacatcaccatggctacagaaattggttctcctcctcgtttttt

SEQ ID NO: 98376 - DNA, 82 bp, Homo sapiens
tgccctggagcagttcgtgaacagtgtccgacagctctcagctcaagatacttggtgcttgaaaaactgaagaaggaagacg

SEQ ID NO: 98377 - DNA, 100 bp, Homo sapiens
tggacgctccgcagcccgcccgccagccggcccgccggccgccgcaggattatatctgtccaagatgcgagtctggttttatcgaggagcttccggaaga

SEQ ID NO: 98378 - DNA, 50 bp, Homo sapiens
gacaccggcgaggaacttggcagattgcagagggaatggcatacatcgag

SEQ ID NO: 98379 - DNA, 87 bp, Homo sapiens
agatgttgttgatgaagtaatacagaactgccccatcgatgtgcggcgtccgctgtataagtgttttagagcactttgctgcaaggg

SEQ ID NO: 98380 - DNA, 82 bp, Homo sapiens
cgacttcttgtatgcatactccacagcacctggacgttctcctgctctattacgctccgtggtgcggcttctgtccatccct

SEQ ID NO: 98381 - DNA, 90 bp, Homo sapiens
aagattttacttctgcttcgagcgtatgagcagaacaagctcagcctcatcaacttcaggtccacacacaggcacagccaagcgtccagc

SEQ ID NO: 98382 - DNA, 100 bp, Homo sapiens
gggaaaatggcggacgggaaggcgggagacgagaagcctgaaaagtcgcagcgagctggagccgccggaggtgtgaccatgaagctcatggatgaggtcg

SEQ ID NO: 98383 - DNA, 50 bp, Homo sapiens
gtgaggaggctctagtaactgtccagatgttcctcctgctgatcaagaga

SEQ ID NO: 98384 - DNA, 95 bp, Homo sapiens
ctgtcagaaagagctgaacactctgtgcagcgagttacatgttgagccatttcaggatgatccgttggtgctgaatgagatcagagaagaccttc

SEQ ID NO: 98385 - DNA, 99 bp, Homo sapiens
cgatctccccagcagcagcaacagcagcgtcctccccaccccacctgccaccgaggccccctcttcgcctcctccaggaaaatcagttggagtggaaat

SEQ ID NO: 98386 - DNA, 83 bp, Homo sapiens
ctcgacaaaatggctgatgatttgctggcagctgctgacaaggatctccaacttgaggaattaaggcagcaggtttctacatt

SEQ ID NO: 98387 - DNA, 83 bp, Homo sapiens
acgaccccctgaactacttcctcggtggctgcgccggaggcctgactctgggagcacgcagcttcttccccgggagctcgcag

SEQ ID NO: 98388 - DNA, 98 bp, Homo sapiens
ccgacctcatctccaggacagtgggaagagtggctggaggaattcagtttcttggggctctagaggacaaaatcccagtccttggcacaaactcagga

SEQ ID NO: 98389 - DNA, 98 bp, Homo sapiens
aaagggtgaaggaggcgaattttcagttgatagggtgtacaactatgagcctttgacacagctcaagaatgtcagagcaaattactatggaaaataca

SEQ ID NO: 98390 - DNA, 90 bp, Homo sapiens
gcccctgaattttacccttcaggttattcttccagttacacagcagagaaaatcctgaaggagcaagagcggctggcctacataaacccc

SEQ ID NO: 98391 - DNA, 100 bp, Homo sapiens
agaatggaaaagaaccattgaagcttgagagaaaagcccccaaaagcagctattcagggtgaaaaggctgatagcttttacatcatagagtctggcgaag

SEQ ID NO: 98392 - DNA, 98 bp, Homo sapiens
tgaagattgctcctggagcagttgtatgtgtagaaagtgaaatcagaggagatgtaactatcggagcagcatggacctgtcagcaactaaggaacaaa

SEQ ID NO: 98393 - DNA, 75 bp, Homo sapiens
ataccccgatggagtataagggggagctagcctcctatgatatgcggctgaggcaggagaatcgcttgaacccag

SEQ ID NO: 98394 - DNA, 87 bp, Homo sapiens
gaagtcggtgtctgctgcgttcacggcaggattcggttagattggctcacagtggttgattgatcaaccccattggacgttggttct

SEQ ID NO: 98395 - DNA, 90 bp, Homo sapiens
gtttccaactccctggaggtcatctggagttcggacctgtgaccgcatcaagcagtcagcagctggcaccaagcgtcgggtgtttatcat

SEQ ID NO: 98396 - DNA, 135 bp, Homo sapiens
ccccgcttgccgcagccgcctcagaacccgaccaacatccagaacttccagctgcccccagatgctggacgagaaccaccacctgatccagtgcatcctggagtaccagagcaagggcaagacggccgagtgcac

SEQ ID NO: 98397 - DNA, 100 bp, Homo sapiens
ataggctgcttggagaaaatgatggggaaacaagagctttggtgtgctacattgagggtcatcgggtaattaatctggccaatgagatgtttggttacaa

SEQ ID NO: 98398 - DNA, 100 bp, Homo sapiens
tgatggaggggacggaggcaacggtggacacgtcattctgagaggctgagtcatcactagagagtgggaagggcagcagcagcagagaatccaaacccta

SEQ ID NO: 98399 - DNA, 90 bp, Homo sapiens
gaagcgagagaacaaagcttattccttcaaagagcagatcatcgagctggagctgaaggagggtttttaatgaccacaacaagcaagcat

SEQ ID NO: 98400 - DNA, 90 bp, Homo sapiens
aggacaaaagccaagaggaggacagttcgctacacagcaatgcatcgagtcttgtgaaaatgccattgtgtgctggaaacctggcaagat

SEQ ID NO: 98401 - DNA, 100 bp, Homo sapiens
gcttcctctccatcctctacagcatcggcagcaagcctctgcaaatctgggacaaaaaggttgggggccgtcccgctcctaaggcaggaagatggtggcc

SEQ ID NO: 98402 - DNA, 106 bp, Homo sapiens
gaggcgagccagagcctgcagtcccacacggtacttcgtactggatttcgaggctggcatcctgcagtattttgtgaatgagcaaagcaaacaccagaagcctcga

SEQ ID NO: 98403 - DNA, 75 bp, Homo sapiens
gccgcaccagcgccgggacgggggtggccgtgcaggtgctggagaatctggtaaaagcaccattgtgaagcagat

SEQ ID NO: 98404 - DNA, 100 bp, Homo sapiens
aacagcgcatttcccctatatgacgcacccttcagggtgttagaacaccaaccttacagctctctgcgatgcaagaaggagactacacttaccagctcac

SEQ ID NO: 98405 - DNA, 82 bp, Homo sapiens
ctttcgcaacatcaagggagttttccggggccctctcagcaagaacgggaacaaaactctgacccaacatgagtgaagtttc

SEQ ID NO: 98406 - DNA, 50 bp, Homo sapiens
ctcttcgctctttgcatcttaactgcagaatgataacactttgtgtccag

SEQ ID NO: 98407 - DNA, 97 bp, Homo sapiens
agaaaagcctcgagtaccagtccgcctggcgattctttggcttccatcccatttatagcatttacagccgaacaataccagcaacatcaacagcaac

SEQ ID NO: 98408 - DNA, 97 bp, Homo sapiens
agggctgggcagctctggccatgccagcacctcagtcagcatcagcatggggcatgcagaccatctgcctgtgggacatcagtgccgttccaaagga

SEQ ID NO: 98409 - DNA, 75 bp, Homo sapiens
gcaagctctatttttaccagatgctcttggctgtgcagatgacagatttgaagatctggaagaggcaaatccatt

SEQ ID NO: 98410 - DNA, 83 bp, Homo sapiens
atccagcctgcggagcctgtggggcaggaggcatacacggaatacctgaggagcatccactatatctcccaggtgttactaga

SEQ ID NO: 98411 - DNA, 117 bp, Homo sapiens
ggacggcattccccacccatggtcagaagtgtggctgccatccaccccagcctggagatccccagtcttgtccaataagcatgtggctcctgatcatcttttgcaaatctgccagcg

SEQ ID NO: 98412 - DNA, 82 bp, Homo sapiens
ccacgcccctggaatgtggacgagagtctcgggtgaaattagagaaggatggaactccaacctcgaaaacatttgaacacgt

SEQ ID NO: 98413 - DNA, 50 bp, Homo sapiens
taaaatttgaatttgatggtattgaagtagatgacattaatgctgataag

SEQ ID NO: 98414 - DNA, 100 bp, Homo sapiens
cgggcagcaggatggtggtggatgcggccaactccaatgggcctttccagcccgtggtccttctccatattcgagaggaaactccgagaggtgtccacaa

SEQ ID NO: 98415 - DNA, 101 bp, Homo sapiens
ctctactccatgctgctagaggaggaaaaggaaaaaaatcgccaagtggagttccaagcaggtgctgggcgtcctcttctttgccatagcctgcttcttat

SEQ ID NO: 98416 - DNA, 82 bp, Homo sapiens
tcgaccttcaatccagttccaaggactccacgggaagctccttcagctcaaaaattttaacaccctgatggcagtggtggga

SEQ ID NO: 98417 - DNA, 50 bp, Homo sapiens
ccagcagaatcttcaccatctaaggtgatggcatcagctgagaagggaag

SEQ ID NO: 98418 - DNA, 83 bp, Homo sapiens
gttcccagctccgctaccctgagcaaatgacttacgctccattggattttccacccctctgccatgaaccagtccatcccagt

SEQ ID NO: 98419 - DNA, 80 bp, Homo sapiens
cagccaaatgccagactgattgtcatgctcagggaccctgtggagaggtagtaagcattaataatgtctttcatctttga

SEQ ID NO: 98420 - DNA, 100 bp, Homo sapiens
cccggggctgggctgcagcaagccgcacctggagaagctgaccctgggcatcacgcgcatcctagaaaccccagttagtgaccgggggtgagagtttcag

SEQ ID NO: 98421 - DNA, 87 bp, Homo sapiens
ggcaactctttgatgtactactataatgggaaagcgggtgtttgtgaaccgaagtttagcaatggaaaagataaagtgttttggttt

SEQ ID NO: 98422 - DNA, 74 bp, Homo sapiens
cgagttttaggcgtgccaatcatagtacaggcatcacaggaacatctggattatgagattatccagtctctaaa

SEQ ID NO: 98423 - DNA, 100 bp, Homo sapiens
tgcaccactgcaccccagcagagacctccgcctggcacacagggaatgctggagcaatacttaaataggcaatgctggacgtggctgcaaaccagggctg

SEQ ID NO: 98424 - DNA, 83 bp, Homo sapiens
ccgagcacccaggcgactgcctcatcttcaaggtactccaaagattcaggtttactcacgtcatccagcagagaatggaaagt

SEQ ID NO: 98425 - DNA, 83 bp, Homo sapiens
ccttagctgtgctcgcgctactctctctttctggcctggaggctatccagctgagacggtttaagcggaagcatcttactgcc

SEQ ID NO: 98426 - DNA, 100 bp, Homo sapiens
tcagagagggatgggttacatgcccaagaggggacttgatgttaacaaatgtgagattgccaggaagatctgcctgcactgcaagtgtccccaggaggag

SEQ ID NO: 98427 - DNA, 49 bp, Homo sapiens
ggtgtctcgtgtgtgaacatcacaggcatgtactggcattgaaaacatt

SEQ ID NO: 98428 - DNA, 82 bp, Homo sapiens
ttctcgaaatgggagtttgaagacctggaatgggggagatcaggatcctcatgaccagccaaagagaagaagaattaggaag

SEQ ID NO: 98429 - DNA, 100 bp, Homo sapiens
tgaagagttcaactttcccagaagttgttctaacgctgcctttgctttaaaacagtattacttgcggtgatgttcctgcctccaggaggccttttctgac

SEQ ID NO: 98430 - DNA, 75 bp, Homo sapiens
ggcggcggcggccggagcttctctcagccgccagtaatgttaaagtagagactcagagtgatgaagagaatgggc

SEQ ID NO: 98431 - DNA, 100 bp, Homo sapiens
ggcccagtcaactggggacccttacctatttctggtggttcggcaatagcacaaagaatgtcgtactctcaggaggctccaccatgttcagggatttcgg

SEQ ID NO: 98432 - DNA, 75 bp, Homo sapiens
tgggcaagttgccgtgcctggagatctcacagaaaggccttttccacctcatatccagctccctccagaaattca

SEQ ID NO: 98433 - DNA, 74 bp, Homo sapiens
aatcacctcgcaggagccctaggcttcttggacacttaatgattgttggcaagaaatgtgctgctgatctgggc

SEQ ID NO: 98434 - DNA, 126 bp, Homo sapiens
cgactacttcacacgccagtacggggatgagtccactctggccttccagcagagacgagttgtactgctgtcacaggaaatggacgctggattacaagcatggcagctcaggcagcagaagttgca

SEQ ID NO: 98435 - DNA, 100 bp, Homo sapiens
attgggagaaagagaccacagatctgaggatcaaggagaagctctttctggaagctttcaaagctttggggggaaaaggaattcaactgaaaaaggtgca

SEQ ID NO: 98436 - DNA, 101 bp, Homo sapiens
cgtgcatgaaccaaacccacttcgttcaagacaggtgtttaagcgttctgagatgcagtaaaatcgctggtgtgaaagtagcagaaattacagagctaata

SEQ ID NO: 98437 - DNA, 83 bp, Homo sapiens
tgtgaggaagccatcagatctgtgcaccattaatgtgagtggcctgaagttctccaagcacaagctccgggtggataaggcag

SEQ ID NO: 98438 - DNA, 101 bp, Homo sapiens
gaaatgtataccacagagatgctaaaatccatatgtctgctggggtctcttcagtttcatcgaaaaggtaaatcttacaaaccattgtggttttatgggag

SEQ ID NO: 98439 - DNA, 96 bp, Homo sapiens
tggatttctgtgagctcactacacagaaactgatgaccagcaacttgaggaagtaccattatataatgatgtaatgctcccctcacccaacgaaaa

SEQ ID NO: 98440 - DNA, 90 bp, Homo sapiens
cgaaggccctatcaggacatggagtatgaaagacgggttgtgagtcccggcccagcccctccacccccctgcccccccgatgcgaccatg

SEQ ID NO: 98441 - DNA, 100 bp, Homo sapiens
ctgaaggggaagatctcaatgaatgggttgcagttaacaagttcttggagtctctgcggagtccctgggccagatctcacagtgaaagctgcaggatctt

SEQ ID NO: 98442 - DNA, 75 bp, Homo sapiens
tctggctttcagaggaatccctgtgtcagctgtgatgcatgtttaaaaggaaattttcgaggtcgcagatataag

SEQ ID NO: 98443 - DNA, 100 bp, Homo sapiens
gccatccgagggatgctgaaaacctttgggcttcatggagtcgtcttagatgttgattcagaatgtatcctgtcaggtataatgtcagtgaatggcaaga

SEQ ID NO: 98444 - DNA, 100 bp, Homo sapiens
cagcaccacagtccttctgcagtccctcgtccagccacccccagagtcttactgtgttgctcaggctgatcttgaactcctggtctcaagttatcttact

SEQ ID NO: 98445 - DNA, 100 bp, Homo sapiens
gccaagtgaaaggcactatcgagattggaaccacagaagacagtatgctggctatgactattcgcagcaaggcagatttgtccctccagacatgatgcag

SEQ ID NO: 98446 - DNA, 90 bp, Homo sapiens
cttggcctcccgaagtgctgggattacagggcaagcaagctccacatatgcggaacaaactggaaagctgaccgaatttgtgtctaacct

SEQ ID NO: 98447 - DNA, 75 bp, Homo sapiens
agccgatgcaccgagtccagcccaggaaaatggagaggtcgggctcccgctcccggagcaagagccggagccgga

SEQ ID NO: 98448 - DNA, 100 bp, Homo sapiens
gctttgccaagttcagcaaatttggagatggtgttgctctcttgccattcgtggatgagcgaaggctacgagctgccctagaagaggtatacccagacct

SEQ ID NO: 98449 - DNA, 100 bp, Homo sapiens
cccgctacatcgccagtctgaagcagttgagtgcacacttgtcagagtgtgtcaatgcccccagcacctgtagttttaagcgctatggctgcgtttttca

SEQ ID NO: 98450 - DNA, 101 bp, Homo sapiens
cggagggagcgagcggcgggatggaggcatctcagcttagaccatgctcagcctccaagcagccttgtcatcgacaaagaatctgaagtttacaagatgct

SEQ ID NO: 98451 - DNA, 100 bp, Homo sapiens
ccggcggccgaagacactgcgactccggagacagcccaaatatcctcggaagagcgctcccaggagaaacaaatatttgttcagtcgaatcaaggtgaag

SEQ ID NO: 98452 - DNA, 100 bp, Homo sapiens
ttaagcctggatcctgtgcaggacaaaactcctctctatagtcaactccttcaagcatataagtggtcaaacaaggagaaatacatagatgctgcttcag

SEQ ID NO: 98453 - DNA, 83 bp, Homo sapiens
cgttatctgagttctggatggaggtaaaggaatatcacggactatgctgagaaggaaaataccatagcaaaagctctggaaga

SEQ ID NO: 98454 - DNA, 101 bp, Homo sapiens
agcctcccgagcagctgggactacagacctgagatccaagctggaaagaggcagtgcctgcagcaaccgctccatcaagaaagaggacgactcttcccagt

SEQ ID NO: 98455 - DNA, 97 bp, Homo sapiens
agcagccccggctctgggctacggactatgggcgaatagctctgaccacccggcgaagcgccctcacaaagccaatgctgaggagatgaccaagtac

SEQ ID NO: 98456 - DNA, 78 bp, Homo sapiens
cgtccccctgccccgttcacaatgccatttcataattctgaatcatgtctgataacggagaactggaagataagcctc

SEQ ID NO: 98457 - DNA, 90 bp, Homo sapiens
caccacctttcataaagccaccagcagatcgaatttcaaaagaatccggcaaagtttttgaagatgtccttgaaagtttctattcaattg

SEQ ID NO: 98458 - DNA, 90 bp, Homo sapiens
ccaggggctctgggagtggctgccagaacttcatggaggaacacggagtgacccaaaccgaacatatggctaccatagaagcacatgcag

SEQ ID NO: 98459 - DNA, 82 bp, Homo sapiens
ctccgggaaaactacactggccagtgtctttggtgcaacactaacaaggcttgtctggactacccagttacaagcgtcttgc

SEQ ID NO: 98460 - DNA, 51 bp, Homo sapiens
caacagcagccacaggaaccttgagctatattcccaaagcttggattagca

SEQ ID NO: 98461 - DNA, 110 bp, Homo sapiens
cgagcacagagcctcgcctttgccgatccgccgcccgtccacacccgccgccaggtactccaaagattcaggtttactcacgtcatccagcagagaatggaaagtcaaat

SEQ ID NO: 98462 - DNA, 100 bp, Homo sapiens
gccgggggcgcgggcggcggcgccggcaggaagggttcgatgaccttcaagtgtgtgctgaccccggcattcccgagaatggcttcaggacccccagcgg

SEQ ID NO: 98463 - DNA, 100 bp, Homo sapiens
ggccggactcaaccgcgtaaaagagagattaaacagattctagaaaatgaacttcagatacctgtgtccaaaatgctgttaaaaggctggaagacgggag

SEQ ID NO: 98464 - DNA, 98 bp, Homo sapiens
tacgccctcatggggaaaatctccccggtgactttcagacaaagaggcagctgaacgtctttcaaaaacagtagatgaagcatgtctgttactagcag

SEQ ID NO: 98465 - DNA, 90 bp, Homo sapiens
cagcgtcctcatgtggggggtaaaccactcggtagacttgggccttctgcgctttgtcacggctgtcgggacacagggcgccatttcaaa

SEQ ID NO: 98466 - DNA, 100 bp, Homo sapiens
agtttcgctttgattgctaccctggtatatgcacttttcagccccatggctgggggttatggagtgatgggtgacgatggttctattgattatactgttc

SEQ ID NO: 98467 - DNA, 82 bp, Homo sapiens
ccgaggaggcagccaagctcgtggcctgcctctgcgtgcgcttaactggcatgggctgagccccttgggctggccatcatgc

SEQ ID NO: 98468 - DNA, 100 bp, Homo sapiens
ttgatatgaatgctgctaggcttttattccacaaacttatacaacctgatcatccgcagatatctcagcaggacatggatttgattgacatactttggag

SEQ ID NO: 98469 - DNA, 75 bp, Homo sapiens
cgcagctacaattgtccagaaatgtgtcaccaagatcttccagaagaagaagaactcggtgacgtacagcttccg

SEQ ID NO: 98470 - DNA, 50 bp, Homo sapiens
gccaggtgctgcagaagctcttggagccagagcccagaggtggagcagtt

SEQ ID NO: 98471 - DNA, 74 bp, Homo sapiens
cgctctgtggtgcctggggctgaacgcggctttctggttgattcttcaccacactgaaaccattaggaaaaatc

SEQ ID NO: 98472 - DNA, 75 bp, Homo sapiens
cgtctctctgctgcggcgcggggaccgctgtgctctcgtgtcaacagcatctccaccctggagcctgtgagccgg

SEQ ID NO: 98473 - DNA, 76 bp, Homo sapiens
ttccgttgccaaacccaggacaaggtttttagaacttcagccataaaaatgggcagaattttccttgatcatatcg

SEQ ID NO: 98474 - DNA, 100 bp, Homo sapiens
gcaagggcagcagctggcgactttctccagtgactgggaaatccaggaagacagtaggacctgcaggctgggacaatgaaaagaaaatagctattttaca

SEQ ID NO: 98475 - DNA, 82 bp, Homo sapiens
ctgagaattttccacctcctgacacaacaccactcaagttttccgtctgatgaaggttggccatttgcaaagtatcttggag

SEQ ID NO: 98476 - DNA, 100 bp, Homo sapiens
gaaacagatggatcctcttgacaagaaggtgacactgatcccaactcatgactcagaagtgatgagggaatggtaccaggagacccatgagaaacagcaa

SEQ ID NO: 98477 - DNA, 100 bp, Homo sapiens
cacagtggaaaggaaccgttctggatcagtactaaggctcgtacgtctgcatcgattatcttacgtggggcaaatgatttcatgtgtgatgagatggagc

SEQ ID NO: 98478 - DNA, 75 bp, Homo sapiens
agaaaactcaaaaaccatctggtgctgtggattgcaaccttgaattatttggaaaccatgttcacactacttttt

SEQ ID NO: 98479 - DNA, 89 bp, Homo sapiens
gcccgctcgggtatgaagatcgggcggattggtccagagaacatggcacactgtggtctcttattattgctaagttgatcctttcccga

SEQ ID NO: 98480 - DNA, 75 bp, Homo sapiens
ccggagagggtgctggctgccgcgcggccgagttattaccccattcaagttgacaactgaggcaacgcagactcc

SEQ ID NO: 98481 - DNA, 111 bp, Homo sapiens
tttgtttcatctgaaggagataatgaatttgaaagaatactacaattttattgggagatttctgtagatgtggattttgtcacagcacaaagtaaaacaatggaagtgaag

SEQ ID NO: 98482 - DNA, 100 bp, Homo sapiens
tgcacgacttcgtcgtgggtcagcaagagggccccgctgaccaggtggctgcagtggaatgcagtagccctctgggcctgggatattgtggttgataact

SEQ ID NO: 98483 - DNA, 75 bp, Homo sapiens
cttcctcattatcagaaattaaaggtgctggagaatgccgaaggtgccagaaccaccccttcagttgtggccttt

SEQ ID NO: 98484 - DNA, 75 bp, Homo sapiens
caccttcagcccccccgcgaacgcccaagcatttgaagacacttcgtcacccttgcttgctaagatttttatctt

SEQ ID NO: 98485 - DNA, 50 bp, Homo sapiens
gcgattggacagaatttgtgaagcctgattacatcaaccccagagccgtg

SEQ ID NO: 98486 - DNA, 75 bp, Homo sapiens
ccttgcccactcccatggtcctgcagagctgcatggctacttggagaatgagccgctgatgctgcagcttttcat

SEQ ID NO: 98487 - DNA, 50 bp, Homo sapiens
agccagggctgaacccccgcagggccgttgctccagggagaactgcaaat

SEQ ID NO: 98488 - DNA, 75 bp, Homo sapiens
gctgacagtcctcctggaggggatctctggccaaggagtgtacgtttctctgcaggtggatattgttcccagcca

SEQ ID NO: 98489 - DNA, 83 bp, Homo sapiens
ctgagcaaccagagaaaccacttgaccttgcacatatagtattttgacaacaaaccagtaaatggccccaagtcagaatccat

SEQ ID NO: 98490 - DNA, 83 bp, Homo sapiens
ttcttctcctggttaatcaagaattctctatttctgctccgtcatccatgccactggaccaacgaatgcttggacaacaacgg

SEQ ID NO: 98491 - DNA, 82 bp, Homo sapiens
ctgcaccttaaaaacaaaagattgagctgcactgtattcctgttcatccacataaaacttatttcacagtagctgaaaaagg

SEQ ID NO: 98492 - DNA, 100 bp, Homo sapiens
taaaagaagccaacaaagcattgcaggtctatcatttggcaagtgtacgcttacgtgatctatgtctaaaactggatgtttcaaatgagttacgaaggaa

SEQ ID NO: 98493 - DNA, 75 bp, Homo sapiens
cccgcttcatgatcgagtgcgacgcctgcaaggactggttccacggcagatggcgttcaggaagtggcttatatt

SEQ ID NO: 98494 - DNA, 100 bp, Homo sapiens
agaactacaggaacctgctttctctcgatgaggataacatccctccagaagatggatgttatcggcttcaatatggctggtcttgattatctcaagaggg

SEQ ID NO: 98495 - DNA, 75 bp, Homo sapiens
cagccgatccagcctgcggagcctgtggggcagcgtggtaccatgcgacgacgctatgaagatgatggcatttca

SEQ ID NO: 98496 - DNA, 73 bp, Homo sapiens
aaacacagtttctgcaggaaaagatctctctacttctcctaaggttgctgctaaatgggaaaaacttagctta

SEQ ID NO: 98497 - DNA, 89 bp, Homo sapiens
cctcccaagtaggtgggactacaggtggctgtacttttgatgatggtccaggggcctgtgattaccaccaggatctgtatgatgacttt

SEQ ID NO: 98498 - DNA, 80 bp, Homo sapiens
ctggcaccccgaacgggttgcttcccccgctgcgagtgaactttgaggcgctgatcatcaccatgtcggtagtcggggga

SEQ ID NO: 98499 - DNA, 97 bp, Homo sapiens
atcacaaaagagttgattgaaattatctctggtgctgcagctctgcctgtctacaagtcattttgcttgggcatttcactcagtagcagaagaagaa

SEQ ID NO: 98500 - DNA, 75 bp, Homo sapiens
tgctgcactgctttcagcatgcaagtaacaattcaggttttaaaccagcttatccaaaagattcgagaagacctc

SEQ ID NO: 98501 - DNA, 75 bp, Homo sapiens
tggaaaatgcgctcgggctggaccagcagacccaacatgagtgaagtttcctgcaagaaacgggacgactatttg

SEQ ID NO: 98502 - DNA, 100 bp, Homo sapiens
cgaagaggccaggaagatccttcaggtgctggaaaggaatgaggagttacagagggccgagaaggacaggatcagagaagagcaagttagtaccttgtac

SEQ ID NO: 98503 - DNA, 80 bp, Homo sapiens
gaagaggagaaggaaattgtcccgaatccctgcaggggtagtaaaaagaatcattcctgcagtagcttccacaaatgcag

SEQ ID NO: 98504 - DNA, 89 bp, Homo sapiens
gactattaagatgtgggatgtcagtactggcatgtgccttatgaccctcatcgttaactgaagacaatatgcaaaattctcacatggat

SEQ ID NO: 98505 - DNA, 100 bp, Homo sapiens
aatagttatggcaaaagtctatcaaacagcaagcactgacaagcagcacattctcaagagcacacagagaacgtttgtctgcctgatgagagccacttgg

SEQ ID NO: 98506 - DNA, 90 bp, Homo sapiens
tttgaagcagcaagtctgttgtctgaattgtactgtcaagagtttctcaagtcaaagaaggccctgtcctagcaactagttcaggagctg

SEQ ID NO: 98507 - DNA, 75 bp, Homo sapiens
ttcttttttgagaaaggaaggaatatatcctgactgattattttcgacaatgaagccaaagacgtggagagagaa

SEQ ID NO: 98508 - DNA, 75 bp, Homo sapiens
gtgtttgttctgggcgaatggcagcccatcgaggactcaagagtagccttcctcgaggacctgcctttcccattt

SEQ ID NO: 98509 - DNA, 51 bp, Homo sapiens
agtacacaactcccagctgaaaggagccggcatcatggattccttcaaagt

SEQ ID NO: 98510 - DNA, 50 bp, Homo sapiens
gtcttcatggacatttttgaacttgtgcagtgattccagcagtagttcaa

SEQ ID NO: 98511 - DNA, 50 bp, Homo sapiens
ggaattttggagatattcaaaggactgaaaactggatatttggtccccat

SEQ ID NO: 98512 - DNA, 90 bp, Homo sapiens
agttggcccctgagccagagctccagcagccttgttagggcgtggcctgaggcttggataagtgggtttcaccagtgatcattaaagaat

SEQ ID NO: 98513 - DNA, 101 bp, Homo sapiens
gaacgaaaacgtagggaccacatcaaagacagctttcacagtttgcgggactcagtcccatcactccaaggagagaaggaggattctctatgggaggatgc

SEQ ID NO: 98514 - DNA, 100 bp, Homo sapiens
caagcccatgcgggaccagatcatccgcgtgaagcggttatacattggctcttcaaagacgttcacctcatcagagaaatccctgactcctttgcagtgg

SEQ ID NO: 98515 - DNA, 98 bp, Homo sapiens
tcgttcaggaggaaccccaggcccttccagcggtggccacacgtcacacagtggggacaacagcagtgagcaagatttggagcaagaggtggtggtgg

SEQ ID NO: 98516 - DNA, 75 bp, Homo sapiens
ggggtggcagcctgccacatcgggggcaccaccctccatgcctttgcagagagacctctctccccaaaagccgtc

SEQ ID NO: 98517 - DNA, 82 bp, Homo sapiens
aattcgcctccatctgtaccatgtccctgaagaggaaggagaaggaatatgagcatgaaatggagcggctggcacgtgagaa

SEQ ID NO: 98518 - DNA, 73 bp, Homo sapiens
atgcccatccgaaaggatgatgaagttcaggtttctgcataaagaccaactcctcggaagggaaggttttcat

SEQ ID NO: 98519 - DNA, 100 bp, Homo sapiens
agttggaatttgtgcaatgtttagccaacccaaattaccttaattaaatctcctgcaaagaagctgagccatgcaattagtaaatctttggggtgtgtac

SEQ ID NO: 98520 - DNA, 75 bp, Homo sapiens
ccctggatgccctgaagatcagcatccgccagctcaagtggaaggagaaacctctgtagaggagcaggatgcaac

SEQ ID NO: 98521 - DNA, 75 bp, Homo sapiens
tgggcttcctgactctttgaagaatctatccagtgtctttaagggggatatgagactttctactcggaatatcct

SEQ ID NO: 98522 - DNA, 83 bp, Homo sapiens
ccacgttctgcagaggaccatccagtgtgcaaaagagacaagaggagcagcagcggcaccgcccctcaccctggagggtcctg

SEQ ID NO: 98523 - DNA, 88 bp, Homo sapiens
cgaggccacggcgagccccaggagccgggggacgacttcttcaacatgctcatcaagtaccaggagatgcagaaactaccagaggccg

SEQ ID NO: 98524 - DNA, 97 bp, Homo sapiens
gcagcgcacgcgggaggccgaggagaagctggaggagcggctgaagcgcgtgcgcatgatgaagggcgccctaatggagatcatccagctcgccagc

SEQ ID NO: 98525 - DNA, 90 bp, Homo sapiens
ctcttctgtgtcagggaatgctcctggctggtgcggacacaacccaataggtcattgagactgcctcttctcaaagggacactgtcctca

SEQ ID NO: 98526 - DNA, 114 bp, Homo sapiens
cgcggctcttcccgcccgccttccgccgtctcttcgagttcttcgtgctgctcaagcggggatctgacgagcttttctctacttgtgtcactaacggaccgtttatcatgagca

SEQ ID NO: 98527 - DNA, 82 bp, Homo sapiens
gtcagcatgagcaaaaactccaaactcctctccaccagcgccaagaggttttgaacgaagaatgtgatcagaactggtacaa

SEQ ID NO: 98528 - DNA, 83 bp, Homo sapiens
cctggtcttgctcggccgatgaagtgcagaggtttttttctgggggagcagcctctgggagtgacagtgctgacaagaaggct

SEQ ID NO: 98529 - DNA, 97 bp, Homo sapiens
gaagaacctgaaggacacactagcaacatggccaacgccctggccagcgccacttgcgagcgctgcaagggcggctttgcgcccgctgagaagatcg

SEQ ID NO: 98530 - DNA, 83 bp, Homo sapiens
cgcgcctgtcctggatcgacaccctctacagcaagagcatcagtgatgtcacgtttggagcaggggtcagttacatcgggaca

SEQ ID NO: 98531 - DNA, 91 bp, Homo sapiens
ctcaccccggacgagagcaaggagaggctaggacaatgcagatcttcgtgaagactctgactggtaagaccatcaccctcgaggttgagcc

SEQ ID NO: 98532 - DNA, 82 bp, Homo sapiens
ctgccatcctcttcaccaggcagggaactctaatgatccaggacaaagaagttaccctggagtatgtatcaagcctggattt

SEQ ID NO: 98533 - DNA, 100 bp, Homo sapiens
cgcgccccgcgcggcccgcccggatcgtggcctctcgagagcaagggttcatagtggcgtcatgcacgcagactcctgcaagttcccctaagttcttaga

SEQ ID NO: 98534 - DNA, 50 bp, Homo sapiens
acagaatatgctccaaagaagagaattcaattcgtcataatctgtcccta

SEQ ID NO: 98535 - DNA, 113 bp, Homo sapiens
aagctgctggagcgagtgtcagccatcgcttcggaggggaaggctgaggaaaggagtcagtggatcggtggggaaaatgctgcttaccctgggccctgggctgtagaaagaag

SEQ ID NO: 98536 - DNA, 75 bp, Homo sapiens
ctgggaccggcgtcgggggtcgcggggaccatgcagcggagggtcccgacggcctacacatggggcgctgtgggc

SEQ ID NO: 98537 - DNA, 95 bp, Homo sapiens
aacctgaagacgacccaaaagggtacctaggctggacgtaaagaaagaagtgatgcactcaattctgcaatagataaaatgaccaagaagaccag

SEQ ID NO: 98538 - DNA, 101 bp, Homo sapiens
gcttctgctgtccttctttgtggagagcaaggctttgaagacaagattcccaaaaggagattctctgagatgcaaaatgaaagacgagaacaggcacagcg

SEQ ID NO: 98539 - DNA, 61 bp, Homo sapiens
ctcacccgcctctacaacatcaagaagtcggatgtcatggatcagaatttgttaaatttcc

SEQ ID NO: 98540 - DNA, 83 bp, Homo sapiens
gagaagaacaagttgggagccaagattatcaaagcagagatgatggggaatatgacatatctgaagagatggattaagaatgc

SEQ ID NO: 98541 - DNA, 100 bp, Homo sapiens
attttgttattttctgccctgaaccagggcagaagcttatggcatcattcttaacaaagaagttaaatattggtgggaaaagagtaaaccttgccatatg

SEQ ID NO: 98542 - DNA, 50 bp, Homo sapiens
ttcctttttgaagtagttccagcacgaaagcaagagattatcaaagtcac

SEQ ID NO: 98543 - DNA, 82 bp, Homo sapiens
aagaagtggagcgtgtcctgaaggagttccaccaggccgggaagcccatcggatgtggacgagtgctcactagcagaaaaaa

SEQ ID NO: 98544 - DNA, 100 bp, Homo sapiens
agttcaaggagtctcttgttaatatacgtaggtaacctttccagagatgtgacagaagtccttatacttcagttgttcagtcagattggaccctgtaaaa

SEQ ID NO: 98545 - DNA, 75 bp, Homo sapiens
ttcaagccctggctcaaaatactgtctgcttttctgtggagactgcgggttgcagacaccagcagccccctattg

SEQ ID NO: 98546 - DNA, 97 bp, Homo sapiens
catcgacaaaagaaccattgaaaaatttgagaaggaggctgctgaggctttgttgggccaggagatggttttgcagcagcagaagactatgaactgg

SEQ ID NO: 98547 - DNA, 100 bp, Homo sapiens
aaaagcccccaaaagcagctattcagaatgtccagaggaggtttatgaccctcgatctctatatgaaaggctacaggaacagaaggacaggaagcagcag

SEQ ID NO: 98548 - DNA, 75 bp, Homo sapiens
gagctttgtctatcttcttccttaggaaaccagaagccttatcagttgtgagtgaggaccagtcgttgtttgagt

SEQ ID NO: 98549 - DNA, 83 bp, Homo sapiens
gcacccctgccagtcctgctctgccgcctgccaccgctgcccgagcccggatcagtttgacaacttagaaaaacacacacagt

SEQ ID NO: 98550 - DNA, 83 bp, Homo sapiens
gaaaggccaatttcatgaatttcaagagagtaccattggggaattttgatttggctgctgggctgctaccttgaaatccaagc

SEQ ID NO: 98551 - DNA, 83 bp, Homo sapiens
agtccttcttcgccaaatactgacatgaagtccgagaggagacccccctcacctgacgtgattgtgctctccgacaacgagca

SEQ ID NO: 98552 - DNA, 100 bp, Homo sapiens
aaggggcaactgggccatgagagggaaggaaacaagccaggacatggatttgattgacatactttggaggcaagatatagatcttggagtaagtcgagaa

SEQ ID NO: 98553 - DNA, 100 bp, Homo sapiens
tcctcctgaagtgtctttggtccaacgttgttccaggatcccattgaagataccacgctgcatgtgtccttagtagtcatgtctccttaggctcctcttg

SEQ ID NO: 98554 - DNA, 75 bp, Homo sapiens
cttccgtatctgcctaggcattttgctgtctcctcctaatacggaataggaaaattgtccacggctgatggtaaa

SEQ ID NO: 98555 - DNA, 82 bp, Homo sapiens
actgtcctccacatattgagaatgtaccccaagaagctagtgcagacttattcagtgtttccctaccaggacgagatgagcg

SEQ ID NO: 98556 - DNA, 98 bp, Homo sapiens
cctcagggccacggctttagcggtgtcttttgcgagttgccatggagaaaattccagtgtcagcattcttgctccttgtggccctctcctacactctg

SEQ ID NO: 98557 - DNA, 75 bp, Homo sapiens
gactccttcggcagtccacccaccgccgccgcctcccagagacggtctccttctgtcacccaggctggagtgtag

SEQ ID NO: 98558 - DNA, 100 bp, Homo sapiens
catgaggggcgggcctgaagttggattctggaggggagccaaatggggcctcaggtctcctctgagcctccggcctccataagacccaaaacagatgaca

SEQ ID NO: 98559 - DNA, 100 bp, Homo sapiens
cggtgctgaggcacctggagaccttcgagcaccccaacgtggtcagtaatggaggggaaagttccagtcgcagcgctgagaagcgatcagctgaagaaga

SEQ ID NO: 98560 - DNA, 50 bp, Homo sapiens
agagactccactgaggtcacacagccggtcaaaatgcagatcttcgtgaa

SEQ ID NO: 98561 - DNA, 51 bp, Homo sapiens
atagatctctcggctctgaggggaacgcctaagctgttaaggaccagcgag

SEQ ID NO: 98562 - DNA, 100 bp, Homo sapiens
gtccagaaatctggaaacatgatacaatctgcaaatggcagcagtgaggatgccagagttcatgggtttctagaagacaagttttcaactgcagatacaa

SEQ ID NO: 98563 - DNA, 75 bp, Homo sapiens
gttcggcgctatggaggagctcgatggcgagccaacagtcactatggccgccctgctcccccaatgaaaggccag

SEQ ID NO: 98564 - DNA, 100 bp, Homo sapiens
gcattatgcatgccccctcccagtgaccccaggctttttatggctgtgagacacgttaaaatttcaggggacagagcagaatgggctgatatagatccgg

SEQ ID NO: 98565 - DNA, 51 bp, Homo sapiens
cgaatcttccttcaggatatcaagatttgggatgtgagaactaaagccagt

SEQ ID NO: 98566 - DNA, 110 bp, Homo sapiens
ctcccagggaacctacagctttctccttcacagcattgcaggaggtgacttatatataggaggagtagctaaagaaacatacaaatccttaccaaaacttgtacatgcca

SEQ ID NO: 98567 - DNA, 98 bp, Homo sapiens
gtgccaatgtctccaacttcacttttgctcctagcacgattatatttcacctgggacatgctggactggacctacagagacatctgggattttctgcg

SEQ ID NO: 98568 - DNA, 98 bp, Homo sapiens
tcaggagtgaccaggagccgctgtacccagggtgtggtaactgcagccacaagtctgatcaccactttagcacagaagaacccagaagagtttaaaac

SEQ ID NO: 98569 - DNA, 50 bp, Homo sapiens
ttggcgatgggttacagtaagaggtgctggcatcggccccaccattcaga

SEQ ID NO: 98570 - DNA, 83 bp, Homo sapiens
gggtgctggcacggggctggtgggcatagtggctgccctgctggctgctctgttaaaagcgaaaatgaaacaattgcctgcgg

SEQ ID NO: 98571 - DNA, 73 bp, Homo sapiens
gatgagtgtggacgagaccctcatgtgctctttccagatgctcaagtccatgtgtgccgggcagaggctagcg

SEQ ID NO: 98572 - DNA, 100 bp, Homo sapiens
tggatgattttgagggaagaaacacagttcacagatttggattcaagatgtgaaataatcagcgatgggaaaatgcagctttataggaaacactcatgtg

SEQ ID NO: 98573 - DNA, 80 bp, Homo sapiens
gcgcttctgctctcagtgtcccggacttcagaacactctgctccagccaaggtggtgagggcagctgttcctaaacagcg

SEQ ID NO: 98574 - DNA, 82 bp, Homo sapiens
gagacgtcaaactcctagtggatggctgagagctagcaaggaaaactcaggaccatgatggctcagtttcccacagctatga

SEQ ID NO: 98575 - DNA, 98 bp, Homo sapiens
agcagccacatgacgtacggcatcagcgaccacaagcctgtctccggcacgttcgacttggaggccctgggcagtgacggggttcgggtgaccatgga

SEQ ID NO: 98576 - DNA, 100 bp, Homo sapiens
cttcaagctgtgaaacaaggcttaaaggttgtcagtgatggtgtacccctggtgctagccctggtcccccaccggcagccccactccttcatcacccagg

SEQ ID NO: 98577 - DNA, 100 bp, Homo sapiens
acagcatcctgagaccttcggggcccggagcaggacagaatgacttggaagataacggagcttcgaagcttctagcagaatatgaagtctttcgtcttca

SEQ ID NO: 98578 - DNA, 99 bp, Homo sapiens
agaatcaatgagaacacagggagcgtctccgtgacacggaccttggacagagaagtaatcgctgtttatcaaccctcttggaacagagatcatgatgac

SEQ ID NO: 98579 - DNA, 90 bp, Homo sapiens
gcgacttctaggagcctggggttcggcgctatggaggagctcgatggcgagccaacagtcactatgaggacggggacttggttgcctttt

SEQ ID NO: 98580 - DNA, 101 bp, Homo sapiens
ctggggggcagcgcctggtggtcctacacctggaggaaggccttgttgctggtggcggccttggcgggcctgggcttgggcctgagcctcattttcatcgc

SEQ ID NO: 98581 - DNA, 100 bp, Homo sapiens
ctgctattgaaggaaattctttgggggtttcccaggcagctgcagacttgaaacagttctgtctgcagaatgctcaacatgaccctctgctgactggagt

SEQ ID NO: 98582 - DNA, 90 bp, Homo sapiens
gtgtcctgtgatgctggtggtaggagaccaagcacctcatgaagatgcagtgccccctgtacgaccagtactgcaaggaccacttcagcg

SEQ ID NO: 98583 - DNA, 75 bp, Homo sapiens
cctaccatgtcagccttcccagtagctggaactacagcttccagtggtgtctgtagtgagagaaacagagtccca

SEQ ID NO: 98584 - DNA, 75 bp, Homo sapiens
cagagatctacaaccttggagcccagagccacgtcaaagatgaggaagtacagacaattggtcagatagaactgt

SEQ ID NO: 98585 - DNA, 83 bp, Homo sapiens
ctacgcctgacagtggtagatacccctggctatggtgacgctatcaactgcagagattggtgcaggtgggaagcacacctcag

SEQ ID NO: 98586 - DNA, 74 bp, Homo sapiens
agagcctcagtttgtgcaggacaccgacatggaacagggactcactggggttgaagattcctgtctctggatcc

SEQ ID NO: 98587 - DNA, 100 bp, Homo sapiens
aacttgtacagagatgtgatgttggagaactatagcaatctggttttcttggctgacatctgaaatgtttgaagcagatcttgagaaggcattgttacta

SEQ ID NO: 98588 - DNA, 100 bp, Homo sapiens
gccctcgatgtgctctgcgtgttgctgggtttcttcaggagaagcattaccaaaaacgctgtgtacaagtgtaaaaacgggggcaactgtgtgatggata

SEQ ID NO: 98589 - DNA, 90 bp, Homo sapiens
caggagcaaggagaagaatgggacccaatctcattccagcccagcggtgctgtcgcaagggaactctaatgatccaggacaaagaagtta

SEQ ID NO: 98590 - DNA, 100 bp, Homo sapiens
gatctagatgtgaggtcctctctgtcagtttctggaagtgtgactgacctaggggctattcacgaaaagcagcagctctagagttcttaaaccgctttga

SEQ ID NO: 98591 - DNA, 80 bp, Homo sapiens
ggatactcttgttaccagaattccaaaggttctgcaattctgtggtgttcttggtcacacatttatggagtttctgaagg

SEQ ID NO: 98592 - DNA, 83 bp, Homo sapiens
gttatgacagccaaaaagcagagtttgctggacaaaggagtgatactacatgagtatgcgaccagtggttggaacctgaatgt

SEQ ID NO: 98593 - DNA, 99 bp, Homo sapiens
ctgccctgggcatccaggggggtcagtccgagtgcctcagcctggccagaggagaagagagaaaaggaacagttccgtaagctctttattggtggctta

SEQ ID NO: 98594 - DNA, 100 bp, Homo sapiens
aatctgaacctcgtctgtattcccacttccttccagatattaaggctaagacatactgcatttgtaataccaaagaaaaacgttcctacctcaaaacgtg

SEQ ID NO: 98595 - DNA, 75 bp, Homo sapiens
gctccgtggaagcgtggccggcagcgtcccggacgaggaggccaagcatggggatcagcacgagggtcagcacta

SEQ ID NO: 98596 - DNA, 100 bp, Homo sapiens
ggttcacccgctgccgggcaccgaggaccagctcaatgacagtgccggtggtggtgtgcacattgagccccggtatagacagttcccccagctgaccaga

SEQ ID NO: 98597 - DNA, 51 bp, Homo sapiens
ataacacaaagactacaacctgggttcgtgtaaattcattagtgtgcttag

SEQ ID NO: 98598 - DNA, 82 bp, Homo sapiens
tgtctagttgcaggaaaacaagctcagggcttccactgattctacattatgctcactaccctgggaaatcttacaccttcaa

SEQ ID NO: 98599 - DNA, 100 bp, Homo sapiens
aacaaaggacactgccaaccttgataagatggcttcggagggaatgaggccacccagaggagaaggccaccccgcctggaggcacaggccatgaggggct

SEQ ID NO: 98600 - DNA, 98 bp, Homo sapiens
ttgggcctttggtagtagattggcctcataaagcagaaagcaagtcctattttccaccaaaaggccagcttcttcaggtggtcagagcagccaatggt

SEQ ID NO: 98601 - DNA, 82 bp, Homo sapiens
caggtccgacccgcgaacccctctgggatccccgccgctctgtctacaacccgaggttacaggaggttccagtggcatcggg

SEQ ID NO: 98602 - DNA, 75 bp, Homo sapiens
gccgcaagtacccgtccatcatagtcaactgcgtggaagagaaggtaaaaccttgttagccaaagcagtagcaaa

SEQ ID NO: 98603 - DNA, 97 bp, Homo sapiens
gcaagaccagtccatttggggaaatccttcggatggtgaactcattagaagtgctggagaatctggtaaaagcaccattgtgaagcagatgaggatc

SEQ ID NO: 98604 - DNA, 75 bp, Homo sapiens
gccaacaacagtgacggaatgcctccatacatgtaccaaagcagtcagactcacagcctaattctgataacctaa

SEQ ID NO: 98605 - DNA, 100 bp, Homo sapiens
aaaaggaccttatacgaagccgagatgtgtgcacagacccaggccatgcagatactggtgcctctaacttcgtcagcccagaacacctcacctctggccc

SEQ ID NO: 98606 - DNA, 74 bp, Homo sapiens
gaaaatagcacacttttactctacgcaactgttgctttttcatgaggaggaggtggaggaggaggaggatggag

SEQ ID NO: 98607 - DNA, 75 bp, Homo sapiens
gaatctccagtttttgacgggggccattcagcaactgggtggggcatattaatgaggataagagaaaaacagaag

SEQ ID NO: 98608 - DNA, 75 bp, Homo sapiens
cctggagtcaggtggcggtgcagaaggtcaacgccgcaggcacagcatgaatgtcagcatcatcattcaaagaac

SEQ ID NO: 98609 - DNA, 100 bp, Homo sapiens
gccaaaaccctggggattggcaaagccattgctgtcttaacctctggtggagatgcccaagtgaggagaaggaggaagtgaccatggacacaagtgaaaa

SEQ ID NO: 98610 - DNA, 95 bp, Homo sapiens
ccatccgttccagggacctcaccctcgggggagtcaagaagaatcggctacagtctcaaagggcaatgcttctgcagggcactgaaagcctgaac

SEQ ID NO: 98611 - DNA, 96 bp, Homo sapiens
cgaggaggggaatttccttgtgcctccattcccgggaggggggagcggcgttggaggccaccgtttccagcttgcaaaattggatattacaaggct

SEQ ID NO: 98612 - DNA, 100 bp, Homo sapiens
gaggagctgctgcccaaagaaggaaacaaagctctgctcacgtttcccttcctccatatttactggacagagtgctgtatggagtctcgctctgttgccc

SEQ ID NO: 98613 - DNA, 119 bp, Homo sapiens
gtaaagggaagtcatttctactggacttcatgcttagatacatgtataacaaggatacattaattgtttggtcagaagcagagaactatgatttggctctgagttttcaggagaaagct

SEQ ID NO: 98614 - DNA, 105 bp, Homo sapiens
tgctcgcgctactctctctttctggcctggaggctatccagcggtctcttgcaacgtgtgagctgcctcttgccaagagtgagtggcaaaagaaactaaccccgg

SEQ ID NO: 98615 - DNA, 50 bp, Homo sapiens
gcctgggagcttgctgcagcttcaggaggcaacgcacgggccacaggcat

SEQ ID NO: 98616 - DNA, 76 bp, Homo sapiens
gagggctctagctaaaaatgagcaagttaaaggcaagatcgacaccatgaagtttattctccagatatgccttcac

SEQ ID NO: 98617 - DNA, 50 bp, Homo sapiens
tggaaacacgcgggagctctcaaaaaggtgatattgaagcagctttcaat

SEQ ID NO: 98618 - DNA, 98 bp, Homo sapiens
ggaagacaaatatggaaacaaatactatgaagacaacaagcaattttttggtcacggcagttgcacaacagaatcaaggagaggtccctgaaccccaa

SEQ ID NO: 98619 - DNA, 100 bp, Homo sapiens
ggaaagtgatgttagagaactacagaaacctggtcttcttggctcggctttggatcgttccttggaatcattggatcaaaccttattgagaacaaaaggc

SEQ ID NO: 98620 - DNA, 100 bp, Homo sapiens
tgaatctctgcccgcaacacatatcaggaattgtgggaacgtattctgctccagttgttgtaaccagaaggttccagttcccagccagcagctctttgaa

SEQ ID NO: 98621 - DNA, 80 bp, Homo sapiens
gaagaggcgttcgctgcgcgtgcacattccgacctgcctagagctggaacgttacctccagagcgagccctgctatgttt

SEQ ID NO: 98622 - DNA, 75 bp, Homo sapiens
cagcaagaggaaaggaaagatgtgttcgggtttttctagaacacggagaacatggtccaagacaattcctgggaa

SEQ ID NO: 98623 - DNA, 51 bp, Homo sapiens
ggaaaagcaggtgcctctggatttccaggtgtcagccagaacatgtctttc

SEQ ID NO: 98624 - DNA, 100 bp, Homo sapiens
tgactgcggccgcctccggccaggacgctgggagctgcctgcgggaaggtgcggggagcggagccatggcctccggttcaaaccttgtactactcagctg

SEQ ID NO: 98625 - DNA, 100 bp, Homo sapiens
ctggagttcagagtaagagaactggagcaggcgcttcttcttcaaacatacccatatagataaaccagactgctcagggccccccatggacataagtaac

SEQ ID NO: 98626 - DNA, 74 bp, Homo sapiens
tcctggggcgcaccgccaagagctggggcccggtggttctgggaagcgtacttccagtcaattaaagccattgc

SEQ ID NO: 98627 - DNA, 100 bp, Homo sapiens
ctatccaatccctgccttttgagtccaggtggtttcagaaaagggatccctaacatcagaagagtttgctaagcttgtgggaatgtctgtcctcctagcc

SEQ ID NO: 98628 - DNA, 83 bp, Homo sapiens
ctctggaggagtactggcaacagcccatggcgaattgtggatgattgcggtggagccttcactatgggtgtcatcggtggcgg

SEQ ID NO: 98629 - DNA, 52 bp, Homo sapiens
ctgtactggtatagcaatcaaatgctggccagctcagcgtccctggaaggga

SEQ ID NO: 98630 - DNA, 100 bp, Homo sapiens
tccgagctcgatccgctgctcgcacgggagccagctgggtgcatctactgccgaggatgttccaagccgctgtgctgctcgtgcgcgctccttgacagca

SEQ ID NO: 98631 - DNA, 100 bp, Homo sapiens
tgggaatgttttcttaaaattcgcttgcattgatgacaatgttgatatggtgaagtttctggtagaaaatggagcaaatattaatcaacctgataatgaa

SEQ ID NO: 98632 - DNA, 90 bp, Homo sapiens
tagtaacccaaagatcgtgcagctcttggcaggagtagctgatcaaaccaaggatggccgagaccgacccgcccgcccgcggccccgcag

SEQ ID NO: 98633 - DNA, 87 bp, Homo sapiens
ctgaaagtcacgattaggactgacaataaggatcagctcagctactatttaataaaacaaaatctgtagaattcacgttttgtaatg

SEQ ID NO: 98634 - DNA, 82 bp, Homo sapiens
gccttacaagtgcactgtgtgtggccagtcatttaccaccaatgggaacatgcacaggtacatctccgttcatggatgcatt

SEQ ID NO: 98635 - DNA, 100 bp, Homo sapiens
ccaataccgagctgcagattgcccagacccagaaaaagtgtaacagaacagaggaactcttggtggaagagattgagaaaaagcttgagtctccaccccc

SEQ ID NO: 98636 - DNA, 100 bp, Homo sapiens
atcaaccgccagatcaacctggagctctacgcctcctacgtttacctgtccatgtgccggtggtggtgtgcacattgagccccggtatagacagttcccc

SEQ ID NO: 98637 - DNA, 100 bp, Homo sapiens
cagcaagaggcgcttggtcaagacacactgacgtgcttagatgagtacgaagatgatgaagcagggcagaaagagcggaaacgagaagatgcaattacac

SEQ ID NO: 98638 - DNA, 75 bp, Homo sapiens
ctggccctgaagaactacagtgtgataacaacgaacttgatgcaagtgataggtttgccaaggtcagacctctca

SEQ ID NO: 98639 - DNA, 51 bp, Homo sapiens
aaaatgatgagcaaaatgctgaggatttggagcaatttacagcaatgaggg

SEQ ID NO: 98640 - DNA, 74 bp, Homo sapiens
ttcaagtcaattaccatcctttaccagggaactgaaattaccattcacttttttaagtggacatattcatgaat

SEQ ID NO: 98641 - DNA, 100 bp, Homo sapiens
ctgcagaacgcacaggtgcaccagttggtcctgcagaactggatgctcaaggccctgcccccagccctgcagattcgagaaatgatggagtccttcgaag

SEQ ID NO: 98642 - DNA, 141 bp, Homo sapiens
cggagcagtaggcacccgagcagcgccagcggccgagcgggcggcttcctggcctgggcgctccggtggcggcggagcatttaaatcaaacggtattgagatggattgggttatgaaacataatggtccaaatgacgctag

SEQ ID NO: 98643 - DNA, 50 bp, Homo sapiens
gcaagagagccgtggaattccaggtgctatgggcataaacaacagaggtg

SEQ ID NO: 98644 - DNA, 76 bp, Homo sapiens
ttgggagaaagtttcatctgtggatggagtattgctcgagatgctgctgtgcagaagattgagactattatcaaag

SEQ ID NO: 98645 - DNA, 100 bp, Homo sapiens
tagcaattctgccggcgaagaagcaaagtctggtggataaagtatctcgaagacagagacctgatatgaatatattatttctaaatatgaaagtaagacg

SEQ ID NO: 98646 - DNA, 50 bp, Homo sapiens
gcaattgttgtgacttcactaataaagaaaactttagaaactgttccttt

SEQ ID NO: 98647 - DNA, 97 bp, Homo sapiens
ctggaggtgggcagcaatctgtcaatcaccttgttaaagagtgggctgagggccatgtcagttttctgccacctacaggatagaccatgaagctgaa

SEQ ID NO: 98648 - DNA, 90 bp, Homo sapiens
cctgtatgagctgctgacgcactgtgactccagccagagcccccccacggcagctgctcccaaccccagaacctttgctgtcttgggacg

SEQ ID NO: 98649 - DNA, 75 bp, Homo sapiens
ctttaaatccggagggggaaaaaatcccaaggtctgcaaaggttcatcatgcctagtggcgtataagaagacccc

SEQ ID NO: 98650 - DNA, 75 bp, Homo sapiens
aaaaatgtgaacacagcactaaatacaactcagatttacactgactgggccaaccactacctagcaaaatcaggc

SEQ ID NO: 98651 - DNA, 75 bp, Homo sapiens
gctggccacttgcttgggatcctttatcctggtcatcttctatttccaaaatccacatgaagaccatgcccgccg

SEQ ID NO: 98652 - DNA, 75 bp, Homo sapiens
tctttgatgaagggaagtggagcacccctgagtcctgataaacctgtgagtgtgaaaataagttttgaagatgaa

SEQ ID NO: 98653 - DNA, 100 bp, Homo sapiens
acttccttgaagaaacaagcttacagggaagaaacccttttttcttggagccagcaataattatcacaattactgatgggagcaagttgactaccaccag

SEQ ID NO: 98654 - DNA, 100 bp, Homo sapiens
ccagaatttgccaagaggaatgttaagttgattgccctttcaatagacagtgttgaggaccatcttgcctggagcaagaaatgcatcgtgattcctgtcc

SEQ ID NO: 98655 - DNA, 80 bp, Homo sapiens
cgcggagcccggctcccgcaccatggaggaggacgacagctacgactttgacccctggtggacaaacgactgtgagcaga

SEQ ID NO: 98656 - DNA, 100 bp, Homo sapiens
cacatctttggaacccccatgggtgccgttaatcccctcctctcccaagctgagagcagccacacaggtcccaggtgtgacaccttcagcaggtctcagg

SEQ ID NO: 98657 - DNA, 96 bp, Homo sapiens
cccgagtcagctatcaagttcatggcctatgaacagtgccaggcttcccgtatccagcagccaccgccgcggccgcctaccgaggggcgcacctgc

SEQ ID NO: 98658 - DNA, 105 bp, Homo sapiens
cgactccgagacctccgaaaagcgtttccgcagacagaagtggggagaagcggaggtgagaagccctaccactgcaactgggacggctgcggctggaagtttgcg

SEQ ID NO: 98659 - DNA, 88 bp, Homo sapiens
acgaggctgcggtgtctgctgctattctccgagcttcgcaatgactccgtgggaaggaggcttgtttaaactacggatgcttttcaaa

SEQ ID NO: 98660 - DNA, 101 bp, Homo sapiens
gtgaaaaaataaaactggaagcagattttgaaaccgatgagaagattgtaaaatgtaccgagcaatcccttttccgggcacatacccaaaggaaatgaaat

SEQ ID NO: 98661 - DNA, 75 bp, Homo sapiens
gacagtccaatgtcaacattgcccagcaagtgagacacctatggctgccgatgaaggctcagcagagaaacaggc

SEQ ID NO: 98662 - DNA, 100 bp, Homo sapiens
ttattggacattgtgatacaggaactgtttccagagctcaataagggaactctaatgatccaggacaaagaagttaccctggagtatgtatcaagcctgg

SEQ ID NO: 98663 - DNA, 75 bp, Homo sapiens
cacccacaaacaaactacccattttcttttttggaactcatgagacgcctccccatggccacccatggaccagtc

SEQ ID NO: 98664 - DNA, 75 bp, Homo sapiens
ctgttgaaattgttacttcaacttctgctgattgggagtatgtatttaaaaacagtgaattttcatcaaagcaag

SEQ ID NO: 98665 - DNA, 74 bp, Homo sapiens
gacaaaaggcagaaggagggagaccccaaaaagaggttgcaaattgctttataaacatgacttggcaaaacgct

SEQ ID NO: 98666 - DNA, 96 bp, Homo sapiens
gtggacagcaacatttcccacaggacacgaagtttgtcggcccttgccttggcagagctgagagccagtcttggtgctctgtgttcacctggttca

SEQ ID NO: 98667 - DNA, 126 bp, Homo sapiens
tgcagtttgcaatatgactttggaggaattctcggctggagagcagaagaccgaaagacaatgcagatcttcgtgaagactctgactggtaagaccatcaccctcgaggttgagcccagtgacacc

SEQ ID NO: 98668 - DNA, 80 bp, Homo sapiens
caccatccccagctcagccatgcaggccccaacaggcatagaatgtcaagctaaccaggcgtccgctacttcagaagagt

SEQ ID NO: 98669 - DNA, 75 bp, Homo sapiens
gcgccaccgagtccggaccggagactttggggcctaactaggacccatggatgaaggaccagatcttgatctagg

SEQ ID NO: 98670 - DNA, 74 bp, Homo sapiens
cacatcgtactgatggatttgctgaagcaattcagcagaaagtgaaactcttcactgctcacaacaatatgacc

SEQ ID NO: 98671 - DNA, 95 bp, Homo sapiens
gctgcggcgcacgccttgcccgcccaggaacaagatcactcaaggtgaaggataatctactaataccagcactttgaatgaaaatttgtttctct

SEQ ID NO: 98672 - DNA, 100 bp, Homo sapiens
tcactggtctctttgccgtctcccggtgttggagcgggccggagagaagtagagtgggctgcgaggagaaggaaacaggcctttcggaggctcctcatcc

SEQ ID NO: 98673 - DNA, 91 bp, Homo sapiens
gcctcagttggaagcagccgatccagcctgcggagcctgtggggcagaaggacagaataacgggctcccagattcacaagccccaccaaga

SEQ ID NO: 98674 - DNA, 75 bp, Homo sapiens
gtttgcaatacaaaggcggccacgcgcggcgccgctcggttatatatgccgcaattttacagggtcttctgcttt

SEQ ID NO: 98675 - DNA, 83 bp, Homo sapiens
cctggcgtctagagatgtggtgtctcggtccatgactctggagatccgagaaggaaggtgccagatgtgacatccagatgacc

SEQ ID NO: 98676 - DNA, 97 bp, Homo sapiens
tgagactgtctggggagctctccgaggttctgaagaaggccttccaggccacgctcaggtggctcctgagctcacccaagacccccggctgctctga

SEQ ID NO: 98677 - DNA, 83 bp, Homo sapiens
cctctcatctgccagaatcagaaagaattcatcacactgtatgtgaagttcatttccaatccgccctccatggtggcagcggg

SEQ ID NO: 98678 - DNA, 100 bp, Homo sapiens
ggaaaaaatgcgccacctgctgcatgtcctgaaagtagacttaggctgcacatcggaggaaaactcggatgctgatatgctaactggtgatgagcaagta

SEQ ID NO: 98679 - DNA, 80 bp, Homo sapiens
ggactgagtcctgcaggacacagttggttaccacagagaagcgcttcctcaaagacagtttgtacaatgaaggaatccta

SEQ ID NO: 98680 - DNA, 74 bp, Homo sapiens
cccccattgctgagccagcggagctgcttggaaattgagaggctgactgagcgactagaagaaaaagagaggga

SEQ ID NO: 98681 - DNA, 99 bp, Homo sapiens
gttagcgtcctcaatgtggacgccctgagctcccattaggagccgctggctgcggcagcaggggactagcgtgagagggaggcgcccagatcagcctgg

SEQ ID NO: 98682 - DNA, 75 bp, Homo sapiens
tgtcctgcacaactttttcagtccttcccccaagaccaggcgccagggcgagggccaggagatggcgaggtccgt

SEQ ID NO: 98683 - DNA, 100 bp, Homo sapiens
ttctatgaattgcaggagaacctggagaagctccttcaagacgcccaaactcgtgtaaaattgaatttcttggaccagattgcaaagtactgggagttac

SEQ ID NO: 98684 - DNA, 90 bp, Homo sapiens
ggaaactgctgcccgccgcgggcccggcaggagcacaacaccatggagtctctgttagagcgaggtgagaagctagatgacttggtgtcc

SEQ ID NO: 98685 - DNA, 87 bp, Homo sapiens
cgccattatcgcatctccccgacaaacaccacgagaattccgcagcccacacggaagtactagccggacatcatgagtggctgtcgg

SEQ ID NO: 98686 - DNA, 100 bp, Homo sapiens
cagcagcagagatgataacatgtttcagctgtccgcaggcttgtccaaaaggaaacatcggaatgaccacttaacatctacaacttccagccctggggtt

SEQ ID NO: 98687 - DNA, 100 bp, Homo sapiens
cgctgtctgggatgttggcagccacttcaaaatcagacctctgtggcagcattttttccagaacacaaaaggttctgtacagagtaatgagatgtgtgac

SEQ ID NO: 98688 - DNA, 97 bp, Homo sapiens
gttaaagctggtctgttctaactgagattggtggaacgagaatgcctacacgcagccacaggaatccagtttccatggaaaccaaaagcagttgctt

SEQ ID NO: 98689 - DNA, 75 bp, Homo sapiens
cacagatgggtctgtcagatctggttcaggcacagatggatcagatataatgaagatctggaacttgaagatgcc

SEQ ID NO: 98690 - DNA, 90 bp, Homo sapiens
ggtgccgtggcgagggccacaagccgtctattgcccacaggatctgcagaaaaggctgtcttggaacaatttggattccctttaactgga

SEQ ID NO: 98691 - DNA, 82 bp, Homo sapiens
gcttggtttcgggatctcggtgctgcagacggcgagacctcctgcacaggtccagccctgctgggagttttctgccacacag

SEQ ID NO: 98692 - DNA, 75 bp, Homo sapiens
gccgcagttcatcttcctccctgtgtactttccatttgccttcctgggtatatgagtagaccagtgatgagtggc

SEQ ID NO: 98693 - DNA, 59 bp, Homo sapiens
taattactattcgtctgagagaatggctggaggactgacaaatggtagtggtcgatata

SEQ ID NO: 98694 - DNA, 100 bp, Homo sapiens
ctgcattccagtccatgatgacaggaggtgaaatccgggtccccggccgtgctggcattcgcaaaggagaagtcttttgggtggcccagcttcatcacat

SEQ ID NO: 98695 - DNA, 74 bp, Homo sapiens
cacggagtctacggggatgctgttgaggaaatggactggagtgtgggggcggagaaactcatcatccacctgcg

SEQ ID NO: 98696 - DNA, 89 bp, Homo sapiens
taataggactgcccatccactgagacataaggaccattcttagtggcactggggaaatcttggcacccagaagaattcaactgcgctca

SEQ ID NO: 98697 - DNA, 95 bp, Homo sapiens
gtgacatgttgataaaaaatgatgtatggtttgaagtggtgaacatggatttttctcggcttcacatgtacagtcctccccagtgtgtgccggag

SEQ ID NO: 98698 - DNA, 82 bp, Homo sapiens
catgtgtctcttctaagctgaataaagctgttttggaactgtcaggtacctcaaagcagaatgtaactggtcactacatttc

SEQ ID NO: 98699 - DNA, 100 bp, Homo sapiens
tatttcctgtacctgaagtgtagcgaaaatgctactatgactcttcctggaatacacccacctaccttgaaccagttaagtgggcagaccaacatccacc

SEQ ID NO: 98700 - DNA, 74 bp, Homo sapiens
tcaggttcacgccaacagtacctcattgctctttggcgactcttattgctgctgggcatgctgtgtgcttgcat

SEQ ID NO: 98701 - DNA, 101 bp, Homo sapiens
gggggacggtaggagcctccgtgcggagaccactgttcaaggccacagtatgttcatgcggatgctcctaccaataaaacactggctgggctggtggtgca

SEQ ID NO: 98702 - DNA, 83 bp, Homo sapiens
ctctctcatctcgctcggctgcgggaaatcgggctgaagcgactgagtccgcgatggaggatattagaaatggctactcccca

SEQ ID NO: 98703 - DNA, 82 bp, Homo sapiens
ctgggcgcggattcgccgaggcaccgaggcactcagaggaggtattagaaaactactcggatgctccaatgacaccaaaaca

SEQ ID NO: 98704 - DNA, 98 bp, Homo sapiens
tctcctccaccggagtgggattccgttccagttcacaaacctggcagctcgcgttccttcacctcgggcagaataactttgcagaagcccacaggttc

SEQ ID NO: 98705 - DNA, 75 bp, Homo sapiens
ctttgaaagatttcttctgtatgaccagacaaaagaaattggccagtttcagaaaatagttggtggtttaattga

SEQ ID NO: 98706 - DNA, 100 bp, Homo sapiens
acgatgaccagtgtggttaagacagtgtatagcctgcagcccccctctgcgctgagcggcggccagccggcagagccatcctcctcaaggtgcgagacat

SEQ ID NO: 98707 - DNA, 90 bp, Homo sapiens
cacaaatgaagctttatgtaaggctttacagagcaaatttttcagaacataaaacaagaatatagtcgttatcagaggtggagacattta

SEQ ID NO: 98708 - DNA, 100 bp, Homo sapiens
ggagctgtgccgcccgcgccccggggcagcagcgcgtcccaggaggagcaggacgaggagatcactattatcttcaaagcccaccatgagtgtacagatc

SEQ ID NO: 98709 - DNA, 88 bp, Homo sapiens
tggccacctacagaaacaaaatgtcaacaaattgatggacttcagtattgatgctcctccatcctttaagccagctaagaagtattct

SEQ ID NO: 98710 - DNA, 100 bp, Homo sapiens
ggaaccatcatatgcaccagcacgcctggctaagtgacggtcctggtcatgtgccacacgagggagctggccttccagatcagcaaggaatatgagcgct

SEQ ID NO: 98711 - DNA, 75 bp, Homo sapiens
gcatttttatggacaacgaccacaggaatctggaattttattaaacatggctgaaaactgttctggccaagcgaa

SEQ ID NO: 98712 - DNA, 101 bp, Homo sapiens
cagagagactccttcaaggctggaggctcagcaagtgccatgctacagcccctgcttgacaaccagcttaataccaaaacatccccagcaaccaaccaggc

SEQ ID NO: 98713 - DNA, 100 bp, Homo sapiens
caggctccttcctactgtccgagggccaccaggccgccgggggcctgctgcgcccggttgccaccttccagagaagaggtacgagatgacaagacaacca

SEQ ID NO: 98714 - DNA, 97 bp, Homo sapiens
attgatggcgagaaggagcacgccaatgccaagaagatcctgctggagatgggggagttctttcagattcaggccctggccaacgtcaacattggga

SEQ ID NO: 98715 - DNA, 101 bp, Homo sapiens
tgaaggcggaggctccatgttgtcccctcagcgagtggcagcagctgcctcaagaggagcaggtcagagatgtcatcatcgctgcaagcgttgcaggaatg

SEQ ID NO: 98716 - DNA, 75 bp, Homo sapiens
agaaaaggcttttccagtttgcataatttcaaaaggtgatgacctatcaacagccattctcaaacagaagaaccg

SEQ ID NO: 98717 - DNA, 75 bp, Homo sapiens
accgagagcgcgaatatcgtcatcgttagaagacgccttctggcaagaggggagagcctctggaacagtgtacag

SEQ ID NO: 98718 - DNA, 100 bp, Homo sapiens
catcttcttgatgacaggaagctggaactcctagtacagaatctggcagcagaaaagacctacaacaacctagatgtatctgtgactaaagccttgcaac

SEQ ID NO: 98719 - DNA, 106 bp, Homo sapiens
gatgactccgctgaggtggacgtgtacaacccgacgaggaacgaatgggacaagatcccgtccatgaatcaggttgtggaaaggaggagaacccctgctgaaattc

SEQ ID NO: 98720 - DNA, 95 bp, Homo sapiens
caacacttctgtggggccagtgtccaacctttgctcattgggagccaaagatctgctccatgttgcagagtgggcaggatcttaagacccgatag

SEQ ID NO: 98721 - DNA, 100 bp, Homo sapiens
caggatggaggaagactcgatccgcctgcctgcgcacctgcgaaacccagcgtttgctggcagaaccagttcctggcatcaaagccgaaccagatgagag

SEQ ID NO: 98722 - DNA, 75 bp, Homo sapiens
tttattacagcattcaacctggcacactgttatctggaagaggctccagggaccatagagtttgtggctgaccct

SEQ ID NO: 98723 - DNA, 76 bp, Homo sapiens
ctctagtggcggaagccttcgtctcccagattgcaggaaagtggagaatgaggacatgaataaagaccagatcttg

SEQ ID NO: 98724 - DNA, 98 bp, Homo sapiens
ttgaggctcgcgagcctccttcgccgcgccccacttgctcgtgcactttacacacatgaggtgcctggagatttgagtcaaacgtccgaagaccagag

SEQ ID NO: 98725 - DNA, 98 bp, Homo sapiens
ccgctgctgcccgcccgctgcctgcctgcctggcatctctctctcccggagtggaagctggacacactatgtgacttgtatgaaaccctgaccatcac

SEQ ID NO: 98726 - DNA, 100 bp, Homo sapiens
ccgggatcgtgaccgagaccgtgaccgagagcgtgaccgagagcgcgaatatcgtcatcgttagaagaacattactactggatggaaatccattccgagt

SEQ ID NO: 98727 - DNA, 96 bp, Homo sapiens
ctgcaccaggatgctgtagacctctttcgtaatgcaggctatgctgtgtctctgagagtgcagcacagggtggtctatgttgcccgaaacccaaag

SEQ ID NO: 98728 - DNA, 100 bp, Homo sapiens
atgaattcgtttgtgaacgacattttcgagcgcatcgcagaatccagggcctgaaaacccagaatgaacttgtgtccatcccagagatcactgcagatgt

SEQ ID NO: 98729 - DNA, 101 bp, Homo sapiens
gcagccgaaggccaaggaatcactgaagatcggcgagggaggacagggggttcatcatgggaccctgctgcaggaagactatgggttcttccgcgccatca

SEQ ID NO: 98730 - DNA, 82 bp, Homo sapiens
acgacggcaggaattattggaggccaggtttactggagtaggtgttagtaaggcttttatcttgagaacatggtgtctggag

SEQ ID NO: 98731 - DNA, 100 bp, Homo sapiens
ctgggccaactccagcacgggctgcgggacagcttcgcagaatcaagaacggctatgtgcgtttaaagatccgtatcagcaagaccttgggataggtgag

SEQ ID NO: 98732 - DNA, 82 bp, Homo sapiens
ccgggcgggagcccctcggccaggagctcttgtccctggcaaagcgaaagcgcagtgactctgaggagaaggagccgcctgt

SEQ ID NO: 98733 - DNA, 74 bp, Homo sapiens
gacattaatgctgataagaatatctcttctgcacagattgttggatctagtttgaagcactaagaagaataaga

SEQ ID NO: 98734 - DNA, 100 bp, Homo sapiens
ttcaaagtcgaatatcatgctggtggctctacccagaattcaattaaagtggctcagctatatgttctcctttcagccaagacctttcaccagtgcaggg

SEQ ID NO: 98735 - DNA, 100 bp, Homo sapiens
ccgcccccgccgccacccggcccggctgtggctgaggagccgctgcaccgaccgagctgtacttcagcaccgtggacactttccagaagttcgtggatgc

SEQ ID NO: 98736 - DNA, 116 bp, Homo sapiens
gttcacgaaagcctacaaaagtgtggagaggttccttcaggaggatcaggttcgagaacttgtcttggacaattgcaaatcaaatgatggaaaaattgagggcttaacagctgaat

SEQ ID NO: 98737 - DNA, 100 bp, Homo sapiens
gaagaagccaatgatgtatggaaagcagcagagtttctacaaatgctagaagctatcaaagcccttgaagtcaggaaaatgtttataggaggccttagct

SEQ ID NO: 98738 - DNA, 83 bp, Homo sapiens
gaatgcatcagtgcccttgtggcgaatggggctcacgtcgagttcccagtctaagtgggtgactttccaagatagaggcagat

SEQ ID NO: 98739 - DNA, 100 bp, Homo sapiens
taagcgaaagtctgggctgaaggcctcatgcattgtgcgtcagcagcaatgtttatggtgaaaaatggcaacgggaccgcgtgcataatggccaacttct

SEQ ID NO: 98740 - DNA, 100 bp, Homo sapiens
gttggcccagaaaaccccagcaggatctgcatcgtcatcgagccggcccagcttctgaagggagatgtcatgatgctgaagaataccagcctcctatatg

SEQ ID NO: 98741 - DNA, 50 bp, Homo sapiens
tttgaatgcatcagaaccatgcacgggtcatgaaactagtgccttgttaa

SEQ ID NO: 98742 - DNA, 100 bp, Homo sapiens
ctagacctgaatgggcttgaccatctcacaactgctcgcgtgacgaccgcattcgtggcagtccgatacatacttctgcatgtctatgcgaataccagtg

SEQ ID NO: 98743 - DNA, 90 bp, Homo sapiens
gggctagctacacacacgccctcacgcccggcgagcccgcgaggctctgtgtgctccgggatggagcaggtgtgcagagggtgagaaccc

SEQ ID NO: 98744 - DNA, 100 bp, Homo sapiens
accgggcactgtacccctttgaatccagaagccatgatgaaatcactatccagccaggagacatagtcatggaaaatgtttataggaggccttagctggg

SEQ ID NO: 98745 - DNA, 83 bp, Homo sapiens
cgggcgcatccctgccccggcgccgtccgtgcccgcgggacctgacagccgggtcagaggtgtaccttccggtttcccagcac

SEQ ID NO: 98746 - DNA, 82 bp, Homo sapiens
cttctcctgagtttttcaagtctgccctgcaagcgataggagtggaagcccaccagacaatgcagatcttcgtgaagactct

SEQ ID NO: 98747 - DNA, 75 bp, Homo sapiens
gggaccccagcttttcagaactgcagggaaacagccatcatgaggtgcactttacaggtccccgatgaaccaaga

SEQ ID NO: 98748 - DNA, 100 bp, Homo sapiens
gagcaggactattttggtttacagttggctgatgattccacagataacccaggtgtgtttgaccatcgaatgaagtgctggcagaaatgggaagatgctc

SEQ ID NO: 98749 - DNA, 75 bp, Homo sapiens
gtttgattctacaaaagaaaccaaacatcagaaatacatccagcatggctggagaactgataaatttcaaacgga

SEQ ID NO: 98750 - DNA, 75 bp, Homo sapiens
ctgatgatcacgcagctggctggcttcagtggaccaggatgaccctgaaaatgataacagtgaattacccaccgc

SEQ ID NO: 98751 - DNA, 87 bp, Homo sapiens
gaaagtgataaaacctgtttcaaattgggaagtgcacttcttattagagacactataccctcaaactgacacaagacctacagagaa

SEQ ID NO: 98752 - DNA, 100 bp, Homo sapiens
tgtggaaagaatgaaggaaaaacaagacaaaatctacttcatggctgggtccagcagaaaagagctaaccagttaccagctggcttaataaccacagacg

SEQ ID NO: 98753 - DNA, 74 bp, Homo sapiens
cagagtggagccatggctagagctcaccagaacaagctagaagaaatgatcaatgagctagcagtggcgatgac

SEQ ID NO: 98754 - DNA, 50 bp, Homo sapiens
ccgacatggaacagggactcactgggggtcaagagaaaggattccagagg

SEQ ID NO: 98755 - DNA, 100 bp, Homo sapiens
cagggacctgcccgcctgcggctgctccgggccctccctatcctgaagacattagctgagagtctggcaccttttaaaggtctgatcatcaattgtctct

SEQ ID NO: 98756 - DNA, 98 bp, Homo sapiens
ggagatgaagccctggagttttatgccaagcacacggcgcagatagagcacttgcacctcctgcgccgccgccccccatccaaggatatgccttcaag

SEQ ID NO: 98757 - DNA, 98 bp, Homo sapiens
gacctacccactacaatacctcttgggactgggctcgatttgaggagctctgtgtgtcgtctgagcagtcgcgagaagatttccctccaggacttgtc

SEQ ID NO: 98758 - DNA, 75 bp, Homo sapiens
acgcctctgtgtttgaaacaaacattcgaggttatcaatactctggctgaccatcatcatcgtgggactgacttt

SEQ ID NO: 98759 - DNA, 83 bp, Homo sapiens
ctagcagacacggtggctactctgcctcggggacgaaagcaggcttgacacaactctcatagactttactgacatgaagtgcc

SEQ ID NO: 98760 - DNA, 50 bp, Homo sapiens
gaaatcctgataagaactgctttggagtaactattcccagtcagaggcgc

SEQ ID NO: 98761 - DNA, 75 bp, Homo sapiens
cagcttcaagcttaggaccacccaccatgcctatccagaaaaagcttgtggtgaaggggggcaaaaaaaagaagc

SEQ ID NO: 98762 - DNA, 97 bp, Homo sapiens
atttcatttctgtcctgctgatgaagtctacgttcattcagggcctgctgtggaagaccagccccaaaggtttttcgttggaatatacgttgcacat

SEQ ID NO: 98763 - DNA, 97 bp, Homo sapiens
tgcctgacagactaagagcaaagctacttccattccagaaagatggcatcatttttgccctcaaaagaaatggcagctggatgaaaaagaaagtcgg

SEQ ID NO: 98764 - DNA, 101 bp, Homo sapiens
gggagccgccgcagccgccggcgctgtggagcaacccttctgtggggctcaattttggaaatcttggaagtacttcaactccagcaactacatctgctcct

SEQ ID NO: 98765 - DNA, 75 bp, Homo sapiens
ggatcctccggggacctgatgggctgagtcgagagaagcagctagagctgctggatttaatgttttgcgattaat

SEQ ID NO: 98766 - DNA, 51 bp, Homo sapiens
ttgaatacaattcttcctgacgccagaggtcaaaatgcagatcttcgtgaa

SEQ ID NO: 98767 - DNA, 50 bp, Homo sapiens
cacgaccacccagaacctcaccaggttgaagaagcctcagcggaggcgat

SEQ ID NO: 98768 - DNA, 100 bp, Homo sapiens
cctcccaagtaactgggattacagaaatcgagctatagcagattatcttcgttcaaatggctatgaagaggcatattcagtttttaaaaaggaagctgaa

SEQ ID NO: 98769 - DNA, 51 bp, Homo sapiens
aatccttaaaagagtcttaacggagcttgtggaaacacttccgtgctgtaa

SEQ ID NO: 98770 - DNA, 75 bp, Homo sapiens
gcctggctgagctggagctggagctgtcggaagatctttaatctcatgaagtacgacagctacagccgcttctta

SEQ ID NO: 98771 - DNA, 100 bp, Homo sapiens
ggcagcaggtggtggggccatgggcggcgactggcggcgcgatggacctgaccgggctcctgctggacgaagaaggcaccttctccctcgccggcttcca

SEQ ID NO: 98772 - DNA, 75 bp, Homo sapiens
gtgagagccacatcaacccacctcacagcacttcattatgcagctaaggtctccttgaagaaaatgatattttca

SEQ ID NO: 98773 - DNA, 75 bp, Homo sapiens
ctcagaaagatggatttttgcatgagacgcttctggacagtgccatctccctcttctacgagctctcggagaatg

SEQ ID NO: 98774 - DNA, 100 bp, Homo sapiens
cgaggcgccctagacatcttctccctcccttgcctcagctaaaccaggtggacaggtgaaatgtcagtatatctctgctgtggataaagttatatttgtg

SEQ ID NO: 98775 - DNA, 51 bp, Homo sapiens
ggatgaccaggaatgggaaagccccagttctaggcctgattcttcactacc

SEQ ID NO: 98776 - DNA, 105 bp, Homo sapiens
ggccgagtagccacagcggcagctccagcccggcccggcagcgacatggaagatggcaggatggtggctggcaaagtgttgatggcaaagcaagaaattgttgaa

SEQ ID NO: 98777 - DNA, 87 bp, Homo sapiens
acccacgacgaggcggtgcaggcgttgaagcgcgcgggcaaggaagtgctgctggaagaaggacagaataacgggctcccagattca

SEQ ID NO: 98778 - DNA, 98 bp, Homo sapiens
tcgtacctgcggctaagagcagcattgcagtgtcgagatggctatgaaccctgtgtaaatgaaggaatgtgtgttacctaccacaatggcacaggata

SEQ ID NO: 98779 - DNA, 100 bp, Homo sapiens
gatccccccgcctcagcctcaatcctcactatggatgggctcattgaggacattaagcatcggcggtattatgagaagccatgccgccggcgacagaggg

SEQ ID NO: 98780 - DNA, 91 bp, Homo sapiens
gaaacacaaagccggctacgcgctgcgagtgggccccatgctgattgagtttaacatgcctgtggacctggagctcgtggcaaagcagaac

SEQ ID NO: 98781 - DNA, 83 bp, Homo sapiens
tgtggcaatggaacaggcttgagaaacaggtcaaatgaagcgcaacagaggggaagaaatagattttgagacacctgggtcca

SEQ ID NO: 98782 - DNA, 96 bp, Homo sapiens
aggagatcgaccggttccaggtgcccaccgcgcactcggagatgcagccgctgacccgtgaccaaggtgtagactaagaagtggagtcatgcttca

SEQ ID NO: 98783 - DNA, 112 bp, Homo sapiens
ctgacacaaacttcaggaaaggattttgcacttgtgcagaccgggcgagcagagtaagaagcagattcaaactcagatgactttgaccctgcttccaccaagagcaagtatg

SEQ ID NO: 98784 - DNA, 100 bp, Homo sapiens
agaaagcaaggaacctggtgttgaagatacggaatggtcaaacacacagacagaggaggccatacagacccaccccaccaacaactgaacgctttggtca

SEQ ID NO: 98785 - DNA, 51 bp, Homo sapiens
catcaacatctccaacagagaagtgccaggatggatgagggagatgctgca

SEQ ID NO: 98786 - DNA, 74 bp, Homo sapiens
aaagccctcgtcagaaggaattatgggaaacgcagaggcagaaaccagcaacagccaactcagtttataaatcc

SEQ ID NO: 98787 - DNA, 100 bp, Homo sapiens
agtacccgtccatcatagtcaactgcgtggaagagaaggccactaatgtgtccgccaccttgaccttcaataccagcaagatcactgggttcctgaagcc

SEQ ID NO: 98788 - DNA, 75 bp, Homo sapiens
cggacgacccaagcccgctgagcaggatgagggactcgctcagcagcagcctgaaaacttgctacaagtatctca

SEQ ID NO: 98789 - DNA, 100 bp, Homo sapiens
ctgaattttgcagctgcagaatgtgtagtaccttaaaaggcttcttctcatatcggtaattccactcaggccactgtgagggatgcagttgttggaagac

SEQ ID NO: 98790 - DNA, 75 bp, Homo sapiens
gacgcgggcgagctgcggctcggacgccagcggacacgcgggcgaggcgaggccttcttgggcagctttgtggcc

SEQ ID NO: 98791 - DNA, 111 bp, Homo sapiens
tttggaaatattttacagatctttttgactatcttcctctcactgccttggtggatgggcagatgccttcaattaagttgcagagttctgatggagagatatttgaagttg

SEQ ID NO: 98792 - DNA, 100 bp, Homo sapiens
agtcggccccacgggagaaaaaggtagtaaacctattgatggcaattttgctgactgtggaagtgactcatccaaactccatgccagctgtcaacattca

SEQ ID NO: 98793 - DNA, 74 bp, Homo sapiens
tacaagaaacagttctctcaatacataaagaacagcgtaactccagacatgacctacctggtggttctgtgcct

SEQ ID NO: 98794 - DNA, 92 bp, Homo sapiens
cgggatcgacgcggacagcgggctggagcctgacgagctggcggatgtgaagttcatttccaatccgccctccatggtggcagcggggagcg

SEQ ID NO: 98795 - DNA, 83 bp, Homo sapiens
tggactacgcgacctccaaggatgcccgtgagcctgttgtcggggccaggtacgaggaacagcaaattcaggaaaaagtggcg

SEQ ID NO: 98796 - DNA, 74 bp, Homo sapiens
gggaaaggagaaacaccagacactggaagtctcactgtctcgagtactatgcgcctgcaggacctacctcagcc

SEQ ID NO: 98797 - DNA, 100 bp, Homo sapiens
agtcatcgcggatttgcaccccgtggggtggtgcacacagaacaacaaggtgttgatgccgccggacgacccaacatgagtgaagtttcctgcaagaaac

SEQ ID NO: 98798 - DNA, 96 bp, Homo sapiens
tgtgaaccctggcgaccactgcttctccgtgggcagcattggcgaccagcgcttcacggtcagaagccaatgacctggccctgaggctggctcgcc

SEQ ID NO: 98799 - DNA, 83 bp, Homo sapiens
ccagcatgaagaccccggcggacacagtgttcagcctgcaggacctctgctgccgggccatcgtctcctgcacccccgtgcac

SEQ ID NO: 98800 - DNA, 83 bp, Homo sapiens
cagaagtccagagctgaggactgcctgtttgcaggttgctccttgagggcaggacagttcttatggctttatccgttgcgtaa

SEQ ID NO: 98801 - DNA, 98 bp, Homo sapiens
gtttgaacaaactcgaagaacagctgtggaaagaagttgcaaaacactgggtatggctttcccaacgaaaggctaagaattcaagaacggtcttaact

SEQ ID NO: 98802 - DNA, 133 bp, Homo sapiens
gaacattttcttgaaaatctggataaatcccgaaaaggagaacttcttaagaagagtgtggctgcatttcctttggaaagtgctgaccctgccggggtggctcccacaactgccaaaggtacctcaacttata

SEQ ID NO: 98803 - DNA, 100 bp, Homo sapiens
ggctcgctggagctgcccggggcggtccctggctgcgtgcacagcgccttgttccagcagggcctgatccagacgcccttgcacttggcagtgatcacta

SEQ ID NO: 98804 - DNA, 100 bp, Homo sapiens
atagactttcgacattggagtgcttcattaccacgagataggcaatacgaaagccaaaattgcctggaaaagagcagtgagaggagtccgggagatgtgt

SEQ ID NO: 98805 - DNA, 89 bp, Homo sapiens
cagccttactatttgaaacatccctcacattgaaatatgttttctgagtttaaccagtaatgccattcagttgccaatctcaagcaaag

SEQ ID NO: 98806 - DNA, 106 bp, Homo sapiens
caatatctgtcttcggtggactccttcggcagtccacccaccgccgccgcctcccaggttttttattggcacctcagtctcaacattttcttttcggattcatgag

SEQ ID NO: 98807 - DNA, 95 bp, Homo sapiens
tgaaatgactgttactcacatatttacttcagatggtctgcatgctgaggttttggttatgaacaggattcggattcacgtcttgccaaccaatc

SEQ ID NO: 98808 - DNA, 75 bp, Homo sapiens
aggaggatcactcgagcccagaagatcaagactagtgtgagcaacaaagcatcacgttgggtggtttccatttag

SEQ ID NO: 98809 - DNA, 98 bp, Homo sapiens
cagtttacacatctcacccaattcagaccatcatcaaagaggggatgctgaccaaacagaacaattcattccagcgatcaaaaaggagatactttaag

SEQ ID NO: 98810 - DNA, 100 bp, Homo sapiens
tgccatccctgtgtgacagcaatgaggtgaacccaggggccgaagcccacccagggagttgatgggggaaggttcctcctcattcttgtcggaaacttgc

SEQ ID NO: 98811 - DNA, 50 bp, Homo sapiens
ggaattaagaaattactgcagcaggcatgtggagaccccaaggcaaaacc

SEQ ID NO: 98812 - DNA, 100 bp, Homo sapiens
actacaaagcagccagtatgcattgtcaggagctgatggccacagtttgaggtggtatcaacatcctacagaagaagaattaagaattcttgcagggaaa

SEQ ID NO: 98813 - DNA, 96 bp, Homo sapiens
cgggcagtcagagcatcgggagcaacgtcacgctcatcaccctgaactcggaagggggcagtacccaaaggaaacgctacgaaagaatacatggag

SEQ ID NO: 98814 - DNA, 83 bp, Homo sapiens
gttgcaacggagataaattcccggaaccgcgattcggcgtgtcagtgtggacaacagtgagtatatgcggaatggagacttct

SEQ ID NO: 98815 - DNA, 75 bp, Homo sapiens
cgacggccacaggggcggcgacggcgcagtgcgaagcgaaacagttgcccagcaggaggctgaaatgttcaaacg

SEQ ID NO: 98816 - DNA, 100 bp, Homo sapiens
gtcggtgttgagcacggcgagcagtctcaggcctttagtgatgatggttgcctaagtactcttgccagttcattgagatgtgtctgatggtgacagctga

SEQ ID NO: 98817 - DNA, 100 bp, Homo sapiens
ggcttcaatatcttcacccagcatgatgccttcaattaagttgcagagttctgatggagagatatttgaagttgatgtggaaattgccaaacaatctgtg

SEQ ID NO: 98818 - DNA, 75 bp, Homo sapiens
gacatgagatggtagccaaacccccaggctggactctgtgaagctgagcaggagcagatgcggaagatcctctac

SEQ ID NO: 98819 - DNA, 100 bp, Homo sapiens
tggaggaagaggcattgaggactttccttacctgtttttccagctcacccactgccagcagaggcatttgcaagtaaaatcactggcatgttgttggaat

SEQ ID NO: 98820 - DNA, 99 bp, Homo sapiens
caacttcggctggaaggaggcggaagccgacaagctgtccatttggtacgacgttggagggatcatagatattgatgatgttaagaagttcaaaccggg

SEQ ID NO: 98821 - DNA, 100 bp, Homo sapiens
tgccccggcatctcagacaagctgatggtgcacctggtggagcgagtgcagagatcacccggaagttcaggctgaattctgaaggcaaacttgagcagac

SEQ ID NO: 98822 - DNA, 83 bp, Homo sapiens
atccgcgtctgcctttttcccccaagagacccagaatcctggcagccggtttcaaagctgttataaatactgcaacaactgta

SEQ ID NO: 98823 - DNA, 90 bp, Homo sapiens
gctcaatcctgccggttgcgccttcttcctggacatgaccaactggggttgtagaaggtgatttagctgccatagaagcatacaagtcat

SEQ ID NO: 98824 - DNA, 100 bp, Homo sapiens
ggtggcatggcgctcctgctcctccaggcgctgcccagccccttgtcagccagggctgaacccccgcagcttggtgctaacagtggtttgcacatcatca

SEQ ID NO: 98825 - DNA, 75 bp, Homo sapiens
cctcactgatatgatcatctatcagggagaaggtgagcagtattgatttggagatcgactctctgtcctcactgc

SEQ ID NO: 98826 - DNA, 101 bp, Homo sapiens
ctggacaggactgacgaatcttctggatgtccctggattgaaatttctctatgaatcatcatcaagaactctgggagaacttttgaattcataaccaagcc

SEQ ID NO: 98827 - DNA, 76 bp, Homo sapiens
ttgtttaatccacataacaaccctattagacagatggagttttaacattgaatgcggagaacactaattatgccta

SEQ ID NO: 98828 - DNA, 100 bp, Homo sapiens
tatctccacatcccagcttctcataataaatactacatgctggttgctcgtggattgttgggaattggagcagtgagagggtccaagcctggtaagaatg

SEQ ID NO: 98829 - DNA, 101 bp, Homo sapiens
gggacgtggcccccatggggcgggaaggcgtgaccgccatgcacaagctctttgactgggccaataccagccggcgcgggaatcagagatcattgatttct

SEQ ID NO: 98830 - DNA, 90 bp, Homo sapiens
tttctttggagacaaaactatgccagaatgtcggattgcacatcctattgtaaaatgtacttactgcagatcagaatttcaacaagagag

SEQ ID NO: 98831 - DNA, 74 bp, Homo sapiens
cgaggaggcttgtatgggctctcatctcagagtacaatgtggtgaagaaatggcttgaggtggagattgcccca

SEQ ID NO: 98832 - DNA, 82 bp, Homo sapiens
tgatgctttcaaacagtgtcaatacaaagatactctccccaagcctttaaagtatctagcatagattcttcagaacagaaaa

SEQ ID NO: 98833 - DNA, 82 bp, Homo sapiens
tccgcgcgcaccccaacacccccaccagctgggcctcgggaattcggttccctcaaaattataaaggcaggaaagctcaaga

SEQ ID NO: 98834 - DNA, 75 bp, Homo sapiens
aagacttcctcactagtctggtggccatcagcaagcccaggtctatgcgtatagcttctggcctgggcttggcct

SEQ ID NO: 98835 - DNA, 75 bp, Homo sapiens
gccccctaaagcggaaccggatcaccgagggcatttacggcaggctgctctttggcgtaaattgcaatcgattag

SEQ ID NO: 98836 - DNA, 101 bp, Homo sapiens
gtacaccaatggaaagtgcgtcatcctaaggaacatcgacgtttttcgttggaatatacgttgcacatttatggcgattctgagtgtgagggcagacttct

SEQ ID NO: 98837 - DNA, 98 bp, Homo sapiens
gtttattggcacagagaaggaagcacccaacagttacaaactacttctccaaaggcatatttatcactactatattcatggcccaaaaggaaatgaaa

SEQ ID NO: 98838 - DNA, 101 bp, Homo sapiens
atcagacaggtctcctggagatgaaatgctgtcccaaccttactgggaattaagtagactggctggacagattcgaaggttgtatggttcaaacaaaaaag

SEQ ID NO: 98839 - DNA, 74 bp, Homo sapiens
cggagctgttgctggacccctggcagggaagtttgtttgcctgaatgacaacattgaccacaatcataaagatg

SEQ ID NO: 98840 - DNA, 90 bp, Homo sapiens
ttcacaaagataatagaagccatgggattcacgggacctttgaaatacagtaaatggtcaccatccaggggagactccacctctcatcac

SEQ ID NO: 98841 - DNA, 100 bp, Homo sapiens
ttgctgagaatgcagccgtgtgacagtaactgaacattggtctaaagtctttccaaaaggtcaaggttcacaagatggagttttaacattgaatgcggag

SEQ ID NO: 98842 - DNA, 100 bp, Homo sapiens
ctgggttgaaccgtcccggcccagctcccctgagctccaggaagcacgttctctacgtggagcacaggttcggagtgttcagtggacacacgcttggcag

SEQ ID NO: 98843 - DNA, 74 bp, Homo sapiens
ccaaagtggacgctgccaacagggtcttcaataaactcatcaggagatataagtatttggagaaggcatttgaa

SEQ ID NO: 98844 - DNA, 100 bp, Homo sapiens
acagagattcctgtaccgtgatgtgatgctggagaactttgcacttgtggctacactaggtgtctgacaacaaagcatccctgccgcccaagccggggac

SEQ ID NO: 98845 - DNA, 97 bp, Homo sapiens
tgactcagcttgaattggtcatggaaggcttttctgagggagagaagtctacactgagatctaaagatggatcctgagcttgaaaaaaaactgaaag

SEQ ID NO: 98846 - DNA, 100 bp, Homo sapiens
cctgggcactggaggctgaagaggaaaatgccatggacaatattaccaggcagaaccaattctacgatacccaagtcatcaaacaagaaaacgagtcagg

SEQ ID NO: 98847 - DNA, 90 bp, Homo sapiens
gtgaacaacgatggcattttgaaaacagcaaagttccccctgcagtggtttggagtccctgccattctgaaaggctggtttgagcgagtg

SEQ ID NO: 98848 - DNA, 100 bp, Homo sapiens
caaagatacagtgattatagtcccaccaagaaaacacattgtggagcgctatacagagttttatcatgtacccactcacagtgatgccagcaagaagaga

SEQ ID NO: 98849 - DNA, 98 bp, Homo sapiens
ttccacaaggatcccgatgtgaacatgctgcacgtgtttgttctgggcgaatggcagcccatcgaggacccagagttcaacaatacagatcagattga

SEQ ID NO: 98850 - DNA, 75 bp, Homo sapiens
gtcgggttattcgagtgaccgagaccgcggccgggaccgagggactggaatgtcacgtggaataccagcaacccc

SEQ ID NO: 98851 - DNA, 76 bp, Homo sapiens
ctattagacatcatgccagggctggaaactgctgtcgtctttcaagaaaaggcttggaaagagacaagtttgacaa

SEQ ID NO: 98852 - DNA, 50 bp, Homo sapiens
aaaaaacccaaaacctcaggctcccagagttcacatgagactctgaatat

SEQ ID NO: 98853 - DNA, 90 bp, Homo sapiens
tcgtggtgactggcctgaccctggtgtgcagctcggccccgggccccctggagctggacctgacgggaccacggaggggtgatcgtgaac

SEQ ID NO: 98854 - DNA, 50 bp, Homo sapiens
caacacttttggaacttagacgctatttttgaaatcatgaatcctgttta

SEQ ID NO: 98855 - DNA, 90 bp, Homo sapiens
gggaagtctataagctttgcaacagaattacagagtatgatgaggaggtgcgccagtctgtaactcctgccgagccagtccagtactatt

SEQ ID NO: 98856 - DNA, 90 bp, Homo sapiens
ccttctgaggacttggatcctgccgatcccccgatctcgggattgtcaatgaggcagatcagattccgatttgacgggcaaccaatcaat

SEQ ID NO: 98857 - DNA, 74 bp, Homo sapiens
gagctagtggaggaaactgtgcaggctatggaggtttgaagatgccgcatttggattggatgaattccaaattc

SEQ ID NO: 98858 - DNA, 100 bp, Homo sapiens
atgatgaggttactgaggggactgtgacacagatacaggtacttcttgcaagggatatgcattagcacatactcaagaaggggaagaaaagaagcaaact

SEQ ID NO: 98859 - DNA, 80 bp, Homo sapiens
ttttataccacttccaagctaggcactgggaaccgcatgtatcacaccaaagaacaatgcagatcttcgtgaagactctg

SEQ ID NO: 98860 - DNA, 85 bp, Homo sapiens
gacactgagggtcttgtaaagagtctgccttctggatctcaccagatccatttgaaccacagcgacgtctccccgcgaagaaaag

SEQ ID NO: 98861 - DNA, 100 bp, Homo sapiens
gaaggaatcattgctcgtgggaacgcttattcaacggcaaaagtggtgatcgccgctcgggaatgcgggcgtgaagggtccgagttgccgcccagcgggg

SEQ ID NO: 98862 - DNA, 100 bp, Homo sapiens
ctcacggccattcactgcccatgctgagcgcctctcacacaggtttcagtctacaggaaagttaacaggacacctaggccctgttatgtgccttactgtg

SEQ ID NO: 98863 - DNA, 90 bp, Homo sapiens
actctggtctgtggcgggtgtgctgcatcgaaggtggagccgccaccaaaatgcagattttcgtgaaaacccttacggggaagaccatca

SEQ ID NO: 98864 - DNA, 100 bp, Homo sapiens
tgccccaattcctcaaaagcaggaaatactggtggaaccagaaccattatttggtgttgcaccttctgtaggaattacaagattaattaactcatcaacg

SEQ ID NO: 98865 - DNA, 99 bp, Homo sapiens
gctggtgggccgcgtcgaagacatggaccagggctacggaggactcctcctattttgaggacttctccaacatctccatcttctcctcgtccgtggact

SEQ ID NO: 98866 - DNA, 88 bp, Homo sapiens
ggtgtcctggatgatctccagagccgtggtgttttgattcccaccatggccatcacccagtttcggttatttaaattttgtacctgcc

SEQ ID NO: 98867 - DNA, 98 bp, Homo sapiens
ccgcagccccgggatggggccggccccgctgccgctgctgctgggcctcttcctccccgcgctctggcgtagagggaggagatatcaccaaacatgat

SEQ ID NO: 98868 - DNA, 100 bp, Homo sapiens
ggtggaggatgtggtgctgcccgagaaggtggacgtgctggtgtctgagtggatggggacctgcctgctggttggaaaagagactgttcaaaccactgag

SEQ ID NO: 98869 - DNA, 75 bp, Homo sapiens
cgcggacagcgggctggagcctgacgagctggcgggttttaaaatcaaagatgggaaaatcggagaaaattgccc

SEQ ID NO: 98870 - DNA, 75 bp, Homo sapiens
gtcatcggggtgaccaagggcaaaggctacaaaggtatggaacctggctaactgcaagctgaagaccaaccacat

SEQ ID NO: 98871 - DNA, 75 bp, Homo sapiens
actgggctggcggccaggatggttcttagactcggtgaaatacctggagtgctcagctctcacccagagaggcct

SEQ ID NO: 98872 - DNA, 90 bp, Homo sapiens
gagatgacaacactgataaaatccactcattgctggtgctggagaatctggtaaaagcaccattgtgaagcagatgaggatcctgcatgt

SEQ ID NO: 98873 - DNA, 80 bp, Homo sapiens
gtttttcggatcatgtctggtggctccgcggattataacaggggactcgtgggggatgttagcgtgcctgtgcacggtgc

SEQ ID NO: 98874 - DNA, 82 bp, Homo sapiens
actagcaaggagaatcatgctttagtcgggaacatgccctgtgtgccgccgtcatttcccacctgcggttattgaagcatct

SEQ ID NO: 98875 - DNA, 75 bp, Homo sapiens
gtctgacaaactaaagaaagacttgtgttacgagagattaaacagattctagaaaatgaacttcagatacctgtg

SEQ ID NO: 98876 - DNA, 100 bp, Homo sapiens
agggggagttgataaccttactacatttgtgtgagtctcgggaccatgtggaactggctaaaaatgtcatttacaggtcctgtatggtggaagagtcggg

SEQ ID NO: 98877 - DNA, 82 bp, Homo sapiens
tccagctgcagcacgtggacgctgactcggaagtgcagggggatatgagactttctactcggaatatcctgagtgttgcgtg

SEQ ID NO: 98878 - DNA, 74 bp, Homo sapiens
gttactttacatccgagatgcttccatcactggtgcaagctatatttaacggagatcctgatgaagttcgagca

SEQ ID NO: 98879 - DNA, 74 bp, Homo sapiens
ccggtgcaagaggcgcaaacaagccaatcccaggaggaaaaacgaaaatgcatccgatgcagatttatggctcc

SEQ ID NO: 98880 - DNA, 100 bp, Homo sapiens
tctaaagcatctttaatctgccaggcggagggggctttgctggtctttcttggactattccagagaggttctgcggcatgaggaatttgaagaaggctgc

SEQ ID NO: 98881 - DNA, 100 bp, Homo sapiens
ccgattttgattgatttccatgctctgaaagacatccttgggcccccgatgtatgaaatggagtggaatgcagtagccctctgggcctgggatattgtgg

SEQ ID NO: 98882 - DNA, 75 bp, Homo sapiens
ctgaagcgactgagtccgcgatggagtctgcgctcctcagaccaccggcaggtgaacagcctgatgcagaccgag

SEQ ID NO: 98883 - DNA, 82 bp, Homo sapiens
gactcatacgcaacctcaatggtgtccccaggtgtcattgccaacccctttgcggcaggcatcggccaccggaacagcctgg

SEQ ID NO: 98884 - DNA, 76 bp, Homo sapiens
tggaggaggaaccagggtgctagttaaaccaatactatactggcaattgctggagaagattttgcaattgttgctt

SEQ ID NO: 98885 - DNA, 83 bp, Homo sapiens
cagaacaggaggtggtagagggcatggatatctctactcgctccaaagggactgatgacggagcccaggaggtggtgaaggac

SEQ ID NO: 98886 - DNA, 113 bp, Homo sapiens
ctccagcagctggtgctgcaccagcaggaggtcctgccccctccactgctgctgctccagtacttcgggatgacttcagacaaaacccttcggatgtcatggttgcagtagga

SEQ ID NO: 98887 - DNA, 75 bp, Homo sapiens
aggccttccagctgtttgaccgaacaggtttggtcaagaccatgccaggtcaaaccttatttggaatttcaaaac

SEQ ID NO: 98888 - DNA, 76 bp, Homo sapiens
ggaccccaaggaaaactgggtgcagagggttgtggagaagtttttgaagaggttactcactataaacaatatccac

SEQ ID NO: 98889 - DNA, 100 bp, Homo sapiens
gtgaaagcctcagcacccggggagctgactccattgcatgtgggaccttcagccgtgaactggctgaagccgacgtagcttctctgaacagacgcatcca

SEQ ID NO: 98890 - DNA, 83 bp, Homo sapiens
cgagaatgaatgggggtaccacggagagggcaataagagcctggtggtggcccacgcgcagatcttttctctgggctactgcc

SEQ ID NO: 98891 - DNA, 100 bp, Homo sapiens
acagaaggatgtaaaggatggaaaatacagccaggtcatcagactagtgctgagtcttggggtactggcagagctgtggctcgaattcccagagttcgag

SEQ ID NO: 98892 - DNA, 83 bp, Homo sapiens
cctcaaacgatacctcagcagcagagttaccaacagattccgttgccaactcgtccccattggtttcttctttttggtactac

SEQ ID NO: 98893 - DNA, 100 bp, Homo sapiens
gtcctccaggagggcgatggaggagccggcattccaaccaggctcacggatgccaagtgtctgcgagattaatctctcatggccgctgcacaagaacctg

SEQ ID NO: 98894 - DNA, 73 bp, Homo sapiens
agatattcaaactctaaaccatctgaattggctcaatgatgaggacagagcgggatgccaccagcttgtccaa

SEQ ID NO: 98895 - DNA, 100 bp, Homo sapiens
ggaaccatctcagaagccatgcccctcaggctggaacttgccctgtctcctcgcagatgagtgggcgacagatgcgaaagaaacgagttccagtgccaag

SEQ ID NO: 98896 - DNA, 99 bp, Homo sapiens
ggacgtgatgttggagaactacaggaacctgctttctctcgatgaggataacatccctccagaagatggtcttgtcaacggaaaggggtccctatccag

SEQ ID NO: 98897 - DNA, 100 bp, Homo sapiens
gtggccgccgctgcggggcccaagtccttggctgctgagtggtgacagtagcccagcccgccggccagacaacgtgtcctggagagacagcacaatgggc

SEQ ID NO: 98898 - DNA, 74 bp, Homo sapiens
tcctgatgccttttttaactttccaggaaagagtgctgcaatgactttgaagaagccaaggaaattttgacaaa

SEQ ID NO: 98899 - DNA, 100 bp, Homo sapiens
gtcatctgtgaggaccgtgacccacctggtacatcgcctcagggcattcatttcaggctccttctaaatggccaagtgtgaagcctcagtttaggtcatc

SEQ ID NO: 98900 - DNA, 75 bp, Homo sapiens
tactccaagttccaggcagggaatggctcatggggatatccgagaccatgtctgacatagaagaggtggtggaag

SEQ ID NO: 98901 - DNA, 100 bp, Homo sapiens
tgtccgtggcgctcgagttcctggaccgtgagagcatcaagctcgtgtccatcgatgacttgcagggtgcacagtcagaaattgaggcaaagcaagaaat

SEQ ID NO: 98902 - DNA, 117 bp, Homo sapiens
ataatcatctcagttttgatcccctggcatcatttattctccgtactgatcactacatcatggaaacccagaagttctgtgaacaagtccatgctgccatcaaggcatttattgcag

SEQ ID NO: 98903 - DNA, 88 bp, Homo sapiens
gcccgctcatcccgttgggcccggaggacccctcgctggaaaggcattttaagggccaccgagatgcagttacctgtgtggacttcag

SEQ ID NO: 98904 - DNA, 75 bp, Homo sapiens
tcaaaggagcaattgctggtcctgagcctgagggatagttgctgttctcttctgtggagtcacacaagcacatta

SEQ ID NO: 98905 - DNA, 96 bp, Homo sapiens
ggggcggccacggtgatgagccgggcctggcggacgcggcgccatcgcagtcagcccgtggaccgggagcccgtggaccgggagccggtggtgtgc

SEQ ID NO: 98906 - DNA, 101 bp, Homo sapiens
agaagaaatggacatgattgcctaaatcagccaaacacaggattcagaatggacagtttagaagaacctcagaaaaaagtctttaaggctcgaaaaacgat

SEQ ID NO: 98907 - DNA, 82 bp, Homo sapiens
actaacagctggagagaacagttcattgaagctatcactgtcagtgctggtctggcggcttctctgttgacaactcagctgg

SEQ ID NO: 98908 - DNA, 98 bp, Homo sapiens
catgaatgaggagtacgacgtgatcgtgctgggcaccggcctgacgagttgctgggagcctgagcacctttcgtttttcggctcagagaaagccaagt

SEQ ID NO: 98909 - DNA, 98 bp, Homo sapiens
gcctttggaaaccgcaagaacctaaagcacaatgccgtgcccacggtgttcgcctttcaggaccccacacaggaaaatgttggggcttttcaggaagc

SEQ ID NO: 98910 - DNA, 75 bp, Homo sapiens
gtgcaggacaccgacatggaacagggactcactggggggtgtacaactatgagcctttgacacagctcaagaatg

SEQ ID NO: 98911 - DNA, 100 bp, Homo sapiens
aaccgcacagagccgcgggccctttgcagctgcgattttcgccctacgttttcaacggaggattctggaacttttcaaagcctgactctcttcttgaaac

SEQ ID NO: 98912 - DNA, 50 bp, Homo sapiens
ccacatggcccacgtacctcaggactgagcagggggaggaacatttaagc

SEQ ID NO: 98913 - DNA, 82 bp, Homo sapiens
ctgcctgtcaccccagatgtcctcatcatcccgtcagagctgaggtacttcgtgaagaattcagaaggagctggcggacatc

SEQ ID NO: 98914 - DNA, 100 bp, Homo sapiens
gcaaagggaagccgagtgctcctgcggctcccagactgcaaccaggtacaggacatctgcttcagccatgactgtcgctgggttgtggtcagtactctcc

SEQ ID NO: 98915 - DNA, 75 bp, Homo sapiens
ttgcccagggggccggagggccagggtctcccggaggactgatcctttgaaatactccagccatgactaaaagag

SEQ ID NO: 98916 - DNA, 90 bp, Homo sapiens
attctttacctgcttcccaatcccactgatgaggatcagcccatgggatggcaccacagatgtgacgcggacaatgcattttgggacccc

SEQ ID NO: 98917 - DNA, 100 bp, Homo sapiens
ggaattagacagtgtgaaaagtgaaattgttccactgttcactagtctagcttcagatgaacaggaagcacaagcctatgcagacgacaacagtttgctg

SEQ ID NO: 98918 - DNA, 99 bp, Homo sapiens
gctaaaatcaccagatgttcaaggcgagctgaggatcagtgtcctgcctgcctacctgtcctatgatgccccatggcctgtcaggaagatcccgctgcg

SEQ ID NO: 98919 - DNA, 100 bp, Homo sapiens
tctctaatacccagttcattgagaatggcacgaccataataacatccctgacttctgtgctgcacaatgacaaagaattccccaacccagagatgtttga

SEQ ID NO: 98920 - DNA, 100 bp, Homo sapiens
aaggaagggaagctgatcatgggcattggtcaccgagtgaagtcggatcactactcttggaatcaaagataaatccaaatactgcatatcagaaacaaca

SEQ ID NO: 98921 - DNA, 50 bp, Homo sapiens
tgattgactatggtctctccggctaccagttggctggggaacagaccagg

SEQ ID NO: 98922 - DNA, 90 bp, Homo sapiens
tgcccggccagctctcgcttctgcaagaccacgaacacagggagagtcccgtattctcagagtaaaagttgtttctggaattgatctcgc

SEQ ID NO: 98923 - DNA, 83 bp, Homo sapiens
agagccgactgacactcgcagccccctcgggaggcccgacgcgactgggcccctcaggtattagaaaactactcggatgctcc

SEQ ID NO: 98924 - DNA, 98 bp, Homo sapiens
gcggggtcgctaacccgcactctcttcggacctacgacatcgcggcttctctggcgttggccagtcagccacagggaggaggtacaggagaactgtgt

SEQ ID NO: 98925 - DNA, 50 bp, Homo sapiens
ccaacggggaggccaacgtgaagaaagtgtgaacatggctacgcctcttc

SEQ ID NO: 98926 - DNA, 76 bp, Homo sapiens
atgatccaccagcggttccatcctacacttgggtcttgctatcacagatgaaattttgctgagtaaggcagagtgg

SEQ ID NO: 98927 - DNA, 100 bp, Homo sapiens
ccagatggcaagcaggaggcaaagccccaacaggcagcaggcatgttgtcccctaaaacaggtgctcagcagggagaccccctttcccgctatatcttca

SEQ ID NO: 98928 - DNA, 82 bp, Homo sapiens
gcgtgggtgctgcgggccgcgttcgggggcgcagacctcctgccccccgaggtctgcagtctcctgaacccagcagccatct

SEQ ID NO: 98929 - DNA, 101 bp, Homo sapiens
tattatcagatcaaccaccaaagtgggaaacattgaaatcaagatatttggtttccaggcaggactgacgtctttggattgcagtggatcttactgcttac

SEQ ID NO: 98930 - DNA, 100 bp, Homo sapiens
ctggtattttttggagcttccatcctggttcttccaaagtgcccggacccaaaacaggaaggacagtatgatttggtgaaatgcctggctcctattcgag

SEQ ID NO: 98931 - DNA, 100 bp, Homo sapiens
aaggatggtgcagattttggcagattatggctttgtccccacccagcactgatgatattataaactattcctgcaccaactgacctgaagttcactcagg

SEQ ID NO: 98932 - DNA, 100 bp, Homo sapiens
ggagagtttgctcccaaaggcgcaccaatgaccaacatttgccccccggaggaaagaactggaaccaggttcgtgctggccgtgggcagcgccgtctttg

SEQ ID NO: 98933 - DNA, 99 bp, Homo sapiens
gccttgtgtcctgggatccccagcccctgcagaatgacccaccaggatctgagcaccccagccctatccctttacgtcatccctgagcaccatcaacta

SEQ ID NO: 98934 - DNA, 75 bp, Homo sapiens
cggacctctttgccatgattggaagcgtcagcccccgtagcacctctgttaccacgacttctagtgcctctgtta

SEQ ID NO: 98935 - DNA, 50 bp, Homo sapiens
aagagaccacctgtccttcgagcagtgacccagtgtgtcctggagagcgt

SEQ ID NO: 98936 - DNA, 96 bp, Homo sapiens
gcggccatggacctggcggatccggcctgccctggcccagctcaacacctgatttcggttcttccaggggacccagccccctaaccatgggagctc

SEQ ID NO: 98937 - DNA, 89 bp, Homo sapiens
ttataaagcaatgaataaatttggtgaagcacttaagaaatgtcatgagattgagagagtcttgcaagagcaaaatccgtccctagcca

SEQ ID NO: 98938 - DNA, 75 bp, Homo sapiens
cagatccagaaactggaggagtcccgctcgaagctaggacaactgtcatctgggaagtaacaacgcaggatgccc

SEQ ID NO: 98939 - DNA, 99 bp, Homo sapiens
gatgaccggcaaattgtggacactccaccgcatgtagcagctgggctgaaggttggaaaagagactgttcaaaccactgaggatcagattttgaagaga

SEQ ID NO: 98940 - DNA, 75 bp, Homo sapiens
ggactgcgccgcgtcttcctcaaggtcgcgtggggcaggcagtggcgctgcgggccaaggccttcggcttcaacg

SEQ ID NO: 98941 - DNA, 100 bp, Homo sapiens
gggagctcatcaggactatgggggattgggcagaggtaatcctcactatggatgggctcattgaggacattaagcatcggcggtattatgagaagccatg

SEQ ID NO: 98942 - DNA, 51 bp, Homo sapiens
aatatctttggcttgcagccaacaatggggattggatagctttagtcaaag

SEQ ID NO: 98943 - DNA, 90 bp, Homo sapiens
gccagcctgggtctcagccccgcgtacggcctttcacgagtcttcaagccttcagcaccccctcaattccaggagacacctcctgctgtg

SEQ ID NO: 98944 - DNA, 75 bp, Homo sapiens
ctctgctgtttaaaaagtatccctgtgactcagatgccactgcatcatcagataacagcgagacggaggggacac

SEQ ID NO: 98945 - DNA, 98 bp, Homo sapiens
gacctggaaatgtacagaaagaagtctcatcttcctttgaccacgttatcaaggagggtgaggacgcttgagcggaagttagaagcaaaaatgatcaa

SEQ ID NO: 98946 - DNA, 83 bp, Homo sapiens
tgttgatggagaccatcgagggtgctgcggggtgtccctacctgcaccggacgacgggggacacagaacgcaagtaccacctg

SEQ ID NO: 98947 - DNA, 100 bp, Homo sapiens
agcaggcctttgctggacagatgaagagtgacttgtttctggatgattctaagaggtgccacacctccctggatgatccaagatgaagaatacattgctg

SEQ ID NO: 98948 - DNA, 75 bp, Homo sapiens
gagggccaagggcaaaggccgagaactggtcatgctgctggagtggtggtcctgcacggagtgtacactgttcac

SEQ ID NO: 98949 - DNA, 100 bp, Homo sapiens
cctccgcctcctcctctcccgcgggcaccgaggactccgctcctgcccagtgtctttctcgagaagcaggtggaaacatgagcattcagtttcttggtac

SEQ ID NO: 98950 - DNA, 105 bp, Homo sapiens
agggtcccgttgatgtaacagagcagaggaccagcagatgaatggacaccttgaagcagaggagcagcaggaccaggccccgtggagaattgattccccgaagac

SEQ ID NO: 98951 - DNA, 75 bp, Homo sapiens
actccccggtgcagtcgggcctgcccggcatgcagatgccagtatggacagaatagcttatgatgcttatcccca

SEQ ID NO: 98952 - DNA, 82 bp, Homo sapiens
caccgtgattctgaggcctccccaaccatgtgcaattgtgttggataaatacaaccctccagaccacttcctccctgagtcc

SEQ ID NO: 98953 - DNA, 100 bp, Homo sapiens
gccgagtggtctaaggcgccagactcaaggcagaatccagagaccacatttgaagtatatgttgaagtggcctatcccaggacaggtggcactctttcag

SEQ ID NO: 98954 - DNA, 76 bp, Homo sapiens
gtggttgtcccaatatccaagaagcagtagagggtgccatgcacattcagatgaacagtgctttgagacaaatgtc

SEQ ID NO: 98955 - DNA, 76 bp, Homo sapiens
catagaaactcacatgagacaaatgcgctcagcttcaattggttggactccatgaaagaattgcacaaaacaaatc

SEQ ID NO: 98956 - DNA, 101 bp, Homo sapiens
ctgagatcaaatggcacttcattggccacctacagaaacaaaatgtcaacaaattgatggctatggaagagagagcaattcaacgagctgaatgtaggcgg

SEQ ID NO: 98957 - DNA, 90 bp, Homo sapiens
tccctcgggctgacaagaaccacttcccaagacccacagtgcctggagaggacatggggaagcctgacttcacccagtccaatccacagt

SEQ ID NO: 98958 - DNA, 100 bp, Homo sapiens
ccgcgctgctccccgtcgcctcctcggcggcggcctcagatgcagattgagttcataaaacaaggaagcatgaatttcagattcatccctgtgctcttcc

SEQ ID NO: 98959 - DNA, 80 bp, Homo sapiens
gaagccgcctctgtattacttaccaggtcagcccaaggccaaccccactgtcactctgttcccgccctcctctgaggagc

SEQ ID NO: 98960 - DNA, 100 bp, Homo sapiens
ttctctgtcagtactatattggaaaaacctcaaaatatgatggtggttggacagtcagcatttgcagactttgcaaggatggaacattactgtggacctg

SEQ ID NO: 98961 - DNA, 75 bp, Homo sapiens
gcgagcgccgcgcgcaccactgacaatgcagatcttcgtgaagactctgactggtaagaccatcaccctcgaggt

SEQ ID NO: 98962 - DNA, 50 bp, Homo sapiens
tgaccttcagtgtgctgctcaaaaacagcctttctgagaaaagtctacag

SEQ ID NO: 98963 - DNA, 101 bp, Homo sapiens
gcattttgacagagatcttccagaatttgggtggaccccaagttcctgaggaacatgcgctttgccaagaagcacaacaaaaagggcctaaagaagatgca

SEQ ID NO: 98964 - DNA, 100 bp, Homo sapiens
ggcgagggagcccgcgtcggctgagagcccacaggcccccacagacttttccagtagcacagtctctaacaccaggtagtatggaggaacggattgcaga

SEQ ID NO: 98965 - DNA, 110 bp, Homo sapiens
atgttggtgcatttaactacaaaaccaggtgaggaattttaaattggaacaagagcaagaaaaaaacaaaatcttgtcagaagcactggagacgctggccactgaacatc

SEQ ID NO: 98966 - DNA, 88 bp, Homo sapiens
tgaagacttgtttccaaccaccaaaatcccaaatcctcgatttcagagattatttcaggaacagcatatgccatatatgagctggctg

SEQ ID NO: 98967 - DNA, 100 bp, Homo sapiens
gacgcgccccgcctcccccgtccggtccctctctccacgtccagggccgcttccagcttggagatacacagctccgagcccaccagagacaccacaaaac

SEQ ID NO: 98968 - DNA, 100 bp, Homo sapiens
ctgtggaacataatggatatgcctggtcagagtccatgctgcaaagggtgatggcatcagctgagaagggaaggaagcccatgtgaggacactgaagaag

SEQ ID NO: 98969 - DNA, 75 bp, Homo sapiens
taggaagaagccgtgtggacagtctgaaatcaacacttgctctgaaatttggggactgagtacaccaaatacgat

SEQ ID NO: 98970 - DNA, 98 bp, Homo sapiens
ggacacctgtgtcagcatgtgggacctggttctctccatcgccttgtctgtggggtgcactggagaatccctacctatgcagcaacgagtgtgacgcc

SEQ ID NO: 98971 - DNA, 98 bp, Homo sapiens
ctgctgctgctgcccgcgtccgaggctcgcgggcggcgggcccgggtcatcatcagatttgaaatatttaaagtggatacaaaactatttcagcaatg

SEQ ID NO: 98972 - DNA, 51 bp, Homo sapiens
tctccatccgccagatggcctatggtgacagagttagtccttgataattgc

SEQ ID NO: 98973 - DNA, 98 bp, Homo sapiens
agcacatccatttcattggcaagatgctgaagaaggaagaagcaattccatggcctggaactttagcaattgttcattcctatattgcctacaaagca

SEQ ID NO: 98974 - DNA, 90 bp, Homo sapiens
ctccattgcacgattatttcagatcaaagccatcggccagacagagttgaatgcaagcaatccagaagaagtgttacagctggcagcgca

SEQ ID NO: 98975 - DNA, 100 bp, Homo sapiens
gatggcggatgccctgcagtacctgcagaaggtctctggagacatcttcagcagatcctccccggcgtgaaggtcatcatcgcacacaccgagaccaaag

SEQ ID NO: 98976 - DNA, 83 bp, Homo sapiens
aggcattttggggcagaatacagagatatggaatcaggtgaactgtcacccctacaactcagcttgcaaccagccctggccac

SEQ ID NO: 98977 - DNA, 109 bp, Homo sapiens
agcaccgcagccttgggcctcgcgccggctatggccgtgccctggggctgagccctcaggcaccatgagccaggacaccgaggtggatatgaaggaggtggagctgaat

SEQ ID NO: 98978 - DNA, 82 bp, Homo sapiens
cgggcacggcggaggcagcggagccctgggccatcgcccgtggaccgggagcccgtggaccgggagccggtggtgtgccacc

SEQ ID NO: 98979 - DNA, 96 bp, Homo sapiens
cagaaggtgcctgaccagaaaggaactcccaagcgactgcaggcagaagctgagacggctaagtgtatcctactcagtacatgtatctgaagatta

SEQ ID NO: 98980 - DNA, 100 bp, Homo sapiens
ccgcagcccgggcccaggccccggcagcgcctgggacaagatcccacccctggggaagcactactcccagcgctgggcccaggaggacctgctggaggag

SEQ ID NO: 98981 - DNA, 78 bp, Homo sapiens
ggcctgggagcttgctgcagcttcaggtggcctggattcctccgtgtccttcgtgtctcaggtccttgggaaagcctg

SEQ ID NO: 98982 - DNA, 82 bp, Homo sapiens
gacacctggttccagctgcagcacgtggacgctgactcggaagtgcagacggcgggcgctaacaccaccgacaaggagctag

SEQ ID NO: 98983 - DNA, 75 bp, Homo sapiens
ctactccaaagcggccgggagtcgcgcttcttccccactcccgagacagtgtctcctcagaaacaacgagctgag

SEQ ID NO: 98984 - DNA, 100 bp, Homo sapiens
aattcttcttccattaataaatcaactcagtgatcctgattatattaatcagtatgtcatatggatggagttttgagagcaaaatgacaacacccagaaa

SEQ ID NO: 98985 - DNA, 82 bp, Homo sapiens
ctggcaccccgaacgggttgcttcccccgctgcgagaggctgacccgcggctgattgagtccctctcccagatgctgtccat

SEQ ID NO: 98986 - DNA, 122 bp, Homo sapiens
cgctccagccgcccgcgggccagcgcaccggtcccccagcggcagccgagcccgcccgcgcgccggttctggctccttggcagcaatggctgtatttgaagataagtttaggccagacatgg

SEQ ID NO: 98987 - DNA, 100 bp, Homo sapiens
ggtccgcgggtttgggaggagtatgccaaccagcatggccctggacagggcggtccaggcggttctagcactggatttggaaactttgaggaaattgggc

SEQ ID NO: 98988 - DNA, 87 bp, Homo sapiens
gtggaagaaaatcataccatatcagatgcctcgcagagcaccaggcccaccgtgaaagacactcttgcactcctgtaatgagcctgg

SEQ ID NO: 98989 - DNA, 105 bp, Homo sapiens
gtcccgaagccccctgcaggaactctacaacccaatccagattagcctgaggcctgctcagtcgttcctaatgaataaaaatcaagtgccaaagcttcagcccca

SEQ ID NO: 98990 - DNA, 100 bp, Homo sapiens
gcagcaacgtgcggtgggaccacgagagcgctcagcgcacacctgtacagatgatgtacttgcgtgaaaagctaaacattggatacatagaagacctaaa

SEQ ID NO: 98991 - DNA, 100 bp, Homo sapiens
accaggggcgagggctacccgctctttgccgtgacaacaccgttcccccagccgggctgacccgggaaaaggagaagatgaaggaagccaaggatgcccg

SEQ ID NO: 98992 - DNA, 100 bp, Homo sapiens
aagaataccatgaggtcaaaaaggaaatcaccctgcttgagcaaaggaaacgaagttatacggaagcgtctcctcattgatggagatggtgctggagatg

SEQ ID NO: 98993 - DNA, 82 bp, Homo sapiens
cactttttgtacaaaagaagcagctcaggaggctgttaaactggtgtgcaactgaggaacatggctcaagaaactaatcaca

SEQ ID NO: 98994 - DNA, 98 bp, Homo sapiens
tggggagaggatgcagagctgcagttggatgaagatggtcagtaggacagaaggtaacattgatgactcgctcattggtggaaatgcctccgctgaag

SEQ ID NO: 98995 - DNA, 95 bp, Homo sapiens
aaaaagcaggtctagggagcaacaaagctcctaattctattacccactacatgacatgtgggccaagtgggcatgttttaagaaattgcctcgca

SEQ ID NO: 98996 - DNA, 75 bp, Homo sapiens
caaatttttggatgatgatggatccatttctcctattgaggagtcaacggaaggccgtgctgctttaataacttc

SEQ ID NO: 98997 - DNA, 100 bp, Homo sapiens
agctgcacatcggattctggaaggcctggggccccaggtggagctgattgagatggccatcctgcggttcccttacgagtcctgggggaccccgttccag

SEQ ID NO: 98998 - DNA, 100 bp, Homo sapiens
tggatttcctggttctgtgggctccgtggcaatgaattcttctgtgaagtgccgacgccaccgccgagcccatgatcctggaacagtacgtggtggtgtc

SEQ ID NO: 98999 - DNA, 100 bp, Homo sapiens
gaaaaatgtcactttactttggaagactggattatggacagaacttggaaatattgagaataatttcttaaagccacttcatataggacttaatatgtca

SEQ ID NO: 99000 - DNA, 107 bp, Homo sapiens
gccgctcccctagccaggaagagccgccgtccgcaccgggaccggagaggaagcggagcgggctgacgcacgaggcacacaggaaggaggtggagcaggtgtatctg

SEQ ID NO: 99001 - DNA, 83 bp, Homo sapiens
aaatactactctgaggggcttagaaattaacaggttgttgacctcctgtactggagagacattaagaagactggagtggtgtt

SEQ ID NO: 99002 - DNA, 100 bp, Homo sapiens
aaaatgaatattctaaagaacttcagactgtgctttcaacgtacctacggccattgcagaccagtgagaaggaatcggatctcttcctgctcgacagccg

SEQ ID NO: 99003 - DNA, 98 bp, Homo sapiens
tttcccagggcttgatgggaaaaaggacttccctagaatgagaaagatcagtctaaagaaaaggagaagaaagtgaaaaaaacaattccttcctgggc

SEQ ID NO: 99004 - DNA, 120 bp, Homo sapiens
ttgggtcctgaatcttctgggagctgaggaaccagatatcttgaaaagctgccagaaagctccaattaaggaacagctatatcctgcttccttctgtaagcagcatcgacttgtgcaagg

SEQ ID NO: 99005 - DNA, 83 bp, Homo sapiens
ggctcttgccctcatcctggttctggaatcctcagttcaaggtcctcagaatggttggaatgaccctccagctttgaacagag

SEQ ID NO: 99006 - DNA, 100 bp, Homo sapiens
ggcgactgtatgatcgtggatgtcccggatgctgcgggtatcacctcttctgggctcaagatggacaacaagaagcgcctggcctacgccatcatccagt

SEQ ID NO: 99007 - DNA, 51 bp, Homo sapiens
cgtcacactggatttgatagaaaatagccggatcgagctgggagatgtgac

SEQ ID NO: 99008 - DNA, 51 bp, Homo sapiens
gggacttcccgtccgcggcgtggagggcgtcctgcctctgcggctctgccc

SEQ ID NO: 99009 - DNA, 75 bp, Homo sapiens
tcctgggcctgtcccgcccgcgccctccgccggccctcagatatgcaatatgatgaggatgatgatgaaatcacc

SEQ ID NO: 99010 - DNA, 100 bp, Homo sapiens
agacccatctggactaccaaggagaagctatagactacttctactccaccaggaaggatgaccagtgtcccagtgaaggaacgagtgaaggtgtctcaga

SEQ ID NO: 99011 - DNA, 100 bp, Homo sapiens
tgagaacaccagccttgcacctgaagaccccacctttcctggcatccagggcattgtggatgcctaccgccaagccctgccccaagttcgcctctatggc

SEQ ID NO: 99012 - DNA, 83 bp, Homo sapiens
ggaagcacagatgtggaaagtgaatgtgcggaaaatgccttcaaatcaggctttatcctgtggataaacgcagagtgaacgag

SEQ ID NO: 99013 - DNA, 106 bp, Homo sapiens
tctggagtaattggagccaagaaatgagtataggtaaagcagctgagcagccattttcagatttaccccttctcattgaggaaaccaaactcagattgactaggaa

SEQ ID NO: 99014 - DNA, 74 bp, Homo sapiens
ccttgatgaggcaatggaatggtctctcaggcagctgcagagcttcaacagtactgtatgcagaatgcctgcaa

SEQ ID NO: 99015 - DNA, 96 bp, Homo sapiens
tacccagaagtagtccatatggaatcagtgtctgtccctgaagggtcattaaatcagctatgttcttcagaagaaccagaacaagaagaacttgat

SEQ ID NO: 99016 - DNA, 83 bp, Homo sapiens
ctcaacgtggacgtggtcaagtacgagagtggccctgacggaggggaggaaagagttaagaaagacgtggacaagggcacacg

SEQ ID NO: 99017 - DNA, 100 bp, Homo sapiens
gggatttggaaatgtcatccgatggcacaatcagatacagtttatgtaacttgatggaagaaaatggaattactccaaaaagacaagtgctcaagcagca

SEQ ID NO: 99018 - DNA, 82 bp, Homo sapiens
tcctggtccacaacgtcaaggagctggaagtgctgctgatgtgcaacaagatgtacagattatagtgtttccagaagatggc

SEQ ID NO: 99019 - DNA, 100 bp, Homo sapiens
tcggatgctgatggggctggacctgctggtgttcgcccacgaccatggagcgttcctgggtgcctgtgtggctgggtctgatgagcctggcccagagggc

SEQ ID NO: 99020 - DNA, 98 bp, Homo sapiens
tggttaatggagatacctgtattatacgctgcattctcgttgtctttcagctcctgggcaacgtgctggtctgtgtgctggcccatcactttggcaaa

SEQ ID NO: 99021 - DNA, 100 bp, Homo sapiens
tgactggtcttacattgctgcatcaagaaacccaagctgctgaggtgaaaggtgtagcagtcactcggcctacacccacagcatcgaccttgtgaaccca

SEQ ID NO: 99022 - DNA, 74 bp, Homo sapiens
tggcctgctgctggcccgcagggttggcattgtaaaggaggaacagcttaaggttcatggattctaaaatgaac

SEQ ID NO: 99023 - DNA, 51 bp, Homo sapiens
cgacctctcggacacggtgcaggcagctattgacctgaaaagtggttctgg

SEQ ID NO: 99024 - DNA, 50 bp, Homo sapiens
tgaagagggaagacacgcggaaacaggtcctaggcctacttacaagcctc

SEQ ID NO: 99025 - DNA, 50 bp, Homo sapiens
gcgccgccctctcgtcccactttccagtttttcagaagaagtgaagtcaa

SEQ ID NO: 99026 - DNA, 75 bp, Homo sapiens
cagacactggaaaactggatgctgcagacactgaacgaggagccagtgggatgctgagaacttgctggagtcaca

SEQ ID NO: 99027 - DNA, 100 bp, Homo sapiens
cctcggcgtgctactgtgcgctcgatccagcaccatggggaagcgggacaatcgggtgctatgacttcacacctatggattcttctgcagtttatgtgtt

SEQ ID NO: 99028 - DNA, 100 bp, Homo sapiens
aataaactcggagtggcagactgacaactgtgagacatgcacttgctacgaaacagaaatttcatgttgcaccctcaccaatgttgttatgaattattca

SEQ ID NO: 99029 - DNA, 83 bp, Homo sapiens
gccggcgcctcctcggagtccttggggacggagcagcgcgtcgtggggcgagcggcagacaggccgacggtcgcaaggtccta

SEQ ID NO: 99030 - DNA, 99 bp, Homo sapiens
aaatacttagaggttgtattgaatactcttcagcaggcctcccaagcccaggtggacaaggatcagttccatgacaagaccccttatacgattatgttt

SEQ ID NO: 99031 - DNA, 83 bp, Homo sapiens
cgctgccagggcagaaattgagcaagcagcaagtcggctttcagatcaggctgctccagttacagcaccacccggccgctgca

SEQ ID NO: 99032 - DNA, 75 bp, Homo sapiens
ccggcgggaaggaaaaccgcgcagagagggagactcatgcatctgtatgccgtgtgcgtggactgcctggaaggg

SEQ ID NO: 99033 - DNA, 100 bp, Homo sapiens
agggacgacccccgtggccatgctgaagcggaggcggccgctgctcgagtttgcttgcctaaactggacttgaagcaatttaaactactggagatctgcc

SEQ ID NO: 99034 - DNA, 82 bp, Homo sapiens
catcatcgacacccccgggatcctgtctggagagaagcagcggatcagcagaggtgtggatgtggaagcagccaagcgggca

SEQ ID NO: 99035 - DNA, 75 bp, Homo sapiens
cgtggtagttaaaggcccagatgataggaatcccatctcatttagatgctgagatgaatcgtcacctgtgtgttt

SEQ ID NO: 99036 - DNA, 74 bp, Homo sapiens
gaacagcatcttcgactccttcccgacctactcgccgaccttcatccgcgacgcaggaggagggagacgcactg

SEQ ID NO: 99037 - DNA, 100 bp, Homo sapiens
atggcctcaacacgtccctaacttgtggtgctggagaatctggtaaaagcaccattgtgaagcagatgaggatcctgcatgttaatgggtttaatggaga

SEQ ID NO: 99038 - DNA, 80 bp, Homo sapiens
gaagctcaccttcgacgaggaagcttataaaaatgtgtttggtgaggattcatcaacctccagtatgatgtctgtgaact

SEQ ID NO: 99039 - DNA, 82 bp, Homo sapiens
gagggagcaggagctggatccggcttccggaaggtttggtgcacctcgatttggaggaagtagggcagggcccttatctgga

SEQ ID NO: 99040 - DNA, 100 bp, Homo sapiens
gccaggccccttctcagattgcaaacagtggttctgctggattgataaacccagctgctacagacacatttgccagcaaagtggcagccacccaggacca

SEQ ID NO: 99041 - DNA, 50 bp, Homo sapiens
cagaatatgccaagtatctaaagtcccctcttgctgttggctgcacatca

SEQ ID NO: 99042 - DNA, 75 bp, Homo sapiens
tatcctgcggtacttcgcctcctacatggagcagcacctcatgaagggcaacgctccccagtccccccacccccg

SEQ ID NO: 99043 - DNA, 74 bp, Homo sapiens
ctccattggtgctactgcgtttaaagaggaaattttgcaaatatgcctccttacgtaagaggagaatcttgctc

SEQ ID NO: 99044 - DNA, 98 bp, Homo sapiens
agagggccgagaaggacaggatcaggtacacagataagctgtttctctccaagttctttctcctggcgtcaggctgcctttgtggattcatattgctg

SEQ ID NO: 99045 - DNA, 90 bp, Homo sapiens
cagattccagcttcggaacaagagaccctggcctggtctccaagtcctctcctaagaagcctcgtggacgtaacatcttcaaggcccttt

SEQ ID NO: 99046 - DNA, 82 bp, Homo sapiens
atcgatgtttcaatattggaagcgctttgatttacagcagctgcagttgaagattcctgtctctggatccaaatcagagggc

SEQ ID NO: 99047 - DNA, 100 bp, Homo sapiens
gatcagtagcaccagtgtttatgatgaacctggcctatgttaaagcagcagactgcatttcagaaccagttaacagggagcctccttccagagaagctca

SEQ ID NO: 99048 - DNA, 100 bp, Homo sapiens
cggggatctggctcaggcccacatacagcaacttagcgaagctgccggtgaagatggtcagccaagatgggaagtcgctccttgacaagctccagcggcc

SEQ ID NO: 99049 - DNA, 76 bp, Homo sapiens
ccaactttcaagctgcagacgccccagggcaagcgaaaggctttggagggcagtagagagcttgaaaatctcattg

SEQ ID NO: 99050 - DNA, 100 bp, Homo sapiens
aggaccagcccctgggaatggccttcgtcaccttccaggagaagtccatggccacctataatctcaggggcgatataatcaatgaggtggtcctaaagtt

SEQ ID NO: 99051 - DNA, 100 bp, Homo sapiens
tcatcagcaatggcgcctatgggttctcccatgggcaggtggtctctctggatgagctgcgccccttccaggacccagacctgagctccctgcaggccgg

SEQ ID NO: 99052 - DNA, 98 bp, Homo sapiens
gctgctcaaagctgctgccgccccttgggctaaaagggactttgaacatgtcggggatcgccctcagcagactcgcccaggagaggaaagcatggagg

SEQ ID NO: 99053 - DNA, 90 bp, Homo sapiens
gcgagctgagtggttgtgtggtcgcgtctcggaaaccggtagcgcttgcagcatggactttctgcagggcgactgcaccaaagcgaaaca

SEQ ID NO: 99054 - DNA, 99 bp, Homo sapiens
tttgggagatccaagagattcagtatcactcgctcccttgatgatcttgaggtattagaaaactactcggatgctccaatgacaccaaaacagattctg

SEQ ID NO: 99055 - DNA, 75 bp, Homo sapiens
aagcaagagaaaaagaacattactgtcttgatattgatgatgttaagaagttcaaaccgggttacctggaagcta

SEQ ID NO: 99056 - DNA, 75 bp, Homo sapiens
cggaggcttcgagtgacccgggtgccgaggagcgggaagagttgctggggaagtgggacccatggcagccgagac

SEQ ID NO: 99057 - DNA, 80 bp, Homo sapiens
ccacatttgaagtatatgttgaagtggcctatcccaggacaggtggcactctttcagtttctgtttcagatgatcgggct

SEQ ID NO: 99058 - DNA, 102 bp, Homo sapiens
caaatgctcagaagactattcttctgcaggtggatcagaactgtgttcgcaattcttacgatgtcttctctttgctacgttcacacaaaagatgttggacaa

SEQ ID NO: 99059 - DNA, 83 bp, Homo sapiens
aatttcgatcgttttcggaataattctttatcaaaaccagatgattcaactgagggacccgagtgtatagccctccagagtgg

SEQ ID NO: 99060 - DNA, 90 bp, Homo sapiens
gtcagctttctcattcctagattgatgcagattgcttaattccttgagggccgttgctccagggagaactgcaaatatcttcatccaccc

SEQ ID NO: 99061 - DNA, 98 bp, Homo sapiens
gcagcaaagggagctggagcgcatggctgaggtcttggtcaccggggaacagctacgttacagatgtagagctaaaacgactgaaggatgctttcaag

SEQ ID NO: 99062 - DNA, 75 bp, Homo sapiens
gcggagggagccgcgggatggaccgcaggtatcctgtggtctgaggccatcttcctcgaggcaaggccccagagg

SEQ ID NO: 99063 - DNA, 83 bp, Homo sapiens
cccggcgagtccgcgacggtcgccgcccacggcgagatgtacctgtgtggtctaagctggaatctggtcaccttccatccatg

SEQ ID NO: 99064 - DNA, 83 bp, Homo sapiens
cgacagtaagacttctgtttcagctgaaaaaggaagtcaggaccgtagctcatgaaaaggtagttgatgtcacttggcgatat

SEQ ID NO: 99065 - DNA, 50 bp, Homo sapiens
ccagccctagtgtagctgatggaatggaaaacgatgacaccgcagttcag

SEQ ID NO: 99066 - DNA, 82 bp, Homo sapiens
aaaggagatgcctggcagccccgctctctgcagtggaacacctgcagcaggagactgctgctctgaaaaagcaaatgcaaaa

SEQ ID NO: 99067 - DNA, 100 bp, Homo sapiens
atcatcgggctggggcgcatagggtggacccgaactccccggtgctcttggaggacccagtcctttgtgccttggcaaaaaagcacaagcgaaccccagc

SEQ ID NO: 99068 - DNA, 100 bp, Homo sapiens
ataatgtctcctgcataatgatcatgccccagcaccaaaggcaaggatttggacggtttctcattgatttcattgctgatgtatattcaagatgagtgga

SEQ ID NO: 99069 - DNA, 74 bp, Homo sapiens
gattgctgtaaaaaatttcaggattggtactacaagatgtgtggtggtcctgggatgtctgacccaagagcagg

SEQ ID NO: 99070 - DNA, 107 bp, Homo sapiens
gtcggtcccaggtcccggcctccgtaatgagagcccggaaccactctttgtgccgcagcttcgcagtaagactttgaccccgacgcaggcttcagtgattgccgcgg

SEQ ID NO: 99071 - DNA, 75 bp, Homo sapiens
tggagtgacctactcgcccgtcagtggttataataagatttctttaaagactcgtgcagcacatcattatcgctg

SEQ ID NO: 99072 - DNA, 98 bp, Homo sapiens
atcattttctaatcatcagcatttacatgacagaaatcacctatgtttacagcgacaggcactcaaggagttgcccctggtcctgtaattggacttca

SEQ ID NO: 99073 - DNA, 90 bp, Homo sapiens
gcagaatggagcctagaagtggaacgtgtactaccgcaactgaaagtcacgattaggactgacaataagccatgaagctcatgactgctc

SEQ ID NO: 99074 - DNA, 114 bp, Homo sapiens
tctctcttggctcctgtcccgctggccctctgtctgcctgtgtccctgaccatggctccctgcagtaccctttaacgatatttggagttcttacaacatggcagacattgacaa

SEQ ID NO: 99075 - DNA, 51 bp, Homo sapiens
gctacctgtgaacagtacgcagtgaatgttctggaagaagaaagatctgtg

SEQ ID NO: 99076 - DNA, 90 bp, Homo sapiens
ttttggaaaatgtgataaaaacaaggtggaagattcttccaaggaaccagtgcgaagggatcgtccattatatcttcatgttcagggcca

SEQ ID NO: 99077 - DNA, 75 bp, Homo sapiens
gggaagcaagaggcaaagagaatcggttgcaatctgcacatcgtgctgccacacgaggcttcattcgttatggct

SEQ ID NO: 99078 - DNA, 75 bp, Homo sapiens
atggcagtgctcaaactcaccgaccaggtggtcagtctgaccaaggatacgggtctaaggatgaacttataaagg

SEQ ID NO: 99079 - DNA, 146 bp, Homo sapiens
ctcgagtcctgccgcctcccgggagtgccgtgcgccgcagcccgggcccaggccccggcagcgcctgggacaaggtagttagaaacaaacctgtggcaaggcaggctcctggcaaacggaagtgcaattgtcggcaagagatgcgg

SEQ ID NO: 99080 - DNA, 82 bp, Homo sapiens
ggatcccggggaagaggaggcggcggaggattatgagctccagctggcctcatacacctcaggactggaaactctgctgaac

SEQ ID NO: 99081 - DNA, 50 bp, Homo sapiens
cggcgttggaggccaccgtttccagtgacaaccatgagtggaaaaaacta

SEQ ID NO: 99082 - DNA, 100 bp, Homo sapiens
gaaatgtcatggaagagggaaaagactttcagccctcaagatctacagctcaacaggaacggttttccaaagcagacagcagctcagctgattctgaagg

SEQ ID NO: 99083 - DNA, 100 bp, Homo sapiens
gggcgggccagggccgcactccggagactcgcggttgctacgcgcaccatggctggagtgtggcaaaggagcagagaactttgacaagttcttcacacga

SEQ ID NO: 99084 - DNA, 50 bp, Homo sapiens
gggatattctcttctgtgctgtcaaggggaaacagtgcttcttagtccta

SEQ ID NO: 99085 - DNA, 100 bp, Homo sapiens
cattaagctcacagcactggggagaccccagtttctggcacagttggcgggcagctcccaggtctccatgagtacggcgccgtcgggggctccacacaca

SEQ ID NO: 99086 - DNA, 80 bp, Homo sapiens
ggtcagttgtccagttcatccctgagccttgagctcccagtcgcagtagagacggggtttcgccgtgttagccaggatgg

SEQ ID NO: 99087 - DNA, 100 bp, Homo sapiens
cacaggaggctgtgcgggccccgctccgcttcgaatggccctaccacttatgtcttggatgaagatgaacctcgattccttgaagaagttgattacagtg

SEQ ID NO: 99088 - DNA, 83 bp, Homo sapiens
ctcgcggttagcccgtcagtccctgctctgtgcgcgcctccatctgggccatggatggagatagagtttcaccatgttgtcca

SEQ ID NO: 99089 - DNA, 83 bp, Homo sapiens
cgagatcctgctgacgccggctaggggggatatgagactttctactcggaatatcctgagtgttgcgtggatgtaaaacccat

SEQ ID NO: 99090 - DNA, 98 bp, Homo sapiens
gaagaatgagaactataagagcctggtgagacggagctatcggcgccgcggcaagagccagctcatcaaacggatgattgatgagacatccagtggag

SEQ ID NO: 99091 - DNA, 85 bp, Homo sapiens
gatcttgacaaagcctcttctgtttccaatgggatggaccagcttttgggaaatatgattgaaatgtgggttgatcgaatggaca

SEQ ID NO: 99092 - DNA, 100 bp, Homo sapiens
tcaattttgcccccagtttacttcggattatagtctctgaccatgtggaattcccagtacgacaggcaggatcaagtcttccataccagggaccaggcca

SEQ ID NO: 99093 - DNA, 96 bp, Homo sapiens
ctgcagcgctgtatcgtgtcgccggcagggaggcatagcgcctctctgatcttcctgcatggctcaggccctgggaggagcggggacactgaggac

SEQ ID NO: 99094 - DNA, 82 bp, Homo sapiens
gcagtccacccaccgccgccgcctcccaggtgcttctcagcttcacgggaaagggcctgctgtaccacggaaattgtgaccg

SEQ ID NO: 99095 - DNA, 76 bp, Homo sapiens
tgaatctcatcgccaccatctttgtctttgcagtggtcatctatttccaggtgtcaagttacatcaaagagcaaac

SEQ ID NO: 99096 - DNA, 75 bp, Homo sapiens
cagagtcagtagccattgtttgctcccccaagttccaggaatcatgtttgaaaccttcaatgtccctgccatgta

SEQ ID NO: 99097 - DNA, 100 bp, Homo sapiens
attcgccccctgaggagtgttgatccaacacagactgagtaccaaggaatgattgagattgtggaggaggttggttgaatctggcgatgtggaacccatg

SEQ ID NO: 99098 - DNA, 75 bp, Homo sapiens
tggaggaggagaaggaaaagttgagcacattgccaaccggagttccccaagaacatacatatgatagttgagaaa

SEQ ID NO: 99099 - DNA, 97 bp, Homo sapiens
acaaaggtagctggatccgtagagaatgattacggacctgaagccaaagaacaagatgcgctagtggacagattgctgaccaggggcttgagagctg

SEQ ID NO: 99100 - DNA, 100 bp, Homo sapiens
gttagaagccaccagcaagaagtcagccaagagatgtgttaaagacaccttggaagagcttaaggaaatagataaaggcatgtggaagaaactgcaggag

SEQ ID NO: 99101 - DNA, 100 bp, Homo sapiens
cgcggccgcaccttcccgccttctcaggtcctggcattgatgtgcctgctccagacatgagcacaggtgagcgggagatgtcctggatcgctgataccta

SEQ ID NO: 99102 - DNA, 100 bp, Homo sapiens
atggactgattaaaatagaatggcctaattggaaagaatttcaggatcaccggtttctcctgcttcatatggagatcttataacaatttttgatagttct

SEQ ID NO: 99103 - DNA, 95 bp, Homo sapiens
ctactgtctgagctacattgcgaaaattaaactcccgaagaagaggtggagtataatgacatatgaactcaaattgccaccaaaagcttccctac

SEQ ID NO: 99104 - DNA, 126 bp, Homo sapiens
cgcagcatggcggtggaggacgaggggctccgggtcttccagagcgtgaagatcaagatcggaccaagaatcgccttcagccctgtctggtgcatccttggcagaaagtgaggaggaaaacacccc

SEQ ID NO: 99105 - DNA, 82 bp, Homo sapiens
gtggaagcagcaccatcggggagacaagcaaggtggctgtgccagtgtcattgtgtcattaactactcagtgtcctcaggac

SEQ ID NO: 99106 - DNA, 75 bp, Homo sapiens
tgaagaatccccccgaaaggaccccccagattattcagagctgggagagcttcccccacgatctcctttagaacc

SEQ ID NO: 99107 - DNA, 100 bp, Homo sapiens
aaaaacctgccttagacctgtgttgcgtggtgggtctgctgccgccacttctaatcctcatcatgacaacgtcaggtcttcgaggaggccaagcagggcc

SEQ ID NO: 99108 - DNA, 100 bp, Homo sapiens
gcctgtgctgaggaccaggtgttggacgcagacggcgtcacttgcttgggttctagcaagaggagaagaaaggaggaaaccacagggaaaaatgttaaga

SEQ ID NO: 99109 - DNA, 82 bp, Homo sapiens
gggcgaccgggcggacgaggtggagccagagtctgtcaggcggcgctgataaagcagtttgtgtccgacgtggcctgggggg

SEQ ID NO: 99110 - DNA, 100 bp, Homo sapiens
gcccgggacccggccagccgtggagacaggtacatgctggtcacctacgacgaacccccgtactgcatcaagatctttctcctggcctgccctccatgtc

SEQ ID NO: 99111 - DNA, 90 bp, Homo sapiens
ccggagacagcccaaatatcctcggaagagcgctcccaggagaaacaagtatcgaaggatgatcgcagtgatgtggagagcagctcagag

SEQ ID NO: 99112 - DNA, 100 bp, Homo sapiens
ggcccctgtttgactatttcctgaaggatccacctctgatgttcactgaagagtaccagaaaagtctgctagagcagtaccatctgggtctggatcaaaa

SEQ ID NO: 99113 - DNA, 123 bp, Homo sapiens
agcgggcccacatcttccggccaacttccattgaacttcccagcactcgaaagggaccgaaatggagagcaaagtgaggtctgccagtctttagtgaaacacagctctggaataaaaggaagt

SEQ ID NO: 99114 - DNA, 100 bp, Homo sapiens
ttgtggcgctgaaaacgaacgatcaccgaagtggccttggagtacaacaactgtcatggggaccaggtggtggagcgtctccttcagcacctgcggcggg

SEQ ID NO: 99115 - DNA, 95 bp, Homo sapiens
agccacagcgcccacttctttgagtttctcaccaaggagctagccctgggccaggaccggtttcattacacatcaaagatgaataatttctctca

SEQ ID NO: 99116 - DNA, 100 bp, Homo sapiens
tactacgttgacactgctgtgcgccacgtgttgctcagacagggtgtgccggaagagcgtggaccgtagctgccccctggtggccctgtcggtgcagaac

SEQ ID NO: 99117 - DNA, 100 bp, Homo sapiens
actgtggaagtgctgaaagcaattcagaaagccaaggaggtcaagtccaaactgagcaacccagagaagaaggatgaaacaggcgcctatttaatcgaca

SEQ ID NO: 99118 - DNA, 100 bp, Homo sapiens
gaatggacagagccatccctgacacccggcatgaccagaatccggagatgatgagtatcaaggggaccagtcagacacagaggacgaagtggactctgac

SEQ ID NO: 99119 - DNA, 74 bp, Homo sapiens
agagatacctacagacggagtgctgtgccactttaattggttggggtcagataagaagaggagtgacaatcaag

SEQ ID NO: 99120 - DNA, 83 bp, Homo sapiens
gcgcaagcgcaaccgtcggtgggtcggggatcggtcgcctgagagggactggtgattgcagctggaagtgcccatgaccgagc

SEQ ID NO: 99121 - DNA, 90 bp, Homo sapiens
gtcccaggagtcctgaccagagagcagtgaggagatttctagtgaagatgatgagctggtagaagagaagaagcagcaacgaagaagggt

SEQ ID NO: 99122 - DNA, 76 bp, Homo sapiens
taccaattcaggcacccagtcagataggatcacgagaccattcaaatctctccattccttcaagagctcctcttcc

SEQ ID NO: 99123 - DNA, 100 bp, Homo sapiens
gggtcagcagccggccaaccgcagccaggagaaggagttcgtgcaggcgtacgaggatgtgctggagcggtacaaagacttcagattttcctgtccttga

SEQ ID NO: 99124 - DNA, 75 bp, Homo sapiens
gtggaggagctaacagagatagagcgtttggaagatctggatacctgtatgaaggagtttgccctgaccaaccca

SEQ ID NO: 99125 - DNA, 100 bp, Homo sapiens
cttcgaaggattttgcaacaaattcgagctgtccgactctgagaatgatggctcggactcaaaagaacaaggccacagcacaccacttagggctgcttaa

SEQ ID NO: 99126 - DNA, 89 bp, Homo sapiens
gacagggccctgtctcctcagcttcaggcaccaccactgacctgggacagtgaatcgaagtcttgcagctgaagggaggcactccttgg

SEQ ID NO: 99127 - DNA, 75 bp, Homo sapiens
tggactgcacccctacgggaacccacgaccattatatgctggaatggttccttagtccaccctgcacctggtgtt

SEQ ID NO: 99128 - DNA, 96 bp, Homo sapiens
gcccataccccttcgcacttctacacacccctgaagacagagagatgaagactggcccatttgcagagcactccaaccagctgtggaacatcagcg

SEQ ID NO: 99129 - DNA, 82 bp, Homo sapiens
tgaagagatgagcacaaaggtgtacttagacctgggcttcgtgctgtgtcactccatcgctgggggtacgggttctggcctg

SEQ ID NO: 99130 - DNA, 82 bp, Homo sapiens
tgcctttaacacacctactgggattccttgggcaatggtgaatttgaaaaggtagatgacattaatgctgataagaatatct

SEQ ID NO: 99131 - DNA, 82 bp, Homo sapiens
cctcagcctgcggatgtgaggctgatgaagaggaaaacagtttctctataacaacaatacaaggcaacaaactgaagcaaga

SEQ ID NO: 99132 - DNA, 100 bp, Homo sapiens
ccagttccaggtagacatggaggccgtcggggagacgctgtggtgtgactggggcaggaccatcagaaatggtggagtcaatgaagaaagtagcagggat

SEQ ID NO: 99133 - DNA, 82 bp, Homo sapiens
acagggacatcagtggagccttctcagacccacagagaatggatcttggagaatgtctgaaagtccatgacctggctttaag

SEQ ID NO: 99134 - DNA, 100 bp, Homo sapiens
aacagagaatgccagctattcctgtcaatatccattccatgaattttacctggcaagctgcagggcagaaagcagaagccactggagaaaaacggccaag

SEQ ID NO: 99135 - DNA, 100 bp, Homo sapiens
ttggatcccattcacctgaggcacccgaagaagagaccatccatatttccaggtctggctctgggagaggagtggacagcagctggttgagatacatccc

SEQ ID NO: 99136 - DNA, 97 bp, Homo sapiens
agcggctgctgagatgagtgcagtgtaataatccgatgaccaaagagccgaaactggaagcagctgtgcggattgtcccggagtggcaggactacga

SEQ ID NO: 99137 - DNA, 75 bp, Homo sapiens
tgtcctccctcacctaccaacggcatagcaatcgcacagctgaggaggatacatgatcccttaattcaggctcag

SEQ ID NO: 99138 - DNA, 76 bp, Homo sapiens
cagccgatccagcctgcggagcctgtggggcaggaatagccaggccagaagaaggaaggcctgtggtgagtgggac

SEQ ID NO: 99139 - DNA, 95 bp, Homo sapiens
ggatattgaaatggacagtggagatgaagcctaagaatatgatcagcaccagaaatgtcagcagcccaggacacccagccccttggtcttggagg

SEQ ID NO: 99140 - DNA, 75 bp, Homo sapiens
aagaacctggtgaaagtcccatattctggccaggtcagagcagcccaccatgggatggggagggggtggaggctg

SEQ ID NO: 99141 - DNA, 75 bp, Homo sapiens
cacagttgtctgcaccctgttgtggctctataagcagccagagcctaagcctggagacctgattgagatttttcg

SEQ ID NO: 99142 - DNA, 75 bp, Homo sapiens
gggcctgtggactgcagcctcggcggtcagcagggtgtggatgaatggaacatagctcgcctcaatacagtcttg

SEQ ID NO: 99143 - DNA, 100 bp, Homo sapiens
gagctcttggaactggctgtagcctttgctgagcaggagcaactatgtctctggttcttaaggattgaaaagccttttatgtcacctcggtaccctggag

SEQ ID NO: 99144 - DNA, 83 bp, Homo sapiens
gagcagtcagctgggggagatgtccctggaagaacacagccagtgtgaatgcagctaacaacctgagagaagattacaaattt

SEQ ID NO: 99145 - DNA, 74 bp, Homo sapiens
cagaaagtcttacatgacacaatggatctgaatcatctcttgaaagcgggtattcccctacatctcagccatgg

SEQ ID NO: 99146 - DNA, 51 bp, Homo sapiens
tgaagagggaagacacgcggaaacagctgatcatggatgaacaggatcaac

SEQ ID NO: 99147 - DNA, 100 bp, Homo sapiens
cacccactctctgggggcaggtgggcccggtgacaggttcgagaacttgtcttggacaattgcaaatcaaatgatggaaaaattgagggcttaacagctg

SEQ ID NO: 99148 - DNA, 75 bp, Homo sapiens
tcatgaatataagaatgaagctgatcatggtcagaatttaagggacgctgtgaagcaatcatggatgcaatgaag

SEQ ID NO: 99149 - DNA, 100 bp, Homo sapiens
taatgaaaagagacatgaagaattggtatttcaaatgaccaccatgttgcaaaaggggtcccttcagtgttgtacgacgatgtatcaacagagaaactgg

SEQ ID NO: 99150 - DNA, 90 bp, Homo sapiens
gggctgcggtcggcaaggaagcggagggggccggagaagagagctctggggtcgacacggagataatcttggccaacagtacaatagccc

SEQ ID NO: 99151 - DNA, 82 bp, Homo sapiens
ctattttactgataagaaaacacatctttacacactaatagtgaaatggtgaaaaatcagacaatggtcacagagttcctcc

SEQ ID NO: 99152 - DNA, 129 bp, Homo sapiens
cgcggcgcagactgcacctcgcagtctccccaggtccgcccagcagccgcgcttcagccaggtactccaaagattcaggtttactcacgtcatccagcagagaatggaaagtcaaatttcctgaattgc

SEQ ID NO: 99153 - DNA, 74 bp, Homo sapiens
atacatttcaaatactttcttaggtttgttggcatccaaagctgttggggttgatggtgctgaaaaaaaggaag

SEQ ID NO: 99154 - DNA, 100 bp, Homo sapiens
cttgtgaagcagataatcatatcaccctccaagccacaaaactgtggtgaatggaaaagaatgtataaacttcgcctcatttaattttcttggattgttg

SEQ ID NO: 99155 - DNA, 74 bp, Homo sapiens
ttgatcactcctcaggtgtccagcctgctcagcggtttgctgtgtttcaaagaagggtgctgaccacagtagtg

SEQ ID NO: 99156 - DNA, 100 bp, Homo sapiens
ctctatgatatgctaagaaagaatcttgtcactttagccactgctactacagacccgggaagaaggtaaggccttactccggcaaatcctacagcttcgg

SEQ ID NO: 99157 - DNA, 82 bp, Homo sapiens
cacagctcggcgctccttcccgctccctcacacaccggcctcagcccgcaccgatggctctgagagattcctctgcgaatct

SEQ ID NO: 99158 - DNA, 76 bp, Homo sapiens
agagacctctacttagctcagcaattcttaccttatcacaaaatttgtccaggatagacatagagctagaagaaac

SEQ ID NO: 99159 - DNA, 89 bp, Homo sapiens
gagaaaaccatctccaaagccaaagggctggagcagtgcctactcaatagaatcggtcatcatgcaaataaatgccaccttagtcaaag

SEQ ID NO: 99160 - DNA, 90 bp, Homo sapiens
ctccgcggcgcacctcgcggcgagaatccggaggagaaggagactgcaaggataggcccagatctcaggatggacccaagctctgccgga

SEQ ID NO: 99161 - DNA, 97 bp, Homo sapiens
taaaacaggatcagtaaagaaggaaaaagcagtaaagccagaggaaggtggcatggaatattcacatgggagagccgcatgaggccgcccaccacgc

SEQ ID NO: 99162 - DNA, 93 bp, Homo sapiens
aggatcctggaggcctgggaagccaacgaccacacgcagagcggtggtgccccccccgggcacggggccatgtacaacgggatcgggctgccg

SEQ ID NO: 99163 - DNA, 74 bp, Homo sapiens
caaaccagagaaagctttccagcagtcagttgaacaagacaacttatttgatacagccaccgcactgtgttcct

SEQ ID NO: 99164 - DNA, 89 bp, Homo sapiens
ctttacgttcatgtaaacagcatgacgtgaggccgtggatgcaggcattaagggtgataaaagaaaatgtggctgaagttacccgaagt

SEQ ID NO: 99165 - DNA, 100 bp, Homo sapiens
ctggctgtggcaaatgtgactgccatggagtgaagggacaaaaggtatttgaagcagtaatagcatgggtgaaccatgacaaggatgtgaggcaagagtt

SEQ ID NO: 99166 - DNA, 100 bp, Homo sapiens
tgccagaaagaggatttggccagagcgttttgtcaaatacttccctggacaagaaagccagatgaaactgatctaccagggccgcctgctacaagaccca

SEQ ID NO: 99167 - DNA, 82 bp, Homo sapiens
gttggcgcggcgcagtcttcctgctttggcgttgtctctcaggaactgtggctgcaccatctgtcttcatcttcccgccatc

SEQ ID NO: 99168 - DNA, 100 bp, Homo sapiens
ccgctgcgcgcggagcccgagcccggagcggccgacgcccgcctcggcgcgcacatcccgcggggcccggccgggtgttatcaggaactgttgccgttat

SEQ ID NO: 99169 - DNA, 100 bp, Homo sapiens
ggcaaacagcttcgcagtcactaatgcttgatgaaagaagcaggagtagaccataggcagtggaggggtcccatattatccacctgcaagcagtgcccag

SEQ ID NO: 99170 - DNA, 50 bp, Homo sapiens
gcggcgggagtcctggcgctctgcagctggcaggggccgcctgaagtggg

SEQ ID NO: 99171 - DNA, 74 bp, Homo sapiens
aactctgttttgatgggatagagctatctcattatcgagagcatttgaacattcaggaccctgacaaacgaaaa

SEQ ID NO: 99172 - DNA, 75 bp, Homo sapiens
caagcattcaaattgctcacagctgatcctaagtcacagcaaactgtacaatggcagttgagtgggttttgaaaa

SEQ ID NO: 99173 - DNA, 91 bp, Homo sapiens
gtggactccttcggcagtccacccaccgccgccgcctcccaggctccccacaggtgcaggaagccgccgcccagccatggacggggaggag

SEQ ID NO: 99174 - DNA, 100 bp, Homo sapiens
cggtacctgacgggcacatatgtccaggaggagtctccggaagataagtgccatagagttcatttccatttgccgtatcgatggcaattcttggatagag

SEQ ID NO: 99175 - DNA, 75 bp, Homo sapiens
gaaggagagcagtcaggaagctgccataaccatctacatgagagagaatggcttcctttgggtggaagaggaaaa

SEQ ID NO: 99176 - DNA, 97 bp, Homo sapiens
cttgaagacagcagcgctaagagtgtttgatcttcctctgacttggtactattctctctcccagctcactgaaaactgaagctaatttggaagtttt

SEQ ID NO: 99177 - DNA, 95 bp, Homo sapiens
tgacagtctgcatgtgcagttttcaggtatgctgccccacaaaaccaagcgaggccaggccgctctggaccgtctcaaggtgtttgacggcatcc

SEQ ID NO: 99178 - DNA, 75 bp, Homo sapiens
cagttgaatgctgtcttccaagaacagaagaaaatgatccaggcccagttcgatcctttggtacagaagacagac

SEQ ID NO: 99179 - DNA, 124 bp, Homo sapiens
gaacatttccccagaggagctcaaaatggagttgccggagagacagcccaggtgctggcccaggccctgactccctgaagagaggtgagtagagccgtaaggcttcagagagagagagacatgg

SEQ ID NO: 99180 - DNA, 100 bp, Homo sapiens
atgctccagtttgagaaacctggatctgcgatctgtttgtgtgcttttttaggaccaaaggatatatttccttactcagaaaataaggaaaagtatggca

SEQ ID NO: 99181 - DNA, 90 bp, Homo sapiens
cagaggaatagaaactttggaatctgtacccattattggtggtttttgggagactatctttggcaacagacatccggctccgggttcgag

SEQ ID NO: 99182 - DNA, 100 bp, Homo sapiens
cagctgaagatgagtggggtaaaaccccagacgccatgaaagctgccatggccctggagaaaaagctgaaccaggcagcatcaaggtccctgaccaaggc

SEQ ID NO: 99183 - DNA, 88 bp, Homo sapiens
aggacatgcaaaacttgcagattttggggtagcaggtcaacttacagtgcgatggtcgggatttgacttcacttaggaatgtaagttg

SEQ ID NO: 99184 - DNA, 95 bp, Homo sapiens
tcctgatggtgaacatgccaggagagcaatgcaaaagaatgaggaaaatggggagcaggaggctgacaatgaggtagacgaagaagaggaagaag

SEQ ID NO: 99185 - DNA, 100 bp, Homo sapiens
ggctgatggcggatcaggatcggaagcctgcgtaactttctcccttgatccgggagtctttccactggtccacctggaaggccgctgtggtggaaggatg

SEQ ID NO: 99186 - DNA, 100 bp, Homo sapiens
agtggccccagctcttctgtgtttggaagcctccctccagctggtcaagcctcgttccaggcccagccaactcctgcagttctcaacatcagcacctcgg

SEQ ID NO: 99187 - DNA, 60 bp, Homo sapiens
gagtacaagttcggctttgagcttcctcagggggctgctaaggaagcaaaaaaggctaag

SEQ ID NO: 99188 - DNA, 50 bp, Homo sapiens
cgctcctggccggctgggtcgccgtagaaaacttggaatataacgtggag

SEQ ID NO: 99189 - DNA, 75 bp, Homo sapiens
cgcggagcagcgcctgggccgcgccgacctggtcatgagcttcgtcaacatggagcataaccttcggtggcagga

SEQ ID NO: 99190 - DNA, 75 bp, Homo sapiens
gccagaaggaagatggcggatctggaggagcagttgtctgatgaagagaaggagccatgtgttcacatgtcatgt

SEQ ID NO: 99191 - DNA, 100 bp, Homo sapiens
aagaaaaacaatcgcttcaatgatgggaaggtggatcccgccgggaggtactttgctgtattgtgtatggatgcaaagatcaattttgactctaattcag

SEQ ID NO: 99192 - DNA, 90 bp, Homo sapiens
gatggacatggacatgagccccctgaggccccagaactatcttttcggcaatgcatgaaccattgcaaacttggcaagatgcaccataca

SEQ ID NO: 99193 - DNA, 101 bp, Homo sapiens
ggctttcctttccaagaggaatcctcggcagataaactggactgtcctctacagaaggaagcacaaaaagggacagtcgcttgcgcgatctctggcctctt

SEQ ID NO: 99194 - DNA, 98 bp, Homo sapiens
gtttcacactccaccaagcatcccattacagatagaagaggtacgagtgcttccatatccatttacccaccattggcaatttgaaaggaccatccaga

SEQ ID NO: 99195 - DNA, 51 bp, Homo sapiens
gacctgtcgcctgccagctctggatggcagaatagctgtgaaggcatgtga

SEQ ID NO: 99196 - DNA, 98 bp, Homo sapiens
caaccatattctaccttggtgaataacagcgagtgtgttgcaaacatgaaaggatggaatccgacgtggtaggcccagagcagatactgtccgcgatt

SEQ ID NO: 99197 - DNA, 75 bp, Homo sapiens
aaggcaggcacggtggatgaggactcgtcaggctccgaatcatgtttgagaccttcaacaccccagccatgtacg

SEQ ID NO: 99198 - DNA, 98 bp, Homo sapiens
atccagttcaattatgaatctcaggaacaccaccttctgtcaggttgtgatcaattattcaatcgtgaaagggctgaagtacaatcaggccacgccaa

SEQ ID NO: 99199 - DNA, 71 bp, Homo sapiens
gcgcagccagagccaccagcgcagcgctgccatggagcccagcagcaagtgtgtcccggcatggatatccg

SEQ ID NO: 99200 - DNA, 100 bp, Homo sapiens
ggccccctctcccagtgttagcaccactggggaatcagagcctccggaggctgcgtcctccgccctggctctgatgaacagcgtcaagacccagctgcac

SEQ ID NO: 99201 - DNA, 113 bp, Homo sapiens
cctcacccaggcccctgtcaagaaggtgccggtggtgcgagtcttcggagcgaccccggcagtggagtacgacaaggagttctcccctcgtcagcgacaccacaaagagttca

SEQ ID NO: 99202 - DNA, 102 bp, Homo sapiens
aggacctcccaggatctcccaagtcgggaccaccaccagaacacacagagttgatgagacgcgtccgtcgcttccagattgctcagtacaagtgcctggtga

SEQ ID NO: 99203 - DNA, 74 bp, Homo sapiens
gccctggtgccaggtgtccatccccgtgctgagtactaaggctcgtacgtctgcatcgattatcttacgtgggg

SEQ ID NO: 99204 - DNA, 100 bp, Homo sapiens
tcagtatgagcgcctatctgcgagaacagagaagggagctctatagtcggagtggagaactgcaaggcctctcggatgaaggtggacccaagtcagaagg

SEQ ID NO: 99205 - DNA, 74 bp, Homo sapiens
cagaagcaagcgaaaagccagatgagcgcttctaaacttagagagagctgcggataaccgtctggtccttgtgc

SEQ ID NO: 99206 - DNA, 100 bp, Homo sapiens
catcttcagtgactttgtgttcctggaggcgatgtacaaccagggattcatccgaaagcagtggagtaatgtggtcattgcatcccgtaagttggagaga

SEQ ID NO: 99207 - DNA, 51 bp, Homo sapiens
ctaaggccattggacacagaatccgagtgaaaaagcttgtggtgaaggggg

SEQ ID NO: 99208 - DNA, 101 bp, Homo sapiens
caacaattgcgtgcattaactgaagcaaagaaattggcttctgcctctgcaaagctaaagatgtggtagtgttaaagatggctccttggcggcatgtgcat

SEQ ID NO: 99209 - DNA, 100 bp, Homo sapiens
caatgccttggagaggggcttcctgagtgccatgatcttgtggagaattttgatgaggcttccaagaatgaggcaaactgaattgagtcaacttctgaag

SEQ ID NO: 99210 - DNA, 97 bp, Homo sapiens
cgcgagtgggagcaccaggatctcgggctcggaacgagactgcacgaatatcctccgaatcctaaatctagagctccaaggatgctggtcattaaga

SEQ ID NO: 99211 - DNA, 132 bp, Homo sapiens
tttatgagcctccatttcttatactactgcagtgaaccaacattggatgtgaaaattgccttttgtcaggatgtaattaaaaccattgtgcagagtggtggcatcaagcatctagttaccatggcaactagt

SEQ ID NO: 99212 - DNA, 100 bp, Homo sapiens
aagagaatgacctagcaaaagttgatgatcttccccctggtgaccaagaatatggcccaggtgaccaaagccctggacaaggccctgagcaccatggacc

SEQ ID NO: 99213 - DNA, 75 bp, Homo sapiens
ggctttgtctccaaagtggaaggttttctgtctcaactggtctctgacaagcctctgactgaatgtatccgtgct

SEQ ID NO: 99214 - DNA, 82 bp, Homo sapiens
gagcctcagttggaagcagccgatccagcctgcggagcctgtggggcagagccgacagttagaatcagaaactgggaccaca

SEQ ID NO: 99215 - DNA, 100 bp, Homo sapiens
ctcggccccagactgaggtaccatggctctgggaggatggatcaacattctcttctaacttatatgattctataacagactcttccagaaatgatatgaa

SEQ ID NO: 99216 - DNA, 82 bp, Homo sapiens
ggctccgggtcttccagagcgtgaagatcaagatcggtgaccagcgccatgtccagccaggtggtgggcattgagcctctct

SEQ ID NO: 99217 - DNA, 100 bp, Homo sapiens
ccttcctcaaataaggaaattgacacctggcgtgggtggtggccttgtccatgtcacctgtggatgacactttcatttctgggtctcttgataagaccat

SEQ ID NO: 99218 - DNA, 87 bp, Homo sapiens
ggaccatgttcaccagcaccggctccagtgggctctatgctccacgccctactagtcatgcccgtcctccatcaacaagtttgattt

SEQ ID NO: 99219 - DNA, 93 bp, Homo sapiens
cgggatctaacccaggagcagacagagaagctgctgcagtttcagttttcggctttgtgagaaaccttaccatcaaacacgatggccagcaac

SEQ ID NO: 99220 - DNA, 90 bp, Homo sapiens
gtcctgttgtggggcttttacagcctttgggtgggaggaggagctcgccaagcgcatgaaccttcagaccatggtggacacgctgcagga

SEQ ID NO: 99221 - DNA, 75 bp, Homo sapiens
tgacctttcgccttaacagagcctttatggaagcagcagggaagatcagttttcctgccatccaggctgctccct

SEQ ID NO: 99222 - DNA, 100 bp, Homo sapiens
tggacaggttaagggactcccaggaatatcagtgagctgtattttcaaggccctagcagcaacaagcctcgtgtgatccgggaagtgcgggctgactctg

SEQ ID NO: 99223 - DNA, 75 bp, Homo sapiens
gcgccccgcagccccccaacatcctgctcctgctcatggacgactacggcaagaagaagctgaaatacctgccct

SEQ ID NO: 99224 - DNA, 76 bp, Homo sapiens
cagggacacggctcaccgtgctagagaatggatcttggagaatgtctgaaagtccatgacctggctttaagagcgg

SEQ ID NO: 99225 - DNA, 74 bp, Homo sapiens
ctctcgtgaacatagctttaatagggattggtccaaaggaagattttttccattgtttgaaatgtaacttatgc

SEQ ID NO: 99226 - DNA, 100 bp, Homo sapiens
gatctccaagtttgatactgttgaagacttttgggcgcaggtatgtttattcctaaaacgaggtgccaatcaacatgccactgatgaagaagggaaagac

SEQ ID NO: 99227 - DNA, 98 bp, Homo sapiens
ttgggtcgagacctgcggcgggtgctcatcctggacaattcacctgcctcctatgtcttccatccagacaatgctgacagagcgggatgccaccagct

SEQ ID NO: 99228 - DNA, 100 bp, Homo sapiens
gacagacttggacaacatgtcccaacattacatcccagaccattctggctgctgtctggacaagaagtcgtagggggtgagggtggaagctgggaaaccc

SEQ ID NO: 99229 - DNA, 50 bp, Homo sapiens
cccatcactccaaggagagaaggtgggaaagcagtgccactctccgcttc

SEQ ID NO: 99230 - DNA, 75 bp, Homo sapiens
ggcagcgttggacagctctatgaggggtgaagctttgttctaagaatatttgtttcatctagtttatgagtccaa

SEQ ID NO: 99231 - DNA, 87 bp, Homo sapiens
cccagactgacttgttcacatgtggcaaatgtaaaaagaagaattgcacttacacacaggttgagcgcacagaaaggattaagaatt

SEQ ID NO: 99232 - DNA, 131 bp, Homo sapiens
gaacgccttgttgcccagttccccagttctggcagattctggaaactgtacattgaagcagagaatgtgacagtgatgataacatgggtgccaaaaatacttcaataggagaagaatttatatccacagaa

SEQ ID NO: 99233 - DNA, 75 bp, Homo sapiens
cgacgagtacgactacctattcaaagataacgaaggaggcccaacttcattcaataaggagcctgacggatttat

SEQ ID NO: 99234 - DNA, 100 bp, Homo sapiens
agaagggacaccattagaaactatccagaagaagctggctgcaaaagggctaagggatccatggggccgccgagtcgtccggaaatccattgcccgtgtt

SEQ ID NO: 99235 - DNA, 95 bp, Homo sapiens
ctggaacctctgggagggctgcagagtctgagagtcactggagctaccagaagcatcatggggccctggggagagccagagctcctggtgtggcg

SEQ ID NO: 99236 - DNA, 75 bp, Homo sapiens
ggcttgtcaggaactcgactcagacgtggataaagataatcccgaattaaacaaccaccatgtcgagcaaaaagg

SEQ ID NO: 99237 - DNA, 50 bp, Homo sapiens
ggatgatgtgttcccgcgtctactacatgaacacggctggcagatccagc

SEQ ID NO: 99238 - DNA, 100 bp, Homo sapiens
caagacggggtccccgagtggttccatggtgcaatctcaagagagttggatggcaagcatgtggtgtttggcaaagtgaaagaaggcatgaatattgtgg

SEQ ID NO: 99239 - DNA, 99 bp, Homo sapiens
ctgagtttcccacttgattacccgttaagtcccccaaagatgagatttacctgtgagatgtttcatcccaacagtattgatgaagatgaccctactgct

SEQ ID NO: 99240 - DNA, 100 bp, Homo sapiens
ccgcatctccttcagcgcgagccaccgattgtacaggctcttgcagccaatgccggaacaggatttgctgttgctgagcctcaaatcgcaatgttttgtg

SEQ ID NO: 99241 - DNA, 100 bp, Homo sapiens
gtctgtgtgttcgagtggacaaaatggcgaagatcgccaagactcacgaagagtgcctaccgcatgtttacaaacaacacgtgtttgaagcacatgatca

SEQ ID NO: 99242 - DNA, 116 bp, Homo sapiens
tgcccttggcccagcgccagctccacgctaaggagggtgctggagtgagtcccccacttatcactcagagacgagttgtactgctgtcacaggaaatggacgctggattacaagca

SEQ ID NO: 99243 - DNA, 50 bp, Homo sapiens
ctgaccctcacaaagggatcgccgtgctggtatagaggactctaagaagt

SEQ ID NO: 99244 - DNA, 100 bp, Homo sapiens
aggcgctgttccagccttccttcctgggtatggacctgtctgccaatcaggacgaggagaccgaccaggagaccttccagctggagatcgaccgcgacac

SEQ ID NO: 99245 - DNA, 80 bp, Homo sapiens
ctccgccgctgcgggcccgctccgacgcggaaggtctcggcgcggaagatggccggcggcgtggacggccccatcgggat

SEQ ID NO: 99246 - DNA, 98 bp, Homo sapiens
ttggtgagccgttggcgtggtggtcccggagtgatcctggcagccggtggggaagacaaggagggagccagcattcgaacgttcactccattttattt

SEQ ID NO: 99247 - DNA, 83 bp, Homo sapiens
tcacttctagacgacaaaatgcaaaaaaggaggccaaagactttgcagggcaagaatcctttcgttccatcacaaggtcgtat

SEQ ID NO: 99248 - DNA, 80 bp, Homo sapiens
caccaacaacaccacaataatccacagccaagtagccggatcgagctgggagatgtgacaccacacaatattaaacagtt

SEQ ID NO: 99249 - DNA, 90 bp, Homo sapiens
gtgagactgcagtcagtgcttttgagattgacaagatgtacacccccttgttcttcgccagagcctatatgaacccaatagcaatggcga

SEQ ID NO: 99250 - DNA, 114 bp, Homo sapiens
gccagcattttccaagtactgtaaattcctgtgcagaaggcatcgtcgtcttccggacagactatggtcaggcttttgtggccacaggaaccaatctgtctctccagttttttc

SEQ ID NO: 99251 - DNA, 100 bp, Homo sapiens
cagagattcaggccagagttgtgggccgccgtcggcagcaagaacagagagagaggtggacagatctgagagatactgagaccattactgggacttccac

SEQ ID NO: 99252 - DNA, 96 bp, Homo sapiens
ccctgtttcagacagacctcatctataacctccttgaaaaactgggatacatggatctggcctcaagactggtggctctggaagaggatctgaacc

SEQ ID NO: 99253 - DNA, 91 bp, Homo sapiens
cagcaatctcctcctccactgccactacagggaagtgcatcacatgtcaggttttcaaatggaacattttgatgcatcacttagtacctat

SEQ ID NO: 99254 - DNA, 83 bp, Homo sapiens
gaggagaagcgagaaaagatgaaacggaccctatccgagatgagtggggcaatcagatctggatctgccctgggtgtaacaag

SEQ ID NO: 99255 - DNA, 75 bp, Homo sapiens
attaaaaagcagtttccacttattatttcttctgtaagtaaaggtgtttgatcagtatgtaaagaccagggcaga

SEQ ID NO: 99256 - DNA, 76 bp, Homo sapiens
atcaggggccttgataacacagagtttcaagagcaaacgccctggaggagcagctgaaggagcaggagctgagagc

SEQ ID NO: 99257 - DNA, 50 bp, Homo sapiens
cagaatttgaaaaggagcccaggacaggttcctacaaacttgatgacttt

SEQ ID NO: 99258 - DNA, 100 bp, Homo sapiens
gaggatcatggcggatggccccaggtgtaagcgcagaaagcaggcgaacccgcggcgcaataacgacaagcccacagggtatggctccagcagtcggagg

SEQ ID NO: 99259 - DNA, 80 bp, Homo sapiens
gccagcaatgcctccatgaacaatctcacccaattactctgctcagattgagaggatccagaatccagatctctggaata

SEQ ID NO: 99260 - DNA, 100 bp, Homo sapiens
ccgggggtgacagctccgggaccggccgaaaggcgaggaaccggtctcctctgagcctccggcctccataagacccaaaacagatgacacctcttcccag

SEQ ID NO: 99261 - DNA, 100 bp, Homo sapiens
gcaatgtcacttacaacattaatcagatactgcatttaagggtcagagtactgatcggctactatcaacagaacctcatgaggaagtacctaatattctt

SEQ ID NO: 99262 - DNA, 51 bp, Homo sapiens
tttgtccttctgctattgatcctgaaggtttttcgttggaatatacgttgc

SEQ ID NO: 99263 - DNA, 50 bp, Homo sapiens
cacagttcaagtgaccattgacccagataagtatgctgtgcgcttcatcc

SEQ ID NO: 99264 - DNA, 97 bp, Homo sapiens
gctccagagcccagacttgcaggtgcttgtgagtgaggattctgacagtgatggcattgtggcccacttccctgcccatgagaagccagtgtgctgc

SEQ ID NO: 99265 - DNA, 82 bp, Homo sapiens
gatggatcttggagccagttcctcgacattttaacacaggctaagcggtatgctttttttatgccaactctgccaagtttgg

SEQ ID NO: 99266 - DNA, 98 bp, Homo sapiens
aaggttgtggcacgttctggaaacatagtagcaggtgcccttcgctttatgaggcggataattggacttaaagatgaattttataatcgttacatcac

SEQ ID NO: 99267 - DNA, 82 bp, Homo sapiens
gccacctacagttactatgcctcgaatcaaggctcagctgtcgcaggccctggaggagctgggaggccagaaacaaagagca

SEQ ID NO: 99268 - DNA, 80 bp, Homo sapiens
ttttccgttgccggtgccggcctagcgtcctggaattacttcaatcaagttttacagacatttcaccagaggaattgagg

SEQ ID NO: 99269 - DNA, 83 bp, Homo sapiens
ccggtgccgtccttcctgccgacgtcggggtggccgttcagcagccgagactcaaacaatgcagatcttcgtgaagactctga

SEQ ID NO: 99270 - DNA, 83 bp, Homo sapiens
agaaggagagaggggactctggacgtgccagggtcagatctcgcctccgaggaagcagcctcccgcgacgatgcccctcaacg

SEQ ID NO: 99271 - DNA, 80 bp, Homo sapiens
agaggaactcagccctgattgcgctctgatgtgaattacctcattgaagaagctgccaaaatgaagaagatcaagtttca

SEQ ID NO: 99272 - DNA, 82 bp, Homo sapiens
gccatcaggggccttgataacacagagtttcaagggcgaactttctgaccaagtatacaactacccagagggcctaggagaa

SEQ ID NO: 99273 - DNA, 100 bp, Homo sapiens
catgggttaccgctgctgcccctgctgtcgctcctggtcggcgcgtggctcaagctaggatcttttcagcctacatcaaggaggtggaggaacggccggc

SEQ ID NO: 99274 - DNA, 100 bp, Homo sapiens
acagggagagcaggtttctcagggggacggggacaggcgaggctgtcgccgtagcatggaagctccacaaagcagcagcctggtcaccttttctcttcca

SEQ ID NO: 99275 - DNA, 100 bp, Homo sapiens
ttgatgttctcatcaagcccacgagtttagggagtgttgacattcagggatgtggctgtagaattctccccagaagagtgggaatgcctggactctgctc

SEQ ID NO: 99276 - DNA, 75 bp, Homo sapiens
caagaaattaaaaagaatgaagaaggagctttctccagcagagccctatgagtttgtctctctggaatggctgca

SEQ ID NO: 99277 - DNA, 82 bp, Homo sapiens
gtggttgaggacgacgaggatgaggatggagatgacctgctccatcaccaccacatcatgtttgagaccttcaacaccccag

SEQ ID NO: 99278 - DNA, 96 bp, Homo sapiens
tttgcagccagtactctatatgaacaatccgtctggatcacggatgtaggaagtggctcacctccacctccagtaaaagtttcttctgaacctccc

SEQ ID NO: 99279 - DNA, 46 bp, Homo sapiens
tctgaactcaggacttggcaaaattgcctaaggaggtgccagaaaa

SEQ ID NO: 99280 - DNA, 96 bp, Homo sapiens
ggcctcttccagagccaactgctgtgccagggcccaagcctagcatctaagcctgttccctgttcagattcatgccagaactgaaagctaaattac

SEQ ID NO: 99281 - DNA, 144 bp, Homo sapiens
agctgatgctcaactccagcctcatgcggatcaccctgcggaacctggaggaggtggagttctgtgtggaaggtgctggagaatctggtaaaagcaccattgtgaagcagatgaggatcctgcatgttaatgggtttaatggag

SEQ ID NO: 99282 - DNA, 89 bp, Homo sapiens
tgggacaagacccatctttatgcaaagccagcgttacagtaatgttccaggttgctccttgagggcaggacagttcttatggctttatc

SEQ ID NO: 99283 - DNA, 83 bp, Homo sapiens
cttcacctgcagaagcgtgtcgttctgcaccagcgccttgatcgagtacttgagggatgtttcagcagcccctgagaaggaag

SEQ ID NO: 99284 - DNA, 101 bp, Homo sapiens
ctagtctggccatcactggggtccctgtggtgacttggccaaagaagactccaaaggttttaaaatcaaagatgggaaaatcggagaaaattgcccttccc

SEQ ID NO: 99285 - DNA, 71 bp, Homo sapiens
ggggagggcatgttccgtggcctcgcccaggccgacggatggtttcacccaaatatcactggtgtggaggc

SEQ ID NO: 99286 - DNA, 80 bp, Homo sapiens
ggcggaggacgagctccgggatgctgtactccttgtctttgcaaacaaacagctccttgtccgcaagactggatctggca

SEQ ID NO: 99287 - DNA, 100 bp, Homo sapiens
acagtcagaggctgcttattgttgtgtcagtgaattaggagaacttggaaaggttcagtttcgtgaccctgatgaccgtggtacaatcaatgacatctct

SEQ ID NO: 99288 - DNA, 76 bp, Homo sapiens
gcagctcgccgcctaccgcaaggtgttctgagaatcagccatgtcatccctgtacccatctctagaggacctaaaa

SEQ ID NO: 99289 - DNA, 101 bp, Homo sapiens
aagaaaagaaactttgctacctgggaactgaagactacttagatttgaatataacctgccgctttgcaggtgtattccacgtggagaaaaatggtcgctac

SEQ ID NO: 99290 - DNA, 97 bp, Homo sapiens
gcagatattatcatagttgctgcaggttattgaagagagggaaaaactaaagaatgaccgggaagcccgccagaagaagatgtactatcttaggacc

SEQ ID NO: 99291 - DNA, 107 bp, Homo sapiens
cgtccgccttctctgtcagctctttccccgtcagcatcccagccgtgctcacggcaacatgagtgagaatgaggaagaggaaatttctcagcaagaaggcagtgggg

SEQ ID NO: 99292 - DNA, 96 bp, Homo sapiens
cggctgccgggctacggggcagatggactcggagcgccccgccgacctgcctagagctggaacgttacctccagagcgagccctgctatgtttcag

SEQ ID NO: 99293 - DNA, 74 bp, Homo sapiens
gactacctcaacctggtgcagtgcgagacgctagaggcttcctgatttctcccgattccttccttctccctgga

SEQ ID NO: 99294 - DNA, 98 bp, Homo sapiens
agaacaagaaggtgcatggggatgtcgtgaagtatggcagtgtgatccaggttgtgcccacgtgcctcagggccttggtagaaatggcccgggtaggg

SEQ ID NO: 99295 - DNA, 82 bp, Homo sapiens
tagcatctctcgggagccgcaaggcgagagctgcaaaggacatcggcagaaactagatgatcagaccaagcccgggagcttg

SEQ ID NO: 99296 - DNA, 83 bp, Homo sapiens
gtccctgtattggtctcctgctcctagagcctgtgggccaaagctgaccaactcccccaccgtcatcgtcatggtgggcctcc

SEQ ID NO: 99297 - DNA, 74 bp, Homo sapiens
tcagagatgccaagaagaatctagacagacaggcctttctagcatatcttcattgacataacagaagtgagatg

SEQ ID NO: 99298 - DNA, 75 bp, Homo sapiens
caagtattttcagcgagggtactgtatttatggagaccgctgcaggaagaagccatggatttaataaatagagaa

SEQ ID NO: 99299 - DNA, 78 bp, Homo sapiens
ccttttgcctcccaccgtgattctgaggcctccccaaccatgtgcaatttttggaaattttagcattcaggtgccagg

SEQ ID NO: 99300 - DNA, 75 bp, Homo sapiens
caagaccgtgctggtctttctcaacctcatcttctgggctaaaacactgtcttatgaaccattatcttcagcaac

SEQ ID NO: 99301 - DNA, 100 bp, Homo sapiens
tcatggcagaaggtggatttgatccctgtgaatgtgtttgctctcatgaacatgcaatgagaagactgatcaatctggtttggcagttctctaccagtgg

SEQ ID NO: 99302 - DNA, 75 bp, Homo sapiens
tgtgcagccgcgaggaggcgcgggaggtgttcgagaacgaccccgagacgccacagcctggcagctctgatcagg

SEQ ID NO: 99303 - DNA, 75 bp, Homo sapiens
ataacttctgtgaagctgatgattgaaagtatccagctgatgatggacagtgaaactggtcgatccaagggatat

SEQ ID NO: 99304 - DNA, 83 bp, Homo sapiens
tggagacagggacagcgacttccttgcagcctcttctccggtgagatggaagattttcgaggtatagcagaagaatcatttcc

SEQ ID NO: 99305 - DNA, 100 bp, Homo sapiens
tattcctctcagctttggaatcttttacttctcacttggacaagaactcaagagcagaatctccggttctactgggacttcaccatgctgctgttcatgg

SEQ ID NO: 99306 - DNA, 75 bp, Homo sapiens
cgttttacattggctgttttcctcacattcctcaagcagggattgtgaagcagcagatagacagccatatcacag

SEQ ID NO: 99307 - DNA, 101 bp, Homo sapiens
gggccctttttcacaccaagttctggggaggctgccttcccaacagccgcgtttagtgggctacagatggcatggcatctaaaaccttacaatgcttgatt

SEQ ID NO: 99308 - DNA, 75 bp, Homo sapiens
aaagtcagtttctgaggaatttcatcagtttcagctcaaattctcaagagcaaccttgcatcaatggaacaacaa

SEQ ID NO: 99309 - DNA, 143 bp, Homo sapiens
tcaagatgcgcgtgaagcaggaggagaagctcagcgcagccctgcaggccaagcgcagcctccaccagccatggccatgcagaaaatctttgcccgggaaatcttggactccaggggcaaccccacggtggaggtggacctgc

SEQ ID NO: 99310 - DNA, 74 bp, Homo sapiens
cagaagcgtgtgcctgcagccaggctgggattaaatgccaggcaggcagtggttaaaggttcccttccacatcc

SEQ ID NO: 99311 - DNA, 83 bp, Homo sapiens
gagctgggagcactccattctgcctgggtgacaatgccttggtttcaacactatcggaatgatgtatcctccactcctcgctg

SEQ ID NO: 99312 - DNA, 98 bp, Homo sapiens
tcagcccttcgcgaagcgccgggcagctcgggaacatggccctggagcggctctgctcggtcctcaaagagatcgagatggtgatcatggagcgtagc

SEQ ID NO: 99313 - DNA, 74 bp, Homo sapiens
gcgggccccgggacctgggctgggaacccgcggtggagcgggacacgaacgtgaaacctgctcctccaaagcca

SEQ ID NO: 99314 - DNA, 75 bp, Homo sapiens
gggaggggtgcgaggctagccacgcaggcggggccctgggctattgagggcacctacattgacaagaaatgcccc

SEQ ID NO: 99315 - DNA, 83 bp, Homo sapiens
gttcggtccttccgaggaagctaaggccgcgttggggtgagaccctcacttcatccggtacatgtcccagagcaagcacacgg

SEQ ID NO: 99316 - DNA, 51 bp, Homo sapiens
ggccctcagcatcccttctacaacaggattgctttcacaacaaaaatttac

SEQ ID NO: 99317 - DNA, 119 bp, Homo sapiens
gctgccctttaggatttgttagaaaggagacccgactgcaactgctggattgctgcaaggctgagggacgagaacgagtaccttctccaggcaaattccgttcccctgcagcaccatct

SEQ ID NO: 99318 - DNA, 82 bp, Homo sapiens
ggggctgctggtgggccgcgtcgaagacatggaccagggctacggaggtgtcgtgaaaactacccctaaaagccaaaatggg

SEQ ID NO: 99319 - DNA, 106 bp, Homo sapiens
tggcgtcaggactattttcacgttttaatgccgagagtctattatcctcccagtccacaacgctgaaccgtggctggacgaatgtttgaggtctgttttgcaacag

SEQ ID NO: 99320 - DNA, 83 bp, Homo sapiens
cactgctttccactcggctcctgtcgtccgttctctcaggctcccgttcagactagacgcttgaagcaaagctgccatcccag

SEQ ID NO: 99321 - DNA, 98 bp, Homo sapiens
gaaactggaatcctcaaaatgctgtggctcttcttccagagaatgacacaggtgaaaggactttgccaataccattcctggccatggaggcatcatgg

SEQ ID NO: 99322 - DNA, 82 bp, Homo sapiens
cggcagccgattcctggccacctccatagcaagcaggcccagctgagagccagcctggaggttacccagcagcaggccaccc

SEQ ID NO: 99323 - DNA, 98 bp, Homo sapiens
gcttgaaaccaagataccattttgctgctttggaaaagacctattatgagaggcttccatatcgcaccaggaatatcttagatgattttagagaagct

SEQ ID NO: 99324 - DNA, 83 bp, Homo sapiens
acctccctcacggggaggacacatggcagaaggtgatttactacctctgcatcttattgaaagatccagtggaaccacatggg

SEQ ID NO: 99325 - DNA, 75 bp, Homo sapiens
ttctacaggaagatgctgagaaactgcggaaagaattgcatgaaggcatccgtgtcattctggaccttactccca

SEQ ID NO: 99326 - DNA, 83 bp, Homo sapiens
ggcgatgaccgtgcgctgaccctgactcactccagaaccgggctgtgggtcggcccaaggggaagctgggcccggcctccgcg

SEQ ID NO: 99327 - DNA, 75 bp, Homo sapiens
aagaaagacaaagacccagtgaacaaatccgggggcaaggccaaaaagaagattgtccccttggggcggaaagaa

SEQ ID NO: 99328 - DNA, 83 bp, Homo sapiens
gccgctgtcgtctttgcttcagccgcagtcgccactggctgcctgagagacaagaggagcagcagcggcaccgcccctcaccc

SEQ ID NO: 99329 - DNA, 80 bp, Homo sapiens
atctctgatgtctgtcctgagccttccgaaatacaggtatcaggatgaagatacacctcctcaagagcatatttccccac

SEQ ID NO: 99330 - DNA, 88 bp, Homo sapiens
agaaccatcacctgcattggttccatccttgactgttactacagaaaaagattttttatcaagcagaaatgcatcgaacaacgagaat

SEQ ID NO: 99331 - DNA, 75 bp, Homo sapiens
ccttgctggtgcatgcgtcgtcggcctctgggcagcaggccaggcacctcattgagaagtcagtgcgtaagatcg

SEQ ID NO: 99332 - DNA, 80 bp, Homo sapiens
ccaccaacaacaccacaataatccacagccaaggaagactatgaccgtctgaggcctttatcttacccaatgaccgatgt

SEQ ID NO: 99333 - DNA, 90 bp, Homo sapiens
cttctctgtctgctcaacagtcagatacgagggcaccatgtagcacagctggaccccctggggattttggatgctgatctggactcctcc

SEQ ID NO: 99334 - DNA, 75 bp, Homo sapiens
ccacagtccacatgtcccggattttaacaacctgggcatccagtgtgtgaggaagaaggagattgaggctgccat

SEQ ID NO: 99335 - DNA, 100 bp, Homo sapiens
ggccctggaggtggaggagtccaactcagaggacgaggcctccttcaagtccgaggcatccggagactctggcagcgggctcggggacgcccgggagctt

SEQ ID NO: 99336 - DNA, 100 bp, Homo sapiens
gaagaccaccatcaacaatgagtacaactaccgctgctggaccacaaaccgctgccagaaaagctcttcagaggtgttcctgcccccagaccccatcttt

SEQ ID NO: 99337 - DNA, 90 bp, Homo sapiens
cgcggtccagagcgcgcgaggttcggggagctcggccaggctgctggtacctgcgtccgcccggcgggtctccctctgttgcccaggctg

SEQ ID NO: 99338 - DNA, 74 bp, Homo sapiens
gcatccctcaactagcacctccagctaggttcagcagactgtacaggatctttttggcagagccccaagtaaag

SEQ ID NO: 99339 - DNA, 74 bp, Homo sapiens
aggaagggctggagttgttttgaatgggcgcccgtaagagaggcccggcgcccgcctgcccgcaccctcgtcct

SEQ ID NO: 99340 - DNA, 101 bp, Homo sapiens
ctgcgctttcctgtccccaagccgttctagacgcgggcttgcttccggcgtcatggctcaaagggccttcccgaatccttatgctgattataacaaatccc

SEQ ID NO: 99341 - DNA, 125 bp, Homo sapiens
ttcgggccgagatgtctcgctccgtggccttagctgtgctcgcgctactctctctttctggcctggaggctatccagcagcatccttagtccagaaatggggagctatgaaccttaagattagac

SEQ ID NO: 99342 - DNA, 98 bp, Homo sapiens
aaaagaaaaaactgacacagattcaagaatctcagagcattctgctaagtgatgaatccagcgaggctgattctcagagtgaagacgatgatgaagaa

SEQ ID NO: 99343 - DNA, 112 bp, Homo sapiens
ctcattgctcagcgcggacctagacctggaatcgcccaagtccctctactcgcgaggtgctggagaatctggtaaaagcaccattgtgaagcagatgaggatcctgcatgtt

SEQ ID NO: 99344 - DNA, 89 bp, Homo sapiens
agcggagctcccccaagagccggaaaggcatcaagcatgatggaaccatgtgtgatacctgccgccagcaaccaatcattggcattcga

SEQ ID NO: 99345 - DNA, 75 bp, Homo sapiens
tggaaaaaaacctgatgacatcactattgatgtcaccattaacgaaaggagctattcatcactaatgaaagttga

SEQ ID NO: 99346 - DNA, 100 bp, Homo sapiens
ttgtagacatggcggccatcagggacccatccattttcacagtattgactgctaagtctgtccgccctggagtggccattgctgattttgtcatcttccc

SEQ ID NO: 99347 - DNA, 100 bp, Homo sapiens
ggagtcaggaccgcctgtcctcagacccctccgcagcgactgtggcggccgcagatgtccctggtagatttgggaaagaagcttttagaagcggcacgag

SEQ ID NO: 99348 - DNA, 100 bp, Homo sapiens
catcctgtccatcgtgtgcctgatgatcacgcagctggctggcttcagtggaccagatccctttgtggccttccacatcaacaagggccttgtgaagaag

SEQ ID NO: 99349 - DNA, 101 bp, Homo sapiens
tatcttgtggatcttctgagtaacggaggacaattcaccatagttttctttaaggtgaccaagaatatggcccaggtgaccaaagccctggacaaggccct

SEQ ID NO: 99350 - DNA, 87 bp, Homo sapiens
cataaacctatcttctttcattatggagggaggtttggcagatggagaacctgatcgaacttcgtggcatgccctctcccgtgaaga

SEQ ID NO: 99351 - DNA, 97 bp, Homo sapiens
ccgagcgccagttccgtaaccgccgcaagatactgatccggggcctcccgggggacgtgaccaaccagcccaattttgacatgctttataaccatgt

SEQ ID NO: 99352 - DNA, 115 bp, Homo sapiens
tgacagtgactgaaggaatgaattgaatcttgagacgggtcctcaccaggttgcagaggcagtgttaacatcccaactgaaagcacatcaagagaaaccaaattttattatcaag

SEQ ID NO: 99353 - DNA, 88 bp, Homo sapiens
tgaaacccaaacaacatctcctgctattccttgggctgcctttcctgcaggttatcttgacgaatcagattacaacccatctgagtgg

SEQ ID NO: 99354 - DNA, 100 bp, Homo sapiens
gtgacatctgcgccatctgtcaggccgagttccgagagcctctgattctcctgtgccagttgtaatttagattcgagaagtggtttatcctttgactgga

SEQ ID NO: 99355 - DNA, 74 bp, Homo sapiens
agatggctactctggagttgaggagcggttggttccccgaggcgtacgtgaaggctctggaggaggggcccgtg

SEQ ID NO: 99356 - DNA, 88 bp, Homo sapiens
cgagagatgaggacactgaaattcagagaggggaagtgatttgcctcagcttgtactggctctctttacctatgaaggcaacagcaat

SEQ ID NO: 99357 - DNA, 90 bp, Homo sapiens
ttccaaggacaggcagcccagtctggtgtttggaatgacgacagtatgaaacttgtggtggagaatgttgatgtgttaacacaaatgagg

SEQ ID NO: 99358 - DNA, 82 bp, Homo sapiens
atcattgttggagatgagatccttaagttaagtgggcagaccaacatccacctcagcaaaaacttcttcctgacgaatcgcg

SEQ ID NO: 99359 - DNA, 71 bp, Homo sapiens
ggcccacgccagacacgacgtctggcaggaacctcggcctcagaggatgcaaggtgttgtaaaccgactgt

SEQ ID NO: 99360 - DNA, 98 bp, Homo sapiens
cggttggagtggacgtcattgccgggaacgagcgagtcgccgctgcagccctagtgactgcggcctgcatcccgagcaatgctaagaagacgtttggt

SEQ ID NO: 99361 - DNA, 83 bp, Homo sapiens
cacgccccgaccttccatcgtagccacataaagaagatccctaatagtcatttctcaacaattatatagtcaactgatgtaac

SEQ ID NO: 99362 - DNA, 100 bp, Homo sapiens
ccaaggatagccaatcggaccaaaaattcactcactttgcaatggaaggatgttcttgagtcgaagaacagcaccatcaaggacctgcagtatgagctgg

SEQ ID NO: 99363 - DNA, 96 bp, Homo sapiens
tgttgaagccacacaaagaacaaattgcagttgtttgagatcacttctgtatgtaacttttttacatacattcgatacattcagcagggactcgtg

SEQ ID NO: 99364 - DNA, 101 bp, Homo sapiens
ttccccgtcttcgacctcagttacttcatcgtctccatcctctacctcaagtatgagccagagtgcctggtgaagaatgtgatgggatcactagcatgtct

SEQ ID NO: 99365 - DNA, 90 bp, Homo sapiens
cgagggaccatggccgatcctcgcgtgagacagatcaagatcaagaccggcgtggtgaagcggctgccctgaggatctgtgtttggtgaa

SEQ ID NO: 99366 - DNA, 113 bp, Homo sapiens
aagccagcctaatccaaagactgtggaacttttaagtggagtggtggatcagaccaaagatgggggagtaggttgcatctttgttgaaatgatccaaggagttgctgcttttc

SEQ ID NO: 99367 - DNA, 82 bp, Homo sapiens
cactacgagttccagacgcgccagctggagctgaaggccaagaactatgccgatcagaccctgggcgctgcctatggcacag

SEQ ID NO: 99368 - DNA, 83 bp, Homo sapiens
atcgcagccgccccgaaggagccaggaagaggagatcccagaactggagattgacgtggatgagctcctggacatggagagtg

SEQ ID NO: 99369 - DNA, 98 bp, Homo sapiens
aagcaattcagatggcccaagaacaggctacagatactgaaattttggaggagcatattatttaatatctagaagtctagggccagaatttggtggtg

SEQ ID NO: 99370 - DNA, 82 bp, Homo sapiens
gctcatcatcccccccgacgccgtcgcggtggactgcaaggattctgtttcactgaggccatctatccgatttcaaggaagc

SEQ ID NO: 99371 - DNA, 95 bp, Homo sapiens
tctgggtgcggactcggagaagccctcgagcatccccacagtgagtccattcttgcacaccgagaaaatatgcgacagatgataagaagtttttc

SEQ ID NO: 99372 - DNA, 75 bp, Homo sapiens
gacagatgctagttggtataccgtggtacagctattggaatcagatgcaaagatggtgttgtctttggggtagaa

SEQ ID NO: 99373 - DNA, 80 bp, Homo sapiens
ccggcgctcttcctcccggagtatgagtcgggaagacatcactcatgaaccagtatgtgaataagaaattcagcaatcag

SEQ ID NO: 99374 - DNA, 97 bp, Homo sapiens
cgcctttctgactcggtccggaacactgaaaccagtcatcactgcatctttttggcaaaccaggttcgagaacttgtcttggacaattgcaaatcaa

SEQ ID NO: 99375 - DNA, 100 bp, Homo sapiens
gtaccatattctctggaggttttagacacgtcgtttatacgcaatgcagactggaatgaagatcgatagtaaaactcctgaatgtcgcaaatttttatca

SEQ ID NO: 99376 - DNA, 100 bp, Homo sapiens
gaggagcgaggcagctgtactaggactgggaacgggttgctgaatgctataaagccaggacttgttaaaaagatcaatagattgcctacccccattgcag

SEQ ID NO: 99377 - DNA, 82 bp, Homo sapiens
tggagaaagtcgtcttccacttgcacgaaagctttcctaggccaaaaagagggggtcctgatgacaacttaattgaaggtgg

SEQ ID NO: 99378 - DNA, 101 bp, Homo sapiens
atcgtctcctgtgtggcgatggtcttcctgctggggctcatgtttgagaggacagaaaaatggttcgtattgttcttacaaagacaaagagagatgcagca

SEQ ID NO: 99379 - DNA, 98 bp, Homo sapiens
atgctgcaagaactgctttgctgtcggaaagatgttttaatgattcttccatatgtggcaattgtccaagaaaaggtctttgtgggaagaaacagaaa

SEQ ID NO: 99380 - DNA, 102 bp, Homo sapiens
ctctcattggactcaagccagcatggctcacaccacaaaggttaacggcagtgcctcagggactggtgattgcagctggaagtgcccatgaccgagctggcg

SEQ ID NO: 99381 - DNA, 101 bp, Homo sapiens
ccccagagatgaaatcccggaggcccaagagctctcttcctcccgtgctaggaactgagagatcacctgctgttaccagctaccacccataacaagaccac

SEQ ID NO: 99382 - DNA, 119 bp, Homo sapiens
tgcggaggcgttggagcgcggaaatctggaaccgggatggcgacgtctacactgagtcggaggcgaagtaagactttgaccccgacgcaggcttcagtgattgccgcggatcagaagcc

SEQ ID NO: 99383 - DNA, 76 bp, Homo sapiens
gacggatcaccgtacggccgaacgcgacccgaggaggcggaagagcggcgccggctggagtgcagtggcgtgatct

SEQ ID NO: 99384 - DNA, 91 bp, Homo sapiens
tgctgcggcgcggggaccgctgtgctctcgagctcccagctcctccagcagccgacaggaggcccgtcaagatgcaggcaggcattgccac

SEQ ID NO: 99385 - DNA, 75 bp, Homo sapiens
tccttgtgccatccaaagagcaggtgacttctgggggaacagaaagcatactgatggcctgcaaagcatatcggg

SEQ ID NO: 99386 - DNA, 100 bp, Homo sapiens
cctggagaagctcaaaggcaaagccacattgtaaatcaccttgtgagggcaaaatgcaaagaggtgaccctgcacaaggacgggcccctgggggagacag

SEQ ID NO: 99387 - DNA, 90 bp, Homo sapiens
atccttctcaaccttgtgggatgtgaaaactctgttactgaaggtggtttcagacaccctcacaggttttctaccatgcagcaactgaac

SEQ ID NO: 99388 - DNA, 100 bp, Homo sapiens
aaatacatgaaaaatggggcagaagaagagcagaaaatagcagccaggaaccaagaaaacttgatgaccagctgaactcagaagaaaaaaagaagagaaa

SEQ ID NO: 99389 - DNA, 100 bp, Homo sapiens
gaaagtgaggaattttgaagtacaccgtggtgacattgtatcattggttattggtaaaggttttcaaggtgtcatgaaaagatggggatttaaaggccag

SEQ ID NO: 99390 - DNA, 75 bp, Homo sapiens
tcggtccagaagctggttctgtatgagactagagctacaaatcttcctattttcaagctgaaagaatctactgtt

SEQ ID NO: 99391 - DNA, 75 bp, Homo sapiens
ccgagatcaaggcggacaaggagaaggggttccgggattcactttaagagatttggaaactcttccctttggaat

SEQ ID NO: 99392 - DNA, 82 bp, Homo sapiens
ccaggcaccggttgctgatttccttgttggagtcttcaccactatgagcagaactgtggctgcaccatctgtcttcatcttc

SEQ ID NO: 99393 - DNA, 74 bp, Homo sapiens
taaaacaagaacagatgtgtaatgttggtgtatccatggggcttacaaggctggagtgcaatggtgcaatctcg

SEQ ID NO: 99394 - DNA, 90 bp, Homo sapiens
gacggacaagaccctggtgaaggaggtcgtacaggctctggaagcaaacaccatctctacagcctcagtaaggcccgcccaggaggagca

SEQ ID NO: 99395 - DNA, 101 bp, Homo sapiens
ccctgctctgggacacacctccattggatttaaaagacagtcctcgtcagcactgactttcagctatggaatcggctatccactctgttgcttggcatcat

SEQ ID NO: 99396 - DNA, 75 bp, Homo sapiens
tgtgctgaaatgtttgacgacactgatggtttgaaagcgtggatacccatcaacgaagttttgatattggaattc

SEQ ID NO: 99397 - DNA, 91 bp, Homo sapiens
gagacgagaagcctgaaaagtcgcagcgagctggagccgccggaggcaaggggagagccagttgcgcagagccctgcaaccagcagtccag

SEQ ID NO: 99398 - DNA, 98 bp, Homo sapiens
gaggggtggtgaccatcgaaaggagcaagagcaagatcaccgtgacatccgaggtgcctttctccaaaagaagaagacgttcgtcagcatccttgtct

SEQ ID NO: 99399 - DNA, 50 bp, Homo sapiens
aagtgcttggagtgcagaactgaaagagggcatgccgccgatgactcagg

SEQ ID NO: 99400 - DNA, 100 bp, Homo sapiens
ctggaagcgaggaggctccacacggccgttgcagctaccgcagccagatgagcagcagctgctcagggctgagcagggtcctggtggccgtggctacagc

SEQ ID NO: 99401 - DNA, 90 bp, Homo sapiens
ccggaaggtgctcttctggcaggaccttgaccagccgagggccatcgccttggaccccgctcacggcctgacatttaccccggtaactgc

SEQ ID NO: 99402 - DNA, 100 bp, Homo sapiens
gaataagtcatctctaacctctcccagcctttttttcataagagagaccatattaaacttacatgctttgaacttggcctactccagcatttacggcagc

SEQ ID NO: 99403 - DNA, 98 bp, Homo sapiens
tcacgcctactacctcaaacaccagttctaccccactgtggtgtacctgaccaagtccagccccagcatggcaatctcaggatggacccaagctctgc

SEQ ID NO: 99404 - DNA, 78 bp, Homo sapiens
ttttgaagcacctacactggcaacattagatccacctcatacaggaaatgcaacctcaccacaagtacaaagaccatc

SEQ ID NO: 99405 - DNA, 83 bp, Homo sapiens
gtgttcgagaacgaccccgagacggtatttctgggaaaagccagcttctgtttgcactggtcttcacaactcgttacctggat

SEQ ID NO: 99406 - DNA, 97 bp, Homo sapiens
gtgagctagaaagcagccacctcacagatcaggacaatgaaatccgagccactgacctgcctgagaggttccaggttatcagtgagctgaatggaaa

SEQ ID NO: 99407 - DNA, 100 bp, Homo sapiens
cggggacccttccgtatctgcctaggcattttgctgtctcctcctaatacggggctgtgcgaaaggacgtttaagcgtctgtaccagtatatgctgaacg

SEQ ID NO: 99408 - DNA, 90 bp, Homo sapiens
gcatgaacaccaattaatgctaatgaggcaagggtaaagttctttacaaagttcgctggaaaggctatacatcggatgatgatacctggg

SEQ ID NO: 99409 - DNA, 100 bp, Homo sapiens
tcatcggctgtcttgaatcctttctacaaggagtgggtatcacagatgtcgtaagaatctgaatcctccaaaagacagatgatgcggaggttcctggggg

SEQ ID NO: 99410 - DNA, 82 bp, Homo sapiens
cccggtagtaccgcccatgctgcagcgggaaagagaacagagagtcctggggacaggtattgaagcccctgggtgataattt

SEQ ID NO: 99411 - DNA, 100 bp, Homo sapiens
acccagcttaaagagctccacattcaggggaaccgcctcaccgttctgcccccagaactagggggaaatttgcagtggtgagaaaatgtataaagaaaga

SEQ ID NO: 99412 - DNA, 100 bp, Homo sapiens
atttgtgccaatttctggttggaatggtgacaacatgctggagccaagtgctaacgagtttcaatgcactgtgtgagggaagaacattccgctgtcaata

SEQ ID NO: 99413 - DNA, 83 bp, Homo sapiens
ctgggagctggaggaaccgcgctctctgatgtaaaggatggagtaaatcaagcagcacctgcatttggatttggcagcagtca

SEQ ID NO: 99414 - DNA, 75 bp, Homo sapiens
aaggacgccagcatcatacaccggctgttcgaggccttgactgtaggtattgttgcagcatctggcagtgagact

SEQ ID NO: 99415 - DNA, 82 bp, Homo sapiens
ggtttagcacgatgagctcaatcggcactgggaattatgatctagcccttaagtatttccagaaagctgctgaacaaggctg

SEQ ID NO: 99416 - DNA, 82 bp, Homo sapiens
agtcacagtgttgctgcaacatagagctgacattaactgtcaggaacgaatgatcacacactttgaaaggtccaaaatggag

SEQ ID NO: 99417 - DNA, 98 bp, Homo sapiens
tggcagacatcgagaagcataatgacattgtggacagtgacagcgatgctgaggatcgaggaacgttgtctggggaacgcccttttgcttgtgactgg

SEQ ID NO: 99418 - DNA, 75 bp, Homo sapiens
tgaagagggaagacacgcggaaacagagggcagccactacattagatgagaagattgagaaagttcgaaagaaaa

SEQ ID NO: 99419 - DNA, 96 bp, Homo sapiens
gtcaggaactgggccagttccggtcccttccttttggggctctcactctggaggatggggtggatgggaggacctgatcccaaccttgaagaaagt

SEQ ID NO: 99420 - DNA, 100 bp, Homo sapiens
caaaaatggagggcaaaggagatgtgatgtccactgcctgtggaactccaggctatgtcgacttgtgcaccatggacaattttgctgagggagatttcac

SEQ ID NO: 99421 - DNA, 98 bp, Homo sapiens
gaagaagagcaaagggccttctgcagcctctgaagagccaatccattcaggatgggaaaccacgcaggcaaacgagaattaaatgccgagaaggccag

SEQ ID NO: 99422 - DNA, 83 bp, Homo sapiens
caccggatttataacgacagaagtcttgcattgaaaggctctagttacagtggacttcttgaacgacatcatattcacaccaa

SEQ ID NO: 99423 - DNA, 74 bp, Homo sapiens
ggagaacctgcggcggccggagcggttctaaatgagaagaaacttcaagaggttgatagtttatggaaagaatt

SEQ ID NO: 99424 - DNA, 76 bp, Homo sapiens
ggagcacaagtacttcgaggagagcttcaagagcaccatcaatcagacgcctgtgaccctgcaagtgccgggcttg

SEQ ID NO: 99425 - DNA, 98 bp, Homo sapiens
gggtcattgacgattgcattggtaactggtggagaccaaattttgaacctcctcagatcactccaagaactgaggcccctgtcagcagtgtcagtaat

SEQ ID NO: 99426 - DNA, 100 bp, Homo sapiens
ggaacaggcatggacgtttccgggcaagagaccgactggcggagcaccgccttccggcagaagctggtcagtcaaatacagccctcagcgcctttttcca

SEQ ID NO: 99427 - DNA, 97 bp, Homo sapiens
gccggcgccctggggccccggagagttctactcctttcaataaagaagagttatcagccattttaaagtttggtgctgaagaactttttaaggaacc

SEQ ID NO: 99428 - DNA, 83 bp, Homo sapiens
gcgcagaatggtggccacctggatgctggaggtttgtgaaatggctgctgacatttctgaatccagcggggctgactgcaaag

SEQ ID NO: 99429 - DNA, 98 bp, Homo sapiens
gcgtggggatgaacatcgacatcgccagcatcgacatggtttccgaagtcaacatggatcatggggttgacagcagcattttccagaatcctaaaaag

SEQ ID NO: 99430 - DNA, 75 bp, Homo sapiens
cagaacaattctttagaagtggccatacaaacaactgggctgttctggtgccttatgcccgctcagaggcccacc

SEQ ID NO: 99431 - DNA, 75 bp, Homo sapiens
ggcagcatgtcggtggcggggctgaagaagcagttctacaaggcgagccagtgatgcggacccaggggagcctgc

SEQ ID NO: 99432 - DNA, 100 bp, Homo sapiens
gcatccgaggccacatgaaggctgtggtgatggatctgctccggcagtacctgcgagtagagacacaattccagaatgggaaaatggagctgatagtatc

SEQ ID NO: 99433 - DNA, 100 bp, Homo sapiens
ccgcgtccgccgattcctcctccttggtcgccgcgtccttggctggcgttgctcttaaagttccgtacagataaaggaagagatcccagttctgatacat

SEQ ID NO: 99434 - DNA, 90 bp, Homo sapiens
ggttttttcatggtgttgatctgtttaggaagtggtatcatgagagatatagcccacttagaaatcacactccctagatctttagcttct

SEQ ID NO: 99435 - DNA, 96 bp, Homo sapiens
gggctgcaaacgtcacacgacggccccgcccccttggccagccaactggacagcggagcacgatgattgatagtcgtgtctgttcaaaccggcacg

SEQ ID NO: 99436 - DNA, 87 bp, Homo sapiens
gtggactccttcggcagtccacccaccgccgccgcctcccaggaacttgctactaccagcaccatgccctaccaatatccagcactg

SEQ ID NO: 99437 - DNA, 100 bp, Homo sapiens
ctggactgtgaagagtgaggagaccatagctgcacagccaggtattgttgtctcaaagccagacctcatcacccatctggagcaaggaaaaaaaccttcg

SEQ ID NO: 99438 - DNA, 100 bp, Homo sapiens
tttaatattggccaatcatcaagacaagccagcagctcgctcagtacaagagtcgtcattgaattttgagaagcattctgaaaactttgcatggacagag

SEQ ID NO: 99439 - DNA, 96 bp, Homo sapiens
tgagagaaccgaggaacgaagaaacagacattcaacatgattgcatttgaagttttgctgttactgctcagtgtagtcacaccttgaataagaaat

SEQ ID NO: 99440 - DNA, 76 bp, Homo sapiens
ctagggcctgggccgcggttcggccgcgccggccgggaggaaataatgctggccatacagttgttgtggattctgt

SEQ ID NO: 99441 - DNA, 52 bp, Homo sapiens
ccgcctctgctcccgcctgggaaggacagaataacgggctcccagattcaca

SEQ ID NO: 99442 - DNA, 80 bp, Homo sapiens
gggcgagcggctcctctgccagaggcatccagcccgcactgtggagcagggaggacgtgctgcactggctgcgctgggca

SEQ ID NO: 99443 - DNA, 75 bp, Homo sapiens
tgaacccagaggtcgtggaggtggccgtggaggcagaggtggcatggggcttgagaaggagaaagcagaaattga

SEQ ID NO: 99444 - DNA, 75 bp, Homo sapiens
tgaacattctgccgaagagaacaagacgtgtgaagactcaggaagagagaagggcacagttacctaagtatcaac

SEQ ID NO: 99445 - DNA, 100 bp, Homo sapiens
cctgagacccggacagtggcagtgaaacagcactctcgagtggaccctgaggagctcttcaccaagctcgaccgcattggcaagggctcgtttggggagg

SEQ ID NO: 99446 - DNA, 51 bp, Homo sapiens
tcttcctttgaccacgttatcaaggaggacagtcattttgtttactcattc

SEQ ID NO: 99447 - DNA, 100 bp, Homo sapiens
gaaggccgaggccaagatggcggtgctgtcaggagatctataaggacaggcagaaattctcagaacaggttttcaaagtggcctcctcagacctggtcaa

SEQ ID NO: 99448 - DNA, 75 bp, Homo sapiens
tatcagttgattgggagccactcgggggtgaagctttgcaggtggacaaaggccaatgaacttccggcagaacta

SEQ ID NO: 99449 - DNA, 100 bp, Homo sapiens
gaatgattttaaagttatgggactacaacagcagccacaggaaccttgagatgtggtaccacagattgtcccacctacacagcaggcttcaggacttgct

SEQ ID NO: 99450 - DNA, 77 bp, Homo sapiens
cggacgccggtctctgttccgcaggatgacaatgcagatcttcgtgaagactctgactggtaagaccatcaccctcg

SEQ ID NO: 99451 - DNA, 90 bp, Homo sapiens
gcacaagtggatgaagctaggggacgccgatcccaactttgacagggaaagatgaatgggagggctgattttcgagagccgaatgcagag

SEQ ID NO: 99452 - DNA, 75 bp, Homo sapiens
cctggggctgtgctccatggcgagctggattctggacaatcaggaagtccaagccacaatgatcctgccaagaat

SEQ ID NO: 99453 - DNA, 97 bp, Homo sapiens
gatgcaaatatcgaagaacagaaagaagaaaagaaagatgcagaggaagaggaaagcgaactggaggcctcagcggggcaacagtcattgactccct

SEQ ID NO: 99454 - DNA, 104 bp, Homo sapiens
gtctcttccatctgctgctcacctcagctgcctgggtccccgacgagagccagacaatgcagatcttcgtgaagactctgactggtaagaccatcaccctcgag

SEQ ID NO: 99455 - DNA, 90 bp, Homo sapiens
tgtatatgagtctgaggcagaccaactgttgggaaatacaatgaaagttcctatagaagagcagcgtggggactacgacctgaatgctgt

SEQ ID NO: 99456 - DNA, 75 bp, Homo sapiens
ggcctttccagcccgtggtccttctccatattcgaggagaataaaggcagccccgttgatgactgaaaatgacaa

SEQ ID NO: 99457 - DNA, 101 bp, Homo sapiens
ccaaactgatctaacagggcaaaaaaagggctggaaacttcgctatcatggagatcttggtgacaaagttcctgctgatataaggttaacttccatcaaat

SEQ ID NO: 99458 - DNA, 83 bp, Homo sapiens
cgtccggtagacatgcttttacggagtatgttcgtcactccaaacacaatgattgcagcgagaacattgggagatcttgtgcg

SEQ ID NO: 99459 - DNA, 96 bp, Homo sapiens
atgagcagttaaccagagccatccttcgggagaggatatgtagcgaggaggaacgcgctaaggcaaagcacctgttgaaagcagagtgtaacaagg

SEQ ID NO: 99460 - DNA, 90 bp, Homo sapiens
ccgccgctgatcgaggagccagccttcaatgtgtcctacaccaggcagcccccaaatcccggcccagatcttgtagaaaatttcagctgt

SEQ ID NO: 99461 - DNA, 90 bp, Homo sapiens
taaaattccaagatctctaaagttacaacctagagagaatttagaatttatgcgtatgattggcaatgacaaacaaggacagatgatcgt

SEQ ID NO: 99462 - DNA, 90 bp, Homo sapiens
ctagcgcggcctgggatgcgcttgggctccctgggggagcacctggggaccacggaagcgaccgaggccttctttgccatgaccaagctc

SEQ ID NO: 99463 - DNA, 75 bp, Homo sapiens
ggacagcttcgacttagccctgctccaggaatgggacctcgagtcactgtgatctattaatgagatgaagcggtt

SEQ ID NO: 99464 - DNA, 100 bp, Homo sapiens
ggctgaggatgggaagaggtgtgtggggccatgctatgatagtggaagcttatccaaaataatagatccagaagaagtgacctgaagtttctgtgcaaca

SEQ ID NO: 99465 - DNA, 75 bp, Homo sapiens
attgtggacagtgacagcgatgctgaggatcgaggaacgttgtctggagtctcgctgtgtcacccaggctggagt

SEQ ID NO: 99466 - DNA, 96 bp, Homo sapiens
aggatttggcgctgcagaaccagatccgggagcacgtcatctccatcgaggggatcatggcccaagttgcaatgtccaccctccccgttgaagatg

SEQ ID NO: 99467 - DNA, 88 bp, Homo sapiens
aaaatttgaacaggttaatctgttggattctaatgcagttcatcacatcattcatgattttcagggcagcggtcttaattctttttat

SEQ ID NO: 99468 - DNA, 100 bp, Homo sapiens
cagatcctcaatagacagcccatggagggtagatctcggtatgtgccagtcaaagatctactgggaatttatgagaaactgtatggtcgaaaagtcatca

SEQ ID NO: 99469 - DNA, 75 bp, Homo sapiens
cggcaccttcacctccctgctgctgctggcgtcgacaggggctgccaggggttgctggacgtcctggagccaagg

SEQ ID NO: 99470 - DNA, 75 bp, Homo sapiens
aaagcaaaatctgccccttcaccatcgccattttcctaaagtacagtaatggtcttagtcctgggtaacaagcga

SEQ ID NO: 99471 - DNA, 82 bp, Homo sapiens
gcagtgaccgagatcgtcaacagctttcaccaacaatcaccagtggtttacacaacattgcaaggagcattgaaactcgaaa

SEQ ID NO: 99472 - DNA, 83 bp, Homo sapiens
gggccccgggacctgggctgggaacccgcggtggagcgggacacgaacgtggttcattggcatggaaaaatgttcagtgggag

SEQ ID NO: 99473 - DNA, 98 bp, Homo sapiens
ccaccagtggagtccaggatgaggtcatatgagaggttccctgcttaccctgcagagattagttcaactatttcccaatgatacttccttaaaaaatg

SEQ ID NO: 99474 - DNA, 89 bp, Homo sapiens
tatgatgcaagtgatagaaccccagtttcaacgagacttcatttcattgctccctaaagagccaataggagctctgaacccaaaaagag

SEQ ID NO: 99475 - DNA, 50 bp, Homo sapiens
cttggccgcaccattgcagaccatggatttgtcttggctgttactatgac

SEQ ID NO: 99476 - DNA, 93 bp, Homo sapiens
aagtgccgctttaaggagaactgcagggaactttccagatgctctcgaccagctttgtggctctacatctcttcatcaggaagaacggcgccg

SEQ ID NO: 99477 - DNA, 87 bp, Homo sapiens
cgccaaccccttcgagcaagacgtggtttttggctttcacccccaaccagtgaccaaagacttgaccactcaaagtccagctcccca

SEQ ID NO: 99478 - DNA, 137 bp, Homo sapiens
taagagctcgtcttcaggatcaacacatgttttacagtggtgtaatagatgtaatcacaaagacatggaggatcttctaagggtgtgaggatacaggcgtcaaagaccccgtgctgagacagctccataacaacatg

SEQ ID NO: 99479 - DNA, 83 bp, Homo sapiens
aaaaggaatcgtatcgtatgtccgctatccagaacctccactctttcgaggatgtactgagtaaagatgctggggaatgtgca

SEQ ID NO: 99480 - DNA, 82 bp, Homo sapiens
atgtcccagaaaggacacaaatagatgtaggcagaatacctttacagaggttaaaattgtttcaccagtgatcattaaagaa

SEQ ID NO: 99481 - DNA, 75 bp, Homo sapiens
ccgcttctcccgcttcaacgaagaccgagactttcaggaagccagcagacctgcagaacttggctcccgggaccc

SEQ ID NO: 99482 - DNA, 89 bp, Homo sapiens
gcgacggcggcaaatctaagaaatttgctaatgtaatgcttgaatatgatattgatgaagctcaggcattgttggaaaagaatttatcg

SEQ ID NO: 99483 - DNA, 75 bp, Homo sapiens
cgggtctcgggggccgctctgggatcccggccaccagcaattgtccgatatattcgactttatgggagaaaattt

SEQ ID NO: 99484 - DNA, 100 bp, Homo sapiens
agaagagggcagagccgtgcatggggctgctccccaggacctgagcaggaacctggagttttcaggaccgtataatagacgctggccccaaaggaaacta

SEQ ID NO: 99485 - DNA, 100 bp, Homo sapiens
gccatgaacggatggatgtgatgcctgctagccaaaaggaaatgtagacaaccaatttcctgggcaagctgctccacctggattcccagtgtatcccgcg

SEQ ID NO: 99486 - DNA, 101 bp, Homo sapiens
gctgggagcgtgctttccacgacggtgacacgcttccctggattgggacccaaccctggaagaaaagatggaatattttcagaatcaacttttaattctcc

SEQ ID NO: 99487 - DNA, 100 bp, Homo sapiens
ctgatgctttatctcagtttcatgctgccgtaggatacctccaaaagcagccatactttggagcagttattgggagggtggccaaccgaatcgccaaagg

SEQ ID NO: 99488 - DNA, 74 bp, Homo sapiens
cgccggcctcctcagtgcgaagaagctgcagccgcacctggccaaggagtctgggacgctattaccctggggat

SEQ ID NO: 99489 - DNA, 98 bp, Homo sapiens
tgactgcaagcctccctcaatttctggctgactgtgctgtcctgattgttgctgctggtgttggtgaatttgaagctggtatctccaagaatgggcag

SEQ ID NO: 99490 - DNA, 50 bp, Homo sapiens
ctgggcctcccggtccgcaagcagcctacaacacagcagtcccctcagga

SEQ ID NO: 99491 - DNA, 100 bp, Homo sapiens
atctgtcttcggtggactccttcggcagtccacccaccgccgccgcctcccagctgcctgtggaggaaccgattgtgtccacagatgaggtcatcttccc

SEQ ID NO: 99492 - DNA, 101 bp, Homo sapiens
gaaggcgcacaggcagaagagcagcagcgtcaggaaggtgccattgcggagcctcatctcctcgggatgattatttcagaaactggaatcccaacaagccc

SEQ ID NO: 99493 - DNA, 75 bp, Homo sapiens
cagaggacaacgaagtgttcggtttcccaggcagctgcagacttgaaacagttctgtctgcagaatgctcaacat

SEQ ID NO: 99494 - DNA, 100 bp, Homo sapiens
agcccagcgggaggatctggagacagccatggagttctacttagaggttcatcacaagacctatgaagatatagataaacgtggaaaatatgacctttta

SEQ ID NO: 99495 - DNA, 98 bp, Homo sapiens
gaaaatccacctcgcagcttgtaaatctacaggatcttatggttggtgatgaggcaagtgaattacgatcaatgttagaagttaactaccctatggaa

SEQ ID NO: 99496 - DNA, 100 bp, Homo sapiens
aatgctcctttaatttttgaacgagagctgaaaccaccaatgggtgaggtcgtcacccctacggccccccaggagcctcctgagtctgtgaggccatccg

SEQ ID NO: 99497 - DNA, 101 bp, Homo sapiens
ggaagatggcgcctgttgtgacaggttcataattggacccttgaagacactcttcagtggttgatagagtttgttgaactaccccaatatgagaagaattt

SEQ ID NO: 99498 - DNA, 83 bp, Homo sapiens
ccagaatcagcagctccggcagcagtgtcctgtgctgatggtgttggcaggaactgtggctgcaccatctgtcttcatcttcc

SEQ ID NO: 99499 - DNA, 100 bp, Homo sapiens
cgaggctgagacctcgggcaacctcagcagtgcgcagggctgcactgtctccgtctgcggcctgcagtaagcgggccggatcacctcaacagtcacgtca

SEQ ID NO: 99500 - DNA, 50 bp, Homo sapiens
gtaaagaggctggagaggagctgggtggagagaagtctttggcctatcat

SEQ ID NO: 99501 - DNA, 97 bp, Homo sapiens
tctgatgagtttaacaggtctgaaatctttggatctctcgcgcaactccttggttagtctggagtgaacagcgttctgagtgtggacgagtagccag

SEQ ID NO: 99502 - DNA, 75 bp, Homo sapiens
aaatggatgcaagtttaggaaatctatttgacttaattcagtgcacaaatgagatgaatgtgaacatcccacagt

SEQ ID NO: 99503 - DNA, 74 bp, Homo sapiens
caagcggccggagcggcgccatggaggagggggcgccgcggcagggggggccctcagcctcttggccttgaacg

SEQ ID NO: 99504 - DNA, 78 bp, Homo sapiens
ggagcctcagttggaagcagccgatccagcctgcggagcctgtggggcagtgttttaactcaaatgggtgatgaaaag

SEQ ID NO: 99505 - DNA, 90 bp, Homo sapiens
agcctttggccagaagatcggccacttccagttaagtgggcagaccaacatccacctcagcaaaaacttcttcctgacgaatcgcgccag

SEQ ID NO: 99506 - DNA, 100 bp, Homo sapiens
cgtctccttgaacgttgtcccgcctgggattgcgagaaagcataacccctactgtagaactaaatgcactgtgcatgaaacttggaaaaaaaccaatgta

SEQ ID NO: 99507 - DNA, 97 bp, Homo sapiens
gagtggcagactgacaactgtgagacatgcacttgctacgaaacagaaatttcatgttgcaccctggctgtgggacagatgatgtctaccatgttct

SEQ ID NO: 99508 - DNA, 100 bp, Homo sapiens
ccgggagctcctggtcatcgagctgtccgacaaccctggcgtccatgagcctgattctgacaatggagatattaattatgattatgttcatgaattgtca

SEQ ID NO: 99509 - DNA, 100 bp, Homo sapiens
atcctcatcgcaaccttggtggtggcccagctgctcctggtgcagtggaagcagaggcacccacgctcctacaatcaagcagatctgatatcattaggaa

SEQ ID NO: 99510 - DNA, 82 bp, Homo sapiens
tccggcaagatcgagaaagcaggactttgtgttttatgccccacgtctgagaatcaacaagcggatcctgcagctctgcatg

SEQ ID NO: 99511 - DNA, 75 bp, Homo sapiens
cagccatcacctggatttacctgttttctgggagcttcgaaggcccagtccacaggctcatgtctggggccccgg

SEQ ID NO: 99512 - DNA, 75 bp, Homo sapiens
gagcttttaggcatacaagtaccctggctggtcaggacaatcgcagcaagctccggaacatgaccgacttccggc

SEQ ID NO: 99513 - DNA, 78 bp, Homo sapiens
ccaccctgggcagtatagagacgtcggacttcacggtggccctcatgacactgacgctcttcccggtccggctcctgg

SEQ ID NO: 99514 - DNA, 75 bp, Homo sapiens
cggcaaactccctggtctctgttggtgtagaagccaaaatcaggcagtgttctgacttactgagccaggcccagt

SEQ ID NO: 99515 - DNA, 102 bp, Homo sapiens
cagcgcctgggctggaggacagagaagccttttccgttgccggtgccggcctagcgtcctggaattacttcaatcaaatgatgttgaatttgaagtatcatc

SEQ ID NO: 99516 - DNA, 100 bp, Homo sapiens
aggggcggaggcggaggcagaggtggaggcgctttgaaagcccatgctcttgtctgcccagctgttgcttctgagatcacagtcttcttattcttaagtg

SEQ ID NO: 99517 - DNA, 82 bp, Homo sapiens
agcataactgtgatcatgctgaggatgctggagtgatttgctcaagtgatgatgaacagtctacacagatggctgcaagttg

SEQ ID NO: 99518 - DNA, 100 bp, Homo sapiens
tccggatgaaagctacaatgaagtatatgcagaggaggtcccacaggctcctgccctggactaccgagaaaacccgcctagtgccaagcaaccctccaag

SEQ ID NO: 99519 - DNA, 83 bp, Homo sapiens
aggcaccttcctcagtcgcgccgtgcaggtattaatctctggagaagacacatccacagttagcactttcttcagatgctgac

SEQ ID NO: 99520 - DNA, 71 bp, Homo sapiens
ctggacaagcacgagggcgcgctcgagacgctcctgagattagaaatgatatttgccaaatttgatgaagt

SEQ ID NO: 99521 - DNA, 100 bp, Homo sapiens
ctcaaccaagtcattagagagagagacacaaaactcccgaagccccagctggagcagccctactctgatagatgtctctgctggatgaaccgaatcctaa

SEQ ID NO: 99522 - DNA, 80 bp, Homo sapiens
ttcaatgcagttagaaggaaaaggtcaactcgatccaatacagaccatcaccgaagtggccttggagtacaacaactgtc

SEQ ID NO: 99523 - DNA, 100 bp, Homo sapiens
atcgagaccactttggccgtacattctataatcaggcaattatgtcttctaaaaatattgcacaggttcctagaagccaaaccaaactgacaataatgct

SEQ ID NO: 99524 - DNA, 105 bp, Homo sapiens
gaggttttcaggaaacttgcagcaaagccattcgggttggagtaattgatgttggagtccggggtgacctggtctcagtgaagaaatctttaggccggaatcgac

SEQ ID NO: 99525 - DNA, 100 bp, Homo sapiens
ggcggtggtgtgctcgagcaaccagaaccggagcatggaggcgcacaacatcctcaggctttccttaaagtttcccatgtctcaatggactcctgaatat

SEQ ID NO: 99526 - DNA, 75 bp, Homo sapiens
cgctgcctggccttcgagtgccctgagaactaccgccgctccgcagccaccaagctgcctcgtacccagccagac

SEQ ID NO: 99527 - DNA, 75 bp, Homo sapiens
gcaggctcgagtgcacggagcgtcccttccatcaggagaggccctgccctgggagaagccctgccacacgtcgtg

SEQ ID NO: 99528 - DNA, 83 bp, Homo sapiens
atctgcatggaattctgtggggctggttctctccaggacatctaccaagattgacctgatccacctgggggccaagttctcac

SEQ ID NO: 99529 - DNA, 75 bp, Homo sapiens
tctcaaccttgtgggatgtgaaaactctgttactgaaggaaaatctggagagctgaagagttggagctattcacg

SEQ ID NO: 99530 - DNA, 101 bp, Homo sapiens
atgtcagtggaaaggagagctaccatcactaagaaaaatcctgggtagaagctggatcagcaagaatgtcactccttatattggtgtccattttcttatct

SEQ ID NO: 99531 - DNA, 100 bp, Homo sapiens
tgaagagacatgagacagtagtcaaatactcagccagctgaggtgggtgtcctggttggcaaagaccggtcaagtttttacgtgaatgggctgacacttg

SEQ ID NO: 99532 - DNA, 100 bp, Homo sapiens
ttgggggctcagaggggagtcatcatgagcgatgttaccattgtgaaagaaggttgggttcagaagagggatttctcggctggagcagacatgggtgacc

SEQ ID NO: 99533 - DNA, 100 bp, Homo sapiens
acccagtctgagtgtctgtccccagagcctcagtttgtgcaggacaccgacatggaacagggactcactgggggttgttcggaatcctataattgaaaaa

SEQ ID NO: 99534 - DNA, 98 bp, Homo sapiens
gtgccgccagtgtttccgtcagtacgcgaaggatatcggtttcattaaggtatggcccatctcctgtacgcttggagcgacctttggctacgtggctg

SEQ ID NO: 99535 - DNA, 100 bp, Homo sapiens
tgtctctccagatggatccctctgtgcttctggaggcaagctgcctctctccagaatgatctcaaccagggtggcccagggagcactaattccaagaggc

SEQ ID NO: 99536 - DNA, 100 bp, Homo sapiens
tagcggcgcggcgctcgctcctacgagtaaagccaatcccagctgaaggaatcaagtcaaatccttccaagcggcatagagaccgacttaatacagagtt

SEQ ID NO: 99537 - DNA, 100 bp, Homo sapiens
aagaaagaaagtctttttgtggtctctggagatacttttcattcatttcctcattcagggctgatggagttatgagaacaatgaacacagaaaaactcct

SEQ ID NO: 99538 - DNA, 75 bp, Homo sapiens
atgctagtggaggggaaatatttgtataccaaatactacattcaccgaattccaagaagccgggaggttcagcag

SEQ ID NO: 99539 - DNA, 75 bp, Homo sapiens
tttctcagaaaccttcacatcttggtcaagcaggtggtccattatggctgacatgcaaaatctggtagaaagatt

SEQ ID NO: 99540 - DNA, 75 bp, Homo sapiens
agctgagtggttgtgtggtcgcgtctcggaaaccggtagcgcttgcagcatggggcgacctatctactgctcttg

SEQ ID NO: 99541 - DNA, 101 bp, Homo sapiens
ccctgccctttccctcctggctgacaatgcagatcttcgtgaagactctgactggtaagaccatcaccctcgaggttgagcccagtgacaccatcgagaat

SEQ ID NO: 99542 - DNA, 75 bp, Homo sapiens
gaggttgattacagcggcctcagggttcaggcaatgcaaataagattgccaacactcctgatagctgaatgtgtg

SEQ ID NO: 99543 - DNA, 100 bp, Homo sapiens
agctagccgggagttacaccgccaccgccagacatgtcatgctgcccaaggacatagccaagctggtccctaaaacccatctgatgtctgaatctgaatg

SEQ ID NO: 99544 - DNA, 76 bp, Homo sapiens
ttggaactgtggtccatggtaaagttttacagaacttggagcgtgatgcccagaagtgtgtgaactggtctgtgac

SEQ ID NO: 99545 - DNA, 75 bp, Homo sapiens
cttcaatccagttccaaggactccacggggtggttatcactaggctaaaactggacaaagaccgcaaaaagatcc

SEQ ID NO: 99546 - DNA, 51 bp, Homo sapiens
cggggagagatcgccccctcgcgggatcttcattgccttgctgctgcgctt

SEQ ID NO: 99547 - DNA, 82 bp, Homo sapiens
gctacgcgagggagcacggacagtgtgcaggaactgtggctgcaccatctgtcttcatcttcccgccatctgatgagcagtt

SEQ ID NO: 99548 - DNA, 100 bp, Homo sapiens
ctgagaacctcaacaacccacatgacattgtcatcttccatgagctgaagcagccaagaggaaaaaagggttgctcattttgggtatcactggagtctga

SEQ ID NO: 99549 - DNA, 100 bp, Homo sapiens
aagctgcagctaccagattaaaaggaatagtcccattagcaaaggctatacctccctttgaatttgctttcaaagatgagcgtatctcttttactattct

SEQ ID NO: 99550 - DNA, 100 bp, Homo sapiens
gtttgaagcaacaccctagatggatgtacagccatcaagaggatcttaaagtgtggtctttagtggaaaaaaagagtacccaaaggcaagtggaacagct

SEQ ID NO: 99551 - DNA, 105 bp, Homo sapiens
atttctctcacctctcatctttggaacgggagatgactttttgcattgaaacgacagctcagcagctcctcctcctatagtggggacatcagcaggcaccacaac

SEQ ID NO: 99552 - DNA, 90 bp, Homo sapiens
ggcacaggaatatccatgtcggcttgtagagagattgcaatctggcaccactccttctacaatgagctgcgtgtagcacctgaagagcac

SEQ ID NO: 99553 - DNA, 100 bp, Homo sapiens
ttgggccaccattttggattcagcagattgacttacgcaggattctcagcccttgcctgggagaacagttcaggagacagatggccccaagagcccagat

SEQ ID NO: 99554 - DNA, 83 bp, Homo sapiens
aagacgtccaatctgagcgtgctgcggacggcgctgcggtacatccagtcgtggcattcctggtggctttccatcagaacaag

SEQ ID NO: 99555 - DNA, 75 bp, Homo sapiens
aagacatcaccatgaacactagcagctcacgacttatttagatgtacagcggtgcctggaatatttgggctatct

SEQ ID NO: 99556 - DNA, 100 bp, Homo sapiens
tggagaacgaattctactatcgctacccaataatccagtccctcatagcactggtgaatgacccccagcctgagcacccgcttcgggctgacctagctga

SEQ ID NO: 99557 - DNA, 90 bp, Homo sapiens
gcagcgacatcaccaagctggaggtggacgccatcgtcaacgccgatcaggatcctcatgaccagccaaagagaagaagaattaggaagc

SEQ ID NO: 99558 - DNA, 50 bp, Homo sapiens
aagacaatcactgcagagataccagtatgccgagattttgctgtcctgga

SEQ ID NO: 99559 - DNA, 75 bp, Homo sapiens
ggagaaggaaggcatggaaagttccagccggttcgagagctaggagatggaataaactgagactgcaggacaaag

SEQ ID NO: 99560 - DNA, 100 bp, Homo sapiens
gcccagcgcggccgcctggccctcgagctcgccgaagatgtccccggcgcagcgcgacagagtttgagcggtgctgaactgtcagcaccatctgtccggt

SEQ ID NO: 99561 - DNA, 75 bp, Homo sapiens
cgtgaccgagagcgtgaccgagagcgcgaatatcgtcatcgttagaagctccctgtgctgtcaggaatctacagg

SEQ ID NO: 99562 - DNA, 109 bp, Homo sapiens
cgaacgtggtggagctgtggcaggcagaagaaggggaactcctgctgcccactcagctatatgttctcctttcagccaagacctttcaccagtgcaggggatagaagat

SEQ ID NO: 99563 - DNA, 100 bp, Homo sapiens
cgagagcgtgaccgagagcgcgaatatcgtcatcgttagaagctcaaatctaatccaagtgaaaatgaagaaaaggaagcacagtctcaacttataaaat

SEQ ID NO: 99564 - DNA, 90 bp, Homo sapiens
accattgtgtcccgcattgcccgcatctgcaaggcactggaaatgtacaaagatgactggaacaaagtgtccgagcatgtgggaagccgc

SEQ ID NO: 99565 - DNA, 75 bp, Homo sapiens
ggccaagatccaggataaggaagattataagaagaccagtctagcaccttatgtgaaagtttttgaacattttct

SEQ ID NO: 99566 - DNA, 75 bp, Homo sapiens
gagggatccttcacccgtgtctgaaattcattgagtttgaagatgctctggaacaagagaagaaagagctgcaaa

SEQ ID NO: 99567 - DNA, 90 bp, Homo sapiens
ggctgatcctgcaccacaaggtgtacgatttgaccaaatttctggaagagagatggagtccacagcctaccctctcaatttgagcctgaa

SEQ ID NO: 99568 - DNA, 76 bp, Homo sapiens
acagaccctgagggaaatgatgaccaaagatagaggctatggagaaaagggaacctcagaacctgttctggatcca

SEQ ID NO: 99569 - DNA, 101 bp, Homo sapiens
tgggaggctccgttgcctgctcccggagggagacgcgctgccgaggagaacccagcggatcgtctatgcggaaagacctctcacagacaaccacagatcat

SEQ ID NO: 99570 - DNA, 84 bp, Homo sapiens
caggaaggtctcacctgaggtgaaccttcgaccttggacttctcagcctccagaatggtcaaaatgcagatcttcgtgaaaacc

SEQ ID NO: 99571 - DNA, 76 bp, Homo sapiens
aagttgacaaaaacttaaattgtggaatgggggacttaggagccattgatgaaaaatacgacgtggctatatcatc

SEQ ID NO: 99572 - DNA, 100 bp, Homo sapiens
tagagagcgaaaccatcttcaagttagcagcgtttattttacagtgattgcagatcggcctcccccagttattcgacaaggtcctgtgaatcagactgta

SEQ ID NO: 99573 - DNA, 75 bp, Homo sapiens
atgaaaaaggatgttgaccggacagggcgcccatgtgagttgttaccgcctccactgtccgcctgtccactgccc

SEQ ID NO: 99574 - DNA, 129 bp, Homo sapiens
cagccgtcatgccggggatagtggagctgcccactctagaggagctgaaagtagatgaggtggacgtctgatttatgaagctccccatccacctatctgagtacctgacttctcaggactgacacctac

SEQ ID NO: 99575 - DNA, 112 bp, Homo sapiens
gttatgacagtggaaccggggtttggagggcagaaattcatggaagatatgatgccaaagggtaggagtcaatgaagacatcttagtcttaacaagttacagataatctctg

SEQ ID NO: 99576 - DNA, 153 bp, Homo sapiens
aggtcatattgaacattccagatacctatcattactcgatgctgttgataacagcaagatggctttgaactcagaagccttatcagttgtgagtgaggaccagtcgttgtttgagtgtgcctacggaacgccacacctggctaagacagagat

SEQ ID NO: 99577 - DNA, 90 bp, Homo sapiens
acaaggtcgtcggctggcggagcggcttgagtatgttgcaagtgagggtgaagaagatccagaagttgaatttttaaagtcactaacaac

SEQ ID NO: 99578 - DNA, 75 bp, Homo sapiens
gaaaattttctcctggtagacctcggtccaaacaggtggaatggatccaacagcaagtggtaaaaaagcggacaa

SEQ ID NO: 99579 - DNA, 83 bp, Homo sapiens
ctagctattgccttattttttctcatggatgttcttcttcgagtatttgtagaagggtcagtcttcactgtttccaatggaag

SEQ ID NO: 99580 - DNA, 100 bp, Homo sapiens
tgatgagatgcgcaggctcaacatacccgtactacaggatgatggctttctcttcctctgggtcacaggcaggctcccagccccattgccaataccttcc

SEQ ID NO: 99581 - DNA, 99 bp, Homo sapiens
ctgttatatgttcttatgtgtggatttctaccatttgatgatgataatgtaatggctttatacaagaagattatgagacggggtcttgctctgtcaccc

SEQ ID NO: 99582 - DNA, 98 bp, Homo sapiens
gagtcttgaatcctaatgagcagccaactcataaattccgatatttaaataaggcttttcatatctggtccaagaaagaaaaattctcacccactttt

SEQ ID NO: 99583 - DNA, 100 bp, Homo sapiens
gagagtgctgcttcaggaggagcagcctatacaaagagtttatttacaaatgttggagtaataaagaaggcagaacaaaatgagctgggctttggaagaa

SEQ ID NO: 99584 - DNA, 90 bp, Homo sapiens
ccgcgtcccgctcgctgggagagaggtacctctccttttccctctccctttccctaaggctgctctttggcgtaaattgcaatcgattag

SEQ ID NO: 99585 - DNA, 74 bp, Homo sapiens
ttcgtacccacagtgcttcatgagagggtcagtttgaaaaggaggatcgagctcactgtggagtatccatggag

SEQ ID NO: 99586 - DNA, 75 bp, Homo sapiens
cagcagcggcagcggcaagcaccgttcaacctttgggaatgaagaacagccagttctgaaggcatctctgccttc

SEQ ID NO: 99587 - DNA, 98 bp, Homo sapiens
ctaggcccgcgagtgcccgggcccagcccggcctagttcagattactgtggcatgatcctccaccattcacactctaccctggactctgggaagggac

SEQ ID NO: 99588 - DNA, 50 bp, Homo sapiens
atcaactactcctgcgaggaaaagctggaccaagcaacactctccctggc

SEQ ID NO: 99589 - DNA, 82 bp, Homo sapiens
tggctaatctccttaagtcggccttccctcacctacaagaggttttcagagaaagatgctgatgaggtgaaaggaatttttg

SEQ ID NO: 99590 - DNA, 51 bp, Homo sapiens
tcgagatcgccatgcctacccataacagcgacttgattgcatgtacagtga

SEQ ID NO: 99591 - DNA, 90 bp, Homo sapiens
aatcctggagagccccggtttaagatctccagggcccagataaaggccactgtgaaacgcaaggtatatgaagattctggcatccccctt

SEQ ID NO: 99592 - DNA, 78 bp, Homo sapiens
catcacgacccattcaggagcctccaggagcccagacaccagccccccaccatgccttctgtggacgattacatgggg

SEQ ID NO: 99593 - DNA, 100 bp, Homo sapiens
cgagtggacaaaatggcgaagatcgccaagactcacgaagtactgccaaatctgtcgaaagggagataatgaagaactgcttcttctttgtgatggctgt

SEQ ID NO: 99594 - DNA, 101 bp, Homo sapiens
aatggcagtaaccctgagacaaccacttctggtggttgccactcacctgaggatggagaagcagaatttgcccgcatcatgagcattgtggaccccaaccg

SEQ ID NO: 99595 - DNA, 100 bp, Homo sapiens
gccaccgccgccgccgccaccaccgccaccggaacccgagaccgagtcagaacccgagtgctgcttggcggcgaggtagttaaaccagagagcaatgaca

SEQ ID NO: 99596 - DNA, 97 bp, Homo sapiens
aacagtgcaaggaagcctggttcagcaggtggccctaaggttggaggtgaccaagaatatggcccaggtgaccaaagccctggacaaggccctgagc

SEQ ID NO: 99597 - DNA, 98 bp, Homo sapiens
ctgcctcccgcatcagccgcttggccaactttgggggaacacatgattctgtgcagatttgcagaccagacagctgtccagctcccaccccaacgaag

SEQ ID NO: 99598 - DNA, 89 bp, Homo sapiens
tggctgccgtcatcaccatcaccttcaatccgctctactggaatgtgtgatgtcttggcattgcccattttcaagcaggaagattccag

SEQ ID NO: 99599 - DNA, 75 bp, Homo sapiens
caagatttcctgggtcaacaggttacatttggccaaaatcggactccactgtaccccatctggagacctgagccc

SEQ ID NO: 99600 - DNA, 75 bp, Homo sapiens
cttgttaagagtggacaggttaagggactcccaggaatatcagatagggatgaggaagaaatgaccaaacgagat

SEQ ID NO: 99601 - DNA, 74 bp, Homo sapiens
gggagctggcggccgggctggggctgctgggcggagggcctgctatggtgtgctgcggttcatcatggagagtg

SEQ ID NO: 99602 - DNA, 98 bp, Homo sapiens
ctgagcgcactctggagggattctggcatcagggaggctttcagccggagaagcgagtttcagctgatgagtttgatgcctacatcattgtgtctttc

SEQ ID NO: 99603 - DNA, 50 bp, Homo sapiens
gcccaggcctgggccctcagaaagtacagagcatgccagcgcctcagcta

SEQ ID NO: 99604 - DNA, 140 bp, Homo sapiens
agaggagtctgatgatgagaatgctgtgtgcgcagcacagaactgccaaaggccctgcaaggacaaggctttggccctcgtcatcctgcccacccagcggggcttcccaacccaccacacagccatggacgggaaggtgg

SEQ ID NO: 99605 - DNA, 82 bp, Homo sapiens
gggaccgccaggccaccaccggccgcctcagccatggacgcgtccctggagaagccggcccgctggggctggaggcacgggc

SEQ ID NO: 99606 - DNA, 100 bp, Homo sapiens
gccatcccagagtgcatctcccgaggtctaagagtgtaaccagttccagtagcagtagcagtgacagttctgccagtgattcttcatcagagagtgaaga

SEQ ID NO: 99607 - DNA, 100 bp, Homo sapiens
atccgctgcgtctacatcctggacccctggttcgccggctcctccaatgtgggcatcaacaggtggcgtactatactggcaattgctggagaagattttg

SEQ ID NO: 99608 - DNA, 76 bp, Homo sapiens
gcggaaaatgccttcaaatcagatacttacaaggagattacgatttcggttggaacgtgcacctggtgaaactgca

SEQ ID NO: 99609 - DNA, 75 bp, Homo sapiens
caatcctttattatgtcaaacggaatctcaattccagatacaacctgaacaaacttcaccgcgtcgggagaggcg

SEQ ID NO: 99610 - DNA, 99 bp, Homo sapiens
attgctggagtgatctatcaggcaccagacttgggatcagttataaactctagagtggacttggatgttgtgggtgatggtatgcagtgtcctccttca

SEQ ID NO: 99611 - DNA, 83 bp, Homo sapiens
gtcagactaaaggcaaacaaggactctctgtataagcatttatgacattaacagagaacaggactatgtcaagaattctgagg

SEQ ID NO: 99612 - DNA, 100 bp, Homo sapiens
ctgacgctcgtggggctgcagtactcgggcaagaccaccttcgtcaatgtcatcgcgactgccactctccgcccctacctgagtgccgtgcgggccacat

SEQ ID NO: 99613 - DNA, 100 bp, Homo sapiens
tggttacctgaggtgatgatcttggtctgcgatagagtgtctgaagatgaaacagattgtctcagtttacctagctttgaaaatgccatacccatgggag

SEQ ID NO: 99614 - DNA, 100 bp, Homo sapiens
gaaacttcagagcaagttttcattgggcaaaatggggaggtcttgctggagttgctagaacaatgtgtggatggcttatggaaggcagaacgttatgaaa

SEQ ID NO: 99615 - DNA, 75 bp, Homo sapiens
gcggtacatcgcctcggtgcagggctccaccccgtcgcctcgacaggtacatgtcccagagcaagcacacggagg

SEQ ID NO: 99616 - DNA, 98 bp, Homo sapiens
gggaggaagccctttctcctcggcactgtattctttacctgcttcccaatcccactgatgaggatcagcccatgaaattagccgggtgtggtggcgtg

SEQ ID NO: 99617 - DNA, 100 bp, Homo sapiens
tcatttatcaaagctacccaaagatactgccttgcttttggacccaaacatatacaggctctttggtgtaacgggaaactgcgctgcctgtagtaagctc

SEQ ID NO: 99618 - DNA, 100 bp, Homo sapiens
agaccttcaactggaatacaaagttgaaactggttgacaaccattaacctgggttgcaactacaggtggcactggaagcagactggttcctggacatgcc

SEQ ID NO: 99619 - DNA, 100 bp, Homo sapiens
gcatttggtacttttctggtccaggaattaatcaagagcaagactcccaagcagcttggaaattgatgacttgaaaaaaattaccaattcactgactgtg

SEQ ID NO: 99620 - DNA, 53 bp, Homo sapiens
ctcgcagaacgccatcaaccagctgactttgcctcccgggccaaactggcagt

SEQ ID NO: 99621 - DNA, 100 bp, Homo sapiens
cctgcaactccagcagcgctctgagaagcccccttggtgcaaaatcctcaatgatgatactgctctcaaagaatataaaattgatgagaaaaactttgtg

SEQ ID NO: 99622 - DNA, 83 bp, Homo sapiens
tggaccccgcctccctcccgcgcgtgctgcgggtctgctcgggggtctacttcgagggaactgtggaaggtgcatcagtgaag

SEQ ID NO: 99623 - DNA, 82 bp, Homo sapiens
gctgcaccgacctcgacgtcttgcctgtgtcccacttgttcgcggcctatagaaaaagcttgtggtgaaggggggcaaaaaa

SEQ ID NO: 99624 - DNA, 110 bp, Homo sapiens
caccttcgctgtctgggatgttggcagccacttcaaaatcagacctctgtggcagcattttttccagaacacaaaaggattggaggctgttgtcattggagaagttcatg

SEQ ID NO: 99625 - DNA, 90 bp, Homo sapiens
ccacggggccacagccgcgggggccaccacactggcccaaatatttcctgcaggtaaagagaaatgtgtatgaccttacaagtatccccg

SEQ ID NO: 99626 - DNA, 101 bp, Homo sapiens
gatccaactgcatgggccacagcaatgaataatcttggaatggcaccgctgggaattgccggacaaccaattttacctgattgatgcactgagtaaaagaa

SEQ ID NO: 99627 - DNA, 50 bp, Homo sapiens
acattgaacgtcataagacttgttgggggcttggagtacccataatacag

SEQ ID NO: 99628 - DNA, 90 bp, Homo sapiens
aggccaagaccgctgtgtggaggtagccgcagcgccagcaccaggtgactaataaaggtaccagaagaatatggctgcacaaataccaga

SEQ ID NO: 99629 - DNA, 100 bp, Homo sapiens
gagactggagcgacggagaccgtcacgccctcagaggccccggtgctggcagctgagcccgaggctgacaagtgggggcccctgaagccactgatggaag

SEQ ID NO: 99630 - DNA, 100 bp, Homo sapiens
tggtccgctgcatccgccatatattgtacaatgaacagaggttggtccgagaagccaacaataaacagcacttcttctcagtctcagacaagtactgcct

SEQ ID NO: 99631 - DNA, 75 bp, Homo sapiens
tacctgggaccaatggttttgatgataatcggtggtcaagacgttaaaaagaaagttcacctaagtgaaaaaatt

SEQ ID NO: 99632 - DNA, 80 bp, Homo sapiens
tctcgtggcatccatgtggtttatccagttttctgaaaaaaagctgacttcatgagaccgaggatctcgttcgttgatcg

SEQ ID NO: 99633 - DNA, 95 bp, Homo sapiens
tgaactttggatgctttattgtacaaaggtcatgactgtccaaagtatgataatcacatgagagtgctcgttgctacggatgtcatttgactcat

SEQ ID NO: 99634 - DNA, 100 bp, Homo sapiens
caggagttcatctacccggagaagcaggagccctactcggcagatacgggacgtgcaggaaacactgatgccccaggtcctgaccaccctggaggaggat

SEQ ID NO: 99635 - DNA, 100 bp, Homo sapiens
ggctatgcagcagcagctcctgcctattctcctaacatgtatcctggagcgaatcctaccttccaaacaggtgttgggctggatcttgatagcagttgtt

SEQ ID NO: 99636 - DNA, 74 bp, Homo sapiens
gcggaacaggacgccctctgatgtggacgacatccttggagaaggcagcgacgacagcgacagcgagaagagga

SEQ ID NO: 99637 - DNA, 101 bp, Homo sapiens
tgaagagccaatccattcaggatgggaaaccacgcaggcaaacgagaattaaatgccgagaaggccagtacgatgttcctcctgctgatcaagagaagctt

SEQ ID NO: 99638 - DNA, 90 bp, Homo sapiens
aagcggttggcaccactgaagtgaccgaatgaggtgaaaggtgtagcagtcactcggcctacacccacagcatcgaccttgtgaacccag

SEQ ID NO: 99639 - DNA, 77 bp, Homo sapiens
ggcgtctgggcagcctacgctttccggactacaaagctgatgaagacccagcattattccagtcagtcaagaccaag

SEQ ID NO: 99640 - DNA, 82 bp, Homo sapiens
ggattccaagtaactcttatttggaagatgagaatgtgcctactgctcctgatcctccaagtcaacatttacgtgggcatgg

SEQ ID NO: 99641 - DNA, 83 bp, Homo sapiens
ctgccttcgacaacttctccgatcccaccaaatattttggttgtgagctgggagcacagacccagtttgatgttaagaatgac

SEQ ID NO: 99642 - DNA, 82 bp, Homo sapiens
cggcgacagtggcggcggcgccatggcagggcttgcaggtaatcattaccaaatgaggaggaaaggacgatgtcatcgaggc

SEQ ID NO: 99643 - DNA, 82 bp, Homo sapiens
ccgaggggctgtcaaagctccaactggaggccaccctgtggttcagcctggtccgacccccagtggcactaacgtgggatcc

SEQ ID NO: 99644 - DNA, 96 bp, Homo sapiens
ataccgctgcgctcaatgacagggaccaggggggcggcagcgctggacacccagcctccagctctgtgcagtgtgcctagaagacttcaagcctcg

SEQ ID NO: 99645 - DNA, 98 bp, Homo sapiens
cggttgatgaccgaggcctctataaacaaggacaacattggctagagaaaaaagatgttgtggggagagccaggggatggagtcttgctctgtcgccc

SEQ ID NO: 99646 - DNA, 100 bp, Homo sapiens
ggcgaggagacggagttctacgtgtcccccgaggatctggaggcacagctgcagtctgacgagagggaattaaacaaccaccatgtcgagcaaaaaggca

SEQ ID NO: 99647 - DNA, 102 bp, Homo sapiens
gtcactctcatcttgcaaaccaggtgcatcatttctggcatggcttcaggaagcattgtgctattttacaacgactttaaccggtggcatcatgaataccaa

SEQ ID NO: 99648 - DNA, 100 bp, Homo sapiens
tggaatatgccaaggaaaaactggagagcttcatcaaaaatagtgatagctttgataagaagcagtcaattatagatttcttcaaaccagcttcaaaaca

SEQ ID NO: 99649 - DNA, 100 bp, Homo sapiens
gctggctgtgttggtcggtgcctgcgttctgaagcccgagaggagccacaatggagacgccgccgctgcctcccgctaagtacaaggtggactgtgcatg

SEQ ID NO: 99650 - DNA, 90 bp, Homo sapiens
gagggaaatcgtgcacatccaggctggtcagtgtggcaaccagatcggtgccaagctccagtgatccacaagctcagaaatacatcgcgg

SEQ ID NO: 99651 - DNA, 50 bp, Homo sapiens
cttgccctgtctcctcgcagatgagtgacatattcgatgccatgttccct

SEQ ID NO: 99652 - DNA, 74 bp, Homo sapiens
ccacccacagctcctcacccccgtgccgtccctcgtgttcacgtttcagagcctgaggccggcactttggaccc

SEQ ID NO: 99653 - DNA, 109 bp, Homo sapiens
tcgctggtggtgcaggcgctgcgccgcaacgccgagcgcaccgacatctgcctgctcaaagtaagactttgaccccgacgcaggcttcagtgattgccgcggatcagaa

SEQ ID NO: 99654 - DNA, 75 bp, Homo sapiens
ccacccccatatcatcaggctctaccaggcatttattaatacagcaaaagaaatttatgaaaaaattcaagaagg

SEQ ID NO: 99655 - DNA, 98 bp, Homo sapiens
ttgagggatatctttcttcactcctcttcacttcttcacttcctcggttatgtggacatgcttggtgtagcctatgaagccccttcgctggccactgg

SEQ ID NO: 99656 - DNA, 75 bp, Homo sapiens
tggaacctcactgaaaattggtattgttggattgccaaatgttggggatgggcgtgttttgggcgtgctagaggt

SEQ ID NO: 99657 - DNA, 96 bp, Homo sapiens
caaggttccgcgccgggcgtggacggtgtggggcggtcccggccccgcagggacgcccaccagccctccccacgatgatccccgcagccagcagca

SEQ ID NO: 99658 - DNA, 75 bp, Homo sapiens
gccgcggccgaggaggcagcgcgacctccgcacgtgttgcattgatgaatcatagctgttgccccaatgtcattg

SEQ ID NO: 99659 - DNA, 101 bp, Homo sapiens
ccgcctccgaatttgcaaagaggaggaaggagggacttcttggcttctcccagcatagccccagatattctgcctccatggtggcctctctccatccatag

SEQ ID NO: 99660 - DNA, 83 bp, Homo sapiens
ctcctgtacagcccgccgcccctgcaggtggtctttgggaagaagcttcctgcctttgccaccatccccatccaccagctgca

SEQ ID NO: 99661 - DNA, 100 bp, Homo sapiens
tggagatgattgagccgcgcacgctacagtacaaggcaggttaccagtctcttaagaagattgaggattgtattcgggctggccagcatggacgagctct

SEQ ID NO: 99662 - DNA, 97 bp, Homo sapiens
ctcgccatgtcctgctgcccgggttatgtaccgaaggactctaccgtgtcagcgggaataaaactgaccaagacaatattcaaaagcagtttgatca

SEQ ID NO: 99663 - DNA, 100 bp, Homo sapiens
cgacctccggccctgcgcgtgcgccgtggcgcggcccggctgacagaaaacacgagatttttctcctatttcagcagttggccacaacttcattgctggg

SEQ ID NO: 99664 - DNA, 75 bp, Homo sapiens
tgggcccaggtgtggcgtctctgtccccatctggttttaggtacatgtcccagagcaagcacacggaggcccggg

SEQ ID NO: 99665 - DNA, 95 bp, Homo sapiens
gtgacccgggtgccgaggagcgggaagagttgctggggtcaaaatgcagatcttcgtgaaaacccttaccggcaagaccatcacccttgaggtgg

SEQ ID NO: 99666 - DNA, 50 bp, Homo sapiens
gtcaacttcctcaagtcgcccaaagaacacttcagttatggaagatcaaa

SEQ ID NO: 99667 - DNA, 98 bp, Homo sapiens
tgacagacgttttgaaaaaccaggacgaaaagatgtagacaatctccgggaaggggcagagcagaaggtggtattcatcacaggacgagtccacccag

SEQ ID NO: 99668 - DNA, 90 bp, Homo sapiens
ctcttttgccttctttactaaaatgtctcaagccctgaccatgtactcgatcaggatggagaattcgacctggatgagaccatggatgtg

SEQ ID NO: 99669 - DNA, 83 bp, Homo sapiens
gcgacagcggcgagcagaactacggcgagcgggaacgtcaaggtcgtgggaaataaaaggcagttctacacagactgcagcaa

SEQ ID NO: 99670 - DNA, 75 bp, Homo sapiens
cgcggattcgccgaggcaccgaggcactcagaggaggtcattcctgtcccaatcagctgctctactactgatgac

SEQ ID NO: 99671 - DNA, 50 bp, Homo sapiens
gctcattaccagtctgaaggagcaaggctcccagccaacctctgataaac

SEQ ID NO: 99672 - DNA, 129 bp, Homo sapiens
caggggtcccccacttcccgcttgggcgcccggacggcgaatggagcaggggcgcgcagatatgtggctctgacatctttgttgaagactgtacagacagatcataatgcagtacagaggcacagaagc

SEQ ID NO: 99673 - DNA, 75 bp, Homo sapiens
ctaaggagaaagtcctacaacagtttggcgtgcaacatggggcttgagaaaggaatgaaacggctggtttgtgtg

SEQ ID NO: 99674 - DNA, 75 bp, Homo sapiens
atcgaacagtacgcactgagggaagagtttattcatggaggacacactgctaagatttcagattttagctggaac

SEQ ID NO: 99675 - DNA, 96 bp, Homo sapiens
gcgagcagcggcgggggcccgagggccgccgccatgtctgcgcatctgcaatggatggtcgtgcggaactgctccagtttcctgatcaagaggaat

SEQ ID NO: 99676 - DNA, 82 bp, Homo sapiens
ggctgaagccgatgaacagcgccgggatccagtgcctacaccaactaatgttacaattgaatcctataacatgaaccctatc

SEQ ID NO: 99677 - DNA, 75 bp, Homo sapiens
ctgagaaagaaatagaaaatttgaagggtattgttccagatcttaacagtgtatcagacttggtgataattctga

SEQ ID NO: 99678 - DNA, 88 bp, Homo sapiens
cctgatgggtcgaggcggacgcgcggctgcgtcagagtcccagctgaaagacaatcctgccttctccatgctgaatgactcggatgat

SEQ ID NO: 99679 - DNA, 100 bp, Homo sapiens
cctgcattaagtcaggactgagaggaagaaaagtatgcctttgtcaactggataaacaaagccctggaaaatgatcctgattgtcggcatgtcatcccaa

SEQ ID NO: 99680 - DNA, 50 bp, Homo sapiens
cttgtttgatgttcgtgactttggaaagtctgagtaccactatgagtaca

SEQ ID NO: 99681 - DNA, 82 bp, Homo sapiens
cgctagggaagatcgcaccgcggacgcccgctgagcttggcgcacgggccgaccagcaaacggggattcagcgtccgatcct

SEQ ID NO: 99682 - DNA, 103 bp, Homo sapiens
cacagggattcttttcctgccatggggatatgacattagccaggtgctttctgatatgatctccatcagtgagaagcctttggcagaacaggactggtaccat

SEQ ID NO: 99683 - DNA, 83 bp, Homo sapiens
tcggcactaggcagcggaggagcccgaccgacccgggaactgctcgcagaaagaagaaggtggttcatagaacagccacagca

SEQ ID NO: 99684 - DNA, 75 bp, Homo sapiens
aatgcatcatgtcaggcagcttatgatgccaatttgtcccatggggttcaactagatatagcttcacaatctctg

SEQ ID NO: 99685 - DNA, 99 bp, Homo sapiens
gcctgcccagacggctcacctgtgcgggatggaacaaaaggtctgaacacgaaagacattccccaaactgcccatttgtgaaaggtgagcacacacaga

SEQ ID NO: 99686 - DNA, 75 bp, Homo sapiens
atgttagagaactatggaaacctggtctccttggggttatgatgatggctacgggggtgaatatgatgaccagac

SEQ ID NO: 99687 - DNA, 74 bp, Homo sapiens
agtaatgctccttcaacaaggtcttaatgacagatcagatattaacctggctgcagagccaaaagtgaaccgag

SEQ ID NO: 99688 - DNA, 76 bp, Homo sapiens
cagttggaagcagccgatccagcctgcggagcctgtggggcagcatcaagcttctagctgtgcaagaactgcttga

SEQ ID NO: 99689 - DNA, 101 bp, Homo sapiens
tggggcccaagaaaaagcacctggacttacctggtgtgtaagaggaagctggagagtaagaaggaagccctgctgatcctctccaaggagctggacacctg

SEQ ID NO: 99690 - DNA, 97 bp, Homo sapiens
cctctttgctgcaccaggtgtcctggagacagggatccccagcagcaagacgggcctttgtcccccagctccggagtgggaagttcaacgtcttgct

SEQ ID NO: 99691 - DNA, 98 bp, Homo sapiens
cagcacctcctcgccagcagccgtccggagccagccaacgagcgttgagtcagcagatactggagttatttgaaacatgtcagcagcaaataagtgat

SEQ ID NO: 99692 - DNA, 75 bp, Homo sapiens
cctcaataaggacaagcctgtcattcctgctgctgccctagctggctacacagcaaaaaatcgtggaattgccat

SEQ ID NO: 99693 - DNA, 96 bp, Homo sapiens
ggttaacagcctatgggtgaaatttggctttcattcatgaatgaggtacccactgatggtaatgctggcctgctggctgaaccccagattgccatg

SEQ ID NO: 99694 - DNA, 75 bp, Homo sapiens
gggggtgctgaaggccctcgactacatccaccacatgggatatgtacacagcttccaatcagaagactatacaac

SEQ ID NO: 99695 - DNA, 101 bp, Homo sapiens
ctcctggcccccgaggaggagcagaggatcaatgcggttcaagaatcgattccagcggagcaatttacagcaatgagggatttatacatgaaaaatggaca

SEQ ID NO: 99696 - DNA, 100 bp, Homo sapiens
cggccacaggggcggcgacggcgcagtgcgaagcgaaacagagttttccgtctgatgaaggttggccatttgcaaagtatcttggagcttgtggaagaat

SEQ ID NO: 99697 - DNA, 74 bp, Homo sapiens
ttccggccacccattgatttgatgcataaaggcagctttgaaacaaatgctgaccccctgaaggtgtacccgcc

SEQ ID NO: 99698 - DNA, 101 bp, Homo sapiens
ccccacctgcccggtgcccgaggaggcagccaagctcgtagcctgccactccgtgcccttgaaaagatcttttgaggtcgaggaggtcgagacacccaact

SEQ ID NO: 99699 - DNA, 76 bp, Homo sapiens
cttccaaaaccttcccacaagtcgttagcaaaccctggtcttatgaaggttaatgacccagagactgcagtaaagg

SEQ ID NO: 99700 - DNA, 97 bp, Homo sapiens
ctgaggacggacgccattggagttcccgagaaggctgaggcctccgtagaagacagcgccttgcttatgcagaccttgatggaggccatccagatct

SEQ ID NO: 99701 - DNA, 100 bp, Homo sapiens
ctcccaggcccttccatggactgaccagggtcctgggtgccagagccttgcaaaggaccatcgcatgaaacttatgcaacaacaacaggaagtggctgga

SEQ ID NO: 99702 - DNA, 80 bp, Homo sapiens
agaggcgcatcgtgttcgaggcggagaccgagggggagccccgcgcgcggcgtcgcttagaccatgctcagcctccaagc

SEQ ID NO: 99703 - DNA, 74 bp, Homo sapiens
gagcccgggacggcagcggcctggggacccagcaaggctgtggacatactcaagacagagcggctgggacacgg

SEQ ID NO: 99704 - DNA, 51 bp, Homo sapiens
ggaactggtgctgcagcgagagagtgactcgtccaagaagaagagagttta

SEQ ID NO: 99705 - DNA, 75 bp, Homo sapiens
ctaccttctggaagctactactacgtggtgcttggaaagctgacagtgaagatagtactgtgtccatccagataa

SEQ ID NO: 99706 - DNA, 78 bp, Homo sapiens
gtacctgcagaaggtctctggagacatcttcagcagattcacaatgacatcctttcaagaagtcccattgcagacttc

SEQ ID NO: 99707 - DNA, 100 bp, Homo sapiens
ttggaagaggatcagtatggcatgcccctggccatcttcacaaagcccagcagaccgggttatcccagtccgaggtccagcgaaggattttatcccagcc

SEQ ID NO: 99708 - DNA, 83 bp, Homo sapiens
gctcgcggggcccggcgaagggcagggaaagcaggcaggatgggagagtcgccgatagaaccacctcttccctgcctcctggg

SEQ ID NO: 99709 - DNA, 83 bp, Homo sapiens
ctcagcaccgtggccagcaccgacattctgactccgccgtggtcatggaggagggaagtccgggcgaggttcctgtgctggtg

SEQ ID NO: 99710 - DNA, 76 bp, Homo sapiens
atacttgacattgaagtaacttcaaaacccctaaatatccaagttcaaggaaatatatcctggacaattccagcca

SEQ ID NO: 99711 - DNA, 74 bp, Homo sapiens
tcctgttatgaccaggagagggctgcgggactctcattcctctgaaggtgagaagccctaccactgcaactggg

SEQ ID NO: 99712 - DNA, 100 bp, Homo sapiens
tgcggccgtcctccaccgtttcctccaggacagcacctagtcgtggccggaggagtctcagagctgtcagaaagtccctcctcctatgtctccatcctcc

SEQ ID NO: 99713 - DNA, 100 bp, Homo sapiens
attatgggtaccatcacctcgaccccatatcatgtgaacctcctcctggctggctatgatgagcatgaagggccagcgctgtattacatggactacctgg

SEQ ID NO: 99714 - DNA, 100 bp, Homo sapiens
ggcggctttagtggcagcatgaagcgcaccccgactgccgaggaacgagagcgcgaagctaaggctactgcagcactggggtgtcagttgttggtccgac

SEQ ID NO: 99715 - DNA, 50 bp, Homo sapiens
aactgtgatcctggactcgctgtagccggccgtcggccagaactgcagcg

SEQ ID NO: 99716 - DNA, 75 bp, Homo sapiens
gtccttattatcggaccccgaggatcaggaaaaactatgggacttgagtgagaacgccatccaggccatccccag

SEQ ID NO: 99717 - DNA, 100 bp, Homo sapiens
gttcggggaaatggctgcgagaccctagaggcctgcggcctgcgccctcgagcatgttccaaactcggttcgcttgtggaaagcagccgttgagctggaa

SEQ ID NO: 99718 - DNA, 82 bp, Homo sapiens
ggcgagtttccgatttaaagctgagctgcgaggaaaatggcggcgggaggtaacagactgggttgacccatcatttgatgat

SEQ ID NO: 99719 - DNA, 100 bp, Homo sapiens
ctggacggctgagctgggcatccgacacgtactgctggtcgctttgctgttcgtgatatgagacagacagttgcggtgggtgtcatcaaagcagtggaca

SEQ ID NO: 99720 - DNA, 98 bp, Homo sapiens
gctggaggttgaccagttcctggaagacgtgcggctacaggagcgcacgagcgggtcagcccaaggctgccccctcggtcactctgttcccgccctcc

SEQ ID NO: 99721 - DNA, 100 bp, Homo sapiens
ggcatttgcacgccaaaggcaaagaagaaaaaatgtccaaatcattaaagaactacattactattaagccattatttggaaagcaggtctataaatgaga

SEQ ID NO: 99722 - DNA, 82 bp, Homo sapiens
gcaactcggcagcctccacccaccggcccaccctacatttagcgcatcatgtgatccggacaatgcagatcttcgtgaagac

SEQ ID NO: 99723 - DNA, 51 bp, Homo sapiens
ccatgattctgcaaagccctctgagatctgtatctgtggacctgaatgttg

SEQ ID NO: 99724 - DNA, 107 bp, Homo sapiens
cggccctcaccgccctcaccacccctatccagacggctgcccttcaagtaccacttcttggacacttaatgattgttggcaagaaatgtgctgctgatctgggcctg

SEQ ID NO: 99725 - DNA, 90 bp, Homo sapiens
aattcttcgacaggaaaaaaatttgctggatattgatgcgccagtcactgctggtcctatagtacccctcctcaggaatgtctccccagt

SEQ ID NO: 99726 - DNA, 82 bp, Homo sapiens
gtgctatcctagaatcaaggatttcagcaacaatgcctctgttcaaactcccagcggatgaccaccaggctctcatctggga

SEQ ID NO: 99727 - DNA, 75 bp, Homo sapiens
ctttgaaagattaagcaaatttcaagatggaggtggaggagttactgatggccatggagaaggtaaagcaggaac

SEQ ID NO: 99728 - DNA, 100 bp, Homo sapiens
ccgcgggctcagctctcgccgccagcgggccgcaggcctggagctgctgaagactgctattgggaaagctggctacactgataaggtggtcatcggcatg

SEQ ID NO: 99729 - DNA, 90 bp, Homo sapiens
ggaaaaactgactcttttgcattatgatccagttgactaaagcaaatcttgtaaccccgaggaatggggaaccgctgattgctgctattc

SEQ ID NO: 99730 - DNA, 100 bp, Homo sapiens
tcgtcccgaggccgtggctgaggtgaagagctttgagtgagatcattggccgagacctgagtggcttccctgcacctcctggagaagagcctcctgcctg

SEQ ID NO: 99731 - DNA, 73 bp, Homo sapiens
ggaggtcctgccccctccactgctgctgctccagaaatggcacctcgaaaggggaaggaaaagaaggaagaac

SEQ ID NO: 99732 - DNA, 90 bp, Homo sapiens
gctcggagcgcggcacggagacggcggcagcgctggactaggtggcagaacctgacgacccggcgacggcgacgtctcttttgactaaaa

SEQ ID NO: 99733 - DNA, 100 bp, Homo sapiens
gcagtgtcgccgccatcacggacttcctgtgggacaagcgcacgggcctcgccgccagaacggttttttgccctgacatctcttcgtcttgtgtttttac

SEQ ID NO: 99734 - DNA, 100 bp, Homo sapiens
tccggcttcggagcgggagtgttcgttgtgccagcgactaaaaagagctcctattaaggaaccaaaaaagttgatgcccaaaacatccctccccacagtc

SEQ ID NO: 99735 - DNA, 100 bp, Homo sapiens
agagatacttacctatccttcagcttttggatccattacaggcccagcccactgggagttggctgattgcaattctggcccaactcaaccctctctttgg

SEQ ID NO: 99736 - DNA, 100 bp, Homo sapiens
cttggccaggctggccccgagcggaactggagaaagctgaggcaatggctgccatccggaagaaactggtgattgttggtgatggagcctgtggaaagac

SEQ ID NO: 99737 - DNA, 75 bp, Homo sapiens
ccaccatggcgagcagtgcctttactccaggaaaagagcactggttgccattggtacccatgatttggacacttt

SEQ ID NO: 99738 - DNA, 100 bp, Homo sapiens
ctcggagaccccgcgccgacggctgctcaaacatcagggctgctctttggcgtaaattgcaatcgattagggatcgtttctcagaatcaagttagaagtg

SEQ ID NO: 99739 - DNA, 89 bp, Homo sapiens
ccagccacctgtggccgagtcctccctgatggttccaagttccccatcaagtggacagccccagaagctgccctctttggcagattcac

SEQ ID NO: 99740 - DNA, 88 bp, Homo sapiens
ggccagctgactgcacttcttttttgagaaaggaaggaatatatcctgactgattgttgtttacattcagagctctatcaataagagg

SEQ ID NO: 99741 - DNA, 75 bp, Homo sapiens
tggttcaagaaccttgacaagctcatccggctggtaaatgcgcagggacatcgcggtggaggaagatctcagcag

SEQ ID NO: 99742 - DNA, 100 bp, Homo sapiens
tcttgacttgtgtattttcaactctgggatcacctgatcatttcagtttaacaatgcatgcatcaattcttgcatatatgtttaatttggttgaagaagg

SEQ ID NO: 99743 - DNA, 97 bp, Homo sapiens
tactacaaagatgctctgcggtttttgggctgtgttgacatcaaggatctaccaggatatgatattcactttcatgacaagaaaatcctgttgctcg

SEQ ID NO: 99744 - DNA, 88 bp, Homo sapiens
agagacagccaacaaaatattcatggttcttgagatttcctcgtcctgtgactgtggagcccatggaccagttagatgatgaagaggg

SEQ ID NO: 99745 - DNA, 75 bp, Homo sapiens
gcctgcatgaccacactttgccttgattgccaaagatttagcatgtagactgctggggcaatcaatggatgaaag

SEQ ID NO: 99746 - DNA, 100 bp, Homo sapiens
agcccgcagaacctccacagtcaagaggacggtgaaaggtgtagcagtcactcggcctacacccacagcatcgaccttgtgaacccagcgacctgactgc

SEQ ID NO: 99747 - DNA, 102 bp, Homo sapiens
gttaagtgtgtggcctgccacaagacactgcgttcccacatggagctcactgcccatttcagggttgaagctttgagagaagcagcaactgctgttgagcaa

SEQ ID NO: 99748 - DNA, 100 bp, Homo sapiens
gacctattaagttcaatgtatgggacacagccggccaggagaaattcggtggactgagagatggctattatatccaaggactcagaattcatgattgaag

SEQ ID NO: 99749 - DNA, 100 bp, Homo sapiens
aagatggttgcattactcattgagtttcttgcagaacataaattattaggaaacattaaaaatgtggccaagacagctaacaaggaccacttggttacag

SEQ ID NO: 99750 - DNA, 82 bp, Homo sapiens
agaagacagccatcatttgaaagctatgctaagaaggaatctgatcttaatggcgcccagatcaagcttcgagaatatgaag

SEQ ID NO: 99751 - DNA, 82 bp, Homo sapiens
agggaaccctggtcaccgtctcctcagagtgcctggtgaagaatgtgatgggatcactagcatgtctgcggagagcggccct

SEQ ID NO: 99752 - DNA, 100 bp, Homo sapiens
atatgatgggtgatgagggttcaggaatcaaccctgcctaccggactgaggatgccaatgaggacaccattggggtcctggtgcgcttgatcacagagaa

SEQ ID NO: 99753 - DNA, 101 bp, Homo sapiens
cctcctggggtgggcccggagtgggctgcagcccccagcagccgagaggggccccggccacagtgaccatggtgaattcaaggaagccttctccctatttg

SEQ ID NO: 99754 - DNA, 85 bp, Homo sapiens
gttaccctgcacagccgtcaccctcaactttcccttcagacttaattcagtgcacaaatgagatgaatgtgaacatcccacagtt

SEQ ID NO: 99755 - DNA, 73 bp, Homo sapiens
agcctgcccagacggctcacctgtgcgggatggaacaaaagcatcgtcatcagacagtgaggaggacccagaa

SEQ ID NO: 99756 - DNA, 96 bp, Homo sapiens
cagcctgcctttccagcccaagcagctttccctcaacagacagctttttctcaacagcccaatggaatcatcatgttggttggctggttactggga

SEQ ID NO: 99757 - DNA, 98 bp, Homo sapiens
cggtgcccggagtgtggtacttctcctagttgcagtcaggcttcatacgctattgtcctgcccataagaccatcatcatgtggaaactgaccagggat

SEQ ID NO: 99758 - DNA, 100 bp, Homo sapiens
cgcagacagagctattccagcaccagcagagactactggtgcctggatgatctgtaccgggagatggtgagatgctatgtggaaatcgttgagaagcttc

SEQ ID NO: 99759 - DNA, 96 bp, Homo sapiens
gccaaatatattctcctacatgggaaccaaagataaaagggctataacagttcaagaaattgctgttctcaatcttgctgtgtcgcccaggctgga

SEQ ID NO: 99760 - DNA, 74 bp, Homo sapiens
ccctcctctgtcagtcatggagcaaaaggtgtggacactgccagcggctgcagccgacttggaatgacctggga

SEQ ID NO: 99761 - DNA, 86 bp, Homo sapiens
actgcattatattacgaatcacaagtgaatggaataagagtaaccagagagcacagagaaatgctggtgaaactggccaaacagaa

SEQ ID NO: 99762 - DNA, 100 bp, Homo sapiens
atccactactgggtgtgaagggggatggcaaatccaagaagaagcaagcaggccggcctaaaggatcaaaagaccctgtacacgtatcctgaaaactgga

SEQ ID NO: 99763 - DNA, 83 bp, Homo sapiens
caggccttcaccagcccgcccctttcggccgctgctgcccacttcccgctcggggtgagaagccctaccactgcaactgggac

SEQ ID NO: 99764 - DNA, 75 bp, Homo sapiens
atagagtcttctgctcttcctcaactaccaaaggtacggaatggccacatcaaaagaatcactgataatgacatc

SEQ ID NO: 99765 - DNA, 85 bp, Homo sapiens
aaagttaataacaaggatgtggaagctattgaggagacggagtgcgcctaaagggatggtggatccaggagagaagattagtgcc

SEQ ID NO: 99766 - DNA, 100 bp, Homo sapiens
gttgaacaatggacagtcctggaagtcagcccaaggccaaccccactgtcactctgttcccgccctcctctgaggagctccaagccaacaaggccacact

SEQ ID NO: 99767 - DNA, 100 bp, Homo sapiens
gaacatccagtaaaacaggaattgaaggcaattctcaagttcaactactcagtgcaggaggagagcgacacttgtctgggaggcaaatggtcttttgatg

SEQ ID NO: 99768 - DNA, 90 bp, Homo sapiens
caccttgaagcataaaattgatgaacagatgttcccttgtcgattcattaaaatagcgccagcagccctgtggtggcgacgacgatggac

SEQ ID NO: 99769 - DNA, 96 bp, Homo sapiens
aagatgctgcttactggtgggaaatcaagtcgtaaaaacaggtcaagtgatatcagttttagagaatgtggcgtggagaaattctcaaggaaagag

SEQ ID NO: 99770 - DNA, 100 bp, Homo sapiens
aatcctgccggttgcgccttcttcctggacatgaccaactggttcagctgctgatctcagcgcaggacgtggagaactacaaggtgatcaagtcggagct

SEQ ID NO: 99771 - DNA, 100 bp, Homo sapiens
cgcatcgcccagctgtacatgatacagtttctccttggaccaagatgactgatggaaaactctccacctctacaaatggcgtagccttcatgggtattct

SEQ ID NO: 99772 - DNA, 100 bp, Homo sapiens
gggcacgatcgctcggtggtgcagtggaaaatcaccttaaggtggctacagtttcagaaaagtcacgtataatggaactggagaaagacctagcattgag

SEQ ID NO: 99773 - DNA, 80 bp, Homo sapiens
gccgcgagcgcggcctgcaggagcctgacatttaccccggtaactgctgggcatttaaaggctcccaggggtacctggtg

SEQ ID NO: 99774 - DNA, 118 bp, Homo sapiens
aaccacagcaagagcacctggctgatcctgcaccacaaggtgtacgatttgaccaaatttctggaagagggttgcttttgtaatgaagaagcacttaaatactcatctactaggcaag

SEQ ID NO: 99775 - DNA, 101 bp, Homo sapiens
ctggctgatactacgtattccagatggtgaagacattcagtgaagcttgcctgatggtaaggaaaccagccctagaacttctgcattacctgaaaaacacc

SEQ ID NO: 99776 - DNA, 100 bp, Homo sapiens
gtcggtgtttggagaaaaggactcagaggacagttatgggatggatgggaaggttaatcagccccgtctcactgcagacatcaactggcaaggcctagag

SEQ ID NO: 99777 - DNA, 82 bp, Homo sapiens
agctgctctagtgaagaagatgaggaagatgactcggaatcagaagctgaaacagtgcctccggagccagcgtggtggccat

SEQ ID NO: 99778 - DNA, 75 bp, Homo sapiens
caccctacatttagcgcatcatgtgatccggtatgaagtattcagaacagaagaggaagaaaaaataaaatctca

SEQ ID NO: 99779 - DNA, 97 bp, Homo sapiens
gattagccgtctggagcaaagacaggagccctggaatgtgaagagacatgagaccatagccaaacccccagctttgccagcgccgagtaccaggagg

SEQ ID NO: 99780 - DNA, 100 bp, Homo sapiens
ctacggaccccccagcaacttcctcgagatcgatgtcaaaatgcagatcttcgtgaaaacccttaccggcaagaccatcacccttgaggtggagcccagt

SEQ ID NO: 99781 - DNA, 83 bp, Homo sapiens
cccagcgtccgccgcgcctcggccaagtgggcatccccaccatcagatggtgcggggcagagggggactacaacgtcatggtg

SEQ ID NO: 99782 - DNA, 74 bp, Homo sapiens
acattacaacttcaagaaaattacggtggtgccgtccgccaagaatacagattctgttcatcttgctctgaaat

SEQ ID NO: 99783 - DNA, 75 bp, Homo sapiens
gatgcagtgaaagaaacttcctcagtaaagcacttccaccgctgtcagaaggcaatgaccgctaaaggaggcgat

SEQ ID NO: 99784 - DNA, 95 bp, Homo sapiens
ggaatcaaagataaatccaaatactgcatatcagaaacaacagaattccttgtgtggatatcagatccggatggaatctcgagcttgtgaatcta

SEQ ID NO: 99785 - DNA, 118 bp, Homo sapiens
ctttccaagaggaatcctcggcagataaactggactgtcctctacagaaggaagcacaaaaagggacagtcggcctgggcaatatttaagggaaagtataaggagggggacacaggag

SEQ ID NO: 99786 - DNA, 82 bp, Homo sapiens
gtggacggcacggacgacagaagcgactttggtgagactctggtgttcgaaatccgcaccactgatgacctcactgaggcct

SEQ ID NO: 99787 - DNA, 75 bp, Homo sapiens
caggcagagtgctgatgtgaaaaataccacgacaaaaccaccctaagttcttcgtaagtacatcttaaagctgtc

SEQ ID NO: 99788 - DNA, 74 bp, Homo sapiens
ctgtgaggccagcgggggaggggccttcctggtgctgcccctgggcaagataattcttgctaatcacttcaatg

SEQ ID NO: 99789 - DNA, 50 bp, Homo sapiens
cttcgccaaggctggcgcagtcggtgagaagccctaccactgcaactggg

SEQ ID NO: 99790 - DNA, 74 bp, Homo sapiens
gactccaggacacccctgaagccgagaaatggtcttcaggcaccatggaggacaaacgcaacatccagatcatc

SEQ ID NO: 99791 - DNA, 126 bp, Homo sapiens
tgaagctcatcatgaccttccagaattacgggcaagcgctgttcaaacccatgaagactccagaagacctttccagattcgtggttgagctgcagcagagggagcttgccttgaaggacaagaaca

SEQ ID NO: 99792 - DNA, 91 bp, Homo sapiens
aagaagacgtccaatctgagcgtgctgcggacggcgctgcggtacatccagatgaaggatttgggggcagagcacttggcaggtcatgaag

SEQ ID NO: 99793 - DNA, 75 bp, Homo sapiens
caaaggctcccatggagagctcagtgtgaagcctcagtttaggtcatctggtggttcagaacactcaacagaggg

SEQ ID NO: 99794 - DNA, 80 bp, Homo sapiens
tgacagaagggagtttgctaaatttgaaaaggagaaaatgaatgccaaatgggacacgggaggaaataatgctggccata

SEQ ID NO: 99795 - DNA, 82 bp, Homo sapiens
tctggcacagatgcaggagcagacgctgcagttggagcaacagtccaagctcaaaatccagcacacggaagacatggagaac

SEQ ID NO: 99796 - DNA, 75 bp, Homo sapiens
atctgcagtcaaccagtcatgtttcatgatggcatcaaaatgaagatgatccctatgatcttgaagatgtttctg

SEQ ID NO: 99797 - DNA, 75 bp, Homo sapiens
gctgcaaggtcttcttcaaaagagccgctgaagtttgcatttatgtcggatcctcagtgaaaataaaagccatga

SEQ ID NO: 99798 - DNA, 51 bp, Homo sapiens
gactagacgcacatcaggaagacagcccccttacccaggaatggaacaacc

SEQ ID NO: 99799 - DNA, 74 bp, Homo sapiens
cttccaaaggtccagagcattcagctgtctcaaatgcaggtgcaggtgatggtcctaccagtgtgtctgttgag

SEQ ID NO: 99800 - DNA, 74 bp, Homo sapiens
aagaagaaggagagacagccacagaagaggatggagatgaagatgaggaagctgagtcagctacgggcaagcgg

SEQ ID NO: 99801 - DNA, 100 bp, Homo sapiens
aataccaacaggctctagccaacatgcagttacaacagcatacagcatttctcccaccaggtgaagcgctggatatttaccagataattgaactcaccaa

SEQ ID NO: 99802 - DNA, 100 bp, Homo sapiens
gagaggaggcagtggccctggtggaagacttgcagaaagaacctggaagacagaggctggagggtcctggcggcagagaccacgtcccagcaggagcggc

SEQ ID NO: 99803 - DNA, 100 bp, Homo sapiens
agatttttccctctaccttaaggatgtgcaggatcttgatggtggcaaggattggctgattgcaattctggcccaactcaaccctctctttggaccgcaa

SEQ ID NO: 99804 - DNA, 75 bp, Homo sapiens
ccaattaaataccaagtaccgggattccttgccccagttgaatgtgacagtgatgataacatgggtgccaaaaat

SEQ ID NO: 99805 - DNA, 92 bp, Homo sapiens
tgaatccagggcctaacatgggacagccgcaaccaggaatgacttctagcatagaatgtcaagctaaccaggcgtccgctacttcagaagag

SEQ ID NO: 99806 - DNA, 74 bp, Homo sapiens
gaaaaattttcaagtaacattaacgaaaagaagagccatgcaggttgcacgttttcaaaaaatacctaatggtg

SEQ ID NO: 99807 - DNA, 75 bp, Homo sapiens
acgaatccgagtgacatcagaaagagttgatctctctaatgtattagatcttcatgcctttgatagtctctctgg

SEQ ID NO: 99808 - DNA, 95 bp, Homo sapiens
acctcaatgatgtgctggtcggcctggagaagcaacacgggagcaacaccttcacggtcaaggcccagcccaggaagttctactacatcaccctg

SEQ ID NO: 99809 - DNA, 74 bp, Homo sapiens
acctgatggaagaccgattcagatgttcagaaaatcattggtaaagatgtttgaagataaaggattagactgca

SEQ ID NO: 99810 - DNA, 98 bp, Homo sapiens
ggatttgttaaggattccaagtaactcttatttgaggctgtggccaggccagctgggctcggggagcgccagcctgagaggagcgcgtgagcgtcgcg

SEQ ID NO: 99811 - DNA, 100 bp, Homo sapiens
ctcaagcatcacttacaggaccagagtgatcagcctttgagcctttcccacattgaagatggtgaaactagatattcatactctggctcatcacctcaag

SEQ ID NO: 99812 - DNA, 83 bp, Homo sapiens
gtaagaagtactccagggaaacctcccaggaagcagttcaggtacttttgaagcattctgcagatgttaatgctcgagacaaa

SEQ ID NO: 99813 - DNA, 98 bp, Homo sapiens
caagacagtgactccaggatttctgaagactattgtggaagaagcatccattaagtgattacagtggcgagatcttgaacaactgctgcgtcatggag

SEQ ID NO: 99814 - DNA, 75 bp, Homo sapiens
gaaaatgatggggaaacaagagctttgaattatatccagatcgagagacagaagattctgaaagggttcaatgaa

SEQ ID NO: 99815 - DNA, 50 bp, Homo sapiens
ccgggatcggttgccttgagcctggttgaactcccaccacctgatcttgg

SEQ ID NO: 99816 - DNA, 100 bp, Homo sapiens
aggctcgggtcgttgtggtgcgctgtcttcccgcttgcgtcagggacctgcccgactcagtgatggcctgatatgaaggagtcacgcctcccgcctcccg

SEQ ID NO: 99817 - DNA, 50 bp, Homo sapiens
ccagcctggaagtgttgcagagggaccaggcccagctggatgcagcctcc

SEQ ID NO: 99818 - DNA, 80 bp, Homo sapiens
atcttcccctcgggctggagtgtggccgccatggccaaccagtctggctggaggtgttccaggtgcgaaaggtgcaaggc

SEQ ID NO: 99819 - DNA, 77 bp, Homo sapiens
gggcctgcaaccagagtgctgtgcagtgttcagacttctccacgaacacaaaggcatcaagtaccacgtttttgaag

SEQ ID NO: 99820 - DNA, 100 bp, Homo sapiens
ttttcaccggcgccgcggtggtcgcatgaatgctttacagttgcagaacctggcgacgctggctgctgctgcagctgcggcccagacctcagccaccagc

SEQ ID NO: 99821 - DNA, 75 bp, Homo sapiens
atgggatccagctgttagtcgggaagaaacatattgccgagtggatgccgccgcgcagcgtgtttgcttgaggca

SEQ ID NO: 99822 - DNA, 100 bp, Homo sapiens
cccgcccggaaggagatccgcagaggacagtcatcagatccagggcctggagcaaagagcggatggggagcggtgctgggcggccggctggcctcgggac

SEQ ID NO: 99823 - DNA, 97 bp, Homo sapiens
tcagcaacagggacatcgtggagacggtgctcaacctgcttccagggaaaaagacaactaaactttgggttccagatgaagaagtatctcctgagac

SEQ ID NO: 99824 - DNA, 83 bp, Homo sapiens
caggccgctgatgccgcccgcggcgaggtggcccggaccgcagtgccccaagagagtgtaaacaggaacatcgataagtagtg

SEQ ID NO: 99825 - DNA, 90 bp, Homo sapiens
ccgctgcgcaccccagcggagccaagccccacgctggccggacagggccgcctgtcgccggacatgggaaagcggaaccaccaaaaggag

SEQ ID NO: 99826 - DNA, 78 bp, Homo sapiens
ttgtggctgcagcctgtagtgatggggccgtaaggtggctgaggagtgggcccagggcaccttcaaactgaactccaa

SEQ ID NO: 99827 - DNA, 83 bp, Homo sapiens
cgaagctcggggacgcgaggagccggcgtggccctggacctcctgccccccgaggtctgcagtctcctgaacccagcagccat

SEQ ID NO: 99828 - DNA, 83 bp, Homo sapiens
gatgaagttcgagcactaatatttaagaaagaagatgttaactttcagctatggaagtgataaacaagtccagtgttaagtat

SEQ ID NO: 99829 - DNA, 100 bp, Homo sapiens
tggaatcagcttctctcattttctttccctgcaccaactagcaggggtcctgtctttgtgatgtcagcgtgaagtggaattcgcagaatggctaaagtgg

SEQ ID NO: 99830 - DNA, 101 bp, Homo sapiens
aattcctggaaaaagaagtccaagaagcaaaaaagggactgctaagaagataccaccaggtgtggaatatcaaacaaatgattaagttgacacaggaacat

SEQ ID NO: 99831 - DNA, 80 bp, Homo sapiens
caatgggcctttccagcccgtggtccttctccatattcgagattatgtggtagctatcctcaagagctcatagtgcctgc

SEQ ID NO: 99832 - DNA, 75 bp, Homo sapiens
gttttactgaaaaaggcacctcctcaggtagcaatgaagtgatgaggatactgatctctagaagcctgcttcagg

SEQ ID NO: 99833 - DNA, 98 bp, Homo sapiens
gggatatccacagttcgatcaagtgatcattcaggatatgttcgtccagtaccagtgccacgcagtttaaatagtgatatttcctattttggtgttgg

SEQ ID NO: 99834 - DNA, 99 bp, Homo sapiens
aaggaaggtcggcagatcaaaccttataccctcatgagcatggtggccaacctcttgtatgagaaacggcattgtgtggctgctcaattaatgtaccaa

SEQ ID NO: 99835 - DNA, 85 bp, Homo sapiens
acatctgaaagccgggaaatgtgtggcaaaggagcagagaactttgacaagttcttcacacgaggacagcccgtcttaacaccac

SEQ ID NO: 99836 - DNA, 74 bp, Homo sapiens
tacgtggagacgtcagcgaagacccgggccaacgtggacaaggtttgactgatattacaaaggatccagacttt

SEQ ID NO: 99837 - DNA, 98 bp, Homo sapiens
cggggacaggcagggccgggtcgcgggccgcgcgtcccccaggccggagacgtgcagttcctggcctcggtgctgcccccagacacggatcctgcgtt

SEQ ID NO: 99838 - DNA, 97 bp, Homo sapiens
ccagctaggagcgctctgtggtgcctggggctgaacgcggctttctgagttttgattcatcatggataatctgtcatcagaagaaattcaacagaga

SEQ ID NO: 99839 - DNA, 100 bp, Homo sapiens
cccgaaagcaagattccgtttgaaaactctcctagcgcggtgcccgcgccgtgactccgcaggagcaggccgggctctcgccatgggtcactgtcgcctc

SEQ ID NO: 99840 - DNA, 100 bp, Homo sapiens
tcctgttatttctgtgcttccacttaaggttttgcaagatggtggctgcaggaatctgtcgttcagatgagcatgtggttagtggcaacctggtgacccc

SEQ ID NO: 99841 - DNA, 75 bp, Homo sapiens
tccaccaggccgggaagcccatcggatgaaggatttgggggcagagcacttggcaggtcatgaaggggtccaact

SEQ ID NO: 99842 - DNA, 101 bp, Homo sapiens
ctgaagagtgcctggctcatggtagatcttttgcgagcaggagaagttcctaaaccttttccaacacattataaagatttgtgggataacaagcatgttaa

SEQ ID NO: 99843 - DNA, 82 bp, Homo sapiens
gaagaataaggagggagtctacgaattttgattcagctaaagttccatcagatgagtattgccctgcttgtagagagaaggg

SEQ ID NO: 99844 - DNA, 103 bp, Homo sapiens
cgcgcagtccgcgcagccctcatcgcaactgggcccgcgcgcagggacccagacatggagctgcgggaagaagcctggtctccggggccgctggattctgagg

SEQ ID NO: 99845 - DNA, 71 bp, Homo sapiens
ttcctggcatgtcagagaacccctccgtctatgtgcctggccagcggaagcctgccacctcctatgtgcgg

SEQ ID NO: 99846 - DNA, 75 bp, Homo sapiens
ttgctagttaggattttattactggcagcatgtatatcttttgtaaagtcagtgataaatcttttgtttgctgca

SEQ ID NO: 99847 - DNA, 85 bp, Homo sapiens
ggacctgctggaagggaaggaaaaacctgtatgtggaaccacctgtgacttcatggtcatgacgattttcttcaatgtgagcagg

SEQ ID NO: 99848 - DNA, 82 bp, Homo sapiens
accaataaaaataaactgcttgaacatcctttgactggttagccagtttaatggatcgagaagtggcgttgcttgctgaaat

SEQ ID NO: 99849 - DNA, 100 bp, Homo sapiens
tcagagctgaggtacttcgtgaaggtggcggccaaagccctggagatgggcgtgtttggcgcatatttcaacgtgctcatcaacctgagggacatcacag

SEQ ID NO: 99850 - DNA, 100 bp, Homo sapiens
cccaaaccaggagattgcgagggagcgatgcggtgcagcgcggtgaaagaacttgtcctggacaacagtcggtcgaatgaaggcaaactcgaaggcctca

SEQ ID NO: 99851 - DNA, 96 bp, Homo sapiens
tgtgatgagccctcctccgaagaccctcatgagtggccagaagacatcaccaagtggccgagatgccctgtatccaagcccaatatgggacaccag

SEQ ID NO: 99852 - DNA, 100 bp, Homo sapiens
tctgaatacggcttttgacgtggcagagaagtacctggacatccccaagatgctggatgccgaagccccacagccaagctcttcaggatgttgaaaaggc

SEQ ID NO: 99853 - DNA, 50 bp, Homo sapiens
ctcagaactgagaagctgtcaccacagaagtctggaacgttttttcttag

SEQ ID NO: 99854 - DNA, 96 bp, Homo sapiens
tgtgggcctggagccaagcccctcttcaggagtaagaatttgctggaccatttggaagaaaagatgcctttagaagatgaggtcgtgcccccacaa

SEQ ID NO: 99855 - DNA, 100 bp, Homo sapiens
cagaagtccagagctgaggactgcctgtttgcaggatttagacaagagtcaagaggagatcaaaaaacatcatgccagcatcagtgagctgaaaaagaac

SEQ ID NO: 99856 - DNA, 75 bp, Homo sapiens
tccaggagaaagaggaagggaggatggaatcaggtttctgcggcactgaaacaaggccaaattacaccaacagag

SEQ ID NO: 99857 - DNA, 100 bp, Homo sapiens
cgcgagcggcgagccggagcgcggagcccggctcccgcaccatggaggaggacgacagctacgattgtcctgggtcacataatgccagctgagcgtaaaa

SEQ ID NO: 99858 - DNA, 110 bp, Homo sapiens
acagagaggcaaatgttcattgcacacttgagttaagcagtagtgtttgggaagaaaaacagaggagttctattaagacgatgttcattgagcaaaacaagctaaagaga

SEQ ID NO: 99859 - DNA, 80 bp, Homo sapiens
cgatctggacgcggcgctgctgaccgacatcgaaggctgctctttggcgtaaattgcaatcgattagggatcgtttctca

SEQ ID NO: 99860 - DNA, 100 bp, Homo sapiens
cgacggccccacctccggccactgggacggcggcgcggagaaggcaggtactaggttttgacaagcttgcatcatgcgtgagtataagctagtcgttctt

SEQ ID NO: 99861 - DNA, 90 bp, Homo sapiens
cggcgcgggtgctccgggccgaggccgcgggtttcatcaccttaaatggttttgaaccaatgaaggtgtattcccttaaaaagacggaca

SEQ ID NO: 99862 - DNA, 101 bp, Homo sapiens
ttgagagaaaagcccccaaaagcagctattcagctgctgtattaaagtatgaaaataatgtgatgaatattcgacagtttaactgttctccacatccttac

SEQ ID NO: 99863 - DNA, 82 bp, Homo sapiens
tggaggagctgtgcagccgcgaggaggcgcgggaggtgttcgagaacgaccccgagacggtcacaccgacaaatctgaagcg

SEQ ID NO: 99864 - DNA, 75 bp, Homo sapiens
tagacccgtttcctatagatgagaaaccatacaagctgtgggtactatttttctgcctggaaataaagtttctga

SEQ ID NO: 99865 - DNA, 100 bp, Homo sapiens
cgccgcgcgctgcgcgccggacccgctgcccctgccggcccggccgggtcgggcggcccaggttgagaacttgttgcttagtaaccaagggaccattaag

SEQ ID NO: 99866 - DNA, 75 bp, Homo sapiens
ggaggcggagctgtcagctcagatccgctacctcacccaggtgaataagccttacgggaaagtccagatctacac

SEQ ID NO: 99867 - DNA, 129 bp, Homo sapiens
ttcagtgtgggagagtttgcagccctagtgtttgccggagccatggaatttgctgaagttccacagaggacgtcccccacaggcccaaaaaacatgcagacctctggccggctgagcaatgtggccccc

SEQ ID NO: 99868 - DNA, 124 bp, Homo sapiens
aaaaaacaccacagtactatcgtctatcattggatgaagtggctccggagatggtacagccaaagaccggagctttggagagatgaagtttaaacagtgtcctacagagaacatggctcgtgag

SEQ ID NO: 99869 - DNA, 96 bp, Homo sapiens
atcctcatgctcctactatccatttcaactacagatactttgaagtagaagaagctgatgacaattacttacttctacagccattttgcacaaaag

SEQ ID NO: 99870 - DNA, 75 bp, Homo sapiens
acaagctgccttcaccacagcccatgaattaggagatgtaatcagtgtagagaaaaccgtgaagagatgcctttt

SEQ ID NO: 99871 - DNA, 98 bp, Homo sapiens
gagttaattaaccaaaaagttccccagtcagtgaccaactcagtgccaaaaccaggagaacctggagatgtagctactccaccacggaagagaaagaa

SEQ ID NO: 99872 - DNA, 75 bp, Homo sapiens
cgctgacaggggggcctggccgcgcagccggtgtggacactgccagcggctgcagccgacttggaatgacctggg

SEQ ID NO: 99873 - DNA, 100 bp, Homo sapiens
ttgccaaccatgccgaccagggcagggaaaattctgaaaacaccactgcccctgaaggtgaatcaaaaactctggttttaagcaacctctcctacagtgc

SEQ ID NO: 99874 - DNA, 100 bp, Homo sapiens
gaaaagctctacactggactaagagaagttgttaccgaacatctcataaataaggttgctgctccaagatagccaaaatgtggaagcactgagaatgcag

SEQ ID NO: 99875 - DNA, 141 bp, Homo sapiens
ggcatgtgggagctgccggctttccggacgccacgtgcagaccggaagagacacgcggggcttcagatcctgcagctcctgaaaggcaagctggtggtgggtcatgacctgaagcacgacttccaggcactgaaagaggac

SEQ ID NO: 99876 - DNA, 87 bp, Homo sapiens
ggaaaacttcaaagagccggatcgcaggctccctgcctactcccccaccggggatttcaggtactccaaagattcaggtttactcac

SEQ ID NO: 99877 - DNA, 76 bp, Homo sapiens
tggaggagctgaggctggccttccggccccagatggatccccggccttgaatgtcccatgcagttccaaagccccg

SEQ ID NO: 99878 - DNA, 50 bp, Homo sapiens
atcatgtctgcgagccaggattcccgcacatacccccggcctcatgagta

SEQ ID NO: 99879 - DNA, 112 bp, Homo sapiens
gcggcggcgggcaggcgtgcggaggacactcctgcgaccaggtttggtgcacctcgatttggaggaagtagggcagggcccttatctggaaagaagtttggaaaccctgggg

SEQ ID NO: 99880 - DNA, 76 bp, Homo sapiens
tgtttatgccaaatcaactgccttacagattcgggaactggagcctctcctctgtcacagtgacaatccatctcag

SEQ ID NO: 99881 - DNA, 118 bp, Homo sapiens
gaagagcgacaagccgctggcagccgcggatctcaccgccgctcaggtacctggagtagaacagaaaaattattatgtctgtgttcccttgggactcattggaaattgtacagtgaca

SEQ ID NO: 99882 - DNA, 100 bp, Homo sapiens
gcggcggcagagaacttgccggtgccagctgagtcggatgcctcctccctgtagtgattcctgtgactttgatgaccccaggctgttgaagaacattgag

SEQ ID NO: 99883 - DNA, 75 bp, Homo sapiens
tacctggcctacttcgtgcgtgagcgaggttgaaatcacaaagattagacacctttttagataggtgttcttcag

SEQ ID NO: 99884 - DNA, 83 bp, Homo sapiens
ccgctgcctccacagggcatgcttgtgcagccaggaatgaaccttccccacccaggagactccagacccctggcagagcctgg

SEQ ID NO: 99885 - DNA, 101 bp, Homo sapiens
tatagtagactgaatccacatagagaaagtgatgggggaaaggatctgctactgcagctggaggatgagacactaaagctagtggagccacagagccaggc

SEQ ID NO: 99886 - DNA, 100 bp, Homo sapiens
ccggctgggccggaagatcggcagcggctccttcggagacatctatctcggactaattgtcagcctagaaaaggaacttgctccattgtttgaagaactg

SEQ ID NO: 99887 - DNA, 75 bp, Homo sapiens
gagtagatattacatattgagtttctgaggactttctccctcgagggtcgggcattgtaacaagacgacctcttg

SEQ ID NO: 99888 - DNA, 75 bp, Homo sapiens
ggatgaagaagtacctgagcaagaccggccgggaaggacacagtgtcctggatgccatacatcagcatcgtctgt

SEQ ID NO: 99889 - DNA, 98 bp, Homo sapiens
aacaggatgctgatagtctccagcgggcctggactgtgggctggtgtgtggaactgacagaccccgtgcggctgacacagctgtatgagcaggcccgg

SEQ ID NO: 99890 - DNA, 75 bp, Homo sapiens
ctgccctcctggttcggcctccccgcgcactagaacggacaactcaaacttatacatggtcatggagtacgtgcc

SEQ ID NO: 99891 - DNA, 89 bp, Homo sapiens
gtgatgtaggagtctctctaccactggatgaaaatatgactgttaattcatctgcctacactatttacatgggaaaagataaatatgaa

SEQ ID NO: 99892 - DNA, 75 bp, Homo sapiens
cctgggaaggtggagccaccagcctctccttgcactatgggactgagtaacattctctttgtgatggccttcctg

SEQ ID NO: 99893 - DNA, 81 bp, Homo sapiens
aaggggcttacgcagaaggacctggccacgatgatcaagcggtgctgattcacgagagtggaagcctccagagcttggggc

SEQ ID NO: 99894 - DNA, 100 bp, Homo sapiens
ggaggggcgtcggaccagccggcgcaagcgggcgaagattagtgatgatgaaccaggttatgaccttgatttattttgcatacctaatcattatgctgag

SEQ ID NO: 99895 - DNA, 75 bp, Homo sapiens
gggacaccgagggaccaaagggcgggttccaaaaggtcccaggtgtcctctccgtgcagtcggaaaaagccccgc

SEQ ID NO: 99896 - DNA, 82 bp, Homo sapiens
cccgagcccggctggacgccgctgcctcagagacaagaggagcagcagcggcaccgcccctcaccctggagggtcctgtaca

SEQ ID NO: 99897 - DNA, 101 bp, Homo sapiens
gattcaagctcagcaagggggaactgaaactgctcctgcagcgagagctcacggaattcctctcgtttcaggcaaatagttggaaaaatcttatcctcaaa

SEQ ID NO: 99898 - DNA, 98 bp, Homo sapiens
caagggtgttcccgaactagagtgggtgagaataatgtttgaggtacaggacttgaaatacgcgaccttggccacagtgtcgcgctgcggcatggtct

SEQ ID NO: 99899 - DNA, 100 bp, Homo sapiens
cagcacaaccaatttgcattatttctgcagaaaaatgtgggccccctccacctattgacaatggagacattacttcattcctgttgtcagtatatgctcc

SEQ ID NO: 99900 - DNA, 51 bp, Homo sapiens
ctgagcgctctccatgcgcccggcgcgagttggttgaatctggcgatgtgg

SEQ ID NO: 99901 - DNA, 133 bp, Homo sapiens
cgatctgcacttcgcattttggcattgacatttaattttagggtcctttatatagaagggagagggtcgctgtgatgaaattcaagaaccccccagtgaacagcctgagcctggagtttctgacggagctggt

SEQ ID NO: 99902 - DNA, 100 bp, Homo sapiens
tactctaacatttgatcacagtttagaggcacagtggaccaagtggaaggcgatgcacaacagattatacggcatgcccccaaatacatcaagatgtttg

SEQ ID NO: 99903 - DNA, 100 bp, Homo sapiens
gctgagccttaacaagttggcgacgtccctgggcgcgtcagaacaggcgctgcggctgatcatctccatcttcctggttaaacacagtgggaatatcact

SEQ ID NO: 99904 - DNA, 50 bp, Homo sapiens
cctgagcgaggacccccggtggcaaggaagtgagctcacaatgactcaag

SEQ ID NO: 99905 - DNA, 71 bp, Homo sapiens
gcccttgtggcgaatggggctcacgtcgagagtcagtggatcggtggggaaaatgctgcttaccctgggcc

SEQ ID NO: 99906 - DNA, 97 bp, Homo sapiens
gcgcgcttcgaagccgagaaagcccgctgggaggccgagcgcgccgagttacaggctgcgggcctctcgggtgcttcttgtcggcttgaaaggactt

SEQ ID NO: 99907 - DNA, 104 bp, Homo sapiens
ctgatggcttcgctgtcggatttcaagcaactattggatgattatccgaaatgtttcattgtgggagcagacaatgtgggctccaagcagatgcagcagatccg

SEQ ID NO: 99908 - DNA, 100 bp, Homo sapiens
ggccctgagcgcactctggagggattctggcatcagggaggctttcagccggagaagcgagtttcagctgatcctgtttgaccaaactcagagatcaatt

SEQ ID NO: 99909 - DNA, 100 bp, Homo sapiens
acagagtcagcatcagagcagcaggagggaaaatgaagaaggaacgatctcgtaagaaggattcattgtatcacggactgattcaccgagcccaaccgta

SEQ ID NO: 99910 - DNA, 88 bp, Homo sapiens
gtctgcgaaggccgggacccggttccccggcccacagtgggggtgtgcaaacccgagagaactggcaagcacctcaaatttgccatgc

SEQ ID NO: 99911 - DNA, 87 bp, Homo sapiens
agctttgataaatgaaatcttcctaagtatagtgtggcaaaggagcagagaactttgacaagttcttcacacgaggacagcccgtct

SEQ ID NO: 99912 - DNA, 90 bp, Homo sapiens
agaatagtggctgactgcctaacagattgttatcaggtttctggtcttcactctagcactaattgaaaaaaaaaaaatttgttttccgag

SEQ ID NO: 99913 - DNA, 100 bp, Homo sapiens
tagatgatgacagagaagatctttttgcaggatggcactggatctttaaaacgcagtggttcctttagcaaactccgggcttccattagacgcagcagtg

SEQ ID NO: 99914 - DNA, 82 bp, Homo sapiens
ctgccttctctttgatgactctttcctgcatgctgcgttccatgaagaaaccatcaatagatgtctcacaaaacatctggaa

SEQ ID NO: 99915 - DNA, 100 bp, Homo sapiens
cttggataagctggagtctattcctggattcaatgtcatccagagcccagagcagtctattatcctcccagtccacaacgctgaaccgtggctggacgaa

SEQ ID NO: 99916 - DNA, 100 bp, Homo sapiens
ggccacctaaggagcggaccccgcatcttcgccgtctggaaagatctgatctactgtggtcggaagctaaaagatgaccagacacttgacttctatggca

SEQ ID NO: 99917 - DNA, 100 bp, Homo sapiens
tgcaacccagttttccagccaccagtgggatgatggaatgtaagaagcacttggcaggcttgggggctttggggctgggcagcctgatcactgaactcac

SEQ ID NO: 99918 - DNA, 82 bp, Homo sapiens
gggacagcacctcatcccctggatgggggaccacaagatcctcatcgacaggctactgcagcactggggtgtcagttgttgg

SEQ ID NO: 99919 - DNA, 100 bp, Homo sapiens
gagatacaagatattattcttagatccggattcaccattgttcagaataatccagaatggctactctgatctatgttgataaggaaaatggagaaccagg

SEQ ID NO: 99920 - DNA, 113 bp, Homo sapiens
gcagacacagaccttcactacctattctgacaaccagcctggtgtgcttattcaggttggaaaagagactgttcaaaccactgaggatcagattttgaagagagatatgccac

SEQ ID NO: 99921 - DNA, 82 bp, Homo sapiens
cagacagctcaggctgcccagatggtggctcccggagtccagatgaaggatttgggggcagagcacttggcaggtcatgaag

SEQ ID NO: 99922 - DNA, 100 bp, Homo sapiens
caccggcttctgcttttgcaatagccacagctgcagcaggacatgggagtccaccaggcctcaacaccctcccccagcctcccattccctgctggacgcc

SEQ ID NO: 99923 - DNA, 100 bp, Homo sapiens
cggacggtacttctgccactgctgctccgtggagatcgtcccgcgcctgccgacaccattcgcttttcacccaagatgatttgatgtcttataaaactct

SEQ ID NO: 99924 - DNA, 105 bp, Homo sapiens
gcaccatcaaccaccaggccctggagcagctgcacaatgtgacagaactgacagatctgctcaaggcaagaaactcacccgaccttgacagggttgaagatcctg

SEQ ID NO: 99925 - DNA, 101 bp, Homo sapiens
gatttatgggaaagaggcagacattttcctggataacgaaggaggcccaacttcattcaataaggagcctgacggatttatcccagacggtagaacaaaag

SEQ ID NO: 99926 - DNA, 90 bp, Homo sapiens
attatacctgtgtggctgccaacaagctaggcacaaccaatgcgagcctgcctcttaacccctgcttgaatttcttgaaactgtgcaaaa

SEQ ID NO: 99927 - DNA, 100 bp, Homo sapiens
caaaatggcgccctacagcctactggtgactcggctgcaggctgattcaccccaagagtggccgttcctaccacgaggagttcaaccctccaaaagagcc

SEQ ID NO: 99928 - DNA, 76 bp, Homo sapiens
atgaaacgggacctggacagcatcttccgccgtatcaggagcccatacatccccccgcacgcggccctgtgcctgg

SEQ ID NO: 99929 - DNA, 100 bp, Homo sapiens
gccgcccccgccgccacccggcccggctgtggctgaggagccgctgcaccgaccagagcctatctctggcagaagtagccaacgagctggacacggagac

SEQ ID NO: 99930 - DNA, 90 bp, Homo sapiens
agcgatgacgaggacgacgacgaggacgagcacggtggcgtcttctcccagtccttcctgctgtgtgaggcattgtgtaatcagccaggc

SEQ ID NO: 99931 - DNA, 75 bp, Homo sapiens
gatgagagcattcgaagtgacctcagcagggcatccagcagggaaaaggggtcgaggccggtcctgacctgttac

SEQ ID NO: 99932 - DNA, 82 bp, Homo sapiens
cagaagccgagttcaacatcctcctggccaccgactcctacaagcaacatgtcatggtttagtggcctcctggtccctaaag

SEQ ID NO: 99933 - DNA, 75 bp, Homo sapiens
gaccctgcccttgccagaatttcctgcgctgttccacctcattcaacttcagacttccaagtgctggccttcatc

SEQ ID NO: 99934 - DNA, 90 bp, Homo sapiens
ctcccggccaagatgtctgacatggaggatgatttcatgtgcgatgatgaggaggactacgacctgatggccgaacagacccaattttgg

SEQ ID NO: 99935 - DNA, 98 bp, Homo sapiens
aaaaacttgaggaattttggattgattttaatcttgggagtcagactctctcattctacattgctggagataatgattagagtcggggtttcaccgtg

SEQ ID NO: 99936 - DNA, 90 bp, Homo sapiens
gaaaaactggaaatcccaaagcctcgaatggctgccactcagaaacttgttaaagacattattgaaactgcctcattgggagccaggact

SEQ ID NO: 99937 - DNA, 100 bp, Homo sapiens
tccatgtcaagttcctattcctatgcaaccactgagaaaacggaaccgaatagtcaagaggacaagaatgatggtggaaaatcaagaaaagggaatatag

SEQ ID NO: 99938 - DNA, 98 bp, Homo sapiens
aagctgttttggaactgtcaggtacctcaaagcatgatgattattctccaccgtctaagagaccaaaggccaatgagctaccgcagccaccagtcccg

SEQ ID NO: 99939 - DNA, 83 bp, Homo sapiens
aggaaccggcggagggagctgaccgaccgactccaggcgaaggggcaggatggggctgggaagtccaaccccacgcatttggg

SEQ ID NO: 99940 - DNA, 82 bp, Homo sapiens
gctcgatctaggttctgcggcacgggatggcggaggcgcctcctgtctcagtgcatattgggtacttccagaagtatgaatt

SEQ ID NO: 99941 - DNA, 74 bp, Homo sapiens
ctgcagggacccggtgacagcgtgagagctcctctggtgcaagtgtggtagctattgacaacaaaatcgagcaa

SEQ ID NO: 99942 - DNA, 97 bp, Homo sapiens
cggaaggttaacagcccccttctcagttttcctggtgtgcaactgaggaacatggctcaagaaactaatcacagccaagtgcctatgctttgttcca

SEQ ID NO: 99943 - DNA, 90 bp, Homo sapiens
gcggcggcggcggcggatcccggagagccccggagtgagcggagtagcgagtcggcaacccggagggatcgcttacacctgagacgaact

SEQ ID NO: 99944 - DNA, 76 bp, Homo sapiens
gcctcccgtttctggctccgggctgagcttcctggagaagaggaagggactggtgattgcagctggaagtgcccat

SEQ ID NO: 99945 - DNA, 100 bp, Homo sapiens
ggtcaatattgtcttaacatgcttcaaataaatcagtaaaggcatgacttcctggcaccacagggaaaatcgggtgcaagcccagaaactatttccccac

SEQ ID NO: 99946 - DNA, 74 bp, Homo sapiens
cctcagcctcctgagtaactgggattacaggtaaaagtatggtttcagaaccgaagaacaaagttcaaaaggca

SEQ ID NO: 99947 - DNA, 118 bp, Homo sapiens
acagcagagaccaaattcatcattgaatcctcaacatctagcacaatatgcctggcataagatcagaccttccagctgcctctcatgtacttgtctgttgggggcttgtgttgatcag

SEQ ID NO: 99948 - DNA, 95 bp, Homo sapiens
ggctaatgtgtgctgtgttaaattcagcccctcttccagataccatttggctttcggctgtgcaggaagccctcctatgacactgaaacagatcc

SEQ ID NO: 99949 - DNA, 74 bp, Homo sapiens
tgacattgagcttgtttcaaattcagagaaaatattctctttggaatgggaaatcctctgcttgacatctctgc

SEQ ID NO: 99950 - DNA, 82 bp, Homo sapiens
ttcaatgtccgcatcgcaaccaccgccctggccatctaccatgtgacctgcctagagctggaacgttacctccagagcgagc

SEQ ID NO: 99951 - DNA, 82 bp, Homo sapiens
gagctgtgcagccgcgaggaggcgcgggaggtgttcgagaacgaccccgagacggaaacttcctcctggccaaccctgtgtc

SEQ ID NO: 99952 - DNA, 83 bp, Homo sapiens
gagtcggcacctgaaggacatggaggccgagtgatagctactttcacatgttcaggagaaaaggaagtaaatttggctgttca

SEQ ID NO: 99953 - DNA, 80 bp, Homo sapiens
aaaatgccagaaatcaacgccaagctgtttttggaaggaagaaagatggaaagcggtgcagttctgctggaatccaaatc

SEQ ID NO: 99954 - DNA, 51 bp, Homo sapiens
ctttctggcctggaggctatccagcgtgctgtgattgtctccacgccccag

SEQ ID NO: 99955 - DNA, 112 bp, Homo sapiens
ttgggtggtctgtaagccgcggagctaattggagatggtttcacagcacgcagtggcttcggggagaccaagacacattccaccccagtggggggtcccataccactcatgg

SEQ ID NO: 99956 - DNA, 97 bp, Homo sapiens
gcggcggcggcggcgcccgcgggcaggtgtcatggagaaactccagctgggcccagagattctgcagcgggaaaatccaaggcttatttatgccagg

SEQ ID NO: 99957 - DNA, 98 bp, Homo sapiens
agattggggccatgccaaggactatgtggagtggaggaatcagacatcattgatcttgagaaacgctattggttattgaaggctcaatcccggactgg

SEQ ID NO: 99958 - DNA, 74 bp, Homo sapiens
gccttttgggcagcttttccggcctgacaacttcatctttgagaaactccagaaaatcttgccaaacttctgac

SEQ ID NO: 99959 - DNA, 118 bp, Homo sapiens
gaggctatgggcagccaggaggtgctgggccacgcggcccggctggcctcctccggtctcctcctgcagatcctaattatctcatggctaatgaacgcatgaacctcatgaacatggc

SEQ ID NO: 99960 - DNA, 75 bp, Homo sapiens
catggcagatggcaacagaggatgtcaacaattttttggagatttagatggtgctctactctcggggccagatgg

SEQ ID NO: 99961 - DNA, 100 bp, Homo sapiens
aagtataagcctgcagttaaccagattgatgctgcctcattcacgctgacattctttggtcaaggatacagccaaggcactggtacagataagaacaaac

SEQ ID NO: 99962 - DNA, 100 bp, Homo sapiens
atgaaaatgtggttctctgttgttggaagaacacagtcagtgtgtcatcctgtgaccaagagcaccagtctgccctggaggaagccaagcagcccaagaa

SEQ ID NO: 99963 - DNA, 100 bp, Homo sapiens
acttaccctgaagtagttagaatgttcctctgtgacgagggtgcaggtatctctggggactacatcgatcgcgtggacgagcccttgtcctgctcttatg

SEQ ID NO: 99964 - DNA, 100 bp, Homo sapiens
ttcgccggtcgcgggagccccgccgtgcagtcggaggtgttgctgcactggattccaacgtatccggaaaaattggtctgcgcgctgtcgtgtattattt

SEQ ID NO: 99965 - DNA, 96 bp, Homo sapiens
agaactggctcaagaaatttgcctcgaaaaccaaccacccctttgctgtgaagttgcttgcgctctgtaagaaagaaatcaagaattcaaaagata

SEQ ID NO: 99966 - DNA, 75 bp, Homo sapiens
cctaatgacagtctccaaattcgcctccatctgtaccatggtcagttcaccgggacctggaggcccagattgcga

SEQ ID NO: 99967 - DNA, 75 bp, Homo sapiens
catgtgaacacgaacactctaattgcctcctgatagcacacagaaagaacattgacatcaccaatttcagcagca

SEQ ID NO: 99968 - DNA, 101 bp, Homo sapiens
ctcgggtctcgggggccgctctgggatcccggccaccagcaattgtccgacctgcctagagctggaacgttacctccagagcgagccctgctatgtttcag

SEQ ID NO: 99969 - DNA, 90 bp, Homo sapiens
ttcttcgagaagtcacaggaggtgccatctccaggcttcatagagcccagtgtgcaattaaacagactcaggtaactgttcagaaaattg

SEQ ID NO: 99970 - DNA, 100 bp, Homo sapiens
gccagctcttcatcaaggagctgcggagccggacctttcccagaaacaaagggtcatcctttctagaaagagaaccgctgtgctatcaggagggaaataa

SEQ ID NO: 99971 - DNA, 98 bp, Homo sapiens
cgttttgcaagccatgaagcatatggagcctcaagtaaaacaagtttttcaaagcctaccaaaatctgaacatcatttacagcgagcaatttcagcac

SEQ ID NO: 99972 - DNA, 99 bp, Homo sapiens
cgcggctctcgtccgggacacggctttccggagtagagcccttggaggagcttactccacgggaacagcctctagataatctgagttgttgaaaatacg

SEQ ID NO: 99973 - DNA, 82 bp, Homo sapiens
agcgtcctcaacgcattcatcgacaggaaggacagttactactccattcaccagatagctgtgagccgtgagctttgaggcg

SEQ ID NO: 99974 - DNA, 100 bp, Homo sapiens
ccggccgccacttgcgcctctccagcctccgcaggcccaaccgccgccagcaccatggccagcaccatttccgctcaaaagccaaaagtctctgagaacg

SEQ ID NO: 99975 - DNA, 90 bp, Homo sapiens
acgaagaactaacagctcggagcaggagaggacgggactgccaagagacatgttagaaggacaagcaccagaatttcctgagtttgccac

SEQ ID NO: 99976 - DNA, 79 bp, Homo sapiens
ggacaaatactgtcagactgaccaccatcatcacggatgctgtgaaccaggtgatgcaggttctgaatgctgatgccat

SEQ ID NO: 99977 - DNA, 75 bp, Homo sapiens
tctcaagctcatattttgaagtgtttacggaaatgcgtgtactgccggaagcggatgaagaaggtgtcaggtgcc

SEQ ID NO: 99978 - DNA, 100 bp, Homo sapiens
caacaggctgcaggactcccatgacaaggaatacatcaatggggacaagtatttccagcaggaacgtcaaggtcgtgggaaataaaaggcagttctacac

SEQ ID NO: 99979 - DNA, 100 bp, Homo sapiens
gatgctttccttgacctgaagaagcctcctgcctccaaatgcccccatcgctatacaaaaaggccagtcaccactgcacattttgggacaatatggcaag

SEQ ID NO: 99980 - DNA, 75 bp, Homo sapiens
gcagttttcatggatgcccctgtttctggtgcctactttggggataaaggattatttggtcttctggatttggag

SEQ ID NO: 99981 - DNA, 75 bp, Homo sapiens
gccgcctgctcaaatgcctccagatggggatgaaccggaagggttctggctccttggcagcaatggctgtatttg

SEQ ID NO: 99982 - DNA, 74 bp, Homo sapiens
cccatctctggcagtgcagtgtgcctgggagctgtctggaacattccgcaacttattccactaagctcaacaaa

SEQ ID NO: 99983 - DNA, 115 bp, Homo sapiens
acagaggactcaacatatttgcagtagaagtgggacccaaatctacaatgggaagtcgagacaacatgagtgtgattttgatctgttttccaaatgcacccaaagtatcgccaga

SEQ ID NO: 99984 - DNA, 83 bp, Homo sapiens
ccgcagcccgcgtccgcgccggccccacagctctgcgtccggcagcccctgtcaaagggaacaggaagcagtccacggagggt

SEQ ID NO: 99985 - DNA, 75 bp, Homo sapiens
tggaggagctcgatggcgagccaacagtcactgctgtcctggaggaccacagtcagatgaggcagatggagctcg

SEQ ID NO: 99986 - DNA, 90 bp, Homo sapiens
gttgcccaccacgctgggcgcactcgagcggctgcggcacccgcgggagcgcacggcgctatggatgtacagttacccagcacgtgtacc

SEQ ID NO: 99987 - DNA, 99 bp, Homo sapiens
ctccctgggtcctgtcttgaatgagtctagacctgtcgtttgtgaaagggcggcgactggcggcgcgatggacctgaccgggctcctgctggacgaaga

SEQ ID NO: 99988 - DNA, 74 bp, Homo sapiens
ttcgtatctaagactctgggacactcctgaagtcgggaaatggtggagtctttcattttggatcaggatgattt

SEQ ID NO: 99989 - DNA, 90 bp, Homo sapiens
ttgatatggttcctggcaagcccatgtgtgttgagagcttctcagactatccacctttggggcggcgactggcggcgcgatggacctgac

SEQ ID NO: 99990 - DNA, 100 bp, Homo sapiens
ccgccatcatggacaccagccgtgtgcagcctatcaagctggccagggcgccttctgcggcaggcggacagatcctcggcgcggcagggccggggcaagc

SEQ ID NO: 99991 - DNA, 97 bp, Homo sapiens
ctctggccggccttggtgcggcgagccgagcgaggcagctctgagccgcgcggtatttacttatgggatgtagaaggcagaaaatattttgacttcc

SEQ ID NO: 99992 - DNA, 88 bp, Homo sapiens
cgcccgcgcccgggaccgacccctctgctcgcggccgcgcctttgagatgccatggacaatattaccaggcagaaccaattctacgat

SEQ ID NO: 99993 - DNA, 75 bp, Homo sapiens
ccgcctccggcagtggcttactcccggtgccaggttcttggagctgtgaggagactacctaggtggagaagcgta

SEQ ID NO: 99994 - DNA, 80 bp, Homo sapiens
ctggcagtgcagaagtccagggaatggctggcccagcagctgagatcacaggagactgaatggccagatggggccaagga

SEQ ID NO: 99995 - DNA, 100 bp, Homo sapiens
aggaacaggccgaactgctgtatgggctctctcttttggtacaccagaaggccagaatggaacgacttcaaagagaacttgagattcaaaagaaaaagct

SEQ ID NO: 99996 - DNA, 99 bp, Homo sapiens
gcacttcttggtctcaaagggaacttggaaatgacattggcatccagattatccactgcaatgctggcatcaccatctacatcaggtcagctgtctcag

SEQ ID NO: 99997 - DNA, 85 bp, Homo sapiens
gcagtcctaccatgtcagccttcccagtagctgggaccacagctctcctttgggtggaacacagtgaagatcgacatgagtgcag

SEQ ID NO: 99998 - DNA, 82 bp, Homo sapiens
atctcttggagcagctggggatcatggtggataagattgtggaccagctgcagcagttaatgcaggtgtatgacttggctgc

SEQ ID NO: 99999 - DNA, 98 bp, Homo sapiens
aactgcccttggaaggtgccaccccgggccatcacagaggccaacgtggcagagagtttattggctcttctgaagccctgtaaagattttgaagtgga

SEQ ID NO: 100000 - DNA, 83 bp, Homo sapiens
agaccatttatttctttggagacaaaactatgccaaatgttgtaccatctttgggtaggcagacttccctgacgacatcagtg

SEQ ID NO: 100001 - DNA, 90 bp, Homo sapiens
attgtccctgaccatccacctgacatcccctgttgtcagagaagaaatggagaaagtattagctggagtgagaaagatcagtctaaagaa

SEQ ID NO: 100002 - DNA, 83 bp, Homo sapiens
agggaaccctggtcaccgtctcctcaggaacccaagacagaccaggatgaggagcattgccggaaagtcaacgagtatctgaa

SEQ ID NO: 100003 - DNA, 83 bp, Homo sapiens
ccccgaatccgatgtccccagcacataataacttgggctgcctgctgtttcccggggagatcatgaaacgaggtcgccttccc

SEQ ID NO: 100004 - DNA, 100 bp, Homo sapiens
ctgtatgacgatgtggaacccagagatgactccagccccagccccaagggcagagaacaggccgcccgcctgaagaaactacaagagcaagagaaacaac

SEQ ID NO: 100005 - DNA, 100 bp, Homo sapiens
gcaaccagccctttacacagactcacttgtcactcactgccatagagtacagccacagccacgacaggtacctaccaggaacagattatggcctttgcaa

SEQ ID NO: 100006 - DNA, 80 bp, Homo sapiens
ctactgtgcgctcgatccagcaccatggggaagcgggacaatcgggtgaaaggaaggcagaggaagccacggccactgga

SEQ ID NO: 100007 - DNA, 75 bp, Homo sapiens
aactcaccaaaaacaacatctttccagaaagaggtgatgtaaaattctcaaacaatgagatagataaaaagtacg

SEQ ID NO: 100008 - DNA, 75 bp, Homo sapiens
ggttggtgaagaaggatttgtaggcccctggatcctcctggaatccccgatccctcttgctccctggcagagttt

SEQ ID NO: 100009 - DNA, 100 bp, Homo sapiens
tctgaagatttcctggttggagggacagccccaggatgccgtgggccgcagccactcaggactgtcaaaggctactctgaacgcccggacgtccattttg

SEQ ID NO: 100010 - DNA, 75 bp, Homo sapiens
cggccaggacgcccccgagggtgtagaccgcgcccctggaggctgcaaggtgtgactgttgtaaatctcaaggaa

SEQ ID NO: 100011 - DNA, 74 bp, Homo sapiens
gacattacgagaaatgttagagaagaaagacagctttgtggaagagcttccaatcagaagactatacaacctcc

SEQ ID NO: 100012 - DNA, 75 bp, Homo sapiens
agcatgctaagaacaacagtcaggccaagccttctgcctgtgatgttgtggaagatatcaataagcgcagagagc

SEQ ID NO: 100013 - DNA, 109 bp, Homo sapiens
tgcctatgtattccctggggatggcgcatcacacaccaaaggtcccaggtgtgacaccttcagcaggtctcagggaagatggcagccctaggggacattcaggagtccc

SEQ ID NO: 100014 - DNA, 100 bp, Homo sapiens
ctggcagtacctgaccactctctcccaggtgctggagaatctggtaaaagcaccattgtgaagcagatgaggatcctgcatgttaatgggtttaatggag

SEQ ID NO: 100015 - DNA, 83 bp, Homo sapiens
ccaaccctgccagcacctggaccttggacattcagacttcagaatggttatggctcatagttcaccccagagcattttagatg

SEQ ID NO: 100016 - DNA, 75 bp, Homo sapiens
gatcagctgaatcagagtttgcattgttaacaaggtgtgtgtctggggaagagacttacagaagtggagttgctg

SEQ ID NO: 100017 - DNA, 101 bp, Homo sapiens
tggagaccatggagaccctcacggagctgggcgacgagctgaccctgggagacatcgacgttggctggagttgtcttccttggagtcgggctgtgggcatg

SEQ ID NO: 100018 - DNA, 100 bp, Homo sapiens
ctcgttattctgcaggagttgcattgcaacttgagttggtggaaccaagtggctggattcatgttcccttaactgacaatcataagaagccaactcgtac

SEQ ID NO: 100019 - DNA, 90 bp, Homo sapiens
aaaactgatgaccaagagaatgtgtcagccgatgcaccgagtccagcccaggaaaatggagagggagtgcctgcagcaccccggcggggc

SEQ ID NO: 100020 - DNA, 120 bp, Homo sapiens
caaaagaaaaaagaatgggtcaaccaagaacgtcaaacactccaacgattgagagcatttaaagatagagacaagagagacacctccaacttcgacaaagagttcaccagacagcctgtg

SEQ ID NO: 100021 - DNA, 96 bp, Homo sapiens
gggcggcgtgtcaggtggttgcggagctggatgaggatgggacagaagaggataacagtcgtgttgaacctgttggacatgctgacacgggtttgg

SEQ ID NO: 100022 - DNA, 49 bp, Homo sapiens
accacacttgatgaccccctgggtcaaaaggctgagtttcaaattctgg

SEQ ID NO: 100023 - DNA, 75 bp, Homo sapiens
ccatcaagttcttcaggaatggagacacggcttcccccaaggaatatacagggcccagtcctatgcggagagact

SEQ ID NO: 100024 - DNA, 98 bp, Homo sapiens
ttcctgtggagcaaagagctgcatcatgaattcaggagcatcggctggtgaattaccatatctccgtcaagtgcagtaaccagttcaagttggaagtg

SEQ ID NO: 100025 - DNA, 100 bp, Homo sapiens
tagctgtgctcgcgctactctctctttctggcctggaggctatccagcaatttcgctaaggagtttgtgatcagtgatcggaaggagctggaggaagatt

SEQ ID NO: 100026 - DNA, 100 bp, Homo sapiens
cgcctacagcatccttgacatcttttcataaaccagcacaactgaaatgggtcctgatgaatatgaagagatggaagaagaggaggaggaggaagaggag

SEQ ID NO: 100027 - DNA, 74 bp, Homo sapiens
atgaaactggatctacggccctttccatagccagagcagtacaagaaaatctccgagaagcaagggataatgct

SEQ ID NO: 100028 - DNA, 99 bp, Homo sapiens
aagaatacatcaagattctgaatctggtgatgaacttagcagcagctccactgaacagataagggtactactgagcgagtgtgcttgatccagggaacg

SEQ ID NO: 100029 - DNA, 75 bp, Homo sapiens
attgaaagcaaaatccaaccaggttctcaacaggctgactacgtcaacagtaatgaaggcaagcagaaaaagcga

SEQ ID NO: 100030 - DNA, 75 bp, Homo sapiens
gccaaaagggaagcaaagcatctcaaagggcaagtgtccagagaatggctgggatgaaagtacacttgaactctt

SEQ ID NO: 100031 - DNA, 100 bp, Homo sapiens
tggatgctgacatgtacaacgctctctgtaagaccctgcagcgtgactgtttggaatccggagatgatgagtatcaaggggaccagtcagacacagagga

SEQ ID NO: 100032 - DNA, 74 bp, Homo sapiens
gcggcgcggtcggtcggcgcctgttctcgggctgtttggcgggacttgattattcttagaaatgcacttgacct

SEQ ID NO: 100033 - DNA, 74 bp, Homo sapiens
ctcccccatcgtatgaatctgttccagtgggtagtgactcgcaaaatgtggtccagccgcctttccagcaaccc

SEQ ID NO: 100034 - DNA, 90 bp, Homo sapiens
aacaagtactgcgccgactgcgaggccaaagtactatactggcaattgctggagaagattttgcaattgttgcttctgatactcgattga

SEQ ID NO: 100035 - DNA, 82 bp, Homo sapiens
cttgcgggcccggaactacgagtacctgatccgcctcttccaggagtgggagggggctcctgagagtgtgatcgagcgctgt

SEQ ID NO: 100036 - DNA, 101 bp, Homo sapiens
gctcaagcagttcaccaccgtggtggccgacacgggcgacttccacggtttttcgttggaatatacgttgcacatttatggcgattctgagtgtgagggca

SEQ ID NO: 100037 - DNA, 82 bp, Homo sapiens
acttatgcagctggaagaagccacccgcttaacatcctacctccagtcccagttaaaaagacaatgcagatcttcgtgaaga

SEQ ID NO: 100038 - DNA, 75 bp, Homo sapiens
cgggggtggaggtggtgcctctggcagtgacgaggacgaagtgtccgagccaagaaggatcaagaaggtggagaa

SEQ ID NO: 100039 - DNA, 100 bp, Homo sapiens
gctcagtctgcggccaagactccgtcctgcaaggtgtggtggctcacgtctgtaatcccagcactttgacaggctgagcgagggagtggatcttgaggtc

SEQ ID NO: 100040 - DNA, 118 bp, Homo sapiens
atgaacaatcatcagctggaactggcaaagcagctacacaaagagggtcatctcttctattgtacctgcagattcctagaggggagtgcctgcgagcctcgggtgagccttcctggag

SEQ ID NO: 100041 - DNA, 100 bp, Homo sapiens
gggacggcgaggccctcatgtaccacacgattgtcactgctgttccaagggcacacgcagagggatttggaattcctggagagttgcctttgtgagaagc

SEQ ID NO: 100042 - DNA, 74 bp, Homo sapiens
ctgtttcctaccaggtcacacactgttgcagcgcaggttgatggacggatggctacatggatgtgatggagatg

SEQ ID NO: 100043 - DNA, 75 bp, Homo sapiens
gcggtgcgctgggggccggggcgcgtcgcagttctttatagctccaagctctacagattcttcaaatatattgag

SEQ ID NO: 100044 - DNA, 73 bp, Homo sapiens
cgcgccccacttgctcgtgcactttacacacatgaggattcctacaggaagcaagtagtaattgatggagaaa

SEQ ID NO: 100045 - DNA, 75 bp, Homo sapiens
catcagggaggctttcagccggagaagcgagtttcagctgataaccctaaggaatatcttggatgtcttcacggg

SEQ ID NO: 100046 - DNA, 98 bp, Homo sapiens
ggagcccggagctggggcgacgaggcgattgcgggggcctgggctagttgaaatggatgcagtcagaactgaatgttgaagaagtggtaaatgacagg

SEQ ID NO: 100047 - DNA, 100 bp, Homo sapiens
agtctgtcaggaagtgccatggtaaactgttttaacaggactggggttttaaggggtgtggcaggaggttttggactcgatgagtttccaccgaaatgtc

SEQ ID NO: 100048 - DNA, 75 bp, Homo sapiens
cctggagctgctgttgcagcacttgttccccaaacaagtgctcctacattctgggcaatttgcatatttctccaa

SEQ ID NO: 100049 - DNA, 100 bp, Homo sapiens
aagccagctctgcagctcagccaatcagtgacatcattgggcacggtgcaccctgtgaccactgtcagcagtagcgacgtggagaaggcctacctggcct

SEQ ID NO: 100050 - DNA, 98 bp, Homo sapiens
ccgcgggagcctcgtggctgcgtcaccgccgcccccccagacaagatggacaccgcggaggaagggtttcgaaaaaacgatgaaatgaaagctatgga

SEQ ID NO: 100051 - DNA, 83 bp, Homo sapiens
cttaaaaaagcaatttttagtccagagctctatgaaaacattgctgaatggattgtgatacagtttatgtaacttgatggaag

SEQ ID NO: 100052 - DNA, 98 bp, Homo sapiens
cacccagcaatccctctgcagacagctcccacaggagtcatgcccagtgtgtgaagatgccatggacaatattaccaggcagaaccaattctacgata

SEQ ID NO: 100053 - DNA, 87 bp, Homo sapiens
tgggggacaaaaaagacctttagaagatggagaagagatcacaaaatggctcttcttcagatggcaacagtggaagaagctattcag

SEQ ID NO: 100054 - DNA, 100 bp, Homo sapiens
cagatgacggtggatcacttgaaaatgctccatgccactggtgggacaggttgggtatctacagccattggttgctgttcaggtcagctttgctcctaac

SEQ ID NO: 100055 - DNA, 82 bp, Homo sapiens
cgtcatgttcttcgcgccctgcacatggattaattgatgtatgttgagtttatggagctgccttttggtggcttgctttatc

SEQ ID NO: 100056 - DNA, 87 bp, Homo sapiens
catccttcaggacgtttcctgggcaccacctggtgtgatccctcacatccacaaatctctgattggaaagaagggacagcagaaaac

SEQ ID NO: 100057 - DNA, 90 bp, Homo sapiens
gcgccttcagcttctctctgccccgccctggcaggcgaggctccaggcctccagatgcagaggccaggatgtgggcccagccctgtgcca

SEQ ID NO: 100058 - DNA, 100 bp, Homo sapiens
ccctatgtccaaaaacgtttttcctgataactggaaagttcctcaagatggagactttgactttatctcccttgagtttagaaatctggctgagaaatac

SEQ ID NO: 100059 - DNA, 82 bp, Homo sapiens
attcgcagtggtcgcttcttctccttgagaattttctctacatgtgcacccatttaaaggactcggcttcaagggaagcagc

SEQ ID NO: 100060 - DNA, 82 bp, Homo sapiens
tgctcctcctggcatccgcagtggctgcgatggaagggtgtcttttatgaataatcaaaagcagcaaaagccaacgctatca

SEQ ID NO: 100061 - DNA, 96 bp, Homo sapiens
ggtcaagcgggccacgcacctcgtcaccaaggccaaggttttaaaatcaaagatgggaaaatcggagaaaattgcccttccccatggccagcttgt

SEQ ID NO: 100062 - DNA, 100 bp, Homo sapiens
cattgctccaagccagatatggtacaggactgtcaacgaaacctggcacggctcttgcttccgctctgcttatgataatgtcaacaaagttcgagtagct

SEQ ID NO: 100063 - DNA, 75 bp, Homo sapiens
agcctcaaggcggcccggcgggcgactggacggccggacagctctggcaggctgccctgagcacgctcaacccca

SEQ ID NO: 100064 - DNA, 100 bp, Homo sapiens
cggccgcctgcacggagctggccaagcgcatcacagacacctggccacattcatcatggacaagagcgaagccatcacgtctgtggacgacgccatccgg

SEQ ID NO: 100065 - DNA, 100 bp, Homo sapiens
ggctcatcctgtccatcgtgtgcctgatgatcacgcagctggctggcttcagtggaccagtatatgccctcattttgcttaagacctctggccagagcag

SEQ ID NO: 100066 - DNA, 101 bp, Homo sapiens
caacaactgggccagcggattctcccagagatggacagagacgtatgtgcgttggtctcctaagggcacctacctggctacctttcatcaaagaggcattg

SEQ ID NO: 100067 - DNA, 100 bp, Homo sapiens
ctaccagggtatttagcctagttggcaagcgagcaatttccacctctgtgtgtgtacgagctcatggtatctgatggtataattgccccaggatatgaag

SEQ ID NO: 100068 - DNA, 98 bp, Homo sapiens
gctgggagagaggtacctctccttttccctctccctttccctaaggtgccaacatcgcctctggtgaggaagtcgccatcaagctggagtgtgtgaag

SEQ ID NO: 100069 - DNA, 111 bp, Homo sapiens
tctctcatctcgctcggctgcgggaaatcgggctgaagcgactgagtccgcgatggaggttatggaaacaaaggacatgctttacatcgtcactgaatttgctaaaaatgg

SEQ ID NO: 100070 - DNA, 75 bp, Homo sapiens
aaggcagagcgtgtggcatctccacctcaaggccaagtatcttcaagaccttctcatggagagtgtgaatttttc

SEQ ID NO: 100071 - DNA, 75 bp, Homo sapiens
ggggcctgagaggggcggcggcggggtcaggggccgagattcagaatatacccccctggacaacacggttatcct

SEQ ID NO: 100072 - DNA, 100 bp, Homo sapiens
ctgcacccctacgggaacccacgaccattatatgctggaatggttccttgctcctcctgctggaccctccagccccgggcctcaggagcccgagaaggag

SEQ ID NO: 100073 - DNA, 83 bp, Homo sapiens
ggagcagctgaaccaggccgacgccctgctgcagtcggaactgtggctgcaccatctgtcttcatcttcccgccatctgatga

SEQ ID NO: 100074 - DNA, 133 bp, Homo sapiens
ctccaggagcaagtactccaggaagcacagagctgtaccagtacacggcccacgttgccagaaaagtgggagatagatccatctgagttggcttttataaaggagattggaagcggtcagtttggagtggtcc

SEQ ID NO: 100075 - DNA, 50 bp, Homo sapiens
tgaagctggaaagcttggacttatgtgtcgtggaggccgaatgtttgcac

SEQ ID NO: 100076 - DNA, 75 bp, Homo sapiens
gaaatcattgtacagaatggaaaagtaattggtgtaaaatctgaaggagaagtctctgttctaggatgtcccgac

SEQ ID NO: 100077 - DNA, 75 bp, Homo sapiens
tctacctactgccaattggaaagtcagccatcgctcccagccccaacagccttcccagccccagcggaccctgct

SEQ ID NO: 100078 - DNA, 101 bp, Homo sapiens
aacgcgagtgggagcaccaggatctcgggctcggaacgagactgcacgttggatatgtcaagtgaccagatagctgccaatctgcaagcagttattaatga

SEQ ID NO: 100079 - DNA, 75 bp, Homo sapiens
tctctagaccttgccaagatggcacagaaactggcaagatgtttacctggggccgagcagactatggtcagctag

SEQ ID NO: 100080 - DNA, 97 bp, Homo sapiens
agcctttctggacagaccaacctgtcagtgctgcaagttgcaaaggagtttggcttccaaaataatggcttctcggtttacatcaatagaaacaaga

SEQ ID NO: 100081 - DNA, 75 bp, Homo sapiens
cagcctgcagcgctctggaggggtatggagagtcggcttgactacactgtgtggagcaagttttaaagaagcaaa

SEQ ID NO: 100082 - DNA, 75 bp, Homo sapiens
agacggacagtacctcttctgcaggtactggaaacccacaggcacacccaaggccatgttctgcaacgatttaaa

SEQ ID NO: 100083 - DNA, 100 bp, Homo sapiens
aagaagccaacagcgaggctttcagttctttggaattccattcttttccttattcttctgatgtggatccagacatgggaaagtctctttctcatttgcc

SEQ ID NO: 100084 - DNA, 82 bp, Homo sapiens
gcacaaaaactaccattcgcctgatgaactctcaggatagagggaggaatcagcagcttggaaattcaagcacgtgatctgg

SEQ ID NO: 100085 - DNA, 82 bp, Homo sapiens
gcgtcgcgcgggccgggatgagggactgtggcggcgcggcccgcgcgcagccggccggagtttcggacgtggctgagggagg

SEQ ID NO: 100086 - DNA, 100 bp, Homo sapiens
caggttacttcttcctcaacaccagcaccgcagatgttgtcaaggtggcctaccaggaggccaggggtgtcgccatggaattacatgaacgacagccttc

SEQ ID NO: 100087 - DNA, 80 bp, Homo sapiens
gagcatgccctcagcgccatcgctcagttcctacccccggttgcgagaggagacagagcgaatcgtcaccacttacatcc

SEQ ID NO: 100088 - DNA, 100 bp, Homo sapiens
gagcctcaagtgcttctgcattacagcctgcactgcccaaagtcttggaaacttgctggatatgatgtaccgggagccagcacgatggtcctacacattc

SEQ ID NO: 100089 - DNA, 85 bp, Homo sapiens
gcggaggcgcctccgctgcagtcgctgcgtctccaaggtgcgcgcggagccatggttatcatgtcggagttcagcgcggaccccg

SEQ ID NO: 100090 - DNA, 98 bp, Homo sapiens
ttctgctgccacaaagactgtaaagtgcttcatttcaacagctgaggtttttgagtcatgatgcaagaatctgggactgagacaaaaagtaacggttc

SEQ ID NO: 100091 - DNA, 75 bp, Homo sapiens
cttccactgatatctcaaaaggtgatctggacaaaggaacaggtatctcaggatgtacttgttaaagagttactc

SEQ ID NO: 100092 - DNA, 74 bp, Homo sapiens
ccggaaggttaacagcccccttctcagttttcctggtgctggagaatctggtaaaagcaccattgtgaagcaga

SEQ ID NO: 100093 - DNA, 101 bp, Homo sapiens
tgaaacctatcagaatagattcctttgggatcagtggttttgatttacaacctgtcagcctgagattcctgaacgcctctgcgaacaaactggaaagcctt

SEQ ID NO: 100094 - DNA, 100 bp, Homo sapiens
agcaggaccacttcgtcaaatgcagctcttgggacccaaccaccatgctgtgaagcagcccaggccacacagagaggccacgtgtacatgttcagctgac

SEQ ID NO: 100095 - DNA, 95 bp, Homo sapiens
ccattttctactgtccctgcgcgaggtgtacaaagataatcaatgctgattcggaggacccaaaatacattatcaacgtaaagcagtttgccaag

SEQ ID NO: 100096 - DNA, 76 bp, Homo sapiens
aagctgttatgttgcctgagggagaggatctcaatgaatggattgctgtgaacacggagctccctgggtcctcagc

SEQ ID NO: 100097 - DNA, 74 bp, Homo sapiens
gaactatatgatgccagctaaagggaagatggtcagtaggacagaaggtaacattgatgactcgctcattggtg

SEQ ID NO: 100098 - DNA, 75 bp, Homo sapiens
gaggtcctatctattactgctatgttgtcagaatcatttgctgtttcaaatagagaactgtgcgatgatgagaaa

SEQ ID NO: 100099 - DNA, 83 bp, Homo sapiens
ctctctctttctggcctggaggctatccagcggccggtcactccgcgcaagtttgggttcctgttttagaactgccacctaag

SEQ ID NO: 100100 - DNA, 74 bp, Homo sapiens
aggttcccgcgggaccctgccagaaattgcatctgatggtctcaagggtcgtgtgtttgaagtgagtcttgctg

SEQ ID NO: 100101 - DNA, 82 bp, Homo sapiens
cctacatttggagcctggacacgcagtacagcaaggttgtgaccgagattcccgacgagagagactgaggggaagagaggaa

SEQ ID NO: 100102 - DNA, 101 bp, Homo sapiens
gaccaagtgcccacttggcctgtgcaaagtgtcagtcatcccacccacggctctcaacagcatcgactccgatggacttcgagtaagaaggtgatttacag

SEQ ID NO: 100103 - DNA, 99 bp, Homo sapiens
taggactctatgacacggccggacaggtagatatagttgtaggtactccgggaagactagatgacttggtgtcaactggaaagctgaacttatctcaag

SEQ ID NO: 100104 - DNA, 75 bp, Homo sapiens
tcggggccgaccaaagggaagcaaaaacaagggtgctgccaagacccgggtctggagggtgagcgacctgcgaga

SEQ ID NO: 100105 - DNA, 75 bp, Homo sapiens
ggaggctgagcccggggatggcgcgccagctactacccacagatggcatgatccgaaaacactctcatgtcaaga

SEQ ID NO: 100106 - DNA, 101 bp, Homo sapiens
ttaaagtctttagtatgttgaactggaaatataggacatgcgtttgagatctactgtgagtactaggttttgacaagcttgcatcatgcgtgagtataagc

SEQ ID NO: 100107 - DNA, 75 bp, Homo sapiens
cgcgatgagtggtctcggcaggctcttcgggaaggaattatatccagatcgagagacagaagattctgaaagggt

SEQ ID NO: 100108 - DNA, 96 bp, Homo sapiens
aatttgaacaactttccgaatctgcaaaagaaggaagcgagtcacgtcccagcgctgctccctggagtttctggaagatgccgtgggatgcgctcc

SEQ ID NO: 100109 - DNA, 100 bp, Homo sapiens
attttatctatgggccattggatcctgtaaatccctatccagagtttttggagctgtacagtgaaagctggtggaatgcgaattgtgcagaaacacccac

SEQ ID NO: 100110 - DNA, 75 bp, Homo sapiens
acatcaagtgatgaaaaacacccacctgaaaatatcattgatggccaaagtggaacaggtgaagttcgatgccac

SEQ ID NO: 100111 - DNA, 83 bp, Homo sapiens
cctttagccactggacttacgaatatacaagaggggagttactggtacttgatttgcaaggtggaagatgcaatgctgatgtt

SEQ ID NO: 100112 - DNA, 90 bp, Homo sapiens
ccctcaagtccctgatggcctcagaggaggaggccgctgcctgctccccaggcccaagtcccttgcgggcagctgcccctccacccgcct

SEQ ID NO: 100113 - DNA, 74 bp, Homo sapiens
cgccggcctcctcagtgcgaagaagctgcagccgcacctggccaaggactggtcttctgaggacctctgccctc

SEQ ID NO: 100114 - DNA, 100 bp, Homo sapiens
ccctcgagaagctccagatggcgtcttccgtgggcaacgtggccgacagcacaggtgacctgagcatctctgcagaccgcctgagtgagaagcgctctcc

SEQ ID NO: 100115 - DNA, 97 bp, Homo sapiens
ggagctaatacaggtatcgggaaggagacagccaaagagctggctcagagaggactatctgctgccaaactcttgactgaatatggcgttagtgttt

SEQ ID NO: 100116 - DNA, 97 bp, Homo sapiens
ccatccgcaacctggaggtcaagttcaccaagaagctatgtggaagcagtgacctgaatgcttctatgacatctcaacattttgaagaacaatctgt

SEQ ID NO: 100117 - DNA, 75 bp, Homo sapiens
cgagatcttccgccactacgagctggtccattcaggtccaggaaagggatcaccccaggctggtgtggatctgtc

SEQ ID NO: 100118 - DNA, 75 bp, Homo sapiens
cggtgagaaaggccagtacacacacaagatctaccacctgcagagattgagcagctgtatgtccggcaactggca

SEQ ID NO: 100119 - DNA, 90 bp, Homo sapiens
ggacagtggctaaagtggagctctcagaccacgtgtgtgatgtggtgtttgcactctttgactgtgatgatgactttgaagaagccaagg

SEQ ID NO: 100120 - DNA, 75 bp, Homo sapiens
gatgaagccagagaagcccagtcttccgaaatgcggtgctcagtttttgctgggcaggaaagaagaggaggcagt

SEQ ID NO: 100121 - DNA, 80 bp, Homo sapiens
ctcagcttcacctgagggatccagtggcaagttcttggagtctctgcggagtccctgggccagatctcacagtgaaagct

SEQ ID NO: 100122 - DNA, 107 bp, Homo sapiens
gcacacagaaccctggccaggatcatgaagggcgattgaaaagtgcatcctaacgttagtcaaggctgccaaggaggctgtgcaacatgctcagattacaatggatg

SEQ ID NO: 100123 - DNA, 100 bp, Homo sapiens
aagaatcctgagttccgtgtgcagttccaggacatgtgtgcaaccattggcgtggatccgctggcctaaatcaagatgactaccagctggttcgaaaatt

SEQ ID NO: 100124 - DNA, 101 bp, Homo sapiens
cttttttcatttccatttctaccttgtatgcctcaatttgctggatttaagcactgctgcactttatgaggagctctcaacttaatcatccttcagcaaaa

SEQ ID NO: 100125 - DNA, 99 bp, Homo sapiens
gtgggagctgtcagtgttttcctgagaaaggagcgagaggagagagagggtttccaggtttggaaggacacccaggattgcctggatttccaggtccag

SEQ ID NO: 100126 - DNA, 98 bp, Homo sapiens
attttgacctccttccatgaatcacaaatgttcttaatggcatctagaatggatggtgattgctcacaccaaagccttggacccctcccagcctgtga

SEQ ID NO: 100127 - DNA, 98 bp, Homo sapiens
atttagttctggggagcgcctcgtcgacatgagtgatgtggaggaaaacaacttcgagggcagagtagctacagcaagctgggtagcaggcagatcca

SEQ ID NO: 100128 - DNA, 75 bp, Homo sapiens
gtctggcctcggcgccaagatcccagtcacaattatcaccgggtatttaggtacaccaggggttggaaaaaccac

SEQ ID NO: 100129 - DNA, 75 bp, Homo sapiens
aactggataacactaagtttagatctcatgagcaaaccagtccagctacgggggcccagccagccagcagctgag

SEQ ID NO: 100130 - DNA, 88 bp, Homo sapiens
ggacggaagaaaaggtctggccgcacttaaatatagatccggtggtatggatgagaaaacaattgctttacttgttgctggactagtg

SEQ ID NO: 100131 - DNA, 75 bp, Homo sapiens
aatacttgctttactggaaagacccagaatatgccaagtatctaaagacagaggtcagatcaaggccaccccttc

SEQ ID NO: 100132 - DNA, 137 bp, Homo sapiens
tctcctcattggagcaagggaaggagccctggatggttgtgagggaagagacaggaagatggtgcccagtgtacctcggtatgatcaaccacctcctgtcacataccagccacagcaaactgaaagaaatcagtccc

SEQ ID NO: 100133 - DNA, 100 bp, Homo sapiens
gccctgctcaccctctacccggcacctgacgaggtgtcctatgccagacccagttcagcatccatccgggatgctaacctgtacgtcagcgggctcccca

SEQ ID NO: 100134 - DNA, 90 bp, Homo sapiens
caggcgcagatgcgggccctgctggaccagctcatgggcacggctcgggacggagtccaacctataccttctcagggaggcaaactagaa

SEQ ID NO: 100135 - DNA, 74 bp, Homo sapiens
gagatcaacaacccagagtccgtgtattactgggcccagaaggttacgggcaggacttgagtggcttcggacag

SEQ ID NO: 100136 - DNA, 100 bp, Homo sapiens
gtacagcaggaagtggcctcccctggggaggatgcagcagaaccttgcataggtgaagaagggcaaagaccccaatgcccccaagaggcccatgtctgca

SEQ ID NO: 100137 - DNA, 100 bp, Homo sapiens
cgggagaagcatgggaaggaggccgagccgggatctcaggtcctcgggggcggcggccacgccaaggacggggaaatcctcattgacgattcaatttgtt

SEQ ID NO: 100138 - DNA, 83 bp, Homo sapiens
ctggaaattgcgctggaccgtcgccttgctcctcgccgcggcggggactgcaggtgagaagcttgactacaagacctgtgagg

SEQ ID NO: 100139 - DNA, 95 bp, Homo sapiens
gaccactgtgggaacctcatgagcatgcacaacgtcaaggaggagataagcaaggacctcagagccacactgaacgccttcctgtaccacatggg

SEQ ID NO: 100140 - DNA, 74 bp, Homo sapiens
ccagggtccctgaagagggaagacacgcggaaacaggctgtaacagaagacaagtacgaaatactgcaatctgt

SEQ ID NO: 100141 - DNA, 75 bp, Homo sapiens
ctcaccctcatctatatcctttggcagctcacagatggattaattgcctctgaaggagccataagtcccgatttc

SEQ ID NO: 100142 - DNA, 90 bp, Homo sapiens
ccagaattacgggcaagcgctgttcaaacccatgaatgcaaacatccttttggatgatcagtttcaacccaaactaactgattttgccat

SEQ ID NO: 100143 - DNA, 83 bp, Homo sapiens
ttaccaggctggcttgctctgagctgcggttactgtgtccaggccccgggttctcaggtgctgccatgcttactgagtccctt

SEQ ID NO: 100144 - DNA, 89 bp, Homo sapiens
gaggagctcctggtcgatgaagaggatgatgtttttggtgaagataagggcctcgctctgttacccaggctggagtgctgtggtgtgtt

SEQ ID NO: 100145 - DNA, 100 bp, Homo sapiens
gccttgcctagtgggccttccttcccagatggagttttaacattgaatgcggagaacactaattatgcctatcaagttccaaacttccataaatgtgaaa

SEQ ID NO: 100146 - DNA, 100 bp, Homo sapiens
gaatgctaagaactgctgggaggatgacagcacttaagtattcatcgaagagtcaccccagtagcggtgatcacagacatgaaaagatgcgagacgccgg

SEQ ID NO: 100147 - DNA, 73 bp, Homo sapiens
tgttatatgtcctaaagtaaggtttcaggaagggaaaaggccgaggcatcagcgtgtgaagaccgcaaagacg

SEQ ID NO: 100148 - DNA, 83 bp, Homo sapiens
acccagagctagactacaccctcatgagggtctgcaagcagatgataaagattgaaatcatggcaggtccagaaagtgatgcg

SEQ ID NO: 100149 - DNA, 108 bp, Homo sapiens
tctgtggcctcgttacctgcaggtattgggagatccacagctaagacgccaggacccactggaagcctagaaatgacaattcctcctcgcttcaagaagatgaagaag

SEQ ID NO: 100150 - DNA, 75 bp, Homo sapiens
caagtcaccatggacgctgaaggagctgtgtcagagcacactgaccgaaatggaaagccagaagcagctctgccg

SEQ ID NO: 100151 - DNA, 82 bp, Homo sapiens
gctccgggtccacaagaccttcaagtttgtcgtcgtcggggtcctgctgcaggttcattttccagacactgaaagagcagaa

SEQ ID NO: 100152 - DNA, 100 bp, Homo sapiens
cctgcttggagacggacttgcttccggtgtcatggagaaactccagctgggcccagagattctgcagcgggaaaatccaaggcttatttatgccaggctg

SEQ ID NO: 100153 - DNA, 95 bp, Homo sapiens
gatcgaccggagcagagagctggcgagcaaggtttttcgttggaatatacgttgcacatttatggcgattctgagtgtgagggcagacttctgcc

SEQ ID NO: 100154 - DNA, 88 bp, Homo sapiens
cagccactccccgctggacagcgccgacgtccgggtgcacgtgccacgcacgatgaaggatttgggggcagagcacttggcaggtcat

SEQ ID NO: 100155 - DNA, 82 bp, Homo sapiens
cgcggccggcccggcgcggcccagcgccctcagagcgggacaaggagaaccggcatcggaagcgcagccacagccgctctcg

SEQ ID NO: 100156 - DNA, 100 bp, Homo sapiens
cgccttacaaacctccccatcaacgccaggaggaaaagctttctcaggaaaaagtacctgccatcctggctggacttgaccccagggacattgtggctgt

SEQ ID NO: 100157 - DNA, 51 bp, Homo sapiens
cctaaaattagggcatgattaagcaaggagtaaataatgctgaaaaatttg

SEQ ID NO: 100158 - DNA, 90 bp, Homo sapiens
ggaagccaagggagattataccagagggtgatgagactggtgtgatggataatcttctagaagccctacaatcaggtgcagcattcagag

SEQ ID NO: 100159 - DNA, 90 bp, Homo sapiens
gcagcctccaatccatgtggcaacattcagcgctcactctatgagctaaacccacagttcagccctccccttctacaacttccaagacag

SEQ ID NO: 100160 - DNA, 74 bp, Homo sapiens
aatttcctgcgctgttccacctcattcaacttcaggctgtctgcggacctggtttcagcgctggtgggactgca

SEQ ID NO: 100161 - DNA, 83 bp, Homo sapiens
cggctggagagcagaagaccgaaagttgatattcactgatggactccaaagaatcattaactcctggtagagaagaaaacccc

SEQ ID NO: 100162 - DNA, 100 bp, Homo sapiens
gactgctgcctggtctgcaaagaagtcctttcaagtctctaggactggactcttcctaagcaagtccggcctcctgatcacttgccacgtggcacgcatc

SEQ ID NO: 100163 - DNA, 93 bp, Homo sapiens
tgcgcagcctcttcgagcgccgcggacgcgtcatcgagtgtgacgtggtgaaagatgccatggacaatattaccaggcagaaccaattctacg

SEQ ID NO: 100164 - DNA, 84 bp, Homo sapiens
tggggccagggaaccctggtcaccgtctcctcagacacgatgaggcgagtggtacgacagagcaagtttcggcatgtatttggg

SEQ ID NO: 100165 - DNA, 149 bp, Homo sapiens
aaggacatctgatggatcttttcaggaagctattatcagcaagttgacagatgctagttggtataccgtgggtacctccagatcatcagtcactagatgtaaaccaggagccaactgccccagttcacacagtggcatcagtagacaac

SEQ ID NO: 100166 - DNA, 51 bp, Homo sapiens
cgcgagtgaggaaaggaggtactgtagcacttttcaggattagaagaggct

SEQ ID NO: 100167 - DNA, 112 bp, Homo sapiens
ttctaccagcccatgcccctgaaggcctcgctggagatcgagtaccaagctagacagcaacaagcagaattggcccaacaggaatggcttcaaatgcagcaagctgcccaac

SEQ ID NO: 100168 - DNA, 100 bp, Homo sapiens
gataagtactgcccctcttacaacaagagtcctcaatccaacagcccagtgcttctgtctcgactgcactttgagaagccaatgttttcagttgcaccaa

SEQ ID NO: 100169 - DNA, 74 bp, Homo sapiens
aggagctggagagagagaaagccaggccttatgatgggaaatggagtaaaacaatggtgggatttgggcctgag

SEQ ID NO: 100170 - DNA, 100 bp, Homo sapiens
gcacagtgtggcacccacccaaggtttccatgcagtttgcatcaacactgaagacagccagatggagttcctggagagatgggactgaggaagacccaca

SEQ ID NO: 100171 - DNA, 100 bp, Homo sapiens
ccctgcgctgccgccgctctgaggagttaaagggaggtatatcatacaaagagaatgcaacatgttatctgtgtaaaatggacttctgacagcaagtata

SEQ ID NO: 100172 - DNA, 100 bp, Homo sapiens
aagctgttttggaactgtcaggtacctcaaagccaatggtacaacagctccatgaacgtgatctgcacctggttgacggaccggatggacttacagcttc

SEQ ID NO: 100173 - DNA, 51 bp, Homo sapiens
acattgagaaatgcctcacagctatcgactttgagaatcactacaagaaaa

SEQ ID NO: 100174 - DNA, 99 bp, Homo sapiens
caactgctttcctttccctcagcacacagaggatgatgctgactttgatgaagatgaggcaacgtgttatgatgatgggaagacataccacgtaggaga

SEQ ID NO: 100175 - DNA, 105 bp, Homo sapiens
aggaaaaaggaagagagcactgcagccagtgaaaccactgaggtacctgtactgcggggagctgaccgtgctgctgacccaggccatccccctgcacagactggc

SEQ ID NO: 100176 - DNA, 82 bp, Homo sapiens
aaaagaatgaacactgtccttcaaaacgagtggagcgcgtgtcgcacccgctgctgcagcagcagtatgagctgtaccggga

SEQ ID NO: 100177 - DNA, 75 bp, Homo sapiens
cagcgcctcttctaccggggcaagcaggaaaagcaggtgatattctcagtggagaccaggacaaggaacagaaag

SEQ ID NO: 100178 - DNA, 98 bp, Homo sapiens
gccgccgccgccgcccctgttgcgatggcgcagaaaccccgttgacaaggcactgctttttcatgacgctgttccatttcctccaagtcaccggctta

SEQ ID NO: 100179 - DNA, 100 bp, Homo sapiens
ccaagctgactgaaagattcttcaagaatacaccttggcccgaggctgaagccattgctccacaggttggcaatgctggtgtatccgaacgacttccggc

SEQ ID NO: 100180 - DNA, 82 bp, Homo sapiens
tcctctaacacattcagactacaagtccagacccaggagagcaaggcccagaaagaggtacaatgactcttcttgcttttca

SEQ ID NO: 100181 - DNA, 75 bp, Homo sapiens
aaacaatagctcaaggaaacctttccaacacagatgtccaagctgccaagacttggatgttgtgggtgatggtat

SEQ ID NO: 100182 - DNA, 98 bp, Homo sapiens
ggggacatgtccaaccccggaagccggaggaacgggcccgtcaagctgcacctgacaggaaaacatttaaagttgatgatatgttatcaaaagtagag

SEQ ID NO: 100183 - DNA, 90 bp, Homo sapiens
gatggaagaatttgtaccccatagcaagatgccccctaaaaagggaggtgatggaattaaaccacccccaatcattggaagatttggaac

SEQ ID NO: 100184 - DNA, 80 bp, Homo sapiens
tgcgtgaggccgcggagcgccagctcaatgaattggctggggaacagaccagggaattggtggatttggagaagagccgg

SEQ ID NO: 100185 - DNA, 100 bp, Homo sapiens
tataatggttccagtatagtctctagatattctcccaggagtacatcaacctcctgctgtccatgtatttcttcgtgctgggaatcctggccctgtccca

SEQ ID NO: 100186 - DNA, 74 bp, Homo sapiens
gaggctgtcatcaccgccatgcccaagaataaagggtctgacaatgaatcagatgaagaagttgctgggaagaa

SEQ ID NO: 100187 - DNA, 75 bp, Homo sapiens
gcacggatggtcttgaaacacaaatggtttttggcatcctctggtatcacgattccaaaacccccaaagccacca

SEQ ID NO: 100188 - DNA, 100 bp, Homo sapiens
atgcctacgtgggaagggacctcgaatgtgggaccccagcccctctccagctcgaaatcgctttcagtccagtgtaaagctgttggagcgcgggagcaaa

SEQ ID NO: 100189 - DNA, 95 bp, Homo sapiens
gccaggctgcattcaagctctatgcctctcttggagcaaatgatgaagacatccggaagaagatggagtgaaggtacctgagcgcaggaaccatg

SEQ ID NO: 100190 - DNA, 83 bp, Homo sapiens
atggagatgggcagacggattcatttagagctgcggaacaggacgccctctgatcttccttcaaaatgtctactgttcacgaa

SEQ ID NO: 100191 - DNA, 100 bp, Homo sapiens
tgaagatgaaccacagcttaagcttgttgcagatccttgtgccagcaacccttgtcaccatggcaactgcagcagcagcagcagcagcagcagcgatggc

SEQ ID NO: 100192 - DNA, 82 bp, Homo sapiens
aatatctgtcttcggtggactccttcggcagtccacccaccgccgccgcctcccaggcgttcccgttgcccgctctctcccg

SEQ ID NO: 100193 - DNA, 90 bp, Homo sapiens
taccagcatatcaaatcaagactggacactggccggagcctcaacagaaagctcctttagttcctcctcctccaccgccaccaccaccac

SEQ ID NO: 100194 - DNA, 60 bp, Homo sapiens
atgtcccaacattacatcccaaactggcaagggaactgaatttttcagtggatgaaatca

SEQ ID NO: 100195 - DNA, 101 bp, Homo sapiens
atttaagaagtttgccacagaggatgaggcctgggcctttgtcaggaaatctgcaagcccggaagtttcagaagcctctatccggctgtggaggtcacgtc

SEQ ID NO: 100196 - DNA, 51 bp, Homo sapiens
cgcggcccgagagccttttataggccagccagctgaagacagagaccatca

SEQ ID NO: 100197 - DNA, 75 bp, Homo sapiens
gggtctcgggggccgctctgggatcccggccaccagcaattgtccggaccccactgaaaatcggactgttcaact

SEQ ID NO: 100198 - DNA, 99 bp, Homo sapiens
tattaccaaatttgccacagaatattgtaacactattgaaggaactgcaaaatatattgaaacttcggagctgtagaaacctgtgggttcttgttgtgg

SEQ ID NO: 100199 - DNA, 82 bp, Homo sapiens
aaggctagtttggatgtggaggggaatagactccatctatccatatgaggcagttccggcgaggggggagcctcagcaggat

SEQ ID NO: 100200 - DNA, 75 bp, Homo sapiens
ccggccggctgcgaagacgcggtgggccgcccctccgatgggcttaggtcacgagcaaggatttggagccccttg

SEQ ID NO: 100201 - DNA, 75 bp, Homo sapiens
tctctgagacccggaggaggttcgaagctgagtatgtgacaggtacagtagcagagggagctcccattattccaa

SEQ ID NO: 100202 - DNA, 100 bp, Homo sapiens
cgcacagagccgcgggccctttgcagctgcgattttcgccctacgttttcaacggagggaggagccgatcactttctgtgaggaagccttcgtgtcccac

SEQ ID NO: 100203 - DNA, 74 bp, Homo sapiens
agtgcaggcgtttggaggacataggacactctggccatgactccctggaggaaaagcggaagcggcagcggtct

SEQ ID NO: 100204 - DNA, 83 bp, Homo sapiens
gacgctgtgctcgctggcaccccgaacgggttgcttcccccgctgcgagacaaatttacatgtattggagaccagaccagaag

SEQ ID NO: 100205 - DNA, 90 bp, Homo sapiens
ctgaggtttcctccaaggccctctgaagtgcagcccataatgaaggtcttggcggcagcctcctgacaaggtgatccgggcgggccccgc

SEQ ID NO: 100206 - DNA, 90 bp, Homo sapiens
ctcaccaccctggtggcctttccctccagctctgtctatcctaccaagcagcaacatgaagcgagcagcctccttgaactatctgaacca

SEQ ID NO: 100207 - DNA, 50 bp, Homo sapiens
gtttaaggaccgtcactttttaacgcatgaccaagtctctaaaataagct

SEQ ID NO: 100208 - DNA, 75 bp, Homo sapiens
attaatcaagcggtcaggataccgggtcctgtttatagcaattcttcagtaagaaatgaattaccaatgcatcac

SEQ ID NO: 100209 - DNA, 100 bp, Homo sapiens
acgccagccgcaccatgccgctcctaagcctgcacagccgcggcggcagcagcagtgagagatgtgcacccccgccaatacccctgctacaccccccaac

SEQ ID NO: 100210 - DNA, 82 bp, Homo sapiens
cgagggcggcctgagcccggcgcaggtgaccggcgcgcgggagcgctacggccccaacgatgtgaagttcatttccaatccg

SEQ ID NO: 100211 - DNA, 75 bp, Homo sapiens
atcccgctctgcacattccaaaggcaggagcagccctgggccccctgctggctgggctcctctccccgtccggct

SEQ ID NO: 100212 - DNA, 100 bp, Homo sapiens
gaacagccccgcgggaatgtcgacgaggagctgagggtgatgaattagaagacaatggaaagaatttctacgaatctgatgatgatcagaaggaaaagac

SEQ ID NO: 100213 - DNA, 112 bp, Homo sapiens
gctgctgcctcgcgcccgggagcaggaggagctgctggcgcccgcagatgcaagagtgagccatggagctacgtgtggggaacaagtaccgcctgggacggaagatcgggag

SEQ ID NO: 100214 - DNA, 90 bp, Homo sapiens
ccggccgtggggagcggacgcagtgatttgctccccctcgtgcagcaacccccacacccagcaccagtgaacagagtatctgtcaggcaa

SEQ ID NO: 100215 - DNA, 82 bp, Homo sapiens
tgagaaggaacagataacccagcacattgcagattttatcatgtgggcaacctgctgcaactggttctgcctggatggacag

SEQ ID NO: 100216 - DNA, 50 bp, Homo sapiens
cccgagtacctgagattagcccagggtctcactgttgtgcagtctggagt

SEQ ID NO: 100217 - DNA, 75 bp, Homo sapiens
ggattacaggccaaattagcaagcctgaagctgcccagcaggcattccaaggcctgggtcctggtttctccggtt

SEQ ID NO: 100218 - DNA, 100 bp, Homo sapiens
gcccggagcaccgagctcgcggcacggtaggaggtgctcctgacctctgataaagctgcagccaatttctcagatcgttctttgctgaagaacttgggac

SEQ ID NO: 100219 - DNA, 50 bp, Homo sapiens
ggaaacccacaggcacacccaatctggctcttgctgattgaattcctttg

SEQ ID NO: 100220 - DNA, 74 bp, Homo sapiens
atgcacccaagagtcaaggaagttcgaactgacagtgggagtcttcgaagagggtgaaaatcctatttataaga

SEQ ID NO: 100221 - DNA, 83 bp, Homo sapiens
gacgcaccgcccggactcaccatggttttaaaatcaaagatgggaaaatcggagaaaattgcccttccccatggccagcttgt

SEQ ID NO: 100222 - DNA, 100 bp, Homo sapiens
aaagagatgtggggggattctcgacctgctaacagaactggaccttttcgttttaacaacctgggcatccagtgtgtgaggaagaaggagattgaggctg

SEQ ID NO: 100223 - DNA, 83 bp, Homo sapiens
gatctgaacaaagaaatcaagaaaactgcgaataaaattcgagccaagttaaaggcaactggatgatgctcgcaacaaagctg

SEQ ID NO: 100224 - DNA, 90 bp, Homo sapiens
accacgctcgcgtgctgatccgccagcgccatatcaggcccctccagccagcgtcaggtgcagaatggcccctctcctgatgagatggac

SEQ ID NO: 100225 - DNA, 90 bp, Homo sapiens
acaaaccctgaatttataactgagaacaagctgaaagctggatacctaatgtcagtggagtcttctgagtgtttcctggaagaagtcggg

SEQ ID NO: 100226 - DNA, 83 bp, Homo sapiens
ggattcccagccatggcagattcctccgggcagcaggacttcccaagtaagaagcggaagaggagccgctggaaccaagacac

SEQ ID NO: 100227 - DNA, 97 bp, Homo sapiens
agaagcccaaagacagtgaagaactcgagggtacagctctgccggggggggaaaaagtggtaccattttgggcgttcttgagcttcagaatgcaacc

SEQ ID NO: 100228 - DNA, 74 bp, Homo sapiens
ccagaacagactgaaggagacgcccctcaagtgtgcattaaactcaaagactcagcccgcctgcacccaggtga

SEQ ID NO: 100229 - DNA, 73 bp, Homo sapiens
ttagggtcctttatatagaagggagagttgatgctatgaaactgggagtaaaggaaatgaagaaggcatacaa

SEQ ID NO: 100230 - DNA, 134 bp, Homo sapiens
cacaggagaagcgccgtgatgaggagctcatctaccacaaagtgacggcagccgagctgcaggcatgttatttgaaagcaattgagacgcaaccgaactttgcagtagcttggagtaatcttggctgtgttttc

SEQ ID NO: 100231 - DNA, 83 bp, Homo sapiens
acgtgggtaaagttgccacaggaagatatggaccatcacttggtgcagctggcctgccactcctcctgctatgatgcctgggc

SEQ ID NO: 100232 - DNA, 101 bp, Homo sapiens
gccctgcagacattagctggagcaacggctggcctcaatgttggctctttggcaggaacattatacatggcagtgattctgtggagagtgcagagaaggag

SEQ ID NO: 100233 - DNA, 100 bp, Homo sapiens
aggccagcggggccggaagcggcggcgcagatatcattctctgctggaactgggtgagaagcgtaaaggcatgttggagaagagttgcaagaagtttatg

SEQ ID NO: 100234 - DNA, 82 bp, Homo sapiens
ccgccgcctctagggatggacggctttcggacagtcctttctccagcccgacatccacctttttaaacaaaatctcttctac

SEQ ID NO: 100235 - DNA, 98 bp, Homo sapiens
cccaagctctgccggacatggtggtgtcccacctttttgggaagggacagtatgatttggtgaaatgcctggctcctattcgagaccccaagaccgag

SEQ ID NO: 100236 - DNA, 101 bp, Homo sapiens
ggctggaaggagaactaaatgggagaagaggaatgttccctgacaatttcgttaaggtgcaaggaaccatcttcccagctcccaatttcaatcccataatg

SEQ ID NO: 100237 - DNA, 74 bp, Homo sapiens
ggggcagtcagagcggagccaagatgcgaatggggctaggcagctggaagagaaagaccgagtgctaaagaagc

SEQ ID NO: 100238 - DNA, 90 bp, Homo sapiens
ctggttattttctacttaacactcatcattttcacttgtacagtcagtcggatgcggagactgcagccgccgcgggcgaagtgctagacc

SEQ ID NO: 100239 - DNA, 99 bp, Homo sapiens
ttggagagctcatctggaattttgccgatttcatgactaaccagtgaggatacgaagcgttttcggcttcctgcccggagctgtgcagcaaacagtcga

SEQ ID NO: 100240 - DNA, 75 bp, Homo sapiens
gcggagtggagctcagccaggggcagccggctctggtgctcccagaagaggtttctgagtcccttcaacatgatc

SEQ ID NO: 100241 - DNA, 75 bp, Homo sapiens
aaggaaaccgcactctcacactggccttgatttggcagctaatgagaagcaaagaacagtctgaacttgatcaag

SEQ ID NO: 100242 - DNA, 50 bp, Homo sapiens
caccggcctcttcttcgtctttgagtcttattagtaggtaagaaacagct

SEQ ID NO: 100243 - DNA, 74 bp, Homo sapiens
ggggctgtgtcggagctgaggtgcaagggctcaggcgccagtttggtgccctggttgtcagatgttggaaagca

SEQ ID NO: 100244 - DNA, 90 bp, Homo sapiens
gcagagtgctctgtgagtcaccgttaatttcagcctgatgtgtgagaagcggatattggcggcagtgaccagtgcgggacaccccttcct

SEQ ID NO: 100245 - DNA, 75 bp, Homo sapiens
gggcggcggactggctcgcggtgcagtgcgaggacgacgggcagacgttcttcagcctagatgacgggaacacca

SEQ ID NO: 100246 - DNA, 109 bp, Homo sapiens
aagatcctcaagaagaagaagttgcgaaggatccccaacggggaggccaacgtgaagaaggtttccaggcctgaggtgcccgccctggccccaggagaatgaaccagcc

SEQ ID NO: 100247 - DNA, 75 bp, Homo sapiens
gtttctcagcacttcctctcccccacagcagcttcagagtccaagacgactgggtttggattcagaagaggatta

SEQ ID NO: 100248 - DNA, 100 bp, Homo sapiens
ccacaacttccgcctcccaggttcaagggattctcctgcctcagcctcccaagtagctgagattatagcccgtgaaaacagaaaccatgactgtcagcag

SEQ ID NO: 100249 - DNA, 75 bp, Homo sapiens
gcggaacccgtgggcctgtggactgcagcctcggcggtcagcagcccattcacctgcttacgtgatggccagcaa

SEQ ID NO: 100250 - DNA, 50 bp, Homo sapiens
cggcaacgtcgccaagacctcggttgctgcttttgctcagaggacatcca

SEQ ID NO: 100251 - DNA, 100 bp, Homo sapiens
ggaaaggatgcacacttcgagtttgaggtcaaggaatgtatcctgtcaggtataatgtcagtgaatggcaagaaagttcttcatatggatcgaaaccctt

SEQ ID NO: 100252 - DNA, 100 bp, Homo sapiens
ctggacccctccaaggagatcaagaagcagatccggagtatcagtaccccacaatggatgagctggctgaaatgctgcctcctgttcttacccacctaag

SEQ ID NO: 100253 - DNA, 100 bp, Homo sapiens
ctgctaatacacgatacctttttcttggcgattatgtggacagaggttattttagtatagagcttctcaataggtttggcatggacaagatctatgaagg

SEQ ID NO: 100254 - DNA, 90 bp, Homo sapiens
ctgaactgcagtgggagaggagaagagatgctggcgtgaagggtggagatggctatttcgaaaacagcccactgatgtcccagccagtgt

SEQ ID NO: 100255 - DNA, 90 bp, Homo sapiens
ctctgtccagtggagtgacccgttgccagagtgcagagcagcacaagccagcgaggaggcagtgtcatttcgccgtgaacgcagcacatt

SEQ ID NO: 100256 - DNA, 50 bp, Homo sapiens
gtcagaaatggaagcaggaagtcctggagaagatggtataaactggtcca

SEQ ID NO: 100257 - DNA, 51 bp, Homo sapiens
caggttgttcccattagtaaaaaggtgacaatctccaatagacttgtgtct

SEQ ID NO: 100258 - DNA, 98 bp, Homo sapiens
tgcggtagccatggcagcaggctccgaggcgaccactcctgtgatcgttgcggctggggctggaggggaggaaggactgcatcaaaacatgtaaacaa

SEQ ID NO: 100259 - DNA, 100 bp, Homo sapiens
aggagttcctgggacacagccattgctgcccaattctatggatcccacacgacaacaaggccacactggtgtgtctcataagtgacttctacccgggagc

SEQ ID NO: 100260 - DNA, 83 bp, Homo sapiens
gtggatttgattttaggagacagccattcggagctacatccagtgaataagttgccaaaacaaaggggatttggtgatggagg

SEQ ID NO: 100261 - DNA, 101 bp, Homo sapiens
aaggattccaagtaactcttatttggttctccgtgctggagcaggtcagcgtcctcttactcccaatcagggtcagcaagggcagcaagcagaatcacttg

SEQ ID NO: 100262 - DNA, 75 bp, Homo sapiens
cagccttcccagtagctggaactacaggatccagcaagtaggcaatgaagcctatgttatagggctctcctcctt

SEQ ID NO: 100263 - DNA, 100 bp, Homo sapiens
ctttgcaagaagatagaaaaggtggagagactctcaaagtgcatcttggaatagcagaaattgatgatgcaatgcgcaactttgctgaaaaagtgtttgc

SEQ ID NO: 100264 - DNA, 117 bp, Homo sapiens
gctaagccgagcctgcgccggacgggtgggctggactgagaggtcctggctataagtcaccatggcacagcaagctgccgataagtatctctatgtggataaaaacttcatcaacaa

SEQ ID NO: 100265 - DNA, 50 bp, Homo sapiens
gattttgaagacaatcgtcacttatacagctatcagaggactcctgaaac

SEQ ID NO: 100266 - DNA, 75 bp, Homo sapiens
tgacgttgaagatgtcggccttctgagccgactgcggtggtcaagagagagaagaagaaggaggttcctgctgtg

SEQ ID NO: 100267 - DNA, 75 bp, Homo sapiens
gcggcggcgccgggcccgggggtggtgacagcaggtctgaggtgccgtgagcgatgtggagatgcaggaacacta

SEQ ID NO: 100268 - DNA, 97 bp, Homo sapiens
caaagagcccctcatcgagctcttcgtcaaggcagttcaattaacctccagaagatggctgaacctgcaggaataccagagcaagaaactgatgtct

SEQ ID NO: 100269 - DNA, 100 bp, Homo sapiens
tgactttggtttttgaattctgtgaccagacttcacagagaatgcagttgtcttgacttcaggtctgtctgttctgttggcaagtaaatgcagtactgtt

SEQ ID NO: 100270 - DNA, 90 bp, Homo sapiens
cgcttccattgcacacagattccatgtgatgagagagaaacatcctgaaaaattcaacagcaggctctgccaacataaatgaccgcagca

SEQ ID NO: 100271 - DNA, 80 bp, Homo sapiens
cagcagttatttgcagctatcatgtgagagagatgaacccggtacctcagatggaaatgcagaaatcaccgtcttctgcg

SEQ ID NO: 100272 - DNA, 98 bp, Homo sapiens
taaaattcatcctgttctttttgcacaaggctgcccaaattgtatctttgtgaattttgtctaaaatatatgaaaagtagaactattctgcagcagca

SEQ ID NO: 100273 - DNA, 75 bp, Homo sapiens
ttactgtgcacatgtgtagatttgcaggttcatgtagtattgaaactctggaagagtggattcagcctggataat

SEQ ID NO: 100274 - DNA, 74 bp, Homo sapiens
cgactgctccatcgaggcagccatggtgaagggacctcaaactggacaatgtgctgctggaccgggatggccac

SEQ ID NO: 100275 - DNA, 90 bp, Homo sapiens
tgttagacaagacaaattagagttttcctactgacttaacttgatgtgagtatgcagtgctcacaggatatacttcgaatgctcctctct

SEQ ID NO: 100276 - DNA, 110 bp, Homo sapiens
ctggttccaaatactaaaatccagatgtcatattcagaagcattcaaagctgtggaagatattcacgggctattctccttgtctaaaaaaccacctaaacctcagttgat

SEQ ID NO: 100277 - DNA, 96 bp, Homo sapiens
tgccctttgacttgcatcgtctacctacctctgccatcctctaccagccgcaactgcgagggctggagtttcagccttttatgctgagtgttttaa

SEQ ID NO: 100278 - DNA, 51 bp, Homo sapiens
cgaaggtgctaccatcgtgagagtaaggctggctttgctacagctgaccac

SEQ ID NO: 100279 - DNA, 101 bp, Homo sapiens
ccgcgccgctgccgctgctgctggtgttagcgctcagtcaagtttgtgatgtctggctggggtataggttattcatttcgatgtgacattgttgactattc

SEQ ID NO: 100280 - DNA, 98 bp, Homo sapiens
ttgactactcgcatcgcgcactttttggatcggcatctagtctttccgcttcttgaatttctctctgtaaaggagaccagcatgttttggaaatttga

SEQ ID NO: 100281 - DNA, 100 bp, Homo sapiens
cggaaacaaagttattttgctcggttcaagggcagacggggtttttgaggaggattcgcaaattgacatagccacagtacaggatatgcttagcagccac

SEQ ID NO: 100282 - DNA, 73 bp, Homo sapiens
ttgtctacaccatcatgtttctggatgtatcggcaagcagtgtaaacggaggacttggggaaaaaggaccaca

SEQ ID NO: 100283 - DNA, 90 bp, Homo sapiens
tagaggacgggtccatccatcgcataagagcaaagaacactgttgttgccacaggaacacagaccaccagtgcaaaacaagaaaaagcac

SEQ ID NO: 100284 - DNA, 88 bp, Homo sapiens
ccgggggcaaggccaaaaagaagtattaaaggtggaagaaggtccatatctttttctgtgggtgcttcaagtgttgttggaagtggag

SEQ ID NO: 100285 - DNA, 101 bp, Homo sapiens
aagtggagaatgaggacatgaataaagaccagatcttgctggaaaaagaagctgagcaccgacgagagtgctggggaataaaaaggggatcttcactcggc

SEQ ID NO: 100286 - DNA, 97 bp, Homo sapiens
gacagagtcaacaattcaattggtgaagcaaatcatggaggaggctgtcaccaggaagtttgtgcatgaagacagcagccacatcattgctttatgt

SEQ ID NO: 100287 - DNA, 99 bp, Homo sapiens
tgcaaatcttccaagtctaatagacctaaagccacagtcttcaagagcccacggacaccacctcaacgagctgacatcgcgctgatcggattggccgtc

SEQ ID NO: 100288 - DNA, 107 bp, Homo sapiens
gggaaatggccgctgtgtggttgcaacggagataaattcccggaaccgcgattcggcgtgtcaggtgtcatggagaaactccagctgggcccagagattctgcagcg

SEQ ID NO: 100289 - DNA, 75 bp, Homo sapiens
actctacacttgctgagatgtacctaccttcatatgactcaatggttttcgttctcaaattccacacaattgctc

SEQ ID NO: 100290 - DNA, 100 bp, Homo sapiens
cggaagatgtgtctgaggtcatctttggacatgtcttggcagcaggatctgtctggctccattgatgacctccccacgggaacggaagcaactttgagct

SEQ ID NO: 100291 - DNA, 51 bp, Homo sapiens
gttttgccggaggagcccctcaggccagcaagcaccagaagcaccaggctt

SEQ ID NO: 100292 - DNA, 100 bp, Homo sapiens
cagaaagcattgggagaatatctggaaagagagcggtcatctttccccaggttctacaagctgcacgagcggaggtgtgagcccattgccatgacagtgc

SEQ ID NO: 100293 - DNA, 97 bp, Homo sapiens
caaacatgtcagcaatgcaccgctcactaaactgccgtcaagaaccctattgaggcaagtgtcttgctggctgaagcctcgctggcacggaagcagc

SEQ ID NO: 100294 - DNA, 74 bp, Homo sapiens
aagagctccagggatttcactcttctttgtgtgtgtgaaggaaggcagatggagtctcactccgttgcccaggc

SEQ ID NO: 100295 - DNA, 143 bp, Homo sapiens
tcatggctcaatttggaggacagaagaatccgccatgggctactcagtttacagccactgcagtatcacagccaggtttatgataatggatcgctttgggagtgaccttcagaaaatatatgaagcaaatgccaaaaggtttt

SEQ ID NO: 100296 - DNA, 100 bp, Homo sapiens
caggggtccctgggggctcccagcgctgccccagagcaagtccatctgtcttacccagtgcctgatcaactttctagcgggagaacgatcatggaggtgg

SEQ ID NO: 100297 - DNA, 75 bp, Homo sapiens
gcgagctcctcaagaatctcgtgctcaccggtttctcccacatcgacctgggtaaaccagacttgaatacaacat

SEQ ID NO: 100298 - DNA, 100 bp, Homo sapiens
aggagacttccttgcttctttggagaatgatatcaaaccaagatttaccgcattgtttctcagaagcaaatgtcagacagacgcgaaaatgacatgtctc

SEQ ID NO: 100299 - DNA, 83 bp, Homo sapiens
ctccagcctgcgccaccacgtcacgcacacgctcggcgctgcgatccgcgcatataacggaacaagttccagttccagtctac

SEQ ID NO: 100300 - DNA, 73 bp, Homo sapiens
ccaccaatggaagcagctggcttcactgctcaggtgattaaaccccctctgatttttgtcgaccctaatcgta

SEQ ID NO: 100301 - DNA, 50 bp, Homo sapiens
ctggaggagcgatttgccatcgtgctggtgctggagaatctggtaaaagc

SEQ ID NO: 100302 - DNA, 100 bp, Homo sapiens
cctgaggtgcagaggcaattcccggaggactacagtgaccagatctttgtagaatttgatggctgtaactggaagcaacactcctgggtaaaagttcatg

SEQ ID NO: 100303 - DNA, 90 bp, Homo sapiens
ccggggaacgcgcgctgcgcggactgcggcgccccggggggggccctcagcctcttggccttgaacgggctgttcatcttgattcacaaa

SEQ ID NO: 100304 - DNA, 98 bp, Homo sapiens
ttggacgtcgtcctgtctgggtgtcgcgggccggccccgcggggagcgcccccggcgcgatgcccttcaggaaaggagtacttcttgcaagcagagct

SEQ ID NO: 100305 - DNA, 80 bp, Homo sapiens
agcttcaccacaaaagcgaaatgggcacaccacaggtcacagtaatgaaaggcagtaatagaaataaggatcattcagca

SEQ ID NO: 100306 - DNA, 83 bp, Homo sapiens
caccccgccagctccagagccacgtacgataagctgtcattggaaggaatagtggtacaaagagctgaatgccgaccagctgc

SEQ ID NO: 100307 - DNA, 100 bp, Homo sapiens
tgcctcagccccctgagtagctgggattacaggcacgcgccaccactcccagggggtgtcttccaaccttttctttgtagaacacaactttcctgaacag

SEQ ID NO: 100308 - DNA, 100 bp, Homo sapiens
ggcccaactggaattccacttacggattgagtctgaaacagcagcttctgaggaaaccttgttcaacgcgtcccagcgcatcagcgagttagagaggaat

SEQ ID NO: 100309 - DNA, 90 bp, Homo sapiens
tgctgtagtcacaggaggtgtagagaggaccccgggacatctgaaagccaggaaatggcatcctagaatacgtttccacacgggtcttgt

SEQ ID NO: 100310 - DNA, 89 bp, Homo sapiens
cgcggagggagccgcgggatggaccgcagaccggaacatgaacattttgcagtactgcccctcttccgacatgtggacgctctttgaaa

SEQ ID NO: 100311 - DNA, 75 bp, Homo sapiens
caatggagaagagaaagcacaaagcatggagaccctccctccagaaatgacctccaccttcaacccccgagaatg

SEQ ID NO: 100312 - DNA, 101 bp, Homo sapiens
cctgtgtccttcgagctggacaaggtcttctccccacaggcctcgcagcaggacgatttacatgggtataatgtgaagtcagatatttacagtgttgggat

SEQ ID NO: 100313 - DNA, 76 bp, Homo sapiens
aaatctactactgttcatggcaggacatggatttgattgacatactttggaggcaagatatagatcttggagtaag

SEQ ID NO: 100314 - DNA, 100 bp, Homo sapiens
tagaggcctgattaaatactggtttcacactccaccaagcatcccattacagatagaagagggtgcctctgccaactggtggaatcatcgccacttccag

SEQ ID NO: 100315 - DNA, 98 bp, Homo sapiens
taaatttatgctgtcgacatgataaagtagaagatgccttgaacttgaaagaagaatttactaaggctcgtacgtctgcatcgattatcttacgtggg

SEQ ID NO: 100316 - DNA, 50 bp, Homo sapiens
ggtcagggtgattaagctgtcaggtgggtactgtaagattgatgttaaag

SEQ ID NO: 100317 - DNA, 73 bp, Homo sapiens
ggcgctcagagaggtaccagaccatgaaggtactccgtggaaggcttcatcgacaagaacagagatttcctct

SEQ ID NO: 100318 - DNA, 90 bp, Homo sapiens
ctcggagggaccctggcccggaggaagaaagccaaggaggatatggtccggcttgctttcacagatgtttcgataaaaaattttgaagag

SEQ ID NO: 100319 - DNA, 75 bp, Homo sapiens
tgcctgccacacattgttcccaatgtgctattggcaaagagagagcatcctccaggacaaatagcaaggaaatac

SEQ ID NO: 100320 - DNA, 95 bp, Homo sapiens
attcatggaagtagttttgtaacatctactgtcaaggatgaagatttgataaagtggaaggcactgtttgaggaagtccctgagttactcactga

SEQ ID NO: 100321 - DNA, 82 bp, Homo sapiens
ggagcctgtccccaaggaaaccatggaggagcactgcaagcttgagcaccagcagcgcacagtgcagaaaaacgccaagtac

SEQ ID NO: 100322 - DNA, 75 bp, Homo sapiens
ggacgcccccgagggtgtagaccgcgcccctggagatggtcagtaggacagaaggtaacattgatgactcgctca

SEQ ID NO: 100323 - DNA, 119 bp, Homo sapiens
cgccccacccgcatgctctttgtcactccccggcggcagcacgaaagtaccatagttgtggaaagtaaaaatgtagccctaccaaaaggaactattgtactggcttctccaggctggac

SEQ ID NO: 100324 - DNA, 83 bp, Homo sapiens
gatgggatccagctgttagtcgggattatattccatcacaacaagatattctgcttgccagaagacccaccaaaggcatccat

SEQ ID NO: 100325 - DNA, 83 bp, Homo sapiens
gaaacagacattcaacatgattgcatttgaagtaccccctgtaccggctgggtggcccacaacttcgggtgttccgaaccaac

SEQ ID NO: 100326 - DNA, 100 bp, Homo sapiens
aaaagactgcaggcgatcataaagaaaatcgacttggactcagatggctttctcactgaaagttatggaggttttgatgactatggtggctataataatt

SEQ ID NO: 100327 - DNA, 83 bp, Homo sapiens
ctgaaggcggcggcagagaacttgccggtgccagctgagatcaggatcctcatgaccagccaaagagaagaagaattaggaag

SEQ ID NO: 100328 - DNA, 98 bp, Homo sapiens
cattctcctcctgagcactgtcgtatcctatatcatgcagagaaaagagatggaaacttacttgaagaaggagtctcgctctcagtcaaaatctccaa

SEQ ID NO: 100329 - DNA, 75 bp, Homo sapiens
catcaatcccagccctagtgtagctgatggttcaaacgcaagtacaaggtgaagctggtggagaagcgggcgttc

SEQ ID NO: 100330 - DNA, 84 bp, Homo sapiens
ggcgacccggtgtgtggcgcgcccagagccccgcgtttcagccctagggaaggaagctcttcgtgggcggtcttgactggagca

SEQ ID NO: 100331 - DNA, 100 bp, Homo sapiens
gtggagtgtaggtcatatcgccgcgatttggtgttgtactgcgaggcattcctgaccacctacaggaccttcatctccccagaggagctcatcaagaagc

SEQ ID NO: 100332 - DNA, 90 bp, Homo sapiens
aagagagaaagagtggatttcagcctgcacggatggtcttgaaacacaaatggtttttgggtgtcaaattgagaaccaggtagatcccca

SEQ ID NO: 100333 - DNA, 90 bp, Homo sapiens
gcagcagggcagcccgcactcgctgccgccgccactcacgctccactgcaacatcacgttggtgcttcccgtgctgctgttgatgctggc

SEQ ID NO: 100334 - DNA, 50 bp, Homo sapiens
gaagaccaaggcccaccatgccccagggagatgccgaaggctgaagaaaa

SEQ ID NO: 100335 - DNA, 100 bp, Homo sapiens
cttttagctctgagcaaaagtggatggctgttaagtgtgtacaccgaacacagcaggtctatgttaacaatgaatgggcaaccagtgttggggaaggagg

SEQ ID NO: 100336 - DNA, 100 bp, Homo sapiens
atgctgatatacatccaatgagggtgaacacagtgatggatttggaaggaagtgatcttttggctgagaaagctgatagaagagaatttgttagtctgtt

SEQ ID NO: 100337 - DNA, 100 bp, Homo sapiens
tctttgtactaagaacctggaacaccctattcagtggctgtacatcacctgcagggcatccgtttccgaggctttagtatccctgaatgccagaaactgc

SEQ ID NO: 100338 - DNA, 100 bp, Homo sapiens
gaaaaccttctccaccagaatccagctcacgctgagagttctggaagagaatcaagaacattatcatatagttcaaaagtttcttatcctgggagacatt

SEQ ID NO: 100339 - DNA, 100 bp, Homo sapiens
ccttgatttgttttctgataacgccccacctcctgagctgcttgagatcccaaactgatcttccaggctagccttgcaaatgctcagattttgattccca

SEQ ID NO: 100340 - DNA, 90 bp, Homo sapiens
tggagttcgtggtgctggaagaccgccgcccgactctgggccccgggtaggaaacgaccttgcagatgcttcgggagaacctggaggagg

SEQ ID NO: 100341 - DNA, 82 bp, Homo sapiens
cacgtcatcctgaacgacatcaccgaggagtgtaggcccccatcgtccctcatgccgaatccgggtgcatggtattggcggg

SEQ ID NO: 100342 - DNA, 75 bp, Homo sapiens
ctgcaacgtgaatcacaagcccagcaacaccaaggtggacaagaaagttggtacagcctttccttcataccattt

SEQ ID NO: 100343 - DNA, 100 bp, Homo sapiens
ttcacctgaatgacatctacctccatcaggaccccagatgtctgacagccctgtgtgacaccaagataagtaaccatccgcacttccactaatagccaag

SEQ ID NO: 100344 - DNA, 100 bp, Homo sapiens
atccagctgcctcaaatcgtcgtagtgggaacgcaggtaaaagtacacctgtaagccagcttggttccgcagactttcccgaggcccccgatccattcca

SEQ ID NO: 100345 - DNA, 100 bp, Homo sapiens
gtgaggtctgcaagatggcactcaacatgaacaactacaaaggctatgaaaagaagccctattgtaatgcataatcgcttatcagccgtatggaaaatct

SEQ ID NO: 100346 - DNA, 101 bp, Homo sapiens
tatgagaccgttcgcatggcagccatcaaagagagctggctttatgtgctggggcagaagagatccgatagctatgttctgctggagcattctgtgaagaa

SEQ ID NO: 100347 - DNA, 116 bp, Homo sapiens
gcggtttactatactgcttcatatgcaaaagatccacttaataactatgcagtcaagagtcagagctgacaaatttggcaggattatacagagatgaacgattgaaacagaaagca

SEQ ID NO: 100348 - DNA, 98 bp, Homo sapiens
tccagctcgcccagctcgcccagcgtccgccgcgcctcggccaagttccagctattcttcagatgctctggattttgagacggagcacaaattggacc

SEQ ID NO: 100349 - DNA, 82 bp, Homo sapiens
aaacttgggccaaaggacagttagaagacagtagaaccactcacgaattcttgtttggtgcccttgctgaactggttgataa

SEQ ID NO: 100350 - DNA, 90 bp, Homo sapiens
aggacctgcaggaggacgcagacggattaatgctacagccctttgactatgatccgaatgaaaagagtaaacacaagtttatggtacaga

SEQ ID NO: 100351 - DNA, 95 bp, Homo sapiens
gtgggactggagctcatggacataagcaggtgctttgcaagatatcaccttgtcacagcagaccccctccacttggaaggacacgcagctcctga

SEQ ID NO: 100352 - DNA, 98 bp, Homo sapiens
tggccctcgggctgcgggagccgggctaggacgccgagcggtgactccccgccgctcccgggggccgtgacgaaaccgaagctgaaagactggcatcc

SEQ ID NO: 100353 - DNA, 75 bp, Homo sapiens
ctgtacgccacctgggaggtggaccggagctcgtccagctgcgtgcctaggtaccccaattatgaatttattagt

SEQ ID NO: 100354 - DNA, 83 bp, Homo sapiens
agtgaggagccagacgacaagcacacactatggcgctgaaacggattaataaggattttttatcaagcagaaatgcatcgaac

SEQ ID NO: 100355 - DNA, 75 bp, Homo sapiens
ggaaatcgtgcacatccaggctggtcagtgtggcaaccagatcggtgccaaggagtctactcttcatcttgtgtt

SEQ ID NO: 100356 - DNA, 88 bp, Homo sapiens
catccatgtgaaaggccagccaccagttcaggagcacttgggagtgatctagcccctcttggagtctgtgccttatgaagaagcactg

SEQ ID NO: 100357 - DNA, 100 bp, Homo sapiens
gcaattgttgccattgaaaaccctgctgatgtcagtgttatatcctccaggaatactggccaggtggttatcactaggctaaaactggacaaagaccgca

SEQ ID NO: 100358 - DNA, 87 bp, Homo sapiens
ggctcaggagctgtgttcagagtcaaaataaatccaccagtaccccaacttctccggggccccggactcattcaactccctccatcc

SEQ ID NO: 100359 - DNA, 75 bp, Homo sapiens
gactggtcttacattgctgcatcaagaaacccaagctgctgagttcctgctcattttccacaaggccgcggcagg

SEQ ID NO: 100360 - DNA, 75 bp, Homo sapiens
ggtagaagttgtggaggagacaattaaagctgtgttccagatcatctccctggtaatttaccccgtgaagtacac

SEQ ID NO: 100361 - DNA, 75 bp, Homo sapiens
ggcaagtgcagcgcctgtaatgtttggcgagtctgcacccacatgcaggatctccaggaggtgacccaggacctt

SEQ ID NO: 100362 - DNA, 101 bp, Homo sapiens
tttttgctcattaacagaaaagaagaggagaatgctaagcagagctctggcatcctgctgtttatcttccatgcaaactttttgggtaaagaagttattgc

SEQ ID NO: 100363 - DNA, 97 bp, Homo sapiens
cgctgcgcgcggagcccgagcccggagcggccgacgcccgcctcggcgcgcacatcccgcggggcccggccgggtgatctcggtgccggtagcgggg

SEQ ID NO: 100364 - DNA, 94 bp, Homo sapiens
ggagcctcagttggaagcagccgatccagcctgcggagcctgtggggcagtgtatgtggtagaagaccaaagaagagatgagctaggaccatcc

SEQ ID NO: 100365 - DNA, 73 bp, Homo sapiens
gaaattgagaagctttgtgagaagggcagaagataaatatgggatatcttctggtgatgctggaagtaccttc

SEQ ID NO: 100366 - DNA, 101 bp, Homo sapiens
ccacccaccatggccgcagaccagcgcccgaaggccgacacgctggccctgaggcaacggctcatcagcgtttgctgccaattgatggggcaaatgatctc

SEQ ID NO: 100367 - DNA, 96 bp, Homo sapiens
ccgctggtgatctccggtagcactcgggccggcggacagtgagggcgcgcccgcgtgaccccaactctgccgaagcaggaccgtcctgtgcgtgag

SEQ ID NO: 100368 - DNA, 82 bp, Homo sapiens
gaggaatttcttgaagaagtcttatgccctcccaaagggagacgtggtgggcggtccttcctgtgacacgacccttgagtga

SEQ ID NO: 100369 - DNA, 74 bp, Homo sapiens
gggaagctcacaaagttgcagatagaaacttggctgtaacttcaaaagaagatttgattctttatttctggact

SEQ ID NO: 100370 - DNA, 75 bp, Homo sapiens
acatacatctcttcagataccttcccaaggccagccacagtcacaaccccagtgtcattggaggacagtgtggag

SEQ ID NO: 100371 - DNA, 132 bp, Homo sapiens
ggcgctggagctgggtcagtccgccgctcaccccgcggccgcaccttcccgccttctcaggtcgcaatggaagaagagatcgccgcgctggtcattgacaatggctccggcatgtgcaaagctggttttgct

SEQ ID NO: 100372 - DNA, 90 bp, Homo sapiens
agacgttcatatcattgtcttccacagatgtgtcaccaaaccagttacggcagtcccagtcctactgcacagacacagagtgtcttcagg

SEQ ID NO: 100373 - DNA, 100 bp, Homo sapiens
cgaggcgtcgccgcatcccggacggtacttctgccactgctgctccgtggagatcgtcccgcgcctgccggggcagaaccccttcgagctggccttctcc

SEQ ID NO: 100374 - DNA, 88 bp, Homo sapiens
ggagagaaagaaaaggaacgggagctgagaggagtgggaatagctttgcgaaaaatgggcgcaatggccaagccagattgtatcatca

SEQ ID NO: 100375 - DNA, 100 bp, Homo sapiens
attcctttgatggcaggagcctgtccaagctgaacctgtgtgaggatggttcgagaacttgtcttggacaattgcaaatcaaatgatggaaaaattgagg

SEQ ID NO: 100376 - DNA, 50 bp, Homo sapiens
cgcggctctaacggggctttctacaaggctgaccccgcactacatctacc

SEQ ID NO: 100377 - DNA, 50 bp, Homo sapiens
tctgccataacccggacaacgagggagacgtggtgggcggtccttcctgt

SEQ ID NO: 100378 - DNA, 100 bp, Homo sapiens
gtgaaatgttcactgttaaagagaaacactttgtgctactctgtggggctttggaaaagcatgttaaatgtgatattagggaagatgcaagactttttta

SEQ ID NO: 100379 - DNA, 82 bp, Homo sapiens
agctgtgcagccgcgaggaggcgcgggaggtgttcgagaacgaccccgagacgatctgggcggaccccggcaaatacgccct

SEQ ID NO: 100380 - DNA, 75 bp, Homo sapiens
caagatggcggccagcaggaggctgatgaaggctttgggggaccagatactatttgtaaatcgtcccgataagaa

SEQ ID NO: 100381 - DNA, 75 bp, Homo sapiens
cttgaatgacatccgagcgaaagagaaagagggcatgtcagagacctttgagacattacacaacctggtacacaa

SEQ ID NO: 100382 - DNA, 82 bp, Homo sapiens
tcgatcttgggacccaccgctgccctcagctccgagtccagggcgaggtatcgagaaccttccctgcgaacttcagaggaac

SEQ ID NO: 100383 - DNA, 88 bp, Homo sapiens
aatatgtggctaatctccttaagtcggccttccctcacctacaagaatggtggatgcttccaaaagcatcgaagctgtccatgaggac

SEQ ID NO: 100384 - DNA, 98 bp, Homo sapiens
gccatggtcaaccccaccgtgttcttcgacattgccgtcgacggcgagcccttgggccgcgtctcctttgagtatatttgccttccctccatgatctc

SEQ ID NO: 100385 - DNA, 96 bp, Homo sapiens
actattctgaagaacacttggccaaaggttgaattgctggaaatggaaaagtcacaaatccgttcacagtgtgaagaactcaaaactgaagtagaa

SEQ ID NO: 100386 - DNA, 90 bp, Homo sapiens
cgtcgcggtggtggactctggaggtggagccttgcccggcgagacgttgaggggaggaagttgccttgtactgtgccaaatatcttcctg

SEQ ID NO: 100387 - DNA, 73 bp, Homo sapiens
agcaagtggccatggggagcctcagcggtctgcgcctggcagcagctgccactgcagagccccgccatggaag

SEQ ID NO: 100388 - DNA, 100 bp, Homo sapiens
gcaagctgtgcgacctcttctgcggccggcctgggcaggtgtcttcctcgagaggcaggcaggggatcccggacactttggggttcttcatgaaagatgc

SEQ ID NO: 100389 - DNA, 100 bp, Homo sapiens
aataccagctcgacaaagatggggttgtcctctttaagaagtggaagacctggagcggaacaacggctccctggaccggccctactacatgtccaagagc

SEQ ID NO: 100390 - DNA, 78 bp, Homo sapiens
ctcccggaagacgtcctccacattctcccgaaacttggcggaacattccaggccctgtctctgcccctggtggtcatc

SEQ ID NO: 100391 - DNA, 95 bp, Homo sapiens
agaagataaattgttttggctggaagcctgttacaaagcattaacgtggcatagaaagaacaagcacgtgcaggactatgatttaatctccaaag

SEQ ID NO: 100392 - DNA, 83 bp, Homo sapiens
caaccatgctcaacttcggtgcctctctccagcagactgcggcagctggctgccagcctctgggaggacgttggcctgcagtg

SEQ ID NO: 100393 - DNA, 75 bp, Homo sapiens
gaatggaggccagatagtaccatgatagctgtatcatgtaaacaggaacatcgataagtagtgtaaaaacttgca

SEQ ID NO: 100394 - DNA, 51 bp, Homo sapiens
gccgtggtatgtgaggaaccccaagacaggaacacagaggacgatcgcccc

SEQ ID NO: 100395 - DNA, 100 bp, Homo sapiens
attgcgtgcaggagggtcgtggtctggctgtggcggaggagcataagaaggtaattgcagccacaaacagggtggacatcctggaccccgccctcctccg

SEQ ID NO: 100396 - DNA, 75 bp, Homo sapiens
cctgggttgctgataaaactaaagaaaccgaaacttcattgccccttcaatgtgggaatccagccagaccctatt

SEQ ID NO: 100397 - DNA, 90 bp, Homo sapiens
ggccaagaggcaaaggggaggttacgcagcaaaccatccagaagatgtgaagttcatttccaatccgccctccatggtggcagcggggag

SEQ ID NO: 100398 - DNA, 50 bp, Homo sapiens
catttatcttgctgcccggacgctggagcccgtgctttgaagaagaggag

SEQ ID NO: 100399 - DNA, 99 bp, Homo sapiens
cacgtggagaagccgtatgagtcctacacagggcagaatgtgaagctacgcacctgtggccttgccgaagaactggaaaaagagaagtcaagggaacag

SEQ ID NO: 100400 - DNA, 82 bp, Homo sapiens
gcggtcttaacctctcctctggccgagtccttgcaagaagtgaattacccgaccctggctttccatctgatggtcccctggt

SEQ ID NO: 100401 - DNA, 73 bp, Homo sapiens
gccgggctggtcctgctgcgagccggcggcccggagtggggcggcgggcatctgcaacaggccccagccaggc

SEQ ID NO: 100402 - DNA, 80 bp, Homo sapiens
agatcttctgcactgtttacaggcacagaacaaaatccagtctcatagcagaggagaatataatgtttacagcaccttcc

SEQ ID NO: 100403 - DNA, 101 bp, Homo sapiens
gaaacaattgacagaagagctccagaatgtgaaacaaaaactctataaaacaggtcgggagatgcaggagaggatcatggacctgcttgtggtggtggaga

SEQ ID NO: 100404 - DNA, 74 bp, Homo sapiens
aatcaattggcccacacctggagagatagcccacaagagtgttcaggaattactctgcttaatgtaagcaagct

SEQ ID NO: 100405 - DNA, 98 bp, Homo sapiens
acactgagacccggaatcagttccttgatgagctcatggaggactacaaagctgatgaagacccagcattattccagtcagtcaagaccaagagaggc

SEQ ID NO: 100406 - DNA, 74 bp, Homo sapiens
gatatttcatatgttttagctacaaacatttatctaagaaatttctacacccagaccatcttctccaggtggac

SEQ ID NO: 100407 - DNA, 75 bp, Homo sapiens
aaaaataagcgttccttccgagaaaaacaggatctccaacttgaggaattaaggcagcaggtttctacattaaaa

SEQ ID NO: 100408 - DNA, 100 bp, Homo sapiens
aaacaggaaaatgcttttttgctccagatgtctttaactgccaagcaccagatacaagagtaaacctggtgatgactatgaagatcccaaagatcttcaa

SEQ ID NO: 100409 - DNA, 100 bp, Homo sapiens
cggcgctagcttcggagtctcccgcgcgcacctcagccgcctcctagcggcgcggcgctcgctcctacggttattcagcttctcaaggctggaaaagcga

SEQ ID NO: 100410 - DNA, 85 bp, Homo sapiens
ctcggccgatgaagtgcagaggtttttttctgatccgactgaagaaccagcaccacaggccaccaatacagttggttctgttatt

SEQ ID NO: 100411 - DNA, 90 bp, Homo sapiens
gtgaccgagaccgtgaccgagagcgtgaccgagagcgcgaatatcgtcatcgttagaagttctgctaagccaatattctctagaatgagc

SEQ ID NO: 100412 - DNA, 100 bp, Homo sapiens
tatttacatcccattccctgaagatgattctaattcaacaaatcataacttggtagacttgggccttctgcgctttgtcacggctgtcgggacacagggc

SEQ ID NO: 100413 - DNA, 100 bp, Homo sapiens
acttaaggccccaacaccaaacacagaagcaacagccttacacagagtgttcagcaagctccaacaattgtgtaagctgtgttggagtagaagaacatca

SEQ ID NO: 100414 - DNA, 83 bp, Homo sapiens
aatggcatttacagaaagagtcaacagcagtggcaacaggcagtagaagatggtgaaagaaacaacttactacgatgttttgg

SEQ ID NO: 100415 - DNA, 83 bp, Homo sapiens
aaggctctgtgaaactgtacacaacaagcatcttgatctagaaaatataacggaaaggaaacagattcattgtctgtctgagg

SEQ ID NO: 100416 - DNA, 51 bp, Homo sapiens
ctccgtttctgtatccccacgaggttcatcatgcctagtggcgtataagaa

SEQ ID NO: 100417 - DNA, 100 bp, Homo sapiens
ctgctgctgctgagtctggcgctgctgggcgcccgggcccgcgccgagcccgccgggagtgccgtccccgcgcagacgctgtgcttcgccgtgagccgct

SEQ ID NO: 100418 - DNA, 51 bp, Homo sapiens
caacctcccgccaatgtaaatatggggacaaggacacactcagcattcact

SEQ ID NO: 100419 - DNA, 123 bp, Homo sapiens
ctgccctttaggatttgttagaaaggagacccgactgcaactgctggattgctgcaaggctgagggacgagaacgagataatctcagtgataccttgaagaagctgaagataacagctgttga

SEQ ID NO: 100420 - DNA, 100 bp, Homo sapiens
gctcacagatctgggacaccgcattcgccatccaggctctgcttgagggtgtccgcaatgttgccagtgtctgtctgcagattggctacccaactgttgc

SEQ ID NO: 100421 - DNA, 100 bp, Homo sapiens
tggcggacgaggggaagtcgtacagcgagctaaatctgcttcgtaatgttgatgctaacaacactgagaatagcactactgtgaagaattctagtttgtt

SEQ ID NO: 100422 - DNA, 100 bp, Homo sapiens
cctgcaggtactttaggagaaaagccagtcaactcctagtaataacagaaaacagagagaggcattctgagtcatctgactggatgaagactgttccaag

SEQ ID NO: 100423 - DNA, 100 bp, Homo sapiens
gatttagataaactcaacatcgacagcattatccaacggctgctggaagcttcctttgctccaataagctttgcaatcaaggccaaagaaaatgatctgc

SEQ ID NO: 100424 - DNA, 75 bp, Homo sapiens
atctctaccgatgggaagtccttattattggccctccagatacactttagccataggaaaaggatacagagtaga

SEQ ID NO: 100425 - DNA, 75 bp, Homo sapiens
attgcagaccaagaattagcagaagcccttcaaaaatcagcagaggatgcaggctgattcaccccaagagtggcc

SEQ ID NO: 100426 - DNA, 100 bp, Homo sapiens
gggcggctggcctcaccgcccactgggttgtctgcattcaaaagagcattctattaaagctaccttaatttggcgcttatttttcttaatcatgtttctg

SEQ ID NO: 100427 - DNA, 98 bp, Homo sapiens
ctgcagatttcctgcagcctgaaaggtcttgaggaccggcccagctcaggctcctggggcagcggcgaccagagcagctcctcctttgaccccagccg

SEQ ID NO: 100428 - DNA, 51 bp, Homo sapiens
gttaaggattccaagtaactcttatttggtttttctctgtcagtgcagttg

SEQ ID NO: 100429 - DNA, 82 bp, Homo sapiens
ggccaatgtgggatcgatgtttcaatattggaagcgctttgatttacagcagctgcagatctgggcggaccccggcaaatac

SEQ ID NO: 100430 - DNA, 74 bp, Homo sapiens
aaattaccattttatgatttactggatgaactgataaaacccaccagtctaggcatgtgggcacattccatgac

SEQ ID NO: 100431 - DNA, 98 bp, Homo sapiens
cggccggcctgagccccagagtcagctcccctttctcgcccagcgcccccaggccgctcccggggctcacggtgtcatggagaaactccagctgggcc

SEQ ID NO: 100432 - DNA, 75 bp, Homo sapiens
tgaacaagctgtggtacaagcccgtggaacaattcatcttaccagaggcgtgaattacccttcactaagtcggct

SEQ ID NO: 100433 - DNA, 51 bp, Homo sapiens
tgaagaaccagacctggactttcttagcattcctctgaatattgatttgct

SEQ ID NO: 100434 - DNA, 97 bp, Homo sapiens
cagcagaggaaggaggcgacagcgccggagcaggaggtacagcatgtgtactgaccgggcagccctttgacacaatgaaagtgaagatgcagacgtt

SEQ ID NO: 100435 - DNA, 100 bp, Homo sapiens
attatcgtagacggcacagccacagccattctcccatgtctactcgcaggcgtcatgttgggaatcgggggaagctggtggcagactccgccaagcacct

SEQ ID NO: 100436 - DNA, 80 bp, Homo sapiens
gatctcgggctcggaacgagactgcacggatgtatcaggaatgccagctctgtgctctccaatttcccagggagggggtg

SEQ ID NO: 100437 - DNA, 100 bp, Homo sapiens
gtgaaattgagactgacaaagctgtggttaccttagatgcaagtgatgatggaatcttggccaaaatcgtggtccctcccacaacacggaattatgggag

SEQ ID NO: 100438 - DNA, 90 bp, Homo sapiens
atctcgggaagagttcagagagcatctggagctaattgtgaaaaatagtgcaacctacaatgacttcattagaggggtggtagactcgga

SEQ ID NO: 100439 - DNA, 50 bp, Homo sapiens
agagctgacacccctatcagaggtttctagagaggaaggatctccccagc

SEQ ID NO: 100440 - DNA, 83 bp, Homo sapiens
aacgaaaatgcatattatgccacatcgtgtacagctcaaaaaagatgatgaagaacgagagcttcaaatggatcctgcagact

SEQ ID NO: 100441 - DNA, 100 bp, Homo sapiens
aaattattcttgatgatgatgagtgtcctttacaaatcttcagggaatggccaagtgacaaagaggcatttcatccttcatgaagccattcaggattttg

SEQ ID NO: 100442 - DNA, 90 bp, Homo sapiens
gtgcgggacgcgggcgccaggaccggccgaacgcagagcaaatcacatacttagatggatttgatcaggaggataatgaagcgccggact

SEQ ID NO: 100443 - DNA, 74 bp, Homo sapiens
ggaagtttggatcctggttccgtccgctaggagtctgcgtgcgagtgtccactggctccgtgacgcaggtgtcc

SEQ ID NO: 100444 - DNA, 90 bp, Homo sapiens
ggggagaccttgaatttggtgtggaagaaataacatcagtagttcaggtgactctgaacaacgtggaagtctgcagtgaaaacatctcca

SEQ ID NO: 100445 - DNA, 100 bp, Homo sapiens
ctgattatgttcagtctcaacctgcacatgaggatcccccagatcaactggaatctgacagcatttcctgcagatcaccctgtgcgtgtgcgagctgtat

SEQ ID NO: 100446 - DNA, 100 bp, Homo sapiens
taacttcaacggttcaggaaggagaactttgtgtgttctttcggaataatcattttagcaccatgaccaaatacaagttctccatggcaactcagtcctc

SEQ ID NO: 100447 - DNA, 100 bp, Homo sapiens
cgcttctgggccagttgggagagcgtctgtagcttccttggcgagcccacaccttaaccgtgctcttcatcctcacctgtacgcttggctatgtgacgct

SEQ ID NO: 100448 - DNA, 75 bp, Homo sapiens
aggtgtatcaagtaatggtgcaaagcctgaagaggtagaagaggatgatccagtgcctgagatccgtcgagatca

SEQ ID NO: 100449 - DNA, 80 bp, Homo sapiens
gcctgcggagcctgtggggcagcagcaaaccaaatcccaaccaaatatccactagtaatgggaagcctggtgctgtgaat

SEQ ID NO: 100450 - DNA, 102 bp, Homo sapiens
ccgctcgatcttgggacccaccgctgccctcagctccgagtccagggcgagggtttccaggcctgaggtgcccgccctggccccaggagaatgaaccagccg

SEQ ID NO: 100451 - DNA, 97 bp, Homo sapiens
ggagatgaacccaacctagtgggtgtaatacatcatgaactgcaggggagagtcacaccgggacagctcatgtcctatattcagctcttcaagaaca

SEQ ID NO: 100452 - DNA, 82 bp, Homo sapiens
ccggttgatcgtggattatttgaggtactgggcctaatcgctacgtgcctctttggctatgatgcctatgtcaccttccccg

SEQ ID NO: 100453 - DNA, 82 bp, Homo sapiens
ctgcagtgacatgtccagcatgaatcccgaatagtggcgacatgtctaagaatgtgagccagtcacagatggcaaaattgaa

SEQ ID NO: 100454 - DNA, 100 bp, Homo sapiens
ttgaaaaccttccctttgaattacagagaaactttcagctcatgagggacctagaccaaagaacagaggtctgaagttgcagccggagtgaagaagagcg

SEQ ID NO: 100455 - DNA, 90 bp, Homo sapiens
caagaacagagagagaggtggacagatctgagagatactgaggtggagcgcgtgtcgcacccgctgctgcagcagcagtatgagctgtac

SEQ ID NO: 100456 - DNA, 100 bp, Homo sapiens
catttttttcctcttacccccccttctggagcggttgtgcgatcagatcgatctaagatggcgactgtcgaaccggcttcaacggaccacaccaaaatgc

SEQ ID NO: 100457 - DNA, 96 bp, Homo sapiens
cagacgctttcgcttttcaactcacttagcagcaaaggggatcagatgatttctgttaacgtgtgtataaagcatctatattggaaagcgactgag

SEQ ID NO: 100458 - DNA, 90 bp, Homo sapiens
cccggagcgcggccacggcgcaggctgaagccgacgtagcttctctgaacagacgcatccagctggttgaggaagagttggatcgtgccc

SEQ ID NO: 100459 - DNA, 98 bp, Homo sapiens
gcatccccattgtgcaactgccagtctaaaaattgatataggtggtttgttggaaatgctccgactacaaagctcaacttgaatatgatggtggtaaa

SEQ ID NO: 100460 - DNA, 75 bp, Homo sapiens
ttgagctgcactgtattcctgtgagaattatgaagatgatgacctagtaaattctgatgaggttatgaagaaacc

SEQ ID NO: 100461 - DNA, 80 bp, Homo sapiens
cacggagctgggcgacgagctgaccctgggagacatcgacgacccaacatgagtgaagtttcctgcaagaaacgggacga

SEQ ID NO: 100462 - DNA, 82 bp, Homo sapiens
aggaaatgcagctttaattggacagaaatttgcagccaactcagatttaaaggtgacttaagagattaaaattaatttggtt

SEQ ID NO: 100463 - DNA, 100 bp, Homo sapiens
gatcaatcttaccagagggccctcagatgttcctcctgctgatcaagagaagctttttatccagaagttacgtcagtgttgcgtcctctttgactttgtt

SEQ ID NO: 100464 - DNA, 75 bp, Homo sapiens
ggaagaccagaagagaagtggaatcctcagacctcaagctttttgcaaatcgagacgctccctccggagctcttc

SEQ ID NO: 100465 - DNA, 50 bp, Homo sapiens
gagcagtcccgagggcctcctggcaaaaatctccagccctacagagactg

SEQ ID NO: 100466 - DNA, 87 bp, Homo sapiens
tggcttttctgaaacagccaaatgtcaggccatgaagaagcattccaggatgccttgaagattttctgtaggataaaaggtggtcga

SEQ ID NO: 100467 - DNA, 75 bp, Homo sapiens
caaatcctggaggcagttgctggatttgtcttggctgttactatgacacgggaagcaattgatgaatttcggcgt

SEQ ID NO: 100468 - DNA, 100 bp, Homo sapiens
gctccaccgcttccacaccaacagacacttagcctgtgatgaggagagagtggaagaagcaaaactgctggtgtcccaaggagcaagtatttacattgag

SEQ ID NO: 100469 - DNA, 75 bp, Homo sapiens
tggctggcgattcgtgttcgtgagggccttttctggtatgatctcgtgaaatcttgagagaaactgaatgacgaa

SEQ ID NO: 100470 - DNA, 75 bp, Homo sapiens
caagacctaaaaaaccccaacaacagctcccttagctgtgaaagttgtgtagatttactgtttgtgagaggagct

SEQ ID NO: 100471 - DNA, 102 bp, Homo sapiens
ggacgaaaccatcggtagactccacaaggagcatctttccttgaagaagtacattattgacattgtggttgaaagtacagctccagcagaagctttgaaaga

SEQ ID NO: 100472 - DNA, 80 bp, Homo sapiens
agaaacccggagggcgccgggacaatgcagatcttcgtgaagactctgactggtaagaccatcaccctcgaggttgagcc

SEQ ID NO: 100473 - DNA, 100 bp, Homo sapiens
cggtttttggttgggacgcagtctcttaaatatgataatcaggctacagaagaagtttccaaaaatctggttgccatgaaagaaattctgtatggcacaa

SEQ ID NO: 100474 - DNA, 82 bp, Homo sapiens
agcaatgcctccatgaacaatctcacccaattactctgctcagatgataacaccctatgcccattgtcctgatctgaaaatt

SEQ ID NO: 100475 - DNA, 110 bp, Homo sapiens
tttgatgactttgcacattatgaaaagcgtcaagaagaggaggaagccatgcgtagggccactactacgtgcccctcctgagagcggaagagacttcttctccagtcatc

SEQ ID NO: 100476 - DNA, 98 bp, Homo sapiens
cgccggccgccgcgccgcccggcagcctcggcaggtcaaaatgcagatcttcgtgaaaacccttaccggcaagaccatcacccttgaggtggagccca

SEQ ID NO: 100477 - DNA, 100 bp, Homo sapiens
gttatgaccgctactcaggaggaaattacagagacaattatgacaactgaaatgagacatgcacataatatagaaagccaagacgaacttgaccattata

SEQ ID NO: 100478 - DNA, 101 bp, Homo sapiens
cagcagcaactgccggacgccctatcgcaagcagttcacttcttcaactgagatggacatgatataatctccattgagtcaaagaatggcatctagtcctg

SEQ ID NO: 100479 - DNA, 101 bp, Homo sapiens
agcacgaggaggacgaggagagccggcggcgggaggccaagggcgcaccctacgacgcgcacaccaccggcatgaccggcgccatcagctaccacccgtac

SEQ ID NO: 100480 - DNA, 72 bp, Homo sapiens
gtttgccaggttgggctgtagcatctagtcctcctgcatatgcccaagaggattgggagtggaatggacacc

SEQ ID NO: 100481 - DNA, 82 bp, Homo sapiens
aatgccatggaagatgcccagaccctgaggaaggccatgaaagggctcgcccgagacagtgatggagctgaggaggatgtag

SEQ ID NO: 100482 - DNA, 100 bp, Homo sapiens
cctgaagcaaaagtccaggaggaagagcatgaccttgttgacgatgacatcaccactgagcagcccgacggccatggaggctgaagagacgatggaatgc

SEQ ID NO: 100483 - DNA, 52 bp, Homo sapiens
gtttctagttagtgaaacagaatctgatcatcaggctgcccggctggggctg

SEQ ID NO: 100484 - DNA, 90 bp, Homo sapiens
cgagaaccaaacctgcccaccccaatgaccagtaaatcggcatcaggaccaaactcttacccaggatctactggagcagctgttggagcc

SEQ ID NO: 100485 - DNA, 87 bp, Homo sapiens
ggcctgcacaccaagggcgcccttcccctggatacggtcactttctacaaggtggcctcactccaggaaaaagtgacatcccagagc

SEQ ID NO: 100486 - DNA, 75 bp, Homo sapiens
ggacaccaggtcattctgtacctctgtcatgggatgggccagaatcagcccccaattccagatccgaacaacatg

SEQ ID NO: 100487 - DNA, 75 bp, Homo sapiens
agttggaagcagccgatccagcctgcggagcctgtggggcagcattatggatccaagcctgttgagagaaaggga

SEQ ID NO: 100488 - DNA, 74 bp, Homo sapiens
ctggtgggccagtacagcaccggcaagaccaccttcatcagatcgatgctatagaagacaaacaagggaaggtt

SEQ ID NO: 100489 - DNA, 100 bp, Homo sapiens
gcagcagtggtggctatgaacccagaggtcgtggaggtggccgtggaggcagaggtggcatggggactcattctgaccagtttctggtggcattcaaaga

SEQ ID NO: 100490 - DNA, 98 bp, Homo sapiens
agaagaactgaagataggcaacaagatgatgagggcgcggcagtatccttggggcactgtgcaggatgcccagcctacagagtctgagaaggaaattt

SEQ ID NO: 100491 - DNA, 75 bp, Homo sapiens
gacgaggtccgctacgtaaatccctttgcggcggatgtacttgaaggatataatggaacaatatttgcatatgga

SEQ ID NO: 100492 - DNA, 100 bp, Homo sapiens
tcactgtcctggaaaaggcctgaagtggcactgaaatgaggcatagatgaggtttgatgaacttgtgaaaaaattcaaagtcgaatatcatgctggtggc

SEQ ID NO: 100493 - DNA, 115 bp, Homo sapiens
gtagtgagtctctacttttatggaatcctgcaaagtgatgcctcagcagctggcttggctttttcagaggaaacagagactctcagacatgaatactgtgacactgaccaccagg

SEQ ID NO: 100494 - DNA, 100 bp, Homo sapiens
catcttccaaactgatctaacagggcaaaaaaagggctggaaacttcgctatcatggagatcgacgactgggtttggattcagaagaggattattataca

SEQ ID NO: 100495 - DNA, 100 bp, Homo sapiens
tgctgttttagagctggcagcagcatctcagcccaagagaagcaagacttcaaggactgcattcgtaggcaaaggttgacccaatcaaagataaaagaaa

SEQ ID NO: 100496 - DNA, 100 bp, Homo sapiens
acaagcccaccaagctaaagaggctgcccagaaagcagttaacagtgccaccggtgttccaactgtttaaagtcacggtctagatcacattctcgatcca

SEQ ID NO: 100497 - DNA, 50 bp, Homo sapiens
ctcttctcagacgccgacgtgcacgagaataatccagaatggctactctg

SEQ ID NO: 100498 - DNA, 50 bp, Homo sapiens
cagaaacaaaatgtcaacaaattgatgggacttcctcgttctgcccatct

SEQ ID NO: 100499 - DNA, 82 bp, Homo sapiens
cgctagtctgaccctccgccaggcaaaaggaaggtttggaaggcgctttgagtccccgctgctgtggcagagcgccatcatg

SEQ ID NO: 100500 - DNA, 98 bp, Homo sapiens
ccagccagtggcagtgcgaggtggaggaggcaaacaagtgtaatcgtttatacatacccacagagattagttgccatgaacatgcctctcaacagtga

SEQ ID NO: 100501 - DNA, 75 bp, Homo sapiens
gtgcttgtgaaaggctccatggtcttgcctccttgcagatggtcatccagactcagagctctctctacagagagg

SEQ ID NO: 100502 - DNA, 100 bp, Homo sapiens
tgctgcttcaatgtccgcatcgcaaccaccgccctggccatctaccatgtgacaaatttacatgtattggagaccagaccagaagcccttctgaattaag

SEQ ID NO: 100503 - DNA, 100 bp, Homo sapiens
ctgggagcttctcagccattttccacagatcagcactattcctgatcagagaactccagttgcttcaacacacagtatcagtagtgcagccaccccagat

SEQ ID NO: 100504 - DNA, 82 bp, Homo sapiens
gcgccgcgagggctccttccctcaggtttgatctgtggatgaaatgaatcatgattttcaagctcttgcattagaatctcgg

SEQ ID NO: 100505 - DNA, 76 bp, Homo sapiens
caactgtgaacagcagcgattcaaagagatgaagagttatcttaaggatcatctttccctaagatcgtcatccctt

SEQ ID NO: 100506 - DNA, 95 bp, Homo sapiens
ccccgccccaccggcccccggcgccgtccagcccggagggacctgatttccagtgggttcaaggagatgtgtgtgaagttcagctgatggtatat

SEQ ID NO: 100507 - DNA, 98 bp, Homo sapiens
aggaagaaattgagaaagaatgtgaagataccagtttgcgtcaggagacacagacctgtgaccgcatcaagcagtcagcagctggcaccaagcgtcgg

SEQ ID NO: 100508 - DNA, 87 bp, Homo sapiens
ttaatgtttacggcgaagtctactcaacgtttccaagatctcccttgagtttagaaatctggctgagaaataccaaacagtgattgc

SEQ ID NO: 100509 - DNA, 100 bp, Homo sapiens
cagcaggattgctgtgtgaaaaccgagctgctgggagaaggatccttgccacggctggaactgacttcgacctgcgaacactgagggctgtgcgtgtgct

SEQ ID NO: 100510 - DNA, 73 bp, Homo sapiens
cacctacgtcccgctgccgtcgccgccgccaccatgcccaagagaaagattatccctggcgctggagccgggc

SEQ ID NO: 100511 - DNA, 100 bp, Homo sapiens
cagcggggggagctcggagccctcccagcctgctgtccagcagggaaatgtttcaacgtgcgcaagcgttgcggcggcgggcagaggactactacagatg

SEQ ID NO: 100512 - DNA, 83 bp, Homo sapiens
aagaggctcagaaggagacgattaaggatcttcccaagatgaaccagatgaggacggggacttggttgccttttccagtgacg

SEQ ID NO: 100513 - DNA, 50 bp, Homo sapiens
agtctgccatcgtccaaggaggtggcagggcgaagctgtgctcaggcccg

SEQ ID NO: 100514 - DNA, 50 bp, Homo sapiens
aaaatctttaacatttgacgcaattcaataccgaaggggctgggaagaaa

SEQ ID NO: 100515 - DNA, 83 bp, Homo sapiens
ggcagcggcaggctcaggtgcagccgctggagtgtggccatctggggccgtgtggtatttgccactcaggagacatgtcccta

SEQ ID NO: 100516 - DNA, 101 bp, Homo sapiens
atgagctcccgcatcgccagggcgctcgccttagtcgtcacccttctccacttgaccaggctggacgagatgagcgacgtagtggttcagccctacaattc

SEQ ID NO: 100517 - DNA, 82 bp, Homo sapiens
ccgcaggatctcagggcctgccgccccattatgatgatgtcgaggctcaggccacagggtcaccacatacatcgcccaccca

SEQ ID NO: 100518 - DNA, 98 bp, Homo sapiens
ctgatggaagagagctctgtctggaccccaaggaaaactgggtgcagagggttgtggagaagtttttgaagagggcccagataaaggccactgtgaaa

SEQ ID NO: 100519 - DNA, 50 bp, Homo sapiens
ggccttcgtacccgtcttgattgaggtgagaagccctaccactgcaactg

SEQ ID NO: 100520 - DNA, 98 bp, Homo sapiens
tggggccagggaaccctggtcaccgtctcctcagatgaaggatttgggggcagagcacttggcaggtcatgaaggggtccaacttctcgggttgttga

SEQ ID NO: 100521 - DNA, 101 bp, Homo sapiens
ccttcctaacatccaggccgtgcttctgcctaagaagaccgagagtcaccacaaggccaagggcaagtgatttgacaggagtacaagatcctcagcatgag

SEQ ID NO: 100522 - DNA, 75 bp, Homo sapiens
gacctggcacccgaatccggcctgccggaatgttgtaccatctttgggtaggcagacttccctgacgacatcagt

SEQ ID NO: 100523 - DNA, 97 bp, Homo sapiens
ttccagctgagggtggaggccggattgtactgtatggggactccaattgcttggatgacagtcaccgacagaaggatgatctcaatgccacccacca

SEQ ID NO: 100524 - DNA, 100 bp, Homo sapiens
ggacaagtcctgcgcttggggatcctctgtacgcccgttcactgcggcttcatatacagatagctctgatgatgagacatcgcccagggacaagcagcaa

SEQ ID NO: 100525 - DNA, 98 bp, Homo sapiens
caggagaaaagccagtattgcttgtgctcctaacaacctgtctcttggtgaccaagaatatggcccaggtgaccaaagccctggacaaggccctgagc

SEQ ID NO: 100526 - DNA, 90 bp, Homo sapiens
ggcagcagcatcggcatgctctatctgtactgccggcacctcaaccagatgaggaagtacaactttgagtttttggctttcacccccaac

SEQ ID NO: 100527 - DNA, 96 bp, Homo sapiens
tacaaagatggacttctctgtacaggatgaccatgaaagctgtggttctaattctaccaaccgtagtactgctgagagcacaaaatcatcaatcaa

SEQ ID NO: 100528 - DNA, 116 bp, Homo sapiens
gcgacggccgcggggactcggagctgagaggagctgctgctcggaccagcgcgattatgcttctcagtgatcctgagatggagagcagcatattgatcagctcagacgaaggggcg

SEQ ID NO: 100529 - DNA, 76 bp, Homo sapiens
aacagttgtcttcagtagaaagggacatggatttgattgacatactttggaggcaagatatagatcttggagtaag

SEQ ID NO: 100530 - DNA, 132 bp, Homo sapiens
cacggtgaacctggaccaggaggaggttttcaggaccaaaattgtggaaaagtcactctgacaatgcagatcttcgtgaagactctgactggtaagaccatcaccctcgaggttgagcccagtgacaccatc

SEQ ID NO: 100531 - DNA, 82 bp, Homo sapiens
accttgacacttatatcctccctgggaatctggaaactgttcttcaggaagaaacccattagtttggaactggagaattcct

SEQ ID NO: 100532 - DNA, 83 bp, Homo sapiens
cagagccgccgagacgccgaagagcccgccgcccgcgcgagtgtcactactccatccagaagggagctgcgtttctgggactt

SEQ ID NO: 100533 - DNA, 82 bp, Homo sapiens
tcagacgtggataaagataatcccgtaaggtacctgccgtgggcagatctgagctttcttcttggacaccccatacccacag

SEQ ID NO: 100534 - DNA, 100 bp, Homo sapiens
catccttgtacagcaatctcctcctccactgccactacagggaagtgcatcacatgtcagataaacaggggtcacatgacgacagaagccaagagggctg

SEQ ID NO: 100535 - DNA, 100 bp, Homo sapiens
acttaaactgcgatatttcactcctaaagaaatagcaaatctccttggatttcctccagagttcgatttgattagaactatccgggacccagaaaagccc

SEQ ID NO: 100536 - DNA, 50 bp, Homo sapiens
ggaggagccccagccaccaagaagcttctgggaacttggcagacgcagct

SEQ ID NO: 100537 - DNA, 131 bp, Homo sapiens
cgtgatgacaacgatgtacgccaagatcgacccctcgttaggaataattgcaaaaatcaatcggactctggaaacggcctgtcaccactgactaaagaagagaaaactgcggcagagcaattcaaatttca

SEQ ID NO: 100538 - DNA, 100 bp, Homo sapiens
actcctgcccagcgtggtggggcagcagaagctccagagcccagacttgcagcccatgactgaagagttgctgaaacaacaaaagctgaattcacatgag

SEQ ID NO: 100539 - DNA, 75 bp, Homo sapiens
cacttcgactctcaaagcaataccaggatagctgttgtttcagagaaagatagcctgggctggaagctcttctac

SEQ ID NO: 100540 - DNA, 78 bp, Homo sapiens
gagagggtagttgtgcttccctaggaatgggaagtggtagtgctggaaaagaaggggggccctttaaagctcttttaa

SEQ ID NO: 100541 - DNA, 50 bp, Homo sapiens
ggcaacagagtgcctgacccaggtcagacttcccaagtaagaagcggaag

SEQ ID NO: 100542 - DNA, 96 bp, Homo sapiens
gggctctgcgcgctcctgccccggctcgcaggttgaaatcacaaagattagacacctttttagataggtgttcttcagcaccactgacaacacggt

SEQ ID NO: 100543 - DNA, 87 bp, Homo sapiens
accatctacatctcccacaggaagtgtcacacagcagtcaagtatgtcccaaacgtctgttttccggacagacttgatcacagccat

SEQ ID NO: 100544 - DNA, 50 bp, Homo sapiens
cttcatactgtaaagcatggagaaaagttgccttttcgggccttggcttc

SEQ ID NO: 100545 - DNA, 100 bp, Homo sapiens
tgagcacctgtagtcaatcacacgcagtcaaagaagtttggcagagatcacggagctaattcatattgctctccttgtacatcgtgggatagtaaattta

SEQ ID NO: 100546 - DNA, 49 bp, Homo sapiens
tcaggctggaatgaacctggaagacggtatccaactgttgaaaaacgag

SEQ ID NO: 100547 - DNA, 80 bp, Homo sapiens
ggaggcgcgggaggtgttcgagaacgaccccgagacgggatgtttcagcagcccctgagaaggaagaggaggaagctgag

SEQ ID NO: 100548 - DNA, 100 bp, Homo sapiens
gttactatggcagttgcaaaatattcaggagaccgtcgttgccttgtatttccagagaacaggaagtgtttggattgtgagctatttcagaactgttctc

SEQ ID NO: 100549 - DNA, 121 bp, Homo sapiens
tggagtggacaggagcattaccacctcagccaccctgaccactatcatcaccatggaaaaagtgacttgagcagcttcctgcctgacacagctcacttcaagaagtgcacaatgtcagaac

SEQ ID NO: 100550 - DNA, 100 bp, Homo sapiens
gttaggattcaggccaaactggtaaatgacgaaggggcttcttccagagccaaggaggaagggttgtccggatagaagagcgagcagaatttttgaataa

SEQ ID NO: 100551 - DNA, 96 bp, Homo sapiens
ctcttcaacactgttattgtaaacaaaggtgagtaccccggggctggctcctccagtgtcttctcagtcctgagcaacagtgcagaggtgaaacgg

SEQ ID NO: 100552 - DNA, 50 bp, Homo sapiens
tacctggcattgccttttgttgaggttctctttggtttccagcaagatgc

SEQ ID NO: 100553 - DNA, 75 bp, Homo sapiens
ggcgatggtcttcctgctggggctcatgtttgagtgtggacgaatgtggaacctcgctctgtggctgtgttccct

SEQ ID NO: 100554 - DNA, 112 bp, Homo sapiens
tagctccagaggtttaaccataggatagagaaaccagtgaaagcaagttgaatacattggtgcagaagcttcatgacttccttgcacactcatcagaagaatctgaagaaac

SEQ ID NO: 100555 - DNA, 50 bp, Homo sapiens
cggcctccctgctcttaccgggagatacgtaggtaacctttccagagatg

SEQ ID NO: 100556 - DNA, 100 bp, Homo sapiens
cagtcgcgcagcgctgcagtgaattttccccccaaactgcaataagccgccttccaaggctggtgtgtgacagctctgtgctgctgtgcctcaagaagag

SEQ ID NO: 100557 - DNA, 83 bp, Homo sapiens
aggagcaagctgaaaaagaaatgtactccttgtgtcttttagcaacattaatggcatatgtaggcagaaatgtaatattgaca

SEQ ID NO: 100558 - DNA, 101 bp, Homo sapiens
agaggtgttaccggaacggcggcgacaagggtgttcccgaactagagtggctattcctgcaccaactgacctgaagttcactcaggtcacacccacaagcc

SEQ ID NO: 100559 - DNA, 88 bp, Homo sapiens
cgcagtggtcgcttcttctccttgttgccatctgcacgaggtcagagctggaggatttcctgagtgaagcggtctgcatgaaggaatt

SEQ ID NO: 100560 - DNA, 51 bp, Homo sapiens
ggagcggagccatggcctccggagccaccagaaatggaactattgaaattt

SEQ ID NO: 100561 - DNA, 96 bp, Homo sapiens
cggcatctgcccctgccatgaccactgtggagaacaaatccaagattagcacaggtcccagtagggatggcacaatcagcgaggacaccatccgag

SEQ ID NO: 100562 - DNA, 98 bp, Homo sapiens
ggacctgagcagcctgaggcggctggcacagagcttccggcccgccatgcggagggatgccggctccaggagcagcagtggaggtcgggaacgcctca

SEQ ID NO: 100563 - DNA, 73 bp, Homo sapiens
tcaagcaaaaatgcccactttatgaagccaacggacaagctgaaggcgacatgccaattcatgaacttctcag

SEQ ID NO: 100564 - DNA, 98 bp, Homo sapiens
gagtccgactcgctacgcgggtcttgcgagatatctggccgcctctgccgcagctggagtcatcagtgagttctgcctcagtcagctcccaagtgagg

SEQ ID NO: 100565 - DNA, 50 bp, Homo sapiens
gaaaactacaggcggggacggcttctcgttgttgacctcctgtactggag

SEQ ID NO: 100566 - DNA, 100 bp, Homo sapiens
caaaaggctttcaataaaacaatcgtgaaacttcagaatacttcaagaatagcagaggagcaggcatgtactggcattgaaaacattgacgaagctatta

SEQ ID NO: 100567 - DNA, 82 bp, Homo sapiens
taacttctactgacgaagcttggaagttgcagaaggataccatacttgcagagctccttcagatacataaagaacacattgt

SEQ ID NO: 100568 - DNA, 82 bp, Homo sapiens
gcaaggtgatccagcaaggtcggcagagcaaggggcttacgcagaaggacctggccacggctactgcagcactggggtgtca

SEQ ID NO: 100569 - DNA, 51 bp, Homo sapiens
cgagaaccgtcagtttgagccagatgttgatattcactgatggactccaaa

SEQ ID NO: 100570 - DNA, 100 bp, Homo sapiens
ttgaaaccaggaacagagacctcctgtccgaaaataaccgccttcgcatggagctggaaaccatcaagctgtgtcagcgtgttatgatgccgtcccgtac

SEQ ID NO: 100571 - DNA, 80 bp, Homo sapiens
gccaaggaaaaactggagagcttcatcaaaaatagtgatagctttgataaaaatatccagagaagttgtattttgagggc

SEQ ID NO: 100572 - DNA, 98 bp, Homo sapiens
tgcgccgcagcccgggcccaggccccggcagcgcctgggacaaggtacagcagggaagaactggaaactcagagaaagaaactgcccttccatctaca

SEQ ID NO: 100573 - DNA, 75 bp, Homo sapiens
agaaggtctctggagacatcttcagcaggcctcaggcccaggcccaaggccaagtgagagagcccaggccacagg

SEQ ID NO: 100574 - DNA, 98 bp, Homo sapiens
tggtagcctggccagcaacccttattctggacatggtctgctatacagctcagactctcgtccgaatcctctcacatggtggctttaggaagatcctt

SEQ ID NO: 100575 - DNA, 75 bp, Homo sapiens
ggaagaccgatgggaatggttaagactgagtggatgagaatggcaaaattagtcgccttcgtcgagagtgccctt

SEQ ID NO: 100576 - DNA, 83 bp, Homo sapiens
aacctgctgctggaggaggataacaagttttgtgcagattgccagtctaaagttccagtgtctcgccccatcctcaccctcag

SEQ ID NO: 100577 - DNA, 85 bp, Homo sapiens
aaagactccagtaacactcaagcaaagaagagttgagcacaatcagcttgaggcagccctaggtgaggccaagaagcaacttcag

SEQ ID NO: 100578 - DNA, 74 bp, Homo sapiens
ctttcccattttgctcagcgactgtttgatgacgtcccgcagttgggagctgaaagtgccgacagcattggtgc

SEQ ID NO: 100579 - DNA, 98 bp, Homo sapiens
ctccagggaaaggatgacatatttttggacctgaaacagaaattctggaacacctatatggtgtttaagatagaagtgctaatgaatggaagaaaaca

SEQ ID NO: 100580 - DNA, 75 bp, Homo sapiens
gatctctcctggcaaagactggacaagctgcagaatgatgccaatgggtggaatgatgccacctggaccaggaat

SEQ ID NO: 100581 - DNA, 76 bp, Homo sapiens
ggactccatggagaactactataaggaccagacttcctgggaatgaaaatggttggtgagctgctacgaatgtcgg

SEQ ID NO: 100582 - DNA, 82 bp, Homo sapiens
ccactgctgctccgtggagatcgtcccgcgcctgccggtgacttaagagattaaaattaatttggttgctgttggttctgaa

SEQ ID NO: 100583 - DNA, 75 bp, Homo sapiens
ccctgagcctcagcacctgcttgtttggaagactctaaaatagagctcaagcttgagaagagagaaccactaaag

SEQ ID NO: 100584 - DNA, 100 bp, Homo sapiens
gctgcctcgccgcgtctcgccacgggtggcaattttaagcccagccagaaaggttttgcaggaggaaccaaatctttcatggacttcggcagctgggaaa

SEQ ID NO: 100585 - DNA, 100 bp, Homo sapiens
ggtagaaggtgttattgggaaaattcaacttcattcagattctctttgtggccagatgggtttgtatggacaggcttgtccatctgtaacttcattaagg

SEQ ID NO: 100586 - DNA, 100 bp, Homo sapiens
cttcgggcagagagaaggaaacacttagaggaagttctggagatgaagtcgccttcgtcagacgtcagaatgattccttgcagagccgcgctgacctttg

SEQ ID NO: 100587 - DNA, 100 bp, Homo sapiens
gtctcattggaaaaaccaccacaggcttattctgtactgtctcctgagtgtttgatgatggtgatgagcgaacattgagacgtacctcactttgtctgaa

SEQ ID NO: 100588 - DNA, 100 bp, Homo sapiens
caaagagttatggatattctggtggggagatgaacccaacctagtgggtgtaatacatcatgaactgcagggaaagtgatgaagcattgggcccaacaat

SEQ ID NO: 100589 - DNA, 99 bp, Homo sapiens
cgccatcattggacccaatggctctggtactgggcctaatcgctacgtgcctctttggctatgatgcctatgtcaccttccccgttcggcagccaagac

SEQ ID NO: 100590 - DNA, 98 bp, Homo sapiens
acttcatcacttccagctcaggttggaaccataatggactcctcctatagtgccaataggtctcgtctacagaggactggtctttcaatagcaagttt

SEQ ID NO: 100591 - DNA, 76 bp, Homo sapiens
gaattccattcttttccttattcttctgatgtggatccagaactgataaatttcaaacggaagagagtggcagcat

SEQ ID NO: 100592 - DNA, 98 bp, Homo sapiens
tttcctttgtgttgctgtagcccccggctccactgagttaaggcacacttagtccagatttggtgcttccagatgtgagttatcaggtggaatccagt

SEQ ID NO: 100593 - DNA, 74 bp, Homo sapiens
tgaaatccgaaaggtctgtgataatacattagatattatagcggtctagtgacggagcccgcgcgcggcgccac

SEQ ID NO: 100594 - DNA, 100 bp, Homo sapiens
cctctcaggacaacccagatgtgcaacaaagtgcgatgcaattctgtggtgttcttggtcacacatttatggagtttctgaagggcagtggagattactg

SEQ ID NO: 100595 - DNA, 101 bp, Homo sapiens
gggatgtgcaaggaacacatgatggatggagtcacgaccaggaccttctgtgggactccagattatatcgccccagaggcactggtgaggtggattgatga

SEQ ID NO: 100596 - DNA, 98 bp, Homo sapiens
cctgggtcctcgctgtggggcaatccgggcttgcagacgagatgagcagcaccagcagtaagagggctccgaccacggcaacccagaggctgaagcag

SEQ ID NO: 100597 - DNA, 74 bp, Homo sapiens
gcatcatccacggggtgctgcagatcctgttccaggcacttccgttccggcgcccctccggtcatcaacccgct

SEQ ID NO: 100598 - DNA, 96 bp, Homo sapiens
gccgcgcgggccgggaggggacggccgccggagccgcgaggccaagcgtccgacctccgatcatgaacgggcccctgcacccgcggcccctggtgg

SEQ ID NO: 100599 - DNA, 117 bp, Homo sapiens
caccgcagccttgggcctcgcgccggctatggccgtgccctggggctgagccctcagggcttgtcaatgaggcagatcagattcaggttcgacgggcagccaatcaatgaaactgac

SEQ ID NO: 100600 - DNA, 75 bp, Homo sapiens
catggcggtaggctgggaccataacacaagaatctttggaagaactaccagaaacgagtgggaaaacaacccgga

SEQ ID NO: 100601 - DNA, 100 bp, Homo sapiens
cctaaacaggagcacctgctggcgctaaaaggtggatccataaagaacccagccaacccgcagagggaggggaggggctgagctgtgaggagagcggggc

SEQ ID NO: 100602 - DNA, 75 bp, Homo sapiens
agctgtaacactcaccgcgacggtctgcggcttcattcttgaagggtcactgtcattcggggacgtggctgtggg

SEQ ID NO: 100603 - DNA, 100 bp, Homo sapiens
cctggcttctcgtctgaacccgccccagaaatcggccctgcctctgtgatggtggggaacctggtctctgggaagagaatcgcccaggccagtggcagag

SEQ ID NO: 100604 - DNA, 100 bp, Homo sapiens
cttcagagacactgccaagcagccttagccctagtgtagagccaaaagaatgcaatggtgtaaagattccagttgatgccagtaaacctaatccaaatga

SEQ ID NO: 100605 - DNA, 100 bp, Homo sapiens
tgaaggcgaacgcggtctgcaagctgacgtatcattggttatagtcatgggaaaggaaggtgtccacggaggcacacttaacaagaaagcatatgaactc

SEQ ID NO: 100606 - DNA, 83 bp, Homo sapiens
agctgccagacctattaatgccagcatgaaaccaggtgatgaaacttatcaggacatatttcgtgatttttcccaaatggcat

SEQ ID NO: 100607 - DNA, 96 bp, Homo sapiens
cttggccaacctccggattgagaggaggaaacagctggaggagatcctggagatgaagtgagaaaccctacaagtgtccgcactgtgactatgccg

SEQ ID NO: 100608 - DNA, 83 bp, Homo sapiens
cacgtgtgccgcgctctgggcacagccttggaaagtcaggaccgcgacggcagcagagcaacaacgactgaaagacctttcat

SEQ ID NO: 100609 - DNA, 96 bp, Homo sapiens
agattcaagatgtatgttcagcagttggacttaacgtatttcttgagagacagggtcttgcaccattgcccaggcatgatcatagctcactgcaac

SEQ ID NO: 100610 - DNA, 98 bp, Homo sapiens
agagtttcttccctgccggaggtgggatacacggtagcatcatggtcgagggtatacctcagttaccatgtgccaaagcattatacaactatgaagga

SEQ ID NO: 100611 - DNA, 100 bp, Homo sapiens
ctcacggtgacgcttttccccagcttttccgagtacatgtcccagagcaagcacacggaggcccgggagctcatgtactcgggagccctgctcttcttca

SEQ ID NO: 100612 - DNA, 97 bp, Homo sapiens
cggaacagcagagacacagagggcagtcatgagagacagcatcttgctgccacccaggctggagtgcagtggtgcagtcttagcttactgcagcctc

SEQ ID NO: 100613 - DNA, 50 bp, Homo sapiens
ttgccatcatggaactgcaagtagagctgatggtacacacatggatggtg

SEQ ID NO: 100614 - DNA, 83 bp, Homo sapiens
gggcgcgtcaggccgcgacgagggcgctgaggccaagactaaggggctgcagagcggggtggacattggcgtcaagtactcgg

SEQ ID NO: 100615 - DNA, 146 bp, Homo sapiens
cttcggctagcaagttcaccagcatccctgcagccttctggtataccatcgtcaccatgacaacactagggcatggaggagtgacggcaggaactttctgtgctctgacaacccttatgcaccaactagaaaaagaaaattccgtg

SEQ ID NO: 100616 - DNA, 75 bp, Homo sapiens
cttattcaggacaaaaggaggagtgcttttttaggaccaaaggatatatttccttactcagaaaataaggaaaag

SEQ ID NO: 100617 - DNA, 82 bp, Homo sapiens
caccatgccgctcctaagcctgcacagccgcggcggcagcagcagtgagagagggagacgctgttgcggcagctggagacga

SEQ ID NO: 100618 - DNA, 100 bp, Homo sapiens
ctatctcatccacggggggatggacagcaccagacactccctggcccacacctcccgctcatcgcccgccacgacctccaatggaagtccgggcacatgg

SEQ ID NO: 100619 - DNA, 83 bp, Homo sapiens
cggctgtaccggcagatcctcaggggcaagtacagttactctggggagttacagaatgtctgaaggggacagtgtgggagaat

SEQ ID NO: 100620 - DNA, 101 bp, Homo sapiens
gttgtccgcgaggccccgcgctcaagccgccttctcctgccgtcccactactgggcgtctacccagaagaaaagaagtcattatatgaaaaagatacctgc

SEQ ID NO: 100621 - DNA, 82 bp, Homo sapiens
ggtttcagagagctccctggaccatctaatggctatgggagatgggtatatttacttctggcacatgggaagagaaatcaga

SEQ ID NO: 100622 - DNA, 134 bp, Homo sapiens
ggcaaatcaagcctagtgcttcgttttgtgaaaggccaatttcatgaatttcaagagagtaccattgggggccgaggagtcttgtaaatgtaatggctggaaaaaccctaacccctcacccactccccccagag

SEQ ID NO: 100623 - DNA, 103 bp, Homo sapiens
caaccccgggctcggcggcggcggccaggtccctgctgaatcacacgccgccatccgggaggcccagggaagactatttggagttttcctggtcttactggat

SEQ ID NO: 100624 - DNA, 74 bp, Homo sapiens
aaattctggaacacctatatggtcagcctagcaacaaagaagatgtggatgatcttgtgagtcagctaagacag

SEQ ID NO: 100625 - DNA, 74 bp, Homo sapiens
tacttggcagctcggggagtcctaccctatgtgggcaacctcatcaccaaggactctctggcttgcttcaatca

SEQ ID NO: 100626 - DNA, 51 bp, Homo sapiens
ctcacaccctggatccttgacctactattaagtgggcagaccaacatccac

SEQ ID NO: 100627 - DNA, 98 bp, Homo sapiens
gccaccgtcgccggccgcccgcacgtccgtccgatacctatatcatggcaatactaatccagaattggcttttgaaagtgccaagatcctctgttgta

SEQ ID NO: 100628 - DNA, 100 bp, Homo sapiens
aagagttcaactttcccagaagttgttctaacgctgcctttgctttaaaacagtattacttgcgcatacggcggcatcaagaaaggagagcaattttgac

SEQ ID NO: 100629 - DNA, 50 bp, Homo sapiens
gtttgcaacacagtattgaaaggctgagtcctggatgcactaatcgtgag

SEQ ID NO: 100630 - DNA, 101 bp, Homo sapiens
cgtggtgtcttcgcactgtgcatacaggacgggtccatccatcgcataagagcaaagaatactattgttgccacaggtgcacagccagagaacaacacatc

SEQ ID NO: 100631 - DNA, 99 bp, Homo sapiens
gtccaggccatgaagagtcctgaccacaatggggaggacaacttcgcccgggacttcatggctccgtatgtggatgtgatctgtttgaacagctactac

SEQ ID NO: 100632 - DNA, 97 bp, Homo sapiens
gccaaggagatcgtctctctcatcgaggcccaaaccgccaagaatgattacggacctgaagccaaagaacaagatgcgctagtggacagattgctga

SEQ ID NO: 100633 - DNA, 83 bp, Homo sapiens
ctggtctttctcaacctcatcttctgggctgcctgctgtttcccggggagatcatgaaacgaggtcgccttcccagcagcagt

SEQ ID NO: 100634 - DNA, 75 bp, Homo sapiens
acagttcacataagaagttcttcgatgtatctaaacttggcaccaagtatgcttcagtatcagacacagcacagc

SEQ ID NO: 100635 - DNA, 101 bp, Homo sapiens
cagaaagtgaagctgtttcgggccagcgacccgctgctcagcgtcctcatgtggggggtaaaccactcggtgacaaccaaagccaagcaactgaaggattc

SEQ ID NO: 100636 - DNA, 51 bp, Homo sapiens
aaggattccaagtaactcttatttgctaggtcttgactccactaacgggga

SEQ ID NO: 100637 - DNA, 100 bp, Homo sapiens
gttttctagtccctcttacttgaagcatgtctttcagagcccggcaccacccatcttgagtatctggttcttccaggggacccagccccctaaccatggg

SEQ ID NO: 100638 - DNA, 100 bp, Homo sapiens
gggcgagcggctgtgtggatgtcggcgaagccgcgggcgaggccagaacacaaagcgtgaatccggaagaaaagttcaatctggaaacatcaatgctgcc

SEQ ID NO: 100639 - DNA, 90 bp, Homo sapiens
gccgcggcgacctcggaggaaccggctccttgcgtcccgcctccctgggagctccgcacgggtttccaatacttatctacaggaatcgcc

SEQ ID NO: 100640 - DNA, 50 bp, Homo sapiens
ctggggctgaacgcggctttctggacctgctgtcctttgagctgttggat

SEQ ID NO: 100641 - DNA, 100 bp, Homo sapiens
gaacgcttggccatgcgacggcggctgcctgtggaagagttcttggagtctctgcggagtccctgggccagatctcacagtgaaagctgcaggatcttcc

SEQ ID NO: 100642 - DNA, 83 bp, Homo sapiens
cagctctcgcactctgttcttccgccgctccgccgtcgcgtttctctgccgaattgtgggagagagactctttgaaagtaaag

SEQ ID NO: 100643 - DNA, 75 bp, Homo sapiens
ctttgagaaagtgcaggagcaactgggaaatgatggttgcagagaacacatcttagaagatgaaaaacctgaatc

SEQ ID NO: 100644 - DNA, 90 bp, Homo sapiens
catcccaggttgccttggaaaatgccaacgccgtgtctgaagaacccagcgggtgccgcttctccacccgaggcttccacctccaacgag

SEQ ID NO: 100645 - DNA, 100 bp, Homo sapiens
tcttttagagtatagaaggcaggtgttcactgttggcagaatttgtgccagccgtaccagaatttatcataaactgaaacattttaaattcaaactatac

SEQ ID NO: 100646 - DNA, 98 bp, Homo sapiens
catattagtcaacatggaggaaaatggccttactggtttaaaaaaatgggtggattctgaccaggaattacaaggctcttgccaaaggaacaagaggc

SEQ ID NO: 100647 - DNA, 100 bp, Homo sapiens
aggagatgaaggcagtggacacacagcatggagaaatccttcgcaatgtcaccatcctacgagacctattccatctgggctagcagttgtaaaaacaaag

SEQ ID NO: 100648 - DNA, 97 bp, Homo sapiens
ctcagtagaatgtggtgccaaaattctagcagctaatccagaagccaaggcagaaatggaccttaagagactgagagacccattacaagtacatctg

SEQ ID NO: 100649 - DNA, 98 bp, Homo sapiens
tgccctgggctggaacgaccctggaaaatcatcagcgtgttagcattttctttgactatgcaagatgtagcaagaacactgcgtggccctactttctg

SEQ ID NO: 100650 - DNA, 75 bp, Homo sapiens
ggggtcaaaaggtgtcatcccaatgaatgccaactgtacaggaagaggcacatacaaagaaaagaatccccgaaa

SEQ ID NO: 100651 - DNA, 75 bp, Homo sapiens
gccagggtgaacgcccgactgcaagctggtccccagtcccaagcggaagttggaagaaccagttctggagttcag

SEQ ID NO: 100652 - DNA, 95 bp, Homo sapiens
acgccaaaggggacagcgagtcggaggaggacgaggacttggaagattttaccaaatgttgcaagaactctggagttcttatggtagtaaaatgc

SEQ ID NO: 100653 - DNA, 75 bp, Homo sapiens
atttcatccaccacattacttagtggtgccaccacacgagacctttggcttcaaggtggccgtgatcgcctccat

SEQ ID NO: 100654 - DNA, 74 bp, Homo sapiens
tgtggcagtggttgtggatcccattcagagtgtaaaaggaaaggacctagatgtgaaggctggtggaggctgtg

SEQ ID NO: 100655 - DNA, 100 bp, Homo sapiens
cccttgggatctgccctccgctcagctcgagcttccctcgtggccgacggaacaatgaagtgcattccactcttcgttcaacttgttttggagagattaa

SEQ ID NO: 100656 - DNA, 100 bp, Homo sapiens
cgcaagcaaaatgcgttaggaaaatgtgatgcatgtctcagtgggtgtccgcaatgttgccagtgtctgtctgcagattggctacccaactgttgcatca

SEQ ID NO: 100657 - DNA, 58 bp, Homo sapiens
caaggaatccatgtttcttccaagaagcagtactatactggcaattgctggagaagat

SEQ ID NO: 100658 - DNA, 90 bp, Homo sapiens
ctgctaccagctctgtggcctcaatgcaatccggccccacatcgcaactcttcgtaagtacacctatggcaagcacattctggccaagct

SEQ ID NO: 100659 - DNA, 50 bp, Homo sapiens
cctgcagtgccagaattcctcgttccatgccattgcagtgtcaactaggc

SEQ ID NO: 100660 - DNA, 89 bp, Homo sapiens
catgccagctttgtcaacgggatctgggagtgacactgatttgcttgtaaatgcatcacgaagaggcagcccagaatgaagaaagcaag

SEQ ID NO: 100661 - DNA, 51 bp, Homo sapiens
cgggtggagctgagccggagacaggctactgcagcactggggtgtcagttg

SEQ ID NO: 100662 - DNA, 100 bp, Homo sapiens
gtcaatcatgacttcacccctctggagacagcacccaagaaaacctcatttggctcgctgaaggatgaagaccggattttcaccaacctgtacggccgcc

SEQ ID NO: 100663 - DNA, 100 bp, Homo sapiens
atatccatccttccagtgccctcttcaacagacagccagaatggaccatggccaacctggagcgcaccttcatcgccatcaagccggacggcgtgcagcg

SEQ ID NO: 100664 - DNA, 58 bp, Homo sapiens
aggcctcgctgccaccagatcccagcaaggaggccttacatcgggaacaaatgttgga

SEQ ID NO: 100665 - DNA, 96 bp, Homo sapiens
aaacagttcggatccagatttcatgtatgaactgggcttccgaagtctggaagacatccgcagccaggcctccctgacaacccagcaggccatcgg

SEQ ID NO: 100666 - DNA, 74 bp, Homo sapiens
ttggccatcccaaagctattctgggggcaacagaggcattgggatcccgtggcagttgcagcactgaagtggag

SEQ ID NO: 100667 - DNA, 50 bp, Homo sapiens
tggtgaagagggcccggctggtgcgaagcaaaccctggaagaagctgaag

SEQ ID NO: 100668 - DNA, 80 bp, Homo sapiens
aggagaaaactcttaaagaatgcagcagcttggggccatgtgaaactttctgactttggtctttgcacaggactgaaaaa

SEQ ID NO: 100669 - DNA, 100 bp, Homo sapiens
ggatgatcgctgcaagatccctttattcatgctaatgtcctttatgccggcctctgctgtccccccattcaggtctgttgcggttctcccacttttccat

SEQ ID NO: 100670 - DNA, 90 bp, Homo sapiens
gtgtggcaagctcatcaatgctgtcgagcttaagacagagaaagagctggacccagatgggctgaagaaggagtcagagcgggatcgggc

SEQ ID NO: 100671 - DNA, 100 bp, Homo sapiens
ctatggctggcagtcaggacatattcgatgccatcgtgatggcggatgagagaacagcacattagttccagaagaaagatggaaattctgaaaactgaat

SEQ ID NO: 100672 - DNA, 97 bp, Homo sapiens
cggaatctagctgcatcttggtaccacaaggtgcctgttgtggaaattaaaggacatcttgattcaatgaatacatgcaagaaagcacttcagccaa

SEQ ID NO: 100673 - DNA, 51 bp, Homo sapiens
tcaccgttctgcccccagaactagtgctggccggcgaggactgcctgtggt

SEQ ID NO: 100674 - DNA, 100 bp, Homo sapiens
tcttcaaactgcagaggatgccaaactagagaagattttgagcaaacagagaaatcatttctaccagttcggagagatccggacgatcactgttgtgcag

SEQ ID NO: 100675 - DNA, 95 bp, Homo sapiens
acgcggctgccgtacgtggccctcgatgtgctctgcgtgttgctggatggctcgttcggaacaccacctggatacggctgcgctgcagaccgggc

SEQ ID NO: 100676 - DNA, 100 bp, Homo sapiens
gtctcgctccgtggccttagctgtgctcgcgctactctctctttctggcctggaggctatccagcggcaattgaaggaacagactaaaaatcgtgtcctg

SEQ ID NO: 100677 - DNA, 75 bp, Homo sapiens
aaggcgtgagaattcctcaatgactgccctctaaaggaagagaccggccttattgtcgcctgctaccacggcttt

SEQ ID NO: 100678 - DNA, 48 bp, Homo sapiens
tctccaggctcctcactctgtccaggaaaatgttggggcttttcagga

SEQ ID NO: 100679 - DNA, 83 bp, Homo sapiens
tctcctccgaaccccttcatgcccaaatcccggaaactccagcgtgtctccagccgtgcgtccagcctgcatgccgtgcggac

SEQ ID NO: 100680 - DNA, 131 bp, Homo sapiens
gtcgctcggacgctcctgctcggctgggtcttcgcccaggtggccggcgcttcaggctctggttttgggaaaaaaagcaaagacatgtccacagagcgggacttcttcatgaggatgaagtgcacggtcac

SEQ ID NO: 100681 - DNA, 83 bp, Homo sapiens
cggccgtctctggagagcagcagatgctgagccagggaggcggcccttccagcagccatgagggaaggacaggagatggggcc

SEQ ID NO: 100682 - DNA, 100 bp, Homo sapiens
agcaacgttcgcgtcatcacggacgagaactggagagaactgctggaaggagactggatgatagaattgaaacctggacaagcatgaagaactagaggag

SEQ ID NO: 100683 - DNA, 100 bp, Homo sapiens
ttgaccatgatggaatgcttgacagagatgagtttgcagttggttccttggatatcacccagagtattgaagacgacccacttctggatgcccagcttct

SEQ ID NO: 100684 - DNA, 75 bp, Homo sapiens
gcgtttgctgccaccttctgcatcgtagatagcctgggctggaagctcttctacgtcacaggctgcctgtttgtg

SEQ ID NO: 100685 - DNA, 82 bp, Homo sapiens
aggtgtcttgagattatcatcggctgagggtggaagcggcccccgcagacgctcggcagacaatgcagatcttcgtgaagac

SEQ ID NO: 100686 - DNA, 100 bp, Homo sapiens
aacttcttcacctacatccgctacatccagcaaggcctggtgcggcaggacgctggcagccacctgcaacgtggagccctcacttttcaccaactggttc

SEQ ID NO: 100687 - DNA, 128 bp, Homo sapiens
cccaaggacagaagtgggattgagacattctcacctcctcctccgcctccaaagtcgcggttccctctcccagcctgtgctgactcagccatcttcccattctgcatcttctggagcatcagtcagac

SEQ ID NO: 100688 - DNA, 82 bp, Homo sapiens
ttgggacccaccgctgccctcagctccgagtccagggcgaggttcgagaacttgtcttggacaattgcaaatcaaatgatgg

SEQ ID NO: 100689 - DNA, 100 bp, Homo sapiens
aaagttagaacttgttagaaaatggagtctaaacacctataaggcaaccccattccagctgccattgaagaaatgcgcggtggtgggaaatggtgggatt

SEQ ID NO: 100690 - DNA, 75 bp, Homo sapiens
tcaattcaaaatctacctgaaggtctgaagaactgttgcccaattcaacagtgccagcattccaactttgttaaa

SEQ ID NO: 100691 - DNA, 83 bp, Homo sapiens
aacgaattatctggcccctggggggctttcagggggggccctcagcctcttggccttgaacgggctgttcatcttgattcaca

SEQ ID NO: 100692 - DNA, 75 bp, Homo sapiens
ccgcggctcctgagggatcggtctcagccgcgcgggaggcaacgcacgggccacaggcatgttcctgcagtatac

SEQ ID NO: 100693 - DNA, 50 bp, Homo sapiens
ctgactagcagcttcattttgaagtttctagagaggaaggatctccccag

SEQ ID NO: 100694 - DNA, 82 bp, Homo sapiens
ctaacgttcttgatctctgtgaagattcaagccgctgccatggcccagacactgcagatggagatcccgaacttcggcaaca

SEQ ID NO: 100695 - DNA, 100 bp, Homo sapiens
cgggcaggtagccctgatgtgctgaggtgctcgagtcaggagattgaggaagaccgtaagaaagctgaacttgagggagtcgcagtcacagctccccgaa

SEQ ID NO: 100696 - DNA, 78 bp, Homo sapiens
ctgtcggatgcactgatctgcacagatgacttcattgccaaagttgttcaaagcttcacagttgactgcaggcattca

SEQ ID NO: 100697 - DNA, 101 bp, Homo sapiens
tggaaaccaagatagatgtgtcctatgaataccgcttcctggagttcacgactctgagtgctgcataaagatagggaggtggtgatggagcacccctcttc

SEQ ID NO: 100698 - DNA, 83 bp, Homo sapiens
gcgtggcctccgccaccgtgcacatccgaatggaaccttctgataacttaagagagattctccaaaatgtggccagattgcag

SEQ ID NO: 100699 - DNA, 90 bp, Homo sapiens
cggctccagccccagctgcgtgcccagatttcaacactacacttgcacaatgtctttgaaaccaagagtagtagattttgatgaaacatg

SEQ ID NO: 100700 - DNA, 82 bp, Homo sapiens
ggctgtcacagtatcctaatgaaaatcttcacagtgctgttactaaagcctgcctttccagatggggtttccccatgttggc

SEQ ID NO: 100701 - DNA, 97 bp, Homo sapiens
ttttgatctgccgtgatcaatatcaggaaaggccccatcttcccttcacacctggtttttgccaatccagaagactgtgtagcatttggcaaaggag

SEQ ID NO: 100702 - DNA, 96 bp, Homo sapiens
tgctcagccgggatacctatgagtgcacctgtcaagtcgggtttacagattaccagttgaccagtgcagagctctcctccttaccagcctttagtt

SEQ ID NO: 100703 - DNA, 89 bp, Homo sapiens
gaagaaactgaggcctggaatttgattaactcattcaaggttacccagttggtccaactggcccaccttcaacactccctctaagcacc

SEQ ID NO: 100704 - DNA, 100 bp, Homo sapiens
tctcaaagtggaagagcttactgtcacagcaactcctttgcaagatgccccgctcttccgccctctctggatgagggaacagaagtggaggaaacaaaag

SEQ ID NO: 100705 - DNA, 51 bp, Homo sapiens
ttcttggaatttaacatgcttgcacaagtaacaggtgacttgaatttcaag

SEQ ID NO: 100706 - DNA, 143 bp, Homo sapiens
gtgaacccatcctgccgtccttctccactttcgccagcccgtgccgcgagcgcggcctgcaggagacaatgcagatcttcgtgaagactctgactggtaagaccatcaccctcgaggttgagcccagtgacaccatcgagaat

SEQ ID NO: 100707 - DNA, 82 bp, Homo sapiens
gccccgagaaccaatcagcagccgcgttagtctgcatgaagaaatcagtgatttttatgaatacatgtctccaagacctgag

SEQ ID NO: 100708 - DNA, 75 bp, Homo sapiens
atggaaaatcgcttggttaaaacctgacacttttaacaggtcaatgtgacggtggactacattagaccagccagc

SEQ ID NO: 100709 - DNA, 82 bp, Homo sapiens
ccaggctttggtgagcgggaagcttgcacttcggtatgcagggaggcagtccctctccaagatcctggatgtggccagtttg

SEQ ID NO: 100710 - DNA, 88 bp, Homo sapiens
cctaaccatgaagacttgaacttaatacagcaagaaagaccatcaagtttaccaacgcaggaggagggagacgcactgatgacatcgg

SEQ ID NO: 100711 - DNA, 100 bp, Homo sapiens
gagccctgccctcctggttcggcctccccgcgcactagaacggcctcctcgaaagatgttgtcagacagctgtgtcaagaaagcttttccagttcagccc

SEQ ID NO: 100712 - DNA, 95 bp, Homo sapiens
cggggctgcggctcttcgggcacaggggcagtgatcggtgatggacagtctgctgtggccagtaacattgccaatactacctaccggctccagtg

SEQ ID NO: 100713 - DNA, 90 bp, Homo sapiens
attttgaagatgatgatctctacggccagtctgtagaggatgattattgtatttcgccgtcaacaggatcctgattgagtcaatgctttg

SEQ ID NO: 100714 - DNA, 101 bp, Homo sapiens
attaaccagctggaagccctgttgctggctctcaaaattagagagatgtgtaattgtccaccactgtctaatccagaccctcgattactattcaaactcag

SEQ ID NO: 100715 - DNA, 50 bp, Homo sapiens
cgaagtctactcaacgtttccaaggtttgccagaacccaataaagatgcc

SEQ ID NO: 100716 - DNA, 75 bp, Homo sapiens
cattgcctcgaccacactcacctctctctgctcatgcaggttatcaatactctggctgaccatcatcatcgtggg

SEQ ID NO: 100717 - DNA, 100 bp, Homo sapiens
tgggacttcccgtccgcggcgtggagggccataggaaaaggatacagagtagagtttcatgaacctgaaacttggtggaaatttgatcctgaagaattag

SEQ ID NO: 100718 - DNA, 100 bp, Homo sapiens
cagtacaagcttacgtctctgctcttcagtacaatcctatcgagctgggagcattagtacccttgattctttagactttgcaagatattcagatgatggt

SEQ ID NO: 100719 - DNA, 88 bp, Homo sapiens
agtttatctgttaagcttgaacaagctatgaagatccaaaaggtaattctggcacttggagactatatgggagccacttgtcatgcct

SEQ ID NO: 100720 - DNA, 75 bp, Homo sapiens
ggacattagttcaagtagcaactatatcaggagtccaacctataccttctcagggaggcaaactagaaatagctg

SEQ ID NO: 100721 - DNA, 82 bp, Homo sapiens
gtctttgctacgtacagcaaaaggtgttgacttcaaaatcaaaactgtagagctaagaggaaagaaaattagattacagatc

SEQ ID NO: 100722 - DNA, 101 bp, Homo sapiens
attgctgccatcaagaccaagaggaccatccagtttgtagactggtgtcccacaggcttcaaggtggagccgccaccaaaatgcagattttcgtgaaaacc

SEQ ID NO: 100723 - DNA, 100 bp, Homo sapiens
tcaccttaccttaaaccttttaagcaaggaaattgaactaagaaatggagagaagctgtacattggaatgcgtttacagtcattgtaatggaagcaaaat

SEQ ID NO: 100724 - DNA, 103 bp, Homo sapiens
cacgaagcctcccgggtggcttacagacgctgccagcatcgccgccgccagagacacctatggctgccgatgaaggctcagcagagaaacaggcaggagaggc

SEQ ID NO: 100725 - DNA, 96 bp, Homo sapiens
gccgtgctgctcttttcctggacagtgtatctttgggagaccttcctagcacagcggcaggttttgcagatgtgaatggttggcaccttcgtttcc

SEQ ID NO: 100726 - DNA, 96 bp, Homo sapiens
ggcgggagacgagaagcctgaaaagtcgcagcgagctggagccgccggaggcaaccacacctccaaatcaaggaaggccagattctcctgtctatg

SEQ ID NO: 100727 - DNA, 49 bp, Homo sapiens
accgaatagccagtggcgaagagccaacagtgaactgggtggtgcccgt

SEQ ID NO: 100728 - DNA, 82 bp, Homo sapiens
ctcgacgtcttgcctgtgtcccacttgttcgcggcctataggctgaaggggatgctaagggagataaagcaaaggtgaagga

SEQ ID NO: 100729 - DNA, 99 bp, Homo sapiens
cacgaattggagagcactcagtcccggctggacaatgtgatgaagaaacttgcaaaagtatctcatatgaccagtgggttcccttctggagaagagtca

SEQ ID NO: 100730 - DNA, 98 bp, Homo sapiens
ccgacatttctcttctaagagaagtagtaaaaccagctgcagtgttatcaaaggatcttttgccagaaatgagggcatactggcctgacgtaattcac

SEQ ID NO: 100731 - DNA, 90 bp, Homo sapiens
gactacggcaaagtggccactcaggggtacccgtgctccatctcatctccacgcccttccctgctgtctggcacacccctgcggacaccg

SEQ ID NO: 100732 - DNA, 90 bp, Homo sapiens
cgctggtgaccctgccgctggcgagcgccaccgcatggattagaagcccaggacccaggaaggagacacaggaaatttattcaaagtccc

SEQ ID NO: 100733 - DNA, 90 bp, Homo sapiens
gcccaggccaatccacgaaagcatcaagactctgaaacagcattatgggtttgtgctgtaccggacaacacttcctcaagattgcagcaa

SEQ ID NO: 100734 - DNA, 74 bp, Homo sapiens
tttgcaccataacttcctcagcttgagcagtttgttaaggaatgaggttacagacggagtttcgctcttgttgc

SEQ ID NO: 100735 - DNA, 74 bp, Homo sapiens
ggggaaactaggtcgatggtcggcggcgcccggatgggcagctgagggccgagatctggacgataaaattcagg

SEQ ID NO: 100736 - DNA, 75 bp, Homo sapiens
cttcaaagcaaaggttcagtatttccggttctggtgtcagatgcttgctctgtcaaggcacagcctattgtctcc

SEQ ID NO: 100737 - DNA, 100 bp, Homo sapiens
tcgagacatgtaagcagcatcatggaggttcatgtgaaatggattttggacactgatattttcaatgaatggatgaatgaggaggattatgaggtggatg

SEQ ID NO: 100738 - DNA, 50 bp, Homo sapiens
ctgcgaccgccgcggcgaagatggtatgaaaatgagtgcgaatgtcaact

SEQ ID NO: 100739 - DNA, 50 bp, Homo sapiens
gtcgcagagctgggagtgaccaagcgagatcgagatggtgatcatggagc

SEQ ID NO: 100740 - DNA, 83 bp, Homo sapiens
gtcaacacttggccctttaagaatgcaaccgaagcaggaactgtggctgcaccatctgtcttcatcttcccgccatctgatga

SEQ ID NO: 100741 - DNA, 83 bp, Homo sapiens
gctgggaacagtgaatggtgggccgcagcattggcatgatgggccaggggtcccacagggactttgaacatgtcggggatcgc

SEQ ID NO: 100742 - DNA, 75 bp, Homo sapiens
atgaaccgcgccgtgcaactgctcatcctggcctacgtcatcgggttcttcgtgaactttgtggttgggcaggat

SEQ ID NO: 100743 - DNA, 95 bp, Homo sapiens
gccgaagaagcatcgttaaagtctctcttcaccctgccgtcatgtctaagtcagaggagctcgaggccatgagcagatataccagcccagtgaac

SEQ ID NO: 100744 - DNA, 85 bp, Homo sapiens
ctgcgggaaatcgggctgaagcgactgagtccgcgatggagggtgactatgaccagagcaggaccaaagtgctgcacatgagcct

SEQ ID NO: 100745 - DNA, 100 bp, Homo sapiens
ccgcgtccgccgattcctcctccttggtcgccgcgtccttggctggcgtatgccgacaaaaggatcaaggtggcgaagcccgtggtggagatggatggtg

SEQ ID NO: 100746 - DNA, 73 bp, Homo sapiens
cctgttggaagctgcccgtgccaacaatatgcaagaagtcagcaggtttggaaggcgctttgagtccccgctg

SEQ ID NO: 100747 - DNA, 98 bp, Homo sapiens
aaattgctgtgctctcactttctgaaatggaacctcaggatcttgagctagagaccactctcatctccaggaaccagctctctgtgggccacacatga

SEQ ID NO: 100748 - DNA, 101 bp, Homo sapiens
gatctgacggggcgggacctggcgccaccttgcaggtgcagctaaatcaagtccagcagctaaaccaggatccacaccttctcgaccctcatcagccaaaa

SEQ ID NO: 100749 - DNA, 101 bp, Homo sapiens
cgggaggcgacagtgaaaccctttgccatcgacatatttcctgtcaccaacaaagatttcagactctgatgccagtatggactggagatgatgggagccag

SEQ ID NO: 100750 - DNA, 98 bp, Homo sapiens
ccgccccaggtacgctaggccgcggccttcgttcctcccagaaaggtgtccctggccagtgtccttccacctgtccacaagcatggggaacatcttcg

SEQ ID NO: 100751 - DNA, 100 bp, Homo sapiens
ggtgcacaggaaggatgaggaagaccaggctctgggggctgctgtggatgctctttgtctcaggtctttgatttgcgtcagtgtcatcgacagatgcagc

SEQ ID NO: 100752 - DNA, 127 bp, Homo sapiens
gcagagaactcggcgccgccaaacagcccagctcgcgcttcagcgtcccggcgccgtcgcgccactcctccgacagccagacccggtccgtttggaatgcctgggatggtgccgccgcatgttcctc

SEQ ID NO: 100753 - DNA, 82 bp, Homo sapiens
acctataggatcaccaccaaactaatgggaatgacagcaagaaatttaaacgagatagacctccctgttcgccttcccgtgt

SEQ ID NO: 100754 - DNA, 100 bp, Homo sapiens
gcattacccccgggaccattctgatcatcctcactggacgccacaggggcaaggaaaaaagggttgctcattttgggtatcactggagtctgatggaaag

SEQ ID NO: 100755 - DNA, 90 bp, Homo sapiens
gacattgaaggatttcagctaccagttacttttacgtgtgatggaaactatggtccaggaggcagtggaggaagtgggggttatggtggg

SEQ ID NO: 100756 - DNA, 82 bp, Homo sapiens
cttactggcagagatagaaactgacaaagccactatagagccaatggccaaaggccctgccaagaattcagaaccagaggag

SEQ ID NO: 100757 - DNA, 74 bp, Homo sapiens
gttagtggccagcatcctcctgctgcagagactctccaacatgtgccttctgaccatacaaatgaaacttccaa

SEQ ID NO: 100758 - DNA, 98 bp, Homo sapiens
ttctccatggccagtgaggaagtcttgaagaatagagccataaagaaagcaaagcgcagaaatgttggatttgaagaaatcatcgagttccccatcct

SEQ ID NO: 100759 - DNA, 90 bp, Homo sapiens
catgctcatggagtgctccatctgcaatgaaatcatccaccctggatgccttaagatgggacccaggtgagcccgggtgcccactactgc

SEQ ID NO: 100760 - DNA, 88 bp, Homo sapiens
aataccagcaaaggcaccgtgacaggccaagtgcaggggccagaagacaaagtcaattccatgttgtaaaggcatatgatcgtgtgga

SEQ ID NO: 100761 - DNA, 83 bp, Homo sapiens
ttgtctgcccctattgtaagtgcagatggaacacaacaggtggaaccgtcccaaaatgtcccttgctcagaagaaggatcggg

SEQ ID NO: 100762 - DNA, 100 bp, Homo sapiens
aactgtttccagtatatacatcaagtcactgagcttatgtccctgatgccaaaaatgcacctactctttcctctaactctggtgaggtcattctggagtg

SEQ ID NO: 100763 - DNA, 88 bp, Homo sapiens
acgggccacctccgcacagggcgccacggagaggtgtgtgttttggatctgcggaagtaaccacaaaatattatcgaaaaaagaaaag

SEQ ID NO: 100764 - DNA, 83 bp, Homo sapiens
gcggcacttctgcgcagcggcgcccgcagccgcagccccctgctccggaggctggtgcagaagtccccacgagaagaagaaga

SEQ ID NO: 100765 - DNA, 75 bp, Homo sapiens
ccagctccctacccatccgccaggagccctcttccttcaggtactccaaagattcaggtttactcacgtcatcca

SEQ ID NO: 100766 - DNA, 50 bp, Homo sapiens
caacaattgaggatgaagatgtgaaaggctggagtgcaatggcgcaatct

SEQ ID NO: 100767 - DNA, 75 bp, Homo sapiens
tgggagggcaacgagcacaacaggagctacgaggagttgggcgtctctggccgagcctctttttgtggaaaacga

SEQ ID NO: 100768 - DNA, 100 bp, Homo sapiens
ctggctgtgctgcgcgacccccgcgcatgacatgtcatgctgcccaaggacatagccaagctggtccctaaaacccatctgatgtctgaatctgaatgga

SEQ ID NO: 100769 - DNA, 80 bp, Homo sapiens
ctgacctcggtttcctggacccattccgactcagccatggcaatgacaggctcaacaccttgctcatccatgagtaacca

SEQ ID NO: 100770 - DNA, 75 bp, Homo sapiens
gcgacagcggcgagcagaactacggcgagcgggtaaaaatgcatttgcaaagggagaaaatgaaggccaaacaga

SEQ ID NO: 100771 - DNA, 100 bp, Homo sapiens
acatgcccatgcgagtacctgaggaaggcttcccagctggcgtgtatgttgtaaagagagttcttcagcttcagcgtcatcatattactctcaagatgac

SEQ ID NO: 100772 - DNA, 96 bp, Homo sapiens
ggccatctgatctataaatgcggtggcatcgacaaaagaaccattgaaaaatttgagaaggaggctgctgagactttccatttcaacacggttgaa

SEQ ID NO: 100773 - DNA, 100 bp, Homo sapiens
agcttgtagacagcttggatcctttctctgaaggaatcatgttcagaatatgacagatacctagcatctagcaaaataatggcagctgcttaccttgacc

SEQ ID NO: 100774 - DNA, 98 bp, Homo sapiens
gggggtggtgccgcgctcctggccccgcgcgggcggacggcggaggcgcctcccagactgttggtggtggtgctgtgcaggagagagcgcctgagctg

SEQ ID NO: 100775 - DNA, 90 bp, Homo sapiens
agcagagcatcctggaactgggatctctcctggcaaagactggacaagctgcagtttgaccctgggaacacaggctacattagcacaggc

SEQ ID NO: 100776 - DNA, 73 bp, Homo sapiens
ggcgcggggcacagcggcagccatatcgccgggttcctgcagagggaggtggtggcggtggaggacagcagcg

SEQ ID NO: 100777 - DNA, 98 bp, Homo sapiens
ccaatgcgctcaaaggcaaaaaggacaacgactgaaagacctttcattcagaagctgtttcgtcctgtggctgcagatggacagttgcacacactagg

SEQ ID NO: 100778 - DNA, 98 bp, Homo sapiens
tcaggtgctcgccccgcgtcggtgcttcaggagggaatgtggccagaacgagaaaggattttttatcaagcagaaatgcatcgaacaacgagaatcaa

SEQ ID NO: 100779 - DNA, 101 bp, Homo sapiens
gttaaggattccaagtaactcttatttgaaactggcgatggaatatgagaggagccctctggaaagaaaaggacagaccctgtgctttcatgaaagtgaag

SEQ ID NO: 100780 - DNA, 100 bp, Homo sapiens
cagcctcccgagtagctgggattataggtctggtgtggcagatgtggatagctggaccctcctgggtgcctctgcgttatgtcgtttggttgatgcattt

SEQ ID NO: 100781 - DNA, 89 bp, Homo sapiens
atttcagaactgttctcaggactcattattttaacatttgggagaaacacagccagaagatggcccactgcgtgaccttggttcagctg

SEQ ID NO: 100782 - DNA, 100 bp, Homo sapiens
ccctcattgaagatattttgggtgttaaaaaggcgggatgtagctcattttgggatacgagtctccatcgtggagcctggcttcttccgaacccctgtga

SEQ ID NO: 100783 - DNA, 75 bp, Homo sapiens
aatccaggtctccccggccctcctggagccaaattcacagaaccccaaagtccaagctcttcttgggatttccta

SEQ ID NO: 100784 - DNA, 100 bp, Homo sapiens
tgtcgaagtatacgagtaggaacactcttccggctgttaatagagcctgtaatttgtcagctgacaagatgtggcctgagaatgaaaaggcaagttcaca

SEQ ID NO: 100785 - DNA, 100 bp, Homo sapiens
gttccatgctgtctgttcagacttcagcttggtgatttccatttaaacagggttaatttggaagaatcttcaggagtggaaaactctccagctggtgcta

SEQ ID NO: 100786 - DNA, 83 bp, Homo sapiens
caaagagtcacctaaagttaggcggcactccagccccagctcggtgacagagttagtccttgataattgcctgtgtgtcaatg

SEQ ID NO: 100787 - DNA, 89 bp, Homo sapiens
cggccgcgcccaagcgcaggggctcctcgggctcagtggagcccttctgcctggcaaactatccatcagcctttcatagtgtcatgttt

SEQ ID NO: 100788 - DNA, 100 bp, Homo sapiens
agttactatggcagttgcaaaatattcaggagaccgtcgttgccttgtatttccagagaacagatcggcttcagctccccaggaatatgattgaaaacag

SEQ ID NO: 100789 - DNA, 100 bp, Homo sapiens
agatttgatgcctactgctttaaacttgcactaataccagctgcctcttatggaaggctggaaactgacaccaaactccttattcagccaaagacacgcc

SEQ ID NO: 100790 - DNA, 75 bp, Homo sapiens
cattccttgtggttggtgatccatttgggattttctgccgtctcttggcaaaaatggcaaataatgatgctgttc

SEQ ID NO: 100791 - DNA, 100 bp, Homo sapiens
gggacgccgccggccagcagagcgagtaagactttgaccccgacgcaggcttcagtgattgccgcggatcagaagcctgagcactttggctcgagacaat

SEQ ID NO: 100792 - DNA, 75 bp, Homo sapiens
ttctccggcctccctgctcttaccgggagcccaaaatggagttaatcctgactgggagaagaaagtaattgagta

SEQ ID NO: 100793 - DNA, 96 bp, Homo sapiens
ctggagagggccattcagcgcatggagaaaggagaacattccatcgtgtacctcaagcccagttcccttgccccaccctcagaccctgcagaagct

SEQ ID NO: 100794 - DNA, 100 bp, Homo sapiens
acacagagtgaacagaaaaagaggatacctctgcgatcccgggtcatctccagatgctagggttatgggttgtggtttctcgatcaggaccatcaacccc

SEQ ID NO: 100795 - DNA, 99 bp, Homo sapiens
atggatcattagaagacatccggacagagtttgacagggagatagaccggggatccctcaaccctggaaaacagctgttgggggccgtcccgctcctaa

SEQ ID NO: 100796 - DNA, 87 bp, Homo sapiens
aagcatttttatggacaacgaccacaggaatctggaattttattaaacatggttggatggcaagcatgtggtgtttggcaaagtgaa

SEQ ID NO: 100797 - DNA, 100 bp, Homo sapiens
ccatcttcggcatgtccttcgcctgccagtctcaccttcaggccattcagaggaggaaagagaggggaatatgaagtcagccaagccccaagtgaaccac

SEQ ID NO: 100798 - DNA, 106 bp, Homo sapiens
atgtgagaaaatctacaatttcttcgagacactcatataaagttccagtctcatcagattttccatgtcctggtggtggcagcagcctttgtccacttctatggag

SEQ ID NO: 100799 - DNA, 100 bp, Homo sapiens
gccgactctgggatgaactgatgaagacaaggccttccagtttggaagaaaacatttaaagttgatgatatgttatcaaaagtagagaaaatgaaaggag

SEQ ID NO: 100800 - DNA, 83 bp, Homo sapiens
cgcaaaccaaggatctggggatcttcgcactatcccaagaacactctgctccagccaaggtggtgagggcagctgttcctaaa

SEQ ID NO: 100801 - DNA, 75 bp, Homo sapiens
gctcagtctgcggccaagactccgtcctgcaaggagaacatgatcgtgtatgtggaaaagaaagtgctagaagac

SEQ ID NO: 100802 - DNA, 82 bp, Homo sapiens
atcagcaggctccgggctgaagattgcttctcttctctcctccaaggtttgagtacaagctcagcttcaaaggcccaaggct

SEQ ID NO: 100803 - DNA, 90 bp, Homo sapiens
tggaagacctggctggccatcaagtgctcgcccagcctgcacgtcgacgacagcaccagaaagtttgatgcaggcattggaagacttaga

SEQ ID NO: 100804 - DNA, 82 bp, Homo sapiens
gagaaaagccttttcagtgtgatgaaatttagaacgtccaacaccaaagtacacaaaagtaggggagcgtttacggcatgtc

SEQ ID NO: 100805 - DNA, 50 bp, Homo sapiens
catggaagagtttttaaaccagactcgggaagaggctctgtcgggattgg

SEQ ID NO: 100806 - DNA, 97 bp, Homo sapiens
tttgaaggagatactctgacctgtgccagtgcttcccatcgacggtcagtgcgcacgttgtaatcagctgaggccatgtcaggagacggagccacgg

SEQ ID NO: 100807 - DNA, 100 bp, Homo sapiens
gctgtggaaggcaatctttttgaaataaagaaacttcgagaactggaaggctatgataaggtgttggagcgggccggagagaagtagagtgggctgcgag

SEQ ID NO: 100808 - DNA, 82 bp, Homo sapiens
aatcaactacctaatgttatacaggctctggaaaaacatgaagagccctaatttgtttagaactgtaatatgcacagttaaa

SEQ ID NO: 100809 - DNA, 100 bp, Homo sapiens
agttaccagctttggctgctcgcgcctccccaactcggggcctacttggaagtgcaccagcaggagcaagagaaactccaggggcagataagggagtcca

SEQ ID NO: 100810 - DNA, 75 bp, Homo sapiens
agaaagcggaccttctggaactcatgccactctcagagcttcgcctcaacagcatcaagaagctgtccaccatcg

SEQ ID NO: 100811 - DNA, 51 bp, Homo sapiens
gttcagttggcaaaccagatatatgacttgacgtgaacttatgaattcaac

SEQ ID NO: 100812 - DNA, 75 bp, Homo sapiens
gaaaagactcaggacggacaagcacagtcttcggaagttggtgttggtattaggagatctgcacatcccacaccg

SEQ ID NO: 100813 - DNA, 75 bp, Homo sapiens
tggagaccagtctcacaaatctcatatgcagtccattattgacaaggttgcccccaagtttcctggcagtgtgtg

SEQ ID NO: 100814 - DNA, 75 bp, Homo sapiens
gcgagagatggtcaggtctggagctcgaccgggccaggtcagcccaaggccaaccccactgtcactctgttcccg

SEQ ID NO: 100815 - DNA, 73 bp, Homo sapiens
ttccctccagctctgtctatcctaccaagcttctcaataggtttggcatggacaagatctatgaaggccaagt

SEQ ID NO: 100816 - DNA, 136 bp, Homo sapiens
ggtctgctggtgggactcaatgttctcgatgccaatctctgcttgaaaggagaagacttggattctcagatttctttaaagactcgtgcagcacatcattatcgctggatgcccggacatgtaatacacctgacag

SEQ ID NO: 100817 - DNA, 82 bp, Homo sapiens
ctggagggcgagctgcatgatctgcggggccaggtggccaaggattccgttggtgaacctgtaaaaacaaaacaaacaaaac

SEQ ID NO: 100818 - DNA, 97 bp, Homo sapiens
gaacccgcccagcgctgctccatgatcctcgttagttgaatccatggacatgaaacccacagatatagagggttggcccggtgcagtggctcacgcc

SEQ ID NO: 100819 - DNA, 75 bp, Homo sapiens
cgcatcaacctctggcacctggccatcaccgacaggagcttcaggatcactgagattctgatgaacagaccttct

SEQ ID NO: 100820 - DNA, 100 bp, Homo sapiens
tcgtgtggcaggaagaactcagagccgggaagcccccattcactagaagcactgagagatgcggccccctcgcaggacaggggcaagtgtccgagtggtg

SEQ ID NO: 100821 - DNA, 75 bp, Homo sapiens
caaagaggtggtgcggaagatgatcagccaggcacagaagcaaattgtggctactaatttgccccctgaagatca

SEQ ID NO: 100822 - DNA, 100 bp, Homo sapiens
ggagcaccgcgaggctcacggcagggccctggcgccgggcagggcgagcctcggaagccgcctggaggctcttgtcaggatggtgaagctgttcatcgga

SEQ ID NO: 100823 - DNA, 83 bp, Homo sapiens
atttgactgagagaaacccactgaagacgtctgcgtgagaatagagaccaccgagttctccaaggagaagtacatcctggact

SEQ ID NO: 100824 - DNA, 101 bp, Homo sapiens
aacttggttccccctccctcagcttccgccccaaaagggtctcacttgtcacccaggctggagtgcagtggcacaaacatgggtcactgcagcctcgactc

SEQ ID NO: 100825 - DNA, 50 bp, Homo sapiens
agccattcatgcaatcttgagatcagagcacacgtcacatggagatgggc

SEQ ID NO: 100826 - DNA, 89 bp, Homo sapiens
agcccatggcagctccagcctctgcctcccagaaactcagttccgatgaagttaaattccgtcaagatttaatgaatattgcgggcaca

SEQ ID NO: 100827 - DNA, 75 bp, Homo sapiens
agaacaagccagatcttcatctcttccagtgtgatgaggttaaggaacaggagtacagctgtgtagtaaagatgc

SEQ ID NO: 100828 - DNA, 103 bp, Homo sapiens
gaggcttccccagccacatggaactgcatgagcctgtcctctgtgacgctggccagcgccctacaggtcaggggtgaagctctgtctgaggaggaaatctggt

SEQ ID NO: 100829 - DNA, 82 bp, Homo sapiens
caagaacgggaacaaaactctggttgaaatcacaaagattagacacctttttagataggtgttcttcagcaccactgacaac

SEQ ID NO: 100830 - DNA, 97 bp, Homo sapiens
aaagcaattaagagagctcaaacaatgggatttgctcgaatatttgggtacccagtaggtatcgttggaaacaacggagttctcttttctgaatctg

SEQ ID NO: 100831 - DNA, 98 bp, Homo sapiens
ggagacggcggcagcgctggactaggtggcagcctacagacctggtacctggatttttgcccgagatgattcctaccaccttactactgacgaagaca

SEQ ID NO: 100832 - DNA, 100 bp, Homo sapiens
gtaaaacactggactaatacatatgcactcctggtaacgtttttatccatggatgacttgcttgggtaaggacatgaagacagttcctgtcatacctttt

SEQ ID NO: 100833 - DNA, 100 bp, Homo sapiens
cagtttgaagcaacaccctagatggatgtacagccatcaagaggatcttaaagtgtggtctttagtggaaaaaaagaattctttgctgaactggataaag

SEQ ID NO: 100834 - DNA, 50 bp, Homo sapiens
ctcgcacagatatggaaaatcttgttcgatacaagaggctgttttcctag

SEQ ID NO: 100835 - DNA, 90 bp, Homo sapiens
ccagcatccgaccaccgaggctggagggggagaacacccagacaatgcagatcttcgtgaagactctgactggtaagaccatcaccctcg

SEQ ID NO: 100836 - DNA, 83 bp, Homo sapiens
cagcgtgtcagaccagttctatcgctacaagatgccccgtctgattgccaagtttgctgacctctctgaggctgccaaccgga

SEQ ID NO: 100837 - DNA, 100 bp, Homo sapiens
gtttcttacaaagtggaggtttgtggcagccctgcatggagcaagtctgtcagcaccatctttctaacagcatcagcaggactcagacctctcagcagcg

SEQ ID NO: 100838 - DNA, 100 bp, Homo sapiens
caatgacctccagtaagggagggcaagaagatatgaacctgagccttcagtcaagaccctccagcttgcctttagaacctggcccattagatgaaaccca

SEQ ID NO: 100839 - DNA, 83 bp, Homo sapiens
ggatttaaaagacagtcctcgtcagcactgactttcagctatggaatcggcctcaggcccaggcccaaggccaagtgagagag

SEQ ID NO: 100840 - DNA, 95 bp, Homo sapiens
cctgtcccgcccctctccccaagcgcgggcccggccagcggaagcccctgcgcccgcgccatgggtgattctgaagagggtctggaggagccttc

SEQ ID NO: 100841 - DNA, 90 bp, Homo sapiens
aatattcactgatgagcgacttcaaggagagattaaacagattctagaaaatgaacttcagatacctgtgtccaaaatgctgttaaaagg

SEQ ID NO: 100842 - DNA, 82 bp, Homo sapiens
ccgtgccctgtacgactaccaggcagttaccggtattgtaagaacaagccgtacccaaagtctcgcttctgccgaggtgtcc

SEQ ID NO: 100843 - DNA, 90 bp, Homo sapiens
caaaattaaggtggggaagaaggagacagaaacgaaatatggaatccgaattgataatctttcaagatatatttttgccatcatggatca

SEQ ID NO: 100844 - DNA, 78 bp, Homo sapiens
gcggggcaagtggctcggaacacaggacagtcattttgtttactcattcagccctgttgcaggtcccaataaactctt

SEQ ID NO: 100845 - DNA, 82 bp, Homo sapiens
gagacccttcgcgagcggctgctgagcgtgcagcaggatttcacctccgggttttaaaatcaaagatgggaaaatcggagaa

SEQ ID NO: 100846 - DNA, 90 bp, Homo sapiens
gtggtatggaagatcaaacaaacttgttgggcttctcgacggagagagctactgatgcaaatgtgaagaatgaaagtctttcatctgtgc

SEQ ID NO: 100847 - DNA, 60 bp, Homo sapiens
ctccactggaaaaaaagatcttgacaaaaccttcaactgtagaagttctagaaagtatag

SEQ ID NO: 100848 - DNA, 96 bp, Homo sapiens
ataaagaatggcccttgtggataagcacaaagtcaagagacagcgattggacagaatttgtgaagttgatgaaagttgtgaatgaaatgtgtccca

SEQ ID NO: 100849 - DNA, 97 bp, Homo sapiens
tgggggtccacactgcaatgtttttgtggaacatggttgtctgcattcaaaagagcattctattaaagctaccttaatttggcgcttatttttctta

SEQ ID NO: 100850 - DNA, 104 bp, Homo sapiens
ccaagctcctggccctggccctgatcatcctgctgggcttcgtccagatcgggaagggctttatcctgtggataaacgcagagtgaacgagtttggggagtcct

SEQ ID NO: 100851 - DNA, 96 bp, Homo sapiens
caggagctgaagcagcagaaccccaggctggtgtacggctggcgcttgtttgatgacagcacagtgacaacggtagacgagagccaggttgtgacg

SEQ ID NO: 100852 - DNA, 83 bp, Homo sapiens
atttcatagccatttattaccatgcttcaagagccattccttttggaacaatgtataaagtttggataaagcctggtgcagag

SEQ ID NO: 100853 - DNA, 82 bp, Homo sapiens
acaaatgttcatcgagtgattggcttcatccctccacccctcatcttcggggctggcatcgactccacctgcctgttctgga

SEQ ID NO: 100854 - DNA, 97 bp, Homo sapiens
tggaccccatcctcgtgctggaggaacagctagtgagacctgcaacgacttccacccgatgttcttcacccacgacagatcctttgaggagtttttc

SEQ ID NO: 100855 - DNA, 50 bp, Homo sapiens
gtatatgtccctcacactgtgtacagctggaggaaagcaggaatgttcag

SEQ ID NO: 100856 - DNA, 90 bp, Homo sapiens
aagctgcagaacatcaagtacccatctgctacaaataacacacctgccaaacagtctcttcaagaaaatgaggaggaggagattgggaac

SEQ ID NO: 100857 - DNA, 100 bp, Homo sapiens
tatgttgtaccttgtgacagaatatgccaaaaatggagaaatttttggtgtaatcctgagagattcacatggtgttgcacaagtacgttttgtgacaggc

SEQ ID NO: 100858 - DNA, 101 bp, Homo sapiens
gccagcaccttgggaagagaaagaaaatgccgaaggcactcagacagtggttagcaggaagaagatgagccttaagtctgaacgccgaggaattcatgtgg

SEQ ID NO: 100859 - DNA, 106 bp, Homo sapiens
aggacaattttctgtcttacttgttcacctcatcatgaagatttagtagccattggctatgctaagaaggaatctgatcttaatggcgcccagatcaagcttcgag

SEQ ID NO: 100860 - DNA, 101 bp, Homo sapiens
ctattcttctgcaggtggatcagaactgtgttcgcaattcttacgatgtcttctctttgctacgcttacagattgcagtggatcaaaggaaaatgcttcat

SEQ ID NO: 100861 - DNA, 75 bp, Homo sapiens
gctgggagagaggtacctctccttttccctctccctttccctaagacgcaagatggctgtcctctctaaggaata

SEQ ID NO: 100862 - DNA, 90 bp, Homo sapiens
atgtgattgcagccaagctggcttttatcattgtcatggagttacctagaaaagtacgagaaagttcatcattttggggaggatgatgat

SEQ ID NO: 100863 - DNA, 90 bp, Homo sapiens
gtctgcggactggagtccccggcaggcacagctcggccgtcgatcacctccgggcacaggatgcgaggatggaccccttcgaggacacgc

SEQ ID NO: 100864 - DNA, 100 bp, Homo sapiens
atgagcagcatgtcagaccagaccgtccgggtgaaggtacatcaggaacgtctctatcaagaatacaatttcagcaaggctgagggccatctgaaacaga

SEQ ID NO: 100865 - DNA, 82 bp, Homo sapiens
tggatataaggaaagttgttgccctgtttcttccaatacagtcaaaatccaagtccaaggaactgtggctgcaccatctgtc

SEQ ID NO: 100866 - DNA, 100 bp, Homo sapiens
ctgataagaaggggagtgcttaaggaattgcctgatcaaggacacattcagctaacgtattttagcaggtggagtgaggttgaagattcctgtgacagcg

SEQ ID NO: 100867 - DNA, 98 bp, Homo sapiens
aagtgaaatcagacccacaacgaatgaatgaacagccacgtcagttgaaaacaatcctcgaacaggaaatcttggtgcactaattaaggtcttccttt

SEQ ID NO: 100868 - DNA, 115 bp, Homo sapiens
gccgggctaggacgccgagcggtgactccccgccgctcccgggggccgtgacgtttgatgccgaccgcgatgaggatgaggtgttctatgacatcagcatggcagttgacaacaa

SEQ ID NO: 100869 - DNA, 100 bp, Homo sapiens
agacgcgggccttcgagcagctcatgaccgacctcaccctgtcgcgggtctcctctgagcctccggcctccataagacccaaaacagatgacacctcttc

SEQ ID NO: 100870 - DNA, 75 bp, Homo sapiens
ggccagacgtgcgaacagctccagctggggccatcgatgcacccctcggagctaatagcggagatgagaaacagt

SEQ ID NO: 100871 - DNA, 102 bp, Homo sapiens
atttgttaaggattccaagtaactcttatttgataagaccatcatcatgtggaaactgaccagggatgagaccaactatggaattccacagcgtgctctgcg

SEQ ID NO: 100872 - DNA, 147 bp, Homo sapiens
tttgtatccaagatagttgacagtgggcctgcagccaaggaaggaggcctgcaaattcatgacaggattattgaggcagcggaggaggaaatggcaggtcctaatcaactctgcattcgccgctggactaccaagcatgtagctgtg

SEQ ID NO: 100873 - DNA, 95 bp, Homo sapiens
gactccaaatgaaccgcagttggaattcatccttgagtcttttattcaaaacttcagcgttctctatagtcccttgaaaaggcatctcattggaa

SEQ ID NO: 100874 - DNA, 80 bp, Homo sapiens
agtggattatttggtcactgaggaagagatcaatcttaccagagggccctcagctaaagcctggagaaaagcctgttcca

SEQ ID NO: 100875 - DNA, 74 bp, Homo sapiens
aggagataaaggtggtagagttgtcatctttcaacaggagcaggagggagattccgggggccctgtgctgtgcc

SEQ ID NO: 100876 - DNA, 100 bp, Homo sapiens
tgacctggtagtatgcattgtaattggtgtgctgtattttgctattcatgtaagcacagtcttcacagtattgcagaacactggaactattttggggctg

SEQ ID NO: 100877 - DNA, 82 bp, Homo sapiens
atcgcccaagtccctctactcgcgaggtagcaatgtacagataaagagtactttaacgcccatgcgtgttcaagactgttca

SEQ ID NO: 100878 - DNA, 100 bp, Homo sapiens
tagaagatggctatttcagaataggttcggacaagtggacctccctagaaagaaaactgtttaacaaagcactagccacttacagcaaagactttatttt

SEQ ID NO: 100879 - DNA, 100 bp, Homo sapiens
ctcaagtttgcacgccacgtggagcccggcaatgccgccatccgggagaagctggcctgggccaaggatgatctgtctgctgtgcgtccggaccgcgtcc

SEQ ID NO: 100880 - DNA, 50 bp, Homo sapiens
gaactatagcaatctggttttcttgggatatccaaattatctcataagga

SEQ ID NO: 100881 - DNA, 95 bp, Homo sapiens
cacatggcttctgacagggaaggaaccaagattcaactggcagtttcccacatgggtgtactcgtgttccaggtgcaacagatgggattggaaaa

SEQ ID NO: 100882 - DNA, 100 bp, Homo sapiens
aagacacaaggaaataagcaaatgctttgcacgtgcctgggcaacggagtcagctgccaagagacagctccagtgtgctgctctgctcgttacaacttag

SEQ ID NO: 100883 - DNA, 100 bp, Homo sapiens
ttttgaacggcttacgaaaatttgtgcaacacatcaagagttaaacccatccagagtaatggctgcggccttacccaggaccctgggggagttgcagctg

SEQ ID NO: 100884 - DNA, 98 bp, Homo sapiens
aggcaccttcgggccctcctgccttcgcagcaattccatttccgtgagggcgtttctagatgaagatgacatgagcttggaagaaataaaaaatcggc

SEQ ID NO: 100885 - DNA, 98 bp, Homo sapiens
agagatgtttctctgaaaattgcagaaaaggctcttcgtcagattgggcagaggacgataagcactgcttcccgcaggcattttaaaaataaagttcc

SEQ ID NO: 100886 - DNA, 87 bp, Homo sapiens
agactcgaaggcagcacaggacctggaaaaattacatatgaacacaatgacgtacagaagaaaacctttaccaaatggataaatgct

SEQ ID NO: 100887 - DNA, 83 bp, Homo sapiens
aaatagatctctcggctctgaggtatttgataggtacaagagttacagcccttatgacatgttggaaagcatcaggaaagagg

SEQ ID NO: 100888 - DNA, 82 bp, Homo sapiens
tgtctgcaggaccaacctctcctctggatgctctagctatccagtcagttcgctgctattcccatgggtcacaggagacaga

SEQ ID NO: 100889 - DNA, 50 bp, Homo sapiens
cttgaggggacagtggagaagcaggaggcaggcccccagcccctcatgtc

SEQ ID NO: 100890 - DNA, 100 bp, Homo sapiens
ctgctgcaggcgtcctgcctgctttccctgctcctggccggcttcgtctcgcagagccggggacaagagaagtcgaagcgagtccctgtggcccatcgag

SEQ ID NO: 100891 - DNA, 100 bp, Homo sapiens
gagctgcagtcggcactgctactgcgaagacagctggcagggattgtcaatgaggcagatcagattccgatttgacgggcaaccaatcaatgaaacagac

SEQ ID NO: 100892 - DNA, 100 bp, Homo sapiens
ttggagaacttctggagctggccaacgtgcaggagaacattactactggatggaaatccattccgagttcctcgagcagccatattaatgaaaggaacag

SEQ ID NO: 100893 - DNA, 100 bp, Homo sapiens
cgcagcgccatggcccccattggcctcaaagctgttgtcggagagagtgctgttgtcaagaccaatgccaatgcagagaagacagatgaagaagagaaag

SEQ ID NO: 100894 - DNA, 100 bp, Homo sapiens
actgcagcaactttgacaaaactggaagaatttcgcagtaagacagcaacagatcccacagccaacaaagattctggccaagagtcagagtctattccag

SEQ ID NO: 100895 - DNA, 83 bp, Homo sapiens
atctctagcaacaggtcacacattgtcaaactacctctcagcaggtctgtagatggacggcagatccgagtagaccaggcagg

SEQ ID NO: 100896 - DNA, 75 bp, Homo sapiens
ccgctgcgggcccgctccgacgcggaagtattccagtaccagtacccggagagaacatgtcaaagttaaaaccag

SEQ ID NO: 100897 - DNA, 100 bp, Homo sapiens
tggagttccacttctccccgcagacctagattctcacctgctacacacccctcagagggactggaggagaactactgcaggaatccagacaacgatccgc

SEQ ID NO: 100898 - DNA, 75 bp, Homo sapiens
tcacttccagtggagacagggacagcgacttccttgcagcctcttctccggtgtactaatggtcacttgatgtgc

SEQ ID NO: 100899 - DNA, 100 bp, Homo sapiens
gacatcttcatttacagagcaacttgatgaaggtacacccaatagagaggtggactatcatctccgaacactcctaagaaatggaagatagtctcttaag

SEQ ID NO: 100900 - DNA, 75 bp, Homo sapiens
cggagcccccagcgcagcggccgcgtcaggtagcattggtgctgcagatagtcctgagaactgggagaaagtctg

SEQ ID NO: 100901 - DNA, 75 bp, Homo sapiens
cttacctcagagattatatgccttacctcgctgaatcatcacagccctaggagatgtgtatggactcagaaaaac

SEQ ID NO: 100902 - DNA, 100 bp, Homo sapiens
gtaatgttattgaagctgtttatagtagactgaatccacatagagaaagtgatggggaacatcatttacagcgagcaatttcagcacagcaagtgtttag

SEQ ID NO: 100903 - DNA, 80 bp, Homo sapiens
gacgccgacgaaagccagcgagctcctcagcctcaggtgagaagccctaccactgcaactgggacggctgcggctggaag

SEQ ID NO: 100904 - DNA, 90 bp, Homo sapiens
cacctcctgtgagcagtgggaaaaatggaccaacttctttggcaagtggacattttactggctcaaggtttttggagtctctggatgatt

SEQ ID NO: 100905 - DNA, 100 bp, Homo sapiens
gacagccttcatttctctgaacatactgccttatgggacagatcaagccaaacgtaccaagaaagtcgggatcgtcggtaaatacgggacccgctatggg

SEQ ID NO: 100906 - DNA, 73 bp, Homo sapiens
agaggtagccatgatgccccacttggtgaatggagatgcagctcagcaggtatggcgttgacggtggatgtgg

SEQ ID NO: 100907 - DNA, 83 bp, Homo sapiens
cccagtcgacccatgttctcctttctacaccagcattagacttttaagacaattatctcctatattgatgagcaatttgagag

SEQ ID NO: 100908 - DNA, 88 bp, Homo sapiens
gcagaagacttcatcctcccagacactacagaggaaatggaggcacgacttgcagcgttgcagggcagagttctaccttctcaaaccc

SEQ ID NO: 100909 - DNA, 100 bp, Homo sapiens
tcctggagagagaaggaagattatcatccctccattcctggcctatggcgagaaaggctatggcttatttgcaacaagttcaagatctggtcattttaga

SEQ ID NO: 100910 - DNA, 75 bp, Homo sapiens
tggattctagaggggtgacagcgaaacgtgccatgtttcagaacagagtaagacccctggtaaagaagaactgaa

SEQ ID NO: 100911 - DNA, 82 bp, Homo sapiens
ctgttttctgccggctgtaaagtcatcacctcctgggatcagatgtgcattgagattcaggcttcttcaggagaaagcaagt

SEQ ID NO: 100912 - DNA, 82 bp, Homo sapiens
gctccagcaccctcttcttcgtgttcacgtgagaagccctaccactgcaactgggacggctgcggctggaagtttgcgcgct

SEQ ID NO: 100913 - DNA, 75 bp, Homo sapiens
atcgaggcatgggggtccacactgcaatgtttttgtggaacatggaatcccgttctgcttccagaagtggaagtg

SEQ ID NO: 100914 - DNA, 75 bp, Homo sapiens
gatgaagatgatgatgaattgggtagagagaccaaagatcttgatgagctcctacagaagaagggaaaaaagagc

SEQ ID NO: 100915 - DNA, 75 bp, Homo sapiens
cgccgcctccaaggaccccacggtcagtcaggagatcctagagctattaaatactacaacagccaaggaacaatc

SEQ ID NO: 100916 - DNA, 104 bp, Homo sapiens
ctatttcttgtggatattatggctaataacacaacaagtttagggagtccatggccagaaaacttttgggcttgtcaaaattcccaaaaatgatcccctcaatg

SEQ ID NO: 100917 - DNA, 123 bp, Homo sapiens
gccgtgccacctgctgcacccacgaatctgcccacccctcctgtaacccagcctgtttcacttcttggtagtgggcagcagtcagtgacaggtgtaacctctgtggatgacagcaacagttac

SEQ ID NO: 100918 - DNA, 75 bp, Homo sapiens
aaggattccaagtaactcttatttggatgcatcatctgcagacatcagaaaagcatatcgtaagctttcactaac

SEQ ID NO: 100919 - DNA, 74 bp, Homo sapiens
ggggttttcttggctctcgtcgcaccgggggtcctcggtaagaatgattgatgttggctgatattggagtgctc

SEQ ID NO: 100920 - DNA, 83 bp, Homo sapiens
aactagccaaggaaaaaaagcagagaggagcggggagcaatgcagatgctgcctggaaacattggccagaaagtaacactgag

SEQ ID NO: 100921 - DNA, 100 bp, Homo sapiens
aacccaccaagccccgctaggagccacctagactggatgcagagcatgtggaagccccttcaaagccagccaggactagtgaaccacagctcaaaaggca

SEQ ID NO: 100922 - DNA, 90 bp, Homo sapiens
cattgttagtgaacgtggacaaagctgttgtctcagggagcacagaaatctaattatcatggacctgcgacagtttcttatgtgcctgtc

SEQ ID NO: 100923 - DNA, 98 bp, Homo sapiens
atcaacaatgagtacaactaccgctgctggaccacaaaccgctgccagaaaaatgccccttggtgtggccactgcaaggctctggcccctgagtatgc

SEQ ID NO: 100924 - DNA, 90 bp, Homo sapiens
atgctgttatcaagggcagacctagcaaattgcgtcagagcaatcctgaattttgtcccgagaaggctttggaagtgataaagcagttaa

SEQ ID NO: 100925 - DNA, 100 bp, Homo sapiens
acatgtgcccttgttttcagatcgcagctttgcccagttttcccaggaatacgagaaggccttaaagtacgtccgcgggttgctgcagacagagccccag

SEQ ID NO: 100926 - DNA, 75 bp, Homo sapiens
caccgtcttcgaccactacgcaggatcatccttccttgtgggttagcaggcagttataagattgcaaaatgggtc

SEQ ID NO: 100927 - DNA, 82 bp, Homo sapiens
agaacggagcttgaagcaaagctgcaggttttaaagtctgcagatctccaggggagcccaccagcctagtcaacatggcctc

SEQ ID NO: 100928 - DNA, 75 bp, Homo sapiens
ctccaggccaagagggatccttcacccgtgtctgggtttgccttcccggattgggcctacaagccagagtcgtcc

SEQ ID NO: 100929 - DNA, 75 bp, Homo sapiens
ctccagtactggggatttgccaaaagatgatgattattctccaccgtctaagagaccaaaggccaatgagctacc

SEQ ID NO: 100930 - DNA, 50 bp, Homo sapiens
ctttgcctttatggagaaaaaggtgcatcatttctggcatggcttcagga

SEQ ID NO: 100931 - DNA, 100 bp, Homo sapiens
ctgcggcgcgctgctggacgaagagctctcctccttcttcctcaactatctcgctgacacgcagatttggtcgtattgggcgcctggtcaccagggctgc

SEQ ID NO: 100932 - DNA, 100 bp, Homo sapiens
ggggaccttgccttgcccgggtttgcccagtatgcggagatcgtccacttcaccctcccagatgggactcagaggagcgggcaggtgcttgaggtggctg

SEQ ID NO: 100933 - DNA, 73 bp, Homo sapiens
attttttaaccctagatctcgggccatgtgaaactttctgactttggtctttgcacaggactgaaaaaagcac

SEQ ID NO: 100934 - DNA, 50 bp, Homo sapiens
aagaagtacaatagcattcgcggtactccaaagattcaggtttactcacg

SEQ ID NO: 100935 - DNA, 100 bp, Homo sapiens
gcgccggtcgcggctgtgtcggtcgccgctgctcccgctcctgctgggagaggtggacagaggactgcagaaaatcaacctatcctccttcaggaccaac

SEQ ID NO: 100936 - DNA, 76 bp, Homo sapiens
gagaccttgagggatatctttcttcactcctcttcacttcttcagtatcactggacaggccatggctccacggtcc

SEQ ID NO: 100937 - DNA, 51 bp, Homo sapiens
ctcaggagagagcagccagagtgctggatccagaacgaagtttatttgacc

SEQ ID NO: 100938 - DNA, 99 bp, Homo sapiens
agagagcagtatgggcttggcccctatgaagcagtaacacctcttacaaaggcagcagatatcagcttagatatccccaaggctcctggcaaaatcatc

SEQ ID NO: 100939 - DNA, 90 bp, Homo sapiens
ctcagatcaatatatacaataggtcttgggcctacattaatacttcttggtgcagctaatgtgtcccgacccaggctaagcttgagcatg

SEQ ID NO: 100940 - DNA, 75 bp, Homo sapiens
tccaaggccgtcgccgaccgctacgctgtctactggaacagcagcaaccccagaattaaagctatagagagtccc

SEQ ID NO: 100941 - DNA, 51 bp, Homo sapiens
tagaggcggaggctcaggcagcttgagggggaagcgagtagcattatctga

SEQ ID NO: 100942 - DNA, 80 bp, Homo sapiens
gctacgagctggctttaatcctgaaagccatgcagcgggtcttcatctgcggcccctcccctcactggctcttggtgacc

SEQ ID NO: 100943 - DNA, 90 bp, Homo sapiens
aagaaagcagtgatgaaattcttgtgcgtctaacatctgcgaaaacgttgtgtgacgtgatcctcatggtccaggaaagaaagatacctg

SEQ ID NO: 100944 - DNA, 105 bp, Homo sapiens
ggcgccagcctgcgaaggtggcggcgctgctgctcgggctgctcttggaggtttttagaacttcagccataaaaatgggcagaattttccttgatcatatcggtg

SEQ ID NO: 100945 - DNA, 100 bp, Homo sapiens
ggacatctttgatatgttttttggaggaggaggaaggatgcagagagaaaggagaggaaacatctttacacagcagccaagttactacagtgacctggat

SEQ ID NO: 100946 - DNA, 103 bp, Homo sapiens
ttcaggccagaccctctgggagcttctcagccattttccacagatcaggtacggacattgctgcaggagaagaggttgccatcaagcttgaatgtgtcaaaac

SEQ ID NO: 100947 - DNA, 80 bp, Homo sapiens
gcttcacgccctggatccaggcccacgggggctggttaagtgggcagaccaacatccacctcagcaaaaacttcttcctg

SEQ ID NO: 100948 - DNA, 100 bp, Homo sapiens
agtggacacacagcatggagaaatccttcgcaatgtcaccatcctacgagcgcgagcccagcattgacctgctgcaggccttcgtggagcactggaaggg

SEQ ID NO: 100949 - DNA, 100 bp, Homo sapiens
tgtgtgagagccacgtgtgccgcgctctgggcacagccttggaaagtcaggaccgcgacggcagcagagcaatctgttgtcaccgaaggtcattacaaga

SEQ ID NO: 100950 - DNA, 111 bp, Homo sapiens
gctacttgaaggaaattttgccaaagaagtgagccatgaaatggatggacttatttttcagcctactggactttccagagtgttgaatcttccaccagaaaacttgatcac

SEQ ID NO: 100951 - DNA, 119 bp, Homo sapiens
cctatccagctccttacttggatgaatatggagaaacagaccctggcctgaagtggtttttccccatcatcggccacatgggcatctgcacatccacaggagtcattcgggacttcgcg

SEQ ID NO: 100952 - DNA, 100 bp, Homo sapiens
ggggattccactctccagtgtaatgattattgacaacaggttgcaaattcgtgaagaatcagcatcatgtttggcagctgagtattggagccaggagcct

SEQ ID NO: 100953 - DNA, 75 bp, Homo sapiens
ggaggctggctgcatcatgggagaagagatcacagaactgtgtggtgcaaagcgggttggttattttggtccaac

SEQ ID NO: 100954 - DNA, 98 bp, Homo sapiens
tcctccccagcatgtcagcatgaccaagcgcctctactacctctggatgtgttctggcctataggaacaagacattttcagtaatggaagaaggagct

SEQ ID NO: 100955 - DNA, 100 bp, Homo sapiens
aagaaaacgagcgcgagagggggaaaagcgagcgatcgagcgagcgcgcgcgcgaaaactccgggcaggtgtcatggagaaactccagctgggcccagag

SEQ ID NO: 100956 - DNA, 101 bp, Homo sapiens
aagaaagacaaaaacgcaggaccattgagagctactgtcaggatgtcctaagacgccaggaggagtttgagcataagattatcaagaatgatctgtgggtt

SEQ ID NO: 100957 - DNA, 88 bp, Homo sapiens
gacaagtcggcgccccagagcggacgaggtctgtctgacacttactgccaaacgcatggcaaggaaaaactgcttagtgaagaactta

SEQ ID NO: 100958 - DNA, 75 bp, Homo sapiens
ctactgtactggctattggaaggaggagattctgaagataaggagtgagaaggcaaccaaagtgcaggacatcaa

SEQ ID NO: 100959 - DNA, 100 bp, Homo sapiens
ggaaggcgtccgttggccttcgtacccgtcttgattgaggtcatttcatgggcaacaacacagtgctggatgttttgcggcgtgaaggctatgaggtaga

SEQ ID NO: 100960 - DNA, 82 bp, Homo sapiens
ccctcacttactccaggatgaggggcatggtggcaattctcatcggaacctagaaagattgtacaatgaatggtgattctcg

SEQ ID NO: 100961 - DNA, 90 bp, Homo sapiens
aaggttcaaaagctggtattgaacaagaaggatattggttgccaggagatgagattaacattctagtatgccagtagaaaaaaatatcac

SEQ ID NO: 100962 - DNA, 99 bp, Homo sapiens
cttggcctggtgggcccagtcctcggtgcggcgcggccaggaagccaaattggcagagaatgcttgtaccctggctgacctgacagagggtcaggttgg

SEQ ID NO: 100963 - DNA, 100 bp, Homo sapiens
ctttgcctttttattggagaacttaatccacttacgttcagggttatcattcatagttaactgcctgtatccatggatcagctgctcttctatacccaat

SEQ ID NO: 100964 - DNA, 101 bp, Homo sapiens
ctgcaggagcagatccggagcctggaggaagagaaggcagctgtgactgaggcagtgcgggccctgctggtgacaaccagggcatccccatcatgtccagc

SEQ ID NO: 100965 - DNA, 83 bp, Homo sapiens
taaaactccagcgagatccgggccgtgaacgaaagcagtgacggaggagcttgtaccaccgtttttgaaatcatgaatcctgt

SEQ ID NO: 100966 - DNA, 100 bp, Homo sapiens
tctatattcagaaaagttgaaacagactggcacatggtgatagaaatgggacttctgaaaatggacaatgcttacaagtttcccaatctccgctgccggg

SEQ ID NO: 100967 - DNA, 90 bp, Homo sapiens
tggcagcgttttatagactagcagatctctttgggtggtctcagcttatctacaatcatatcacatgttctaagaacggaagcatctggg

SEQ ID NO: 100968 - DNA, 100 bp, Homo sapiens
gtgtgaagagaccaccaaacaggctttgtgccgagacgcatccagagctttcgtgaccggggactgttctgaagcaggcctcgtggatgacgtatccgac

SEQ ID NO: 100969 - DNA, 75 bp, Homo sapiens
aaggtgtgcaggtgcctgccggggcagaggccatcccagagcccgtggtgaggcaaaagtcaacaactctagctt

SEQ ID NO: 100970 - DNA, 50 bp, Homo sapiens
ctctgcccctggaggagaaatagaaggcctctccttccgatgaaaagaga

SEQ ID NO: 100971 - DNA, 83 bp, Homo sapiens
cttagctgtgctcgcgctactctctctttctggcctggaggctatccagctgcctacaccaactaatgttacaattgaatcct

SEQ ID NO: 100972 - DNA, 83 bp, Homo sapiens
gggtaccctgggtccattttcacctggaacaagcggagtggcctgcagggtgcggaggcagcaaatgttacaggtcctggtgg

SEQ ID NO: 100973 - DNA, 98 bp, Homo sapiens
ctccaagttgggggctcagaggggagtcatcatgagcgatgttaccattgtgaaagaaggttgggttcagaagagggaattaaacaaccaccatgtcg

SEQ ID NO: 100974 - DNA, 90 bp, Homo sapiens
tggaattttgccgatttcatgactaaccagtataacaacgaacttgatgcaagtgataggtttgccaaggtcagacctctcatcatccgg

SEQ ID NO: 100975 - DNA, 75 bp, Homo sapiens
ccgaggagtgcaggcgcttcaccacagacgaatcttgtggaagaagaatgaagttgctgattatgaagctacaac

SEQ ID NO: 100976 - DNA, 82 bp, Homo sapiens
ccagatggcgtcttccgtgggcaacgtggccgacagcacagataacgaaggaggcccaacttcattcaataaggagcctgac

SEQ ID NO: 100977 - DNA, 100 bp, Homo sapiens
ggactgctctatccagcatcattgagaatgtttctccatcccagagagatgaagtaattcaatggctggccaaactcaagtaccaattcaacctttaccc

SEQ ID NO: 100978 - DNA, 99 bp, Homo sapiens
gaagttacttattcttttaagaggtctgcctggttctgggaaaacaacattgtctcggcaacatcagatgctgacctgaaagaacatatggttggaatc

SEQ ID NO: 100979 - DNA, 50 bp, Homo sapiens
agcgggagaagcggggtcaaatatctcccggggccaattcagcatctcta

SEQ ID NO: 100980 - DNA, 83 bp, Homo sapiens
cctcgctggagatcgagtaccaaatatttcagcagttgaatcagttgaattcacttcatcaagaaactatcatgaaatgcgtg

SEQ ID NO: 100981 - DNA, 80 bp, Homo sapiens
gggtgatgcagaggggcctgggcctcctgcgccaggccgggactgtcacttggtgatacagctctgcagaacctggagca

SEQ ID NO: 100982 - DNA, 100 bp, Homo sapiens
cgaatcccggtgttggagtgtgctgcctcctggcttcaggccctccacgcccttcaggaggagcaggccagactcaagatgaggctgtgggacctgcagc

SEQ ID NO: 100983 - DNA, 50 bp, Homo sapiens
ggaaatgtgtcatcgaaagccagggatgaagatgcccctgctaagattcc

SEQ ID NO: 100984 - DNA, 117 bp, Homo sapiens
cgacgagctcagcaacatcgctatgcaggtgcggaagctggtgggcactcagcaccctctgcttaccacagccaggaagctgcagtaaaggaagatgaagaagaagtttcagataag

SEQ ID NO: 100985 - DNA, 100 bp, Homo sapiens
aaacagcaagcggcgtggacgaccgttgctgagctggtgtggaacgtctgtgatcaggtgcagtagacattgttgcaatcatgatcggcaatctgaaagg

SEQ ID NO: 100986 - DNA, 82 bp, Homo sapiens
ggagactagcgctccggagcacgggcacgacgggggcaccttctcggctgctagcttgggcactgtttaaaggaaagttccg

SEQ ID NO: 100987 - DNA, 100 bp, Homo sapiens
tttgaaatctgtcgtgaacttgccctcctggagcctgagtttatcctcaagttctggatgcgggtacccttggtggcaccagaggacctgagagatgata

SEQ ID NO: 100988 - DNA, 75 bp, Homo sapiens
cgggagcaggagctgggcctaggtctgcgccctgggggggccctcagcctcttggccttgaacgggctgttcatc

SEQ ID NO: 100989 - DNA, 83 bp, Homo sapiens
caggaattgagagtcacagaggaaggacagtggagtctggcatcttattgtgatgcggctgactaagcctactttattcacca

SEQ ID NO: 100990 - DNA, 100 bp, Homo sapiens
tctcacctccctaaactggttaatagtggcatggaagatccatttggaggaattttgttgtcagagaataaaaggaggttgtccataattgactttaagc

SEQ ID NO: 100991 - DNA, 75 bp, Homo sapiens
cacggacgagaactggagagaactgctggaaggagactggatgatagaattactatatgtcggaaaccaaagacc

SEQ ID NO: 100992 - DNA, 95 bp, Homo sapiens
agaaccagccgactggagcaggcagcagcccagccctaccacttatgtcttggatgaagatgaacctcgattccttgaagaagttgattacagtg

SEQ ID NO: 100993 - DNA, 90 bp, Homo sapiens
ggagactcagaatcgaatctcttctccctccccttcttggtatttctggtggtcgcattcatatgtcagttttaggaaggcttgggacat

SEQ ID NO: 100994 - DNA, 90 bp, Homo sapiens
gctggttccggctgcagcccgaccagtccaagagccggcggcatgacgacaccacaccccactctggccggagcacgccaagcagctccc

SEQ ID NO: 100995 - DNA, 51 bp, Homo sapiens
aagtccgggagctgggcggccatttaccagattctggaaaccaaaatggag

SEQ ID NO: 100996 - DNA, 102 bp, Homo sapiens
agaaggccatcaccacgcagaacgtcaacaccaagtgcatcaccatccccaggtactccaaagattcaggtttactcacgtcatccagcagagaatggaaag

SEQ ID NO: 100997 - DNA, 100 bp, Homo sapiens
atccagctctaaactttatttcctcccagaagacactccccagggcagaaatagcgaccatggcgagaaaaagcttgtggtgaaggggggcaaaaaaaag

SEQ ID NO: 100998 - DNA, 83 bp, Homo sapiens
ggatcctggtggctatttcattattaatggatcagaaaagttggctggatctattattggcaaaggtggtcagcggattaaac

SEQ ID NO: 100999 - DNA, 82 bp, Homo sapiens
aaatgaagctagaggacttcatcaagaacctccgaggtggatccataaagaacccagccaacccgcagagggaggggagggg

SEQ ID NO: 101000 - DNA, 100 bp, Homo sapiens
gtttggaggaaagatgagacgacttctgaatgaacagtgaatctattactgaggaaaaccagaggaagcctgtgtagataggtatcaattagataccagc

SEQ ID NO: 101001 - DNA, 75 bp, Homo sapiens
ttcagcttgagccccatcactagagccaagattttcttcttcactcctcgcttggtggctcccagccagaggccg

SEQ ID NO: 101002 - DNA, 75 bp, Homo sapiens
acagatttgagtttgacacccaaaactggaatgtctgatcacagatacggggatggtggctctactttccagagc

SEQ ID NO: 101003 - DNA, 100 bp, Homo sapiens
gcgactgtgtcttcatcaagtcccatggcctggtgcgtcctcgtgtgggcagttgtcactcagcccagtccatcagtttctcagcccagtacttctcaga

SEQ ID NO: 101004 - DNA, 98 bp, Homo sapiens
gcatgtttgcgaggaagccgccgggcgccgcgcctttggatcatgatgctgccgccaccgccgccaccacggagcgagaagcccagatagacgccccg

SEQ ID NO: 101005 - DNA, 100 bp, Homo sapiens
agacgacaagcacacactatggcgctgaaacggattaataagaatgaagaaggagccccacaggaaggaattctggaagatatgcctgtggatcctgaca

SEQ ID NO: 101006 - DNA, 74 bp, Homo sapiens
cttatacgtatgataatctggctcctaggaattcctcctgatcagcagagactgatctttgctggcaagcagct

SEQ ID NO: 101007 - DNA, 83 bp, Homo sapiens
agacgctaaacgtgccctactctgccccgggggagagcatcaagatggtgctcatgtggaccagtggtgacgccttcaagacg

SEQ ID NO: 101008 - DNA, 101 bp, Homo sapiens
ctaatgtctacctcgaatcaaaggggttcaactagatatagcttcacaatctctggatcaagaaattttattaaaagttaaaactgaaattgaagaagagc

SEQ ID NO: 101009 - DNA, 73 bp, Homo sapiens
cagtacacagacgagcatggggaagggttgctcctggacgccaccaacaactttagctatgttttctacatgt

SEQ ID NO: 101010 - DNA, 101 bp, Homo sapiens
ctgcatctgccaacaagactggaagcagatctcagtgaccagctgctggaggtggtcggcttggaaggagccatggagatggggcaaatatacacaggcct

SEQ ID NO: 101011 - DNA, 98 bp, Homo sapiens
gcccgtcggacggggaggaggagcaggagctggaggaggagccgccgccgccaggacgagattgaggagctgcgggccgagatgctggagatgcggga

SEQ ID NO: 101012 - DNA, 100 bp, Homo sapiens
agcctctgtcgcgccgtgacctgtacaggtcgcgggagtcgtagggaggacgccgggacacctggaagccgagaaatgaaactggcgatggaatatgaga

SEQ ID NO: 101013 - DNA, 75 bp, Homo sapiens
tgtaatgtctgtgaggagagagcaaggcagttcttcaggggagttacccagataatatcactcctgacactgaag

SEQ ID NO: 101014 - DNA, 90 bp, Homo sapiens
gcctccagggccctgcgccttgctccttttgtctaccttcttctgatccagacagtgctctgccctacctaaccttgccctttggagcag

SEQ ID NO: 101015 - DNA, 74 bp, Homo sapiens
ctttgctcttccatccgcctttgatcgtcttcctcttcagccatccagcctcctgacaaggtgatccgggcggg

SEQ ID NO: 101016 - DNA, 50 bp, Homo sapiens
cgaagaagcttcgaggatctggtggagtacatcctgctgcttcaagggta

SEQ ID NO: 101017 - DNA, 98 bp, Homo sapiens
attccagaatgatgaaattgtactactgtcagaggatgtaggaatggacatcccctttgaagagggcgtgctgagtcccagtgctgcagacatgaggc

SEQ ID NO: 101018 - DNA, 98 bp, Homo sapiens
cggagatctctctcatctcgctcggctgcgggaaatcgggctgaagcgactgagtccgcgatggaggccactgtggctgtccccgttccaggtggtgg

SEQ ID NO: 101019 - DNA, 100 bp, Homo sapiens
agtgggttcgttgtatttgtgacatctgtgggtttaatccaacagaagaagtggtgaactatgacaatgtagtggacacaggttctgaaacagatgagga

SEQ ID NO: 101020 - DNA, 76 bp, Homo sapiens
atgaaaaccaagaaggagattttgaagatgcagatacccagattagcctgaggcctgctcagtcgttcctaatgaa

SEQ ID NO: 101021 - DNA, 87 bp, Homo sapiens
aggaagaccgtgatgggagctgcagcacagtcgggggtgtaggttatggggagaccatgaaccaggcatctcctgctagaaagctgg

SEQ ID NO: 101022 - DNA, 95 bp, Homo sapiens
agtgatgaggaaagctgtgaaagttctcaagatccctgcatgtcactgagtccaccatgctttacagaagaagacagatttagtctggaagctct

SEQ ID NO: 101023 - DNA, 100 bp, Homo sapiens
ggcgggaggaacgctcactgtcagcgcctggaaacttgctcacgacggggaggtttactgcatcgacgcgcggttctacgggaacgtcagccggttcatc

SEQ ID NO: 101024 - DNA, 74 bp, Homo sapiens
cgcgccccaagcccgggcgccaccgctgccacctccgcgagggagtaccctgacttctaccggaagctctacgg

SEQ ID NO: 101025 - DNA, 74 bp, Homo sapiens
agatcgactgtttgagcccggaagcgcagaagctgttcaaggagcagggacaagttacaggaatgttctccaag

SEQ ID NO: 101026 - DNA, 100 bp, Homo sapiens
gaaaacttccaaacatctacaactcctcagacctgtcatttactccatcctttatagtgatgctacaggacgaagaggaatggataaaaacattggcgag

SEQ ID NO: 101027 - DNA, 73 bp, Homo sapiens
gcgctctggctgtgctgcgcgacccccgcgcatggttaagacatcagaattttatagatactcccgacagctc

SEQ ID NO: 101028 - DNA, 96 bp, Homo sapiens
attgggggcaggagctgctttttcaatgagaagaatgaacagacctagtgggcgttgcctttagacccaggccatggttgcttgttatccgggcaa

SEQ ID NO: 101029 - DNA, 90 bp, Homo sapiens
caatgcagtaaagccagaaaagactgctgctccctcgccgtcactgttgtataaataatggggaatgcatcagcaacccccacacccccc

SEQ ID NO: 101030 - DNA, 75 bp, Homo sapiens
cggatcgaccggagcagagagctggcgagcaaggcacaccttgggcccaccccacctccacatagccttaattac

SEQ ID NO: 101031 - DNA, 100 bp, Homo sapiens
agaacgtcccgctggatctgacccgagggggtcctgatgacaacttaattgaaggtggaggaacaaaatttgtctgcaaacctggagccagaaacattac

SEQ ID NO: 101032 - DNA, 100 bp, Homo sapiens
agagaagaaatggacatgattgcctaaatcagccaaacacaggattcaaccctatgaaaagataaaggccaggggcttgcctgataatatatcttccgtg

SEQ ID NO: 101033 - DNA, 100 bp, Homo sapiens
cgcgccgccatcatggacaccagccgtgtgcagcctatcaagctggccagggtacatgtcccagagcaagcacacggaggcccgggagctcatgtactcg

SEQ ID NO: 101034 - DNA, 75 bp, Homo sapiens
caaagaccctgcagaaaatcagtcaacaagatgctgtctgatgaaaccaaggccctgaaaggttcaccaagttgc

SEQ ID NO: 101035 - DNA, 124 bp, Homo sapiens
cagaattcggccatgagccgctacatactcatcatggggctcctgtacaagggagccccgcgcggactcactctatgatgtccctgtcggtgcggccgcagcgccgtctgctcagcgcccgggt

SEQ ID NO: 101036 - DNA, 83 bp, Homo sapiens
ttggggtgaggcagaagatgggaagttggggcatggcaacagaaggcatcacgttgggtggtttccatttagaccgaggccgg

SEQ ID NO: 101037 - DNA, 101 bp, Homo sapiens
gtcctgcagcgccagcagctggactatggcatctatgttatcaaccagcctggctttcgaaaacatctgggcctgctggagaaaaagaaagattacaaact

SEQ ID NO: 101038 - DNA, 97 bp, Homo sapiens
tcttgcagtctcatatttctcctctgaaggtagtgtgccagtatttgaaaaatcccaatgtatctgattcactgctgctgcagaatattttccaagc

SEQ ID NO: 101039 - DNA, 97 bp, Homo sapiens
ggtgctgctggttagtgtgctctgagggagggtccgagccagccgctgttttgccggaggagcccctcaggccctgtccctttccccccaacacatc

SEQ ID NO: 101040 - DNA, 100 bp, Homo sapiens
cccaacccgctgcaggacgcgaacctctgctcacgcgtgttcttctgcagggagaaggttttaaggtgaaaacgaagaaagaaatccggcatgtggaaaa

SEQ ID NO: 101041 - DNA, 100 bp, Homo sapiens
ttcgtttaaggctttcttctttctcctgtggacaagccagtgctaccccattcacagacatcaagagtgaagatagtccaagtcctaagagacagcgcct

SEQ ID NO: 101042 - DNA, 75 bp, Homo sapiens
gagctatcaggggaagatatgcatcagttccatcgagccattactacagctatgcaagaagaggccttgaagctg

SEQ ID NO: 101043 - DNA, 100 bp, Homo sapiens
gatgaatcatacaatatttcagaggtcatgtcaaaagagggacagtggccttagagctattgagaatttgatgcaaaagaaggggaaatttgattacata

SEQ ID NO: 101044 - DNA, 90 bp, Homo sapiens
gtctccagtgggctctggcgcctatggctctgtgtgagtcctgccaaatatcacaaaacctagatattatgaaggagaaagaaaataaag

SEQ ID NO: 101045 - DNA, 50 bp, Homo sapiens
ctgggtccaacagcaggcctatggaatgaaacagaagcctatcagttgct

SEQ ID NO: 101046 - DNA, 50 bp, Homo sapiens
ctgcagcactcaggccaggagggacaaccctccatatgataagggagcct

SEQ ID NO: 101047 - DNA, 74 bp, Homo sapiens
tgttttttctacctgttgacgtgtcaagcactaactatcccaccaaatattttggttgtgagctgggagcacag

SEQ ID NO: 101048 - DNA, 107 bp, Homo sapiens
cgcgcccgggaggaaggaacgaggcaaggagctaaagcagcgtgcgttcagccctgggactagacgcttgaagcaaagctgccatcccagaagacgacatgctctca

SEQ ID NO: 101049 - DNA, 98 bp, Homo sapiens
gaaatgacaacgtcaaccctccagagagaactcgatgccaccgcaacggtattggcgaaccggcaggatgaaagtgagcagtccagaaagcggcttat

SEQ ID NO: 101050 - DNA, 100 bp, Homo sapiens
caagtctctttccagaggccaggctttatgggagcatgggttaccagcgacgcaccctgtctgattattttcgcaactttgtagattcttgcctccagaa

SEQ ID NO: 101051 - DNA, 75 bp, Homo sapiens
ttctctcggccagcgcctccgcggtcccgcagcccccggaagccaatagactccctcagggactctcggtccctc

SEQ ID NO: 101052 - DNA, 83 bp, Homo sapiens
ggacagagcgcctgcgaccccagtcggtgctccggggaggtcacctgacgaggagacaatgcagatcttcgtgaagactctga

SEQ ID NO: 101053 - DNA, 50 bp, Homo sapiens
cacaggacctggaaaaattacatgttttaaaatcaaagatgggaaaatcg

SEQ ID NO: 101054 - DNA, 100 bp, Homo sapiens
cctggacacgcagtacagcaaggaacctggtttctgacaagcaggactcactggctcagtgtgcagactttaggagcagcctgccatcccaggacgccat

SEQ ID NO: 101055 - DNA, 75 bp, Homo sapiens
ggcggacagtgcggaactaaagagatttaccgcattgtttctcagaagcaaatgtcagacagacgcgaaaatgac

SEQ ID NO: 101056 - DNA, 100 bp, Homo sapiens
ccggtgtcccctgtgtcatgagaacttcagccctggagaagaggtgatgaccccacaaggaagaggtactgttgcagccgctgcagctgctgccacagcc

SEQ ID NO: 101057 - DNA, 100 bp, Homo sapiens
acgatgtcagcattcctgtctatagtccactgtcagctgaggtggatcttccagagaaaggaccaggatgctgttccactgccagggactccctccccat

SEQ ID NO: 101058 - DNA, 75 bp, Homo sapiens
actactcttctcattacatgactttagtggttcaatccaaagatgtggaagatgtgaaatttgtcatcaattatg

SEQ ID NO: 101059 - DNA, 82 bp, Homo sapiens
ccgtttccgagccataaaaggtctaggaccgcttcccccgagccagcagattttgcaagaacgaggctcaaggatgtgaggg

SEQ ID NO: 101060 - DNA, 99 bp, Homo sapiens
ctgtctttcagtttgatgtccagaggaagtacttcaaggaagctcttgataggggatgtatggcattgagaatgaagtcttcctgagccttccatgtat

SEQ ID NO: 101061 - DNA, 75 bp, Homo sapiens
atgatcagtagcaccagtgtttatggaggaggcgtctccctattccttacttgatatctgcttgaatttcttgac

SEQ ID NO: 101062 - DNA, 83 bp, Homo sapiens
ctctttctggcctggaggctatccagcgctccaccaattcctctaaaactgaagcctgattactggagtgacaaactacagaa

SEQ ID NO: 101063 - DNA, 100 bp, Homo sapiens
gtcgactgcccagagtccgcggccggggcgcgggagatcttgagccagatgattgtgcatccatttacatctttaatgtagatccacctccatctacttt

SEQ ID NO: 101064 - DNA, 98 bp, Homo sapiens
tctaccgcacaggaaaatcctacctgatgaacaagctagctgggaagaataaggtgattcgcctttgccagtctcatctcgtgtctgctttgttaagt

SEQ ID NO: 101065 - DNA, 75 bp, Homo sapiens
caagttcaaaaccagcaatttcaaacaacgactgaaagacctttcattcagaagctgtttcgtcctgtggctgca

SEQ ID NO: 101066 - DNA, 153 bp, Homo sapiens
actgacagctgtgagcccgccccagaatgttcatctttagagcaagaggagcttcaagcattgcagatagagcaaggagatgtgaaggaatggacaagagttgagcagcctttctgctgattatcacacatcatgagctgagtgactgcagct

SEQ ID NO: 101067 - DNA, 88 bp, Homo sapiens
tttacccctggagatgggctcaggacagctggcacccaggtagatgacattaatgctgataagaatatctcttctgcacagattgttg

SEQ ID NO: 101068 - DNA, 116 bp, Homo sapiens
ggggattcgcagggaggatgtcgggacaccccggaagctgggaaatgacgcaaaatgatttcatggttatctgcaatgttgcaaaaatcctagagctagttgtaccactgatggag

SEQ ID NO: 101069 - DNA, 129 bp, Homo sapiens
agcagcgtcaaatatctccttggccattggaccatttgaaatactggtagatccatacatgcatgaggattttgcctaccattttacagtatttgtcttctattttggagcctttttattggaagcagc

SEQ ID NO: 101070 - DNA, 122 bp, Homo sapiens
agtgcttactaccaggttgggcagacgggcaaggaggggaccgagaatcaaggcgttgagcctcaagattcaattagcagagcctcacagacaatggccaaatgtgtcaaagctgtcacaga

SEQ ID NO: 101071 - DNA, 88 bp, Homo sapiens
gccatcgttgctgccttcttcgtcaagagacggagtttcgtcatgttggccaggcccatttgagatctttgaagatatcctcaacgtg

SEQ ID NO: 101072 - DNA, 82 bp, Homo sapiens
cgcaaccattgacgccatgtcgggttattcgagtgaccgagaccgcggccgggaccgaggatgccttcaattaagttgcaga

SEQ ID NO: 101073 - DNA, 90 bp, Homo sapiens
gtcattctcgctaacaactgcccagctttgagattttaggtgatgggcaagtcagaaagtcagatggatataactgatatcaacactcca

SEQ ID NO: 101074 - DNA, 82 bp, Homo sapiens
ctcaagaaccggcacggcctcgtgcccttcgccttcgtgcgcttcgaggacccccggccgactcgcgggccgctgcacccac

SEQ ID NO: 101075 - DNA, 95 bp, Homo sapiens
tttttgcctttgttgattaactggacaaattcagggagcgtaaccacgctgaaagcactgaacctaagacactgccctctggaattccctcctca

SEQ ID NO: 101076 - DNA, 100 bp, Homo sapiens
ctcggccgcccgggaccgccagctctgtccgctgcccacagcctagcagtcgggaccgtactgaggtctagaattacggagtcaacaaagcaaacctcaa

SEQ ID NO: 101077 - DNA, 101 bp, Homo sapiens
tacgtaaagagagtatggagctcgtaaaattagtattctctactgccgctgatggtcaaacgcaagtggaaattaaagtgtgtcagggtgaaagagagatg

SEQ ID NO: 101078 - DNA, 83 bp, Homo sapiens
ggcggatggacacggacgtggtcaagctctctgtgacctgcctgctgcctccctcaacgaccagttgccccaacatacatttc

SEQ ID NO: 101079 - DNA, 130 bp, Homo sapiens
ccaggagttcgtctcttacgtctgcggaagtgcagctgcctcagttcttagcgcagatgaggtttatataactttccaagacaaggaagttgtgcaaagcctcacagctactaagaggctgggctgggac

SEQ ID NO: 101080 - DNA, 75 bp, Homo sapiens
cgccgcctgcagtcggtgaccgcgcgactcggcgcccgcccgcggaagcgttgttgacgaccatggacatcatcc

SEQ ID NO: 101081 - DNA, 100 bp, Homo sapiens
ggactcagatggtcccctgaagcaaggactgcggctgtcacagactgctgaagagatggcggccaatctaacaggcttgaagtagaaaatgccatgatga

SEQ ID NO: 101082 - DNA, 90 bp, Homo sapiens
gagtggaaaaattgagaattgaacatcagaccatcacagatgaatgctatcaagtaagacaagtgtttgcccagaaacttcacaaaggcc

SEQ ID NO: 101083 - DNA, 98 bp, Homo sapiens
ggaaaatttcaggctgaaggtttagcgggtgccgtcatatttgatcagaaattggatgaaccttcgggatgctgagacagggaagatactctggcaag

SEQ ID NO: 101084 - DNA, 75 bp, Homo sapiens
aaaggttaacatatcatatgtatgcagggttcattccatgatctgctccgtagagaaccaatgctgcgcatgcag

SEQ ID NO: 101085 - DNA, 100 bp, Homo sapiens
ggtggttgaaaaggacactcgatttattcctggattacagggaccattgcaatttagagatgtggccatagaattctctctggaggagtggcattgcctg

SEQ ID NO: 101086 - DNA, 100 bp, Homo sapiens
catccttgccctctggagatgccttttcttctgtggggacacatagatttgtccaaaaggttttgctgttactgctcagtgtagtcacaccttgaataag

SEQ ID NO: 101087 - DNA, 90 bp, Homo sapiens
ccctggctgcagccctcactcttcatggtcactgcggtaatcgtgtgttgcatcgatgcgtttgtggtcaccacgaagatgaggaccaac

SEQ ID NO: 101088 - DNA, 98 bp, Homo sapiens
atctctgcactcccggccgggtggtgggcgcatatcctgggtagcctctaggaagcgctagacacatgccaagtcctgtatctgccatgtctgtggcg

SEQ ID NO: 101089 - DNA, 75 bp, Homo sapiens
cctaaaaaaagaaaaaggaagactctacacccttctcgttattcaggcccagctcatcgcccagtctatcggcca

SEQ ID NO: 101090 - DNA, 127 bp, Homo sapiens
tcgtgaccgagaccgtgaccgagagcgtgaccgagagcgcgaatatcgtcatcgttagaagggagagtcccgtattctcagagtaaaagttgtttctggaattgatctcgccaaaaaggacatcttt

SEQ ID NO: 101091 - DNA, 101 bp, Homo sapiens
ctgaatggcaatggcacaaagttctctcgatcagggcatacatctttcttcgacaaagggctcacagaacatttcctgcctgttgctcacactctgttgtc

SEQ ID NO: 101092 - DNA, 89 bp, Homo sapiens
cgccagggtgggcctgggaagacaggccctcttcaacagtttttccagaggcctcaaatacagcctcctagagctaccatcccgaacag

SEQ ID NO: 101093 - DNA, 75 bp, Homo sapiens
acaccttctaagagtttggcgagtcagtgactgaagcgcccgtccattccaagagccacactttgtccaggcctt

SEQ ID NO: 101094 - DNA, 100 bp, Homo sapiens
ccgagtctggcagatccagtcttgctcagctctcacaggagagggcgttcagtgaagtaagaactctgctagagaggaaatggctgcttcatcatcatcc

SEQ ID NO: 101095 - DNA, 74 bp, Homo sapiens
catctaccccatcaccagaacccagcagcttgccagcatcgttgcagtcattgctgtgcgtgtgaaggaagagc

SEQ ID NO: 101096 - DNA, 83 bp, Homo sapiens
gcctgaatggcgggaagtgtgaagcggccaatggcacggaggcctgcgtaattttgtagccaccttggctaatgggatgagcc

SEQ ID NO: 101097 - DNA, 100 bp, Homo sapiens
gtgatgctggagaattataggaacctggtctccctggatgaggtttatataactttccaagacaaggaagttgtgcaaagcctcacagctactaagaggc

SEQ ID NO: 101098 - DNA, 73 bp, Homo sapiens
ttgatcatgaacaccattgccattcaggtgtctgcacaagcgaggttgactatagtcaatggggccaatggag

SEQ ID NO: 101099 - DNA, 75 bp, Homo sapiens
tgagcaagaaaatcgcccagctcaccaaggttcagcagatagatcgtgtggtagaagttgtggaggagacaatta

SEQ ID NO: 101100 - DNA, 90 bp, Homo sapiens
atattgccctggggtgtaaaatcctccaggaccctaaacagatggacagttgatgcatttcaggactgcttttcaggaagccttggacgc

SEQ ID NO: 101101 - DNA, 98 bp, Homo sapiens
ccgctgcctcaggagcggaacaacgtcggcgagcgggtattgaatttgaccgggattgtgactattttgcgattgctggagttacaaagaagattaaa

SEQ ID NO: 101102 - DNA, 100 bp, Homo sapiens
gcggccaccaacaaacgccacagcacaagtgataagatgcacttcccacggtctagcctgcagcccatcaccacgctggcatcaaagctaagccagaaga

SEQ ID NO: 101103 - DNA, 75 bp, Homo sapiens
tgctcctggtgcagtggaagcagaggcacccacgctcctacaataggtcagctggcggctccagtcctgaaggcg

SEQ ID NO: 101104 - DNA, 74 bp, Homo sapiens
ccgccatggagcccgactcggtgattgaggacaagaccatcgagctcatgagttgtctgctggttctcagcttg

SEQ ID NO: 101105 - DNA, 96 bp, Homo sapiens
tccagatacccgatggattttctcaaaccaactgaacactcgtgaaactgctcaggccatcaagggtatgcatatacgaaaagccacgaagtatct

SEQ ID NO: 101106 - DNA, 97 bp, Homo sapiens
agctatagactacttctactccaccaggaaggaagaattttaaatcgtttctccaaagacattggacacttggatgatttgctgccgctgacgtttt

SEQ ID NO: 101107 - DNA, 141 bp, Homo sapiens
ggatttgcatgaactccactctgagctgaaatacagactgcggtgttaatatccttttcttctgattgttattaacagctttagcgtcacctccctcactgggcagcatgggggagaagtcagagaactgtggggttccag

SEQ ID NO: 101108 - DNA, 100 bp, Homo sapiens
gcaggacctcgaacccgcctgcgatggggcgagaaaggtcccactgcagccctccaagcagacatgtcatgctgcccaaggacatagccaagctggtccc

SEQ ID NO: 101109 - DNA, 80 bp, Homo sapiens
tcttgccaggccctgccctccgagggcttcagtctggagccgcccagaggttatgggcacgctgcacctggcaccgatgc

SEQ ID NO: 101110 - DNA, 82 bp, Homo sapiens
ttctaatcatcagcatttacatgacagaaatcacctatgtttacagcgacaggtttttagaacttcagccataaaaatgggc

SEQ ID NO: 101111 - DNA, 50 bp, Homo sapiens
ggtgacactcaacaggattcccgactgtggatattcataaggagaaagtg

SEQ ID NO: 101112 - DNA, 100 bp, Homo sapiens
gcgaaggatatcggtttcattaaggacttgaaagaggagattgatattcgactctccagggttcaggatatcaagtatgagccccagctccttgcagatg

SEQ ID NO: 101113 - DNA, 111 bp, Homo sapiens
cgcaagtacccgtccatcatagtcaactgcgtggaagagaagctgtcaaagctcgaaaaacagcagcagaggaaagaaaagaccagagctaagggaccttctgaatcaagc

SEQ ID NO: 101114 - DNA, 100 bp, Homo sapiens
cagctctgaataaaccgaagaaacctctcacttctagcagtgcagaaaaacttcattgctgtcagcgctgccaaccgcttcaagaagatcagcagctcgg

SEQ ID NO: 101115 - DNA, 100 bp, Homo sapiens
cagaattacactgaagaagtagagtatttcaaccataaagacatcttaattgggcacgaaagagaacatccatgatagcagtcttctgtaaatcgaactt

SEQ ID NO: 101116 - DNA, 100 bp, Homo sapiens
aaccaggcatctctgggtgggcaacttacccgagaacgtgcgggaagagaagatcatcgagcatttcaaacgaattaaacatgtggacatgaaccaaaag

SEQ ID NO: 101117 - DNA, 82 bp, Homo sapiens
gagggtgtacaaatacccctttgaattaattatggctggacttaagtcacaacagattatctttcatcaaggcaagttccat

SEQ ID NO: 101118 - DNA, 100 bp, Homo sapiens
ccgcttcctggaatggcaagcgcagcaacaacagagagcacgtggtacgaggaacagcaaattcaggaaaaagtggcgacctttcgactcatgttgctgg

SEQ ID NO: 101119 - DNA, 107 bp, Homo sapiens
cgaagcctcccgggtggcttacagacgctgccagcatcgccgccgccagacaatgcagatcttcgtgaagactctgactggtaagaccatcaccctcgaggttgagc

SEQ ID NO: 101120 - DNA, 100 bp, Homo sapiens
atggatatcagctacagactttcctgagtcaggtgtttcagtcacctccagtaacacgggcgtgccagatatctcgggttctgtgtactccaaaacccag

SEQ ID NO: 101121 - DNA, 75 bp, Homo sapiens
attttttcaagaagaggaatagggtgaatgaatctcatcagaaaagcagacatggtcagatgttgaaggccagag

SEQ ID NO: 101122 - DNA, 100 bp, Homo sapiens
caagcggagctcccccaagagccggaaaggtggcacaagaatggctcaactctccaaatagagagaatttctatcagttgcaagtacgaaaatttcctgc

SEQ ID NO: 101123 - DNA, 90 bp, Homo sapiens
tcagcttctttctcacacgcagatgaacactggacttcagaaatgcatttcttttgaagaagctcctgttttcttcggagaagtcttctt

SEQ ID NO: 101124 - DNA, 82 bp, Homo sapiens
cggcactccagccccagctcgacttaattcagtgcacaaatgagatgaatgtgaacatcccacagttggcagacagtttatt

SEQ ID NO: 101125 - DNA, 85 bp, Homo sapiens
cggtggcgatgctcttcttggaaaaccagatccagaaactggaggagtcccgctcgaagctagatgccatggacaatattaccag

SEQ ID NO: 101126 - DNA, 50 bp, Homo sapiens
gtgtggggcggtcccggccccgcagggtgctgacggagcttgtgtccaag

SEQ ID NO: 101127 - DNA, 98 bp, Homo sapiens
tgactctgatggaacccctgactaaaatgacaggaagcacaagcctatgcagacgacaacagtttgctgttcatggagacatcagcaaagactgcaat

SEQ ID NO: 101128 - DNA, 50 bp, Homo sapiens
ggaggaggtggcaggcctcggcggtgactcgaagaagccttccaaaaagc

SEQ ID NO: 101129 - DNA, 83 bp, Homo sapiens
gagtcctagcgcctggcctgcgcgccgctgcccgcgccacagcctcccgcgacgatgcccctcaacgttagcttcaccaacag

SEQ ID NO: 101130 - DNA, 100 bp, Homo sapiens
tcgtggaaaccaagataaagatgcccattttccaccaccaagcaagcagaggccagtgctgctgaggaagcagatgtgcacgtagctgtggtggtgagac

SEQ ID NO: 101131 - DNA, 75 bp, Homo sapiens
ccccggccccgtcccagagcagcccaccagagcagccgcagagcatgcttcgttgttccctctggcttgtggggg

SEQ ID NO: 101132 - DNA, 90 bp, Homo sapiens
tggcttctgaggctgtcgggtctttgcgggttgcggaagggggccccaatacccttcttcttcaggattgcttatggatgcccaaatgcg

SEQ ID NO: 101133 - DNA, 82 bp, Homo sapiens
ctcacggagaagtccgcctgtaagagatgccatggacaatattaccaggcagaaccaattctacgatacccaagtcatcaaa

SEQ ID NO: 101134 - DNA, 75 bp, Homo sapiens
actggaatctggatgagcagctcaagcagtgactgtcatgtggcatgggtctctgcccaagctcgtaatgagact

SEQ ID NO: 101135 - DNA, 100 bp, Homo sapiens
ggcaaatgaggaacagggcaatagtatgatggcaaagaaacttctgcctcccagggtcactaggcgggcagcccacacccaccccagacggccaccacac

SEQ ID NO: 101136 - DNA, 100 bp, Homo sapiens
taatatacagaaatctccagagattcaaccctatgaaaagataaaggccaggggcttgcctgataatatatcttccgtgttgaacaaactagtggtggtg

SEQ ID NO: 101137 - DNA, 98 bp, Homo sapiens
agaattctgggcttccacacaactccagtgctaactcaacaggatcaacactctgtggtaggccagaacacaggccccagtccaagtcctaacccctg

SEQ ID NO: 101138 - DNA, 100 bp, Homo sapiens
aaaatacttttcttcaatgataagagctgtcagttttctgtggatgaaggttttggaaggaaggatgttgtagaacacttactacagatgggtgctaatg

SEQ ID NO: 101139 - DNA, 100 bp, Homo sapiens
agcttcggagcggccggtactgttgaaagcgacaagtggaggcgccgctctagcggccgggactctgaactatggcgattcctgacattcagacaactga

SEQ ID NO: 101140 - DNA, 75 bp, Homo sapiens
aaactattggaaagtttttccaagctgacattgcagaaaatgctttgttggccagcgcagaagcttattgaattt

SEQ ID NO: 101141 - DNA, 100 bp, Homo sapiens
gggaagatggcggcgccgctcatccccctctcccagcaggtcacacagcggcagtgataaagagcacagggatgtggagagatctcaagaacaagaatct

SEQ ID NO: 101142 - DNA, 50 bp, Homo sapiens
ggcagtgctcaaactcaccgaccaggtacctagtcgatagtcgctggttc

SEQ ID NO: 101143 - DNA, 96 bp, Homo sapiens
gagaccatgacgcccatgcactaccacctgcgggagatcatcatctgcacctaccgccagaaggcctttgagccctacttagagattttggaagta

SEQ ID NO: 101144 - DNA, 96 bp, Homo sapiens
aacaagcaactgtgggcgacataaatacaggacagagcgggatgccaccagcttgtccaaagggaagttccaggagctcctggtgggcatcgttgt

SEQ ID NO: 101145 - DNA, 100 bp, Homo sapiens
gaatgacatctacctccatcaggaccccagatgtctgacagccctgtgtgacaccaagataagtaacgtcacagatgtgacattgatgtgtccactgaag

SEQ ID NO: 101146 - DNA, 100 bp, Homo sapiens
ggaggccctggctatctatccaccatgtgggaggaggaaaatcatcttatcagacgaaggcaaaatgtatgatacatgactgatggtggacttggcctct

SEQ ID NO: 101147 - DNA, 101 bp, Homo sapiens
ctcgaagccagctctgcagctcagccaatcagtgacatcattgtgagaagcgccaccttcaagtgaacgtcaccaacccagtacagtgcagcctgcacggg

SEQ ID NO: 101148 - DNA, 82 bp, Homo sapiens
aggctggctgctgaaggatgaacggagaggaagaattctttgatgccgtcacagggaaccctactctggaaactgtcagtcc

SEQ ID NO: 101149 - DNA, 95 bp, Homo sapiens
cgggcgagcggctgtgtggatgtcggcgaagccgcgggcgagccgagcctcttgaagccattcttacagatgatgaaccagaccacggcccgttg

SEQ ID NO: 101150 - DNA, 52 bp, Homo sapiens
ttttcagaagcacatgtattataacagaagcagtcagttccctgcacccagc

SEQ ID NO: 101151 - DNA, 90 bp, Homo sapiens
caaaagaattggccaaagaagttgagaaaatgggagcagttttcatggatgcccctgtttctggtgtccaaaagaatatccgctaaggat

SEQ ID NO: 101152 - DNA, 98 bp, Homo sapiens
gccggatgagttgcttttaggcttgctggcccgcggggctgtccaggcacgcgaggcccctcagagtttatatcccctgtatctatgtgttaaataag

SEQ ID NO: 101153 - DNA, 75 bp, Homo sapiens
ccccgaggccagatgcgtttaaaatcgaggagttctcggagtttggaaaggtgcccctgggcgctgggattgctc

SEQ ID NO: 101154 - DNA, 75 bp, Homo sapiens
caagaagatgatcttcaacatttgcaatttaagtgctgtggggctgctaactacacagattgggagaaaatccct

SEQ ID NO: 101155 - DNA, 50 bp, Homo sapiens
taccattcgcctgatgaactctcagggtgctggaaatgtaaacaagaata

SEQ ID NO: 101156 - DNA, 100 bp, Homo sapiens
caggcagaaccttcacttgcaagcatgggtgttttcatcatcggctgtcttgaatcctttctacaaggagtggcatcaaagctaagccagaagatttatc

SEQ ID NO: 101157 - DNA, 100 bp, Homo sapiens
ggatgccctgcagtacctgcagaaggtctctggagacatcttcagcagcaaattgtggctactaatttgccccctgaagatcaagatggctctggggatg

SEQ ID NO: 101158 - DNA, 75 bp, Homo sapiens
gtagtttgaacttcaatggaaaacatgaaaaggtgaacagtcagcccagtttcagctgtgagttcaacatggagg

SEQ ID NO: 101159 - DNA, 82 bp, Homo sapiens
cgcggggttagccactgctggctgcttccagtgttcgccgagagggcgtctctggccgagcctctttttgtggaaaacgaca

SEQ ID NO: 101160 - DNA, 100 bp, Homo sapiens
gatccggcctaatcgtgaaggagaccgggaagccatcgtggcagattttgcctgcctgagctcctctagtagtggccacaattgccagagaagatagagc

SEQ ID NO: 101161 - DNA, 95 bp, Homo sapiens
aaaaatgtggcagcgcctgaaaggaatgtgattttacaacgagatgctgctctccatagggatgctcatgctgtcagccacacaagtctacacca

SEQ ID NO: 101162 - DNA, 101 bp, Homo sapiens
gtgcaagatgagcctcaagtgcttctgcattacaaaccgaacaatattttgggagtccaagtgacatggcttctactgcagaaaacatcagagacaggatg

SEQ ID NO: 101163 - DNA, 100 bp, Homo sapiens
atgagcctggagtccttggcgcccccagagagtaccgacgagggggccgaaaccgagagatgtggacgagtgccaccgcgtgccgccgccgtgtgacctc

SEQ ID NO: 101164 - DNA, 96 bp, Homo sapiens
aaggaagcaagcagttcagaagagccaaggaataaacatgcaatgaacccaaaagggttatgtctagagaagatatttccacactggtttcccttt

SEQ ID NO: 101165 - DNA, 90 bp, Homo sapiens
gccagactcagggatcaaagagcaaacagattcagtggcctgcattggtcacacagcggcagtgataaagagcacagggatgtggagaga

SEQ ID NO: 101166 - DNA, 98 bp, Homo sapiens
gtgtggatccccgatgtacatgggtgagcttgtcggccacagactgctacattgtgcatgagatctacaatggggagaatgcccaagaccagtttgag

SEQ ID NO: 101167 - DNA, 83 bp, Homo sapiens
tatcatgctggccaagaagatcatcattaaggacggaggcacgggaagcggggccggcgcgggcggccgagggtccaggcgag

SEQ ID NO: 101168 - DNA, 74 bp, Homo sapiens
gcgtcgccaatgttcccaacaccagcctgctcgtcaacatcccacagggtttagatgtagattctctggtcatt

SEQ ID NO: 101169 - DNA, 98 bp, Homo sapiens
cagccttaaacgacttgttctctatcgaacaaaagtagagggcatatcgatgcatttacttcaaaactttttctactggaagaaattacctcagaaga

SEQ ID NO: 101170 - DNA, 100 bp, Homo sapiens
gagcgcccggcggaaaaccgaagttggaagtgtctcttagcagcgcgcggagaagaacggggagccaggtacggttcctggagcagcagaacaagatgct

SEQ ID NO: 101171 - DNA, 80 bp, Homo sapiens
ccgacgtgtgctccgcccagggggtgcgaggataccccaccacatggattaattgatgtatgttgagtttatggagctgc

SEQ ID NO: 101172 - DNA, 100 bp, Homo sapiens
cagcgggcggccccctgcagcctcctgcccaggctccgcaaattcaacacccaacagcttccttaatagcaaaggtagcaacagcccaggatgatataac

SEQ ID NO: 101173 - DNA, 90 bp, Homo sapiens
aaacaatcgtgaaacttcagaatacttcaagaatagcagaggagcagggaagaggaagaacgtctgagaaataaaattcgagctgatcat

SEQ ID NO: 101174 - DNA, 83 bp, Homo sapiens
atagaatgccagcaaccagaagcagacttatacagctcgatgcattctatttctcatcatttggctcataactggaggaaggc

SEQ ID NO: 101175 - DNA, 80 bp, Homo sapiens
gcctccagggtcatacgcatccttagggcatggtgctgatgtgaaatgtgtagactggcatccaaccaaagggttagttg

SEQ ID NO: 101176 - DNA, 50 bp, Homo sapiens
ctgacctgtaaatcatcctttaggctgacaactgcagtctccagtttaga

SEQ ID NO: 101177 - DNA, 100 bp, Homo sapiens
ccggcgcccctgagccggccgagcggcgacggaccgcgagaggatctgaagaggcaaaatgcagtattacaagctgcacaagatgatttgggacaccttc

SEQ ID NO: 101178 - DNA, 100 bp, Homo sapiens
agacgaacaaacctcacagccagagccagagaacatcgtagctgtgggagctgggttctgcgacggcctccgctgtggagacaacaccaaagcggccgtc

SEQ ID NO: 101179 - DNA, 100 bp, Homo sapiens
gatccctaagaagacagcttgaacctagggtaaacatgcccgccgcaagggaggctgtgactccaagatggctgccaggcggcgccccggagcccagcca

SEQ ID NO: 101180 - DNA, 82 bp, Homo sapiens
cacaacagtgggcattgatttcagggaaaaaagagtggtgttcagattttgcaaatctaaatgtcataaaaactttaaaaag

SEQ ID NO: 101181 - DNA, 100 bp, Homo sapiens
gaaatctggcatattagcgctagccctgcagacagaggtgtgctgacgacctgctacaacagaacatctgggctgatgggccgtaccctgcaccgtgagc

SEQ ID NO: 101182 - DNA, 90 bp, Homo sapiens
catcggcatgctctatctgtactgccggcacctcaaccagatgaggaagtacaactttgagctccgccgcatgcaagagatgattgcaag

SEQ ID NO: 101183 - DNA, 75 bp, Homo sapiens
cagattcgcagtggtcgcttcttctccttggctgcctgggtctcagccatttgggtccccattggcccctgtggg

SEQ ID NO: 101184 - DNA, 100 bp, Homo sapiens
gattcgccgaggcaccgaggcactcagaggagggttggggtgctggaggactgcttcaccttcctgggcatcttcctggccatcatcctcttcccctttg

SEQ ID NO: 101185 - DNA, 100 bp, Homo sapiens
agagctgtaccgggttttggaggctggcaagattgggatatttgagagtccaactggcactcaatggccaatgtacatggtggactatgccggcctgaac

SEQ ID NO: 101186 - DNA, 100 bp, Homo sapiens
gcgtgggcaccctgcaggtggtcagacatgtcatcaactcagctgctgctctgttaaaagcgaaaatgaaacaattgcctgcggcaacagttcgactcct

SEQ ID NO: 101187 - DNA, 100 bp, Homo sapiens
ccagtggatttccttgcggaaaggatgttggcggtccctgtgacctgtggagacacggccagatctgccctccacaatgctggggtgaaaacaacacggc

SEQ ID NO: 101188 - DNA, 96 bp, Homo sapiens
ttcatggatgcccctgtttctggtgaattactgggagatgtactcaaagatcggccccaggaagcagatggaatcgattcggtgattgtagtggac

SEQ ID NO: 101189 - DNA, 74 bp, Homo sapiens
cgactcatccacctccggctgaagctccaggagctgaagggtttgagaaatactttaagaggagtggaaggaac

SEQ ID NO: 101190 - DNA, 50 bp, Homo sapiens
cggcagacgacagagatgctgaagggcaaccccgtggaactgataacaaa

SEQ ID NO: 101191 - DNA, 100 bp, Homo sapiens
cggccaagaggcagacctaggaaatgggccgattctttgatgaaaatgaatcccctgttgatccgcagcatggctctaaactggcggattataatgggga

SEQ ID NO: 101192 - DNA, 80 bp, Homo sapiens
tggattcacccacagcggggcggcggcggcggcggctgcggcccaatatagttcaaatctgaacatcaatgatgtactag

SEQ ID NO: 101193 - DNA, 85 bp, Homo sapiens
cggagatccgctcgcgcgccgaagaaaaggtcacggatcgcctacagtgacgaagtacggaatgagctcctgggggatgatggga

SEQ ID NO: 101194 - DNA, 75 bp, Homo sapiens
attttgtgaatatggtggaaaaaggaatcattgacccaacaaagtaatccacctaactcccagcctgcttcatac

SEQ ID NO: 101195 - DNA, 99 bp, Homo sapiens
cggtcgcgatgggggcgcaggaccggccgcagtgccacttcgacatcgagatcaaccgggagccgggggaacttatgacattttagtaacaaaagataa

SEQ ID NO: 101196 - DNA, 76 bp, Homo sapiens
agaaagacttgaaggcgtatacaggaacaatattgatgatgtagtaaggtcattgagactgcctcttctcaaaggg

SEQ ID NO: 101197 - DNA, 99 bp, Homo sapiens
atggaacccaagcagtggcgaagggaatcgcaaggctcttccctgaccattttctactgtccctgcgcgaggacttgtttacactgggcatgtaaacga

SEQ ID NO: 101198 - DNA, 98 bp, Homo sapiens
aatccactcgccagcccgccgccctctgccgccgcaccctgcacacccgcccctctcctgtgccagccacccctttgctgtgaagttgcttgcgctct

SEQ ID NO: 101199 - DNA, 75 bp, Homo sapiens
agcgatgctgaccggtggaaaccagagcagtacctcgtgtatactacgctatcgctggagtgcagtggcgggatc

SEQ ID NO: 101200 - DNA, 102 bp, Homo sapiens
tagcctagttggcaagcgagcaatttccacctctgtgtgtgtacgagctcatgggcctcctcccaaggagaacatgagaccacttcatatctggaactctag

SEQ ID NO: 101201 - DNA, 98 bp, Homo sapiens
gtggatctagcaggaagtgaacgagctgattcaactggtgccaaagggactcgattaaaggctaaagaattacctccaaagccattgtcaagaccaca

SEQ ID NO: 101202 - DNA, 98 bp, Homo sapiens
acaaagctatcatcctgccaaactccaggctcagatgtcacaggtgccagcttaggaataaccagcgatggattttttcagctggaagaattgcccgg

SEQ ID NO: 101203 - DNA, 116 bp, Homo sapiens
ttcctgacctcaccgcgcccgtggccgccgtgcaggcggccgtcagcaacctcgtccgggttttgcactgattgcaaaaataaagtcctccgagcatacaatatccttattggtga

SEQ ID NO: 101204 - DNA, 100 bp, Homo sapiens
cccaggtgtaagcgcagaaagcaggcgaacccgcggcgcaataacgggcgccctgcgtccggcagaggaggcgagcatcccgctcaggtgatgaggaacc

SEQ ID NO: 101205 - DNA, 90 bp, Homo sapiens
caacagaaaaacaacgcctggaatggctaactgtgatctcagacggcaaatagatgaacaacaaaaattacttgaaaaatacaaagaacg

SEQ ID NO: 101206 - DNA, 60 bp, Homo sapiens
cttctcggcccgccgagatggcgctcgaccccgcaggtctctaattaacagaagatggca

SEQ ID NO: 101207 - DNA, 100 bp, Homo sapiens
cacaaatccaccttcttgccacctgcaaccccaatctcaatccggaggccagtagcaccaggatatgtcttgaagtgagctcacaatgactcaagctgcc

SEQ ID NO: 101208 - DNA, 82 bp, Homo sapiens
ggcttcctaaacacctcttatcaccggcaagagctgaggcaacttctcctagaatctcaatctcagctcgatgccgccaaga

SEQ ID NO: 101209 - DNA, 49 bp, Homo sapiens
tgagctcagaggctgagcggcatggtgctggagaatctggtaaaagcac

SEQ ID NO: 101210 - DNA, 83 bp, Homo sapiens
cccaggcacagccgacgccgcgggggggatatgagactttctactcggaatatcctgagtgttgcgtggatgtaaaacccatt

SEQ ID NO: 101211 - DNA, 100 bp, Homo sapiens
aaacagcccgcccgaccccgtcccgaccctggccgccccgagcggagcctggagaaccaagcgcctccaggtctctacacgaagacccaggacccagcca

SEQ ID NO: 101212 - DNA, 109 bp, Homo sapiens
ttcgttccaacatggacatcctgaagccaatcctgttgtcactcagcccagtccatcagtttctcagcccagtacttctcagagtgaagaaaaagctcctgaattgccc

SEQ ID NO: 101213 - DNA, 98 bp, Homo sapiens
tgactggagaagaaggaaaagaagtaattacagaaattgagaaaaaacttcctcggctgtacaaagttttaaagatactattcgttacttgtccttgc

SEQ ID NO: 101214 - DNA, 98 bp, Homo sapiens
cctcggcctcggcggcagcggctgcggagaaggcgagcgaaggggaacgcccttttgcttgtgactggcagggctgcgacaagaagttcgcccgctcc

SEQ ID NO: 101215 - DNA, 100 bp, Homo sapiens
gtttctgctgcctgttgctgtgaagctcttccccaacatgttgccatccacatttgagactcagtcactcaaggtgctgacagctgcagaagaaattgta

SEQ ID NO: 101216 - DNA, 51 bp, Homo sapiens
gctcgagaaggagctgcagggccaggcatccaggctggagaagcagaacag

SEQ ID NO: 101217 - DNA, 74 bp, Homo sapiens
cgagtcgtcgtgagcgcggtcggcgacaatgcagatcttcgtgaagactctgactggtaagaccatcaccctcg

SEQ ID NO: 101218 - DNA, 100 bp, Homo sapiens
cagctccaagacgctgcggccaagcagaaagttgaacagaacgcggctcccagccacaccaagttcagctggttgtcttcttgcctgccctgtgtcgtaa

SEQ ID NO: 101219 - DNA, 100 bp, Homo sapiens
ctgacgaagcttggaagttgcagaagctcggagtgaggatgccaggtcatctccctctcagagacgtagaggcgaggattccacctccacgggggagttg

SEQ ID NO: 101220 - DNA, 75 bp, Homo sapiens
atgctgacctcagtgagtataacatgctgtggcatgctggaaaggaacgcgctcatgttcaacaacgagctcatg

SEQ ID NO: 101221 - DNA, 82 bp, Homo sapiens
ctccttcggcagtccacccaccgccgccgcctcccaggttctgagcagtgcagagaacattgctgtggggcttgcaacagag

SEQ ID NO: 101222 - DNA, 100 bp, Homo sapiens
cgaggaggcgcgggaggtgttcgagaacgaccccgagacggttgtgaccgagattcccgacgagagagactgaggggaagagaggaaggaggggcgggct

SEQ ID NO: 101223 - DNA, 111 bp, Homo sapiens
gcgaggcggaggcaggatgaagatgactgtggatttcgaggagtgtctgaaggactcgccccgcttcaggttttaaatgcacagagagcaggatacaaggcagccatagtt

SEQ ID NO: 101224 - DNA, 83 bp, Homo sapiens
ctgagctgctggctaagatcaccaacacagacgtggttgtaggttccatgccaactgcagggagtgccggctctgttcctgaa

SEQ ID NO: 101225 - DNA, 83 bp, Homo sapiens
tcaggaaaccccatctttgctgaaaagaggaaatactatgtgaagtatgccggaaaacatttaaacgcaaagattaccttaag

SEQ ID NO: 101226 - DNA, 125 bp, Homo sapiens
ttacttccactcaagaatcgtaggccaggctgatggagagctgaacattactcttccagaagagatatcatggaaatcaggacagtggcagttggaattgtggcaatcaaaggggtggaaagtga

SEQ ID NO: 101227 - DNA, 100 bp, Homo sapiens
gaatatctggttttgtctctgctgggcctgtgtgcctggaaaggaattgttttggcctaggatcatccagctgaaactagaggaccgttctgtggtgccc

SEQ ID NO: 101228 - DNA, 98 bp, Homo sapiens
cgcggctggggttccctcctccgtttctgtatccccacgagccaaaagaatgcaatggtgtaaagattccagttgatgccagtaaacctaatccaaat

SEQ ID NO: 101229 - DNA, 74 bp, Homo sapiens
ctgatttctgcagctctgtgtgaaggttactcactataaacaatatccacccaacacaagcaaagtttattcct

SEQ ID NO: 101230 - DNA, 83 bp, Homo sapiens
tgcatgtatttggaacaaaaaaaggagatgcctggcagccccgctctctgcaattttgactaaaggagaagttcaagtatcag

SEQ ID NO: 101231 - DNA, 83 bp, Homo sapiens
ccgctgaatctcataacccacgggtcccccacggctctgccacctgtagtgctcgttggctggagttgtcttccttggagtcg

SEQ ID NO: 101232 - DNA, 97 bp, Homo sapiens
gctagagactgccgggactggtcagatgaacccatcaaagagtgcgggagtctgaagatacagtattgctcgtcctcaaagagatctaccaaaccca

SEQ ID NO: 101233 - DNA, 100 bp, Homo sapiens
aagaaatggggcctgggggacggtaggagcctccgtgcggagaccactgttcaaggccacagcagttggaattgatcacaccttttcagttgtacttcaa

SEQ ID NO: 101234 - DNA, 75 bp, Homo sapiens
gagcttcatgacaatcaggacggtcttgtgggactgttgacattcagggatgtggccatagaattctctcgggag

SEQ ID NO: 101235 - DNA, 83 bp, Homo sapiens
gcagacgtggctcctgctgcacatgtatgacagtgacaagggagtaccctgacttctaccggaagctctacggcctcttggac

SEQ ID NO: 101236 - DNA, 98 bp, Homo sapiens
cgtgagttgatcatcgaattctccaaaatggcccgagacccccagcgctaccttgtcattcaggaaggaaaatcacctcggcagtgtttgaaggaagg

SEQ ID NO: 101237 - DNA, 100 bp, Homo sapiens
tgctgcagcaaaatggctcaaagtccaaccaaagtctggccttttcctgtctcggcgcggaagatggccggcggcgtggacggccccatcgggatcccgt

SEQ ID NO: 101238 - DNA, 96 bp, Homo sapiens
ccaagagggatccttcacccgtgtctgcaactacactgcgctgcatcggactcgacgcccgctggtgacgcacacgctgcgccggaagtgtgaact

SEQ ID NO: 101239 - DNA, 99 bp, Homo sapiens
gatctgaacaaagtctgctcaaatctcctgctgtgaaccagcagaatttttgaacagataccagatgacaattttagcatcccagaaggtgaagaagat

SEQ ID NO: 101240 - DNA, 90 bp, Homo sapiens
tttcatcatcgccttccacatcacctctgcagccttgctgttcattgccaccgtcgacaatacccagcctcgcctttaaggatggcaaac

SEQ ID NO: 101241 - DNA, 80 bp, Homo sapiens
ctaatccaaagactgtggaacttttaagtggagtggtggatcagaccaaagatgggatcaaagtgcttgactttgttggt

SEQ ID NO: 101242 - DNA, 108 bp, Homo sapiens
tgaagctcatcatgaccttccagaattacgggcaagcgctgttcaaacccatgaacctggagatttgaaaaagagaattgaatctctgatagacagagactatatgga

SEQ ID NO: 101243 - DNA, 75 bp, Homo sapiens
gtcttccctggcaagattcttctgaattgtgctgccttggccaaaagagctgataccccaatgtccttctttgac

SEQ ID NO: 101244 - DNA, 75 bp, Homo sapiens
agcgtgtccagggcggctgtggaggtgttcgggaagctgaagggccatcactgtgcatgtccccatgccctcagc

SEQ ID NO: 101245 - DNA, 82 bp, Homo sapiens
ctccgacgcggaccccagtaccaagtaataagaaacctgactcagaagcaagtgctttgaagaaaaaggtcaacaagggaaa

SEQ ID NO: 101246 - DNA, 74 bp, Homo sapiens
ggccgccatggcgtccaacatggaccgggagatgatcctggcggattttcagaaaaagcttgtggtgaaggggg

SEQ ID NO: 101247 - DNA, 99 bp, Homo sapiens
cgtgggcgtaggaccctccgagccagctggagaacacattcaaatcagttattgcacagattggacctggaggaactatcagttcagaactaaaacata

SEQ ID NO: 101248 - DNA, 127 bp, Homo sapiens
aagaaaagcctctgggagcagaagggaggctccaagacctcatcaacaattaagtttcctccagcttatggaggcatatctgaggtgaatcaacctgccgaattgatgccccagttttctacaattg

SEQ ID NO: 101249 - DNA, 75 bp, Homo sapiens
atttctcctgctctgcagcttctgttcagttatacatgggaagctgttgataccaaaaataatgtactttataaa

SEQ ID NO: 101250 - DNA, 75 bp, Homo sapiens
gcagtggtcgcttcttctccttggtttttgacaactatgcagtcacagttatgattggtggagaaccatatactc

SEQ ID NO: 101251 - DNA, 130 bp, Homo sapiens
cagacaacaaggtcctcaatgtgcctgtggctgtcattgcagggaaccgacccaattacctgtacagataccgactgcattttgagagagacagcagggaggaggtagagaggagaaagagagcagcccg

SEQ ID NO: 101252 - DNA, 83 bp, Homo sapiens
tgagcaacgaggccttcccgttctccacccacaagctactgagagccgcagggcacctggattgtcagtggcttcgccccgag

SEQ ID NO: 101253 - DNA, 100 bp, Homo sapiens
gggatgggggacccagtgcagtcttggaaggggccggtggagttctacttcctttcccagtacgtgtcgccagccgactccccgttccgccacatcttca

SEQ ID NO: 101254 - DNA, 84 bp, Homo sapiens
ttcaacatcctcctggccaccgactcctacaaggtcttattagtaggtaagaaacagctgctcctccacctccaccccagcccc

SEQ ID NO: 101255 - DNA, 82 bp, Homo sapiens
tctgacagtggagacactggcattggaacttcctgttctgatagcgtggaagtgcctacaccaactaatgttacaattgaat

SEQ ID NO: 101256 - DNA, 98 bp, Homo sapiens
ccgggatggaggacgttaactctaacgtgaacgcggaccaggagaaactggcgatggaatatgagaggagccctctggaaagaaaaggacagaccctg

SEQ ID NO: 101257 - DNA, 100 bp, Homo sapiens
tctttaaggatggtttagaaatggaaaaatgtgtcaagtctggcaccatctttgacaacttcctcatcaccaacgatgaggcatacgctgaggagtttgg

SEQ ID NO: 101258 - DNA, 100 bp, Homo sapiens
cgcggacaccgtgacccagttcgacaacgtgcggctgtggctcggcaagaactacaagaaggtgagcactcaccaccttcactcctcaagtgaggacgag

SEQ ID NO: 101259 - DNA, 90 bp, Homo sapiens
catggccccggggatgtcgggccgcggcggcgccgccctgctctgcctctcagcgctactcgcccacggctacctgacagtcaacattga

SEQ ID NO: 101260 - DNA, 101 bp, Homo sapiens
caggaaatgggaattctacttgtgtggaaaagaggcacagttagatgaagaaggacagtttcttgtcagaataatatatgatgactccaaaacttatgatt

SEQ ID NO: 101261 - DNA, 82 bp, Homo sapiens
ttttgaacaacagacatatagtgaagatgctggaaaaatacctcaaggaagctcttcgtgggcggtcttgactggagcacga

SEQ ID NO: 101262 - DNA, 74 bp, Homo sapiens
cgaatgctcaagtgcaatgtcaagagctttctggacatatctgaagagatggattaagaatgctttggattaag

SEQ ID NO: 101263 - DNA, 74 bp, Homo sapiens
ccaaagtaaaggtatctttcaaccatggtctgaaaaagttcttttcttgtcgtggaattgcaattgcagttgaa

SEQ ID NO: 101264 - DNA, 50 bp, Homo sapiens
cttgactacggaggggttgccaggtgggtcatgataactgggtacgtgga

SEQ ID NO: 101265 - DNA, 74 bp, Homo sapiens
ccacactggccaacaaccagtgcatggctacagagagcgtggaccatgaaaaatgagccgtcagactgctacag

SEQ ID NO: 101266 - DNA, 100 bp, Homo sapiens
cttgggaacgaggggtgaagcggcccaggtgaggccagaagatacctgaaattcctgcagatgttgtgggtgcccttctgttcctggaggattatgttcg

SEQ ID NO: 101267 - DNA, 101 bp, Homo sapiens
tgttttccaaagtcacgctcattggccggaggaagctcaccttcgacgaggaagcttataaaaatgtgccaccaattaccctagttatgggcccatcatct

SEQ ID NO: 101268 - DNA, 97 bp, Homo sapiens
gcgcagaatctaccaacttcgccaccctgcggtggattgactacggcaaagtggccactcaggattgtcagtggcttcgccccgaggagagctgact

SEQ ID NO: 101269 - DNA, 75 bp, Homo sapiens
ggagatcgtgtctacccccaggctgcagtattatgacaaggaaagtgatgaagcattgggcccaacaatgatgag

SEQ ID NO: 101270 - DNA, 82 bp, Homo sapiens
gtttgatacagcatgtgttaccaagctgtttcctaccaggtcacacactgttgcagcgcagccgaggaatgggtccctgcca

SEQ ID NO: 101271 - DNA, 113 bp, Homo sapiens
ggaagacgtatttttaaagctagaagttgaagcagaaattgaccaagcaggattggtagcttatgtcgatcttgatgaaagagcaattgatgctctcagggaatttaatgaag

SEQ ID NO: 101272 - DNA, 100 bp, Homo sapiens
gagctcagacctgccaatttaccagagataattgataacaccctgtaacagctgagtccttggatgtggctgtgttgcccaagctattctcagtcgagga

SEQ ID NO: 101273 - DNA, 75 bp, Homo sapiens
gccaccaattatgggagggctggccaacttctgctacagacgactcagttgttggatatgggaagtatgaactgg

SEQ ID NO: 101274 - DNA, 75 bp, Homo sapiens
cagcagcctgtgttcgtagtgcaagagattgtcctggcctttggcaactacatgaacagtagcaagcgtggggca

SEQ ID NO: 101275 - DNA, 75 bp, Homo sapiens
tttgctctgctaaaaggctccttcagtgagcaaggcatcaacgagtttctcaggcaagtgaaccggagcaaacga

SEQ ID NO: 101276 - DNA, 50 bp, Homo sapiens
cacctgggctgcctggtcttcagcagaattaagatgctctggtttcaagg

SEQ ID NO: 101277 - DNA, 100 bp, Homo sapiens
gaggcaggcccactcctcccgtcactcagcctctgaagaagcttcgggttcagactcaggcagtcagtcggaaagtgagcagggaagtgatccaggaagt

SEQ ID NO: 101278 - DNA, 100 bp, Homo sapiens
cccggattgagggagaagggtccgtgctgcaggccaagctaaaagcacaggccttggccattgaaacggccctagactggagctggttacagacggaaga

SEQ ID NO: 101279 - DNA, 103 bp, Homo sapiens
gaagccggagtgtaggcggcagaggattcgctcccagagcagctgcggccagctgtgctgtcgtcatgcctcaaacccgatcccaggcacaggctacaatcag

SEQ ID NO: 101280 - DNA, 90 bp, Homo sapiens
ccggcgtctccgcagcagatcagggaccggctgctgcaggccatcgacccccagagcaacgcgcatattaaatttcctattgactacccc

SEQ ID NO: 101281 - DNA, 90 bp, Homo sapiens
gaaatcctaattggatatttagaatatgtcaagaaattagggagccaggaggaactctctcccagtccgcctttgttgaatccatccacg

SEQ ID NO: 101282 - DNA, 73 bp, Homo sapiens
tggctgctgctgccctgcgcgctgctggctggccaggtcagagcagcccaccatgggatggggagggggtgga

SEQ ID NO: 101283 - DNA, 100 bp, Homo sapiens
agggtctcctgcggtgatgagtttaccattgctgccactgatggaaggatctgagtctctccctgcggagacagccctgaagaactcctgtaacgtcaag

SEQ ID NO: 101284 - DNA, 74 bp, Homo sapiens
agcaccatcggggagacaagcaatggtgagacagcattcaaagccatgatggagtcctttggctgggcccggcg

SEQ ID NO: 101285 - DNA, 82 bp, Homo sapiens
acgacatgccatgtactgcaatggtctgatggaggaagatacagagcaaggcttagatcacatagcagaaaacattctttcg

SEQ ID NO: 101286 - DNA, 88 bp, Homo sapiens
cagattcgcagtggtcgcttcttctccttggccagaagcggactcctagaagaggggagcagcaaggatggaatgacagccgtgggcc

SEQ ID NO: 101287 - DNA, 88 bp, Homo sapiens
tggagctggacgtgaggagtgtcacttccgtcaggagagggggggccctcagcctcttggccttgaacgggctgttcatcttgattca

SEQ ID NO: 101288 - DNA, 101 bp, Homo sapiens
ttgaagtgctccaggacagcgtggactttgatattgatgtgaacgcctctgtgtttgaaacaaacattcgaggtgagggcttccacaactaccaccactcc

SEQ ID NO: 101289 - DNA, 75 bp, Homo sapiens
gccgagtcccatgagctgcaggacgtcctggaagagaccaatgatctcgaggacctggaagaagcagaggagcca

SEQ ID NO: 101290 - DNA, 83 bp, Homo sapiens
tttttcgggtagtggaaaaccaggattttttatcaagcagaaatgcatcgaacaacgagaatcaagatcactgagctaaatcc

SEQ ID NO: 101291 - DNA, 90 bp, Homo sapiens
agccatacaaagtaagctggaaagcagatggtactcgttatacatgggaagctgttgataccaaaaataatgtactttataaaatcaaca

SEQ ID NO: 101292 - DNA, 82 bp, Homo sapiens
gtctgcgagccaggattcccgtttgggatatgagattgaaaatgacgactcggaattttcctgagagagaagtaccctgtga

SEQ ID NO: 101293 - DNA, 99 bp, Homo sapiens
cgcggtggttccgggctggtcccgggtctcgggcatcccctcccggcgccactggccggtgccctacaatgctgatgagcgctttgacgccacattcca

SEQ ID NO: 101294 - DNA, 100 bp, Homo sapiens
agattttggtgcagctagagaattagaagatgatgagcagtttgtttctctgtatggcacagaagaatatttgtgtttggtgtataaaacagaccaagct

SEQ ID NO: 101295 - DNA, 83 bp, Homo sapiens
cgccttcgttgagttcgaggacccgcggctactgcagcactggggtgtcagttgttggtccgacccagaacgcttcagttctg

SEQ ID NO: 101296 - DNA, 100 bp, Homo sapiens
aaagatctgcagagctcccagggcggacagcagcctcgggtgcaatcctggagccccccagtgagggtgcaaggaaccatcttcccagctcccaatttca

SEQ ID NO: 101297 - DNA, 100 bp, Homo sapiens
tgcaggaattcacacagaaaagtggaggccaaggcgtgagaattcctcaatgactgccctctaaaggaagaggttgggtatctacagccattggttgctg

SEQ ID NO: 101298 - DNA, 100 bp, Homo sapiens
ctgcgtccgagtctccgccgctgcgggcccgctccgacgcggaagcgcctttccttcgaggagctcaaggcatttttcaaaatctgacagtttttctcac

SEQ ID NO: 101299 - DNA, 100 bp, Homo sapiens
ccctccgcggggcaggggctgctgcgagctcgccgggcgccctttagacgtaaaataccatgaagattttgaaaaaacaaaggggagaggctttactccc

SEQ ID NO: 101300 - DNA, 51 bp, Homo sapiens
caaagcattctctaaagacttgccaagagatttggtgcttccagatgtgag

SEQ ID NO: 101301 - DNA, 113 bp, Homo sapiens
tcaccagtgacccagtcagtgcccttcagttaaagaccaccaggagcacacttattgccctgacattctcaatcgtctttggggtgatagtgtatcgaataacaactgcagcc

SEQ ID NO: 101302 - DNA, 100 bp, Homo sapiens
cggatgttgcagatgttttacttcaagcaggggctgatttaactgctaggtggaaagttacctctaaggaagctctgcagagaatcagtgaatactctga

SEQ ID NO: 101303 - DNA, 75 bp, Homo sapiens
cgcggaggcggctgaggtgcgagccggacgtggtgggtcctctggtgcgaaattccggatttccttgggtcttcc

SEQ ID NO: 101304 - DNA, 82 bp, Homo sapiens
tgcaaactcgctcaactggagggagttcagcttcgttcagatctcggcccctttccaaacactcctgatgcctcatttgcct

SEQ ID NO: 101305 - DNA, 96 bp, Homo sapiens
cccgagtcggccaagcatgggcaaccactcaggacggcccgaggatccggaaccaggacacatgacggaagtgtgtatttttgggccactccacgg

SEQ ID NO: 101306 - DNA, 51 bp, Homo sapiens
acagaatggaaaagagtcttctggagagaagtatggctacctttcacttcc

SEQ ID NO: 101307 - DNA, 98 bp, Homo sapiens
cagttttttaagaagggacaaaaggatttctctctgatcaaacggacagttcaggactcagaatctaaggatgaatgttcaccgtggcagtgacagtg

SEQ ID NO: 101308 - DNA, 142 bp, Homo sapiens
gaagattcagcaacaggtcagcaagtacccattaatggaagagattgggttcttggtgcttggcatgaggaccccagaggaactggaggatgtttctgaccttgaagaggaacacgaggtccgcagtcacaccagcattcag

SEQ ID NO: 101309 - DNA, 80 bp, Homo sapiens
aacgtggctgagccgtgttccatcaaagtccttgacaaggctacggtggtctacatagcctgctccttcaccacggtctg

SEQ ID NO: 101310 - DNA, 100 bp, Homo sapiens
ctcttgttttgccctcaattgtaattctgggattggctaaaagatgtgtgtgaaaagaataagtggagtcacaagaattcccctatcatctggagagagc

SEQ ID NO: 101311 - DNA, 96 bp, Homo sapiens
caggactgcgccgcgtcttcctcaaggtggggttcggggggccaccgaatcgctgtcacgccggcaggtacatgtcccagagcaagcacacggagg

SEQ ID NO: 101312 - DNA, 89 bp, Homo sapiens
cgaggacgaggagtcggaggagccgcgggcggcgcggcccagctcgttccaggcttgggcactgtttaaaggaaagttccgagaaggca

SEQ ID NO: 101313 - DNA, 75 bp, Homo sapiens
cctcgtgtctgccaccatcttcgacttgagcgaagttttatgcaagaccagcatctcagacatgtcgaaaaagat

SEQ ID NO: 101314 - DNA, 96 bp, Homo sapiens
gcccgtgccgccgccgcctcctgggaagtgtactaatggtcacttgatgtgcgctggctgttttatccacctactagcagatgcccggctgaagga

SEQ ID NO: 101315 - DNA, 100 bp, Homo sapiens
tgagcctcttgagcctgtgaaggacactgacattcagaatttcgctaaggagtttgtgatcagtgatcggaaggagctggaggaagatttcatcaagagc

SEQ ID NO: 101316 - DNA, 50 bp, Homo sapiens
aaggattccaagtaactcttatttgcctcttcagaagaaacttgactcct

SEQ ID NO: 101317 - DNA, 76 bp, Homo sapiens
ctggtgtcacctatcagtaaaagatgaacaagagaactgggcaacccatgatccacatctacctggacaaggaaac

SEQ ID NO: 101318 - DNA, 100 bp, Homo sapiens
aagtcagttgttgcatcaaatacttcatatttggcttcaatgtcatattttggtcaaataaagtgcccgtggtgcagccatcccatgcggtccatcctct

SEQ ID NO: 101319 - DNA, 74 bp, Homo sapiens
accggagcatggaggcgcacaacatcctcagatgaggagcgggaaggcctcctgcaccctggagaccgtgtggg

SEQ ID NO: 101320 - DNA, 100 bp, Homo sapiens
atgaacaactgtcaactcagtctctgattgaactttttgaatctttcaagagttttgaaggtggatatggttatagaagaagtggccgagataaatatgg

SEQ ID NO: 101321 - DNA, 101 bp, Homo sapiens
ccttccatgaatcacaaatgttcttaatggcatctagaatggatttttagactctgaggagcagttggagctaatccacattatggaaatggaaaccaccg

SEQ ID NO: 101322 - DNA, 75 bp, Homo sapiens
ctgtgaaaataatagacaaaactcagctaaatcctaccagtctacaaaagggatatagctagtgcaataaaagaa

SEQ ID NO: 101323 - DNA, 75 bp, Homo sapiens
ctacatgttctgcatcattgacaagtcattggtttattcttcagtccaaggaagcaattcacagtcagctgttag

SEQ ID NO: 101324 - DNA, 87 bp, Homo sapiens
gtgtacctccttgatggtgggtttaataagacagggctgttcatgtgaaggagggttggagcccaggcgtttggtacggggcgtgaa

SEQ ID NO: 101325 - DNA, 100 bp, Homo sapiens
gcatttcacggtggccttgtggagacaacgccttaacccaaggaagtgactcaaactgtgagaacttcagatctctactaagaatgtcactctggccggg

SEQ ID NO: 101326 - DNA, 87 bp, Homo sapiens
ccacgttcgtgctacagaagaagggcatcgtgcgtgccaagcggcgaggttctttgaatcatgctgccagtaagaagcttgacctgg

SEQ ID NO: 101327 - DNA, 83 bp, Homo sapiens
agaagaaattagagaagcattccgtgtgtttgataagctcttcaaaggaatctaaagacagcaagacatcatctaaagatgac

SEQ ID NO: 101328 - DNA, 101 bp, Homo sapiens
agctgctaataaagttgcagcgaggagaagcgcagcgacggcgtcgggagagcgcgcctagccggctcgcgaccaagaaggatcaagaaggtggagaagaa

SEQ ID NO: 101329 - DNA, 87 bp, Homo sapiens
gcccccagctcagctcttactgcgggccgctccgacggcggtccatcctggtgaccctggcagcaaccccaacaaacgccagaggca

SEQ ID NO: 101330 - DNA, 87 bp, Homo sapiens
gccccctgggatccgcaggttccctacacggtctcctgggtcaaggcccaggctgcaagcacaaaggaagtttgctcagtctcagcc

SEQ ID NO: 101331 - DNA, 96 bp, Homo sapiens
cgagagaaagagcctccgtcaccacataaggtcggaaaggtctgcttggaagccagacgaaacggctccacagagttccctgaggcgcccagaccc

SEQ ID NO: 101332 - DNA, 75 bp, Homo sapiens
atttcctggacttagctttgtcatgcaaagctgtcatttgctgtcgaccggagtacactgggaagcatcaaagaa

SEQ ID NO: 101333 - DNA, 100 bp, Homo sapiens
actgctctgctgtctcctgcaagaactggctcaagaaatttgcctcgaaaaccaattgtcgccgtgatcctgaaggcgctgacctacgacgagaagcggg

SEQ ID NO: 101334 - DNA, 100 bp, Homo sapiens
ggcagttggttgggacccgctccaaccctcgattttgactaaaggagaagttcaagtatcagataaagacacacacaactggagcagatgtttagggaca

SEQ ID NO: 101335 - DNA, 98 bp, Homo sapiens
ggaagcatgtcaccaacccggccttcaccaaactccctgtaaaaagatggcctatcagaaggtccatgcagatcaaagagctccaggacactcacagt

SEQ ID NO: 101336 - DNA, 50 bp, Homo sapiens
gttcaccagcactgtctccaccctagagctgctgcggactctggagcgtg

SEQ ID NO: 101337 - DNA, 106 bp, Homo sapiens
tgtggttgcaacggagataaattcccggaaccgcgattcggcgtgtcaggttatggaaacaaaggacatgctttacatcgtcactgaatttgctaaaaatggagaa

SEQ ID NO: 101338 - DNA, 98 bp, Homo sapiens
gtgattttagctacatcaagtgatgaaaaacacccacctgaaaatatcattgatggctgatgaacttattagtcctaaagacattgatcctgtccagc

SEQ ID NO: 101339 - DNA, 75 bp, Homo sapiens
atgagatcatggtggccaaacccacagactctgatgccagtatggactggagatgatgggagccagttggatagc

SEQ ID NO: 101340 - DNA, 75 bp, Homo sapiens
gaaagcagggtcatgctgtggaaaaggaatcctttacctgagaaagatcagtctaaagaaaaggagaagaaagtg

SEQ ID NO: 101341 - DNA, 100 bp, Homo sapiens
aatggtatcaaagtaacagtggaaaatgcaaagtgtgtgcaagcaaatgcttttattcagggacaggccttcagtatttggcatcacctttacatggagc

SEQ ID NO: 101342 - DNA, 107 bp, Homo sapiens
gaggaggaggaggtggagttgctgcccttccggagtccgccccgtgaggagaatgggttaaagcacgaattgggagctctcagcgacatcaccagtcagcagccaaa

SEQ ID NO: 101343 - DNA, 72 bp, Homo sapiens
ccacccggacaagaacccggatgagggcgagaaggctcttgcagccaatgccggaacaggatttgctgttgc

SEQ ID NO: 101344 - DNA, 100 bp, Homo sapiens
gaagaggtggcccccgccccgtcgggcctcacgagtactatactggcaattgctggagaagattttgcaattgttgcttctgatactcgattgagtgaag

SEQ ID NO: 101345 - DNA, 100 bp, Homo sapiens
gtcatcacagagaaggagacccaggtgaccattgaagagttggagaaggagatgctgaatgggcaaaagctccaaggaccgcagacttctgctgaagtgt

SEQ ID NO: 101346 - DNA, 51 bp, Homo sapiens
gtggcttcaatcaggctgaggagagcacagagatgctgttcagttaaatgt

SEQ ID NO: 101347 - DNA, 50 bp, Homo sapiens
ctgctccggccgccggcgacgcggggagtacttcttgcaagcagagctga

SEQ ID NO: 101348 - DNA, 100 bp, Homo sapiens
cggggtgatggcggtggagactctgtccccggactgggagtttgaccgcgttgacgacggctcgcagagttgcatcataaatacaaaggactgaagttat

SEQ ID NO: 101349 - DNA, 90 bp, Homo sapiens
ctgcgaaggctccccataaacagcctcataagcagtattctaccttgtaaatactgttatttgtatatactgtaaatgatgacatcggtg

SEQ ID NO: 101350 - DNA, 121 bp, Homo sapiens
gacttcccattatgtgattgccatctttgccctgatgagctcctgtttagccactgcagataaacctctcataatgaaggcccccgctgtgcttgcacctggcatcctcgtgctcctgttt

SEQ ID NO: 101351 - DNA, 95 bp, Homo sapiens
aggcctgtcacgcaggcgctctgcacaggaagctgcagggttggattagtagaatctaaaatccgtgtacttgttggaaacttggaacggaatga

SEQ ID NO: 101352 - DNA, 83 bp, Homo sapiens
cgtcgtcggcctctgggcagcagcaaattgtggctactaatttgccccctgaagatcaagatggctctggggatgactctgac

SEQ ID NO: 101353 - DNA, 90 bp, Homo sapiens
gacgcacccagtctctgggtctacggcttcagtgaccgcgtgggcagcgtgaaggtctccagtggaacggctctgccagcagacagcctt

SEQ ID NO: 101354 - DNA, 100 bp, Homo sapiens
cccgcccgccggggccccgctgtccgccgcccgccgccgctggagctagagggtggtgaaggaggagatctttgatgacaatgccaagcttccctgcttc

SEQ ID NO: 101355 - DNA, 100 bp, Homo sapiens
caagacatgatttctgctggtggagagagtgttgctggtatcactgcaatatctggcaagccgggtgacaaggtatcttcaaagaacagtaaaacatcca

SEQ ID NO: 101356 - DNA, 83 bp, Homo sapiens
cttggaccgagccgatcgccgcggggcagttcgggccggctgtcctggcgcgtgaacacctacctcttcatgatgcaagccca

SEQ ID NO: 101357 - DNA, 98 bp, Homo sapiens
gattcttcaagggatatggacggataagagatattgatctgaaaagaggctttggttttgtgaaatgtggtttggttttgagctggaagagagtacaa

SEQ ID NO: 101358 - DNA, 100 bp, Homo sapiens
ctaaccaggggcacctgattggtgatttttccaaggagacccccttcccacagaaagccgactcatgaacagctgtctccaggccaggaggaagtgccag

SEQ ID NO: 101359 - DNA, 100 bp, Homo sapiens
gctccccgggcagcgcatcaggcgggtccagagagtacaaggtggtaatgctgggagcagggggagttggtaaaagcgtactggagaaaatgaaactggg

SEQ ID NO: 101360 - DNA, 100 bp, Homo sapiens
attggcctggaggatatttggaatagcctctcttcagtgttcacagagatgcaaccagaacggaaaacagttcttccttcaaagcatgcagtacctgaag

SEQ ID NO: 101361 - DNA, 133 bp, Homo sapiens
acctgatcgagcgcatcgaggatttggcgctgcagaaccagatccgggagcacgtcatctccatcgaggcgtcgagggcgaggcccccagcagtgagactggcacatccctggacagcccctcagcctacccc

SEQ ID NO: 101362 - DNA, 74 bp, Homo sapiens
tgggaagtggagcaccgatgatgtgcagatcaatgacatttccctgcagcgtccagaggaccagaggttaattt

SEQ ID NO: 101363 - DNA, 82 bp, Homo sapiens
cggtgtggctgtgccgttggtcctgtgcggtcacttagccaagaagtccattggaatattaagcccaggagttgctttgggg

SEQ ID NO: 101364 - DNA, 75 bp, Homo sapiens
cattccgcttttgaggatgagatcgtttctctcagtttggggtcagaggctgctgatactttggctgtgaggcaa

SEQ ID NO: 101365 - DNA, 89 bp, Homo sapiens
caatgatggggcagcaagtggccaactgctccaatgaaaacgtccataaagagttcaagaaagccctgggagccaactgcatctttctc

SEQ ID NO: 101366 - DNA, 111 bp, Homo sapiens
tagctccaggttaggccgagctttgcgggaaagcagcggtgaaaggtgtagcagtcactcggcctacacccacagcatcgaccttgtgaacccagcgacctgactgccttg

SEQ ID NO: 101367 - DNA, 90 bp, Homo sapiens
gctgctggaggacatcgtgtaccggcagctgaatggggacggcaaaacagaacagaaaggcggagataaaaagaggggtgttaaaagacc

SEQ ID NO: 101368 - DNA, 100 bp, Homo sapiens
gaagccatggtttcttccctgccagaaatgaaggttcagttatgaggcaaccctctagtgtccaggactaagcctgtatgtgtcacctgcagtgcccatc

SEQ ID NO: 101369 - DNA, 76 bp, Homo sapiens
aaaaccagttattgaatatcaagaggaggagttgttggttggtcttggacaactgcacctgcacggagggcgtgga

SEQ ID NO: 101370 - DNA, 98 bp, Homo sapiens
aatagttctactccttctacaggtgtgtatgagcctcccctcccggaagtagaattttttacggtgcacagaggacctctaccacgcctcagactgag

SEQ ID NO: 101371 - DNA, 100 bp, Homo sapiens
caacatccagtaccagttccgcacagagacaaatggaggacagggtgacccgagaggcgtgccctgagctggactactttgtggtcttctcctctgtgag

SEQ ID NO: 101372 - DNA, 100 bp, Homo sapiens
aacaagcgcgtgtgcgaggagatcgccattatccccagcaaaaagctccgcaacaagatagcagggcagaaccaccccagtgcacctccctggcctggtc

SEQ ID NO: 101373 - DNA, 75 bp, Homo sapiens
cggagggcattcctgcaggccatcttggagcatgaggaggaaaatgagaattatatccagatcgagagacagaag

SEQ ID NO: 101374 - DNA, 100 bp, Homo sapiens
tgacacagcgtgggtagtggaggagggttacttcaacagttccctgtcgctggcagacaagggttcgaggacagccggctggatgcgtgcgtctatgagc

SEQ ID NO: 101375 - DNA, 75 bp, Homo sapiens
gtggggaaaatggcggtgtctacagtgttctcgacttcgtcgctgattgagaggatccagaatccagatctctgg

SEQ ID NO: 101376 - DNA, 90 bp, Homo sapiens
ccgcccacggcacggcagccaccatggcgctcctgctgtgcttcgtgctcctgtgcggagtagtgggtttaggagacgcgtggggacagc

SEQ ID NO: 101377 - DNA, 100 bp, Homo sapiens
tctgaatgaagccacaagagcttcaggtgatgataaatctaagctggactacttactactgatccacgtgtgagggaacggaagaagccaggccaagagg

SEQ ID NO: 101378 - DNA, 87 bp, Homo sapiens
cgtcgccatcttggatccgcgggacaagaaaattcatgcgggtacttttgacttcagtgacattgctgtctatatattcaataaacc

SEQ ID NO: 101379 - DNA, 101 bp, Homo sapiens
gctgcctgcctgcctggcatctctctctcccgagcggcaacacccttctcagactcgtggtactacccgtcctatcctccctcctaccctggcacgtggaa

SEQ ID NO: 101380 - DNA, 75 bp, Homo sapiens
cgaaaggatcatgaactagtgacctggaaaggtttgcctgcaatgagatttcattctctacatttaaaggacatc

SEQ ID NO: 101381 - DNA, 100 bp, Homo sapiens
cgggggcggcggccacgccaaggacgggtaattgctctagcagatgcagtggaggaaaaccaaggcaatctgttccagtcattcaccaggctgaagagtg

SEQ ID NO: 101382 - DNA, 88 bp, Homo sapiens
gcggcggaccgcggggcgctcatctggctctgctacgacgcgctggtgcacttcgcgctggaattgaatgatctggcacgggaccctc

SEQ ID NO: 101383 - DNA, 90 bp, Homo sapiens
gcggaccggcgtccccggcgcgaagaggctggactcggattcgttgcctgaggcaagaaataatggcggcagctacgggggatcctggac

SEQ ID NO: 101384 - DNA, 98 bp, Homo sapiens
ccaataaagagaggcagcttggaaatgagttctggttctccgatgggtccttatcagataagtccaagtgcgcagatcctggcctgatgcccctcccg

SEQ ID NO: 101385 - DNA, 100 bp, Homo sapiens
acatcaggtgtttttagtgtcactgagctagtaagagtgtcacagaggatgcagttattaaatgctgttcttctctcctaagttgaaaatcagaaacttg

SEQ ID NO: 101386 - DNA, 96 bp, Homo sapiens
tgggcgacgagctgaccctgggagacatcgacgatcttccttgacttgtccccactgcctgaaacagagcaacacctttgatcctttcctgtgtgt

SEQ ID NO: 101387 - DNA, 100 bp, Homo sapiens
gggtcctgaagtcagttgttgcatcaaatacttcatatttggcttcaatgtcatattttggaggaccattcttagtggcactggggaaatcttggcaccc

SEQ ID NO: 101388 - DNA, 100 bp, Homo sapiens
aaccaggcggaaaaaaacacagtcatgggcagagttcttgaggaagccagggtgataaaagaaaatgtggctgaagttacccgaagttcagcttgcagtg

SEQ ID NO: 101389 - DNA, 98 bp, Homo sapiens
ctctttctccacccatcccgagaacagcatatcacacctgaaaaattttatgtggaagcttgtgatgatggagcagatgacgtacttaccattgaccg

SEQ ID NO: 101390 - DNA, 50 bp, Homo sapiens
gtcaatcgcttgccccagcacagggatcgcttacacctgagacgaactac

SEQ ID NO: 101391 - DNA, 82 bp, Homo sapiens
gtgaggcctccccagccatgtggaactgtgaatgaaaactttgccattgatttgatagcagagcagcccgtgagcgaggtgg

SEQ ID NO: 101392 - DNA, 83 bp, Homo sapiens
cgcctccctggccggggcgcagttcggaggttcaggccccttcccagctgcctgcctgccctagccagctcccaggtgaagag

SEQ ID NO: 101393 - DNA, 88 bp, Homo sapiens
ctttacgattccaggacaagcttttgtccccaaaccagaggtgtcagcttcctctggtgcaaccagcaagtcttccagtatgaatccc

SEQ ID NO: 101394 - DNA, 88 bp, Homo sapiens
ggaagaaaacacaggagccggagcagaagcaaagaggtggtgaagcagtattttccaatttgaagattcatttgaaggtggctcctgc

SEQ ID NO: 101395 - DNA, 141 bp, Homo sapiens
agcactgccaaatagcagaagaataccatgaggtcaaaaaggaaatcaccctgcttgagcaaaggaagaatgaatctgaagtctgctgcagtaaaacacagaaggctttaaaatgttttcttgcataaaattcaaaacttt

SEQ ID NO: 101396 - DNA, 105 bp, Homo sapiens
gggaccgagcctgggaggccggccggtgccagcacctttcggcttctgagacggcggcagcagcggcattcaggagtatctgtgaaggaacagaccaggagacac

SEQ ID NO: 101397 - DNA, 50 bp, Homo sapiens
gccgatcgaaaactcagagaggaggagaagaaggaagttgtggaagaggc

SEQ ID NO: 101398 - DNA, 100 bp, Homo sapiens
gtagacaccagctccgaaatcaccaccaaggaaagaccacagcaagattctttcattcgtctcctcctagcctgggggaccaggctcgaactgaccctgg

SEQ ID NO: 101399 - DNA, 76 bp, Homo sapiens
gtgacctgcaaagtgctgagaaggaagagttcaaaggtcaggcgccctccccctgcgatcctgtgtgcaagattgt

SEQ ID NO: 101400 - DNA, 100 bp, Homo sapiens
aggaggataagcaagtcgaatttttgtcttacgattcccaacctgctgagcatccgcacacccactcaggagttggggcccagctcccagtttacttggt

SEQ ID NO: 101401 - DNA, 97 bp, Homo sapiens
tttgtgtctggagtgaagattttttatggttctcagactggaacagcgaaggtggagctgatcagaataatgttcagcatcaaccccctggagaacc

SEQ ID NO: 101402 - DNA, 75 bp, Homo sapiens
agaagccacgatccagaccgcaattaacaatggtacaggatagtggccaaagcctccaagaacctcatgtccacg

SEQ ID NO: 101403 - DNA, 75 bp, Homo sapiens
gaaatcggcgccatccttcagaatgcaggcatggctctgtgagcgctgatgaggctgcccgcacggctcccttcc

SEQ ID NO: 101404 - DNA, 90 bp, Homo sapiens
aaatgtttctgtccaggcaagggtgtgtgctgaatgactcaaggattttttggtccagttacaacacagggatcacaacaaacacaaccg

SEQ ID NO: 101405 - DNA, 100 bp, Homo sapiens
catctgctgctcccgctgcccgccagatcgccacatcacagaatcgtatctatctcacagctgacaaccttgtgctgaacctacaggatgaaagtttcac

SEQ ID NO: 101406 - DNA, 90 bp, Homo sapiens
catgtaccgaccttctgaacaaggccaacacctatgcaggaaaatgtttataggaggccttagctgggacactacaaagaaagatctgaa

SEQ ID NO: 101407 - DNA, 101 bp, Homo sapiens
agaacctgggaaccatcaaatgcagcaacctgtgcacagaaatagtggagtacaccagcaaagatgaggttactgaagagcaatagccacttgagtgagga

SEQ ID NO: 101408 - DNA, 90 bp, Homo sapiens
ccgggatcgtgaccgagaccgtgaccgagagcgtgaccgagagcgcgaatatcgtcatcgttagaagcaataacaattggtcgtcttggt

SEQ ID NO: 101409 - DNA, 100 bp, Homo sapiens
tggacagacaccacaagagcgagtggaagaagtccttagtggcaagatggtcatccagactcagagctctctctacagagaggaaattctccactgtgca

SEQ ID NO: 101410 - DNA, 95 bp, Homo sapiens
gagaacaccccgagcgaggccaaccttcaggaggaggagatgtgctggtggacggacagccatgtgaccgcgaggctgtggcggcctgccaggtg

SEQ ID NO: 101411 - DNA, 116 bp, Homo sapiens
ctcacgactaccagccgcttcctggcatgtcagagaacccctccgtctatgtgcctggtttggtgcacctcgatttggaggaagtagggcagggcccttatctggaaagaagtttg

SEQ ID NO: 101412 - DNA, 75 bp, Homo sapiens
ccaacatgccctggctgaaggccttaccgaggaggagtatcagcttgctatggcattgttcaagtacccactgga

SEQ ID NO: 101413 - DNA, 100 bp, Homo sapiens
ctgctggctttggcgtatacacaggtgaaattcgatgctactgtgatgctgcccactgtgtagccactggttatatgtgtaaatctgagctcagcgcctg

SEQ ID NO: 101414 - DNA, 90 bp, Homo sapiens
taccgcagccatgaagaaccaggttgcaagatttaatgacctcaggtttgtcggtcgaagtggaagagagagttaggttctgtggatgaa

SEQ ID NO: 101415 - DNA, 96 bp, Homo sapiens
ccgcgccctgctccctctcagcacctgggcggacgctttcccatggtttggcatggacattgggggaactctagtaaagctctcgtactttgaacc

SEQ ID NO: 101416 - DNA, 90 bp, Homo sapiens
cttcctggagggaaagtgccgctttaaggagaactgcaggtcttgggcgtctttggtactggcttttttaggggtctgcctggggattac

SEQ ID NO: 101417 - DNA, 100 bp, Homo sapiens
ctggctcaggtgagctgccccgcccccgcccggcgcgagccccaggtcctggcagcagaactgaagcgctgcggcatggcgcgcgcctgcctccaggccg

SEQ ID NO: 101418 - DNA, 100 bp, Homo sapiens
gattttcctgcatggattgggagatactggacattgtatgcaaacctgttccattctttcttcgtggacaacccattccaaaaagaatgcttccaccaga

SEQ ID NO: 101419 - DNA, 83 bp, Homo sapiens
cctccttgccaggccttcaaccactatctcagtgcaatgggtttttagaacttcagccataaaaatgggcagaattttccttg

SEQ ID NO: 101420 - DNA, 75 bp, Homo sapiens
ctgacattgcgtttccgttgtcggcctcccactgcagattcaagtcaatctgaaagtcccagccagccaagtgac

SEQ ID NO: 101421 - DNA, 98 bp, Homo sapiens
ctataaaggtcttatgagacttttgcactgtaaaactttacacattgtgctattcactctgctttacaagagatcgcggattcaggtgtggctctatg

SEQ ID NO: 101422 - DNA, 83 bp, Homo sapiens
aggggacagtgtccgcgcttgtgcttccctggtggtgctcagcttccctgagctcgagggcaagtgtccagagaatggctggg

SEQ ID NO: 101423 - DNA, 98 bp, Homo sapiens
ggaatgtcatccagcgagtgattaggaatccattccttcattgccacaatcacctatgagagaaacgccttccaaagcatttcatcagtacagcaaca

SEQ ID NO: 101424 - DNA, 100 bp, Homo sapiens
gcttaccaggctggcttgctctgagctgcggttactgtgtccaggccccgggttctcaggcatctgtgggaaaactagaattgcagaagttggaggtgtg

SEQ ID NO: 101425 - DNA, 82 bp, Homo sapiens
gaagggagccgaccgggccctgggctggaggtaaaaccccacgcagcccctgtcaaagggaacaggaagcagtccacggagg

SEQ ID NO: 101426 - DNA, 75 bp, Homo sapiens
atgtgttttggtgttatccagttccatcttctaaggctaaaaggattcttgaagatcatggctcacctgctggag

SEQ ID NO: 101427 - DNA, 100 bp, Homo sapiens
cataattgaatttgtttcacccccgtggattccagtgggcccgacagcgcaacaggtgaccattgtgaggtagatattttgttctaattttccagatgag

SEQ ID NO: 101428 - DNA, 50 bp, Homo sapiens
caggcaccttccaccaaccgccagatcggataacagcccgccgtcagtgg

SEQ ID NO: 101429 - DNA, 100 bp, Homo sapiens
cgtgcggaaggccctcaacatcccggagcagctgccacaatgggacatgtgcaattttaagacaattatctcctatattgatgagcaatttgagaggtac

SEQ ID NO: 101430 - DNA, 74 bp, Homo sapiens
agctcaatgcctcagaaattcattgaattcagaggtgtctgtgtttgaagtcaacattcgatttattggaggcc

SEQ ID NO: 101431 - DNA, 83 bp, Homo sapiens
accttctggaagctactactacgtggtgcttggaaagctattgtggacgatgaaaggctctctgcagaggagatggatgagag

SEQ ID NO: 101432 - DNA, 100 bp, Homo sapiens
atcaaccatattaatagcaattaaaagaaaatagaatgtggccacttatttcactatcttcttcaaatacaaagtctgccaaaatgtctgaaagatcaga

SEQ ID NO: 101433 - DNA, 100 bp, Homo sapiens
caggaggttgctaacccagaacactatattaaacatcccctacagaacagatttgggatgatgaaattgttgcagacttttacgtagctgttccagaaat

SEQ ID NO: 101434 - DNA, 85 bp, Homo sapiens
aaaaagcgatgggccgaaagagctcataaagtggtggagataaaatcgtttcatttccagggaccctgtggaacgactcttcctg

SEQ ID NO: 101435 - DNA, 90 bp, Homo sapiens
agtgaggaattttgaagtacaccgtggtgacattgtatcattggtgttcagtaagaagaaggacagcatagatccttacatatacacacc

SEQ ID NO: 101436 - DNA, 89 bp, Homo sapiens
ggagatggatggtgatgagatgacccgtattatctggcagttcatcaaggagaagggagcttgtattttgaatatgctcaaggattttc

SEQ ID NO: 101437 - DNA, 75 bp, Homo sapiens
aggccctgaggtgggccggacctgggagtggcagggggctgttgtggttccgactataaacagtacgtgtttggc

SEQ ID NO: 101438 - DNA, 75 bp, Homo sapiens
gtgtggggctgggtctcggagtgggagacgtggagtgcaggccttcgtcaagatggttggacaccacgtcgcctt

SEQ ID NO: 101439 - DNA, 100 bp, Homo sapiens
tccactacgaaggccacctacaaatagcagatcagtccaaacaagttgtagttgagtccctgtacattatcagttgctatggcaccttagtggaacacat

SEQ ID NO: 101440 - DNA, 100 bp, Homo sapiens
gaccgcttgtcaaaggcccagttacatctcatggctttagtgtcaaatgggttttgcacagtaataagttgactcacacagacttaaagcctgaaaacat

SEQ ID NO: 101441 - DNA, 82 bp, Homo sapiens
cctgtgccccgacggcttccagctggtggcccagcgaagatgcgaaggtcgacactcaaagggggtggcaaagacagtaaca

SEQ ID NO: 101442 - DNA, 50 bp, Homo sapiens
caggcatcatggactgtgcgcccaaggttctgcttccttcggtgctgcgg

SEQ ID NO: 101443 - DNA, 100 bp, Homo sapiens
caataatgaaagctcttcagaggaatgtgcggcaagaggagaagactatgagaaagtgaagttgctggagatcagtgcagaagatgcagaaagatgggag

SEQ ID NO: 101444 - DNA, 93 bp, Homo sapiens
gctccgtggctggttcccggcgagctacgtgcagttgctggaggagagaacattgaaagtattctctaagctatttgaagagagtgactaaat

SEQ ID NO: 101445 - DNA, 97 bp, Homo sapiens
ttcctgcagaacatcctggctcaggaggacactgctaagggtctcgaccccttggcttctgaagacacgagccgtagaagaagtatgtcttcctgga

SEQ ID NO: 101446 - DNA, 100 bp, Homo sapiens
ctgcttccaagacctcaaggagagcagctcttgcaagcttaggatatgaaaagagctgtgtgttgttcaattgtgcagccttagctagccaaattgcagc

SEQ ID NO: 101447 - DNA, 100 bp, Homo sapiens
gaagattcgaggcggcgggggacaagtcggcgccccagagcggacgagtgccgatgcaagaccccagagcagctatgcagcggggatccttgcctgcgaa

SEQ ID NO: 101448 - DNA, 74 bp, Homo sapiens
cctacaaggaccttcctcccaagccagtgtgacaagcggaatccaaatggcattcgagtggctccagttcctct

SEQ ID NO: 101449 - DNA, 100 bp, Homo sapiens
gtggcttcattcgcctcaagcccgacaccaacaaggtggcctttgtcagcgcccagaacacagactgatgtcctcaagtgtgtggtcagcacagaccctg

SEQ ID NO: 101450 - DNA, 83 bp, Homo sapiens
aaacctcactgtctctgtcctggaagcagaaggagtctttgaaaaagtttgcttgcctaaactggacttgaagcaatttaaac

SEQ ID NO: 101451 - DNA, 98 bp, Homo sapiens
agtaagcttgggaggtaggagttggcgagtagtagcgaggagacgaaggagaatgaagtttctagattagaagacataatgcagcatttaaaatcaaa

SEQ ID NO: 101452 - DNA, 50 bp, Homo sapiens
ctgcaaatacctcacccttcaaagtaccacttcttacatccgtgtttgac

SEQ ID NO: 101453 - DNA, 100 bp, Homo sapiens
caaaccactgaggatcagattttgaagagagatatgccaccagcatttattaagaactagcttctaaaaaatccctgcctatgaattattacacagtatt

SEQ ID NO: 101454 - DNA, 100 bp, Homo sapiens
cctgaccatggctccctgcagtaccctttaacgggaaatcctcattgacgattcaatttgttgaaggccaatttgtggactcctacgatccaaccataga

SEQ ID NO: 101455 - DNA, 82 bp, Homo sapiens
tatgatgacaacagcatcatgaccttcaacctcagtcaggtgtacagccttggcctcaaaggagccattgtgaccttatcca

SEQ ID NO: 101456 - DNA, 75 bp, Homo sapiens
gcagccaggagtcatgagcgacagcggcgagcagaactacggcgagcggcttaagagttggacagtggaggacct

SEQ ID NO: 101457 - DNA, 100 bp, Homo sapiens
tctgcctgacttggaccctggaaaacctggccctcttcaatttctgacaaaaggtcatggaaaatggaagatttgcaaaatacaaatattttacccatgt

SEQ ID NO: 101458 - DNA, 101 bp, Homo sapiens
gaaaggaagagggagcagagcaagaaaaaaaggaagacgatgacttcaggtgaagtgggcaatgcagccaagatgatgctgatcgtgaacatggtccaagg

SEQ ID NO: 101459 - DNA, 100 bp, Homo sapiens
cggaggcggaagcaggactcggggcacttgggcaagagtttggctcagatcaatgtccagatctgacaagggaagtgtacctccaggacatccactgtgt

SEQ ID NO: 101460 - DNA, 90 bp, Homo sapiens
gcggcgtcccctgcagccgcggaccgaggcagcggcggcacctgccggccgaggggtagaaatatttctgtcatggctcattcaaagact

SEQ ID NO: 101461 - DNA, 74 bp, Homo sapiens
ttacttctccgccaacgcggtcatctcgcagaacgccatcaaccagctccactgaggcggctcccagctgcgtt

SEQ ID NO: 101462 - DNA, 75 bp, Homo sapiens
gtcgaaggggtgctggcgagacgggggtgatgcccacccgggcgagaaaggcttggccttcgtgcctctgcagat

SEQ ID NO: 101463 - DNA, 127 bp, Homo sapiens
aatggatggttccttgcaaagggcacgtatagcattggtaaagaacgatcgtccagtggaggttagcatggcctcattgaaagaactagatcaaagactctttgaaaattacatcgagttgaaagca

SEQ ID NO: 101464 - DNA, 75 bp, Homo sapiens
gacagctttatttcacatgtacagcatttggcgcctcaagtgagaaagatcagtctaaagaaaaggagaagaaag

SEQ ID NO: 101465 - DNA, 100 bp, Homo sapiens
agcatttgcagcaagccaccaccttaaaactcacgttcgtacacatactggagaaacctacacctacgactggcagctgattactcatcctagagactac

SEQ ID NO: 101466 - DNA, 96 bp, Homo sapiens
caaactctgtgcctcaacaaccatttctaagtggaacattttagtggacaaaccaaatgaccaatcttcaagatggtcttcagagagcaactatcc

SEQ ID NO: 101467 - DNA, 83 bp, Homo sapiens
agccgagcacgcgggtctgtcatcatgtcgcgttacgggcggtacggaggagggtgataaaagaaaatgtggctgaagttacc

SEQ ID NO: 101468 - DNA, 80 bp, Homo sapiens
ttcatgtccaacaagcacgtcttcgccatcttcaacacggagcagagaaaaggaacggctgtagtagatctctctgggaa

SEQ ID NO: 101469 - DNA, 100 bp, Homo sapiens
ctgcacttcctgcagcacgagtgggcccgcttcgaggtggagagagcccagtgggaggtggagcgggcggagctgcagacgttggaacttgccaggaatc

SEQ ID NO: 101470 - DNA, 80 bp, Homo sapiens
agattcttccaagaaaggaatgacagttaagaaccttattgatgcagagattattaaagattcttggatctcccagtcag

SEQ ID NO: 101471 - DNA, 100 bp, Homo sapiens
gggaggataattgggatgatgacaatgtagaggatgacttctctaatcagttacggaggggttggttcccgtcgtcgtacacgaagttgctggaagaaaa

SEQ ID NO: 101472 - DNA, 89 bp, Homo sapiens
gtcctaccatgtcagccttcccagtagctgggaccacagggatgatgcagtgtgtgattgcagtcgcggacaaagtattcgatgccttc

SEQ ID NO: 101473 - DNA, 143 bp, Homo sapiens
cgccggcaaccgcgagaaggcccagcgcttcctgcagaaggccgagaagctctacccactgccctcggcccgcggccaagtggcatcagagctgagtgatggacgacctgcagtcccagaacctctccatggacatgactgac

SEQ ID NO: 101474 - DNA, 75 bp, Homo sapiens
ctgcctcgggccctgcccctacatttggagcctggacacgcagtacagcaaggaagaagctgtttgttttgattc

SEQ ID NO: 101475 - DNA, 100 bp, Homo sapiens
gaaagctagaagaaaaggtgtacttgcaagaaacctcaggacttgagtaacagcaacatggtcagaaacccttcccttgtcaaaaatgcgatgccttctt

SEQ ID NO: 101476 - DNA, 75 bp, Homo sapiens
gctacggttgttgttggcgactgtgcttcaagcggttttaaaatcaaagatgggaaaatcggagaaaattgccct

SEQ ID NO: 101477 - DNA, 75 bp, Homo sapiens
cgagcggccgcgagcagagccgcccagccctgccagctgcgccgggacggagtgtggccatctggggccgtgtgg

SEQ ID NO: 101478 - DNA, 98 bp, Homo sapiens
gagaagagggcggcgggacctttcctggcgccgctcgcatccgcacttccactaatagccaagtagacaagctgaccctgtcagggagtgacagcgtc

SEQ ID NO: 101479 - DNA, 98 bp, Homo sapiens
ttcgtactcggttattaaatggcctagcccagcaaatgatcagccttgcaaataatcacagattagctgaaaggaatgtagaagctgtaagaaatgca

SEQ ID NO: 101480 - DNA, 101 bp, Homo sapiens
ctcacggccagccctggggtgttccccgtcactgtgcacatgatggctccgctacttacttgagattcattattgtatcagcctttgatcattttgcatct

SEQ ID NO: 101481 - DNA, 100 bp, Homo sapiens
catcctctcggtgttcccgctggcggcgggcatcttcttcgtgaggctgctcttcgagcgtttaatggatcgagaagtggcgttgcttgctgaaatggac

SEQ ID NO: 101482 - DNA, 83 bp, Homo sapiens
tgaggaagttacatctttggcaaagtctctcatcaaatcctggaaaaaattattagacctagaggatcaagacataatgggag

SEQ ID NO: 101483 - DNA, 100 bp, Homo sapiens
cagaaggtctctggagacatcttcagcaggaatacggggtgctttgcattcaggaatacagaaaaaacagcaaagtggagtcaagtacacgtaacaactt

SEQ ID NO: 101484 - DNA, 98 bp, Homo sapiens
tgagggctccggggtaggtgggtgacggcggtcggaggtgtaggagggagccgtggaggtccagatgttggggatcagccaggtgaggtaggttattc

SEQ ID NO: 101485 - DNA, 75 bp, Homo sapiens
gcttcacgcctggcaggcggccggccaggttggcatggattacagaagctgcatcctgagacccggcggttccga

SEQ ID NO: 101486 - DNA, 74 bp, Homo sapiens
ccggagagccccggagtgagcggagtagcgagtcggcaacccggagatggtcagtaggacagaaggtaacattg

SEQ ID NO: 101487 - DNA, 100 bp, Homo sapiens
acgttcgagaggaagattcttacctctttgatctcgacaataaggccctgtttgtgctcttcgtcctggcctacatccacatcgtcttctcccgctcgcc

SEQ ID NO: 101488 - DNA, 100 bp, Homo sapiens
cggatgggatccagctgttagtcggtgttcaagagacctatgaagccaaaagacatgagttccatggtgaacgtcagaggaaggaagaagaaatgaaaca

SEQ ID NO: 101489 - DNA, 100 bp, Homo sapiens
tacgccagtatgctgtacgaacgccggatactcatcatttgcagcaaactcagcactagcatgaataatctttcatttagtgagctatgttgcctcttct

SEQ ID NO: 101490 - DNA, 82 bp, Homo sapiens
ggtggcgcctgccggagcttcctacaatccatcctttgaagaccaccaggaatgggtaccacagaccatgtcatcgtcctgg

SEQ ID NO: 101491 - DNA, 100 bp, Homo sapiens
agctcagcgttcttgaagatctggccttattcccagagccacagccagttgagaacatgaaattgtaccacatgctgcctcgaactctgtcactgagacc

SEQ ID NO: 101492 - DNA, 83 bp, Homo sapiens
gttccttgtggagccggagctgggcgcggattcgccgaggcaccgaggcactcagaggaggagtgcctgtgaagaaaacgggg

SEQ ID NO: 101493 - DNA, 89 bp, Homo sapiens
atttgacgatgccaccgaggcatcagtgctgctcacggccgtgaactgctacagcgtgaaggccgccacccgggtccaggatgcctttg

SEQ ID NO: 101494 - DNA, 100 bp, Homo sapiens
gtctcctacctcctcacggctcttcccggcgctctcctggctcccttctgccccagctccgtctcggcggcggcgggctccaaccaggaatggagacgcc

SEQ ID NO: 101495 - DNA, 90 bp, Homo sapiens
atgccctgaaaaagtatcgtcgagaagcctatcatcggcagttgtgaaaaacttcaggacaaaaatgtttcatttaaggacttgtgctgc

SEQ ID NO: 101496 - DNA, 98 bp, Homo sapiens
gacgacgagtacgactacctctttaaaggtgacagaccatgccaccactgccctgctccactatcagctgccccagatgccggatgtcgtggtccgat

SEQ ID NO: 101497 - DNA, 75 bp, Homo sapiens
cccctcggcactaggcagcggaggagcccgaccgacccgttctttcgggaggaccattgcctcaagggcatgaat

SEQ ID NO: 101498 - DNA, 95 bp, Homo sapiens
gagctgaaggcctctgagactcagagatccctcctggagcaggaccttgctacctacatcacagaatgcagtgactacaaatccctccaggatat

SEQ ID NO: 101499 - DNA, 124 bp, Homo sapiens
gatgtatgatcgtgtgattgactttgatgagaacactgctctggatgatgcagaagaggagtcctttaggaagcccaaatcctcagaagaaattttacatttattggataatggaaacaaaaac

SEQ ID NO: 101500 - DNA, 76 bp, Homo sapiens
ctgatgaatacaaagacaacctgcaccagggcgacataccttctgttgaataccttttacaaaatggaagtgatcc

SEQ ID NO: 101501 - DNA, 83 bp, Homo sapiens
gagcgaagagctcggaccaagcgctcagatgatgtcagttcatacagactgtattgtgtcagtgcagattttaagtacattga

SEQ ID NO: 101502 - DNA, 100 bp, Homo sapiens
taccccactcctgggccgtccctgaaggtagctcagtggcatttctgagcaggggccaccctgacttcaccttggcccaccatgagggtcttcctgcttt

SEQ ID NO: 101503 - DNA, 136 bp, Homo sapiens
tccgtcatgggcgtgtgcttgttgattccaggactggctactgcgtacatccacaggttcactaacgggggcaaggtgatgggcggcctggatggcgacatgttcaactactataagatgctgatgctgcaagggc

SEQ ID NO: 101504 - DNA, 50 bp, Homo sapiens
gcagagtacgatactcaggtcaaagatgaagattatggaagagattcggg

SEQ ID NO: 101505 - DNA, 83 bp, Homo sapiens
gtacagcaccggcaagaccaccttcatcagatggacacccgctccgggagccagtgttccgtcaccccagaagccatactcaa

SEQ ID NO: 101506 - DNA, 75 bp, Homo sapiens
tgccactgctgctccgtggagatcgtcccgcgcctgccgggcatgacgtccttgatgaaggccgcgctggacctc

SEQ ID NO: 101507 - DNA, 80 bp, Homo sapiens
cttggatatcttcggggacctgaagaagatgaacaagcgccaggtgacttaagagattaaaattaatttggttgctgttg

SEQ ID NO: 101508 - DNA, 100 bp, Homo sapiens
atcacttataaatggcgccgaagcaggacccgaagcctaaattccaggagggcctggtactgtggcgctccgtgaaattagacgttatcagaagtccact

SEQ ID NO: 101509 - DNA, 110 bp, Homo sapiens
ctgcctcagcctcccgagtggctgggattacagggcttgaagttcaaagatgtggtcatttacttctctcaaaaggagtgggaatgcttgcactctgctcagaaggattt

SEQ ID NO: 101510 - DNA, 74 bp, Homo sapiens
aacatggcggatcggctcacgcagcttcaggacgctgtgaattcggaactgcaagcacatgttgaccagataac

SEQ ID NO: 101511 - DNA, 100 bp, Homo sapiens
acacttgatgaaatctacataaagactaaaacattttaccaattttgcattgtttgtttgaaattgcattgacgactggaggacatgaaccttaacgaag

SEQ ID NO: 101512 - DNA, 100 bp, Homo sapiens
ttcagaattgtcagatttcgctttgatgaatcaggtcccgaaagtgctaaaaagaatcccctactttgaaactagtgctgccaatgggacaaacataagc

SEQ ID NO: 101513 - DNA, 96 bp, Homo sapiens
tgatgatgggcagaaatggactgtgtacagagagcctggtgtggagcaagataagtggaattggggctgaatgaagatgatgcatttgcaaagggc

SEQ ID NO: 101514 - DNA, 100 bp, Homo sapiens
atcgtcgagatgtctacttcgaagactggcaagcacggccacgccaaggtgacaatgtgctatcagccctcactcggtcccggcacctcctcggcctcga

SEQ ID NO: 101515 - DNA, 75 bp, Homo sapiens
ggcggcggtaggaagccggagacagcagggtgacagaaatacactttcgggaaatggcctctaaatcctggctga

SEQ ID NO: 101516 - DNA, 88 bp, Homo sapiens
gcggtggtgggcgccgtgaagagccttcaggcgctgggcgagcaaatcagccggcaccaggagcagttcatccagatgctgaacgagc

SEQ ID NO: 101517 - DNA, 75 bp, Homo sapiens
ttcagaagagccaaggaataaacatgcaatgaacccaaaaggactgctgatcttggacttgatattggtgcccag

SEQ ID NO: 101518 - DNA, 100 bp, Homo sapiens
cccgcccctgtctcccgctccgcagccccgggcacggcggaggcagcggagccctgggccatcgttgacttcaagcctcgagccagcatggatactgtcc

SEQ ID NO: 101519 - DNA, 100 bp, Homo sapiens
caaacccaaaatccactgcttcaggagcctaaagcgtggggtcacgactgctgaatatgagacgatctgcagcaccaagtcagttgcaggggaattcctt

SEQ ID NO: 101520 - DNA, 83 bp, Homo sapiens
atttattaaaggaagcacacctaaggtggtggaagatggatatgaattttttgctaaacgacagttggtaaccttattttcag

SEQ ID NO: 101521 - DNA, 75 bp, Homo sapiens
gagcagaggatggaacacttcagtgcattcaaggaccccgcagggatctttgaattggtggaacttgttggaaat

SEQ ID NO: 101522 - DNA, 134 bp, Homo sapiens
gtgaccgagaccgtgaccgagagcgtgaccgagagcgcgaatatcgtcatcgttagaaggttacaggaaatacaggaggcagaggaacaaataaaagacaccacgagaaacagacacatccagaacgtggaata

SEQ ID NO: 101523 - DNA, 95 bp, Homo sapiens
tcccggaagtcaccattggagctcatcagactgaccgtgtcttacatcagttcagagaggacttggatgttgtgggtgatggtatgcagtgtcct

SEQ ID NO: 101524 - DNA, 100 bp, Homo sapiens
catgcacttgctacgaaacagaaatttcatgttgcaccctgtatgccaacagtagcctcataaagtacatggagaaacacaaggtcaagcctgacagcaa

SEQ ID NO: 101525 - DNA, 101 bp, Homo sapiens
tcagttgcacatccccacatcaatgcactgccaatggtcacgagacatgtgtagaactgcttttagaacaggaagttttccagaaaacggaaggaaatgct

SEQ ID NO: 101526 - DNA, 99 bp, Homo sapiens
ttatacttgcttttgcttcagcgttctgtggttgtcaacaggcctcctgtgtcacctggatgacgcctgtgtcagcaacccctgccacgaggatgctat

SEQ ID NO: 101527 - DNA, 100 bp, Homo sapiens
aaaagtagtgggacagtttcaagatgaagtctggcaaactgatgacctaatagagagaatccaggaagaggaaaataaaccttcaaggcaaactgtgttc

SEQ ID NO: 101528 - DNA, 94 bp, Homo sapiens
ggctgactacctgctgtacaccctcaacaaacaccagcgctttgggttcgagaacttgtcttggacaattgcaaatcaaatgatggaaaaattg

SEQ ID NO: 101529 - DNA, 82 bp, Homo sapiens
tgttacatgacagatgtatgagatggcccactgcgtgaccttggttcagctgtccatttcctgtgaccatctcattgacaag

SEQ ID NO: 101530 - DNA, 100 bp, Homo sapiens
cccgagttatgcccaccctccaactttgcgacggaaatgtgtcatcgaaagccagagtattgttacaatcacatttgacgtaccaggaaatgcaaaggaa

SEQ ID NO: 101531 - DNA, 100 bp, Homo sapiens
gtgacaagctcaaggcctgcgagagaatttggatggagagacccggaactgccggaagtgattcagatgttgcagcaccagtttccctcggtccagtcta

SEQ ID NO: 101532 - DNA, 100 bp, Homo sapiens
cccccgacttgtccactgaagtaacagcagcaatgaccttccctcgggaattccacctctgcgtttttccctccagctcgccctcccctacctgcggaag

SEQ ID NO: 101533 - DNA, 51 bp, Homo sapiens
ctctgcgggagatcatccgtcggctggagctgggcgccgtgtacacagaag

SEQ ID NO: 101534 - DNA, 100 bp, Homo sapiens
ctctcagtcaagatccaaacagtctttcaaacctagatcaggtgtgttttatggcccagaacatggtctgtcttggtgaatgttccatgtgagcttgaga

SEQ ID NO: 101535 - DNA, 74 bp, Homo sapiens
tcccatccaagacatctggtaccacgaggatcggattagagcatttccacaagacggcaccctatgtcgtcact

SEQ ID NO: 101536 - DNA, 75 bp, Homo sapiens
cgccgaggaacccggctgaggcggcagtaccgtgtgactgtgccgctgatgggggctgtgtccgacctgtgcgag

SEQ ID NO: 101537 - DNA, 73 bp, Homo sapiens
gtggagcggtacatcgcctcggtgcagggctccaccccgtcgcctcgacaggagatgtaatcagtgtagagaa

SEQ ID NO: 101538 - DNA, 100 bp, Homo sapiens
cagctgtgtccttaacaaccaggccccagttaagtgggcagaccaacatccacctcagcaaaaacttcttcctgacgaatcgcgccagggagcgctcaga

SEQ ID NO: 101539 - DNA, 100 bp, Homo sapiens
atgattaacaacaatgtgattgtgaggaatgcggaggacattgagcagctctatgggaaacgtaactggcggaaacccagaggcattgacaacagggttc

SEQ ID NO: 101540 - DNA, 75 bp, Homo sapiens
gtgatccagaagtccagagctgaggactgcctgtttgcagctcctgacccctgaggattaccagcgatttctaga

SEQ ID NO: 101541 - DNA, 87 bp, Homo sapiens
ttgccagggcatgtagctctccaggcttgcaagcgattaccaggcaccagagaaggaggaattcctggcctggcagcatgatctgga

SEQ ID NO: 101542 - DNA, 75 bp, Homo sapiens
cggtaccggaccctgcagccgcagaggtcaaaatgcagatcttcgtgaaaacccttaccggcaagaccatcaccc

SEQ ID NO: 101543 - DNA, 100 bp, Homo sapiens
gaatattaccagtcagaggcggaaggactcctggaatgccacaaatgcaaatacttgtgcactgggagagatgagtttgatgcctacatcattgtgtctt

SEQ ID NO: 101544 - DNA, 75 bp, Homo sapiens
gaaaattccatccttggacagttaaaagcagagcgacctgatcccaaccttgaagaaagtcctaaaagaaaaaat

SEQ ID NO: 101545 - DNA, 100 bp, Homo sapiens
ttggccctgaaaaaagacagagaaactatgggacacagatatgttgaaggtgacagtgagggtgatgaagaggagacgacacaagatgaagtctcttccc

SEQ ID NO: 101546 - DNA, 88 bp, Homo sapiens
tcgctcccttgatgatcttgaggagagaacattgaaagtattctctaagctatttgaagagagtgactaaatgcacctgggtcaggct

SEQ ID NO: 101547 - DNA, 121 bp, Homo sapiens
gtgagcgccgcggccgccgcagccatgaccgtggagttcgaggagtgcgtcaaggactccccgcgcttcaggacttcactgaggatgtcaactgtgcttttgagttcctgctgaagctcac

SEQ ID NO: 101548 - DNA, 102 bp, Homo sapiens
ggagaacatcgaggcccccagtccccaagcagggctccatgggtcgggcggcgggcattggtactccaaagattcaggtttactcacgtcatccagcagaga

SEQ ID NO: 101549 - DNA, 75 bp, Homo sapiens
cacccgctccgcgccgagggctggaggatgcgttccctggggtccgggtcccaaaccagttgtcttcctgcaaca

SEQ ID NO: 101550 - DNA, 98 bp, Homo sapiens
cctcgagaaaagattttctattacttcagcaacagtccttcaaagcgtcattgtgaaaattggaagacacttatataaactttggcattgtgtttagc

SEQ ID NO: 101551 - DNA, 75 bp, Homo sapiens
gacccgcgccctgctccctctcagcacctgggcggacgattagctaatcatcagctggataaagagaaagcagaa

SEQ ID NO: 101552 - DNA, 83 bp, Homo sapiens
gtggtgtctttgctgagggtcacattgagctgcaggttgaatccggggtgcctttagccgccgccatgtctgcgcatctgcaa

SEQ ID NO: 101553 - DNA, 100 bp, Homo sapiens
tcggctccaaagacgatgacaagatggtctttaagacagatctgactgcagccatgagcagcaatgagtgcttcaagtgtggacgatctggccactgggc

SEQ ID NO: 101554 - DNA, 100 bp, Homo sapiens
tgccgctgccgctgccgcacctccgtagctgactcggttgtggcagcactgcctgaaggtatgagaccagattctaatctttatggttttccatgggaat

SEQ ID NO: 101555 - DNA, 82 bp, Homo sapiens
ccacaagaaccgcgaggacagaggtttggtgcacctcgatttggaggaagtagggcagggcccttatctggaaagaagtttg

SEQ ID NO: 101556 - DNA, 75 bp, Homo sapiens
tttactcctttatggagcaaatatgaactcttctgaagaaagatcatggagctttgtggtgcaacaagacttggt

SEQ ID NO: 101557 - DNA, 82 bp, Homo sapiens
cgtgccgcgagcgcggcctgcaggaggtccccgttctccgtgtcctgctgtccgctgacctgaaggggttccagtacttctc

SEQ ID NO: 101558 - DNA, 97 bp, Homo sapiens
gcgaaacgccgcgcactcggagccggcacggctcggcgcaagagtgagccatggagctacgtgtggggaacaagtaccgcctgggacggaagatcgg

SEQ ID NO: 101559 - DNA, 50 bp, Homo sapiens
tgatcatcctgctgctccccggaagtgaccctggcaaagatgagagtgca

SEQ ID NO: 101560 - DNA, 74 bp, Homo sapiens
aagaagtgatgctggagaattacaggaatcttctctcattgggagagatgaatggagagtatagaggcagagga

SEQ ID NO: 101561 - DNA, 90 bp, Homo sapiens
tgtgacctgcatgtactgggggattcgcagggaggatgtcgggacaccccggaagctgggaaatgatgccatcccgcccactttctacag

SEQ ID NO: 101562 - DNA, 101 bp, Homo sapiens
tcaggacagggctgaggaaccatgtctccatccccgaccgccctcttctgtcttgaaaggaagctgttgaagttattgaagtacctgttgctatattctaa

SEQ ID NO: 101563 - DNA, 100 bp, Homo sapiens
ttcttctcaagtatacagaatataatgaacctcatgaaagcagaaccaactcggatattgttgaggaagctgaatatggtgggcatgatcagatagattt

SEQ ID NO: 101564 - DNA, 100 bp, Homo sapiens
tgctttagcatttatcacttccttccttactttgtcttggtatactacatggcaaaatgggaaagggccgcgatgggcctcttggaacattggtgtgttc

SEQ ID NO: 101565 - DNA, 111 bp, Homo sapiens
gaaactatgggagttcccaattaacaatgaagcaggtggggtggaagacaacccgtgagtattacaccttcatgtgggttactttgcccattgacctaaacaacaaatcag

SEQ ID NO: 101566 - DNA, 83 bp, Homo sapiens
gaaaagaaggtggcagacccggtttgctgatcgccccagggatcaggagactcagtgttcctgaaagtacacctttcacagca

SEQ ID NO: 101567 - DNA, 100 bp, Homo sapiens
acccagatcgctactaccccgcagttcccggacatgatcctctccgcctctcgaggctgcgctgaagaaataccagactgagcaaaggagcaaaggcgac

SEQ ID NO: 101568 - DNA, 50 bp, Homo sapiens
cgccgagccggaggctgcaggatgatctgacaggatggcatctgatgact

SEQ ID NO: 101569 - DNA, 46 bp, Homo sapiens
aaccataatgctacaaactctaggttatgatgtgattgctcaagcc

SEQ ID NO: 101570 - DNA, 75 bp, Homo sapiens
gcaggcgccgccgccggacgtcggcaacggagaagctagaacaacagaggcagcagttgcttactgaacgccaaa

SEQ ID NO: 101571 - DNA, 103 bp, Homo sapiens
ccagatggccaccatgtctgggagatggaagcgaaaactgaccgggacctgtgcaagccgagcggttctggtgaggttggaaggatgcagccacccggttgtc

SEQ ID NO: 101572 - DNA, 75 bp, Homo sapiens
caggaggccaggggtgtcgccatgaaggtgacaaagtacaatttgaagaatttgcaaaagtagtaaggaatatgc

SEQ ID NO: 101573 - DNA, 74 bp, Homo sapiens
cgactactgtcagcagctgtgccagggaggtggggaagacagggctccagctaccacaggacgggctctgggta

SEQ ID NO: 101574 - DNA, 88 bp, Homo sapiens
ggtttttcggatcatgtctggtggctccgcggattataacaggtgcagtagacattgttgcaatcatgatcggcaatctgaaaggcac

SEQ ID NO: 101575 - DNA, 73 bp, Homo sapiens
ccgaccaggacaactactgcgtgactgtgtctgctagtgccggcattggtgctggagaatctggtaaaagcac

SEQ ID NO: 101576 - DNA, 90 bp, Homo sapiens
ggccggcagcgtcccggacgaggaggcttgaccactatgctatcatcaagtttccgctgaccactgagtctgccatgaagaagatagaag

SEQ ID NO: 101577 - DNA, 75 bp, Homo sapiens
gcggcagcgaggcggcgccgcaggatggtgctggagaatctggtaaaagcaccattgtgaagcagatgaggatcc

SEQ ID NO: 101578 - DNA, 115 bp, Homo sapiens
ctggcctcggcgccaagatcccagtcacaattatcaccgggtatttaggatggagtccacagagaagtgtgaagccatcatcacccactttaatggaaaatatattaagacaccc

SEQ ID NO: 101579 - DNA, 100 bp, Homo sapiens
ctggagtctgcgaaggccgggacccggttccccggcccacagtgggggtgtgcaaacccgagagaactggaacgggctcatgtcggggctgatgcagatg

SEQ ID NO: 101580 - DNA, 50 bp, Homo sapiens
ctcctgagtagctgggattacagttcgaagcattcagcaaacaatggcaa

SEQ ID NO: 101581 - DNA, 100 bp, Homo sapiens
ggccaactacacctgcgtggccatgtccagcctgggcgtcattgaggcggttgctcagatcacggtgaaatgccctagactggagctggttacagacgga

SEQ ID NO: 101582 - DNA, 74 bp, Homo sapiens
taacttttgatgatcatgatacagttgataaaattgttggcatttataagacgctgtttggcatatcgaaaaga

SEQ ID NO: 101583 - DNA, 75 bp, Homo sapiens
cgggcgtggacggtgtggggcggtcccggccccgcagccattcaaactcctccccacgacactctgaagcagcga

SEQ ID NO: 101584 - DNA, 98 bp, Homo sapiens
agaaagatcagccctttttggaaacatacaggatatctaccacttcaatagtctctctgccttctggggaaaagataacttttcttgatactccagga

SEQ ID NO: 101585 - DNA, 100 bp, Homo sapiens
cgtgaacaacctgaacgtcaccgaggagaagtaccaggaggcgttggccaagggaggagacatcacagctttcccagatcgggaggaaaaatatggaatg

SEQ ID NO: 101586 - DNA, 101 bp, Homo sapiens
ggcttatcgaacagagccgggagttcaagaagaacactccagaggaattgtcttagaagaaagaaggcaagccaccattttacccacgtaaatatatgaat

SEQ ID NO: 101587 - DNA, 76 bp, Homo sapiens
cccagacgggcgggcagggccgggctccgcagtggtggacttgctttgtgaagagacagttcatgaacaagagtct

SEQ ID NO: 101588 - DNA, 75 bp, Homo sapiens
ccaaagattaaaacttgaagcaacccttaatgtgcatgatggttgtctgcatatccccaccgtttgaatctcttt

SEQ ID NO: 101589 - DNA, 75 bp, Homo sapiens
gtcaccaatttcctgcccgggatcccagagctacccttcttggagcccacagggctgattacctggctcaggcat

SEQ ID NO: 101590 - DNA, 101 bp, Homo sapiens
cgtgctcacccacggctgcttcgacatcttcaccacggaggaggagagaggagttcattacttcggaagtggtacaatttaatgatacaaaataaggatga

SEQ ID NO: 101591 - DNA, 78 bp, Homo sapiens
ttctcaactcccacacacaggatgtcaagcatgtggtttggcacccaagtcaggagatgcttgctctgtcaaggcaca

SEQ ID NO: 101592 - DNA, 100 bp, Homo sapiens
aggccaaactgacagaaatgcgtggcatctatgccaaagtggaccggctagagttgagggcacatgcagtagatattaatggaaatcaagtggagaaccc

SEQ ID NO: 101593 - DNA, 90 bp, Homo sapiens
caccgcgctgcactacgcctttcaggacgagaaccacctgcaagggggccaggccaaccaccccacagcagccgtggtgacggagaagca

SEQ ID NO: 101594 - DNA, 100 bp, Homo sapiens
tgcatacaagaatgtgaaatttgttctcaagcacaagggccttcagaaggaagaagttgttttgcttacacatggagatagtgtagacaaagtagctgat

SEQ ID NO: 101595 - DNA, 76 bp, Homo sapiens
gagacagtggccccaccagagccagagccaaatcatcactgttgaagaggcaaagcgcaggaagagcacatgcagc

SEQ ID NO: 101596 - DNA, 100 bp, Homo sapiens
gcccgcgcgctgcccttcgcttgagattattcagagctgggagagcttcccccacgatctcctttagaaccagtttgtgaagatgggccctttggccccc

SEQ ID NO: 101597 - DNA, 100 bp, Homo sapiens
gaggccttacaagtgcactgtgtgtggccagtcatttaccaccaatgggaacatgcacagattgctggactcgctgaagagagactacgcaggaaagccc

SEQ ID NO: 101598 - DNA, 100 bp, Homo sapiens
accgggcccgcttctttctcgagtcggccggctgggacttgcagaaggacagaataacgggctcccagattcacaagccccaccaagaggatcaccccag

SEQ ID NO: 101599 - DNA, 100 bp, Homo sapiens
gcgtcctctcgcaacgtggctgtggagcgtaagaacctgatcaccgtgtgcaggctgctggtggtctacccttggacccagaggttctttgagtcctttg

SEQ ID NO: 101600 - DNA, 75 bp, Homo sapiens
agcagagggcgaagtttcaagcagacttcacttgctcttgtacatgagggaggtggggaagacagggctccagct

SEQ ID NO: 101601 - DNA, 82 bp, Homo sapiens
ctttcacaactgctggtcagaggagcatttcctccctctgctatttatacacggaaagacttactacagcgatctacccata

SEQ ID NO: 101602 - DNA, 90 bp, Homo sapiens
tgccgccgccctccaccccccaggaagtgccaggaccttccagaccaggtgaaggagtacgaggaggagattcactcactgaaagagcgg

SEQ ID NO: 101603 - DNA, 100 bp, Homo sapiens
acagcctcatggagcagcatgttggcattgacgtgctcaagagagacccgaccctgtacaggtgtacgaagccatcgacagcagagatggagcatcttgt

SEQ ID NO: 101604 - DNA, 75 bp, Homo sapiens
gattctgaaccatttagacaacctgttgatttggttgaatatccagttactggtaaaaagctactagaaaggggg

SEQ ID NO: 101605 - DNA, 82 bp, Homo sapiens
ttccaggtgaatccaacaagatcccccgtctgaggactgacctttttcccatttaaatcaaacggtattgagatggattggg

SEQ ID NO: 101606 - DNA, 100 bp, Homo sapiens
cggcatctgcccctgccatgaccactgtggagaacaaatccaagattagcacaggaccagtcctgcctctgttgtagaagacatgtggtgtatataaagt

SEQ ID NO: 101607 - DNA, 90 bp, Homo sapiens
cttctccaagtttcaggaaatgatagaaacaactttagatatggatcagttttcagaaaggcactttgcggatgaactgtcttgactgcc

SEQ ID NO: 101608 - DNA, 87 bp, Homo sapiens
tcaataatactttaatgtcattatcaggtggatggagagagaaagaaaaagccagagaggagagctggggtccacctcgagaatcaa

SEQ ID NO: 101609 - DNA, 90 bp, Homo sapiens
gtcatggaggagatccggcggcagggcaagctgtgcgacgtgaccctcaagtgtttgtaagcggtgcattcggaagatggaccaccactg

SEQ ID NO: 101610 - DNA, 74 bp, Homo sapiens
ggccaccgaccagaggaaagtcaaggaagcggggagaggtggtgagagatgacccctgttgaggatttcattgg

SEQ ID NO: 101611 - DNA, 100 bp, Homo sapiens
caacaccaccgggaagcagctatttgaccagtgtactaaaggaagtataccaagcctttaatcccaaagcagtggtcttacagctgggagctgacacaat

SEQ ID NO: 101612 - DNA, 102 bp, Homo sapiens
tcttctgccgtctcagcctgggcgtcgctgaagctgtgtctgcggggaggcagcggaaggcggcaggtttggtgcacctcgatttggaggaagtagggcagg

SEQ ID NO: 101613 - DNA, 74 bp, Homo sapiens
ggcagaggtggaggcgctttgaaaggaaccagggaaaatgtgtagagggcatggtggagatcttcgacatgctg

SEQ ID NO: 101614 - DNA, 50 bp, Homo sapiens
ccaaaggctgtctttcagagaacaaagccaaagtcatacactggctatca

SEQ ID NO: 101615 - DNA, 74 bp, Homo sapiens
atcgacagtgccttcggccagagcggcaagttcaagatccacatcccaggaaacggaggtggagctgtacaacg

SEQ ID NO: 101616 - DNA, 82 bp, Homo sapiens
ggcatgcttctgacggccaatgaaacccccaagatgggcatctattacattccagtcgtcgtcccgcagacacacaatccag

SEQ ID NO: 101617 - DNA, 83 bp, Homo sapiens
cttcaagaaatctccccagaagagattcagccaaaccccccatcctctgggatgcttgacaatgcagatcttcgtgaagactc

SEQ ID NO: 101618 - DNA, 75 bp, Homo sapiens
catcgtgaggagggaggagaaaacctggaccaggcacgggaagatgcccagtgacaacactgcagctgaaggagg

SEQ ID NO: 101619 - DNA, 87 bp, Homo sapiens
acacctgatggtacagtgagctacgataacaagactcagattgatggacaacttttcttaattaagcaccttttgatacttcgtgaa

SEQ ID NO: 101620 - DNA, 75 bp, Homo sapiens
caagaacctggtccatgttgcccatgaccttatccagaaactctctcctaatttaagcagaacggtgggaagccc

SEQ ID NO: 101621 - DNA, 75 bp, Homo sapiens
ccggaacaccctggaagccgagaaatgacgctgaccggaaaggagattgagattgacattgaacctacagacaag

SEQ ID NO: 101622 - DNA, 100 bp, Homo sapiens
ctaaggccagcatccaagccgcgtcggctgaaagttccgggcaaaaggctatttactgaggacccactggatgtcaagcattgtgcatagttttcttcga

SEQ ID NO: 101623 - DNA, 96 bp, Homo sapiens
tcaaatacatgaaaaatggggcagaagaagagcagaaaatagcagccaggaaccaagaaaacttgattcagaatggacagtttagaagaacctcag

SEQ ID NO: 101624 - DNA, 75 bp, Homo sapiens
gtgggcgctgctggcgctctggctgtgctgcgcgacccccgcgcatgtaccatggggcgcaagttggaccctacg

SEQ ID NO: 101625 - DNA, 100 bp, Homo sapiens
cacaaggatgtcaacgtggtagtagtggaaggggttctggacagcatcagccacagcaggaggaggaggaatcaaagccagaaccagagaggtctggcct

SEQ ID NO: 101626 - DNA, 98 bp, Homo sapiens
ggcgacctcaagaagcagctccacgaaaggcagccgcggatcgccgcgctcagcgacaaacaagcaccagcttgctgcaggaggtggtctacttggtg

SEQ ID NO: 101627 - DNA, 76 bp, Homo sapiens
cacagtgccaaatggagctggaagcagtccagtgggtgaatgaaaactttgccattgatttgatagcagagcagcc

SEQ ID NO: 101628 - DNA, 74 bp, Homo sapiens
ttgggactgggaccagattacaagtctttccaacattgatggcccatgtagaagacctgatcattaagactata

SEQ ID NO: 101629 - DNA, 49 bp, Homo sapiens
gacagccaggcccgcgagaagaagctcttcgtgggcggtcttgactgga

SEQ ID NO: 101630 - DNA, 100 bp, Homo sapiens
cgctccatttcgaattctgcttcaagttcccggctcccaggtttattctcccatagcatgtgctcaagagggccagcagtgaggacacgctcaacaagcc

SEQ ID NO: 101631 - DNA, 74 bp, Homo sapiens
gccgaagctgacaaaattggactactgcttgctgcaaaggtcaaatgcggtctggataaagaaacaccaaatca

SEQ ID NO: 101632 - DNA, 82 bp, Homo sapiens
gcgggtcctacgaggagggctgtcagagcctcatggagtacgtgggcgacagatgcgaaagaaacgagttccagtgccaaga

SEQ ID NO: 101633 - DNA, 100 bp, Homo sapiens
cgacggcaccgaggccaaggtggatgaggcccaggctgatgggaaggagcacccaggagctgaagatgtacttgaaggatataatggaacaatatttgca

SEQ ID NO: 101634 - DNA, 82 bp, Homo sapiens
atgattcgtctctttaatactggtggataagattgtggaccagctgcagcagttaatgcaggtgtatgacttggctgccctt

SEQ ID NO: 101635 - DNA, 100 bp, Homo sapiens
gactactgtgtgtggattcagaaagtcaagggcctttatcatctgctggactcctggattggttttgttacttctagacgtgtgctgtccacagtgcgac

SEQ ID NO: 101636 - DNA, 100 bp, Homo sapiens
caccttgattggcttcagcctgggagccagagtcatctacttctgtctgcaggagatggctcaagagaaaggccacaccatgaggccccagccccaccag

SEQ ID NO: 101637 - DNA, 104 bp, Homo sapiens
gcagtttgactctggagccactcaggtttttcctaagctcaactctagccagctaggttcctggtgctttggggaggagaccttgcctattttgatggacttag

SEQ ID NO: 101638 - DNA, 74 bp, Homo sapiens
attttattgacattgctgaagtggagacagacgaagttatacggaagcgtctcctcattgatggagatggtgct

SEQ ID NO: 101639 - DNA, 100 bp, Homo sapiens
agggataggagaaggatgtggactgcagtgctgcagtgccagatggcttgttcaatcagtatatcagtcaacaggaatataagccacgatggagtcaaat

SEQ ID NO: 101640 - DNA, 90 bp, Homo sapiens
gagcgtgaccgagagcgcgaatatcgtcatcgttagaaggaactgcaagcacatgttgaccagataactgaaatggcagcagtaatgagg

SEQ ID NO: 101641 - DNA, 97 bp, Homo sapiens
acaatgcttctcaagatgtggagctctccttgcagatcggtgacacagttcacatcctggagatgtacgaggtatgccaccacgggctgttccctga

SEQ ID NO: 101642 - DNA, 75 bp, Homo sapiens
gaagaacgacattcccttcgagctgcgcatcgtggatctgattaaaggacaccagcagtgaaaacactgtggttc

SEQ ID NO: 101643 - DNA, 99 bp, Homo sapiens
ttcggaaccccagagcacgagtagtagtcttaagaatagacgatcagctgaacactctcttgaaggagttccagctaacagaggagaacactaagctcc

SEQ ID NO: 101644 - DNA, 75 bp, Homo sapiens
aaaccatcagaacatgattaagcagtttaaagaaaactgtggatttagttactccactctgccatgtctttccac

SEQ ID NO: 101645 - DNA, 100 bp, Homo sapiens
cttgtggaagagacaagccattttgtgcgcaccacttttgtgtccaggcataagaaatttgacggaaaaaggcctgtgtcatatcaacacttatctaaca

SEQ ID NO: 101646 - DNA, 98 bp, Homo sapiens
aggagaccctggaagacaatctaagcaatcactgcttgagaagcagagagtcctgatccagcagcacgaggacgccaaggagctcaaggagaacctgg

SEQ ID NO: 101647 - DNA, 75 bp, Homo sapiens
gctgggaaaactgtttcagttgcagactttaggcctgaaaggtgtgaccatgaagctcatggatgaggtcgccgg

SEQ ID NO: 101648 - DNA, 100 bp, Homo sapiens
aaggatgagaaaattaaagttcgcctcccaccgcctacaatcctaaagtttggctgtagcagcaattcctgaaggtctccccattgtggtcacagtgacg

SEQ ID NO: 101649 - DNA, 75 bp, Homo sapiens
ttaagcccttctcccgcctcacttccgaggctcatgatggagcagtccaagaagtcctccctcatggtggcccgc

SEQ ID NO: 101650 - DNA, 50 bp, Homo sapiens
gttttgatcaccggggctagcagctgtaaacactttgactgaatcaacgt

SEQ ID NO: 101651 - DNA, 99 bp, Homo sapiens
gagcattgcagaaacgtcatgaagattttgaagaagtggcacagaataatccagaatggctactctgatctatgttgataaggaaaatggagaaccagg

SEQ ID NO: 101652 - DNA, 89 bp, Homo sapiens
tgaagcaacccttaatgtgcatgatggttgtacggatgtttccagtcctaaagattagtgtcacagggttggaccccaatgccatgtac

SEQ ID NO: 101653 - DNA, 83 bp, Homo sapiens
caccttatatgggcatacttccactgtgcgttgtatgcatcttcatgaaaaaagggttggttctggacattacacagcatacg

SEQ ID NO: 101654 - DNA, 75 bp, Homo sapiens
ccagaaagatggcatcatttttgccctcaaaagaaatggcagaacctgcacttgttgccaagtcttccatcttac

SEQ ID NO: 101655 - DNA, 95 bp, Homo sapiens
atgcaaatctacgcaagaatgaactggagacagagaatagcagatataatttctacagtagaatttaatcattctggagaattactagcaacagg

SEQ ID NO: 101656 - DNA, 75 bp, Homo sapiens
gaaagacttggtaatggcgacgggtttggtcaaaatgcagatcttcgtgaaaacccttaccggcaagaccatcac

SEQ ID NO: 101657 - DNA, 100 bp, Homo sapiens
ttattaatttgatcagtgatccttcacgttgggttgctgaaaagccaggagtcaaaatgactgagcgctttgactgccaccattgcaacgaatctctctt

SEQ ID NO: 101658 - DNA, 75 bp, Homo sapiens
ttaaaagtggtgatgaacttcaggatgaggtacggaatggccacatcaaaagaatcactgataatgacatccagt

SEQ ID NO: 101659 - DNA, 75 bp, Homo sapiens
ggccaagctctccaagttcagcatccccaagcagggggagaagctccaccatgaggcgaggtggatggaggaagc

SEQ ID NO: 101660 - DNA, 100 bp, Homo sapiens
tggaaatattttacagatctctttgattatcttccacttacagctttagtagatggacaggtgaatgttggatgtgtacccaaaaaggtagaatttttat

SEQ ID NO: 101661 - DNA, 89 bp, Homo sapiens
caccaagggcgcccttcccctggatacggtcactttctacaaggaagagctaaagatggctgaatttctagatgaccaggaaactcgac

SEQ ID NO: 101662 - DNA, 76 bp, Homo sapiens
gcgcggcccgcccggatcgtggcctctcgagagcaaggtcgagctgtgtttagagtgcatcgaatgggccaagtca

SEQ ID NO: 101663 - DNA, 50 bp, Homo sapiens
cgcgaatatcgtcatcgttagaagaatagcctaacatggcagaccagaga

SEQ ID NO: 101664 - DNA, 75 bp, Homo sapiens
attttccccaagcactctcaggaacctggcaacagggccatgctggataaggagctggctgcctctgtgaacatc

SEQ ID NO: 101665 - DNA, 100 bp, Homo sapiens
cagcctcccaagcagctgggtctacaggagcatctttccttgaagaagtacattattgacattgtggttgaaagtacagctccagcagaagctttgaaag

SEQ ID NO: 101666 - DNA, 117 bp, Homo sapiens
ccgctgctcagcgtcctcatgtggggggtaaaccactcggctgacaaacgggctcatcataatgcactggaacgaaaacgtagggaccacatcaaagacagctttcacagtttgcgg

SEQ ID NO: 101667 - DNA, 98 bp, Homo sapiens
aatcactgagctgtaacaaagcactctgtgctagtgatgtgagcaaatgcctcattcagctgaaggctatgcagcctttcaggaagatagctctggag

SEQ ID NO: 101668 - DNA, 83 bp, Homo sapiens
agatggtgcagaagatggaggaggagctgtgtcagagcacactgaccgaaatggaaagccagaagcagctctgccggccgctg

SEQ ID NO: 101669 - DNA, 101 bp, Homo sapiens
tcgttacctgcaggtattgggagatccacagctaagacgccaggacccactggaagcctagaaatggacccagatgatgtggtaccagttggccaaagaag

SEQ ID NO: 101670 - DNA, 100 bp, Homo sapiens
tgcggagagaccatatatgtcattgggcagggatcagatgggaatgatgaacaaccccaatccttatggttcaccatatactcagaatcctggacagcag

SEQ ID NO: 101671 - DNA, 74 bp, Homo sapiens
aaagtaacaagagaacagcaagtgcaccaaacttagtcagggactatgcggcgcaaacatctccttcgccaaaa

SEQ ID NO: 101672 - DNA, 50 bp, Homo sapiens
agaacggtgcttctatggcaggatatgatattttggagtgtatacaataa

SEQ ID NO: 101673 - DNA, 74 bp, Homo sapiens
cactccgagggcgacatgcacgcatcacgttgggtggtttccatttagaccgaggccggttcagaacttcccaa

SEQ ID NO: 101674 - DNA, 96 bp, Homo sapiens
ccgtgcacagggctgcgattccggggtacctcactgcagaggtgctggagctggcagcctaaaagtggtgatgccaaatcttcgagtaaatcaaag

SEQ ID NO: 101675 - DNA, 100 bp, Homo sapiens
tcggaaccgagcgggcaggaggccaccgctgcagcgcgggccccgcagaggaaggaagccggcgggcggggttggtcaaagaaaaagtgatgtatgaaaa

SEQ ID NO: 101676 - DNA, 75 bp, Homo sapiens
ctatggaaagctgacatttggacaagggaccatcttgactgtccatccaatttgcctgagaatacagatcaaccc

SEQ ID NO: 101677 - DNA, 82 bp, Homo sapiens
ctagtttcccaaacagatgttaagacattcttggaagccttaccggtttttctatatgagtggagaagacagctgttaccag

SEQ ID NO: 101678 - DNA, 100 bp, Homo sapiens
tgaaaaactgaggatgattgttagctccacgagtgcaaactgcagtcaccaagtaaaacagtctgcaattaaggccttacgtcctggagggatacttgta

SEQ ID NO: 101679 - DNA, 75 bp, Homo sapiens
atcccggctgcttttgctgcgccctctcagcttcccaagaaagaattcagaaggagctggcggacatcactttag

SEQ ID NO: 101680 - DNA, 75 bp, Homo sapiens
acagatgtccacacatcagttttacaggaaatatatgtgtctcctacagaagaagggaaaaaagagctgctgttc

SEQ ID NO: 101681 - DNA, 50 bp, Homo sapiens
gatattcctcatgacattgctgtctgactgcaaaattcaaaatggggctc

SEQ ID NO: 101682 - DNA, 75 bp, Homo sapiens
ccgcgcgcccggccggcccggagcaccgagctcgcggcacggtaggagtttaagctatgaagaaggacatccctc

SEQ ID NO: 101683 - DNA, 96 bp, Homo sapiens
taaagtgaatgactccaacgaattaggtggtctgactaccagtggctctgcagagctcctctggtgcaagtgtggtagctattgacaacaaaatcg

SEQ ID NO: 101684 - DNA, 90 bp, Homo sapiens
gatctcttgatgtcacaagtaatgtttaaatcagtgaagcagccgacacgagtcgttgttcataaaacagcttttgaaagttgagagcac

SEQ ID NO: 101685 - DNA, 75 bp, Homo sapiens
atggcttttatgattaaacactcccagaaactttttaaggtcgacaaagatgctgaattagtggcccaatggaac

SEQ ID NO: 101686 - DNA, 80 bp, Homo sapiens
cgccgggaccgggaccgccgccgccgccgccaccatggtccctgtgcgttttattgcgacctgccggtgggaactttgtc

SEQ ID NO: 101687 - DNA, 98 bp, Homo sapiens
aacagattcctggaatagacatacagctgaataggaagtatcacaccacacgtaagggagctaccattaagaaggatgaacagaccggggcgatcatt

SEQ ID NO: 101688 - DNA, 100 bp, Homo sapiens
ccggttcattctggacgtgcttctgcccgagaacgtgctggccaaagcgctctatgacaatgtggccgagtccccggatgagctctccttccgcaagggt

SEQ ID NO: 101689 - DNA, 101 bp, Homo sapiens
gagaaaacttgcaaggaaaggaacatgtttgaatttcagatgtgttcctcaatgaatcacatgccctgatgcagaaggctttcaactcctcgtccttcaac

SEQ ID NO: 101690 - DNA, 90 bp, Homo sapiens
gttgctgctatacaacacaattataaaatgtcagcttttaagggtgctggagaatctggtaaaagcaccattgtgaagcagatgaggatc

SEQ ID NO: 101691 - DNA, 75 bp, Homo sapiens
accaccaacgcctttcccggagagtacatccccaccgtgtattgttgcagcatctggcagtgagactgaggatga

SEQ ID NO: 101692 - DNA, 82 bp, Homo sapiens
atttggtagcctttgcatacaagaatgtgaaatttgttctcaagcacaatacaaatggtgatgatcatcaggtcaaggatag

SEQ ID NO: 101693 - DNA, 100 bp, Homo sapiens
ggcagggacagcaggagcagtggtgctgtcagcgcggccgtcggagacatgggagacccggggtcggaggaatgagtttgaaaaaatctgcagaaaggag

SEQ ID NO: 101694 - DNA, 72 bp, Homo sapiens
gagtacttcgttccaacatggacatcctgaagccaatcctggtaactactccagacccccagcgtatagtgg

SEQ ID NO: 101695 - DNA, 50 bp, Homo sapiens
cagagaggagcggggagcaatgcagatcatcagaaaagcccttactgagg

SEQ ID NO: 101696 - DNA, 98 bp, Homo sapiens
caactgcaaacgctctttgttccagagcatggagatcagcagaatccagagaccacatttgaagtatatgttgaagtggcctatcccaggacaggtgg

SEQ ID NO: 101697 - DNA, 100 bp, Homo sapiens
aactcaagtttttcaccacggcatgtgtctgtgaatgtccgcaaaacattcatggatagtgatggatcaatgacagtagactgggatgaatggaagtact

SEQ ID NO: 101698 - DNA, 100 bp, Homo sapiens
gggttctgacaagatggccgggctgccccgcaggatcatcaagcctgcgtatcagaatctgagacagcgtgttgacaactttgttgcaaatcacttggca

SEQ ID NO: 101699 - DNA, 83 bp, Homo sapiens
tggacctcattcagacagaatctattaccttgcatttagcagagtgcttgcttcactctattctctcagaactaaaaattcag

SEQ ID NO: 101700 - DNA, 100 bp, Homo sapiens
acgatacgccatctgttctgccctggctgcctcagccctaccagcactggtcatgtctaaaggtcatctcttggccccgaaaatctgtcacctgcaccct

SEQ ID NO: 101701 - DNA, 100 bp, Homo sapiens
catttggggaccagagatggacggtcactcagcctatggagaggctaagaatattgtacacaaagattcttgatgttcttgaggaaatccctaaaaatgc

SEQ ID NO: 101702 - DNA, 75 bp, Homo sapiens
cagccggctgcaggccagagagggcctcgggaagagatgcgaggatgacaagacagagtcttgctctgtggccca

SEQ ID NO: 101703 - DNA, 114 bp, Homo sapiens
gaacaaaattgtatctgtttttctcagaagagaattccacaagagggagacgtggtgggcggtccttcctgtgacacgacccttgagtgacagttctatttgattgcctccggt

SEQ ID NO: 101704 - DNA, 75 bp, Homo sapiens
cgggatctcggctgtccttcctcccggattcactggcaaaatttgctggcagaaaactgaaagactgtggagaag

SEQ ID NO: 101705 - DNA, 100 bp, Homo sapiens
cggagctgtgcgagagcctcctcacttggatgctgtgtgctgtggacccacctggggttcatggagtgggccacggggcccagccctaagcactgctgcg

SEQ ID NO: 101706 - DNA, 98 bp, Homo sapiens
ctgggcttccacacaactccagtgctaactcaacagggaaaaagttggattgttaaaagaagttatgaagattttcgggtacttgataaacatcttca

SEQ ID NO: 101707 - DNA, 100 bp, Homo sapiens
gcaacacgctccggaagggtggtcagcgccgtggaggagatcgagaacggctactttgtacactactttgcccccgagggcctaaccacaatgcccaaga

SEQ ID NO: 101708 - DNA, 90 bp, Homo sapiens
cacagccctcccctcacagttgagcacctgtttgcctgaagttaatttccagaagcaggctgctgagaactagccctagacctctgcgtg

SEQ ID NO: 101709 - DNA, 82 bp, Homo sapiens
ccttgcacccctgctgctggcgttcgtgaccaagtctgcagcccagagggcaccttctgcaaacatgtctgtggatccccta

SEQ ID NO: 101710 - DNA, 100 bp, Homo sapiens
gaagaggtcctatgacaggatcaaggaatgacgggacagagtttggcggctccatttaccagaaagtgaacaagaagttggagaccgctgtcaatcttgc

SEQ ID NO: 101711 - DNA, 75 bp, Homo sapiens
ggatcaccgagggcatttacggcagctgttccaaagacctaatgcgcttgctgtccagcagttgacagctgctca

SEQ ID NO: 101712 - DNA, 132 bp, Homo sapiens
agaacacatcttcccagctttggttggaagacctattatcagatcaaccaccaaagtgggaaacattgaaatcaagaactgacctgaagtttcagtgtagtcagagagctcttcaagtaataaatcatggag

SEQ ID NO: 101713 - DNA, 95 bp, Homo sapiens
tacctgtttcacggagtcttgggacccagcatcagcccctcccacagccaggtagatgatgagctggagatcaaggcctactatgcaggccacgt

SEQ ID NO: 101714 - DNA, 98 bp, Homo sapiens
ttcctcctccaccacctcttgatgaagaggctttcaaagtacagtggagttggatcacaggattgattttgaactcagagaaggccttgtggagagcc

SEQ ID NO: 101715 - DNA, 97 bp, Homo sapiens
gccgccgcgaggccgggaaggtgaagggtgtccgcaatgttgccagtgtctgtctgcagattggctacccaactgttgcatcagtaccccattctat

SEQ ID NO: 101716 - DNA, 100 bp, Homo sapiens
caacaattgataagaactattgaagacctagatgaaaatcagctgaaagatgagttttttaaacttctgcagcatgtcagtgaaaaaaccagtgaatcgc

SEQ ID NO: 101717 - DNA, 100 bp, Homo sapiens
ctgccacctcaacgtccctgtcactgtggtgctagatgctgctgtcgggttcaacagagtttggaaaagatttctaaactggagcaggaaaaagaacatt

SEQ ID NO: 101718 - DNA, 80 bp, Homo sapiens
gtcctgtactggactgcatcaggccgcgtctcctcagggaagtgggaaaactcttgcctttgccatcccaatgattcatg

SEQ ID NO: 101719 - DNA, 100 bp, Homo sapiens
ccgctccgcgccgcccgggagtcgggagccgcggggaaccgggcacctgcacccgcctctgggagtttgtttcgacgccggaccgcgtaagagacgatga

SEQ ID NO: 101720 - DNA, 78 bp, Homo sapiens
agccctggtgtcacctatcagtaaaagtctgtagatggacggcagatccgagtagaccaggcaggcaagtcgtcagac

SEQ ID NO: 101721 - DNA, 101 bp, Homo sapiens
ggaaaatggattcagtttgcatctctccctcctttaaacagcttctccgggtctcagcatgggtgcagtactagccgctgtgtcaagtcacaaattcaact

SEQ ID NO: 101722 - DNA, 75 bp, Homo sapiens
agaaggactccttcgaaatggaagaggttggcaggtttgactgttcctctgcaccagacatctgtagtaatctgt

SEQ ID NO: 101723 - DNA, 90 bp, Homo sapiens
tccaacacagatgtccaagctgccaaagccctctccccagaagtagagtggtgaaaaatgacagacggtgatggagtaagaaaatctcac

SEQ ID NO: 101724 - DNA, 100 bp, Homo sapiens
gtatgaaggtcgcttacagcattctacacaaattaggcacaaagcaggaacccatggtccggcctggagataggatgctgcagttggagaagaaacttga

SEQ ID NO: 101725 - DNA, 100 bp, Homo sapiens
gccggaccccagcacacagaagccgagacggtatcagcagatgttgcacacaaacttggtataccttgctacaatagcagattctaatcaaaatatgcag

SEQ ID NO: 101726 - DNA, 100 bp, Homo sapiens
tggactggagcagaaccccaggactgcgcccccgggagcgggcgcccagaggatccgagccagagacaacaacggctcctacgccctgtgcctgctgcac

SEQ ID NO: 101727 - DNA, 90 bp, Homo sapiens
gcgggatccaaagtacagcttctagcgacccccaggagtactgagtgaacaagcaaggtttttggattcaaagcataaaaaccattacaa

SEQ ID NO: 101728 - DNA, 96 bp, Homo sapiens
tgccgcgccaccgagtccggaccggagactttggggcctaactagtgtctgctgcacagagctttacatccccgggagcctctacccccaattcag

SEQ ID NO: 101729 - DNA, 101 bp, Homo sapiens
ggaaatcctaatgacagtctccaaattcgcctccatctgtaccatgggccatgtttatgagtggactaagtgaaagcaaacaaacccatgtacacctgagg

SEQ ID NO: 101730 - DNA, 100 bp, Homo sapiens
cgtgtatgatattaccaagcagtaattttatgcgtcaggagtgtttggattccagatttgtattcgatagaccactgcctgtgtctcgtcttgtatctct

SEQ ID NO: 101731 - DNA, 81 bp, Homo sapiens
agattcgcagtggtcgcttcttctccttgggcttttaccaagatggcctcagctccggccagctatggcagcactaccact

SEQ ID NO: 101732 - DNA, 97 bp, Homo sapiens
tagtacatgcttttgacatggaggatttgggagataaagctgtgtactgccgttgttggaggtccaaaaagggcactgtgtttagtcttgagtcaga

SEQ ID NO: 101733 - DNA, 101 bp, Homo sapiens
agagattctgggagccaaacactccattgggatcctagctgtgttcagactgcatcacagtgcttccgatacaagcgacaaaaatcgagttaaaagcagat

SEQ ID NO: 101734 - DNA, 96 bp, Homo sapiens
cccttccccacgcaaccccagatccatttacactttacaaatactctggagcagtgcaatgtgtgttccaagcccatcatggagcggattctccga

SEQ ID NO: 101735 - DNA, 75 bp, Homo sapiens
tcacggcgtacgccctcatggggaaaatctccccggtgactttcagggtgtcaaattgagaaccaggtagatccc

SEQ ID NO: 101736 - DNA, 75 bp, Homo sapiens
tggataccaaggaagagaagaaggaacggaaacaaagttattttgctcggcggcgctggcggcggccctgggacc

SEQ ID NO: 101737 - DNA, 90 bp, Homo sapiens
cgagctgctgctggattgaactcagagaagccggggctgagtatgagtttatcagctctggtctctacctagtggtgttattgcacttgt

SEQ ID NO: 101738 - DNA, 82 bp, Homo sapiens
tctgctgaaagtggtcttcagtttctccatagtggtgcttccgtcctccagtatgaagtgtaacagaacagactttaccacc

SEQ ID NO: 101739 - DNA, 90 bp, Homo sapiens
ggggtccgcaaggccggagaaggccgccgggcccgggcatggtggtctggggcaacgcggaagtagccggatcgagctgggagatgtgac

SEQ ID NO: 101740 - DNA, 50 bp, Homo sapiens
ttgtttctggatgattctaagaggccgaatccgggtgcatggtattggcg

SEQ ID NO: 101741 - DNA, 74 bp, Homo sapiens
ggaaaactgtacaacttttgcaattccagttgtgtggctaaatttcagatggagtctcgccctgtcacccaggc

SEQ ID NO: 101742 - DNA, 75 bp, Homo sapiens
gaagcgtgttggggaaggagctgtaaagagaactgggctggcttagatgaagatgaagatgcacatgtctgggag

SEQ ID NO: 101743 - DNA, 101 bp, Homo sapiens
aacggaagcgcagggagaaggaagaggtgtttgaaaaggcatccaaacaattgactctacccaggctctgttccttccaattggagcatctgtctctcttt

SEQ ID NO: 101744 - DNA, 74 bp, Homo sapiens
cagagtcactggctgtcatgtagtttcctcaactactgcctcagatgcagaggccaggatgtgggcccagccct

SEQ ID NO: 101745 - DNA, 100 bp, Homo sapiens
ctggcggagacgccggctgctcctcccctccccgccgggaagtctgaccgtcccgctacagtagaagacctgaagaaacttcggtatctggaatgtgtta

SEQ ID NO: 101746 - DNA, 100 bp, Homo sapiens
tctgcacctcaggagggaattcagcctcagtgatgtccatgaggtccagaacatccacggagctttcaatgctctcgggggagcagacagactcacctcc

SEQ ID NO: 101747 - DNA, 101 bp, Homo sapiens
agacttccttgcttctttggagaatgatatcaaaccagtagctgcaatcaacccaaatcaccctcttgctcagatgcctttgcctccgtcgatgaaaaact

SEQ ID NO: 101748 - DNA, 75 bp, Homo sapiens
tgacatcagtttctggaagaagaagaagagcatgatcggcatgtccaccaagagtcttgctctgtcgcccaggct

SEQ ID NO: 101749 - DNA, 141 bp, Homo sapiens
ggggacaaaggcgcaagtcgagaggaaactgttgtgcctcttcatattggcgatcctgttgtatctttaatctcatgaagtacgacagctacagccgcttcttaaagtctgacttgtttttaaaacacaagcgaaccgagg

SEQ ID NO: 101750 - DNA, 100 bp, Homo sapiens
aatagtgatagctttgataagtttgttctcatgaacaagatggatgacctcaacctgcactaccggtttctgaattggcgccggcggatccgggagattc

SEQ ID NO: 101751 - DNA, 82 bp, Homo sapiens
ggtcagcggaggtcagcgggggtcagcagcagcggctccgagggcgcggcggacgcagccctgggcgctgcctatggcacag

SEQ ID NO: 101752 - DNA, 95 bp, Homo sapiens
acatctttgctgcaagatcgaggctgtcctctggtgagaaggtggtgaggcttcccgtcatattccaggaggaagagggtaatctggaagagttt

SEQ ID NO: 101753 - DNA, 100 bp, Homo sapiens
catgttgcaaaggttaaattccaggctatgaaaatgattctgtagaagacctgaaggaggtgacttcaatatcttcacggaagagaggtaaaagaagata

SEQ ID NO: 101754 - DNA, 100 bp, Homo sapiens
ctgaatcagctcagtcaaagcagcctccagatggcagtggcagcaccatgatgcaaaccaagaccttctcctcttcctcctcatccaagaagatgggcag

SEQ ID NO: 101755 - DNA, 92 bp, Homo sapiens
tctgtctgcctgtgtccctgaccatggctccctgcagtaccctttaacggaactgtggctgcaccatctgtcttcatcttcccgccatctga

SEQ ID NO: 101756 - DNA, 96 bp, Homo sapiens
ggagaccgggctggagccggacgagctgtcggggaaattcaactactgaggaggttacggcacaaaaatgtcatccagctggtggatgtgttatac

SEQ ID NO: 101757 - DNA, 100 bp, Homo sapiens
ttcaggacaacaaatttcgcctgcttactcagatgtctgcaggaaaacagtatttagaacatgcatctaagtccactggggatcaggcattagaagttct

SEQ ID NO: 101758 - DNA, 100 bp, Homo sapiens
tcagaactgttccttcagccaaagaaacaagccgtggaataggtgtatcaagtaatggtgcaaagcctgaaggtcagagtactgatcggctactatcaac

SEQ ID NO: 101759 - DNA, 98 bp, Homo sapiens
agaatgtgcttaagaagttcatctgcatatctgaccttcgggcccaagtccttgaatgggcaagagggcacatgaagtacggcgtcctccacattcac

SEQ ID NO: 101760 - DNA, 90 bp, Homo sapiens
cagttttgacaacacctatcaggtaagaagacaagaggtttcttctcctagaaaagaaacttcagcaaggagtcttggcagtcctttgct

SEQ ID NO: 101761 - DNA, 100 bp, Homo sapiens
atttggaagggatcgtgtggcatgaaacagaagaaggttgtaagttctacaaatggagagttaaacacagatgaccccaccgcaggacgttcaaatgcac

SEQ ID NO: 101762 - DNA, 75 bp, Homo sapiens
ggatttgcgacgctgtcacaggttccagggtataccccgcgaatgaagacaatgcagatcttcgtgaagactctg

SEQ ID NO: 101763 - DNA, 100 bp, Homo sapiens
attctctcccaggccacaagacatttcctgctcggaaccttgtttactaatttgccggtggtggtgtgcacattgagccccggtatagacagttccccca

SEQ ID NO: 101764 - DNA, 88 bp, Homo sapiens
aaacatgtttgcttgtctctttgcttcttaaatcagagccagtcttggtgctctgtgttcacctggttcatctgaggagctgcatcta

SEQ ID NO: 101765 - DNA, 75 bp, Homo sapiens
atgcagtttgcggaagtaaccagagctgtgaggtggtgaagcagtattttccaatttgaagattcatttgaaggt

SEQ ID NO: 101766 - DNA, 74 bp, Homo sapiens
cttcaaggatcttgagactcaaccccatatgaattatatccatggaagcagtcaagcccagtttgtagctgaaa

SEQ ID NO: 101767 - DNA, 78 bp, Homo sapiens
aagaccatgctggcaagtctgaaggtcaaggcccaacatctgtaccacgcgaggtgtgagctcctgccagcagtgcct

SEQ ID NO: 101768 - DNA, 101 bp, Homo sapiens
ctcggagaccgacggaggggccgggggagcgcagcccagaggtcccctctgagccctctcaccttgtcctgtggaagaagcacaggctcctgtcctcagat

SEQ ID NO: 101769 - DNA, 100 bp, Homo sapiens
gtggatctgatccccgaatatgaaattgcatgtgaacacgaacactctaattgcctcctgatagcacacagaaagtttgacatgcaaaggataactctgg

SEQ ID NO: 101770 - DNA, 75 bp, Homo sapiens
ggcggccggccgacccttcctgtcgctgacggcgactgcgggaggccaggattggtagcttatgtcgatcttgat

SEQ ID NO: 101771 - DNA, 100 bp, Homo sapiens
cggcgtctggctgctgcggaccccgccgagtcctagcgcctggcctgcgcgccgctgcccgcgccacaggttactataacaacagtaccaaggtggctgt

SEQ ID NO: 101772 - DNA, 82 bp, Homo sapiens
ccagaccctggagcctcagttggaagcagccgatccagcctgcggagcctgtggggcagggcctgacacatttagggaaggg

SEQ ID NO: 101773 - DNA, 100 bp, Homo sapiens
aatgggacttcccagctggaacgagaactgagtctgatgcaaaaagaaccgcctgagggtggctttcgaggtgtcactgacattcgaggacgtggctgtg

SEQ ID NO: 101774 - DNA, 100 bp, Homo sapiens
tcctgggcatccacgggggctcctctatgataatggcagataagatcttgattccacccaaaggtttattttcaaagctcaagaaagaggctgaaaaccc

SEQ ID NO: 101775 - DNA, 100 bp, Homo sapiens
cttggacttgggaccccctcaggggaacagcgagcagatcaaaggcactgtggttggcgtggacgagagcactgctttctcatggcctgtgtgtgacatg

SEQ ID NO: 101776 - DNA, 80 bp, Homo sapiens
tcccgagaccgtcctggcgcgatgcgtcaagtacactgaaattcatcctgagatgagggtttctgatctctaacttggct

SEQ ID NO: 101777 - DNA, 80 bp, Homo sapiens
caaaagttcatctccttctgcatccttaactgagaatgaggttttaaaatcaaagatgggaaaatcggagaaaattgccc

SEQ ID NO: 101778 - DNA, 75 bp, Homo sapiens
caatttttgctatactcctgttctggggacagtttggtattaaaattgtcacaggtagtactgatggaattggaa

SEQ ID NO: 101779 - DNA, 78 bp, Homo sapiens
ctcatctcgctcggctgcgggaaatcgggctgaagcgactgagtccgcgatggagagtacaaggccagctatgtccgc

SEQ ID NO: 101780 - DNA, 74 bp, Homo sapiens
aaggaatcagttgcctcaatgggagctgactcaggagatgactttaaccaggctttagcaaagatggatatatt

SEQ ID NO: 101781 - DNA, 98 bp, Homo sapiens
accaaggccagcacataggagagatgagcttcctacagcacaacaaatgtgaatgcagggtgaaggtactctacagtgtggtcattgaggacaagttg

SEQ ID NO: 101782 - DNA, 83 bp, Homo sapiens
ggatcctggaggcctgggaagccaacgaccacacgcaggcgccatgttttggaagtttgacctgcacacaagctcgcacctgg

SEQ ID NO: 101783 - DNA, 50 bp, Homo sapiens
ggacccttattttatgccataatggaaaatctgctcttcactgggcagct

SEQ ID NO: 101784 - DNA, 74 bp, Homo sapiens
aactataaaaatgtgggaagtgcaaactgggtctgtgcagacttttgcagacaaatcaaaacaagaagctctga

SEQ ID NO: 101785 - DNA, 80 bp, Homo sapiens
cagaagacaagcagatgccgctatgcttcctgaacagcccacagaactaaaaagatcgttcagaagtttaccagaattaa

SEQ ID NO: 101786 - DNA, 100 bp, Homo sapiens
gtcctggcagcattcagccagtattttagacaaatcttcctattttcaagctgaaagaatctactgttagaagaagatacagtgactttgaatggctgcg

SEQ ID NO: 101787 - DNA, 100 bp, Homo sapiens
ctacttctgttatcgctggttcctgctggattttaagagaggagctccagaaagctgtggaccaccgcaaagccatcatcctctccatcaatctctgcag

SEQ ID NO: 101788 - DNA, 100 bp, Homo sapiens
aagggttgactctgattgagctctgggaaggcctgacagtggatgacgtacagaagagtactgggtgtgattttgcatgccaggcttcccgtatccagca

SEQ ID NO: 101789 - DNA, 100 bp, Homo sapiens
ctgaggagcgcgcgggcaccctgcagcgcgagctggaccacgagaggaagctgagggagaccgactgggctaatgctaatgtcagcagacagattgagga

SEQ ID NO: 101790 - DNA, 90 bp, Homo sapiens
ccggagccctcggggcggcggactggctcgcggtgcagatcggcttcagctccccaggaatatgattgaaaacagcatgtttgaggaaga

SEQ ID NO: 101791 - DNA, 75 bp, Homo sapiens
cattattcgattctttggcagttggtgaaaattactgatggctctccttccaaaagtcttgctgtgttgcccagg

SEQ ID NO: 101792 - DNA, 100 bp, Homo sapiens
gaacagattacaaatgagaagctggctatggttaaagcggttgcctgtgatttgcttcggaggattattcgtatcttgaatctcagtaagagactccaag

SEQ ID NO: 101793 - DNA, 100 bp, Homo sapiens
agctctctgcccagcatctgaccctaaaccaaacttcacagactgtaataggcatacacaagtgtgcattaatgggcagggaaaaggggtcgaggccggt

SEQ ID NO: 101794 - DNA, 88 bp, Homo sapiens
gcagtttcagcagttgttaaattctcaacagctcacaccagaatgtatcctgtcaggtataatgtcagtgaatggcaagaaagttctt

SEQ ID NO: 101795 - DNA, 73 bp, Homo sapiens
caaagcagtcctataaagagaaacgaggaggctttgtgttggtgcatgcaggatagcatttctcaagacctga

SEQ ID NO: 101796 - DNA, 100 bp, Homo sapiens
caaaagccgagttctgtttcctcttgggttgggacatgctgctgagtacgtcaggcctcgggtggcgctcattgggctgccgtactgaggtgatgggcca

SEQ ID NO: 101797 - DNA, 75 bp, Homo sapiens
tgagaaacattaagacctactaccaggcagacgcgtgccatgcctaccagatcattcaccgcaatgggattcctg

SEQ ID NO: 101798 - DNA, 50 bp, Homo sapiens
gaaatcaacatgggcgagtacgctgggtttcctgtctctttacaggctcg

SEQ ID NO: 101799 - DNA, 100 bp, Homo sapiens
agtgttctgctttcatggagttcacagaagagtcgaggagcctcgagctgtggcaggttttcgagggacagttcgttatgcatcaatcaacgcacatcgg

SEQ ID NO: 101800 - DNA, 74 bp, Homo sapiens
gttcttcttcgagtatttgtagaaggaccgagacatgggtgcccggcaccgcgcccgagcccactccattcaga

SEQ ID NO: 101801 - DNA, 100 bp, Homo sapiens
gcggcgggcaggcgtgcggaggacactcctgcgaccagttcgtcccattccgagactatgttgaccggtcggggaaccaggtgttgagcatggcccgact

SEQ ID NO: 101802 - DNA, 100 bp, Homo sapiens
gaaaaagtggctcacaacattttgtcaggggtttatgccctggacagcatcatgcagacctggtttacactctttactcccaccgaggccacaagtatag

SEQ ID NO: 101803 - DNA, 90 bp, Homo sapiens
acctgcaggacaccttcattgtgcacaccattgaggagatccagggcagaaatacagatgtggcccagagcccagaggcaccaaagcaag

SEQ ID NO: 101804 - DNA, 82 bp, Homo sapiens
agtcgcgaaagtgggccagaggttctgcgacaccacctcgggaagctcttcgtgggcggtcttgactggagcacgacccaag

SEQ ID NO: 101805 - DNA, 82 bp, Homo sapiens
atctgaggctaccccacagcactctctggcattgagttactgaaagctctcgaaattacggttacaatccttctcctgtgaa

SEQ ID NO: 101806 - DNA, 100 bp, Homo sapiens
cgtgtctcttacaattaccaaacagaatggacaagcttaataaaataaccgtccccgccagtcagaagttgaggaagaagccatggatttaataaataga

SEQ ID NO: 101807 - DNA, 60 bp, Homo sapiens
agaagacactgcgtcaagcaggtgccccgaataacatgaagtcttgctctgtcacccagg

SEQ ID NO: 101808 - DNA, 88 bp, Homo sapiens
agagttgtacaggaggaaaaccagagctctgaggaacatgaatacagtgatgaagctcctcaggaagatgagggctttatgggcatgt

SEQ ID NO: 101809 - DNA, 73 bp, Homo sapiens
gaggagcccgcgggcggccggtcgggcggggcggcggcgctgacagctgcgtttggatgaagcacaggaagca

SEQ ID NO: 101810 - DNA, 100 bp, Homo sapiens
cagcaacctgggtgcgttcagcggcattcaacaaatggcaggattgtctcaaagcttgccaggagcagattgaggcggtgctcctcaatagcctgcagca

SEQ ID NO: 101811 - DNA, 75 bp, Homo sapiens
agcagaaagtagatgaagatgagattcagaagatgcactatgctgggactcatgtatgtctactggactcagctc

SEQ ID NO: 101812 - DNA, 100 bp, Homo sapiens
actatgtggtggacttggacacgtcccagctctctctgggcatctggaaagtgacgggtcagtcttacgagaatatggtaactgagatcatgtcaatggg

SEQ ID NO: 101813 - DNA, 99 bp, Homo sapiens
gaagtccagagctgaggactgcctgtttgcaggctcagccgcccagtgggctcaggcccagagcccagagcaaccagcacaatagcgtccaacagctgg

SEQ ID NO: 101814 - DNA, 100 bp, Homo sapiens
cttcacttccctcggtctgggcttctctgaggcggcgagagatggtcaggtctggagctcgaccgggccagttcatggcctcccacgggaacgacgccgc

SEQ ID NO: 101815 - DNA, 100 bp, Homo sapiens
ccagggtcggctggcggcgtcggggactgccagggagtggaggggagccaggcggccgcctcagagtctcttccatctcccacactaacttgtgcattga

SEQ ID NO: 101816 - DNA, 100 bp, Homo sapiens
ctgatatcatccctcagcactgatgttctcatgggagcagtgccgtgtctgcatgcaggatggcccaatggaatcagctacagcagcttgacacacggta

SEQ ID NO: 101817 - DNA, 100 bp, Homo sapiens
cttaaccctagttcacgaatcaaggccgttcatattctgtgtgttctccaagaatgcttaatcagtgtctggagtccttggtgcagaaagtacaaagtgg

SEQ ID NO: 101818 - DNA, 74 bp, Homo sapiens
agtgaccgagaccgcggccgggaccgagggatttttgtccctgagtcatggaagacagaagagctgaaaagtca

SEQ ID NO: 101819 - DNA, 75 bp, Homo sapiens
gggcagccgccagcccaaacaggcgtgtcacaggccataggaaaaggatacagagtagagtttcatgaacctgaa

SEQ ID NO: 101820 - DNA, 98 bp, Homo sapiens
acataaatcctgttcggagtgtttaacagccacagaccctcactgcggttggtgccattcgctacaaagataaactgccagggagaagaatgagaaga

SEQ ID NO: 101821 - DNA, 97 bp, Homo sapiens
ggacatccaggaagaggagccgagcatctgggccgagaccattccgtatggagagccggctaaaagaactgtacaccctcctgaatgagaactatgt

SEQ ID NO: 101822 - DNA, 75 bp, Homo sapiens
ctgttccaaagcctcctggaccgtccaagaagctgttcttgccttagctgcatcttggacctcaagacaagtagg

SEQ ID NO: 101823 - DNA, 101 bp, Homo sapiens
tccctccggaactcacactccagcggttacgactttggctacttaatcaaaatcctaaccaactctaacttgcctgaagaagaacttgacttctttgagat

SEQ ID NO: 101824 - DNA, 131 bp, Homo sapiens
gcgacatggccttcaattttggggctccctcgggcacctccggtaccgctgcagccaccgcggcccccgcgggagactacctaggtggagaagcgtactgggccggcggcctgcacctctacaccccatta

SEQ ID NO: 101825 - DNA, 82 bp, Homo sapiens
tctccctttcttctgtggataagctggaacagatctatgaatgcattgagtcagcagatactggagttatttgaaacatgtc

SEQ ID NO: 101826 - DNA, 99 bp, Homo sapiens
gcagaagcgatggcaggacaaaggcagagaaggcactgccaggacaaccccagcaatgtggagaagcctggggcttgccctggctctctgtctcctccc

SEQ ID NO: 101827 - DNA, 74 bp, Homo sapiens
cactcttattacaagtggtgctgacactgcaaagttacgttatatataggattcgtgttcgccgtggtggccga

SEQ ID NO: 101828 - DNA, 101 bp, Homo sapiens
cggctgccggcatggcacattacaacttcaagaaaattacggtggtgccgtccgccaagccgtggggccaattttttaactcagatcttgctgagaccagg

SEQ ID NO: 101829 - DNA, 97 bp, Homo sapiens
tcctcgctcgtcaccagcaagcttgcggggtgtcatttgcctatgctgtatattggattagaatatggtttgaccaataactcaaaactagctgaaa

SEQ ID NO: 101830 - DNA, 74 bp, Homo sapiens
aaagactgcaccaaagtgaagtgctatagaggtcatgacgccagtcagatcacactagccttgggcacagctgc

SEQ ID NO: 101831 - DNA, 71 bp, Homo sapiens
aaatgtgatgcatgtctcagtggcccagctgtggtccctcaccagtattatggagttactccctggggagt

SEQ ID NO: 101832 - DNA, 119 bp, Homo sapiens
caagcctggaggacctcttcaacttctgctccaggaaattcagcctcaaaaccgtcctgctgcttgctgaccaaatggtgagaagccctaccactgcaactgggacggctgcggctgga

SEQ ID NO: 101833 - DNA, 99 bp, Homo sapiens
aattcatcttaagattttttcacccaacgttgtcaatttgacacttgtggatttgccaggaatgaccaaggactcacaccacccggcaagaactgctca

SEQ ID NO: 101834 - DNA, 100 bp, Homo sapiens
cccggctcagcccccggccgcggcgggacccgagaattcaaagaagctttttcactatttgacaaagatggtgatggaactataacaacaaaggaattgg

SEQ ID NO: 101835 - DNA, 100 bp, Homo sapiens
cagccctggcggggcgggcagcatggttcactccagcatgggggctccagcgtgaaggagggtgccaacaaggaggtgctgggaatcctggtgtcctaca

SEQ ID NO: 101836 - DNA, 100 bp, Homo sapiens
ttctccagctgccctatcacctgccagctcatcacaaagaaataatgaagatgtttcattttcaagaccagcagatcttgaccttattcagtcaactccc

SEQ ID NO: 101837 - DNA, 100 bp, Homo sapiens
ggccgagggacgtgccaagaagcgcaagactgtgccctgtccacggtgcctcctgcatgtcctgctgccctgagctgtcccgagctaggtgacagcgtac

SEQ ID NO: 101838 - DNA, 100 bp, Homo sapiens
agtgaggaacagctgcttggggtacaaaggtggctttctagaagatgaccatagaggaccttccagattttccattagaaggaaatcctttgtttggaag

SEQ ID NO: 101839 - DNA, 97 bp, Homo sapiens
ctgacattggaattctcaggaaccggattgatcaggccagcttagactattcatacgctcggaatcacatgcagcccaactacagattcttatggaa

SEQ ID NO: 101840 - DNA, 117 bp, Homo sapiens
ttgagttcagttgtcttctcagagatgccaggaagcctcaggaatagagctgtgcccccctggaaaacggttcatgattacgatggtggcgagcttcgtggccatggcgggccagtt

SEQ ID NO: 101841 - DNA, 98 bp, Homo sapiens
ctggcaaaagcacaaggattctcgctgtgacagagacaacaccgagtatgagaaagatgctgttcagttaaatgtgattgcaacgcgacagcttattc

SEQ ID NO: 101842 - DNA, 75 bp, Homo sapiens
aaaaagtttgtcattaaacccatcgacaagaaggcacctatgagcagcaccagcagtaagagggctccgaccacg

SEQ ID NO: 101843 - DNA, 83 bp, Homo sapiens
tattggtctcctgctcctagaggaaagatgaatgggagggctgattttcgagagccgaatgcagaggttccaagaccaattcc

SEQ ID NO: 101844 - DNA, 100 bp, Homo sapiens
gggcagagagaaggaaacacttagaggaagttctggagatgaagtaaataccagctgtcccctacagtgaatatgccccaagatgacactgtcattatag

SEQ ID NO: 101845 - DNA, 75 bp, Homo sapiens
aaaataccacgacaaaaccaccctacagctcttcagtgggtcatctgtgtgtcacagcctcagaagaccagcgag

SEQ ID NO: 101846 - DNA, 100 bp, Homo sapiens
cctcaaggtcgtgcgtctgaagcctacaagaaagccacaatggtgcgcatgaatgtcctggcagatgctctcaagagtatcaacaatgccgaaaagagag

SEQ ID NO: 101847 - DNA, 82 bp, Homo sapiens
tcaacttacagatgggacttcacctatagatcatgactctgaaaaggaatcttgcccaagcagtgatgaagttgatgaggag

SEQ ID NO: 101848 - DNA, 75 bp, Homo sapiens
ggtgtggacgccactacagttcatcaacatcaactacgtccctctgaagcttgcagtttgacccagcacctcgta

SEQ ID NO: 101849 - DNA, 86 bp, Homo sapiens
gagcctcagttggaagcagccgatccagcctgcggagcctgtggggcagttgtggaagctgatcgaggaagcctaagcaggctctg

SEQ ID NO: 101850 - DNA, 100 bp, Homo sapiens
ccgtgagcaagcataagctgccaaaccaaggattgccttgacaagttccgaactcctttatatatatggtgccctagactcaagagtgagagccttggtg

SEQ ID NO: 101851 - DNA, 98 bp, Homo sapiens
caaggaatgagaaatataaaacatgtaggtccttctggaagatttactatgaatatgctggtcgacattttcttggattaatgcgctcacagggactc

SEQ ID NO: 101852 - DNA, 75 bp, Homo sapiens
tgcaacctgataggatttggctacccagcctacatctctcaagtcctaattcgaagcagagtcctcagggaaaat

SEQ ID NO: 101853 - DNA, 98 bp, Homo sapiens
caaggggaagtctggaaaacaacgccttaccaagtggctgctgaaattaggtttgttcggacagtgttaccattttctcaggaatttcaaagagataa

SEQ ID NO: 101854 - DNA, 130 bp, Homo sapiens
caatgatctctaccgatgggaagtccttattattggccctccagatacactttatctctgctggatgaaccgaatcctaacagtccagccaatagccaggcagcacagctttatcaggaaaacaaacgag

SEQ ID NO: 101855 - DNA, 101 bp, Homo sapiens
atctggaagaggctggggagtctgtgtccttccagctgcagatacggagtgaccatgcagcaggtggccaggacagtggctaaagtggagctctcagacca

SEQ ID NO: 101856 - DNA, 101 bp, Homo sapiens
atcactgatgtcattattgggatgccccatagagggaggctgaatttattgacaggccttctgcagttccctccagagaacatgggcctggaattgatata

SEQ ID NO: 101857 - DNA, 83 bp, Homo sapiens
cgacagactcagatccaagtcaacagttggaaaggtgaaatccaggaattttgtccaaataccaaaatgctcttggtcggctg

SEQ ID NO: 101858 - DNA, 82 bp, Homo sapiens
attcagtatcactcgctcccttgatgatcttgaggtgctccagaggctggtggacctgagcggaggctgggacgccctggtg

SEQ ID NO: 101859 - DNA, 75 bp, Homo sapiens
caacgtgctggagagaccccgcggctgggcgttcatctaccacgctttcgtgtggaatatgtgatcaagtgtgac

SEQ ID NO: 101860 - DNA, 50 bp, Homo sapiens
ttcacttggcaaactcaacaagtgctgtccccggcataggtccatctctg

SEQ ID NO: 101861 - DNA, 75 bp, Homo sapiens
ttccccagaactacaggggctctggccatcttcgtggacctcagcagccatgtcgaagccccatagtgaagccgg

SEQ ID NO: 101862 - DNA, 90 bp, Homo sapiens
tccgcccgggtcgtggcggcgggcgcccagcgcgtggctcacagaacatttcctgcctgttgctcacactctgttgtccacagcataccc

SEQ ID NO: 101863 - DNA, 83 bp, Homo sapiens
cggcggcaagggcgcgcccgggccgggcggcgcgctgcccacttgcccagcctgccacaaggggctactgttcccgtagacaa

SEQ ID NO: 101864 - DNA, 49 bp, Homo sapiens
gcgccgaactgctccggttcccggctactctgacctacgacactctccg

SEQ ID NO: 101865 - DNA, 83 bp, Homo sapiens
ccgtaggagccactatgaggagggccctgggaagatgaggtttatataactttccaagacaaggaagttgtgcaaagcctcac

SEQ ID NO: 101866 - DNA, 101 bp, Homo sapiens
agagggtgcgaggtcgagtaccttccctgtcccatcgcaaacccaaagatccccgttcctggagattctgattgagacgcaaacatgcagatctttgtgaa

SEQ ID NO: 101867 - DNA, 115 bp, Homo sapiens
cgctggaccacgtgctcacccacggctgcttcgacatcttcaccacggaggaggagatgaaacaggcgcctatttaatcgacagagaccccacctactttgggcctgtgctgaac

SEQ ID NO: 101868 - DNA, 75 bp, Homo sapiens
ccaaaacaagtggctgcggccgtcgcccaggagtcatcggacgccagaatctgcattgttggaaactgttactac

SEQ ID NO: 101869 - DNA, 88 bp, Homo sapiens
ggtagtgctagagaccttggctggtcagagggctgtgaagacgcacggtgccaggaccaagtatctgctgccactgcagagccccgcc

SEQ ID NO: 101870 - DNA, 90 bp, Homo sapiens
gctgcgcggcggggctgaggcggccgcggggcccgagcgcaggtcagcccaaggccaaccccactgtcactctgttcccgccctcctctg

SEQ ID NO: 101871 - DNA, 82 bp, Homo sapiens
ggacaaagaaacgagcgctcgctggcagagaggctgatgacatcgtgaactggctgaagaagcgcacgggcccggctgccac

SEQ ID NO: 101872 - DNA, 100 bp, Homo sapiens
atggtgatgattagagacatactaatgtacatgggagcgcttgtgagtgccttggctgatgacaccttacacttatggaatttacgtcagaagaggcctg

SEQ ID NO: 101873 - DNA, 83 bp, Homo sapiens
gttgcctgttattcctgtgactggtcctgtggctcagctctacagcttacctcctgaagcatcacgtcatcttgacagctatg

SEQ ID NO: 101874 - DNA, 101 bp, Homo sapiens
gggcctccagggtctgcagacaaggcaggcaatggtgaactagacccctggtcaggaggtggagtaactaaggatatcacagacactctggttgcagtcac

SEQ ID NO: 101875 - DNA, 101 bp, Homo sapiens
gtcttcactgactttcagctagaagaaggatatgatttcttagagatcagtggcacggaagctccatccatatggctattcagcttgaccctgaagaaact

SEQ ID NO: 101876 - DNA, 75 bp, Homo sapiens
cgacgatgaggtgacagtcacgtgtgtgttttaatagaaaagttgtcactttccaaaatgccctttagaggtgac

SEQ ID NO: 101877 - DNA, 83 bp, Homo sapiens
tgggagaaagtttcatctgtggatggagtattggtttctaagcatgaattgaggaacagaagaagcagagcagatgatcggag

SEQ ID NO: 101878 - DNA, 74 bp, Homo sapiens
ttatatcatttaaaccacatggctatctaaagagactaatctggtagcttctggtgctaatgaatctgaaatct

SEQ ID NO: 101879 - DNA, 75 bp, Homo sapiens
cagcctggtcaatttgtacctgcaggcctcctacacctacctctctctggaccgtaagaggcaatatgagctgct

SEQ ID NO: 101880 - DNA, 100 bp, Homo sapiens
aaacagtctcaacttcaagaacttattctacagcacacagcaagaaggaggccatcagcaaactgggaagaggaccctcaccaggaaccacatctgccag

SEQ ID NO: 101881 - DNA, 75 bp, Homo sapiens
actatcataacctgatatcagtgggtaaggagtgccaatggaccgatgcctgcctgtctcatccctgtgcaaatg

SEQ ID NO: 101882 - DNA, 100 bp, Homo sapiens
gtctggctgtgatgctcgggagggagactgttgttcccggagatgcggcgcgcagacacttaaagaatcctgtaatagcacagaagatccagaagctgat

SEQ ID NO: 101883 - DNA, 75 bp, Homo sapiens
tccgggaagccatagctctgcatggcaataccaagattttcttgaagatcttgaagaagatgaggcaattcgaaa

SEQ ID NO: 101884 - DNA, 100 bp, Homo sapiens
tgtagtattgatgaaaagagggactgccataacattcccaaagattttatcatgtgggcaacctgctgcaactggttctgcctggatggacagcctgagg

SEQ ID NO: 101885 - DNA, 82 bp, Homo sapiens
accggagcctggcgcagcctccctctattaccagcaagagtgagccatggagctacgtgtggggaacaagtaccgcctggga

SEQ ID NO: 101886 - DNA, 151 bp, Homo sapiens
cctgaatcgagctgagagggcttccccggttctcctgggaaccccatcggccccctgccagcacacacctgagcagtccctgctatgtggatatttggtagcaatgactgatgtggaaactacatatgcagattttattgcttcaggaaga

SEQ ID NO: 101887 - DNA, 76 bp, Homo sapiens
actggccgttgggactttgagtggtgatgcttttttacaccttcttccacatgttcgagtaggtgaagtaggtggg

SEQ ID NO: 101888 - DNA, 60 bp, Homo sapiens
gaaaggagctgcttcccaataaggaaacagatcctaagcacttcaagtcagagaagacag

SEQ ID NO: 101889 - DNA, 93 bp, Homo sapiens
gaagtgcagctgcctcagttcttagcgcagccaagaagtatgatgcgtttttggcctcagagtctctgatcaagcagattccacgaatcctcg

SEQ ID NO: 101890 - DNA, 98 bp, Homo sapiens
ggagggtagcttgcacctgtcccaactgtaaagaaggtggtggaagatacttgccagaactaatacagctgatgaaatacctgaccttttctgctcca

SEQ ID NO: 101891 - DNA, 100 bp, Homo sapiens
tgttcattgagaccctgattgaagagagaggtattggatcaggagtcaattttcagttgaacaaccaacataaattcaacattctaatcttatattcaac

SEQ ID NO: 101892 - DNA, 100 bp, Homo sapiens
gcaccgccaggcctggatgggccccatctgccagctggccttcccgacctatgaggaccagcacagcagtgaggaggaggaggaagaggaagaggaagag

SEQ ID NO: 101893 - DNA, 73 bp, Homo sapiens
ggtactccagtgccagaaagagctggagaatgctggaggagaccttaaggatggccaccaccactatgaagga

SEQ ID NO: 101894 - DNA, 100 bp, Homo sapiens
gccggcggtggcgcctgcggacctaactagctccaggttaggccgagctttgcgggaaagcagcgaccttcacggcatggtgcaactcccacctgcggaa

SEQ ID NO: 101895 - DNA, 100 bp, Homo sapiens
agatgcaccttgtcttacaaaacatttacaagcttttagaggaacttgataaaacaccatggcagtatcctccagagagcaagtggtggaaaactctgag

SEQ ID NO: 101896 - DNA, 80 bp, Homo sapiens
accttcagagcgtcacggcgtacgccctcatggggaaaatctccccggtgactttcagaatgaagaacaagctatggtac

SEQ ID NO: 101897 - DNA, 50 bp, Homo sapiens
gggctctgaggatgagctggaggaggggacatcacggctgcagccctggc

SEQ ID NO: 101898 - DNA, 100 bp, Homo sapiens
ttgacaactgggatgagagctatgactattggcggagtacgtccagcttgttactgaacttcgaatgacaagagccattcagcctcagatcaatgctttt

SEQ ID NO: 101899 - DNA, 100 bp, Homo sapiens
ccgaagcccagcccctgatgtcccagcagataaccatctcttagagaaggctgagctgctggacaagttctcaaagaagctgcagccggagccaaacagt

SEQ ID NO: 101900 - DNA, 100 bp, Homo sapiens
gcagaatgccaccaagtatggcaacatgacagaggaccatgtgatgcacctgctccagagggctgtgctgaagtttgctgctgccactggagccactcca

SEQ ID NO: 101901 - DNA, 74 bp, Homo sapiens
gagcttctcagaagacagagggttttcttttgagacttgaaggaaatgtgccttagtgctttggccaacctgac

SEQ ID NO: 101902 - DNA, 100 bp, Homo sapiens
ccgggaagcgacgccccggggcgggggcgatggcggcggcggcggccggagcttctctcagccgatcacccggaagttcaggctgaattctgaaggcaaa

SEQ ID NO: 101903 - DNA, 100 bp, Homo sapiens
gaaagtgtgaaaagacacacagtggctgtgtgttcaaggaccaggcaggcagctcccaagcagacaccacgtgctcctcctaagccaaaaacatcaccac

SEQ ID NO: 101904 - DNA, 98 bp, Homo sapiens
tcgctgggagagaggtacctctccttttccctctccctttccctaagcggagattctggagctggctggcaatgcagcgagagacaacaagaagggac

SEQ ID NO: 101905 - DNA, 100 bp, Homo sapiens
cagcgcccagccccctgctatgacccttgcgactatcatggtgaacttacttcagattgtgcgggaccactgggttcatgttcttgtccctatgggattt

SEQ ID NO: 101906 - DNA, 101 bp, Homo sapiens
ccggcccggattatagtctctcgccacagcggcctcggcctccccttggattcagacgccgattcgcccaggtactagcaaaggccagacgtcttactcaa

SEQ ID NO: 101907 - DNA, 114 bp, Homo sapiens
gttagagattacaatttgactgaagaacagaaggcgatcaaggccaagtatccgccagtcaataggaagtacgagtacttgaaactgcatctgcagagcactgattatggtaac

SEQ ID NO: 101908 - DNA, 100 bp, Homo sapiens
ctgttttccgcgcggcaggcgcggccatggcgcagctgggaaagctgctcaaggagcagaagtacgaccggcagctgagttaattcaggacagcagaaga

SEQ ID NO: 101909 - DNA, 119 bp, Homo sapiens
gttgatatggttcctggcaagcccatgtgtgttgagagcttctcagactatccacctttggacgaagttatacggaagcgtctcctcattgatggagatggtgctggagatgatcggag

SEQ ID NO: 101910 - DNA, 82 bp, Homo sapiens
gagctcatcagactgaccgtgtcttacatcagttcagagagaagaacatgagctgcctgtggacatggaaaccatcaacctg

SEQ ID NO: 101911 - DNA, 82 bp, Homo sapiens
ttcccagcccgggtccccgcgttcacagccccagcgcagggaaccctactctggaaactgtcagtcccagggcactggggag

SEQ ID NO: 101912 - DNA, 88 bp, Homo sapiens
aggaagccacgtgcagacatctacaaccttcgatctcctgacgagtacccggaaattaaagaggagctggaggagctggaccgcatca

SEQ ID NO: 101913 - DNA, 82 bp, Homo sapiens
ccgttattggctgccgttaaggaccgttacgtttcccggacaatgcagatcttcgtgaagactctgactggtaagaccatca

SEQ ID NO: 101914 - DNA, 51 bp, Homo sapiens
ctccagggttctttggggcccgaggttagtggttacttggatgattgtacc

SEQ ID NO: 101915 - DNA, 98 bp, Homo sapiens
gcggaggtcgataagctggaactgatggacgcaatgagcccctgaagaaagagcggcttaagtggaagagcgactaccccatgactgacgggcagctg

SEQ ID NO: 101916 - DNA, 100 bp, Homo sapiens
caaaatcctaatgaactccagtagagacaattcccacccatttgtaggcctggcttttaaactggagggcctgacacatttagggaagggcacccttacc

SEQ ID NO: 101917 - DNA, 97 bp, Homo sapiens
gcgggtggaccactgtcccatcaaatcgcgcaaaggggatgtcctgcacatgcactacacggctgtgggtgagcgtggaggatgctcagatgcacac

SEQ ID NO: 101918 - DNA, 100 bp, Homo sapiens
ctgcagcctcatcctacagccccctagatgcagaggccaggatgtgggcccagccctgtgccaggaggctggctggaataaaggtacagatagaggcctc

SEQ ID NO: 101919 - DNA, 132 bp, Homo sapiens
ggccaatatggcagcgcccagcaacaagacagagctggcctggagtccgcggctggccgcgtgagtaggacccatggcgaatgctgctgcccccacgagcacccctcagaagctgattcccccgcagccaac

SEQ ID NO: 101920 - DNA, 116 bp, Homo sapiens
taaatgggggcctctccagggagtgctctgttcacggctccatcgctgttaggaaatcctcattgacgattcaatttgttgaaggccaatttgtggactcctacgatccaaccata

SEQ ID NO: 101921 - DNA, 101 bp, Homo sapiens
tagatattttatccacaactggccacagctgtgcttcttgtgtttgatgatggtgatgagcgaacattgagacgtacctcactttgtctgaaaggagagag

SEQ ID NO: 101922 - DNA, 75 bp, Homo sapiens
cgaaatgggagtttgaagacctggaatgggggaggacaatcatatcctgattcagcccttcctccacaaaggcaa

SEQ ID NO: 101923 - DNA, 75 bp, Homo sapiens
atcgacatatttcctgtcaccaacaaagatttcaggtggacccaagtggagagattgtggaactggcgaaaggtg

SEQ ID NO: 101924 - DNA, 88 bp, Homo sapiens
gattccaagtaactcttatttgaatgtatttacccggcaactctgtttagaacatgatgaaaagctagtatcctatctgtctctgtta

SEQ ID NO: 101925 - DNA, 98 bp, Homo sapiens
accactttagcaccatgactaagcataagaaatgacatcagatgtaccatcactgggtccagccattgcctctggaaactctggacctggaattcaag

SEQ ID NO: 101926 - DNA, 100 bp, Homo sapiens
cccaggctgatctcgaactcctgacctcagatctgtctcgtaactgtgtaatcaaggaactagcaccacaacaggaaggtaacccaggagaagtattcca

SEQ ID NO: 101927 - DNA, 100 bp, Homo sapiens
aagccagaggacgctcagcaaggccagcaggccatgtcactggccatcctccgtgtcatccggttggatccaaggattctgtagctacaatgttgtcaag

SEQ ID NO: 101928 - DNA, 50 bp, Homo sapiens
ttcacacgcaccaacaaaatgggggatagagggaggaatcagcagcttgg

SEQ ID NO: 101929 - DNA, 75 bp, Homo sapiens
gaagtgatagtgttccatctcttcctgatgaaaaaggcgggatgtagctcattttgggatacgagtctccatcgt

SEQ ID NO: 101930 - DNA, 100 bp, Homo sapiens
cttccttcgctaacgcctcccggctctcgtcagcctcccgccggccgtctccttaacaccgaacaccagaatgtgatcaatgggcaggactacgaagtga

SEQ ID NO: 101931 - DNA, 50 bp, Homo sapiens
tcctttgacgaaggtgtatgttgtggaagccctgaaacatgtatctgatg

SEQ ID NO: 101932 - DNA, 112 bp, Homo sapiens
cccagaccctggagcctcagttggaagcagccgatccagcctgcggagcctgtggggcagatatggccgcgtggaaagtgtcaaaattcttcccaagaggggatctgaagga

SEQ ID NO: 101933 - DNA, 100 bp, Homo sapiens
cttcgctgggccgtcttctgccggccgcaaggccggggctccccgctgctctcgaaaagccgcagctgtgccgctgggcactgtggtggtcccaggagac

SEQ ID NO: 101934 - DNA, 100 bp, Homo sapiens
cgcggaccgaggcagcggcggcacctgccggccgagggaaaagcttcactctgaccatcactgtcttcacaaacccaccgcaagtcgccacctaccacag

SEQ ID NO: 101935 - DNA, 87 bp, Homo sapiens
gaattgatgctgtcctcattgcaacgtggttggaaactaattctgaagcaagcccttatagttgtgctgcagtggtgtttcaatcac

SEQ ID NO: 101936 - DNA, 100 bp, Homo sapiens
gtggatcttgacttatccaggccacttttcacttctgctgcactgctttcagcatgcaaattggagctggagtgagccttccaggaattttggctgccaa

SEQ ID NO: 101937 - DNA, 49 bp, Homo sapiens
gaacgcgacggcggcgcccgcaggagtgagctgagtcgacagaaacttc

SEQ ID NO: 101938 - DNA, 50 bp, Homo sapiens
agatgcgcctctgcgatttgcagggagtgcatccgccccaacccttttcc

SEQ ID NO: 101939 - DNA, 101 bp, Homo sapiens
gcgaggtcgtggcagggagattcatcgaggtgccctgctctgaggactacgacagtcaccgcaggttcgaaggtcatccgcaagggctggctgactatcaa

SEQ ID NO: 101940 - DNA, 100 bp, Homo sapiens
aactgtgttcagattcacttccttctcatccttttccaccagctaaaggaatcagtaacatgatagccaagcttgccaaaacctgcaccctccgcatcag

SEQ ID NO: 101941 - DNA, 100 bp, Homo sapiens
gttgcagaaaatcctcactctgagtacggtctcacagacaacgttgagatcaccgaagtggccttggagtacaacaactgtcatggggaccaggtggtgg

SEQ ID NO: 101942 - DNA, 98 bp, Homo sapiens
ttttgccacgtggatgtgaagatttcctctaaaaggaggatcagctgatttattcggaggatttgctgactttggctcagctgctgcatcaggcagtt

SEQ ID NO: 101943 - DNA, 80 bp, Homo sapiens
gaggagcaccaggagacgcaactcatcggctgccactgcagagccccgccatggaagacacgccgttggtgatatcgaag

SEQ ID NO: 101944 - DNA, 90 bp, Homo sapiens
ccaactgcttaataatttcctccgaaatgacagatttaagtgccctgtatgctcaaaatttgtatcctcagatgaaatggatttgcatct

SEQ ID NO: 101945 - DNA, 82 bp, Homo sapiens
cgcgactcgcttctttcggttctacctgggagaatccaccgccatccgccaccatgggcatgacgtccttgatgaaggccgc

SEQ ID NO: 101946 - DNA, 100 bp, Homo sapiens
ccgcgggcgcccgaggggccgagcgagttacatggacacagaacagtatgaagaagcagtacgagactatgaaaaagtataccagacagagaaaacaaaa

SEQ ID NO: 101947 - DNA, 100 bp, Homo sapiens
cctgctggaggagcgcttccggattctgcctgatcaatgcaggagtcctgtacctctacttcagcaattacctacagattgatgaggaagaatatggtgg

SEQ ID NO: 101948 - DNA, 101 bp, Homo sapiens
cttctccgccatgcaaggctggcgcgtctccatggaggaaggagtcaagactgagaacaacgatcatattaatttgaaggtggcggggcaggatggttctg

SEQ ID NO: 101949 - DNA, 100 bp, Homo sapiens
tctactgcatctcgacagcatctcgggtaacaaccgagcccctcctcgcagctaagactttgaccccgacgcaggcttcagtgattgccgcggatcagaa

SEQ ID NO: 101950 - DNA, 75 bp, Homo sapiens
cgcagggctcccctccttcaggaacagaggtggagaagagcgagtacttgagaaagaagaggaagaagatgatga

SEQ ID NO: 101951 - DNA, 90 bp, Homo sapiens
ccaaggacctactctatactctcagtggcttaggtaagtcagtaatgttgtatgcagcagaaatgatacctaaactaaaaacaaggacac

SEQ ID NO: 101952 - DNA, 95 bp, Homo sapiens
tcatcgaacagctggagcaaggcgacgaaccttggagagaggagaacgaacatcttctggacctttgtccagacgctgttggaagctctgactgt

SEQ ID NO: 101953 - DNA, 107 bp, Homo sapiens
cagatcacttgagatcaggagttcgagaccagcctggacacaggttgaacatcacggcggagaacgactgccggcggctgcactgctccctgagagacttgagctcc

SEQ ID NO: 101954 - DNA, 100 bp, Homo sapiens
tcaccgacaagatcaccacggacgagatgatcaaacgcctgaaggtttccgccagctgtggatgcctttgacattatgaccgcagaggattccaccgcag

SEQ ID NO: 101955 - DNA, 90 bp, Homo sapiens
gcgctgctcccgggggcgacgggcatcagtgtcattcaaggacgtgactatagaattcacccaggaggagtggcagcaaatggcccctgt

SEQ ID NO: 101956 - DNA, 89 bp, Homo sapiens
aacatcctggcggcggccagcccgtacatcaggttggacacgagttgccgctggttgtccaaatcaacaaccaggtcgtccagctcctg

SEQ ID NO: 101957 - DNA, 98 bp, Homo sapiens
gaccacagagctgggaaaattgttgtgaacctcacaggcaggctaaacaagtcccaaagacacctgtcgagatccccaggaattgtgtctaccaacct

SEQ ID NO: 101958 - DNA, 100 bp, Homo sapiens
caggaattttactgggataattatccaaataaattgcaagcattctatccaaatgatattgatgaatgtgtaaacaacactgtttgtgacagtcacgggt

SEQ ID NO: 101959 - DNA, 100 bp, Homo sapiens
aatgtcaaagtgggagacatcattaaattagaaaataaccaatttgttgctataccatgtttgtgtggaagtgccccgtgtttgctatgccgatgctgtc

SEQ ID NO: 101960 - DNA, 101 bp, Homo sapiens
cagtgtgcagctccctaatgatgatgctcagtttgatgcgtcacactacgacagtgagaaaggaggagatgacttacagtctcttctgtttcactttttgg

SEQ ID NO: 101961 - DNA, 97 bp, Homo sapiens
cagctattctcaggatatgacaggggtaacacccttccagatgatttttgaggtgtcatggagaaactccagctgggcccagagattctgcagcggg

SEQ ID NO: 101962 - DNA, 90 bp, Homo sapiens
ctgagcaggagtcgtccgcttatagtggaggctgctaggagccggtcagagggtgtggccgacgacgatgccctcgctgaggagcgcatg

SEQ ID NO: 101963 - DNA, 90 bp, Homo sapiens
ccttcaacagactcaagaactggttatacttgaaaccataatgctacaaactctagctgtcaataccagcaaatatgcagaaagctatcg

SEQ ID NO: 101964 - DNA, 86 bp, Homo sapiens
aatgactccactgaacagaatctctcagtccaggccttcgcgtctcctgcgccagcagacggtgcccacggagctcccagctgagg

SEQ ID NO: 101965 - DNA, 74 bp, Homo sapiens
tctgctagatgttgtggttgaaaataatctagatattgatggctttgggaatctagagcaacagcaaagctgag

SEQ ID NO: 101966 - DNA, 83 bp, Homo sapiens
gcctctcttcgcctcgcctcgggacccgcggtccccgctcttgctgaaatgagccgtcagactgctacagcattacctaccgg

SEQ ID NO: 101967 - DNA, 87 bp, Homo sapiens
ttactgtcatcaagaactgtaatacttctggaatccagacagaatgggaaagcgctctagcgagtgctgatttagaagaagaaattc

SEQ ID NO: 101968 - DNA, 100 bp, Homo sapiens
atgaaaaagtcaaaacgggcaataagactctttaaagaaggcaaggagagaatgtatgaagaacagtcacaggacaggtgacagagctgaatgaacctct

SEQ ID NO: 101969 - DNA, 100 bp, Homo sapiens
acccagaaggtgctagacaccaagaaggacgcactgactcgcctcaagcacctgcgcatcgtcatcgcgggagatacagatgacccaccaagaattactc

SEQ ID NO: 101970 - DNA, 83 bp, Homo sapiens
ggctcaacgaggaactcaaagtggatgaggaaagctcttgtcaggatggtgaagctgttcatcggaaacctgccccgggaggc

SEQ ID NO: 101971 - DNA, 78 bp, Homo sapiens
gaggacagaggctatatgaaaagtaccttaacatggggaatcttcttaaagttttgacatgcacagaccttgagcagg

SEQ ID NO: 101972 - DNA, 75 bp, Homo sapiens
tgtttgcctggggcaatggagaaaaagtctccacagcctattggctcacttggacatgatgctgacttgaggcgg

SEQ ID NO: 101973 - DNA, 100 bp, Homo sapiens
tgtgaagtaacagaattaaccagagaaggtgaaacgatcatcgagctaaaatatcgtgttggagggaaaacccctgatcctaaaatgaatgctaggactt

SEQ ID NO: 101974 - DNA, 100 bp, Homo sapiens
ccgcgctacaccaacctctcgtacatcggcgagggcgcctacggcatggtgtgagttacactgttagaccttatgatagccaagataacgagtgatgagc

SEQ ID NO: 101975 - DNA, 98 bp, Homo sapiens
tatgggagtcccggcgttcttccgctggctcagccgcaagtacccgtccatcatagtcaactgcgtggaagagaagcttcgagagctgtgcccaggag

SEQ ID NO: 101976 - DNA, 101 bp, Homo sapiens
gcggcggtaccggtgctggcggcggcagctgaggccttggccgaagccgcgcgaagttcaccatgtctattctcaagatccatgccagggagatctttgac

SEQ ID NO: 101977 - DNA, 100 bp, Homo sapiens
ttataaaatgaggacaatgacacctgcaagactgtgaggtttaaaaacaaaatctgtgttgagaggcgtcacaatgtagcagggaccccaggcgtcgtgc

SEQ ID NO: 101978 - DNA, 82 bp, Homo sapiens
tgcccgcgggcccggccacggcggagccaagatcattgagaagcagccaggccacattcggagcagggttttcagggaggtg

SEQ ID NO: 101979 - DNA, 51 bp, Homo sapiens
ggcctagttcccgacttgtttctcagggtcatgatcagagttcgactcttg

SEQ ID NO: 101980 - DNA, 97 bp, Homo sapiens
aagaattgagctgaagcagggctacacatttttcatcccttccggaggaaaactccctcttcgtcatgaccaacgtgatcctcaccatgaaccagac

SEQ ID NO: 101981 - DNA, 98 bp, Homo sapiens
tttgagagtgggaacatgacgcaggtgcaggtgtctcttctcgccctggcggggaaggtgcagcggaactgctgcctgacgctctgcaacttcagcat

SEQ ID NO: 101982 - DNA, 75 bp, Homo sapiens
agaaagcaggcgaacccgcggcgcaataacggttcggctttccagtttggcagcagcactacaaatttcaacttc

SEQ ID NO: 101983 - DNA, 75 bp, Homo sapiens
gaagagaatgcgcccgcacagtccatcggcatacggagacaggtgcgtgctctggaggaggccaacgccgacctg

SEQ ID NO: 101984 - DNA, 96 bp, Homo sapiens
catgggatgcttatggaatgtgcgagaacacgggtgcccaagcaaggaaagaaataatgaagagacacatgtgttagctgcagccttttgaaacac

SEQ ID NO: 101985 - DNA, 98 bp, Homo sapiens
ggggaccaagccggggactaaggcgagccggagaccgagcccgaacagcaggacgtggcccagtggaacatcgggagcctccggaccatcctggacat

SEQ ID NO: 101986 - DNA, 75 bp, Homo sapiens
cagctcttgaggagtgagactgcaggagatgtgggccggccaggtcagagcagcccaccatgggatggggagggg

SEQ ID NO: 101987 - DNA, 99 bp, Homo sapiens
gtgcttttgaggacccagatgtcaacatcaccaatctggaatttgaaatatgctggaagagaagactgagaacaagttgggagaactaggctcctccgc

SEQ ID NO: 101988 - DNA, 90 bp, Homo sapiens
gtaaaaaacccagctgaagaccactttagaaactcaattaagtgactgcttagaaaactgcacagcatctgatgaaattagcgaataaga

SEQ ID NO: 101989 - DNA, 75 bp, Homo sapiens
gccgctccatccagggccaccatgtctgcctcctggtgaaaaaggttcgtgctggccgtgggcagcgccgtcttt

SEQ ID NO: 101990 - DNA, 93 bp, Homo sapiens
ctgccgccgaacgacaggacgttggggcggcctggctccctcagctgctcatgtttcccacctggagaatgtgtcagaggaagaaatgaacag

SEQ ID NO: 101991 - DNA, 75 bp, Homo sapiens
gagcgcttccgcaccatcacctccacagtaatcaagtcagaggattatatgacttttatctgcctagagaagaac

SEQ ID NO: 101992 - DNA, 100 bp, Homo sapiens
ctgcagggactggcagacccgtagctaagacgccaggatttcctggaagcagagaaatgaagtctggacagctgatcacctgaaagagaggagccaagaa

SEQ ID NO: 101993 - DNA, 100 bp, Homo sapiens
ttattgcttttggtccatggatgaatctaacactacaaaatacgctgccattgccgaaatctaaaaaaacttgtagcaaaggcagtaaaaaggaacggaa

SEQ ID NO: 101994 - DNA, 98 bp, Homo sapiens
gaaaatggcagagaatacaaatttgatgtttcgtcagagttactagagcatccttccatggcaataataaaaggagctgggttggttatgaaggcaat

SEQ ID NO: 101995 - DNA, 75 bp, Homo sapiens
ctctaattgcctcctgatagcacacagaaagctgcattaatactacattgtcaaagacaaagacgaacatgagac

SEQ ID NO: 101996 - DNA, 100 bp, Homo sapiens
gtcatcggtggcggagtcttccaggccatcaagggtttccgcaatgcccctgttgattctggttgatctgaaaaatgaagtttggtatcaaaaatgtcat

SEQ ID NO: 101997 - DNA, 88 bp, Homo sapiens
tttgatagtgtaaactcagcacgagccattttgcagctggtggagctgtctaaggctcaagatatagaagcaggagatggcaccacat

SEQ ID NO: 101998 - DNA, 103 bp, Homo sapiens
tttgagttccgattcatgcagactgaccccaactgggccaacttcctgtatgatgcctccagccaccagaacatttccccagaggagctcaaaatggagttgc

SEQ ID NO: 101999 - DNA, 100 bp, Homo sapiens
gctctccagtgggacagcgcatcgacctgcctagagctggaacgttacctccagagcgagccctgctatgtttcagcctcagaaatcaaatttgacagcc

SEQ ID NO: 102000 - DNA, 82 bp, Homo sapiens
agatgctttgccacccccatatcatcaggctctaccaggaactgtggctgcaccatctgtcttcatcttcccgccatctgat

SEQ ID NO: 102001 - DNA, 134 bp, Homo sapiens
cgagaaatcaaactttgggcacaagtcatgaagccgacaagcccgggagacacagtgtcagaattacaagaaaaagcttgtggtgaaggggggcaaaaaaaagaagcaagttctgaagttcactcttgattgca

SEQ ID NO: 102002 - DNA, 50 bp, Homo sapiens
tgaaagtgtctacccagaccaagaggtcgtggagtcagatttgagtgatg

SEQ ID NO: 102003 - DNA, 100 bp, Homo sapiens
aggggctgcggccggagcgggcggctgagacaaaggcgacggttgcatcccagcgcattagctcagtggacctctcgtgttgtagcctggaacatctgcc

SEQ ID NO: 102004 - DNA, 100 bp, Homo sapiens
cttgaatgttgaagatgtccttaccagctttgacaatacaggaaatgttttttccatagcaaggcgtgtacaagatccattagctgagctagtgaaaatt

SEQ ID NO: 102005 - DNA, 90 bp, Homo sapiens
agtccaacttgcctggaccagcttaatggttctggcatacttctccgccttcccaccacccggattcatagtgtgaattcctgcccggcc

SEQ ID NO: 102006 - DNA, 98 bp, Homo sapiens
ttcggagtacctgcgctatgaagacacgcttcttctggaagaccagccaacagaggcatttcatccttcatgaagccattcaggattttgaattgcat

SEQ ID NO: 102007 - DNA, 87 bp, Homo sapiens
ccccgcggagacccttcgagaaatctcgtctcgaccaagagctgaagctgatcgaacactcgtgaaactgctcaggccatcaagggt

SEQ ID NO: 102008 - DNA, 83 bp, Homo sapiens
caagtagagatttgctcaatgcattgaagtcagtcattaatgaccctatagacggggtttcaccatgttagccaggatggtct

SEQ ID NO: 102009 - DNA, 83 bp, Homo sapiens
tgccactgctgctccgtggagatcgtcccgcgcctgccggaacaagatcactcaaggtgaaggataatctactaataccagca

SEQ ID NO: 102010 - DNA, 82 bp, Homo sapiens
ccaagatgagccaagtagcccccagcctgtcagccctaattggggaagcgataagaccatcatcatgtggaaactgaccagg

SEQ ID NO: 102011 - DNA, 82 bp, Homo sapiens
gttatgaacaatatggaatcctttcagtaccactctgaagaatctcagacttcacagagaatgcagttgtcttgacttcagg

SEQ ID NO: 102012 - DNA, 83 bp, Homo sapiens
gtccgggctgtgagcaagaggaagctgcagcccacccgggcagccctcaccctggttttaaaatcaaagatgggaaaatcgga

SEQ ID NO: 102013 - DNA, 100 bp, Homo sapiens
gactcagagaccaataaaaataaactgcttgaacatcctttgactggttagccagagacacctatggctgccgatgaaggctcagcagagaaacaggcag

SEQ ID NO: 102014 - DNA, 50 bp, Homo sapiens
aagtgaagatctggcgcatgaatgtgtgggcgaaatgctgaaaacttcga

SEQ ID NO: 102015 - DNA, 100 bp, Homo sapiens
aggaacagggacagcacctcatcccctggatgggggaccacaagatcctcatcgacagagaatggaggatgaagattacaacacttccatcagttacggt

SEQ ID NO: 102016 - DNA, 74 bp, Homo sapiens
ctttgccattgtgtattacctcattcaaagtgacaaacagcatgtttggtgcttcaagaaagaagtttgtagag

SEQ ID NO: 102017 - DNA, 50 bp, Homo sapiens
acaggaatctggaattttattaaacatgatggaacagatttggagttgag

SEQ ID NO: 102018 - DNA, 97 bp, Homo sapiens
agtggagcattgttttcacatgtgtgatagaatggttatctatttcttcattgctgcttcttatgctccatgtttacaagtccttccactttctctc

SEQ ID NO: 102019 - DNA, 75 bp, Homo sapiens
tctggagctgggagacaagcccgcgcccaacaccttctatgtagggcccaccagctctgagcagatcatgaagac

SEQ ID NO: 102020 - DNA, 101 bp, Homo sapiens
ccaaagactgtggaacttttaagtggagtggtggatcagaccaaagatgggtgtgatgaatgcagactctgctaccattttggctgtttggatcctccttt

SEQ ID NO: 102021 - DNA, 99 bp, Homo sapiens
gatgatgatggatccatttctcctattgaggagtcaacgttgggagccacgtgtaccagtgtgtgttgatcttggcttgattcagtctgccttgtaaca

SEQ ID NO: 102022 - DNA, 82 bp, Homo sapiens
agggaaccctggtcaccgtctcctcaggtcatgttctctttcgaggccggccgccgctgcccctcaggccctggaaccttca

SEQ ID NO: 102023 - DNA, 50 bp, Homo sapiens
gctggaacatgcagagtctgcacaagtgggaacatccagttgcaggaaaa

SEQ ID NO: 102024 - DNA, 100 bp, Homo sapiens
gtgggtgattctgaaggacagattgttatatacgatgtgggagaggaggagatgttaaagtaacccatcttgcaggacgacattgaagattggtcttctg

SEQ ID NO: 102025 - DNA, 98 bp, Homo sapiens
gaaaacactatcctctgagatcccagatcatgaggtattgttgcagcatctggcagtgagactgaggatgaggacagcatggacattcccttggacct

SEQ ID NO: 102026 - DNA, 83 bp, Homo sapiens
ccgctctcgcttcgtcctacacttgcgcaaatgtctccggtttaactatagatcaacacatcatcttgcatctcatgggttct

SEQ ID NO: 102027 - DNA, 78 bp, Homo sapiens
ttgggaggccgaggcgggcagatcacctgaggaactcctgcgttgcgagctgtgcctgggcatcatgggtgggaaacc

SEQ ID NO: 102028 - DNA, 100 bp, Homo sapiens
gacaagatggcggacggggagctgaacgtggacagcctcatcacccggctgctggaggatgaggaaacagacttggagaggttaagtgacatgctcaaga

SEQ ID NO: 102029 - DNA, 90 bp, Homo sapiens
cccccgggcacgacctctcggacacggtgcaggcagttcataaaccagaaaaggtcacatggacggaagcagcaggaagcattcgggatg

SEQ ID NO: 102030 - DNA, 75 bp, Homo sapiens
aatgaagaacactttcaagaaccagagccagctctcccaggcgctgaacggactgtcagacagggccaaagaagc

SEQ ID NO: 102031 - DNA, 74 bp, Homo sapiens
acttgccggcttatggtttcaatgctggattgggaccttcgaacttttcatcttttgcatactgttcccgctct

SEQ ID NO: 102032 - DNA, 80 bp, Homo sapiens
gtcacatctcttactactgctagtcgctgcaacactcctctacagtttgagcaacacagtcactcctggcggcaaaccaa

SEQ ID NO: 102033 - DNA, 75 bp, Homo sapiens
gggctgctggtgggccgcgtcgaagacatggaccagggctacggagttggaatcgaagcctcttaaaatggcaga

SEQ ID NO: 102034 - DNA, 82 bp, Homo sapiens
tcccgcagcctgcctttccttccccctcggaaaatggttcccactgccgggcgagaaggatatggccctgaagccacatgag

SEQ ID NO: 102035 - DNA, 100 bp, Homo sapiens
gggagacaaagcagcgcccgtctgcttcgggcctctggaatttagcgctcgcccagctagccgcaggtaactgtgacatttgatgatgtggccttatatt

SEQ ID NO: 102036 - DNA, 100 bp, Homo sapiens
tcgggcagctgctcaagtggattgacaccacggcttgcctgtccggcctgtcctcctcggtacacatgctgtccctgtccatcacgccggcccagaccgc

SEQ ID NO: 102037 - DNA, 80 bp, Homo sapiens
ggaaaagaagcccaaagttttaaagggcccttaagtgagaagcaggaggctttgatgaccaagagccccgcatccaatgc

SEQ ID NO: 102038 - DNA, 101 bp, Homo sapiens
ggcagatatcgaggtggatggaaagcagagttttgcggcctccaggtggtggatccaatttttcattaggttttgatgaaccaacagaacaacctgtgagg

SEQ ID NO: 102039 - DNA, 97 bp, Homo sapiens
gagaaagcagccagagtactggtttgctgttcctcgggagaggaagctatgaagcagataacccagctcctaccagaggacctcagaaaggagctct

SEQ ID NO: 102040 - DNA, 90 bp, Homo sapiens
ctgccctctaagaggcagatgcagctttcaccaacaatcaccagtggtttacacaacattgcaaggagcattgaaactcgaaactactca

SEQ ID NO: 102041 - DNA, 51 bp, Homo sapiens
aagcgactgagtccgcgatggaggcagcgtctatcccagactaccggggcc

SEQ ID NO: 102042 - DNA, 75 bp, Homo sapiens
gaagctcagcaagactggagtccctgatggaattatgcagtttattaaggccagcgagaccgaggagaatggctc

SEQ ID NO: 102043 - DNA, 97 bp, Homo sapiens
gtgaaccggagaccccgaaaacggaagcgcagggagaaggaagaggtgtttgaaaaggccaagcagatagaacttcagttcactattggcgaagcca

SEQ ID NO: 102044 - DNA, 83 bp, Homo sapiens
gcaagaccgcgaggcgagacctcttgtaaaagtacacctgtaagccagcttggttccgcagactttcccgaggcccccgatcc

SEQ ID NO: 102045 - DNA, 96 bp, Homo sapiens
ccaccgcaggtcgaggacggtcggactcccgcggcgggaggagcctgttcccctgaggtaagaatgattgatgttggctgatattggagtgctcat

SEQ ID NO: 102046 - DNA, 100 bp, Homo sapiens
ggcccatcgaagctgtgtccactattgagactgtgccatattggaccaggagccgaaggaaaacaggtatcgagaaccttccctgcgaacttcagaggaa

SEQ ID NO: 102047 - DNA, 98 bp, Homo sapiens
ccagagcctggagtctgcgaaggccgggacccggttccccggcccacagtgggggtgtgcaaacccgagagaactggccccctgcctgggatgcgcca

SEQ ID NO: 102048 - DNA, 90 bp, Homo sapiens
gagcccggagacaccctggctggactagcactcaaatatggggtgacggttcgtgctggccgtgggcagcgccgtctttgatgccatgtt

SEQ ID NO: 102049 - DNA, 84 bp, Homo sapiens
ggacagccccaggatgccgtgggccgcagccactcaggactgtcaaagggttcagccgactcctacaccagccgcccatctctg

SEQ ID NO: 102050 - DNA, 50 bp, Homo sapiens
gcgtcacttgacaagcctatagaatcgaattaaacaaccaccatgtcgag

SEQ ID NO: 102051 - DNA, 97 bp, Homo sapiens
ggagaaacatctgcgcaagccctgcccggaatggagatgaggcgcctggtgtttggatgatcccaacttcagatccagcggctaacttgcatccagc

SEQ ID NO: 102052 - DNA, 98 bp, Homo sapiens
gtcccctgtggcctcggttccctggagaagccacagcttctgcaaagacaggaggagtgggccctttgtggacaagggtgtcccccacctgaagacgg

SEQ ID NO: 102053 - DNA, 75 bp, Homo sapiens
attttctgcaccttcaggaacaggccataaaattttgagtagaaaaatccagaaatttgaaaatcagtatcgtgg

SEQ ID NO: 102054 - DNA, 100 bp, Homo sapiens
agatgtttacagtgcagtcttatcgaaggatgtgcatgaaggacagcctcttctcaatgaggaggtgtctgcaaggatagttcaagtagtcactgctgag

SEQ ID NO: 102055 - DNA, 83 bp, Homo sapiens
cttggtttcgggatctcggtgctgcagacggcgagacctcctgcacagtttggtgccctggttgtcagatgttggaaagcagt

SEQ ID NO: 102056 - DNA, 97 bp, Homo sapiens
actacagaacagcacgtaccagaggtggaagtccaagtcaaacgcagaaggactgcctcactgagcaaccaagaccctttctaaggcacaaaatgat

SEQ ID NO: 102057 - DNA, 90 bp, Homo sapiens
ctgacggctgaatgtgccatcgtcaccctgaagtctggacagctgatcacctgaaagagaggagccaagaaaaccaatctaaacatttgt

SEQ ID NO: 102058 - DNA, 101 bp, Homo sapiens
gtcacctttgctgcaaaaaattacgggggccaacaaatatgatgaggcagccagctacatccagagtaagtttgaggacctgaataagcgcaaagacacca

SEQ ID NO: 102059 - DNA, 83 bp, Homo sapiens
atgaccctgtgcgggagaggctcaagcgggacctgttccagtttaacaagaacatgaaaggctcccggagcagcgctgactcc

SEQ ID NO: 102060 - DNA, 100 bp, Homo sapiens
ctcatccacaatgatttctccagtgctcatcttgttctcgagttttctctgccatgttgctattgcaggacggaccattcctctcactgcctacggacca

SEQ ID NO: 102061 - DNA, 94 bp, Homo sapiens
ggacgcggcagcccgtggagtcggctgagggaaaagcgaggcaaggcaggcgggtcaatgtgacggtggactacattagaccagccagcccagc

SEQ ID NO: 102062 - DNA, 101 bp, Homo sapiens
cggaccaggaccaggaagtaactttagaggaggatctgagccatccaaaactctgtttgtcaaaggcctgtctgaggataccactgaagagacattaaagg

SEQ ID NO: 102063 - DNA, 95 bp, Homo sapiens
gatcctgctgggatttttgagctggtggaagtggttggaaatggcacctatggacaagtctataagggaagaggaagaacgtctgagaaataaaa

SEQ ID NO: 102064 - DNA, 101 bp, Homo sapiens
ggatgccaccaatatgccagctgtcaaagccatcatatatcagtatatggaagaggtggttattaacttggtgatgcttttggctgaaatgaaaatacagg

SEQ ID NO: 102065 - DNA, 100 bp, Homo sapiens
ttgaaccatgtttggattgaagccgcctctgtattacttaccaggttgggcccgaaggcatcctgcagaacggggctgtggacgacagtgtagccaagac

SEQ ID NO: 102066 - DNA, 50 bp, Homo sapiens
ggaaggcgcctgaagaggacgaaggcatctcccctcagatggaagtcaca

SEQ ID NO: 102067 - DNA, 83 bp, Homo sapiens
acagccttcctgtgtggttttaccgcccagagagcgtcatggacctgggggatgaacgtagggcacttagcttcttccaccag

SEQ ID NO: 102068 - DNA, 100 bp, Homo sapiens
gaatctgccgtcttttgaagcaccctaatattggtagctacagcaagctgggtagcaggcagatccaaaggatatcatgaagtttccagggcctttggaa

SEQ ID NO: 102069 - DNA, 75 bp, Homo sapiens
cgcggcacctacggtcacgtctacaaggcgaggcggaaagatgggtcctaggcctacttacaagcctccagtctc

SEQ ID NO: 102070 - DNA, 90 bp, Homo sapiens
aatgattcgaagagcttttgaagctggatggggttttgccctcaccaaaactttctctcttgataagggaggtggggaagacagggctcc

SEQ ID NO: 102071 - DNA, 75 bp, Homo sapiens
gaaagaagtacagctcatgaatagactctcccatcccaacatccttagtactaaggctcgtacgtctgcatcgat

SEQ ID NO: 102072 - DNA, 96 bp, Homo sapiens
atttgttaaggattccaagtaactcttatttggagctgactaaggctttggaacagaaaccagatgatgcacagtattattgtcaaagagcttatt

SEQ ID NO: 102073 - DNA, 75 bp, Homo sapiens
ggtctggacacagaaagagaacctacccgttccatcccgggctatcccagttccccactgccagggaaccccacg

SEQ ID NO: 102074 - DNA, 75 bp, Homo sapiens
ggagatcatagcagagtacgatactcaggtcaaaggtttttcgttggaatatacgttgcacatttatggcgattc

SEQ ID NO: 102075 - DNA, 82 bp, Homo sapiens
ttgaggactttccttacctgtttttccagctcacccactgccagcagagttgcacctggacttgatatgaaagtaaccatca

SEQ ID NO: 102076 - DNA, 80 bp, Homo sapiens
ttcagaagttcatggatgctgtcaacaagaagagcagttcccaggatctgcataaaggacacatgacggaagtgtgtatt

SEQ ID NO: 102077 - DNA, 99 bp, Homo sapiens
tcaccacggcatgtgtctgtgaatgtccgcaaaacatttgaaagagtttctagccaaagccaaagaagactttttgaaaaaatgggagaatccaactca

SEQ ID NO: 102078 - DNA, 96 bp, Homo sapiens
cagcagtcagttcctggatggtatgaattacctgcgatacagcttggagggaggacgatctgacagcatccgcacttccactaatagccaagtaga

SEQ ID NO: 102079 - DNA, 51 bp, Homo sapiens
agcctattggaggaaaacacaccaagtgaagctgtggtctaccaatctaga

SEQ ID NO: 102080 - DNA, 75 bp, Homo sapiens
cacctggagagcagttatttcagaaccattctacctggcgtggtgaccaagatgaagatgcagaggaccattgtc

SEQ ID NO: 102081 - DNA, 83 bp, Homo sapiens
agcagcgccagcggccgagcgggcggcttcctggcctgggcgctccggtggcggcggagggatgtttcagcagcccctgagaa

SEQ ID NO: 102082 - DNA, 75 bp, Homo sapiens
aggttgattacagcggcctcagggttcaggcaatgcaaataaggtaactcacgtagtgctccacctacacgaggg

SEQ ID NO: 102083 - DNA, 100 bp, Homo sapiens
gggaaggtgtgtttcctcgccacaggtggtccagctgtagttcctctggacgttctcgaagatgctcttcctcttcttcgtcatcatcttcctcttcgtc

SEQ ID NO: 102084 - DNA, 119 bp, Homo sapiens
gttgaggcggacggcggggtccgggccggagtacgtcgttcccgctgcgctaggggaagcgggcaggcccctccagccagcgtcaggtgcagaatggcccctctcctgatgagatggac

SEQ ID NO: 102085 - DNA, 75 bp, Homo sapiens
aggagactcagaatcgaatctcttctccctccccttcttgatctcacattcttgaaggtggcattgaagagcact

SEQ ID NO: 102086 - DNA, 51 bp, Homo sapiens
ggatgtgaaaatgaagccagaccgaggttttgattcccaccatggccatca

SEQ ID NO: 102087 - DNA, 90 bp, Homo sapiens
cgcccagcccactcaaggatatgcacagaccacccaggtctggctcccagccatgaaggctaaggggctggagatctcaggcaccttcac

SEQ ID NO: 102088 - DNA, 76 bp, Homo sapiens
ctgcttccaggacaagtcctgcgcttggggatcctctgtacgcccgttcactgtggtgcttcatgccccacctcca

SEQ ID NO: 102089 - DNA, 74 bp, Homo sapiens
tgctggtgcatcgggacgtgtgccaccatgttctcctctgagggttgactttgataaagattgtgaagatcctg

SEQ ID NO: 102090 - DNA, 100 bp, Homo sapiens
cttgcgagccgtcttccccaggcctgcgtccgagtctccgccgctgcgggcccgctccgacgcggaaggaagtgcacggctgtctataacgtgctgccgg

SEQ ID NO: 102091 - DNA, 121 bp, Homo sapiens
tgatatttctcttttgtctgcccctattgtaagtgcagatggaacacaacaggggaagtattacaaatggaagatgatctggtgatttcatttcagttaatgctatgtgtccttgactatt

SEQ ID NO: 102092 - DNA, 84 bp, Homo sapiens
agggccttggaccccgcggcgcccctcggcctcggagcaacgagcgcagcgccgaatacagttatggccacccaggtaatgggg

SEQ ID NO: 102093 - DNA, 98 bp, Homo sapiens
gtttcgtcttcttggcttctgatatttatgaccatgcagttctattcaataagtctgcggccgtggtgtgtgtcaccctcctgaaccgcctggaaggg

SEQ ID NO: 102094 - DNA, 100 bp, Homo sapiens
ctcagtgctgatcgtcggagcttgggagcaggaagatgtcgaatgaacttgagggacattgaataaacctgagtattgtgtgcctgtattttgactgcga

SEQ ID NO: 102095 - DNA, 51 bp, Homo sapiens
gtgggggtgtgcaaacccgagagaactgggatctatcttgggatcccatgg

SEQ ID NO: 102096 - DNA, 51 bp, Homo sapiens
aatatatcaagcccagggaaaagggcattttgtcagtgatgctgatctttg

SEQ ID NO: 102097 - DNA, 75 bp, Homo sapiens
gactcagccggacctgcttccgccagtggagacaacaggaatgggtaccacagaccatgtcatcgtcctggcgtc

SEQ ID NO: 102098 - DNA, 95 bp, Homo sapiens
attttatgttgtgtcatttcgaagggaatagccaggccagaagaaggaaggcctgtggtgagtgggacaggaaatgacatcaccaccccaccgaa

SEQ ID NO: 102099 - DNA, 74 bp, Homo sapiens
gctgagcgtcggcgccggggttcggtggcctctagtgagatctggagggttcatgcttgaaccagatccggaac

SEQ ID NO: 102100 - DNA, 82 bp, Homo sapiens
tacaaactggccaagaagggccttactccttcacagatcgtgtggcaaaggagcagagaactttgacaagttcttcacacga

SEQ ID NO: 102101 - DNA, 98 bp, Homo sapiens
ccagcagagactgcacacctcagaaaggagcttctgattgctgccaaacacatcctcaccacagagctgagaaaccgaggagatgttaaagtaaccca

SEQ ID NO: 102102 - DNA, 75 bp, Homo sapiens
cggacctagacctggaatcgcccaagtccctctactcgcgagcggtcacctttgtcccggtgtccaaggtgagcg

SEQ ID NO: 102103 - DNA, 125 bp, Homo sapiens
cgcgggagcacctgggggaccgcttgcagcggggacgcgaggacccgggctgggctttcctcacccggtgaaagagtttctagccaaagccaaagaagactttttgaaaaaatgggagaatccaa

SEQ ID NO: 102104 - DNA, 98 bp, Homo sapiens
gcgccgggccccgggccccgatggccccgaccgcgtgctggagctcttcgacccacccaagatgtttctttctcagcaaaatagaggagaagcttacc

SEQ ID NO: 102105 - DNA, 115 bp, Homo sapiens
cgcggctcttcccgcccgccttccgccgtctcttcgagttcttcgtgctgctcaagctgctgatgcaaggaatcccctgggctcccgtccactccactgctgaccagcccattcg

SEQ ID NO: 102106 - DNA, 75 bp, Homo sapiens
gttcatctccttctgcatccttaactgagaatgaggaaagtgaaaaggtttctgaatatccagcagtgattgtgg

SEQ ID NO: 102107 - DNA, 75 bp, Homo sapiens
aggacatggagtatgaaagacggcctgccgaggaggaactgaagacgaagaacatggatgataacacctttgcca

SEQ ID NO: 102108 - DNA, 148 bp, Homo sapiens
tcatcccctcttcagtgcaggaatatgttagcgttgtatcttgggagaaagacacagtctccatcatcccagaaaatgaagtgccagccccagccccacccccggaaggtgagtaaaaacactcactcacacacgtttgggctgcaaa

SEQ ID NO: 102109 - DNA, 88 bp, Homo sapiens
aggcgtataatctctttgcagtgaacggcattctcttcaatcatgagagtcccagaagaggtatgatctcgtgaaaccttgagagaaa

SEQ ID NO: 102110 - DNA, 100 bp, Homo sapiens
ctctagaagtctggatgtcggtgggcctctgagatatgccgtttacggaggtgtgttgcagtcactcattgaaaaacattttcctgctccagacaggaaa

SEQ ID NO: 102111 - DNA, 100 bp, Homo sapiens
tcaagacaatctcatccgaaaccacacaggatccctggctgtagcgaacaacaacccaaccattactggtcctcagaatggttggaatgaccctccagct

SEQ ID NO: 102112 - DNA, 98 bp, Homo sapiens
aaaaacagacgcaggggtaagaatgagaatgaatctgaaaaaagagaactggtattcaaagaggatggtcaggtatgtgacactaaaagagatgccag

SEQ ID NO: 102113 - DNA, 100 bp, Homo sapiens
aggcatctgcatctggaatgtttcctggacaaagaaggtgtttaagatagaagtgctaatgaatggaagaaaacattttgttgaaaagagatacagcgaa

SEQ ID NO: 102114 - DNA, 98 bp, Homo sapiens
cggcggcggcgcgcagcgtgtcaggcggagagacccgccgccagaatgatatggaacctagcaaagctgttccactgaatgcatctaagcaagatgga

SEQ ID NO: 102115 - DNA, 51 bp, Homo sapiens
tgccaagagcttagttgaactccttgatgaggagaacaatccccttgagac

SEQ ID NO: 102116 - DNA, 82 bp, Homo sapiens
cgcgcgggaagccccagcccgcagccctcgggggtttggtgcacctcgatttggaggaagtagggcagggcccttatctgga

SEQ ID NO: 102117 - DNA, 74 bp, Homo sapiens
gacgctgtgcgggtgctgagggacattgtgcacaagcctggggggcagtacccaaaggaaacgctacgaaagaa

SEQ ID NO: 102118 - DNA, 75 bp, Homo sapiens
aacagatgtggccgtcctgcggtaccagccaccccctgagtatggggtaacgagaaaagatcccgcaccatcctc

SEQ ID NO: 102119 - DNA, 74 bp, Homo sapiens
agagacttcacagtttctgctctggtttgaagatgccgcatttggattggatgaattccaaattctgcttgctt

SEQ ID NO: 102120 - DNA, 100 bp, Homo sapiens
caggcctccactgcagctccagtcctacaactgccccagcccctacgcagatgggcggctgtaccagccctacggagactcggccggctctctgcacagc

SEQ ID NO: 102121 - DNA, 83 bp, Homo sapiens
gcgtgcgcggacatggcctcaaacggtgaccagcgccatgtccagccaggtggtgggcattgagcctctctacatcaaggcag

SEQ ID NO: 102122 - DNA, 101 bp, Homo sapiens
gatccgcaaagtgtctacctcggggcagatccggaccaagcatgtgatagtgatggaagatatgctgaaagactttctccttggagaacacttattattgg

SEQ ID NO: 102123 - DNA, 100 bp, Homo sapiens
cagcattctaagacgaagagggctccagctttcttatatacattcaggtctgtgtatgatgaccaaccaaatgcgcacaagaagtttatggaaaagttag

SEQ ID NO: 102124 - DNA, 96 bp, Homo sapiens
aactgaaagaagtggatgatgtgcttggtggagcagctgcctgggagaatgttgactctactgcagtttcaaaattctgtgatcctggagaaactc

SEQ ID NO: 102125 - DNA, 97 bp, Homo sapiens
gatataattctggatggaagacctcttatttgtattacattgaattagagggctgatagttcaggaccattcagaccccatgttcagttcatatgcc

SEQ ID NO: 102126 - DNA, 90 bp, Homo sapiens
ctcttgccggccggcttcgctgcgggtttgcactgcccgggttgcacgttttcaaaaaatacctaatggtgaaaatgagacaatgattcc

SEQ ID NO: 102127 - DNA, 101 bp, Homo sapiens
ggtgtacaaatacccctttgaattaattatggctggctaatgctaaaggaggtcatctggaaggactgcagatgactgatttggaaaataattctgaaact

SEQ ID NO: 102128 - DNA, 100 bp, Homo sapiens
gaaactcggctgccaggggagctggagccacctgcgaaggtgtcctcccatactggacccctacaggacttcagggccacaggtgctgccaagatgctcc

SEQ ID NO: 102129 - DNA, 82 bp, Homo sapiens
ctgtagtgtttgccaatgttggagccgtctgcaaagtgtccccggcaagaaggtgagaagccctaccactgcaactgggacg

SEQ ID NO: 102130 - DNA, 98 bp, Homo sapiens
gtagctctgctaattgggccaaatgctcctttaatttttgaacgagcatatcagtgctttcatgccttaaaaattaagaaaaattatctacctctatg

SEQ ID NO: 102131 - DNA, 88 bp, Homo sapiens
ttccaaacaaccgggcacattgtcaagcgggaacagcttccacgtgttcgaccagggccagtttgccaaggaggtgctgcccaagtac

SEQ ID NO: 102132 - DNA, 101 bp, Homo sapiens
tcaagagcttcaagaacaagggccgcgatgtggaaacagcagtgaagaccgtttgggtagaaggtttaagtgaagatggttttacctattactataataca

SEQ ID NO: 102133 - DNA, 115 bp, Homo sapiens
cggctcttcccggcgctctcctggctcccttctgccccagctccgtctcggcggcggcggattggggaccacaaattcagtgcccaccggattgtcttagcagcctcgatcccgt

SEQ ID NO: 102134 - DNA, 50 bp, Homo sapiens
gttatgccgctgcactctacaggcaagaataggtgacttcattgatgtga

SEQ ID NO: 102135 - DNA, 100 bp, Homo sapiens
cgcctggagcgttacaaggccttctacattaccggtgggagacctacctgatgcagatattaaacctccagaaaatgtactgtttgtgtgtaaattgaac

SEQ ID NO: 102136 - DNA, 100 bp, Homo sapiens
tcagcgtcgctggcagccgctgtacttgaaaggcctaaagaatgtatttgacgaagcaatattggctgccctggagcctccagaaccgaagaagagccgc

SEQ ID NO: 102137 - DNA, 50 bp, Homo sapiens
aggaggcagccccagccccacccaccgaactgcctctgtcaccgggtccc

SEQ ID NO: 102138 - DNA, 50 bp, Homo sapiens
cctcccgagtagctggggttacaggttgttcttcgtgggctcccgggagg

SEQ ID NO: 102139 - DNA, 88 bp, Homo sapiens
tccctggtgaacgtcgtgcccaaactcaatgccacagggagggatctgctgcagccaacacaagccatcagccccatgctcagctccc

SEQ ID NO: 102140 - DNA, 100 bp, Homo sapiens
ggacggctctgtaggaaggaacttggttccccctccctcagcttccgccccaaaagataaatttgcgcctcattttggtaagcggaaaaacaaaagagtt

SEQ ID NO: 102141 - DNA, 88 bp, Homo sapiens
ggtatagtgtggatcaggaaaacaacatgatggtgttggtgtcgcgccagacgaggacagccggctgctgcccctgctggtctgcctg

SEQ ID NO: 102142 - DNA, 90 bp, Homo sapiens
atgaatttagagccaaactgtccaaggctttggcagaaacccagcgtttgctggcagaaccagttcctggcatcaaagccgaaccagatg

SEQ ID NO: 102143 - DNA, 96 bp, Homo sapiens
gagaaacaattgtcattgaagaacttcttgacggagaagaggtgtcgaactacagttcctgaggaagaactaaatccaaagatactagctttgcag

SEQ ID NO: 102144 - DNA, 75 bp, Homo sapiens
agacagggacagcgacttccttgcagcctcttctccggagcactacaaacaccactggtttcccgaaaagccgtc

SEQ ID NO: 102145 - DNA, 83 bp, Homo sapiens
cgcgtgtctaggtgagtcgcggtgggtcctcgcttgcagttcagcgaccacgtgcagagcagagcgggcggaggaccccgggc

SEQ ID NO: 102146 - DNA, 75 bp, Homo sapiens
ataaaaataaactgcttgaacatcctttgactggttagccagagttgtctgatgtcctgtgggccatgctgatgc

SEQ ID NO: 102147 - DNA, 51 bp, Homo sapiens
tgtggtacgggaagaagaaatggggaagggagagaaggtacccaaagggaa

SEQ ID NO: 102148 - DNA, 100 bp, Homo sapiens
gccatctctttataattccctaagcatagctatgcagactctaaaataacaacgaacttgatgcaagtgataggtttgccaaggtcagacctctcatcat

SEQ ID NO: 102149 - DNA, 75 bp, Homo sapiens
cgtcagtcctgccaatttacagtgagcttaaagagtaccaggacattattcactctattcatctagcacggaagc

SEQ ID NO: 102150 - DNA, 82 bp, Homo sapiens
gggcgccaggaccggccgaacgcagagtttggtgccctggttgtcagatgttggaaagcagtaggacggaacatactcttcg

SEQ ID NO: 102151 - DNA, 51 bp, Homo sapiens
cggattggagcctgtgacctaccacagggctatcttagcggcacagagacg

SEQ ID NO: 102152 - DNA, 76 bp, Homo sapiens
aggaattggccttctctagaagactcttggctggtgaattaccatatctccgtcaagtgcagtaaccagttcaagt

SEQ ID NO: 102153 - DNA, 50 bp, Homo sapiens
aagacctctttggacccgaaattgtaagggaagaaacccttttttcttgg

SEQ ID NO: 102154 - DNA, 90 bp, Homo sapiens
gggtatctgaagtaaaaggggagtgaccgtctccttatcaagggaggcagaatcgtcaatgatgatcagtccttttatgctgatatttac

SEQ ID NO: 102155 - DNA, 100 bp, Homo sapiens
cgtgcgcgttgctgcggccgtggtccgcgcccttcctcggcgggccggactgtccaagtggtaagaagttcagaagcaagcctcagttggcaaggtacct

SEQ ID NO: 102156 - DNA, 98 bp, Homo sapiens
acacagctcatgtctcattaatcacaccaacaaaaagatcctgtggtacaggaagcggctcagccccagggcagcacatcagagacaccatggaacac

SEQ ID NO: 102157 - DNA, 75 bp, Homo sapiens
tcccacacacaggatgtcaagcatgtggtttggcacccaagtcaggaggtagttttgcagaagtgcaaagtcaag

SEQ ID NO: 102158 - DNA, 50 bp, Homo sapiens
tgtttcgtagccatattaattgtacagagcatgccagcgcctcagctaat

SEQ ID NO: 102159 - DNA, 83 bp, Homo sapiens
tggtgaagtggaaaggatggcccccaaacactctcgagtggaccctgaggagctcttcaccaagctcgaccgcattggcaagg

SEQ ID NO: 102160 - DNA, 100 bp, Homo sapiens
ggacgagctccgggatgctgtactccttgtctttgcaaacaaacagatgtatgtccctgggaagctgcatgatgtggaacacgtgctcatcgatgtggga

SEQ ID NO: 102161 - DNA, 100 bp, Homo sapiens
gtggatggtcaagagcgtgccctacttcaaggataagggtgacagcaacagctcggcgggctggaaggccaagaagcttgagagaagaaaaatttcagaa

SEQ ID NO: 102162 - DNA, 50 bp, Homo sapiens
attggaaaaacatttcttaccccccaaatacatcaagatgtttgtactgg

SEQ ID NO: 102163 - DNA, 75 bp, Homo sapiens
caggaattattggaggccaggtttactggagtaggtgttagtaagacctgatggccaaaagaaaggaagaaaatt

SEQ ID NO: 102164 - DNA, 100 bp, Homo sapiens
aagtcatcccaaatatggttccatccctaaacttatacggttatgagagaatttacaatgaaattccggacattaatctggatgtcccacattcatactc

SEQ ID NO: 102165 - DNA, 100 bp, Homo sapiens
actcagcttttccggttccgcctacaggccagcaagataagggagctgctggctgacaaggatattattgctggattcctatataccattttaatcttag

SEQ ID NO: 102166 - DNA, 100 bp, Homo sapiens
agtgaagataatgaatgtcgaatgtgactgactagcagcttcattttgaaagtctccacagcctattggctcacttggacatgatgctgacttgaggcgg

SEQ ID NO: 102167 - DNA, 82 bp, Homo sapiens
tgacgccatgtcgggttattcgagtgaccgagaccgcggccgggaccgagggtcgcctgcgaggccgctggccaggcctgag

SEQ ID NO: 102168 - DNA, 100 bp, Homo sapiens
gaggagcagttgtctgatgaagagaaggtcctctcagggtgcgccatcattgtccgaggtcagcctcgtggtgggcctcctcctgagcggcagatcaacc

SEQ ID NO: 102169 - DNA, 51 bp, Homo sapiens
catcaccatcacagagagcgatagatttaccgcattgtttctcagaagcaa

SEQ ID NO: 102170 - DNA, 98 bp, Homo sapiens
atggattggagtgaaccggagaccccgaaaacggaagcgcagggagaaggaagaggtgtttgaaaaggggaatcccggaggcaagacacttgaggaga

SEQ ID NO: 102171 - DNA, 100 bp, Homo sapiens
gctggattcaggcgtgcaatcagatggagttcttcaacacctacagcgacctgggcattgacagctggagtatcagccttggaagtatatacgccaaaag

SEQ ID NO: 102172 - DNA, 100 bp, Homo sapiens
aaattttccttgacctttaggtgcttttatattcatctcaaaaacaaaattctgaactcaggacttggcaagtgccagcgagatttcagattcctgtaaa

SEQ ID NO: 102173 - DNA, 73 bp, Homo sapiens
gcaatgccaacctcagcaccatcaagcaggccaccctggagaaatgtgccacgtgctcccagcccatcctgga

SEQ ID NO: 102174 - DNA, 74 bp, Homo sapiens
gggcatgttacctgtagacaaaccagtcgcttatcaaatatggagttattagcactaacgttctgattgaagat

SEQ ID NO: 102175 - DNA, 50 bp, Homo sapiens
cgagaaggagctgcagggccagactgattcttgctattccaaatcctctt

SEQ ID NO: 102176 - DNA, 143 bp, Homo sapiens
ggcggacgttcttgttctgtggagaataacggctgcacctggagattgacgcagagtgggcggcggtggtggtgctggagaatctggtaaaagcaccattgtgaagcagatgaggatcctgcatgttaatgggtttaatggag

SEQ ID NO: 102177 - DNA, 88 bp, Homo sapiens
ccacaatagggtatcatttttacgggccttctggagatgcttccgaactgtgggcaaaaatggcggtgactcctgcacctgcgccggc

SEQ ID NO: 102178 - DNA, 75 bp, Homo sapiens
cataattcatccattgctcttagcgactgttttggactcagctgcagaaccttggcctgaaaatgctacattata

SEQ ID NO: 102179 - DNA, 74 bp, Homo sapiens
accggctggagcggatcccacacctccggaccgagggacgcgggcatagaatgtcaagctaaccaggcgtccgc

SEQ ID NO: 102180 - DNA, 100 bp, Homo sapiens
ggtggaagaagagccagaggtgatccctgggcctccatcagagagccctggcatgctgactaagctccagtttgaagaaaacaggtctgaaacaaggtct

SEQ ID NO: 102181 - DNA, 100 bp, Homo sapiens
ttgaaagcgccccggaatgacctgtcgcctgccagctctggggcttcaagaagcgtgcacctcgggcactcaaagagattcggaaatttgccatgaagga

SEQ ID NO: 102182 - DNA, 100 bp, Homo sapiens
cttgggccgccgagctggacccggaccggttttgggctcccaccccgtggccaggtacctaggctccgtggactaccgctacaacaacttcttccaggac

SEQ ID NO: 102183 - DNA, 51 bp, Homo sapiens
gcccttctctgccgtccctgggaggctgaaggtgatgtggccgccctcaac

SEQ ID NO: 102184 - DNA, 75 bp, Homo sapiens
tctgggacacagcggggcaggagcgcttccgcaccatcacctccaccagcctcccgcgacgatgcccctcaacgt

SEQ ID NO: 102185 - DNA, 100 bp, Homo sapiens
acaagcagcctattatgcccagacaagtccccagggaatgccacagcatcctccagcacctcagaatgagtccctggaacgccagatgcgtgaaatggaa

SEQ ID NO: 102186 - DNA, 100 bp, Homo sapiens
aagtaagcctgctacacttacaacaactagtgcaaccagtaagttgatccatccagatgaggatatatccctgtagtcaatgaccatcaatcaaataaag

SEQ ID NO: 102187 - DNA, 75 bp, Homo sapiens
ggagctggacggcgagcgcgagcggcgcgagaaaagactggctccagctttccttgaaatcctgcagagccttca

SEQ ID NO: 102188 - DNA, 82 bp, Homo sapiens
ttgcaaggaacacccggcagagcccacatccacgggagctgggtggtgaaggaggagatctttgatgacaatgccaagcttc

SEQ ID NO: 102189 - DNA, 82 bp, Homo sapiens
atccggttccttggtgtcatccagccttagcaaaccagaggacaaattattggattccagcacagtgactcacttattcaag

SEQ ID NO: 102190 - DNA, 97 bp, Homo sapiens
gaaagcattggctcaggtcttctgtgaggaatctggattgtcacctttgctgcaaaaaattacgggccctcgggaccaaggatcacgtcatgactcc

SEQ ID NO: 102191 - DNA, 100 bp, Homo sapiens
agttgctacccagtgacagcagcgcgacactgaagatttcagagactcctccactctctgggaatgacacggactccctctcctgcgacagtggcagttc

SEQ ID NO: 102192 - DNA, 75 bp, Homo sapiens
cgaccaaagcgcctgaggaccggcaacatggtgcggtcggggaataagccgtactctgacagctgtgcacgatgc

SEQ ID NO: 102193 - DNA, 82 bp, Homo sapiens
cggacgggccatacccaataaccaggtgcttggcaaaatcgagcgggccattgaaatgctttgtggtctacagccacaccac

SEQ ID NO: 102194 - DNA, 102 bp, Homo sapiens
aagtgagcggcggcagctgcgaggctcggagaaacaggcgccgcgggctccgcgcccggccggacccgggcccgagaacccttaggagaaatcttgagagtg

SEQ ID NO: 102195 - DNA, 82 bp, Homo sapiens
ctctgccgcaaacatgctccgccagatcatcggtcaggccaagaagcatccgagcctctagaggacaaaatcccagtccttg

SEQ ID NO: 102196 - DNA, 83 bp, Homo sapiens
cgggtctcgggggccgctctgggatcccggccaccagcaattgtccggtcgggaaagaggttaaagaagacacgcaagtatga

SEQ ID NO: 102197 - DNA, 49 bp, Homo sapiens
tggtcctgctgcaggtggcaagctctggccagctgcgggccgtccagcg

SEQ ID NO: 102198 - DNA, 90 bp, Homo sapiens
tacctctggccccgagatcagaatgccgaatatgacagatacctagcatctagcaaaataatggcagctgcttaccttgaccccaacttg

SEQ ID NO: 102199 - DNA, 88 bp, Homo sapiens
tgaagattactggatgcacgtacagaatacattcagccgtcaggaaccaccaaactgttttccacagaggctgcatcaattgacattc

SEQ ID NO: 102200 - DNA, 75 bp, Homo sapiens
gctattggatcctttcctaatgttgtcatggatgcactggtagaagatgatatctgtattctgaatcatgaaaaa

SEQ ID NO: 102201 - DNA, 50 bp, Homo sapiens
gtcccgccgggtctgaagcctgaacagggtgtcgaagtgcagacagacta

SEQ ID NO: 102202 - DNA, 123 bp, Homo sapiens
gaggagccgccaccgcctcctcctgctgctgctgcgctacctggtggtcgccctgggctgtacccactgatggtaatgctggcctgctggctgaaccccagattgccatgttctgtggcagac

SEQ ID NO: 102203 - DNA, 82 bp, Homo sapiens
tgcctgtccccgggggcgccatggcgaccggagcgaacgccacgccgttgggccactcttcacctccaccatgagcctggac

SEQ ID NO: 102204 - DNA, 117 bp, Homo sapiens
agatggggctgctctcggccctgcctctggctgtggaaacaggcctccaagtacccaaggaatagcgggttttgcagcaattgttgcatatggattatataaactgaagagcagggg

SEQ ID NO: 102205 - DNA, 90 bp, Homo sapiens
gcggtacatcgcctcggtgcagggctccaccccgtcgcctcgacagctggtgccgacaagaaagccgaggctggggctgggtcagcaacc

SEQ ID NO: 102206 - DNA, 75 bp, Homo sapiens
agaaacagctgccactgagtagggattgacagccgctgtactgtgttaaggaaacaagatagtggtgaagcaccg

SEQ ID NO: 102207 - DNA, 82 bp, Homo sapiens
tgaaggctcatggtgtggacaaggtcgtggcctgcacctcgggtaatctcagccaggaaaggagagtttgaaactggatttg

SEQ ID NO: 102208 - DNA, 100 bp, Homo sapiens
ttcagcatcggggcagacaccgccctgaacactatcaccgacgagatgccccttgtccaggagttgccactgctgaagcttggggtgaattaccttccgt

SEQ ID NO: 102209 - DNA, 96 bp, Homo sapiens
tttctgtctctatgaatgtgactaccctggttacctcatatgatggagctatgacattgaagagaggaaggttccaaaacccaagtccaagtctta

SEQ ID NO: 102210 - DNA, 101 bp, Homo sapiens
ctgctcttcgtctgcttcttcctcttcagtcaagctgtcaataccagcaaatatgcagaaagctatcggatccaaacctatgctgaatatatggggagaaa

SEQ ID NO: 102211 - DNA, 75 bp, Homo sapiens
gtcgggttattcgagtgaccgagaccgcggccgggaccgaggcattgcagtgtcgagatggctatgaaccctgtg

SEQ ID NO: 102212 - DNA, 100 bp, Homo sapiens
ttttaaatcaagatttaacattccaacacataaaaattatttatccaacagctcctcccagatgttttcacctcctgtgagcagtgggaaaaatggacca

SEQ ID NO: 102213 - DNA, 128 bp, Homo sapiens
caaggtacccaatgcctgtttattcaccatcaacaaagaagaccacacactgggaaacatcattaaatcataaagagttctatctgtcttctacgcgggaaaatctatgatgctctagataaccgaac

SEQ ID NO: 102214 - DNA, 83 bp, Homo sapiens
tgcgggtgcctttgaaaatcaacgacaacttgagcacagggactttgaacatgtcggggatcgccctcagcagactcgcccag

SEQ ID NO: 102215 - DNA, 87 bp, Homo sapiens
cagcaccaaggaccagcaattcaacaaccttggccatggaccagccggctggcctgcaggtggactacgtcttccggggtgtggagc

SEQ ID NO: 102216 - DNA, 88 bp, Homo sapiens
ggttcctgtataaaggcgagggcctcaacaagacagccattggtacctacctgggggagagtgagaaagatcagtctaaagaaaagga

SEQ ID NO: 102217 - DNA, 100 bp, Homo sapiens
gtacttcccaggaactggggacctacggggtagctctccagctggaagccttgctgatgccatgtcccagaaacacctccagatcaaccagacgtttgag

SEQ ID NO: 102218 - DNA, 76 bp, Homo sapiens
gaatgaatccttctagagacgtccacgatacttttctgctgtgagaatgtaagatggatccagaagagcaggagct

SEQ ID NO: 102219 - DNA, 87 bp, Homo sapiens
agggagcttgccttgaaggacaagaacagcgccgtcaccagcagttcaaaaggtgatgacctatcaacagccattctcaaacagaag

SEQ ID NO: 102220 - DNA, 87 bp, Homo sapiens
agcctcggtgcggcggcgagcgcggtcgagatcgccatgcctacccgtttacccaaggtccagcctagcccctaggcaccatgtcgg

SEQ ID NO: 102221 - DNA, 75 bp, Homo sapiens
agactgaatccacatagagaaagtgatggggtgcgtataacccgtatatagagataattgaacaacccaggcaga

SEQ ID NO: 102222 - DNA, 100 bp, Homo sapiens
ctaaaggtccttctaggagagaggtgaaagtcatcgctgttctttaagtggagaggatttgaataggcagtggcaaagtccaagtccggatttacatcct

SEQ ID NO: 102223 - DNA, 96 bp, Homo sapiens
tttgggagagagagaaagtcagatgccccttttaaactccctcttcaaaactcatctcctgggtgactgagttctgccttctccgagggaagcaag

SEQ ID NO: 102224 - DNA, 95 bp, Homo sapiens
tgcagggcggtaaggatttcaacatgcctctgacaatctctagtttactccacaggatccgctgaacataggatgttgccacaaaatctacctcg

SEQ ID NO: 102225 - DNA, 140 bp, Homo sapiens
ggcctcatctcatgcagcagtcagttgaatacgaaaggaagaagtttcaagagattttggagaggcaaccaagcctgttacatgaacagaatatggcaaaaatgagactacttacttttatgggaatggcagtagaaaat

SEQ ID NO: 102226 - DNA, 97 bp, Homo sapiens
tgtgagacatgcacttgctacgaaacagaaatttcatgttgcaccctctcattgctatggacagtgctatcaccctgtggcagttccttcttcagct

SEQ ID NO: 102227 - DNA, 88 bp, Homo sapiens
tacgtggctattgtctttgaaagcaacagctcctaccttggacgggagagacacctatggctgccgatgaaggctcagcagagaaaca

SEQ ID NO: 102228 - DNA, 100 bp, Homo sapiens
tccctgcacttcttggtctcaaagggaacttggaaatgacattggcatccagattatccactgcaccaaggaagtatcgcctggggatgctggaggagag

SEQ ID NO: 102229 - DNA, 51 bp, Homo sapiens
ggagcgtcaacagcagcaccatggatgatgattattctccaccgtctaaga

SEQ ID NO: 102230 - DNA, 100 bp, Homo sapiens
atagagttcacgatcctgtaactgccaaacccaagttggttggagatgtggattttgaagaataatccagaatggctactctgatctatgttgataagga

SEQ ID NO: 102231 - DNA, 82 bp, Homo sapiens
cagctgcctgcccccggaggtgcccacgcagctgcctggacaaatctgactgcagccatgagcagcaatgagtgcttcaagt

SEQ ID NO: 102232 - DNA, 100 bp, Homo sapiens
cccagccgaccttgagctccaggagttcgtctcttacgtctgcggaagtgcagctgcctcagttcttagcgcagatgagagtccggagtgttgtcatgtg

SEQ ID NO: 102233 - DNA, 100 bp, Homo sapiens
agcacctttcggcttctgagacggcggcagcagcggcattcaggtcttgggcgtctttggtactggcttttttaggggtctgcctggggattacccttgc

SEQ ID NO: 102234 - DNA, 100 bp, Homo sapiens
cctccttgtggccctgggaggaagccatggactctaccaagtctgaacccctgaagggatcaccagagaccgaccaagaccatcactatgaccgatggag

SEQ ID NO: 102235 - DNA, 80 bp, Homo sapiens
acacactgggaaacatcattaaatcgtgcagcccaaattccgttaccccttctactatgagatgtgctggtatgtcctgg

SEQ ID NO: 102236 - DNA, 90 bp, Homo sapiens
gccgcgtagcttccatccgccagctgccatgagcgagcgcctccgtcccagataactggagtgccaaggctaaaagacgaaataccaccg

SEQ ID NO: 102237 - DNA, 100 bp, Homo sapiens
ttcgcaacatcaagggagttttccggggccctctcagcaagaacgggaacaaaactctggttcgatacaagaggctgttttcctagcgtggcttgctgcc

SEQ ID NO: 102238 - DNA, 82 bp, Homo sapiens
acgcacaggccgtcgctatgagcgggaccaccctgggcacagcaggcatcggaggcagcagcccagacgcggcacagagagg

SEQ ID NO: 102239 - DNA, 100 bp, Homo sapiens
ccaacatccctctcctcctctaccctcaggacggcccccgcagcaagccccagccaaaggagatctataaggacaggcagaaattctcagaacaggtttt

SEQ ID NO: 102240 - DNA, 82 bp, Homo sapiens
cactttgtggagaaagtcgtcttccacttgcacgaaagctttcctaggccaaaaagagatatcatggaaatcaggacagtgg

SEQ ID NO: 102241 - DNA, 83 bp, Homo sapiens
tttactgtcaagacatttcttcggcattctgcaacaggtgaaaggtgtagcagtcactcggcctacacccacagcatcgacct

SEQ ID NO: 102242 - DNA, 75 bp, Homo sapiens
atatcgtgtctggagcagtggagcccaaagacccctggagacatgccaaactggcaagacgcagtcaagaacggg

SEQ ID NO: 102243 - DNA, 98 bp, Homo sapiens
ggaggagattccagtcgctgctcctgcttctcgggctgctggtgctgtgcgcgaggctcctcactgcagcgaaggttgtcccttctgctccgggtcgg

SEQ ID NO: 102244 - DNA, 75 bp, Homo sapiens
ttctttgttaaaaggagacctaaagggagtcaaaggagagtcaaattgactttatcagctttaatcgatgggaag

SEQ ID NO: 102245 - DNA, 101 bp, Homo sapiens
caaatctgtctgcactccaattctaccaggatggctctcttcgctggtggcaaactgacccggatgcagagtctacagcctgacccagctgcccgctatcg

SEQ ID NO: 102246 - DNA, 98 bp, Homo sapiens
ttcatgaggcgcattgagtgctatgagaactcctacgagtcgctagatgaggacctggataggtgggaatgactgttcactgccgcatcatgaagatt

SEQ ID NO: 102247 - DNA, 51 bp, Homo sapiens
tcaagatcaagaccggcgtggtgaagcgtgtcgtgtgggagccaatgggag

SEQ ID NO: 102248 - DNA, 83 bp, Homo sapiens
cgcgcccggccggacccgggcccgagcaaacggggattcagcgtccgatcctttggaacagggactcacgtgaagcttccagg

SEQ ID NO: 102249 - DNA, 100 bp, Homo sapiens
ggggacgggcagtacaagcgctgcggtgtcacctctgtgcccgacatcagacgctgccagctgacccccaatgacaggatatcccagaagctcctgagag

SEQ ID NO: 102250 - DNA, 82 bp, Homo sapiens
tccactgcatgccatcctcatctgaccacactgccatggaaagccattcactcctcaatcccaacctgcagcaaggtgaagg

SEQ ID NO: 102251 - DNA, 100 bp, Homo sapiens
cctctttgaaaatgaccgtcatttttctcacctctcaacattggaaagggagatggcttttcgcactgaaatgcaacagaagaaccttgaaggctatgtg

SEQ ID NO: 102252 - DNA, 100 bp, Homo sapiens
tgtttgaagtgtcagacactatgagtgccgtgctccaggtggccactggcgtcatctctacgctgcaggttacctccagccgctgccatgcccaactcag

SEQ ID NO: 102253 - DNA, 100 bp, Homo sapiens
cgcctccaccacgagggcaggttcagagaaatttggtgttgtactgcgaggcattcctgaccacctacaggaccttcatctccccagaggagctcatcaa

SEQ ID NO: 102254 - DNA, 74 bp, Homo sapiens
ttgaagacattttcaagcagtgtctacgaacaattattgaaggcacaagaagtgagaaagatcagtctaaagaa

SEQ ID NO: 102255 - DNA, 50 bp, Homo sapiens
ggcggcggcggctgcggcccaatatagagccccacagtcttcgttataac

SEQ ID NO: 102256 - DNA, 113 bp, Homo sapiens
taatggaaaatcgcttggttaaaacctgacacttttaacagacgaagttatacggaagcgtctcctcattgatggagatggtgctggagatgatcggagaattaatctgctag

SEQ ID NO: 102257 - DNA, 100 bp, Homo sapiens
tgatgcccgtggataaaaagaagacctacgtgggctcgctcaggaatggagttcagtctgaaagaatttcgctaaggagtttgtgatcagtgatcggaag

SEQ ID NO: 102258 - DNA, 95 bp, Homo sapiens
tttgcaacaaattcgagctgtccgactctgagaatggaggccagagcaagctcattttcaaaccagatctcactttggaagaggtacaggcagaa

SEQ ID NO: 102259 - DNA, 122 bp, Homo sapiens
tcccccacccccgactcgggcttggcgcggcggccagaggaaccccgaggtgctggagaatctggtaaaagcaccattgtgaagcagatgaggatcctgcatgttaatgggtttaatggaga

SEQ ID NO: 102260 - DNA, 100 bp, Homo sapiens
caaggacatgagcagtttacacatctcacccaattcagagaaatacagcctgagatggacagcagtaattgcaaagttattgctcctctcctaagtcaaa

SEQ ID NO: 102261 - DNA, 75 bp, Homo sapiens
ctaccctaaagtcaccacctgctgcttttctggagcgcttaccaggatgaggagaagcagcagcaggcccatgac

SEQ ID NO: 102262 - DNA, 74 bp, Homo sapiens
tgtggctacggatcccaggaccctcttcgcgggcgattcgcgtagcctcagatgatgtgctgactaaagacgcg

SEQ ID NO: 102263 - DNA, 100 bp, Homo sapiens
tgagccatgaggtcgggccacaggctctgaagtcgtgaagccttgggacggagcgggtggtgcttcgaggtgctggagaatctggtaaaagcaccattgt

SEQ ID NO: 102264 - DNA, 98 bp, Homo sapiens
gaggccgagaccagacgcggagccatggccgaggtgttgcggacgctggccgggggcttgtacatgacagctggaatagcctccagttgaggggcttg

SEQ ID NO: 102265 - DNA, 96 bp, Homo sapiens
cggcgagacaaccccagattcaacctgatgctgggagagaggaatcggctgcccttcgggagactggatatcaatgatgtcaaacggctgaaacct

SEQ ID NO: 102266 - DNA, 98 bp, Homo sapiens
cccagagaaagtcctcgctcgtcaccagcaagcttgcggggatttccctggggaaagtcttcactcagagcttcgctgacagccaaggatggcaagca

SEQ ID NO: 102267 - DNA, 75 bp, Homo sapiens
ccagcctgacaaccttggaacagaacaagaggacaggaggtgtcgttccaggaaaaatgccagctgtgggacaag

SEQ ID NO: 102268 - DNA, 100 bp, Homo sapiens
actagtagggtaggagtttttgttcagggaccagcggaacgaggctttctgtcgttaatagggtgtggacactgccagcggctgcagccgacttggaatg

SEQ ID NO: 102269 - DNA, 83 bp, Homo sapiens
gtcctgcactgaaaggaaatgacggattttctcagagtcaagatctccactgaagttggcatcacaaatgttgatctttccac

SEQ ID NO: 102270 - DNA, 117 bp, Homo sapiens
cgagtgccggcttctcccctacgcgctacacaagtggagctccttttcctccacctaccttcccgagctctgacgcccgctctgcggcttcggtgtttgaacaggccacagtccagg

SEQ ID NO: 102271 - DNA, 93 bp, Homo sapiens
ggccgagaagctgtgcatctacaccgacaactccatccggcccgaggagctgctggtgagaagccctaccactgcaactgggacggctgcggc

SEQ ID NO: 102272 - DNA, 100 bp, Homo sapiens
gggaaactgagtcatatcaaggtggaaggcagctgaagggtgagttctgcatcctggtacttcctcaatgtatttgggcttcggagcatttactctctga

SEQ ID NO: 102273 - DNA, 100 bp, Homo sapiens
gagcaacagatctaaagccctggtggattcaggagcagttccagaaaaatcccgacagttacaatggtgctgtccgagagaactacacctggtcacagga

SEQ ID NO: 102274 - DNA, 127 bp, Homo sapiens
ctcatcctggacaattcacctgcctcctatgtcttccatccagacaatgctgctcactcaccatgaccaagctgagcgcccaagtcaaaggctctctcaacatcaccaccccggggctgcagatatg

SEQ ID NO: 102275 - DNA, 99 bp, Homo sapiens
ctgctcctggctctgcgcaccgttgagccccatatgggggttggcaggcagcagagaggcccctttcaaggtgttcgggtaaagaactcagtgaaggaa

SEQ ID NO: 102276 - DNA, 106 bp, Homo sapiens
gcgacgcagaagacgggtgatttctgcatttccatctgaggttaaaaagatcaagtggcatgagcagccttttggggaaaattggtgccaagaagcagaaaatgag

SEQ ID NO: 102277 - DNA, 76 bp, Homo sapiens
tgcaggaggagaaccgcgacctgcgcaaagccagcgtgaccatcgacagtcggcccaatatgtcaagacctctgat

SEQ ID NO: 102278 - DNA, 100 bp, Homo sapiens
tttcgcaacatcaagggagttttccggggccctctcagcaagaacgggaacaaaactctggaaatagctcgtctgctggccctggaggaggctaccctga

SEQ ID NO: 102279 - DNA, 100 bp, Homo sapiens
gaacagggggaagagagagattcaagtcttcctaatgtctaccttatatgcagatgactccaaactgcctcctccgccaaccctggagcccactgggcct

SEQ ID NO: 102280 - DNA, 96 bp, Homo sapiens
atagggacagccgcccctggtgcacacaccctcgtattctcctgcccttccccagttgatattcactgatggactccaaagaatcattaactcctg

SEQ ID NO: 102281 - DNA, 75 bp, Homo sapiens
gctgaaagctgagctaggaattcccttggaagagatttccacaagacggcaccctatgtcgtcactggcagcgta

SEQ ID NO: 102282 - DNA, 105 bp, Homo sapiens
ggtcagctacgtccgctgggagggcgtcttccgctgcatccccatcttcggcatgtccttcgcctgccagtcgtttggtgcacctcgatttggaggaagtagggc

SEQ ID NO: 102283 - DNA, 75 bp, Homo sapiens
aacggctcacagatctgggacaccgcattcgccatccaggctctgcttgagttccagatttcggaaggttcacga

SEQ ID NO: 102284 - DNA, 97 bp, Homo sapiens
cccagccccgccgtcgccccgccgcgccgcgctccaaccgcctcctcctcctcagtaacgcgggtgcttttgaagatgatgatatcacgcacgttga

SEQ ID NO: 102285 - DNA, 75 bp, Homo sapiens
cacaaccgtctccagccttggtctgagtggactgtcctgcaggtatggcatttcaaatatagatacaaccattga

SEQ ID NO: 102286 - DNA, 101 bp, Homo sapiens
agcaggcactggaagaccacttcagcagtttcggacctatctctgaggactgtcctgcctggctgtgggcctggccctgctgaagcgctgcgtgctcatgt

SEQ ID NO: 102287 - DNA, 90 bp, Homo sapiens
gtctagatgtaaatgtcagtggaaaggagagctaccatcactaaggtgacctcaaagcagaagctctgaattcacctctcatctgacgac

SEQ ID NO: 102288 - DNA, 75 bp, Homo sapiens
cccatcgcaccaacgaagcaactgctgagcagttgttgacctcctgtactggagagacattaagaagactggagt

SEQ ID NO: 102289 - DNA, 75 bp, Homo sapiens
ccatgtggtttggggagtctgaggccaatgtcagagaaatctttgacaaggagctcgaggccatgagcagatata

SEQ ID NO: 102290 - DNA, 75 bp, Homo sapiens
ccaaggccaagaacgggcacctggctgtgacctacattgccccaccagctgccattttttacccatcgggtgctc

SEQ ID NO: 102291 - DNA, 101 bp, Homo sapiens
cccggccccgcccgcgccggaagagccacgccggtcgcaatggaagaagagatcgccgcgctggtcattgacaatggctccggcatgtgcaaagctggttt

SEQ ID NO: 102292 - DNA, 100 bp, Homo sapiens
agcctccggagaagacaagggcatcgccgcctcagccgccgccgccgccgttttcgcctgcagctgctcaccgccctggcaggtgcccggcccgcccccc

SEQ ID NO: 102293 - DNA, 50 bp, Homo sapiens
ttggagagcaactttactttagtgggggaggaagttgccttgtactgtgc

SEQ ID NO: 102294 - DNA, 100 bp, Homo sapiens
ttcccttatatactgcttacaagcataatactcaccctactattgagagctacgaagtgaagagtgtcctcggaaaggaagtggggttgttaaattgttt

SEQ ID NO: 102295 - DNA, 100 bp, Homo sapiens
cacatccgctcgctgatggaggagcgcttcggcacctcggacgagatggtgcagcgggcacagatgtcacacaccaagccctacatcaggaagaaggctg

SEQ ID NO: 102296 - DNA, 100 bp, Homo sapiens
tcttgggacatcagagggtcgcttcatgcagggtttggattcaggatttgttcctagtgtccaagattttgataagaaacttacagaagctgatgcttac

SEQ ID NO: 102297 - DNA, 100 bp, Homo sapiens
ggaggatgtcgggacaccccggaagctgggaaatgatgtgtcttgctgaatcagggctctcttatccctgccatcgacttacagtgggaagaagatcttc

SEQ ID NO: 102298 - DNA, 51 bp, Homo sapiens
ctgagacggcggcagcagcggcattcagccctgcctctttcttgtcgcagt

SEQ ID NO: 102299 - DNA, 82 bp, Homo sapiens
ggagatctacctggaacccttgaaggatgcaggtgatggtgttcgatacttgctcaggaccaacttggaggccttgcagaag

SEQ ID NO: 102300 - DNA, 74 bp, Homo sapiens
tcggaaatcagctctacagttcagatacttctcaccactgcatgaatggacatttgaaagtgccatagccaaac

SEQ ID NO: 102301 - DNA, 50 bp, Homo sapiens
gttacgcagcaaaccatccagaaggatgctccagaccttgtatgattact

SEQ ID NO: 102302 - DNA, 100 bp, Homo sapiens
gtcctgggacctacaagtacctggaggtgcagtacgactgtgtcccctacagagtcaaattgactttatcagctttaatcgatgggaagaacttcagtgc

SEQ ID NO: 102303 - DNA, 87 bp, Homo sapiens
atcttcgttctgacttctccaagtttcaggaaatgatagaaacaactttagatatggatcaggctgatcccaaagaactaatcaaga

SEQ ID NO: 102304 - DNA, 80 bp, Homo sapiens
ccctggccgcggcgaccggtggtcccacgtccagccgggctcagtgagacaatgcagatcttcgtgaagactctgactgg

SEQ ID NO: 102305 - DNA, 50 bp, Homo sapiens
gcgactggctgctgcggcgcgaggatggcctggtgggaatccaacaatta

SEQ ID NO: 102306 - DNA, 83 bp, Homo sapiens
ctcatcctggttctggaatcctcagttcaaggattttttatcaagcagaaatgcatcgaacaacgagaatcaagatcactgag

SEQ ID NO: 102307 - DNA, 116 bp, Homo sapiens
ccctccgtgccgccggcgccatgggcaattgccacacggtggggcccaacgaggcgctggtggtttcagtagtttatgccaacgtgacttcattcatacagatgaaccaaggatcg

SEQ ID NO: 102308 - DNA, 102 bp, Homo sapiens
aaacaatagctcaaggaaacctttccaacacagatgtccaagctgccaaggacattgctgctcggaatgttctggtgtcctcaaatgattgtgtaaaattag

SEQ ID NO: 102309 - DNA, 82 bp, Homo sapiens
actgcagaactgggttctggactttgggcgtcccattgccatggaagactatgaccgtctgaggcctttatcttacccaatg

SEQ ID NO: 102310 - DNA, 74 bp, Homo sapiens
tggcactgtggttcctgcatgaagacagtggctggcggtgcctggacgtacaacacgctggcagcgaaggggaa

SEQ ID NO: 102311 - DNA, 100 bp, Homo sapiens
gacctttccgagttggctgcagatttgtggtgcgttctgagccgtctgtcctgcgccaaggctttacaggaagtatggtgctggcatctgcttggcttct

SEQ ID NO: 102312 - DNA, 100 bp, Homo sapiens
ctgttgctgccgccatacgcgctctccctgtttagagtgttgttcgctgcctgtggcatccaaagctgaaccagatcatggttggaactggaaatggatt

SEQ ID NO: 102313 - DNA, 74 bp, Homo sapiens
cgaggacagagaagccaagaggaagaaggaggaggaagagctagagccggtgcaggccacgcagaacaagacag

SEQ ID NO: 102314 - DNA, 89 bp, Homo sapiens
gtgaaactattcgaccagaagagacagcctggaacacaggaacactgaggaatggtcctagcaaaatggtccccatcatttcccaatgt

SEQ ID NO: 102315 - DNA, 50 bp, Homo sapiens
cagatggccagtcacgagaacccagaccaagatcactccatggatgaaat

SEQ ID NO: 102316 - DNA, 100 bp, Homo sapiens
cccggctgccgggagccgacagcttcgcgccgggctagtgcaaatcttcaggggccgtccaggactacagagctgtttcaccctaccttggcttcaatct

SEQ ID NO: 102317 - DNA, 105 bp, Homo sapiens
cctacatagagtcgcagggagcccaccgggcgggcctggccaagggcgtgatggtgggcatgggtcagaaggattcctatgtgggcgacgaggcccagagcaaga

SEQ ID NO: 102318 - DNA, 98 bp, Homo sapiens
gaacttggagattttccctgtggatctgcagaagaaagctggccggggcctgggcctgagcatcgttgggaaacggtgccgcaagatgactggggggg

SEQ ID NO: 102319 - DNA, 98 bp, Homo sapiens
acctgtggaaaacatccttggagaggtcggagatgggtttaaggaacttctgggtcaaccagttcagagacctgcttcttccaatcttctgagtggcc

SEQ ID NO: 102320 - DNA, 100 bp, Homo sapiens
tcaaaggtgcagaatctgggacaagttgcatgaagagcatatcaatgcaggacgtacagttcaggacctgacttctgctctgaccaagaaaatcactctt

SEQ ID NO: 102321 - DNA, 99 bp, Homo sapiens
ggtacctggccccaaaaggaatcctggagaggaggacagtgacaacagggataaacacacttgttacctatgatatggttccagagcccaaaatcattg

SEQ ID NO: 102322 - DNA, 90 bp, Homo sapiens
tggagacatgagcaagaaaagcctctgggagcagaagggaggctccaagacctcatcaacaattaagtctccagcttgtacctcatatca

SEQ ID NO: 102323 - DNA, 95 bp, Homo sapiens
cgagtgcctgcaggatgtgagggaggtgatcctgaaggacctggaggtgctggcagaaatcgcttcctcccccgcaggccagacggatgacccag

SEQ ID NO: 102324 - DNA, 100 bp, Homo sapiens
tccatcaacctgaaggagatcaacctgaggccgcagatgtcccagcgtttagtcacatcaagaaatagaacagaattcagccatggccccaagaaagaga

SEQ ID NO: 102325 - DNA, 100 bp, Homo sapiens
atgctgcctggtggggatcagacagagattggagagaagtatcaggtacaaactgagagacaaaggatacaaacagaatttgatcagcttagaagcatcc

SEQ ID NO: 102326 - DNA, 82 bp, Homo sapiens
caaaatattctagaaggggaaaagctacttcaaggccctcgggaccaaggatcacgtcatgactccggtgagttcacacgtg

SEQ ID NO: 102327 - DNA, 75 bp, Homo sapiens
gcaaactgtcagaaaagagtagcctgggctgtctggaaatctgaggctttcatgagaaggacaagaagccatatt

SEQ ID NO: 102328 - DNA, 75 bp, Homo sapiens
ggagggtccgagccagccgctgttttgccggaggagcccctcaggccactgtgccctgtccacggtgcctcctgc

SEQ ID NO: 102329 - DNA, 89 bp, Homo sapiens
agagcgcgtatggagtggaaacgcttgtagggcttcaccagatgtttgagacggaggcagatgagaagagggagatggccttggaggaa

SEQ ID NO: 102330 - DNA, 75 bp, Homo sapiens
gcggtccgacagagtcctccgtgtcctcccccgcatgacccccttggctggagcattggatttgctaaaggagct

SEQ ID NO: 102331 - DNA, 50 bp, Homo sapiens
ctgccctgagacggtgtcccgccgaaagaagctgcacacatacatgtaag

SEQ ID NO: 102332 - DNA, 74 bp, Homo sapiens
ctagatcctgtgctttactctgaagactcgatttaatcaaagatctcaaatcagagttaagtggaaatatggaa

SEQ ID NO: 102333 - DNA, 75 bp, Homo sapiens
gcaaactaagccgattttccggaaaaagaactggaagaagttcgggaactcagagtttgacccccccggacccaa

SEQ ID NO: 102334 - DNA, 100 bp, Homo sapiens
ctgagctgttcctcccagctacgagctgccccaggtgtcatggagaaactccagctgggcccagagattctgcagcgggaaaatccaaggcttatttatg

SEQ ID NO: 102335 - DNA, 100 bp, Homo sapiens
attcaattcatggtttcttataaccctactccacgtctggatcaagcgtgctttccttatcgaggagcagaaaatcgttgtgaaagtgttgaaggcacaa

SEQ ID NO: 102336 - DNA, 82 bp, Homo sapiens
tcaggccaagaagcatccgagcgttatcaatactctggctgaccatcatcatcgtgggactgactttggtggaagtccttgg

SEQ ID NO: 102337 - DNA, 49 bp, Homo sapiens
gagcgctggacggagaggaaagcggtggggtggaagacaacccgtgagt

SEQ ID NO: 102338 - DNA, 98 bp, Homo sapiens
agacattgtctcccaagacaacttcctcaccagcaccttacagaaatgagccgtcagactgctacagcattacctaccggtacctcgaagtgtccacc

SEQ ID NO: 102339 - DNA, 98 bp, Homo sapiens
cgaccttggacttctcagcctccagaatggctatgaccagggccagagcactcagatctcagtcagaggagtctgcttctgcctttagtgctgatgac

SEQ ID NO: 102340 - DNA, 89 bp, Homo sapiens
cacaggtcacagtaaggccaaaaatgtgcatactcacagagttagagagagggatggtggtgaaatgacaatggatgctctgttggctc

SEQ ID NO: 102341 - DNA, 87 bp, Homo sapiens
cccaggagtcatcggacgccagaatctgggcgtgatggtgggcatgggtcagaaggattcctatgtgggcgacgaggcccagagcaa

SEQ ID NO: 102342 - DNA, 121 bp, Homo sapiens
tcgccctgtggatgactgagtacctgaaccggcacctgcacacctggatccaggataacggaggctggtgtaaacaggaacatcgataagtagtgtaaaaacttgcacaatgaaatccgaa

SEQ ID NO: 102343 - DNA, 74 bp, Homo sapiens
atttcagccagattgagacgctgacctccgtgttccagaagaagttgtgcaatggtctgtcttctgctgatccc

SEQ ID NO: 102344 - DNA, 75 bp, Homo sapiens
aggacagcacttccggtcacgccatcgttgctgccttcttcgtcaaggtgataattcaggatgatggccctgaaa

SEQ ID NO: 102345 - DNA, 101 bp, Homo sapiens
ggaaaactaggaatctatgatgctgatggtgatggagattttgatgtggatgatgccaaagttttattaggtattgggagagttgctgctacatctttagg

SEQ ID NO: 102346 - DNA, 100 bp, Homo sapiens
tcgagaggaccatcctgggtgctggccctgtgctggaggaaaatcctgccttgcttcgttgggcctatgcaagaacaataaatgtctatcctaatttcag

SEQ ID NO: 102347 - DNA, 75 bp, Homo sapiens
gtggagtccaacttgcctggaccagcttaatggttctgatccagtttgctgaccagaagcaagaattcaacaaac

SEQ ID NO: 102348 - DNA, 105 bp, Homo sapiens
gggactgaggccgccctgcaccttcagcggatttggggattaggctcttttagattctacttcaaagaaatcctgccacccgatgattaaacagtgaataaaatg

SEQ ID NO: 102349 - DNA, 85 bp, Homo sapiens
tagtttgcatatgagtgctgctgcagcttcccgagacatcaccttggtgaccaagaatatggcccaggtgaccaaagccctggac

SEQ ID NO: 102350 - DNA, 87 bp, Homo sapiens
ttgttgttttacagaccttaaggtgtttgttgacctcttacctgctacacagtgtacaaaacaaaagatacagatattgtggatgaa

SEQ ID NO: 102351 - DNA, 100 bp, Homo sapiens
gattcacttcaacctctgctctccgggctcaagcaattctcccacctcagcctgagactttagaagacagctttccatcgacactaggccctttagacca

SEQ ID NO: 102352 - DNA, 73 bp, Homo sapiens
tgtgccccaactctacttccctctgctccttcccagctgctggccaacgcagtcatcttcctgtgtgggaacc

SEQ ID NO: 102353 - DNA, 100 bp, Homo sapiens
cttggaaacacctactttatagtcctgattcaagtgttggcggatggaagggaggagactcctgaccctcagaatgtctgaacaacccagtcctgccagc

SEQ ID NO: 102354 - DNA, 74 bp, Homo sapiens
ggcttaaggtcttcagcggggcgctccaggaggcactcacaggtggagctggccctgctacagcgctcctacca

SEQ ID NO: 102355 - DNA, 100 bp, Homo sapiens
tctacctcctgcagaaaatcaccaaggataacaatgcccacacagtgaagagcaggctagaagagctcgatgagagattaaaaggggacttggcatataa

SEQ ID NO: 102356 - DNA, 100 bp, Homo sapiens
gatttctgctcacctggagaagggatggaaatacttcaacaaggtatcttggagatggccgcttccatctggagtctgtcatgattgccaaccccaatgt

SEQ ID NO: 102357 - DNA, 100 bp, Homo sapiens
caaatggaacagactccacccaaacatctggttggcaatatgatactcagtgttcactggcaggagatgcatcaaattgcaatttggaggagaggcagca

SEQ ID NO: 102358 - DNA, 88 bp, Homo sapiens
tgtggagggacttgatctgcttttcatgagccacaaacggacgtcattgagtgcaatgtgtagttggtgactgcctctccagatgctg

SEQ ID NO: 102359 - DNA, 75 bp, Homo sapiens
ctgactcatgggccctggcggtggacgagcaggaagctgcggctgagtcgaaccaaaaacttttgctagaaaatc

SEQ ID NO: 102360 - DNA, 119 bp, Homo sapiens
cgcaaccattgacgccatgtcgggttattcgagtgaccgagaccgcggccgggaccgagggtttacccaaggtccagcctagcccctaggcaccatgtcggacagtgatctaggtgagg

SEQ ID NO: 102361 - DNA, 50 bp, Homo sapiens
cgacttgagcgaagttttatgcaaggaactataattgatgctaagaccac

SEQ ID NO: 102362 - DNA, 49 bp, Homo sapiens
ttcctggtctcccgggtcaccaggacagcacgcgctaacaacccaggca

SEQ ID NO: 102363 - DNA, 82 bp, Homo sapiens
ttcagatgggatctttccggatcaatccagatggcagccagtcagtggtggagaaatcatgagtggaggatctcaagtccac

SEQ ID NO: 102364 - DNA, 99 bp, Homo sapiens
gacagagaggcaggcagacttcacagctgagaagtttccagatgaaaaggagccaagagaaaggctgtatcaggataccagtctcatgatgatagttct

SEQ ID NO: 102365 - DNA, 98 bp, Homo sapiens
gataaccagaaaacatcggatttacattttaagaaagcagatctggctgtggcaggcctcaccattacagctgaacgggagaaggtgattgatttctc

SEQ ID NO: 102366 - DNA, 75 bp, Homo sapiens
catgggccttgttaaactgtgccagggagaatacttatctctggcgcacatcactatatttggctgcctctgcca

SEQ ID NO: 102367 - DNA, 100 bp, Homo sapiens
cggtgtggtggcggcggcggagactgcgggcccgtagctgggctctgcgaggtgtgctgggcatcaaggtgaagatcatgctgccctgggacccaactgg

SEQ ID NO: 102368 - DNA, 50 bp, Homo sapiens
tacatagacgacaccctgacgctttctgaaaaggatatgagcatgctcga

SEQ ID NO: 102369 - DNA, 75 bp, Homo sapiens
gctctcaccctgccgaggagctcagtctggtgtctgtgacctttgaggatgtggctgtgacattcacccaggagg

SEQ ID NO: 102370 - DNA, 82 bp, Homo sapiens
gcgggaggtgttcgagaacgaccccgagacgcagttggaattgatcacaccttttcagttgtacttcaatcctgaattaatc

SEQ ID NO: 102371 - DNA, 111 bp, Homo sapiens
ggagcggcgcgtcatgtacaccatcaccaaggggcccagcaagctggtcgcgcagcgccgcacaggtctctaattaacagaagatggcaaagcccagccacagcagctatg

SEQ ID NO: 102372 - DNA, 98 bp, Homo sapiens
cattgcttccttcttcaccttgcagccaggggctggcaaggtttaattgcttatggatgtcattcacttgtggtagtgattgattccattactgccca

SEQ ID NO: 102373 - DNA, 76 bp, Homo sapiens
tgaaatcactgcaccttaaaaacaaaagattgagctgcactgtattcctgttcaacttcttggggccgatggccta

SEQ ID NO: 102374 - DNA, 111 bp, Homo sapiens
tctgcgtcaacgccatcgcagtgctgcacgaggagcgattcctcaagaacagttcgatacaagaggctgttttcctagcgtggcttgctgcctttggtaagaacatgtcgt

SEQ ID NO: 102375 - DNA, 83 bp, Homo sapiens
ccgctcccgggcggccgcgggcgggtatcagaagcatgtgcacacgtatcgcattctgcctgatggagaagatttcttggctg

SEQ ID NO: 102376 - DNA, 50 bp, Homo sapiens
caaccttcgatctcctgacgatcacccacaaaagctgtatataatgccag

SEQ ID NO: 102377 - DNA, 83 bp, Homo sapiens
gccctgggctggaacgaccctgccagaagatacctgaaattcctgcagatgttgtgggtgcccttctgttcctggaggattat

SEQ ID NO: 102378 - DNA, 76 bp, Homo sapiens
aatgaacgggcaggcaagcagtgtcaatattgcagctactgcttctgagtcacagtcctagtgagtgtcaggagcc

SEQ ID NO: 102379 - DNA, 100 bp, Homo sapiens
gcgacctggccagctgccgcgactgggaggagcgccggaacgccgaggcccaggtctcctctgagcctccggcctccataagacccaaaacagatgacac

SEQ ID NO: 102380 - DNA, 88 bp, Homo sapiens
gttccagggaggtgggattgaaaagcagatgagcgtcccactttcaaaattcttctgagcaatattctagatgtcatggatgaagaat

SEQ ID NO: 102381 - DNA, 100 bp, Homo sapiens
cgcgaggccgacaagagccacccggagcagcccgagggcaacatccttcgagaccggttcaagagcttccagaggaggaatatgatcgagcctcgagaga

SEQ ID NO: 102382 - DNA, 50 bp, Homo sapiens
gacaccgcctgtgtggggcccaccctccgagcagttcagagccccagttg

SEQ ID NO: 102383 - DNA, 100 bp, Homo sapiens
cactatgcttaccgagatgcggttttcctcgcagaacgcctttatgcagaagtgggctcgggatgagtttgaaggcctcttcaagcagccagcagaaaat

SEQ ID NO: 102384 - DNA, 100 bp, Homo sapiens
agtccttcctttccgacttagtcctcgggaagaagtttcagactacaaggtatgggttcatagaagggcacgtggtgattccccggatccaccccaactc

SEQ ID NO: 102385 - DNA, 83 bp, Homo sapiens
cttggagtgagtggacgcactcgggaattgtaggaggacgagtgtactaatggtcacttgatgtgcgctggctgttttatcca

SEQ ID NO: 102386 - DNA, 100 bp, Homo sapiens
cgcagcatgactttgctccagcctggcttaatttccctactccaccatcatcaacaaagctctctccccagccttcatgtgttaacctggggatgatgtg

SEQ ID NO: 102387 - DNA, 83 bp, Homo sapiens
cacagctacagcgagggcctcggccatccaagggtctcccagcaaccatgtccaagggacctgcagttggtattgatcttggc

SEQ ID NO: 102388 - DNA, 82 bp, Homo sapiens
ttggactgagtcctgcaggacacagtatcctgtggagcacccagacaaattcctgaagtttggcatgacaccttccaaggga

SEQ ID NO: 102389 - DNA, 100 bp, Homo sapiens
ctggatgcaacttgtgattttgatttatcacatttctggagcaagtacagcgcgggtttaagtggacgccaggtgcaccggacacaggctgtgtttaacc

SEQ ID NO: 102390 - DNA, 80 bp, Homo sapiens
gacagaacctacaccatccgtgaggagccccagaaccaggactgggggatttggagctgggcagagacttaacccccaca

SEQ ID NO: 102391 - DNA, 75 bp, Homo sapiens
tgctctccagtgaaacaaactcatattgatattaattccaaaatcagaaacctgtggatttttgtatctaagttt

SEQ ID NO: 102392 - DNA, 90 bp, Homo sapiens
ttccctaatacgtacctcattgtgggaggagacgaaaccagacagagggtcaagtttacagatgaccgtgtctgcaagagtcaccttctg

SEQ ID NO: 102393 - DNA, 74 bp, Homo sapiens
cgtcagtacgcgaaggatatcggtttcattaagaccctcaatatagtaacctggtctccctgtgggcaatattt

SEQ ID NO: 102394 - DNA, 100 bp, Homo sapiens
cgggcttcggcccccaccagagactcgtgcataactcctcctcagagccctgatctcgtggagccatcgacaaggacacctgtttctccccaagtaacag

SEQ ID NO: 102395 - DNA, 82 bp, Homo sapiens
ttggacgctgccagtttgcacagcagcagggcgtgatggtgggcatgggtcagaaggattcctatgtgggcgacgaggccca

SEQ ID NO: 102396 - DNA, 83 bp, Homo sapiens
cgcgttcttccgcagcatagactgggacttggtgagaagccctaccactgcaactgggacggctgcggctggaagtttgcgcg

SEQ ID NO: 102397 - DNA, 88 bp, Homo sapiens
tccaggggcagagtccacgtctggcttctttgtctggagttgaaagccagatcaccaccttctgagacagggtctccctgtgttgccc

SEQ ID NO: 102398 - DNA, 50 bp, Homo sapiens
cgcaaggtgaaatgttcactgttaaagagcttcctgcctgacacagctca

SEQ ID NO: 102399 - DNA, 100 bp, Homo sapiens
ggctgtattcctgaaaatcatggtgaggacatgaggaaaatgtccttccagcgctgcgcccggacagacaagtgcctccggagccagcgtggtggccata

SEQ ID NO: 102400 - DNA, 83 bp, Homo sapiens
acaagttcctgccggctgtgtgctcgtggatccagtatggtttgaagtggtgaacatggatttttctcggcttcacatgtaca

SEQ ID NO: 102401 - DNA, 101 bp, Homo sapiens
tgaccagtccaggcccagcctctcgaatgggcacacctgtgtagtatatgactctcaacccttctactaagaggaagaatactggatccccagacaggaag

SEQ ID NO: 102402 - DNA, 83 bp, Homo sapiens
gagaccaataaaaataaactgcttgaacatcctttgactggttagccagccgaaaatgagagcacacctattcagcaactcct

SEQ ID NO: 102403 - DNA, 75 bp, Homo sapiens
ctctgggtctccaggcccgcgaccgtccgccagtcgtcccgagatccagagacaatggccccgatgggatggagc

SEQ ID NO: 102404 - DNA, 90 bp, Homo sapiens
tccagctccgctctcttcggctgccccaatccccggcagctctctcagaatctcacgggctgtgcgtgcctcaccaccgtccctgctgag

SEQ ID NO: 102405 - DNA, 74 bp, Homo sapiens
ctgcgttgtaccatccgcctgtgggacacctaccagatagttggttgccactttaggtctattccagtgaatga

SEQ ID NO: 102406 - DNA, 82 bp, Homo sapiens
ccgctgttcacctacgggcctgatcaaacttgccttcctgttctccaagaccagttgcagagtgggcaggatcttaagaccc

SEQ ID NO: 102407 - DNA, 100 bp, Homo sapiens
ctgcccagccaccagcaaccccccaggcctatggcatgtctgcgttacctttaaatctgataaaaggcactagaagcgctgcttatgaacgtttggaaaa

SEQ ID NO: 102408 - DNA, 75 bp, Homo sapiens
cagacgagagcttcagccatcacgaggatgatttcggaacctggagaaaattgatgctattgctgagattagagc

SEQ ID NO: 102409 - DNA, 98 bp, Homo sapiens
tgctaatggcatactttgatcctgacttttatgcctcagggaagcacttggagaatatttagatgggaagaaggagagtgaggaggatcaaagcaaga

SEQ ID NO: 102410 - DNA, 75 bp, Homo sapiens
cgagctgcaattgcccagaaaaagggcgagatgtgtgacagaggtggcatcaagctcttacagtcccaaccctcc

SEQ ID NO: 102411 - DNA, 90 bp, Homo sapiens
ccccaacatcatctgttactagcgagaactcagaagtgttccacgtttcagaggcaggagatatgtcagtattgaattctcccagacatc

SEQ ID NO: 102412 - DNA, 82 bp, Homo sapiens
tgcagatcgggagcgcaaggtcgccctcaaggccatgatcaaaacgctttatcctgtggataaacgcagagtgaacgagttt

SEQ ID NO: 102413 - DNA, 144 bp, Homo sapiens
gtggaatttcagaggggctccgagaggcaaacttttaagattccaggacctctgatggctgatttcatcttcaagaatatcagctgcatccagtgtccccagacgagaatacaagccaaggcctgtgaaaaggagttctagtga

SEQ ID NO: 102414 - DNA, 92 bp, Homo sapiens
cgggatcgtgaccgagaccgtgaccgagagcgtgaccgagagcgcgaatatcgtcatcgttagaaggttatgaagacagtatggagtttcca

SEQ ID NO: 102415 - DNA, 75 bp, Homo sapiens
gtagttgctccaaaacctaagtacaacccatacaaacaacctggaggtgagggtcataaataaagttcatcttaa

SEQ ID NO: 102416 - DNA, 100 bp, Homo sapiens
tgcagtggcgcctaaagtctgagagagggaagtcgcctctgtgctcacctgcagccagttacctactgcgagccggccttctggtgctccatctcctact

SEQ ID NO: 102417 - DNA, 75 bp, Homo sapiens
gcgtgcgcggacggtgtgcggaacatgtatcgattcgagggcactgggttttcaaacattcctcaacttatagat

SEQ ID NO: 102418 - DNA, 99 bp, Homo sapiens
tacagattttatacaccaccaaactttgttcttgctcttgttttgccctcaattgtaattctggatggcaatagcagcgactcagacgcagatgccggg

SEQ ID NO: 102419 - DNA, 100 bp, Homo sapiens
cagctaatgaacctacctcaaagtgcagctacaccagcactctccaatcctcacctcactgctgtgctccagaacaaggaccctgatgctcccataagac

SEQ ID NO: 102420 - DNA, 83 bp, Homo sapiens
taggagcctccgtgcggagaccactgttcaaggccacagcagatactttctgagtgcctactatgtgccagcctgtgctaggc

SEQ ID NO: 102421 - DNA, 88 bp, Homo sapiens
aacttgacactcaccctgaccgactcaagaatgaacaatccgtcagaaaccagtaaaccatctatggagagtggagatggcaacacag

SEQ ID NO: 102422 - DNA, 50 bp, Homo sapiens
cacactgcaggcctccgcgctcagtgggaagtcccacctggccatcgtgc

SEQ ID NO: 102423 - DNA, 98 bp, Homo sapiens
gcaggacctgctttcggagtacatgggcaatgtgcactttacaggtccccgatgaaccaagagaaccctccaccatatccaggccctggtccaacggc

SEQ ID NO: 102424 - DNA, 80 bp, Homo sapiens
ctccttcgcagccgcgcaaaaaaagtgacttaagagattaaaattaatttggttgctgttggttctgaacaaataatgag

SEQ ID NO: 102425 - DNA, 75 bp, Homo sapiens
ggaccctggagtacaccccgcagcacagccgcgacttcaagatataatgaagatctggaacttgaagatgccatt

SEQ ID NO: 102426 - DNA, 83 bp, Homo sapiens
ggaaaaactacaccaagcacatgttcatccactcgggatgaccgagtgggagacagcagcaccagcggtggcagagaccccag

SEQ ID NO: 102427 - DNA, 100 bp, Homo sapiens
agcagggaccgcctgctgcactttgggttcaaggcgacaaggacagtgctgctgtgagtttgacgaagtggacatcacctgcagtcagtccagagctgcc

SEQ ID NO: 102428 - DNA, 87 bp, Homo sapiens
ggggccatccagtacatcccaactgagctggatcaaatatttggttcccgggtaagagttgactctacagcaaaggttgcagaaata

SEQ ID NO: 102429 - DNA, 98 bp, Homo sapiens
atgaaattgagtcatgaaactgtaaccattgaattgaagaacggaacacaggtccatggaacaatcacagagtcttgctgtgtcgcccaggctggagt

SEQ ID NO: 102430 - DNA, 75 bp, Homo sapiens
ccctgaaggcctcgctggagatcgagtaccaaattcattccacttaaaacctgaaaacattggaccacacaaagt

SEQ ID NO: 102431 - DNA, 74 bp, Homo sapiens
cgccgctctagcggccgggactctgaactatggcggcttttatagttgtaatacagaaattatgcccggtataa

SEQ ID NO: 102432 - DNA, 82 bp, Homo sapiens
tgggtttcccgggagatcccaggcggtgacagagtggagccatggctagagataacgaaggaggcccaacttcattcaataa

SEQ ID NO: 102433 - DNA, 75 bp, Homo sapiens
tgagggatgggactggaaatcaaatgttacagtcaggtgacacacagtcttttgcacagaagctccagctccggg

SEQ ID NO: 102434 - DNA, 80 bp, Homo sapiens
ctgcgatacctgcctgcaggagttcctcaggtgtgggaaccgctgagcagaacaccctcccccagcgggaaatccgggac

SEQ ID NO: 102435 - DNA, 75 bp, Homo sapiens
gggccagggaaccctggtcaccgtctcctcagaagctgcacacatacatgtaagagaagcaaaaatgtcagatga

SEQ ID NO: 102436 - DNA, 51 bp, Homo sapiens
caggaccacggggaaattgccaagaatcatacatctgtcggtggcctggga

SEQ ID NO: 102437 - DNA, 75 bp, Homo sapiens
tagcctggaggaactccgaacccaaatcctgagtccaaacactcaagatgagacagggaagaacgattggcagca

SEQ ID NO: 102438 - DNA, 75 bp, Homo sapiens
ctcggttggatgcgaaggagctgcagcatccaggtgactgctggctgctggcagccattgcctccctcaccttga

SEQ ID NO: 102439 - DNA, 75 bp, Homo sapiens
tcaccgtggagctccgccgccccgaaactttcaccgcgagcgggcaatgaatcgctccctggctaatgtgattct

SEQ ID NO: 102440 - DNA, 98 bp, Homo sapiens
ttttcctcggtgggggcttagcgcactggaggagcggcgggcttcagacaggtggtcaaggtgaagccccatgacaaggatgccaaaatgaaatacca

SEQ ID NO: 102441 - DNA, 100 bp, Homo sapiens
tgaggcgacggccgcggctgcacagatcactgtgtccactactatgatcttcgtaacactaaacagccaatcatggtattcaaaggacaccgtaaagcag

SEQ ID NO: 102442 - DNA, 100 bp, Homo sapiens
ggaggcctacttgcagcatattacctatcaggagaggagatggaacttgctaaggaagaaaagtgtgaatttctgccattcctgtccccacggaaggtta

SEQ ID NO: 102443 - DNA, 75 bp, Homo sapiens
ggaagacgcgctcctgcgccgctgatggtgagaccattctaaaaggcctccagtccattttccaggagcagggga

SEQ ID NO: 102444 - DNA, 50 bp, Homo sapiens
attccacgagaggatccgcgagtgtattaggtctgcggggtttccgagag

SEQ ID NO: 102445 - DNA, 82 bp, Homo sapiens
gccgctcccttccccgcgcagccccgcacggcccgggcccacgcctcctcgctggggaggcagagtcctcgcgtggtctcct

SEQ ID NO: 102446 - DNA, 127 bp, Homo sapiens
gatacctgcagaggtgtcacaggcaacagaacttcatgtcctggatgtggcagggaacagtgtgtatgtacagagaaccatcgctacatgaaattggagaaaaacaagggcgttcaaggaaaagttc

SEQ ID NO: 102447 - DNA, 74 bp, Homo sapiens
ttataatgagcctggctctcaagtattcaagcttcgagcaaatgctctcatcaaaagaggcagcatgtacatgc

SEQ ID NO: 102448 - DNA, 100 bp, Homo sapiens
atgcaagaggcgtttctataagaattggcctaaggcagagcccccatcacctcaggcttctcagttcccttagccgtcttactcaactgcccctttcctc

SEQ ID NO: 102449 - DNA, 75 bp, Homo sapiens
cctcggcggagcagaggaaccacacgctgatcatggttgtgtcgccaggctggagggcagtggtgtcatctcggc

SEQ ID NO: 102450 - DNA, 75 bp, Homo sapiens
agcgcccggataaggcggcgctgaacgcactgcagcctcctgagttcaggctgtctgtccccagaccccagagca

SEQ ID NO: 102451 - DNA, 83 bp, Homo sapiens
gagatttttgaacttcgaggaagtcagaaaaagagtgcacgccagtatcacgtacagttctttggtgacgccccagaaagagc

SEQ ID NO: 102452 - DNA, 100 bp, Homo sapiens
catcgatggacgcattcagaagagcaaggaagccacgagcggctgtgccggaacgcggccgtctgcccttactgcagcctcaggtttttctcgcccgagc

SEQ ID NO: 102453 - DNA, 83 bp, Homo sapiens
gtggcttcggcttcatccgcttggcattttttactgtctacagaaacttattgtaattcatttttcctcactccagtagtaag

SEQ ID NO: 102454 - DNA, 75 bp, Homo sapiens
cctgaatacatgatttaaacaagagatttccacagaaggcctgtagtggtggagacacgcccagtggatgatcct

SEQ ID NO: 102455 - DNA, 100 bp, Homo sapiens
cagattacctggagattgcccgggatggactggggggactgcctgacattgtcagagatcggaggtggtttgtgctccccctactgcctatatcgacttc

SEQ ID NO: 102456 - DNA, 96 bp, Homo sapiens
gctgtctaagtccaaagatttttacccaggtgattcacataacaggccggctacgcctgagagtgtcgctgtcccacgggaggaccgtccccagcc

SEQ ID NO: 102457 - DNA, 87 bp, Homo sapiens
acactgaagccacccaggtgtaccccaagctgtacttgtcacctcgaattgagcataatcctaaattggagagtcagagagtaaata

SEQ ID NO: 102458 - DNA, 100 bp, Homo sapiens
aagatgtccttaccagctttgacaatacaggaaatgttttgttctggacttggtgcctctttctgttatatgctttcctatttagttgggagaccagttg

SEQ ID NO: 102459 - DNA, 100 bp, Homo sapiens
ctggactcttttacactcaactaattggcatcatcacagaagagtttgaagtttgaaatcccagaatgaggaaattcatccagcttggagacttccaatc

SEQ ID NO: 102460 - DNA, 122 bp, Homo sapiens
gacgaaattgaaattacctccgagggaaacaagaaaacatcaaagaggtctagcaaagggatgattctctgaacgactgtcggatcatcttcgtggacgaagtcttcaagattgagcggccg

SEQ ID NO: 102461 - DNA, 82 bp, Homo sapiens
catctccgcggtccggcccggggccccgggatctcggctgtccttcctcccggtctacttcaggaaaggaaaagtactctgc

SEQ ID NO: 102462 - DNA, 83 bp, Homo sapiens
cgctccggagccgctgcacatttcgccatggaccagctggccaagaccacccaggaaaccatcgacaagactgctaaccaggc

SEQ ID NO: 102463 - DNA, 95 bp, Homo sapiens
ctgcagccctgaccgtctctgccagcctcaagatggcaaacttgcggagggcccggttcaagaggcccatcatcctggatccggccgaccccacc

SEQ ID NO: 102464 - DNA, 100 bp, Homo sapiens
agcactcatgaaggaaattccagcgctgcttcatcttccagtgctgataattatggcattagccatcctgctgacacttcctccatggcccatctatcgc

SEQ ID NO: 102465 - DNA, 101 bp, Homo sapiens
gtggcagctgctgagttctcggtgaagccctttggagtgaatcaacctggaccttatatcatgtatacaactgtagatgcaaatgggtatctgaaaaatgg

SEQ ID NO: 102466 - DNA, 104 bp, Homo sapiens
acaacctgaacgtcaccgaggagaagtaccaggaggcgttggccaaggcacatgattttgataaaagatcagctatcaaaacaacaaaatgaaggagatagcat

SEQ ID NO: 102467 - DNA, 82 bp, Homo sapiens
ctgtgcctcccagcaccacagtccttctgcagtccctcgtccagccacccccaggacttgccggagcagccttacttgcagc

SEQ ID NO: 102468 - DNA, 82 bp, Homo sapiens
attttcctatggattctagtaacggaaactgtagaggggcaagcagtgagtagcacagaagagggaggatgctgtttccaaa

SEQ ID NO: 102469 - DNA, 74 bp, Homo sapiens
acaaagggacctgatgaagcgaagatcaaggctggcagtgatggtgaaagcataggaaactgccccttttccca

SEQ ID NO: 102470 - DNA, 100 bp, Homo sapiens
gggccctctggaccctggagtacaccccgcagcacagccgcgacttcaagatccaggatgagaagactgataaaagaagaagctagctgaacagctgtaa

SEQ ID NO: 102471 - DNA, 80 bp, Homo sapiens
gcagaaaaagctggagcttgagctagagcaagctaaggcacagttggcccctagcagtcttcttgatgctttggaacaac

SEQ ID NO: 102472 - DNA, 75 bp, Homo sapiens
gtgacagtctgcatgtgcagttttcaggacagagcgggatgccaccagcttgtccaaagggaagttccaggagct

SEQ ID NO: 102473 - DNA, 74 bp, Homo sapiens
ggggcgacagggccgattccggagtggaatcagcatgattcttcagaggctcttcaggttctcctctgtcattc

SEQ ID NO: 102474 - DNA, 91 bp, Homo sapiens
ccaccggctggagcggatcccacacctccggaccgagggacgcggacaatgcagatcttcgtgaagactctgactggtaagaccatcaccc

SEQ ID NO: 102475 - DNA, 82 bp, Homo sapiens
ggccggaagcgcagtgtctcctttgggggcttcggatgtgcctccggagccagcgtggtggccatagacaacaagatcgaac

SEQ ID NO: 102476 - DNA, 97 bp, Homo sapiens
gctacgtgcagcaaggcgtgtacagccgcgggggctaccctggggcccccggcttcaccaccgggcatgactacggggccccccaggaggcgactct

SEQ ID NO: 102477 - DNA, 74 bp, Homo sapiens
ttgaagggtgattttgatgcttgcgaagagttgattgaaaaggctgtaaatgcctgcagtggcgtctgggacaa

SEQ ID NO: 102478 - DNA, 80 bp, Homo sapiens
agtggttgtgtggtcgcgtctcggaaaccggtagcgcttgcagcatggaaggttgtgcaggaccagcgttccctgtgcag

SEQ ID NO: 102479 - DNA, 76 bp, Homo sapiens
tctacccggagaagcaggagccctactcggcagccatgaagtcggggggcacgcagctgaagctcatcatgacctt

SEQ ID NO: 102480 - DNA, 89 bp, Homo sapiens
cgttcttggagttgctggtgttctatactggaagaggcatgccagaggtagagcagctcccctcccacccggtcactccgtccagcaag

SEQ ID NO: 102481 - DNA, 50 bp, Homo sapiens
gtaacccgtgtgactttgactggcccaccttgggacaccttgactccaag

SEQ ID NO: 102482 - DNA, 96 bp, Homo sapiens
ctggtattttttggagcttccatcctggttcttccaaagtgcccggacccaaaacaggaactaaattttcaggagtgaaaagaaaaagaggaagga

SEQ ID NO: 102483 - DNA, 75 bp, Homo sapiens
gagctcctggtcgatgaagaggatgatgtttttggtgaaggtttagcatgagctttaacagacataatctgaaat

SEQ ID NO: 102484 - DNA, 90 bp, Homo sapiens
gtacgaagggtgcaaagtgggacgcggcacctacggtcacgtctacaaggcgaggcggaaagatggggaaatcctcattgacgattcaat

SEQ ID NO: 102485 - DNA, 75 bp, Homo sapiens
gcggtggtgcccgacttcgaccccgaagtcacctgcaccggtgcccgtgacgtacgagctgcccacactgtatag

SEQ ID NO: 102486 - DNA, 82 bp, Homo sapiens
ttctcacgcatcctcatgggcttgctccaagcggagctggagtttgttcagatcatcatcatcgtggtggtgatgatggtga

SEQ ID NO: 102487 - DNA, 49 bp, Homo sapiens
caggaagcccttccgcggaccgaaagctccataatgggagaagtaaaga

SEQ ID NO: 102488 - DNA, 82 bp, Homo sapiens
gggacctttgactgtttccggaagactctttttagagaggaccgcctggcccggtgcaccatgcattgcaacgacaaagcca

SEQ ID NO: 102489 - DNA, 49 bp, Homo sapiens
ctcaagacccagctggagctggaaaagaggcaacgcacgggccacaggc

SEQ ID NO: 102490 - DNA, 82 bp, Homo sapiens
gtcgaggaggcgcaggagactgaccgcaacggcagggtttaaacttacacgaatcgctttctggaggaggaggggacccgct

SEQ ID NO: 102491 - DNA, 95 bp, Homo sapiens
ctgcttttcctgcgtcctgctgggagctgcgcgctccaggtatcctggcctgccgccctagccggcccaagagtgcttgtgatttcacgtatttt

SEQ ID NO: 102492 - DNA, 100 bp, Homo sapiens
gagctgctgctcggaccagcgcggtaccaaccaagaagctgaagaaatatgagaaagaatatcagacaatgcgagagagtcagctgcaacaggaagaccc

SEQ ID NO: 102493 - DNA, 88 bp, Homo sapiens
catgtggtacagagtgttgagaagtttattcagaaaagttgctggagaatgtaaccctaatccataaaccagtgtcgttgcaaccccg

SEQ ID NO: 102494 - DNA, 100 bp, Homo sapiens
tgggaactcagtttatatgagttacaacgaacacctcaggaagatgagaagtttttgtctgaagtttttgcacaattaacagatgaggctacagatgatg

SEQ ID NO: 102495 - DNA, 88 bp, Homo sapiens
gacctccctctccgtgccaggacaacacctgcagtgtactggaaagattcctgacattcagacaactgacttgtaactgacttataac

SEQ ID NO: 102496 - DNA, 83 bp, Homo sapiens
acggatgtgatcattgttgcaggaggagatgggacactgcaggaggacctcttctcagctctcatcaagggccccactcgaac

SEQ ID NO: 102497 - DNA, 82 bp, Homo sapiens
ccagaattttccagtgccctgaaaaataacactgccctaaccatcatggaggtggccgaggtggaaagtcctctgaacccca

SEQ ID NO: 102498 - DNA, 82 bp, Homo sapiens
ttgcatcctacgtaaccagaccaagctgtgggtatctacagtcggtgaggcctcttatgaaggaagaagacttcaaacggat

SEQ ID NO: 102499 - DNA, 95 bp, Homo sapiens
ggcggcccgctctgggcgctcattgatgtctacggcatcaccgacgaggtgcagcttctggtctccatctgctgctgcctcttcatcctcttcct

SEQ ID NO: 102500 - DNA, 99 bp, Homo sapiens
ccaggactacagtaaggctgaaatcattgaagtgcttggagtgcagaactgaaagaggcatgaagaccccgtttggaaaggcagctgcagggcagcggt

SEQ ID NO: 102501 - DNA, 75 bp, Homo sapiens
gcttggttggggagatcggcgcttggccgatgtatcctccactcctcgctggccaccatcctgctgcccaacaga

SEQ ID NO: 102502 - DNA, 90 bp, Homo sapiens
taccagtcatttgtggatgtcatggaatttcgggtgaatgaaaactttgccattgatttgatagcagagcagcccgtgagcgaggtggag

SEQ ID NO: 102503 - DNA, 99 bp, Homo sapiens
gacagataccggtgagataacatcctacatcactgaagatgatgtggtctacagaccaggagcaacaatggtgtggttggtgaatatggcagaaggaga

SEQ ID NO: 102504 - DNA, 97 bp, Homo sapiens
atctgctacaatgtactggatcgaaatgtccatgagaaaaagcttggagataaagttgctttttactggaaggctttgtgatacctgatgaaggggg

SEQ ID NO: 102505 - DNA, 74 bp, Homo sapiens
aaagccaaagctcccatccaagacatctggtaccacgaggatcggattagagcagtttcgctcttgttgcccag

SEQ ID NO: 102506 - DNA, 100 bp, Homo sapiens
gaaatctcgtctcgaccaagagctgaagctgatcggtggggtcccggtcagtgggccctcagcctccgatccctggacaccggccccggccttctcagat

SEQ ID NO: 102507 - DNA, 90 bp, Homo sapiens
cggagcagggccttggaccccgcggcgcccctcggcctcggagcaacgagcgcagcgccggttatgaagacagtatggagtttccagacc

SEQ ID NO: 102508 - DNA, 97 bp, Homo sapiens
tcactagaatatggagactgttcaatcaccaggatgcctggaatgatgtcgtcagtaatgcctggaatgatgatgtctcatatgtctcaggcttcca

SEQ ID NO: 102509 - DNA, 98 bp, Homo sapiens
acgccccctatcctatccgcaaacagctgagtcatcactagagagtgggaagggcagcagcagcagagaatccaaaccctaaagctgatatcacaaag

SEQ ID NO: 102510 - DNA, 51 bp, Homo sapiens
ttggcaccactgaagtgaccgaatgaggaccctatgtactcggaactgggc

SEQ ID NO: 102511 - DNA, 98 bp, Homo sapiens
tcaagtacgagagtggccctgacggaggggaggaaggtcccaagcaagacagaactgcagaagggcaagcactaagtgaagcaagaaagcatttaaaa

SEQ ID NO: 102512 - DNA, 75 bp, Homo sapiens
tttctcatggatgttcttcttcgagtatttgtagaaggatcgaacggttggaagtaagcagccttgcccaaacat

SEQ ID NO: 102513 - DNA, 90 bp, Homo sapiens
cccatttcaagtttggattggagtccagataaaaggggtctctgcgtctgtagttcatttgaccaaacgagcatggtagaatcaattaaa

SEQ ID NO: 102514 - DNA, 80 bp, Homo sapiens
tggagcctcagttggaagcagccgatccagcctgcggagcctgtggggcaggagcgacgaaaatttggccccttaggatg

SEQ ID NO: 102515 - DNA, 83 bp, Homo sapiens
ccagtcccgggcgagcagcgttgggtttatgtctttatttgacgaaaacggtttggtgcacctcgatttggaggaagtagggc

SEQ ID NO: 102516 - DNA, 83 bp, Homo sapiens
tctcagatgttggatatttgcttggaaaaacgtgtgggtacgaccttggaaactggagcacccatcctaactgatgatgttag

SEQ ID NO: 102517 - DNA, 100 bp, Homo sapiens
cttccgcgagcccatccgtctcaagactgtgaaaccaggaatgcccactctcatggcaaccagtacagcactatcatgcagcagccatccttgctgacta

SEQ ID NO: 102518 - DNA, 98 bp, Homo sapiens
gttcttggtggtgaagtggaacaccttattgagaaatgggagttacagagacgttcttacttccgtactcttctcatgtatgggttccactttctggt

SEQ ID NO: 102519 - DNA, 82 bp, Homo sapiens
ggagcgcaaggagccgcagtacctggagatggagttcaagggaccttaaaccggaaaacattttgttaaatgaagatatgca

SEQ ID NO: 102520 - DNA, 90 bp, Homo sapiens
catctcagatctggagcatcggctgcaggggtcagtgatggagctgcttcaggacctgcgcgaagtctggctcaattatcctctccaccc

SEQ ID NO: 102521 - DNA, 74 bp, Homo sapiens
ccagggcagcccttcaggagctccttagtaaaggtggataatattaatgcagctgtgatggatttgaaaaaaaa

SEQ ID NO: 102522 - DNA, 76 bp, Homo sapiens
agctcatctggaattttgccgatttcatgactaaccagtgaatgtctgatcacagatacggggatggtggctctac

SEQ ID NO: 102523 - DNA, 50 bp, Homo sapiens
tttgatgctgatgaagaaaagtccaagaatggagatttacagacagtcat

SEQ ID NO: 102524 - DNA, 100 bp, Homo sapiens
gtcaaccccaccgtgttcttcgacattgccgtcgacggcgagcccttgggccgcgtctcctttgaggcatttgttgctatcggggactacaatggccacg

SEQ ID NO: 102525 - DNA, 82 bp, Homo sapiens
cagtggtcgcttcttctccttggtcctggcaaaactggcctgtggactaaacaagcccaaccgccaaaccctggtttcacat

SEQ ID NO: 102526 - DNA, 100 bp, Homo sapiens
caacagcgaggaagaagaggacgacgacgacgaggaagaggaggtttctgaggtcttgagagctgatgacaataacatgggcaatggctgctctcagaag

SEQ ID NO: 102527 - DNA, 75 bp, Homo sapiens
gtggggcatgtggcaaaacacacagctgaggcatttggctttatgtcccgagttgccctacaagcagagaagatg

SEQ ID NO: 102528 - DNA, 100 bp, Homo sapiens
ccagagtcgcggggacacaggagtcttcctacagtacacacacgcccgcctccacagctggtagccggtctgggtctccaggaagagttctgaccacaac

SEQ ID NO: 102529 - DNA, 100 bp, Homo sapiens
ggaggcacagctgctgtcttcaatgctgttaactggattgagtccagctcttgggatgattccttcgcctcagaaaccaatctagattttagaagtgggc

SEQ ID NO: 102530 - DNA, 104 bp, Homo sapiens
tatggctgggccattgagcagctgccggctctcagtctctggatggtcgtcagatccgtgtggatcatgcaggcaagtctgctcggggaaccagaggaggtggc

SEQ ID NO: 102531 - DNA, 76 bp, Homo sapiens
tgctgtatcggcgttcacatgctacgcgtcttaaaattttggtagcagaaagcaaatgtgcaaagagcaatggaaa

SEQ ID NO: 102532 - DNA, 51 bp, Homo sapiens
gggacttcccgtccgcggcgtggagggtcatgcgcatcgtggataatgttc

SEQ ID NO: 102533 - DNA, 100 bp, Homo sapiens
gcgagacgcgcgtgtgtgagcgcgccggaccaagcgggcccagaagcgggggctttgaccacgacctttgaagagcttcattttgagatcaagccccacg

SEQ ID NO: 102534 - DNA, 75 bp, Homo sapiens
gcttcctgagccactacaacatctggaaggagccctctgcctttgaagagaaggccattgagaaggtggatgacc

SEQ ID NO: 102535 - DNA, 90 bp, Homo sapiens
gtgcctctggcagtgacgaggacgaagtgtccgagggtaagcttgatgattaccaggaacgaatgaacaaaggggaaaggcttaatcaag

SEQ ID NO: 102536 - DNA, 75 bp, Homo sapiens
ctttgatgaatacatgaaggagctaggatatgttcaaggaatgagtgatttactttcccctcttttatatgtgat

SEQ ID NO: 102537 - DNA, 97 bp, Homo sapiens
ataagaaaggaagcacagaagtcgcaggcagcctctcagaaaggtgacccagggcctggtcatcgggcagctgagcagccacttctcggaggaggtg

SEQ ID NO: 102538 - DNA, 100 bp, Homo sapiens
ctggaagctgagggcacgtgtttgcggttcagccctttgatgaccgcagcagaatacaaatggagagatttgcatgggatgcagaaatatggaagactaa

SEQ ID NO: 102539 - DNA, 75 bp, Homo sapiens
gtacaagttggactgcttcccaagctcactgcactcctagctgtatgcaggagctattcttgaagtttgtggatg

SEQ ID NO: 102540 - DNA, 100 bp, Homo sapiens
cgagaggatgcggagcccgcagaacctccacagtcaagaggacggtgacagagctgaatgaacctctctccaatgaagatcgaaatctcctctctgtggc

SEQ ID NO: 102541 - DNA, 100 bp, Homo sapiens
gtgcaaggggtgtttttccgtaagcatactcagggtttgaagggtgttccatggtgcctaccatctaccctctggaaacactgcataatgccctttccct

SEQ ID NO: 102542 - DNA, 100 bp, Homo sapiens
aggccgtcatctgcaactccccaagcagcatccccgtcacaccgccaggccaggggaacacagccgcacccgggtctgtgccagctgtggttggcagtgc

SEQ ID NO: 102543 - DNA, 75 bp, Homo sapiens
agaagacaatatcatgcaagtgtggcaaatgctatcagttgagggatttgcagttgataaaatggctggagaggt

SEQ ID NO: 102544 - DNA, 100 bp, Homo sapiens
tctcaattctgaagcttccccaatggcttaaaggactgctggccttcctggtgaagcctctgaacgatcgccgcggccggaagagttggcgctcggggcg

SEQ ID NO: 102545 - DNA, 82 bp, Homo sapiens
aaaggtgataagaaggggaagaaaaaggaccccaatgctcctaaaaggccaccataaccttaagtaattcctggattgcttt

SEQ ID NO: 102546 - DNA, 90 bp, Homo sapiens
gtccgactcgctacgcgggtcttgcgagatatctggccgcctctgccgcagctggaggtgctccatacttgcttgcagtgcctacgtggc

SEQ ID NO: 102547 - DNA, 75 bp, Homo sapiens
gatttgcagaaaccgtggtggagttgcttaaggcatttattgaaatggcaaccacagaggatgctcaggccgcag

SEQ ID NO: 102548 - DNA, 76 bp, Homo sapiens
tctggctggcaccaggaaagatgttgaagtgactaagggtgtatgcaacagcgttattgcaacaggctaacgaaaa

SEQ ID NO: 102549 - DNA, 75 bp, Homo sapiens
ctcgggagccgtggccctgatccagacctgggcagcccaagagttccatggcctccacttcccgccgccaacgcc

SEQ ID NO: 102550 - DNA, 109 bp, Homo sapiens
ttcgaggagctcgaggtggactatgaggctatccgcagcgagatggagcagctcaaggagaaattacagaagacatccccgtgaagactttgaatatgaagactgtgta

SEQ ID NO: 102551 - DNA, 82 bp, Homo sapiens
tcctcagcgactcttctgacctccgcgcgacgtacccgccgccgccgttggctggagggtgaggtggctttgaccccgggtt

SEQ ID NO: 102552 - DNA, 100 bp, Homo sapiens
aggaaagctggtgtggcacacagtaaatccagcaaggatatggagagccatgttttcctgaaggccaagacccggccaaaactggacaagccaaggcatc

SEQ ID NO: 102553 - DNA, 74 bp, Homo sapiens
ccttttcgaccttcaatccagttccaaggactccacgggtcaagtccatcatctccagaaccagctagtcttcc

SEQ ID NO: 102554 - DNA, 100 bp, Homo sapiens
acccgtttgagctggtcatggcgtgatggaatggggagaagatattaaagcagtttcaaaagatgaagcagtgatgttggtgaatcatcaggcaacagga

SEQ ID NO: 102555 - DNA, 82 bp, Homo sapiens
tgctgagccgggagcgctgactggcccggctgggcaggcaggtcaatggccagcaaggaggggggtccgagccggcggcggc

SEQ ID NO: 102556 - DNA, 100 bp, Homo sapiens
caacgcaacgggatcagtgttgtgataaggcagctgcaaaaagcggcaggagtggaagctggacacactatgtgacttgtatgaaaccctgaccatcacc

SEQ ID NO: 102557 - DNA, 97 bp, Homo sapiens
ggcagatgcttttctatcttggtgttgatgctttacgcaagagttttgaggagctggctgctgaatgtaagagtgcaggctaccccgggactttgat

SEQ ID NO: 102558 - DNA, 100 bp, Homo sapiens
caagattgaccacattgatcacagtaagaagagttcctgggtcaagtggtcaccttcataaaaccgaagacggggactgggagtggagtgacgacgagat

SEQ ID NO: 102559 - DNA, 100 bp, Homo sapiens
aagaccgcaggaaggactggggccacgtggagctgctggaggacaatcacaaagagtgtgtaggccagccccggtcacagagtgcaccgtatcctgtcac

SEQ ID NO: 102560 - DNA, 100 bp, Homo sapiens
taggcttcccccagcgcttgccgccctgggcgcggccctgctcctgtcttccattgaggcagaagggacctaccagggccagtgggtcggtggcatgcgc

SEQ ID NO: 102561 - DNA, 75 bp, Homo sapiens
gctcgaaatgagctttttgctctcaggccagctcctattcagtcgaaaatttgccctttttgatgaacaacatcg

SEQ ID NO: 102562 - DNA, 115 bp, Homo sapiens
ccctggagcctcagttggaagcagccgatccagcctgcggagcctgtggggcaggtggaaaggagactatggaaccaggatccagcagtacttcccatccaactacgtcgaggac

SEQ ID NO: 102563 - DNA, 100 bp, Homo sapiens
caggggccttgataacacagagtttcaagtacctggagtagaacagaaaaattattatgtctgtgttcccttgggactcattggaaattgtacagtgaca

SEQ ID NO: 102564 - DNA, 50 bp, Homo sapiens
tatcaagtaatggtgcaaagcctgaagtttctacgataaagacagttcag

SEQ ID NO: 102565 - DNA, 74 bp, Homo sapiens
gtactaccaaggacagcttttttcctgcaaggtcgtggttcaattccagaattctttcatattatgaaaagaaa

SEQ ID NO: 102566 - DNA, 75 bp, Homo sapiens
agactggagtcgaaggccgtgagatggcccactgcgtgaccttggttcagctgtccatttcctgtgaccatctca

SEQ ID NO: 102567 - DNA, 100 bp, Homo sapiens
ctgcttctggtgaacttgtctggccggcattcatttaaggcctaaggatgaaggcggtttgtacaaacataattgagaaaaatgcaaacccagagtggaa

SEQ ID NO: 102568 - DNA, 75 bp, Homo sapiens
tggattcccagcgcgggacagccagggcactgtgtttagtcttgagtcagaggaggaggaataccctggaatcac

SEQ ID NO: 102569 - DNA, 100 bp, Homo sapiens
gcggtcacctggcacaccagcgcccgcaggatgcccagggaaaggggctgtttgccacacagctcatccggaagggggagaccatcttcgtagaacggcc

SEQ ID NO: 102570 - DNA, 145 bp, Homo sapiens
cggcgcggggccaccgacgggacgcggctccgggaacatggctcgcttcgctctgactgttgtccggcaaaagtgactgagaccgaagatgatagtgatagtgacagcgatgatgatgaagatgatgttcatgtcactataggag

SEQ ID NO: 102571 - DNA, 98 bp, Homo sapiens
cacgaggaggaccagaaggagatcggtgacctccgtgcccagcagcagcaggtcttctccctgatcgtcttctcctccctgctgaccgacggctacca

SEQ ID NO: 102572 - DNA, 96 bp, Homo sapiens
cagaaggcgccaccatggcggcgcccccgcagcccgtcacccacctcatctttgacatggacggacttcttctggcatcccagccatcactcttcc

SEQ ID NO: 102573 - DNA, 100 bp, Homo sapiens
tcccctgggacagtgcaaggaaagaaagaagcctgcggtgaaagtgacactgagttgtttttcaccattcagaacattgcctgaagcaggtccaccatgc

SEQ ID NO: 102574 - DNA, 74 bp, Homo sapiens
caaagactgcggagccacgtgggtggtcctggggcactcagagagaagggagagaaggtacccaaagggaaaaa

SEQ ID NO: 102575 - DNA, 99 bp, Homo sapiens
agagtcaccactgaacaatatcagaaagctgctgaagaggtggaagcaaagttcaagtcagaagagatcaattctacagaaatttccagtggttctgtt

SEQ ID NO: 102576 - DNA, 100 bp, Homo sapiens
ttcagtctataataaagagatgtgtgtgatgaatgcagactctgctaccattttggctgtttggatcctcctttgaaaaagtctcctaaacagacaggct

SEQ ID NO: 102577 - DNA, 83 bp, Homo sapiens
cacagcaagaacatcacccagcgcggcaacgtcgccaagacctcgggtctcggtgactgagctgcagactcacccggagctgg

SEQ ID NO: 102578 - DNA, 100 bp, Homo sapiens
cacgtgcaggcagcggcggatcatattccttcatctaccatggctcagccgggaactctgaacctcaataacgaggtcaatgtgacggtggactacatta

SEQ ID NO: 102579 - DNA, 50 bp, Homo sapiens
gaattttgccgatttcatgactaaccagtttctgcaggctgtacaggaag

SEQ ID NO: 102580 - DNA, 100 bp, Homo sapiens
ccagcaccggctccagtgggctctcaggggacctctctcaccacaggaagttgaatattggatcttaattggagaatcaagtagaaaacatcctgccatt

SEQ ID NO: 102581 - DNA, 75 bp, Homo sapiens
ctgggatcggcccaaggccagttctccgcagattgaagatggaaaatccccaagacattttctcaagtaatggtg

SEQ ID NO: 102582 - DNA, 82 bp, Homo sapiens
gtcattaaacccatcgacaagaaggcacctacaagaagctccgccacgcccgcagtggggcccccgctggagggcccagagc

SEQ ID NO: 102583 - DNA, 138 bp, Homo sapiens
tgggagcgacgcggggcgggccctgggggtcctcagcgtggtctgcctgctgcactgctttgggtattgcaggcaacaaggacctttcatacagggcagccacaccttgtccctgtaccacctcttcctgaatacgga

SEQ ID NO: 102584 - DNA, 50 bp, Homo sapiens
gaagaaacccagcttgatatgttgatcactgtgtccactactatgatctt

SEQ ID NO: 102585 - DNA, 76 bp, Homo sapiens
aacacctcactcggctcattcagaacagcaaggcctggctacagcaatatggctacctgcctcccggggacctacg

SEQ ID NO: 102586 - DNA, 75 bp, Homo sapiens
atgtgtgggacattcattgcggaataacatcggaggagaaggcacctgttcaccgaagttgaggctggtcacaac

SEQ ID NO: 102587 - DNA, 97 bp, Homo sapiens
acggagtgccctgtcctgccggagccgctgtgtgcaaagttcctattgatggtccccccatagtgaccaagaatatggcccaggtgaccaaagccct

SEQ ID NO: 102588 - DNA, 74 bp, Homo sapiens
gccaccgtcgccggccgcccgcacgtccgtccgggagagataatgcatgtgagaaaacttcatatatgtttcta

SEQ ID NO: 102589 - DNA, 82 bp, Homo sapiens
agaaactcacatgagacaaatgcgctcagcttcaattggatgagaacaagttgagcagtgccaacggccatgaagaacgtag

SEQ ID NO: 102590 - DNA, 51 bp, Homo sapiens
atgctgtccaaacttaaacatgatgctactatcattcacgatggccatgag

SEQ ID NO: 102591 - DNA, 83 bp, Homo sapiens
caggagtgctgccagaaatttgaacaactttccgaatctgcaaaagaaggtgaaaggaaagcaagccaggatggatatttacg

SEQ ID NO: 102592 - DNA, 74 bp, Homo sapiens
gactgaccgctgccgcccagcacgtccagttggagtcattcgttgcccagtttgcagccaagaatgtgcagaga

SEQ ID NO: 102593 - DNA, 100 bp, Homo sapiens
tccaacagtatccgaggatgacatatcctcctctacatggtcccatgagattcccaccttctttatctgaaacaaacaacttaattggcttagtgtcgac

SEQ ID NO: 102594 - DNA, 114 bp, Homo sapiens
gtgcgacaaggagttcatgtgggccctgaaaaacggagacttggatgaggtgaaagactatgtggccaaggtatctcagatgaagacatcatcaacattactcttcctactgga

SEQ ID NO: 102595 - DNA, 92 bp, Homo sapiens
cgacaaggagggcatgatcaacctcgtcatgtcctacgcggattttttatcaagcagaaatgcatcgaacaacgagaatcaagatcactgag

SEQ ID NO: 102596 - DNA, 51 bp, Homo sapiens
caatactacctttatttccaccataggacagtcattttgtttactcattca

SEQ ID NO: 102597 - DNA, 75 bp, Homo sapiens
cttcaccacaaaagcgaaatgggcacaccacaggctacccacctttctgttctgagacccctcaagagacatata

SEQ ID NO: 102598 - DNA, 77 bp, Homo sapiens
agaaaaagaaagaggacgatgatggagaaatcgatgatggggaaatagacagagtggagaaagcctcagagtttgca

SEQ ID NO: 102599 - DNA, 100 bp, Homo sapiens
gggagcttccgggagggcggctcgcagcctagaacattccatattctgcttcacacacggtgactcactcactactgctttgtaccagtgtgcccactcg

SEQ ID NO: 102600 - DNA, 98 bp, Homo sapiens
ctccgcaccgcggcttaaatgatgtattttgtgatcgcagcgatgaaagctggagaagaagcaggcgctccctccattccagccacagatcacagacg

SEQ ID NO: 102601 - DNA, 100 bp, Homo sapiens
cgataagcgctttcgcttggcgctgggcagcttcgtggaggagtacaacaacaaggtcagtcattggcaccatgaactggaataaaggtggtcctggcac

SEQ ID NO: 102602 - DNA, 50 bp, Homo sapiens
ggggagccccgggagccgcacggctatggtgaactaaacggtaatgctgg

SEQ ID NO: 102603 - DNA, 90 bp, Homo sapiens
gtcggcgcaggcccagatgcgcgcgatgctggaccagttgatgggcacctcccgggacgtttttgaagagccggaagatccaagcaacag

SEQ ID NO: 102604 - DNA, 75 bp, Homo sapiens
tgacttggtcaagctaggtttcaaggtacttaagagattatggcatcagaaacccacaatgttaaaaaacggaac

SEQ ID NO: 102605 - DNA, 96 bp, Homo sapiens
ggatcttgctcagtctctgtcagaggaagatcccttggttgcctgtggctggagaaaggaatgtgctcatcaccagtgccctcccttacgtcaaca

SEQ ID NO: 102606 - DNA, 100 bp, Homo sapiens
gtccccaatgcctacgacaagacagccttggctttggagatcacagattctgctggccatattctctactccaaagaggatgcaaccaaggggaaatttg

SEQ ID NO: 102607 - DNA, 88 bp, Homo sapiens
gaaactgaagcaaaagatcagcgaggagcagcagcagctccagcaggcgctggctcctgctcagaagtaaaagattatgagcctccat

SEQ ID NO: 102608 - DNA, 101 bp, Homo sapiens
gagaactatgtggcagatatcgaggtggatggaaagcaggttctcttacatctgatggaaaaaatttgtctcaggaaaaagaattgctgagtctcttttgc

SEQ ID NO: 102609 - DNA, 75 bp, Homo sapiens
gggaaattacctgaggacatcatgaaggctttatcctgtggataaacgcagagtgaacgagtttggggagtccta

SEQ ID NO: 102610 - DNA, 51 bp, Homo sapiens
gcgtacggccaagcagactccagccctgttcacagagacaccccatgacat

SEQ ID NO: 102611 - DNA, 100 bp, Homo sapiens
gagagagacctaaacatcgttgtccacgtccagcattatgagaacatggacacgagaacccccataaataatcttcgtgaccgaactagcagttgcccag

SEQ ID NO: 102612 - DNA, 97 bp, Homo sapiens
ggacagcgcccaagtacggcaacgccgagctcatggagaccggggatgtgttctagaacagatcagacattttgtaatgatgcctgaaataaacact

SEQ ID NO: 102613 - DNA, 82 bp, Homo sapiens
caacagtgctggtgtcgccaggctctggagcagttccatcagctcagccaggtcttgaatactcccccagttgcaagaggcg

SEQ ID NO: 102614 - DNA, 100 bp, Homo sapiens
aggacgtcctccgggcactcccacgaccaggttatcaatagtctggctgtctatcgtcatcgtgagactgactttggtgtaggagttcgagaccaccctg

SEQ ID NO: 102615 - DNA, 100 bp, Homo sapiens
tgaagtgggaaagcattttctctcataggtggcccagagtggcgagatccccccatcttgctgcaacttccccgtggctgtgtgccgggacaagatgttt

SEQ ID NO: 102616 - DNA, 73 bp, Homo sapiens
ccgagagcgcgaatatcgtcatcgttagaaggtattcaaaacctttgaccacatggcccgtcaggatgatgag

SEQ ID NO: 102617 - DNA, 80 bp, Homo sapiens
ccccaccatgtcagacgcagccgtagacaccagctccgaaatcaccaccaaggaggaggcctcggtggtaccagaagagg

SEQ ID NO: 102618 - DNA, 100 bp, Homo sapiens
aggagaagcagttcctgccggcgctgctgagtttcttcatctacaacccgcgcttctggccgcgggaaggagaggtcctgatccggttccccatgcagag

SEQ ID NO: 102619 - DNA, 86 bp, Homo sapiens
ggaaaacagagaaagaagtgataggagggctctgtagggggatatgagactttctactcggaatatcctgagtgttgcgtggatgt

SEQ ID NO: 102620 - DNA, 100 bp, Homo sapiens
atgcagtcatgaggttttctctgaagaccgtgaagccactttcactttttgacagtaagattgagaggatccagaatccagatctctggaatagctacca

SEQ ID NO: 102621 - DNA, 83 bp, Homo sapiens
aaggtgcagggcaacacctctacaaggatctgcagccatttatattgcttaggctactgttcgcggcgcggcggacatggcgg

SEQ ID NO: 102622 - DNA, 100 bp, Homo sapiens
aaaactgcagtacaggtttttgagaaagtgaaattcgttattctacatggaagaaagctgtgatgaagtcaatgggttgggttacaactcaatctccaga

SEQ ID NO: 102623 - DNA, 100 bp, Homo sapiens
acgagctgccacacggcctgcactctgcgctttgagctactgggctgtgagctgaacgagggccactgccaaggcgacaagtcaatattctgtaggatgg

SEQ ID NO: 102624 - DNA, 98 bp, Homo sapiens
gaggcgaggccggacgcacctctgtttgggggtcctcagactacgcgtttgttcacatggagaaggaagcagatgccaaagccgcaatcgcgcagctc

SEQ ID NO: 102625 - DNA, 100 bp, Homo sapiens
gtgctatacacaggagtggttcggaattccagaagattgccatggcaacagcaataggatttgctataatgggattcattggcttctttgtgaaattgat

SEQ ID NO: 102626 - DNA, 100 bp, Homo sapiens
agcaaccctgtaaaaccagccttagactatttttcaaacaactatgtcttcagcagtggtgcagttatatgcagcagatcggaactgtatgtggtcaaag

SEQ ID NO: 102627 - DNA, 74 bp, Homo sapiens
tagatggtgacactgcagttggatggtgccatgacaatggtgtgaactacaagattggagagaagtgggaccgt

SEQ ID NO: 102628 - DNA, 50 bp, Homo sapiens
ccgctgccccctaccaccccttcacttggtgaagcagcgcttgcagatgt

SEQ ID NO: 102629 - DNA, 100 bp, Homo sapiens
ggacaatcgcactttataccacctgcgattactgtatggcatttcaaatatagatacaaccattgaaggaacgtcagatgacctgactgttgtagatgca

SEQ ID NO: 102630 - DNA, 51 bp, Homo sapiens
gcaaagctggataaatacatgtatataaatgtgcctgtggctgccttgcct

SEQ ID NO: 102631 - DNA, 123 bp, Homo sapiens
ccaaggaaacgcggctgaccctgatggaggaagtgctcctgctgggcctcaaggaccgcgagcctcgtcacgtgttcaatatgctaaagaagtatgtccgcgcagaacagaaggacagacagc

SEQ ID NO: 102632 - DNA, 100 bp, Homo sapiens
caggtatcagcactgcaagcaccaagtgtgtcttgagctgcttttctaacccaaactgtatgtcttgatgacactacagtaaagtttgaaatatgggata

SEQ ID NO: 102633 - DNA, 100 bp, Homo sapiens
cctgtggtacaggtgcctgggaggctgttccccatcacgctggaaaaggattttggtctgagatgctgggcgtgggggacttctattacgaactaggtgt

SEQ ID NO: 102634 - DNA, 98 bp, Homo sapiens
ttgaagctcacctttgtctaaataaattgggctcgacacaggctactggacggccatcaaccacttcttcatctggggaagccttgctgtttactttg

SEQ ID NO: 102635 - DNA, 97 bp, Homo sapiens
gaagggagccaacaaaaattgttttttctacctgttgacgtgtcaagcactaactaatctacctgttactcgtattttggacaatcttatggagatg

SEQ ID NO: 102636 - DNA, 50 bp, Homo sapiens
gaaggattaattacacaaggtggaagcgatgccacctcagtatggacagc

SEQ ID NO: 102637 - DNA, 100 bp, Homo sapiens
ctgtggtctctgagagactgaagattcgaggctccctggccagggcagcccttcaggagctccttagtaaaggactcgggggactatcctctgacagctc

SEQ ID NO: 102638 - DNA, 83 bp, Homo sapiens
caggaacccctccgagacccagtccaaaaggagccttcacgtaaatgggtccagtcatgcctcccagtaagaagccagaaagc

SEQ ID NO: 102639 - DNA, 74 bp, Homo sapiens
aaatcatctgccccagctgtaataggactgcccatccactgagacataaacaaaatccagtctcatagcagagg

SEQ ID NO: 102640 - DNA, 75 bp, Homo sapiens
aaaggactgttcttgaggtattcagaggtcggaaaggtctgcttggaagccagacgaaacggctccacagagttc

SEQ ID NO: 102641 - DNA, 50 bp, Homo sapiens
gacgaactccgcaatgaggacgttcagggacccagacatggagctgcggg

SEQ ID NO: 102642 - DNA, 82 bp, Homo sapiens
cggtgctgaaggaccggctcaccggcctccacaaagccgagagggtgacctctctgggcaaggactggcatcggccctgcct

SEQ ID NO: 102643 - DNA, 98 bp, Homo sapiens
gatgacagacttggacaacatgtcccaacattacatcccagacaggaagatgtcacccaagcgcatagctaaaagaaggtcccccccagcagatgcca

SEQ ID NO: 102644 - DNA, 50 bp, Homo sapiens
cactgacctctacacctacccagccaccttttgtggtgacattggatgag

SEQ ID NO: 102645 - DNA, 51 bp, Homo sapiens
ctggaaagcattggggagcttttctcaagacgatgttaatatttcaagttt

SEQ ID NO: 102646 - DNA, 83 bp, Homo sapiens
tggttctggaatcctcagttcaagatgatctgcctcggatgcgattcaagtgcccgtactgcacacatgtggtgaagcggaag

SEQ ID NO: 102647 - DNA, 74 bp, Homo sapiens
acggggccaagatcgtgtccactcgtgcttggttgactatagtcaatggggccaatggagccaagtgtatggaa

SEQ ID NO: 102648 - DNA, 75 bp, Homo sapiens
caaaagcacacaaagacctcctcctccacaggggagacagagatctatccatactaatggaaatgtaactggaac

SEQ ID NO: 102649 - DNA, 100 bp, Homo sapiens
agccgcccgccccccaccgccgccccctccggcgtgttcatgcccccgggttccagggtctccctccactgctgtagtaacccgggtccggggcctcggt

SEQ ID NO: 102650 - DNA, 123 bp, Homo sapiens
ctccatcccgtgccctcgctctgagctgcgcctggacctggttctgccttctggacaatctttccggtattgttgcagcatctggcagtgagactgaggatgaggacagcatggacattccct

SEQ ID NO: 102651 - DNA, 83 bp, Homo sapiens
tgcagctacctgcacttctagatatctttgatgatgcgtacaaatcccagctcagttgtgtggttgtggatgacattgagaga

SEQ ID NO: 102652 - DNA, 50 bp, Homo sapiens
ctcgccatgtcctgctgcccggtgtgtgtctggggaagagacttacagaa

SEQ ID NO: 102653 - DNA, 75 bp, Homo sapiens
gcggaagaaaatacaaatcacacgcataatggatgaaaggaaccgacaggttagcatggcctcattgaaagaact

SEQ ID NO: 102654 - DNA, 82 bp, Homo sapiens
ggtggccctaggggcagcgagcaagacagcaagcagggtgaggtggctttgaccccgggttgcccggccagcacgaccgagg

SEQ ID NO: 102655 - DNA, 51 bp, Homo sapiens
aaatccccacaggagaaggaattgtgaaaactgctgagagagacttgcaat

SEQ ID NO: 102656 - DNA, 100 bp, Homo sapiens
gtggggtgtgtgagggccgagtgaaatcgtgcatttgcgccacttccggctcctgcgtcgctccggaagcctgcgagttccggaagccttggtaatccag

SEQ ID NO: 102657 - DNA, 75 bp, Homo sapiens
ggactctccgttattttaggagaaccccgagatgcccctgtccttcacaataagccgaggattctgggtgctgct

SEQ ID NO: 102658 - DNA, 90 bp, Homo sapiens
gcttttcgtaaagggaagtcatttctactggacttcatgcttagatacatgtataacaagaccattcctcaagaattttgtatccaaggc

SEQ ID NO: 102659 - DNA, 52 bp, Homo sapiens
agaaccgtcagtttgagccagatggtgtaccttcagttgaatttttagaatc

SEQ ID NO: 102660 - DNA, 82 bp, Homo sapiens
catgggcgcctcggccgccatggtcttcagcggtaactaggatttctacctcaaccgcgagacctatgcaaggacggtgtgg

SEQ ID NO: 102661 - DNA, 75 bp, Homo sapiens
acctctccagcggggacctgctccgggacaacatgctgcggggcacaggtgaccctggcagcaaccccaacaaac

SEQ ID NO: 102662 - DNA, 75 bp, Homo sapiens
tgggaacatgacgcaggtgcaggtgtctcttctcgccctggcggggaaggacggggaggtttactgcatcgacgc

SEQ ID NO: 102663 - DNA, 98 bp, Homo sapiens
atggggtctcactatattgcccaggctggtctcgaattcccgacctcaggtaatccacctgccttggccccccaattataggtgtgagccacagcacc

SEQ ID NO: 102664 - DNA, 111 bp, Homo sapiens
ctcgggacctcctgccgctgcgggcaggatccctggacacttacgtacaatggtggtttttccccatcatcggccacatgggcatctgcacatccacaggagtcattcggg

SEQ ID NO: 102665 - DNA, 75 bp, Homo sapiens
gtggacggaccccgggagcccagaccctgggactacggccagggcttcgtgaatgaggagatgatccgggaccac

SEQ ID NO: 102666 - DNA, 100 bp, Homo sapiens
gagtgaccggggcatctccaacatgctggatgtcaacggcctctgagcagtgaggagaatgaataccttccaagaccagagtggcagctccagtaataga

SEQ ID NO: 102667 - DNA, 74 bp, Homo sapiens
ggaagcagccgatccagcctgcggagcctgtggggcagatccggggatttctttcacggtttgataatgtcctt

SEQ ID NO: 102668 - DNA, 99 bp, Homo sapiens
tcgtaacattttatacaagaaaagctgcacttgaggcccagaatgcactgcacaatattaaaactttacctggggcagatgacctcagcaacccctttg

SEQ ID NO: 102669 - DNA, 99 bp, Homo sapiens
ccggccatcgactttcccgccgagggcccggaccccgaatatgacgattttcagctgaactctcatctctcaacactggcaaatattcataagatctac

SEQ ID NO: 102670 - DNA, 100 bp, Homo sapiens
tcagctgtgtgtccagaacgtgccatggagacgcttaacgggctctcacctttgtgtatccttttggtgccacattgagtgtcatgaaaccagcagtggc

SEQ ID NO: 102671 - DNA, 76 bp, Homo sapiens
gggacgcttcatcatgggcatagatggaggtttctaagcatgaattgaggaacagaagaagcagagcagatgatcg

SEQ ID NO: 102672 - DNA, 82 bp, Homo sapiens
tgcaaaaatgcggtccctgggatgccttcgcgtcttctcttccctcgggtgacttgagaaccacgaagctgccctgagacgc

SEQ ID NO: 102673 - DNA, 100 bp, Homo sapiens
aatgatgttggaaatgcacaagctggagcccaactgataatccttgaacatgggggatctttggatgtatataggaaaatgccagaacatgtccttggaa

SEQ ID NO: 102674 - DNA, 98 bp, Homo sapiens
ggacctgcatgtgtgtgcgcgcgaaggagcggaagaatggcagtgctcaaactcaccgaccagatatttagcttcctgtggtatactgatgagcagaa

SEQ ID NO: 102675 - DNA, 83 bp, Homo sapiens
ttctgagcaagagaatgggctgggcagcctgagtcccagtgatgaaggcgctgcggcacatgcctccactctctctctcacca

SEQ ID NO: 102676 - DNA, 75 bp, Homo sapiens
tttatggtgtttaatctaatacacttaagctgcagtcccaaaattagggggtgtgtccgcagccggccaggtggt

SEQ ID NO: 102677 - DNA, 50 bp, Homo sapiens
ccagaacaaccaggctttgtcaagactatacacacaaatccatgttttta

SEQ ID NO: 102678 - DNA, 80 bp, Homo sapiens
ggcggcgatttcgggagaatctcatctacgtacaggtttgcagattccgccagcagcacagcaagctctacagatgagtg

SEQ ID NO: 102679 - DNA, 82 bp, Homo sapiens
gcacggagttgcgtcccggggacttggggccgcagggagggactttgaacatgtcggggatcgccctcagcagactcgccca

SEQ ID NO: 102680 - DNA, 100 bp, Homo sapiens
ccgccattccctatggagcctacaatggcccagtaccaggctatcagcaaacacctccccaaggctgattcaccccaagagtggccgttcctaccacgag

SEQ ID NO: 102681 - DNA, 83 bp, Homo sapiens
cgacaagccgctggcagccgcggatctcaccgccgctcagggagaatgcagttgaaactaattttgtggatagagaaactgtt

SEQ ID NO: 102682 - DNA, 100 bp, Homo sapiens
gtcgattgcgtcttgtgcttagtgaactgttggcaattatgaacaagggctcgtcggaaaaaaagttctgctagaaaatttggtctacagaaactttggg

SEQ ID NO: 102683 - DNA, 106 bp, Homo sapiens
catcgagagaggcgccttccaggacctgaagcagctagagcgactactttgagagttttgacctgcctgaagagcaccagattgcgcacctccccttgagtggagt

SEQ ID NO: 102684 - DNA, 100 bp, Homo sapiens
atgtctgtctggctgctgcagtgacccagaccctctcctttccctttgagaccgtgaagagaaagatgcagcgggctgacgcacgaggcacacaggaagg

SEQ ID NO: 102685 - DNA, 87 bp, Homo sapiens
aagagaaaagaaatgaaccagtattcttaaattgatttcaagtttgaacaaggataaaagaatcagagtgtctcaacccttgacaag

SEQ ID NO: 102686 - DNA, 83 bp, Homo sapiens
aacgttctctcctgctccacgcatatttccttcacaaacagaaaatgaatgaaaataaagatactgattcaaagaaaagtgaa

SEQ ID NO: 102687 - DNA, 71 bp, Homo sapiens
cctctccagtcccctgcccctcacagcaacacggaggtagtcacgtttcccggaaatccgaacacttgagt

SEQ ID NO: 102688 - DNA, 82 bp, Homo sapiens
agacttcacagtttctgctctgcgtccagaggaccagaggttaatttattctgggaagctgttgttggatcaccaatgtctc

SEQ ID NO: 102689 - DNA, 90 bp, Homo sapiens
cttcctgcagaaggccgagaagctctacccactgccctcggcccgcggattggtccaaaggaagattttttccattgtttgaaatgtaac

SEQ ID NO: 102690 - DNA, 100 bp, Homo sapiens
gatctgccgccgggttgctgtgcgactattctccgggagccgtccgtgtcaccgccggaacctggcgcagaagatgggtgtgaacctgacacgcagcaac

SEQ ID NO: 102691 - DNA, 100 bp, Homo sapiens
ctactagtagataggactcttggtttggacatactacatggatcagcaatcccacagagtattgatgaggaaactgaagtttggagcgatcacatcattt

SEQ ID NO: 102692 - DNA, 75 bp, Homo sapiens
gcaaggtgatcttgagagtgacaggccatccctctagacgagaacgagggcatctatgtgcaggatgtcaagacc

SEQ ID NO: 102693 - DNA, 97 bp, Homo sapiens
ggcccaggaggcagtggagcagcagctccccacgctgcatcatgagtgcagccggctgcaggagcagctagcgcagtggagacggggtttcactgtg

SEQ ID NO: 102694 - DNA, 82 bp, Homo sapiens
tcgccctgcccgtcgccaatgacaggctccataagacgttcagtcagctgccctcggtccatctctgctcaatcaccttcca

SEQ ID NO: 102695 - DNA, 100 bp, Homo sapiens
ctcttcatctacaacccgaccaccggagaattcctggggcgcaccgccaagagctggggtactacatgaggcctgttcttgcggcccatgtgttttctgg

SEQ ID NO: 102696 - DNA, 98 bp, Homo sapiens
atcatcactttcattgtctcggacgtgcggggcctgggcctcccggtccgcaagcagcaattctgtggtgttcttggtcacacatttatggagtttct

SEQ ID NO: 102697 - DNA, 100 bp, Homo sapiens
ggcagcgacacaattgtctgtgacagtaacagtacttgggatcccccagttccaaagtgtcttaaagagatccgtgctcagctcacagagcagatgaaat

SEQ ID NO: 102698 - DNA, 96 bp, Homo sapiens
gggaaacctgctcagccccgacaatgtggtccggaaacaggcagagttagaacctggcccattagatgaaacccagatcgctactatattaagaga

SEQ ID NO: 102699 - DNA, 74 bp, Homo sapiens
ccaagcccgagaagacggaggaggactcagaggagataatgtacaacggccagccaattaccaaaatggcctgt

SEQ ID NO: 102700 - DNA, 95 bp, Homo sapiens
gttcaaaggggaaaattactgatacagagacgatggtcggaatcagatttgaaaatgaaagtacacagcaggatgccaatgcctcttccctctta

SEQ ID NO: 102701 - DNA, 96 bp, Homo sapiens
ctgttgtgtccgaccgagagtcctggtgactttgaacatgctggtgccgctagccaagctgtcctgcctgggctgaacaagctccaaacacttgtg

SEQ ID NO: 102702 - DNA, 74 bp, Homo sapiens
ctcgcgctccaagctccctgcggggaagaacgtgctactgctgggtttaactatagatcaacacatcatcttgc

SEQ ID NO: 102703 - DNA, 78 bp, Homo sapiens
gcagctagcaaggtgacccatgcattggttaatatcagctcttttgtgacagggacggcttgttgcgggcacttctca

SEQ ID NO: 102704 - DNA, 100 bp, Homo sapiens
gtcaagtgcagtacctggatctcatcaaaaaggacaccagcaagctgttcaatgaggagaaatgacgctcctctcctcccagtcttcatcactggtggcc

SEQ ID NO: 102705 - DNA, 76 bp, Homo sapiens
ggttgatacagcagagacgtcatacttggaaatggctgcaggttcagaagaatggatcttggagaatgtctgaaag

SEQ ID NO: 102706 - DNA, 101 bp, Homo sapiens
aaagcagcaggatggtcggaattaagtgagagagatgccatctacaaagaattctccttccacaattttaatcaggtgccaggattgctgagtattcccag

SEQ ID NO: 102707 - DNA, 100 bp, Homo sapiens
gcgagctgagtggttgtgtggtcgcgtctcggaaaccggtagcgcttgcagcatgatacaaggtctcgctgttctacctaggctgttctagaactcctaa

SEQ ID NO: 102708 - DNA, 75 bp, Homo sapiens
tgtaccatccgcctgtgggacacctaccagggtgctttcttctgcgacctggtactcatctacctcatcaaaaag

SEQ ID NO: 102709 - DNA, 50 bp, Homo sapiens
ggaatgacaaacaaccagctcttcagggtttcccaaactctcgattgcct

SEQ ID NO: 102710 - DNA, 75 bp, Homo sapiens
ctggtggccgaagccgtagtgggagtattgtggaacttatagaaagcaagggcggaccatggtttgattccagat

SEQ ID NO: 102711 - DNA, 90 bp, Homo sapiens
acatcatttacggcatgtacttctgcatgaacatctccagccaggcaatcagccatgactgcctttgcactgtccatgctctcagcccac

SEQ ID NO: 102712 - DNA, 75 bp, Homo sapiens
ctctgaggggcttagaaattaacaggtccaagctggcagcgtttctgctcataaaacattctgaagaaccttgtg

SEQ ID NO: 102713 - DNA, 90 bp, Homo sapiens
gcaaacctatgagctctgctgtgatatgatagatgtggttattgacatctcttgtatttatggggtctcgctctgtcgcccaggctggag

SEQ ID NO: 102714 - DNA, 100 bp, Homo sapiens
cgcttcatcgagctgcctttacaggacgaaagatcttcagtcgtgctggtgaagcctgcaaaaaggtgatacttaatgtaccttctaaactagaggcaga

SEQ ID NO: 102715 - DNA, 83 bp, Homo sapiens
gccagatggtgttacctggagcttaaaaagctgcacgcaagtgttaaacttctgggctccacgtgttccccacgtttgtggcg

SEQ ID NO: 102716 - DNA, 100 bp, Homo sapiens
ctttgattaaagacattcgggagaatgggatgaaggatgagaaatactggagccggcggtacaagaacaacgaggcagccaagcggtcccgtgacgcccg

SEQ ID NO: 102717 - DNA, 100 bp, Homo sapiens
tcaccatcatcaagacggaaaaagtcgatctggagcttttcccctccccggacttgggaagatccccatgaaaaagataagagcacgaactgctttggag

SEQ ID NO: 102718 - DNA, 75 bp, Homo sapiens
atttattacaaagtgaagaaaacaagaacttggatttagagccatgtaccggtagcaaattgcttcaggagttga

SEQ ID NO: 102719 - DNA, 97 bp, Homo sapiens
gctgaggcttatttgggaaagaaggcccagaccacactgaccacaaatgacattgtcattagcaagctgacccagatcctttcatacctgaggcagg

SEQ ID NO: 102720 - DNA, 100 bp, Homo sapiens
cccagggtctggcatacagatgccgtgtttgtaaggccggtcagtacggcgtggcccagactaggaggcgggccatcatcctggccgcggcccctggaga

SEQ ID NO: 102721 - DNA, 95 bp, Homo sapiens
caagagctggatctcgtctttctgccaggacgactggaatgggaccaggccgtcgctgaaggcccctcctgctaggccagtgaagggagcataca

SEQ ID NO: 102722 - DNA, 99 bp, Homo sapiens
tggaaaagtgcattgcttattctccaccttttggtgattatgcacagtatttcactggccttgaatgtggacataagttttgtatgcagtgctggagtg

SEQ ID NO: 102723 - DNA, 87 bp, Homo sapiens
tgacaccattgcagaaggaataaccttcatcaagttttatgctccatgagcaaattggtcaggagatgttggaaaaccttagtcatg

SEQ ID NO: 102724 - DNA, 100 bp, Homo sapiens
caagaatggacttctagacatgaacaagggcctcagcctgcaacacataggccggccccacagcggcattggctttcatctgagtggcacagtaactgag

SEQ ID NO: 102725 - DNA, 80 bp, Homo sapiens
ggagaatccaccgccatccgccaccatgttaccggtattgtaagaacaagccgtacccaaagtctcgcttctgccgaggt

SEQ ID NO: 102726 - DNA, 97 bp, Homo sapiens
aggttcttgccagatgacaatggccacaatgctcttcttgggctctctaaatacgtacagattctgcgataatgtgtggacttttgtactgaatgat

SEQ ID NO: 102727 - DNA, 100 bp, Homo sapiens
ggtgcggatacgacccatgaaccggcgaggtctgccatcatggatgttctcgcagaagcaaatggcacctttgccttaaaccttttgaaaacgctgggta

SEQ ID NO: 102728 - DNA, 100 bp, Homo sapiens
agccccgaggtgtgcgaagccaccaaggagcgcttgtgagtgccttggctgatgacaccttacacttatggaatttacgtcagaagaggcctgccatact

SEQ ID NO: 102729 - DNA, 83 bp, Homo sapiens
gcggccaatcacagtccactttggacagtgtgtaaaggttgccataaaggacaaacaagtgaaatacttcatacattacagtg

SEQ ID NO: 102730 - DNA, 98 bp, Homo sapiens
gaacagagtgctgttttagagctggcagcagcatctcagcccaagagaagcaaattgctcgaccctcgcaagaagaaaaagtagaagaaaaagaagag

SEQ ID NO: 102731 - DNA, 100 bp, Homo sapiens
ttctgaaaacatcagaagtgcccatattgctggtgaattcaaagagcagttacaggcactgataccgtatgtattaaacccatctaagttaatggaaaag

SEQ ID NO: 102732 - DNA, 97 bp, Homo sapiens
acatctacttggaaatctttgggatgctcaatgcctcgtcacgtgttcaatatgctaaagaagtatgtccgcgcagaacagaaggacagacagcaca

SEQ ID NO: 102733 - DNA, 98 bp, Homo sapiens
ccggtgttcccgcgctttatcaagattatcgagagaatggcaaatcggttcattggaaacttggagctgataaggaagtctgggtatgggtgatgggc

SEQ ID NO: 102734 - DNA, 100 bp, Homo sapiens
ggaggattcattgaggaagaaaaagaagacttgcttcagcatttctcactttcccatggtttggcatggacattgggggaactctagtaaagctctcgta

SEQ ID NO: 102735 - DNA, 90 bp, Homo sapiens
gcgcacttggaatagtagcaggcggcggcggcggaacgccaggcaggtgctgtgtagcatcaattcaattatccacaatccaagagctcc

SEQ ID NO: 102736 - DNA, 82 bp, Homo sapiens
gcgcgcagggcctgcagcgggagctggacggcgagcgcgagcggcgcgagaaagcattgaagttgatatcgatgtggagcac

SEQ ID NO: 102737 - DNA, 51 bp, Homo sapiens
atcgtcaccctcatggtcgctccgaaccaaaaacttttgctagaaaatcag

SEQ ID NO: 102738 - DNA, 50 bp, Homo sapiens
agaatgaacaaacattgagagcagaagaccctctacactcaggatgcccc

SEQ ID NO: 102739 - DNA, 98 bp, Homo sapiens
catcacccaccaacaacaccacaataatccacagccaagttttagccataaaatctctgccacagaccattgttcctgattcaagcgaaatatttttt

SEQ ID NO: 102740 - DNA, 126 bp, Homo sapiens
gaccgagaccgtgaccgagagcgtgaccgagagcgcgaatatcgtcatcgttagaagaagaagctcattcacacagaagacccatttaatgatgaacatcaggagaggcaagaggtggaaatgttg

SEQ ID NO: 102741 - DNA, 115 bp, Homo sapiens
gtcaaagttggttacaaaggcatatgctgacacacagtggagacaaacctttcaagatgtgtatatctcatgattgatatggagaaactagtcatgggccaaaggtcaagatact

SEQ ID NO: 102742 - DNA, 75 bp, Homo sapiens
cacttcagtgacatcagtgctttgacagggggaactgttcatcttgatgaggtcctccttccccttccctcttag

SEQ ID NO: 102743 - DNA, 74 bp, Homo sapiens
gaaatgcaaagactgtgaggagaggctttggaggagaagatacggaccacggagacacaggtgcttgtggcatc

SEQ ID NO: 102744 - DNA, 98 bp, Homo sapiens
gctcgcttcacggaggcaatagctagccggctggtgcagtggtgtcatcttggctcagtgcagcctcgacttcctgggatccagcgatcctcccgctt

SEQ ID NO: 102745 - DNA, 90 bp, Homo sapiens
ttcttgagggctccccagccatgcttcctgtacagcctgcaaaactgaaagatatggagagagatttgaaggctgactcaaacatgccac

SEQ ID NO: 102746 - DNA, 100 bp, Homo sapiens
cgggagcgctgcggaccctgctgccgctgctggcggccctgcttcaggcatcaagcatgatggaaccatgtgtgatacctgccgccagcaaccaatcatt

SEQ ID NO: 102747 - DNA, 82 bp, Homo sapiens
aggaagaatccactgatagaaatcatttccatcaataccgggtcaaaatgcagatcttcgtgaaaacccttaccggcaagac

SEQ ID NO: 102748 - DNA, 75 bp, Homo sapiens
cggaggcagagcggctgccatgactgtgccctgtccacggtgcctcctgcatgtcctgctgccctgagctgtccc

SEQ ID NO: 102749 - DNA, 100 bp, Homo sapiens
gcgccccggagaacaccttgcccactcccatggtcctgcagagatgccatggacaatattaccaggcagaaccaattctacgatacccaagtcatcaaac

SEQ ID NO: 102750 - DNA, 98 bp, Homo sapiens
attttcagatattttccgacgagcatttgcttcccgagtatttcctccagagattgtggagcagatggtttctggcccccaaagacaaaccaagtgga

SEQ ID NO: 102751 - DNA, 75 bp, Homo sapiens
tggcaacgtggctcatcagcagcttatccagggcaattgaaggaacagactaaaaatcgtgtcctggaaggaaac

SEQ ID NO: 102752 - DNA, 101 bp, Homo sapiens
atggaaatatggtcaacatgcatgcttctgtcaaaaacaaggttctggaaacaactgggcatatggtacaacagggtctggattcccgatcctgaagaagt

SEQ ID NO: 102753 - DNA, 75 bp, Homo sapiens
ggaaacctttccaacacagatgtccaagctgccaagcctggtactgtggcgctccgtgaaattagacgttatcag

SEQ ID NO: 102754 - DNA, 49 bp, Homo sapiens
agcctcctgaatagctgggactacaggtcctctgtgtaaataccgccat

SEQ ID NO: 102755 - DNA, 88 bp, Homo sapiens
tcaggaccccttgggcaagcaagggtaccagcttagacagggagaaaaaatcagcatcttggattacacggatacgaccagagcttgt

SEQ ID NO: 102756 - DNA, 97 bp, Homo sapiens
gcggccatggacctggcggatccggcctgccctggcccagctcaacacctgatttcggtcatttcttcagatagctccccagctgtggaaaatgagc

SEQ ID NO: 102757 - DNA, 98 bp, Homo sapiens
gcacggagggagcgggccaaggaggaggcagagtggcagacgagctcccggagccagtcggcagcggtcaccccgtcatccaccacctcttccacccg

SEQ ID NO: 102758 - DNA, 100 bp, Homo sapiens
gcacactgccttaatggaggcctgcatgtgattcgcctttgccagtctcatctcgtgtctgctttgttaagttccatgatccagactcagcagttgtggc

SEQ ID NO: 102759 - DNA, 100 bp, Homo sapiens
tgtgaaactgctttctaaaacaccagaactcaacctgctgaaagtgcccactacggaaaagccaacagtgactgtgaacttccgaaagctgttgttgaat

SEQ ID NO: 102760 - DNA, 75 bp, Homo sapiens
ctttggagaccttctgagattagagcgactgatattattgctggattcctatataccattttaatcttagctgtc

SEQ ID NO: 102761 - DNA, 83 bp, Homo sapiens
tgaagatcggcgagggaggacagggggttcatcatgggagccttcacgtaaatgggtccagtcatgcctcccagtaagaagcc

SEQ ID NO: 102762 - DNA, 90 bp, Homo sapiens
aacatgctttggtcacgaatgttaaaagacaacaaaaagaattggagaagagtttataagagagcagcacttgaggcatgtcacaagggc

SEQ ID NO: 102763 - DNA, 75 bp, Homo sapiens
tttccaaaaggtcaaggttcacaagggccatgtgaaactttctgactttggtctttgcacaggactgaaaaaagc

SEQ ID NO: 102764 - DNA, 90 bp, Homo sapiens
cccggcccgcgttcctcccgccggccccaaagacgctaaacgtgccctactctgccccgggggagagtggccacgtggcgctatggcggt

SEQ ID NO: 102765 - DNA, 50 bp, Homo sapiens
attgaaaaaatggttgacctcacccaggtgatctgtgaaaatggttcgct

SEQ ID NO: 102766 - DNA, 88 bp, Homo sapiens
agcccaagtacaaaggacggagcaccatcaacccgtccaaggccagcacaaacccagaactgataaatttcaaacggaagagagtggc

SEQ ID NO: 102767 - DNA, 100 bp, Homo sapiens
ggcaccagtggcctggacaacagacctctgtttggggagacgtccgccaagaagcggatgaaatagactcagaagatagtattgaacctccacataaaag

SEQ ID NO: 102768 - DNA, 74 bp, Homo sapiens
tccctgtgcacaagtggtgcatcaggtacatgtccagggccgccgggtccccttccccattgccagcccctgac

SEQ ID NO: 102769 - DNA, 82 bp, Homo sapiens
cattttactgtcaagacatttcttcggcattctgcaacagggggatatgagactttctactcggaatatcctgagtgttgcg

SEQ ID NO: 102770 - DNA, 100 bp, Homo sapiens
ggctatctcgtgcttccagtgtttggctctgtgcgaaacagaggctgaccggttccctgatgtgttacctgcttctgctactgatccaaactgcagaact

SEQ ID NO: 102771 - DNA, 83 bp, Homo sapiens
tatctgtcttcggtggactccttcggcagtccacccaccgccgccgcctcccaggcctctcggccccgactcagcatcccctg

SEQ ID NO: 102772 - DNA, 100 bp, Homo sapiens
aaagaaaaagattcctttcttggcaactggaggtcaaggcgaatatttaacttatatctgcctgtcaggattgtctcaaagcttgccaggagcagattga

SEQ ID NO: 102773 - DNA, 90 bp, Homo sapiens
cttggcagaaattatattttccagcccgtgtctgcaggaaaatgtttataggaggccttagctgggacactacaaagaaagatctgaagg

SEQ ID NO: 102774 - DNA, 82 bp, Homo sapiens
tctggatgggaagttacggtttacagcgaagtccacccagcgtttccgaggacgactgggtttggattcagaagaggattat

SEQ ID NO: 102775 - DNA, 74 bp, Homo sapiens
gggactatcctctggaggctgtgcgcatgcagcacctgggttattttggagctgttggagcactccttgagctg

SEQ ID NO: 102776 - DNA, 100 bp, Homo sapiens
cttcctcctgtcccacttgcacagaagtactttgaacttttccctcaggagcgaagccccctttggcagtacataccgagcatcaaatattaaggcaccc

SEQ ID NO: 102777 - DNA, 75 bp, Homo sapiens
cccagatccatttacactttacaagctggactggccattatggaggaggagctgcagcattcccattgtgtgaat

SEQ ID NO: 102778 - DNA, 82 bp, Homo sapiens
atgctatgctggaagaccacatcagggcgcttgaaagctctacagtctgctggagaggatcaacccggaccacagcttccct

SEQ ID NO: 102779 - DNA, 83 bp, Homo sapiens
agggttcaggcaatgcaaataaggctttccttaaagtttcccatgtctcaatggactcctgaatataacgagctctacacctt

SEQ ID NO: 102780 - DNA, 83 bp, Homo sapiens
ccactgctgcctctacttcatccccgccaccggccactcgagcaggccgggctctcgccatgggtcactgtcgcctctgccac

SEQ ID NO: 102781 - DNA, 74 bp, Homo sapiens
gcctcgctggggcggggaccttgccttgcccgggctgcatccagatctcattatgcatcagaaaaatgaaaaaa

SEQ ID NO: 102782 - DNA, 83 bp, Homo sapiens
ggagaagctcagcgcagccctgcaggccaagcgcagcctccaccaggatgaccgagtgggagacagcagcaccagcggtggca

SEQ ID NO: 102783 - DNA, 100 bp, Homo sapiens
cggccagtggcgacagcaggagctgagcctaagccctggcggggctttgggctgtagctgtggtcgccaggacccccccagagccaagaccttctccaga

SEQ ID NO: 102784 - DNA, 100 bp, Homo sapiens
catagggagcttttggagagcaactttactttagtggggctcgtcggaaaaaaagttctgctagaaaatttggtctacagaaactttgggagtggtgctt

SEQ ID NO: 102785 - DNA, 96 bp, Homo sapiens
atgtcaaacatcattttccttgtaaagaagtaaaagaaagtggacacatgtttcccagccacagcatgttccgaagagatgattggaagatggaag

SEQ ID NO: 102786 - DNA, 76 bp, Homo sapiens
cctatgttgccctgagttacataaatagggaagtttggttggcttagtggattatccagatgatgaagaggaagat

SEQ ID NO: 102787 - DNA, 98 bp, Homo sapiens
tgaatgggaggcattgatcatgtatccagctcacatagaagacattgactacgaggaaggaaaagtactcatccatttcaagcgttggaaccatcgtt

SEQ ID NO: 102788 - DNA, 101 bp, Homo sapiens
gacgcgttcatgcttggcatggggatgctggcctaatgcatggaaagctaacaggatggagcacaagtcaggatccctttcctctagccgggagtctgctt

SEQ ID NO: 102789 - DNA, 74 bp, Homo sapiens
tgcaaacatagagaattctgggcttccacacaactccagtgctaactcaacagtgacagacatcacacctccag

SEQ ID NO: 102790 - DNA, 75 bp, Homo sapiens
ccactcccagacaccattgaccagatgctaagagtcaaagggtggcagcacaccctgggccccccactccccgcc

SEQ ID NO: 102791 - DNA, 75 bp, Homo sapiens
ttcaagtacgtctcagggtcttcagccgagaggagggcagcccagagccggaaacatgtccttcgataactccct

SEQ ID NO: 102792 - DNA, 100 bp, Homo sapiens
aaggaactgaaggacttcctccccagcctttgggcttctatccgcagagagatgactgtccaagtgcctccaaagtgtacaaagcatcagattcagcaga

SEQ ID NO: 102793 - DNA, 100 bp, Homo sapiens
gagttgaagttaatggagaacatgcaacagtacgttttgctggtgttgtccctcccgtggcaggtttggtgcacctcgatttggaggaagtagggcaggg

SEQ ID NO: 102794 - DNA, 100 bp, Homo sapiens
gcgttctgagccgtctgtcctgcgccaagaggctgtggccaggccagctgggctcggggagcgccagcctgagaggagcgcgtgagcgtcgcgggagcct

SEQ ID NO: 102795 - DNA, 75 bp, Homo sapiens
ggcctctccagccatgtggaactaacttgaagccaccatgggagatgaagattgggaagcagaaatcaaccctca

SEQ ID NO: 102796 - DNA, 100 bp, Homo sapiens
ccgagggccaccccctggtcctctgccctcgcgccccgctagggccaggcttgcttccggcgtcatggctcaaagggccttcccgaatccttatgctgat

SEQ ID NO: 102797 - DNA, 50 bp, Homo sapiens
gacaccgtgatcctgcaggttgcagctatcgccaagcccaggccgcagtg

SEQ ID NO: 102798 - DNA, 89 bp, Homo sapiens
cggagacttttggggggaaactaggtcgatggtcggcggcgcccggatgggcagctgaggacaacttgcctttgatgattttcaagaga

SEQ ID NO: 102799 - DNA, 100 bp, Homo sapiens
tcctccaggtttgccatcttcacttttctgggagaagaggctacaaggacttagtgcatcagatgtaacagaacaaattataaaaaccatggaactaccc

SEQ ID NO: 102800 - DNA, 104 bp, Homo sapiens
gggaacccgcggtggagcgggacacgaacgtggcctccggtgtggctgtctctgatggtgtcatcaaggtgttcaacgacatgaaggtgcgtaagtcttcaacg

SEQ ID NO: 102801 - DNA, 98 bp, Homo sapiens
ggtgaaggccaagttctgtgaggcccccggcagctgcgtggctgtgcactgcgtggcgggcctgggccggaaagaccacagcaagattctttcattcg

SEQ ID NO: 102802 - DNA, 100 bp, Homo sapiens
agagggtcctggtactactgcttgctgtggcatttggacatgctttagagagaggccatgaagaagatgtacaaggcgtgcctcaagtaccccgagtgga

SEQ ID NO: 102803 - DNA, 100 bp, Homo sapiens
ccggctggtgcccgagtcggccaagcatgggcaaccactcaggacggcccgaggatccggaaccaggcaaaacccatttatggcggttggctgctcctgg

SEQ ID NO: 102804 - DNA, 74 bp, Homo sapiens
tgaagaccaatattcaacaggcacttaaagaaagtggttattgtacaggtcatgaaccagattccctggagttc

SEQ ID NO: 102805 - DNA, 50 bp, Homo sapiens
caggaaccacccctccagttaaggatggagaagatgaaagtgcagagcat

SEQ ID NO: 102806 - DNA, 83 bp, Homo sapiens
gaggcggcgcgccctgcaagaggtgctcttacagcctgttccaagtgtggcttaatccgtctccaccaccagatctttctccg

SEQ ID NO: 102807 - DNA, 100 bp, Homo sapiens
gacaattccatttggggaccagagatggacggtcactcagcctatggaggtgcaagaattgtttatccgtgattatggagagatttttaatgtccagtta

SEQ ID NO: 102808 - DNA, 100 bp, Homo sapiens
cctccgccagccgacagacacagccgcacgcactgccgtgttctccctgcggctcgactccttaccaagtccacacgactgacgatgacacggaatgcag

SEQ ID NO: 102809 - DNA, 74 bp, Homo sapiens
cacgccctgcatcgagcagctggagaaggactggaaggatcaccagcacatatgcggccagtcagcagctgtca

SEQ ID NO: 102810 - DNA, 74 bp, Homo sapiens
cttcagatagctccccagctgtggaaaatgagcatcctcaaggatcaagtcttccataccagggaccaggccaa

SEQ ID NO: 102811 - DNA, 100 bp, Homo sapiens
tgggacactcctgaagtcgggaaatggagtacttcttgcaagcagagctgacaagcaacgtcttaaaaacaggcgtggtgcgctgctgcgtgggacagtg

SEQ ID NO: 102812 - DNA, 107 bp, Homo sapiens
cagcaattgcccttaaaacatcatccctgccctggatcggcctggagccagtgcccaagtacggtttggtcctgcaaccctggttccagtctggcaagcattgtaga

SEQ ID NO: 102813 - DNA, 83 bp, Homo sapiens
aaggctatctcgctatcgatgaggtgaaggtgttaggacatccatgtagccccttcacagatgtagtcactacaaatcttaaa

SEQ ID NO: 102814 - DNA, 73 bp, Homo sapiens
tgcaaaaacgaaagcaactggagctcaggctggagaaggagtacgcagccatgaagagcaaggagatggagga

SEQ ID NO: 102815 - DNA, 80 bp, Homo sapiens
cgcgagagggggaaaagcgagcgatcgagcgagcgcgcgcgcgaaaactccgggcaggggtcgggccccggctcagtggt

SEQ ID NO: 102816 - DNA, 116 bp, Homo sapiens
atggactacgcgacctccaaggatgcccgtgagcctgttgtcggggccagtgtactaatggtcacttgatgtgcgctggctgttttatccacctactagcagatgcccggctgaag

SEQ ID NO: 102817 - DNA, 100 bp, Homo sapiens
aagtgtttgggcaggatgagatgatcgacgtcatcggggtgaccaagggcaaaggctacaaaggggcctttttatcattgatgataagggtattcttcgg

SEQ ID NO: 102818 - DNA, 83 bp, Homo sapiens
gggaccggtgtctggcggatgcggtcgtgaagatagggccgcgatgggcctcttggaacattggtgtgttcatctgcattcga

SEQ ID NO: 102819 - DNA, 90 bp, Homo sapiens
ggagcaggccacacaggcacaggccggtgagggacctgcccagacctggaggaatgtatcctgtcaggtataatgtcagtgaatggcaag

SEQ ID NO: 102820 - DNA, 103 bp, Homo sapiens
gctcgggagattcagccgtgaagcaagtgcagatagatggccttgagaactatgccatttttgggtcaggactggagatctcctggatggagttggattaaga

SEQ ID NO: 102821 - DNA, 100 bp, Homo sapiens
atccgttggatatccacaccatccttctcgctgcaggccccgacgaagacccatcatgagcaaccacacagctacgcacattctgaacttcgccctgcgc

SEQ ID NO: 102822 - DNA, 74 bp, Homo sapiens
cttcgagaaatctcgtctcgaccaagagctgaagctgatcgggtggggcacacctgctgcacacagggatgaca

SEQ ID NO: 102823 - DNA, 50 bp, Homo sapiens
cctctctgcgcccaaacggatctagtatctcccatattcatgttgcactt

SEQ ID NO: 102824 - DNA, 100 bp, Homo sapiens
ctcctccgggccgtcgtcttcggtcggtttttcatcctttgatcccgcggtcccttcctgtaccttgtcctcagccgcggcgagtcctttgcacatgttg

SEQ ID NO: 102825 - DNA, 80 bp, Homo sapiens
ctgaattctgtggattttcgtctaaaaataacaagaatgggaggagaaggaatgttggctcaattaagaaacatcaggga

SEQ ID NO: 102826 - DNA, 97 bp, Homo sapiens
ttggcatgggctacaaggaaaacgaccactttacctgcattgtgaaggtactttttaccctactgtacacacaggctcttgcagcactctcagttaa

SEQ ID NO: 102827 - DNA, 82 bp, Homo sapiens
ggcctcggcctccccttggattcagacgccgattcgcccagagcaaacgaggcccctgagagctccacctagttcacaggat

SEQ ID NO: 102828 - DNA, 98 bp, Homo sapiens
ttatagccagcaccatctctgctgttagatttatcagcaagactgttgaacgcataactgcccaagatgcctgtccctccccctccagcacccccgcc

SEQ ID NO: 102829 - DNA, 117 bp, Homo sapiens
cggcgagctgggtggtctggagaccatggagaccctcacggagctgggcgacgagctgaccctgggagacatcgacgatgaaggatttgggggcagagcacttggcaggtcatgaag

SEQ ID NO: 102830 - DNA, 101 bp, Homo sapiens
gtcggtgaccgcgcgactcggcgcccgcccgcgtttccaggttaactaaggtctcagctgtaaaccaaaagtgagaggagacattaagattttcattctta

SEQ ID NO: 102831 - DNA, 78 bp, Homo sapiens
cggatcctgctggtgggagaacaatttcgctaaggagtttgtgatcagtgatcggaaggagctggaggaagatttcat

SEQ ID NO: 102832 - DNA, 98 bp, Homo sapiens
ttttggagaacaaagcagggatttcattcatcattaagagtggaatcaactatgaaattataatcatagatgatggaagcccagatggaacaagggat

SEQ ID NO: 102833 - DNA, 74 bp, Homo sapiens
ccgtgtaccgctacccgcccaagtccggtctgctgagaacagacccagtccctgaggaaggagaagatgttgct

SEQ ID NO: 102834 - DNA, 75 bp, Homo sapiens
gtctgggccttttgggcagcttttccggcctgacaacttcatctttgtggtgaactatgacaatgtagtggacac

SEQ ID NO: 102835 - DNA, 75 bp, Homo sapiens
caaaaagatggccaagaactaagtaacgatctggatgcccaggatgaccggaaagaagggatgaccgcgtttgtg

SEQ ID NO: 102836 - DNA, 121 bp, Homo sapiens
tgacaatctctctccaccttttgtcaattccagaatacaaagtgtgggccatgtttgaggattgccccagcattcagttctatgagtaataaatatccacaggctgttttcttggaagtcg

SEQ ID NO: 102837 - DNA, 100 bp, Homo sapiens
tgaacggcgactgccagtggatcaccgcgctgcactacgcctttcaggacgagaaccacctggtggtacagaagttggtcctgccctttgggcgactgaa

SEQ ID NO: 102838 - DNA, 100 bp, Homo sapiens
cagcaagctcgagttaaagttggatgtgctggaacaggatccattctggaacagaatgaagaagccactgcaccttttggattgtatacatgtattattg

SEQ ID NO: 102839 - DNA, 75 bp, Homo sapiens
taccagagcatggtgctcttcttcttcgagaattacaccggggtccagctgtgagaaaaagccctgagctgtctc

SEQ ID NO: 102840 - DNA, 100 bp, Homo sapiens
cagtagctggatcctttgataatgaaggcattgctatttttgcacttcagttcacatactatttatggtctagagcatgtttggaaaggattcaagaatt

SEQ ID NO: 102841 - DNA, 82 bp, Homo sapiens
gaagctttggatcagacttttgtgttgcagttcgggccacaccatgaggccccagccccaccagaggccccgcgctgccctg

SEQ ID NO: 102842 - DNA, 100 bp, Homo sapiens
tcagaaggatatcgacgtcgtgatccagaagtccagagctgaggactgcctgtttgcagatgctgaagtgcattgagctggatgagcggctgaaagccat

SEQ ID NO: 102843 - DNA, 100 bp, Homo sapiens
agatgatgtaacataccaagtctatgaggaacaaggacacaccatgctgaccggggtgaccgacggtatcttctgttgcctgctgggcacgccccccaac

SEQ ID NO: 102844 - DNA, 100 bp, Homo sapiens
tcaagatcctcaagaagaagaagttgcgaaggatccccaacggggaggccaacgtgaagaagtgccaagtcctgccctgccaacttcttggcagctgccg

SEQ ID NO: 102845 - DNA, 100 bp, Homo sapiens
gaaacctggcacggctcttgcttccggtgactctgacatcattagaagcatgccagaacagactggtgaaaagtaaaccttttcacctacaaaatttcac

SEQ ID NO: 102846 - DNA, 100 bp, Homo sapiens
gtttctgagcatccctgcaatgaagagaacccagggaagttcctttttgaagtagttccagtgcattaaaggagttcgagcaggtgccgggacacttgac

SEQ ID NO: 102847 - DNA, 82 bp, Homo sapiens
tcgcgcccgggaggaaggaacgaggcaaggagctaaagcagcgtgcgttcagccctggggtgcaatgattctggactgagac

SEQ ID NO: 102848 - DNA, 51 bp, Homo sapiens
ttttgatgaaattgtagagaactatggaaccatctagttgcaggaaaacaa

SEQ ID NO: 102849 - DNA, 100 bp, Homo sapiens
gacggagctaagagatatctgcaatgatgtactggtgctgttgcacgtgctgtttgagcacgcggtcggctacgcgctgctggcgctgaaggaagtggag

SEQ ID NO: 102850 - DNA, 75 bp, Homo sapiens
gcaggttcggctgcgcgagcggagggaggcgggacctcagcagccatgtcgaagccccatagtgaagccgggact

SEQ ID NO: 102851 - DNA, 75 bp, Homo sapiens
accaaagcagctacagcagctgcagatttcacagcgatcagattttattaagacctctactggaaaagaaacagt

SEQ ID NO: 102852 - DNA, 88 bp, Homo sapiens
catagtggctttccagttgtttgacaagagtggaaatggagaggtgacatttgcggcaacctttggcactgcatccatgagcatgccc

SEQ ID NO: 102853 - DNA, 73 bp, Homo sapiens
aatgttcttaatggcatctagaatgagagagatcatcattgcctgaatttagctttgtgactgcaagagcaag

SEQ ID NO: 102854 - DNA, 90 bp, Homo sapiens
cgaggagaaaacagcaggcacccaagcgggcggcaggtcacatggtgggctttaaggaagaccactacatgctgcgggagaacctgatgg

SEQ ID NO: 102855 - DNA, 90 bp, Homo sapiens
tgaggaggcccgagcggcggcggtggcggcgaaggccgaggcggtaaaattgaagagttgttgccgggtagctcaattgatgcagaaacc

SEQ ID NO: 102856 - DNA, 75 bp, Homo sapiens
ggcgaggccagggacatggccatgcagcagcagcggaaccgcttaggcagtgggggaagcggggacggtccgtcc

SEQ ID NO: 102857 - DNA, 75 bp, Homo sapiens
aagtgcagctgcctcagttcttagcgcaggagaataaaggcagccccgttgatgactgaaaatgacaaagcatcc

SEQ ID NO: 102858 - DNA, 75 bp, Homo sapiens
atatctgggtttgttggagagatgtacgatggatggctggggagaattacagtttaattggttggggtcagataa

SEQ ID NO: 102859 - DNA, 75 bp, Homo sapiens
ggcgccaggccacccggccgtcagcagcatgcaggttgttgacctcctgtactggagagacattaagaagactgg

SEQ ID NO: 102860 - DNA, 83 bp, Homo sapiens
atatcttccatgtcaacacggatgatcacaggtttttcctacgatggcaggtggaaacaaaaattacagacatctgtggactt

SEQ ID NO: 102861 - DNA, 75 bp, Homo sapiens
acattgggaaggctggtcttcacggtagccagggtcctctctgctcagctgatgttaacgaatgtgagatttact

SEQ ID NO: 102862 - DNA, 82 bp, Homo sapiens
ctgctcaaatctcctgctgtgaaccagcagaatttttgaacaggacggagaggagcaggaggagccgcgtggcaaggaggag

SEQ ID NO: 102863 - DNA, 100 bp, Homo sapiens
gacccctctgctgcaccacttcatgggcatgtcagagacctttgagacattacacaacctggtacacaaaggggtcaaggtggtgatggacatcccctat

SEQ ID NO: 102864 - DNA, 100 bp, Homo sapiens
caggcacagggcccgatgagccagagaagcttgtggtggacttgctttgtgaagagacagttcatgaacaagagtctttcaggacctggacagtgaaggg

SEQ ID NO: 102865 - DNA, 100 bp, Homo sapiens
actcggtgattgaggacaagaccatcgagctcatggtgttagtaaaatggcctttcgccatttaattgagttcacatatacagcaaaattaatgatacaa

SEQ ID NO: 102866 - DNA, 134 bp, Homo sapiens
ggtttctgcacaggaatatcgagagcgtcatgaacccgagctatagagaaaggagatgaggtcatcagactagtgctgagtcttggggtactggcagagctgtggctcgaattcccagagttcgaggtggtggg

SEQ ID NO: 102867 - DNA, 98 bp, Homo sapiens
gtggaggaggcggctataataatagcaaacatcgatggcctactggggataacattcatgcagaacatcaggtcagcacctcatctatgggcacttta

SEQ ID NO: 102868 - DNA, 100 bp, Homo sapiens
aggacgttctcaagtggggcgatgagcccagcgacttctccgtgtcccttaaagcgtcagggaagaacaaacacttcaaggtgcagctcgtggacaatgt

SEQ ID NO: 102869 - DNA, 46 bp, Homo sapiens
atctaagtgttatgaatgtgggggtgtccgcaatgttgccagtgtc

SEQ ID NO: 102870 - DNA, 98 bp, Homo sapiens
gtggtgctgaccctgtaacccaaaggaggaaacagctggctaagctcatcattgttactgggtgagaaggactggcagaaatacgagactgctcggcg

SEQ ID NO: 102871 - DNA, 82 bp, Homo sapiens
tacctgtgaacagtacgcagtgaatgttgtcatcatcagatttgaaatatttaaagtggatacaaaactatttcagcaatgc

SEQ ID NO: 102872 - DNA, 48 bp, Homo sapiens
catcctggagtacctcaccgcagagcaaaccagtccagctacgggggc

SEQ ID NO: 102873 - DNA, 83 bp, Homo sapiens
ggaggagctgtgcagccgcgaggaggcgcgggaggtgttcgagaacgaccccgagacggcatgggttggaattggagcctatc

SEQ ID NO: 102874 - DNA, 131 bp, Homo sapiens
ggacctgagccgcgaggacacgggctgcaacctgcagcacatcagcgaccgggagaacatagacgctgaagaaaaggtgactggtctcatgagccctgaagaatgaactcagaggaggttgtttacatgag

SEQ ID NO: 102875 - DNA, 97 bp, Homo sapiens
ggggagctgaacgtggacagcctcatcacccggctgctggaggggaagcacttggagaatatttagatgggaagaaggagagtgaggaggatcaaag

SEQ ID NO: 102876 - DNA, 100 bp, Homo sapiens
agacgagctgccctacacgttcgcaggagtctggtgaaggcagaaattcatcagactgtagagataatgaaattaaaaaatggcagctagctcctcttcg

SEQ ID NO: 102877 - DNA, 50 bp, Homo sapiens
tgctttacgcaagagttttgagcattaccaggagagtgacaagggtgagg

SEQ ID NO: 102878 - DNA, 100 bp, Homo sapiens
cctctatggcttcccacagccacgacttcctagattcaccaatgacccctatgcaatcaaactgaggccgaaggaaggggagacatactttgatgttgtg

SEQ ID NO: 102879 - DNA, 83 bp, Homo sapiens
aaaagaggaagatagtcttgggacccttgcatggtgtttcaaagggtggtgaagaactaagatctgtagaaacttccagtgtg

SEQ ID NO: 102880 - DNA, 100 bp, Homo sapiens
agaagcaaagaagcgctggcagtttcaaacgtaggagcaacggtgggaatgccctctgaggaatgcagtgatgtccatcagtcacctctcacccagagcc

SEQ ID NO: 102881 - DNA, 73 bp, Homo sapiens
tatacaacctgatcatccgcagatatctcagcaggcagagtggcatgattccgactggatactctcagtgcca

SEQ ID NO: 102882 - DNA, 100 bp, Homo sapiens
ccgagacgcactgggggccggatgactcaccccacacagaccgcgtttctctccagtgtcgacctacacactcactgctcttaccagatgatgttgccag

SEQ ID NO: 102883 - DNA, 100 bp, Homo sapiens
tgggggccacaaatgctccttctcctggagacgcaactcaagatggagtcatcagaacccactgtgaggaagtgacttctccttgaggtcacccagacac

SEQ ID NO: 102884 - DNA, 80 bp, Homo sapiens
ctttccaatcttgttcgtagagaagaggatggccatcttttttcccaggcctgaagctgcccagcaggcattccaaggcc

SEQ ID NO: 102885 - DNA, 150 bp, Homo sapiens
ggtcattctagtcttgactaccttccatgtaccactggtaattatgacttttggacagtccaagctatatcgaagaatgctgtcagaagggtatctcagtggacttgagtactggaatgacatccactggagttgtgcctcttataatga

SEQ ID NO: 102886 - DNA, 96 bp, Homo sapiens
tgacatcacagttgtctgcaccctgttgtggctctataagcaggatcgacgagaacgtgctaggagcccagctggacgttgaggccgcccattcag

SEQ ID NO: 102887 - DNA, 75 bp, Homo sapiens
tgaagcttctgaaccatccacacatcataaagctttaccagatgggaatgatgaacaaccccaatccttatggtt

SEQ ID NO: 102888 - DNA, 90 bp, Homo sapiens
gaagagtggacactactgggaaaggaagagttgagtgggaacatggagctgatccaggacacctcccgcccgccactggagtacgtgaag

SEQ ID NO: 102889 - DNA, 80 bp, Homo sapiens
tggatcagctgtgaaaaactctttggatgattctgccaaaaagtgacagctggagtatcagccttggaagtatatacgcc

SEQ ID NO: 102890 - DNA, 84 bp, Homo sapiens
agctccacatcaccccagggacagcatatcagagctttgaacagggtatacctcagttaccatgtgccaaagcattatacaact

SEQ ID NO: 102891 - DNA, 98 bp, Homo sapiens
ggccttcctgaccaagctgtggaccctcgtgagcgacccggacaccgacgcgctcatctgctggagcccgagagtgataatcttcaaaatgaagactt

SEQ ID NO: 102892 - DNA, 111 bp, Homo sapiens
cgaggcctccggaccttcaagactgtctttgctgagcacatcagtgatgaatgcaagaggcgtttctataagaattggaacagatggagtcggataactgttcaggaggag

SEQ ID NO: 102893 - DNA, 49 bp, Homo sapiens
aaaaaataagcaaaagcgtcccaggagtactatactggcaattgctgga

SEQ ID NO: 102894 - DNA, 75 bp, Homo sapiens
cgcccctccagccttcgagtcgttcttgctcttcgagggcgagaagaagcatgaattgctggaggaagcccggag

SEQ ID NO: 102895 - DNA, 74 bp, Homo sapiens
gggagctgaacgtggacagcctcatcacccggctgctggaggatttggagtcaaaatatggacctgagaaaata

SEQ ID NO: 102896 - DNA, 80 bp, Homo sapiens
gaggaggaggattcagggaataggagctggggagcccttctgcgccacagtccattggaaatgctaaaacaaccaggaat

SEQ ID NO: 102897 - DNA, 50 bp, Homo sapiens
ccggcccgtagtgtggaagcagcttcaggaggagacatcacagctttccc

SEQ ID NO: 102898 - DNA, 100 bp, Homo sapiens
ctgagccccagagtcagctcccctttctcgcccagcgcccccaggccgctcccggggctcacgtgttctaagaacggaagcatctgggctggatggaatt

SEQ ID NO: 102899 - DNA, 100 bp, Homo sapiens
tctggcgaccatctgcaaacaaccagagaatagctgaaacctttggacttcaagaaaattatatcaaaattgtcataaataagaagcaactacaactagg

SEQ ID NO: 102900 - DNA, 75 bp, Homo sapiens
gtcttatttaatccacatcatagaatgctgtccagtttcaacgagtggttttggcaggacaggttctggttacca

SEQ ID NO: 102901 - DNA, 90 bp, Homo sapiens
ggaaaacaaaggccgagagaccctgatgcccacagcccccaggacccgagctgatccagaaagccaacggtctccacggcttcatgaatt

SEQ ID NO: 102902 - DNA, 98 bp, Homo sapiens
gttcagcagcgcggcagagtcatgggggttgcctgcctgattcgagttccatctgaagtggttaagcagagggcacaggtatctgcttctacaagaac

SEQ ID NO: 102903 - DNA, 108 bp, Homo sapiens
tggtggggctgggggatgagagctgcaccgcgcgggacaagtcgccggcggcgcccgacggagcagacacagcaggatgccaatgcctcttccctcttagacatctat

SEQ ID NO: 102904 - DNA, 115 bp, Homo sapiens
gacccaccactagccccactacccaggccctgcatgtccatcgacttcagaggattcttcttctcagacaatgcctgtggaagacaagtcagaccccccagaggggtctgaggaa

SEQ ID NO: 102905 - DNA, 82 bp, Homo sapiens
tgtttggattgaagccgcctctgtattacttaccaggtgacgcggcgcacggcgcggatggtggccgagtggcagtgtgtgg

SEQ ID NO: 102906 - DNA, 75 bp, Homo sapiens
atccagggggtcggctgccaggtacagactgcttttcaggaagccttggacgctgcaggtgataaacttgtagta

SEQ ID NO: 102907 - DNA, 100 bp, Homo sapiens
ggtcctccataaagtcctgttcccgggaagagactgcatatccccccacgtccatgtccaggagcccccctactgtcctggtcatctgtggcccggggaa

SEQ ID NO: 102908 - DNA, 75 bp, Homo sapiens
cacacgcgcagccccggcctctcggcctctgccggagaaacagctggcccgagataacttcttccgctgtggtgt

SEQ ID NO: 102909 - DNA, 82 bp, Homo sapiens
gaggcgcctcgctggggcggggaccttgccttgcccgggatagtcgtgcaagcactgcagtgttcccattattcgattcttt

SEQ ID NO: 102910 - DNA, 83 bp, Homo sapiens
cggagctaggacgcggaacatcccagaggccagcatcaacatgttttaaaatcaaagatgggaaaatcggagaaaattgccct

SEQ ID NO: 102911 - DNA, 75 bp, Homo sapiens
actgattagcaatttaaagatcctctccaagggttttggccaaattgggcgagggcacaaaataaccacttaccc

SEQ ID NO: 102912 - DNA, 76 bp, Homo sapiens
gggtccctgaagagggaagacacgcggaaacagctgactggaaataccggcatgcaggattgatggccttatctgc

SEQ ID NO: 102913 - DNA, 100 bp, Homo sapiens
ttactcagctgagtgtgccacacaggtagccctggacggcattcagtgttttggacattctgagcatgtgagacctgaggactgcaaacagctataagag

SEQ ID NO: 102914 - DNA, 75 bp, Homo sapiens
gctaggccagcggctcggcggtgagatcgtcagcgctgactccatgcaggctgaccggttccctgatgtgttacc

SEQ ID NO: 102915 - DNA, 75 bp, Homo sapiens
aaggcaggaagatggtggccgcaaagaagacgaggcggggtttcaccatgttgcccagactggtcttgaactcct

SEQ ID NO: 102916 - DNA, 75 bp, Homo sapiens
gaaggcaccgacgtcatcatgctgaccaccaatcagatccgtaaggctgcagagactgcaagtctggaagaacag

SEQ ID NO: 102917 - DNA, 114 bp, Homo sapiens
ggagattctgcggcgaatacgccaggtgtgactggctggaagtggcgtggctgatcatggaagggaagtggttgctgtgtatgttactggtgcttggaactgctattgttgagg

SEQ ID NO: 102918 - DNA, 89 bp, Homo sapiens
tcgacggctggagagaagccgggagcgagcccaggcggcagacatcctcatcgtcaagttgagaaagggccaggagctgagacttcgag

SEQ ID NO: 102919 - DNA, 87 bp, Homo sapiens
gccatggccttctacgttgtgaaaatgaaaaagcttgtggtgaaggggggcaaaaaaaagaagcaagttctgaagttcactcttgat

SEQ ID NO: 102920 - DNA, 75 bp, Homo sapiens
cgggactgccacgtccaagcaaaccgggaaaggagaggatcccggagccgagccatcatcaaccactttaacccc

SEQ ID NO: 102921 - DNA, 75 bp, Homo sapiens
caagtctcctgaagaggaaggagcggtgtcctcttaagaaaatggctccagcaaaccttcaccaatttacatcag

SEQ ID NO: 102922 - DNA, 82 bp, Homo sapiens
gttcagaggtccccaggagctgctgctggcgagcccgctactgcagggacctatgggactggtgattgcagctggaagtgcc

SEQ ID NO: 102923 - DNA, 75 bp, Homo sapiens
ggtccctgaagagggaagacacgcggaaacaggtactccaaagattcaggtttactcacgtcatccagcagagaa

SEQ ID NO: 102924 - DNA, 83 bp, Homo sapiens
cgcgctactctctctttctggcctggaggctatccagcacaagttggatggcttgaggactggtactaaaaggaaacgtgact

SEQ ID NO: 102925 - DNA, 75 bp, Homo sapiens
cacatctggaagcgtttaggagaaggggtggagggcttcaccagccaggaggaccaggagatgctgagccgcatc

SEQ ID NO: 102926 - DNA, 75 bp, Homo sapiens
gagcccacccgcgccaggaggccgaacgcggactcgccacccgggctgacaaacgggctcatcataatgcactgg

SEQ ID NO: 102927 - DNA, 90 bp, Homo sapiens
tccggaggcccggccacctctgagaagggagacgacgctgctgggtccgctgagcggggcgacccgagattgttcagattccattctgtg

SEQ ID NO: 102928 - DNA, 98 bp, Homo sapiens
ttgtcgcatccctgggctctgcggagaaggaacccgagcagcccccggccctgtggaggaagcactgaacttcccagccctgccgtggaagctgcctg

SEQ ID NO: 102929 - DNA, 100 bp, Homo sapiens
tttcttatcatcagtgtgttagctttccccaatgagagacatctccccatacatttcaattagacttattcttcaacaatgtaagcaaaccaagtgcccc

SEQ ID NO: 102930 - DNA, 100 bp, Homo sapiens
gatgcattacgaaaaatacaggaaagctatggagatgtctatggaatttgcaccaaattgaaaacatctcccaatgaagcttcccacatcacaaactttg

SEQ ID NO: 102931 - DNA, 82 bp, Homo sapiens
gagaagaaaatcaagaagctgaatttccaggccttcgccgagctgtgcaggtcctagaccagaaggagcacaggctggatgg

SEQ ID NO: 102932 - DNA, 97 bp, Homo sapiens
gcccccagaagtgatcgctcagctggagaacgcggctaaagttctgatgcaccaaggatgacattgatcttgatgccttggctgcagaaatagaagg

SEQ ID NO: 102933 - DNA, 82 bp, Homo sapiens
caaggattggagcacagaggctcagaagcaagtccaggctcacagaacatttcctgcctgttgctcacactctgttgtccac

SEQ ID NO: 102934 - DNA, 100 bp, Homo sapiens
tgaaaagtgatgaggaactggcaagaaagctaagcattgatattccagaggaagagcatttggcctgtgatatcaccggatccagttcatccaccgatga

SEQ ID NO: 102935 - DNA, 71 bp, Homo sapiens
gcagcatattgtactggcctgctgctggcccgcaggcctgccacagtgactcaggtcactcaaggaactat

SEQ ID NO: 102936 - DNA, 75 bp, Homo sapiens
caactatgtttggatgttggatctacactttctcaagcactgtgatcttcaaataataacatagctgatccagaa

SEQ ID NO: 102937 - DNA, 83 bp, Homo sapiens
cacagccgccggccgggagaggcgcgcgccatggcttctggagccgaaatccagactccaaaatgatgcaaatcaacctgact

SEQ ID NO: 102938 - DNA, 82 bp, Homo sapiens
ctggagctggcttccatgatccccgccctgcgggagctgggcagatctgactgcagccatgagcagcaatgagtgcttcaag

SEQ ID NO: 102939 - DNA, 143 bp, Homo sapiens
ttctttcctgtcgttgttggctttattagaagagtgccagtccttggatccctcctaaatttacctggaattagatcagggatgtatggcattgagaatgaagtcttcctgagccttccatgtatcctcaatgcccggggatt

SEQ ID NO: 102940 - DNA, 76 bp, Homo sapiens
aacttaatcaacaacctggaaacattctttgaattggattatcccaaagttttgcacactagggaccaagaagccc

SEQ ID NO: 102941 - DNA, 90 bp, Homo sapiens
cgacggccgcaaggccaacgtgaacctggcatatctgggcgccaagccgcggagcctccagacgggtcccttcaccgatgttgtcaccac

SEQ ID NO: 102942 - DNA, 88 bp, Homo sapiens
cctgaaggccggggtgctcagccaggccgactacctcaacctggtgcagtgcgagacgctagaggttttgatgaagcaagaacacaga

SEQ ID NO: 102943 - DNA, 110 bp, Homo sapiens
tcttgcctcaggccagtcgcctccaggccaagagggatccttcacccgtgtctggtatcatgatattagctggtttgacatcaagtcatttgtgagtcatcagatcttct

SEQ ID NO: 102944 - DNA, 80 bp, Homo sapiens
gagctctatcagcagaaggagatggctttgcaaaagctctttcattatcatcctcatcttgatatagttccatgaatatt

SEQ ID NO: 102945 - DNA, 74 bp, Homo sapiens
cagacttctttcccagatgtttataatgagggcacacagttgaaatggatgcagtcagaactgaatgttgaaga

SEQ ID NO: 102946 - DNA, 100 bp, Homo sapiens
gcctacgtgaacaacctgaacgtcaccgaggagaagtaccaggaggcgttggccaagggtgactcctgcacctgcgccggctcctgcaaatgcaaagagt

SEQ ID NO: 102947 - DNA, 74 bp, Homo sapiens
aactctgtccttattatcggaccccgaggatcaggaaaaactatggaagcaagatttccagatgtagcaaatgg

SEQ ID NO: 102948 - DNA, 50 bp, Homo sapiens
gaaacaaaatgtcaacaaattgatgggtgccttagctggaccaattattg

SEQ ID NO: 102949 - DNA, 101 bp, Homo sapiens
ccaaggctacagacaggaggagggaaccagcataggaactggcatggagcagcttgtgaaggagaggaaaggtttactggctccacatgctctatgctgct

SEQ ID NO: 102950 - DNA, 90 bp, Homo sapiens
gattgcacaccctgttgtgaagtgcacctactgcaggactgagtaccagcaggagagcgtggtgatggtggatgaggcacacgaaaggac

SEQ ID NO: 102951 - DNA, 100 bp, Homo sapiens
ctaagacatcgacctgtaccagagattccagggtcaacaaaaggagtttctgggaggtccccttcccctgagcccatctacaatagcgaggggaagcggc

SEQ ID NO: 102952 - DNA, 101 bp, Homo sapiens
gccgtggtggtggtggatatggtggcagtggggatggctataatggatttggtaatgatggtaatggcaccattgacttccccgaatttttgactatgatg

SEQ ID NO: 102953 - DNA, 82 bp, Homo sapiens
caacagcaggggtcagctgggccgcaggggcgcgcagcgcggggagctgccagatgacatccagattcgattttatgaagag

SEQ ID NO: 102954 - DNA, 90 bp, Homo sapiens
aaggcccagaatgttccctaaggcccaaccaaacagaagagaattaaacaaccaccatgtcgagcaaaaaggcaaagaccaagaccacca

SEQ ID NO: 102955 - DNA, 97 bp, Homo sapiens
ccagcgagccagcgagccgccgacccgccgagcaaaatgagtggtggacatgacaacagagtcaactgcatacagtggcatcaagacagtggctgtt

SEQ ID NO: 102956 - DNA, 75 bp, Homo sapiens
ccaacagatgaagacagatgcaccaacgagattgagaaaatcatgagttctattggagaagggattgacttttct

SEQ ID NO: 102957 - DNA, 83 bp, Homo sapiens
ctttctgctgggcctgcccttcaccctctacatgctagacttcgggctccttgaggatattcagttttgtatgtttgaatatc

SEQ ID NO: 102958 - DNA, 90 bp, Homo sapiens
caccgttcaacttctgctgactctgcttcctcctccgatacttcccgcagtcggtaaatatggacagctgggccacgaggacaccaccag

SEQ ID NO: 102959 - DNA, 75 bp, Homo sapiens
ctttggcattgtgtctggaatgctcaatgtcaaatgggaccggattgccccggcttggcaactcttgtgaaattt

SEQ ID NO: 102960 - DNA, 100 bp, Homo sapiens
cgccagggaccctgtgcaggcctgctcctccgtttgcaaggattggatagctttagtcaaagcagctgctgcagctgcagccaagaacaaaacagggagt

SEQ ID NO: 102961 - DNA, 50 bp, Homo sapiens
cgggaagcagggattccagtgccaagtgataacctcctaaggagagcagc

SEQ ID NO: 102962 - DNA, 50 bp, Homo sapiens
tcagctctcggcctgctgatggtaaagaggatgaatatccaaagaagccc

SEQ ID NO: 102963 - DNA, 82 bp, Homo sapiens
ggaatcgtgtgctgggctggtcccccttggagctcgaggccatgagcagatataccagcccagtgaacccagctgtcttccc

SEQ ID NO: 102964 - DNA, 50 bp, Homo sapiens
ctgaatctacccccgtggaaattcagaccaggatgtagcactcaaacttg

SEQ ID NO: 102965 - DNA, 83 bp, Homo sapiens
ctctggaagtgcaggatgacaatgcttctgtgcttgacgtctatttagtcagcccaaggccaaccccactgtcactctgttcc

SEQ ID NO: 102966 - DNA, 74 bp, Homo sapiens
gacgttcccgaagcaaaagtccattcagaaaagacaagagccctgtgaggtatacacacggtctgtgattgaac

SEQ ID NO: 102967 - DNA, 74 bp, Homo sapiens
gttgacagcatcgatgctagacagacagtgccgtgagcgatgtggagatgcaggaacactatgatgagtttttt

SEQ ID NO: 102968 - DNA, 83 bp, Homo sapiens
caaagccaacaaccccccgtatttgccccccgaggggctcccacaggatcagaggctggggccaactggaaccattggcagct

SEQ ID NO: 102969 - DNA, 90 bp, Homo sapiens
agaagaggaggaaaatgttttgccacgtggatgtgaagatttcctctaaaagaccaagctccacgaagatctctgtgagaagaggacggc

SEQ ID NO: 102970 - DNA, 75 bp, Homo sapiens
tccagttcaaatattctggtcctgaagatgatgctgctatcagcctggagttggtggtgaccccgcccagttggc

SEQ ID NO: 102971 - DNA, 125 bp, Homo sapiens
ccccagtagcagggccttctgcagcaaggccgggaactgctgcaccattggtactccaaagattcaggtttactcacgtcatccagcagagaatggaaagtcaaatttcctgaattgctatgtgt

SEQ ID NO: 102972 - DNA, 100 bp, Homo sapiens
tcctttaccttgtggaaatgatttcctcaggactccagattatctacaacactgatgagggatcgcttacacctgagacgaactacagaacagcacgtac

SEQ ID NO: 102973 - DNA, 108 bp, Homo sapiens
cgggagcgtccccggctatctggcgctgctcatcctgggcacggagtgtgaatgtgaagacacaagctctttctggatacagagaccaatttagtttggagattacag

SEQ ID NO: 102974 - DNA, 85 bp, Homo sapiens
tctggtctcccaggcccaacccacctgaaggtggagggagcaaagtcctgcacactggagtggtgtactagcggatcaagtatgg

SEQ ID NO: 102975 - DNA, 98 bp, Homo sapiens
ccaggaagtcggagtttgagccccggaggcagagcggctgccatgacaatgcagatcttcgtgaagactctgactggtaagaccatcaccctcgaggt

SEQ ID NO: 102976 - DNA, 75 bp, Homo sapiens
ggaaggaacgaggcaaggagctaaagcagcgtgcgttcagccctggggctgtggatgagatgaacggaaaggagc

SEQ ID NO: 102977 - DNA, 90 bp, Homo sapiens
tctccagaaccctggacagctcctccagccttgtcttcaactcccttttcctcgccgaccttgaaccacgccttttcctgcaacaacccc

SEQ ID NO: 102978 - DNA, 83 bp, Homo sapiens
cggggacccgctgatcttccagctcccctcacccaacgtcgttccagttacaacacagggatcacaacaaacacaaccgccac

SEQ ID NO: 102979 - DNA, 75 bp, Homo sapiens
cacgatgccctttgacttcaggaggttggacgtgataagtatgagcctgcagctgtttcagaacaaggtgataaa

SEQ ID NO: 102980 - DNA, 101 bp, Homo sapiens
gatggccgcttggggaaggaggcgtcttggcccgggcagcagtggcggcagcgcccgagagagactgtgccctgtccacggtgcctcctgcatgtcctgct

SEQ ID NO: 102981 - DNA, 100 bp, Homo sapiens
ccagttctggcagattctggaaactgtacattgaagcagagtatttcaggggctgccaagctgctctcctgtttcctcttccttggggctgattgcatcc

SEQ ID NO: 102982 - DNA, 100 bp, Homo sapiens
ttttcctgccatggggatatgacattagccaggtgaatgatatggaacctagcaaagctgttccactgaatgcatctaagcaagatggacctatgccaaa

SEQ ID NO: 102983 - DNA, 97 bp, Homo sapiens
cggcggcctcacgcactcgggcctctggaggatctgctgcctggaagggaggtggggaagacagggctccagctaccacaggacgggctctgggtat

SEQ ID NO: 102984 - DNA, 82 bp, Homo sapiens
ccggcttcggagcgggagtgttcgttgtgccagcgactaaaaagagggaagcagctcgagagtgtcgtagaaagaagaaaga

SEQ ID NO: 102985 - DNA, 83 bp, Homo sapiens
cctccactccgtcccccgcgggtctgctctgtgtgccatggacgggagcggtggtgccccccccgggcacggggccatgtaca

SEQ ID NO: 102986 - DNA, 83 bp, Homo sapiens
ggcgtctgttgagcctttctctcagtcgtgagggaggcgtcgacggcgtgcggctacttcacccccctcaacaccccacagag

SEQ ID NO: 102987 - DNA, 75 bp, Homo sapiens
ttcaagagaaatggagcccttctccaagattttatcatgtgggcaacctgctgcaactggttctgcctggatgga

SEQ ID NO: 102988 - DNA, 50 bp, Homo sapiens
acaactggactttttgacccatataagaaaccacatttgagaagtatttc

SEQ ID NO: 102989 - DNA, 82 bp, Homo sapiens
tgtaacaaatatttgcggtttcagcctcaacccagaggaatcgttactctttcaggcatagaatgtcaagctaaccaggcgt

SEQ ID NO: 102990 - DNA, 90 bp, Homo sapiens
agccccggggcatctatgccagtgagaggcccaagtccctaggaatgggtaccacagaccatgtcatcgtcctggcgtccacgaaccgag

SEQ ID NO: 102991 - DNA, 51 bp, Homo sapiens
tgggtccgctgagcggggcgacccgaggaccatctgtggcacccccaacta

SEQ ID NO: 102992 - DNA, 75 bp, Homo sapiens
aacactatcctctgagatcccagatcatgaggattattgcatcgagcttttagtgtcttcttattcaacaccgaa

SEQ ID NO: 102993 - DNA, 76 bp, Homo sapiens
gacatggtcatgagcttcgtcaacctcggttatgaagacagtatggagtttccagaccatagtagacatttgctac

SEQ ID NO: 102994 - DNA, 90 bp, Homo sapiens
atttaggctgggtcactgggactggaggaggaattagcttgaagcatgggatgtggcagataaccagatagactctggggacctgatgga

SEQ ID NO: 102995 - DNA, 98 bp, Homo sapiens
acgcacaggccgtcgctatgagcgggaccaccctgggcacagcaggcatcggaggcccagggccccggccagtgcccagccccgctgggagacccggc

SEQ ID NO: 102996 - DNA, 98 bp, Homo sapiens
ctcagagggctctagccttcctgtgcaacctgaggtggcactgaagaggcatttgaggctcaagaatgtgaacgaataaacttcttccggaatgcatt

SEQ ID NO: 102997 - DNA, 75 bp, Homo sapiens
cagccaaaagcatggactcactgagtgctgcagctggggccagtgatggacagagcgggatgccaccagcttgtc

SEQ ID NO: 102998 - DNA, 99 bp, Homo sapiens
cagcaacctgctgacagagaggatccacctccgaaacccctcggcggcgttcttctgtgtggcccgcctgcagaaagttcaggagccctggaaaggaga

SEQ ID NO: 102999 - DNA, 83 bp, Homo sapiens
tccagttcctggccaagtttgagatcgccctgcccgtcgccaatgacagcgatctagggcagccctgcagaggtacctgttct

SEQ ID NO: 103000 - DNA, 83 bp, Homo sapiens
aggagaagctgagcctttctggacagaccaacctgtcagtgctgcaaaaaactttagaaactgttcctttggagaggaaaaag

SEQ ID NO: 103001 - DNA, 100 bp, Homo sapiens
ccggggccatggccggaatgcagtaccctcagcagcaggttaatgactccagagagtaagatcagattcgtccacaaagagatgggcataataccaagct

SEQ ID NO: 103002 - DNA, 75 bp, Homo sapiens
gagaccctgtccctacctgaaggacgccgttcagaagatgtcccagtcatgcagggaacaggaatgcaaggagca

SEQ ID NO: 103003 - DNA, 75 bp, Homo sapiens
gggggacagccagccagcagcaggagggtgctggagaatctggtaaaagcaccattgtgaagcagatgaggatcc

SEQ ID NO: 103004 - DNA, 83 bp, Homo sapiens
gacacgcttcttctggaagaccagccaacaggtctctaattaacagaagatggcaaagcccagccacagcagctatgtccttc

SEQ ID NO: 103005 - DNA, 80 bp, Homo sapiens
tcagaagctcagaacgctggactctccctttgcagcggacaaggcaaaatctcagcaagttcggacctctagtacaataa

SEQ ID NO: 103006 - DNA, 74 bp, Homo sapiens
gcgacctgaggggagagggaacgcagctgaaagcgtgaactggcagcgaggtcacaggccccacctttgctgat

SEQ ID NO: 103007 - DNA, 82 bp, Homo sapiens
gcttgaacccattgtcacccctccggtgtgttccagagaacaagccttcagacatttgctatattgacgctgagctgtcagg

SEQ ID NO: 103008 - DNA, 98 bp, Homo sapiens
ctgtttcagcttcagtagtcattatcctcatggaatcaacacagctatttaccaccctggtcacagcccagcgacttctccgtgtcccttaaagcgtc

SEQ ID NO: 103009 - DNA, 74 bp, Homo sapiens
gctgtacgccgagcacccaggcgactgcctcatcttcaaggtcgcctgcgaggccgctggccaggcctgagcct

SEQ ID NO: 103010 - DNA, 90 bp, Homo sapiens
ctaagcaggaatgactggagagcaggctggatagcagagagtgaggaagaagatgaaatggaagttgaagaccaggatagtaaagaagcc

SEQ ID NO: 103011 - DNA, 98 bp, Homo sapiens
tgatttagaaggaggttcaggctacggtgagccgaagggctggagcggctctgggctccggaatcgcccgcagccggtactgcgggacccactgcgga

SEQ ID NO: 103012 - DNA, 90 bp, Homo sapiens
cactcgcagtcccgtcagcccaggggctgggcctgtatgctgctcgagacattgagaaacacaccatggtcattgagtacatcgggacta

SEQ ID NO: 103013 - DNA, 49 bp, Homo sapiens
agaacctggcacttatgtcctccctggtggatggcattcccaatgacag

SEQ ID NO: 103014 - DNA, 83 bp, Homo sapiens
cgaggggccgacccgcagcgtccctggtctctccagccctcactcggaaccgcacgtacctggcaaagaattctgcaactttg

SEQ ID NO: 103015 - DNA, 82 bp, Homo sapiens
ctcattgctactgccctctgcgctcctgcatctgcctccccataggccctgcagtgctacctcgtcctgatctaccctggcc

SEQ ID NO: 103016 - DNA, 98 bp, Homo sapiens
gcggaccccgcgtgcgccttgctcgcccgcagccccgagaccgcaggtagtccaggggatcctgctcatctcagctgtgccagcaccctggggttgag

SEQ ID NO: 103017 - DNA, 87 bp, Homo sapiens
cagtggcgcctaaagtctgagagagggaagtcgcctctgtgctctgagagggtccaagcctggtaagaatgtccagcttcaggagaa

SEQ ID NO: 103018 - DNA, 100 bp, Homo sapiens
gctcaggaaatgttatcagcaaattgatagaagattggtggaacgagaatgcctacacgcagccacaggaatccagtttccatggaaaccaaaagcagtt

SEQ ID NO: 103019 - DNA, 76 bp, Homo sapiens
cgcgaagatgcgaaaggtggttttgatcaccggggctagcagggaaaccctcagggaagaggaggaggagaaaaag

SEQ ID NO: 103020 - DNA, 83 bp, Homo sapiens
aaaacttcaagccaaacatcaagcagaatgtgatttgcttgaagatatgaggaaaaatgaggaagctgtgagtaccagtggaa

SEQ ID NO: 103021 - DNA, 96 bp, Homo sapiens
gggtcgcttccccgcagcatggaggacgatgcaccagtgatctacgggctggagttccagattaagatgttctacgaggagcatttgcacttggac

SEQ ID NO: 103022 - DNA, 90 bp, Homo sapiens
ttaagactcatccagtatgattgcgactccatcagcagctatgaagcccagatcaccgccctgaagcaggagcgacagcagcagcagcag

SEQ ID NO: 103023 - DNA, 75 bp, Homo sapiens
gagggtggaaaaagcagggaggttatgaggcttaataaagaaggtgtatgcaacagcgttattgcaacaggctaa

SEQ ID NO: 103024 - DNA, 83 bp, Homo sapiens
ccaccttgtggccctgggctttaccatctttgtggctgtgcttgccaggcctggctccagaaaagaagatttttcagatcccc

SEQ ID NO: 103025 - DNA, 90 bp, Homo sapiens
atgtcctcatcatcccgtcagagctgaggtacttcgtgaaggacagcttccaattctagaaggggaagtttttgattctgtgaagccagg

SEQ ID NO: 103026 - DNA, 97 bp, Homo sapiens
ccgtgctggatgccgtgatctccagcgccggcctcctcagtgcgaagaagctgcagccgcacctggccaagggcttcatcgcctcagacatgacctc

SEQ ID NO: 103027 - DNA, 75 bp, Homo sapiens
gcaaagaaaaatgaacccaaacatagacttgcaagatttggatttaggtggcgagtagaaaaagaagtaatttca

SEQ ID NO: 103028 - DNA, 101 bp, Homo sapiens
ccgagacctccaatttcctctccgagggctccccagaccagagctgtcaagccccgggttccgagtctgaggaagacataaccttgtgcctgcctgcccac

SEQ ID NO: 103029 - DNA, 83 bp, Homo sapiens
gtcgcccgcgattctcagggattgatcgcctcttcaggtttggtgcacctcgatttggaggaagtagggcagggcccttatct

SEQ ID NO: 103030 - DNA, 83 bp, Homo sapiens
atctcttccaaagaatgccacagaatcaggggaggcatgcttcaggtgtcgtgaaaactacccctaaaagccaaaatgggaaa

SEQ ID NO: 103031 - DNA, 50 bp, Homo sapiens
gtcgccgcgtccttggctggcgtgtgacaatctccaatagacttgtgtct

SEQ ID NO: 103032 - DNA, 75 bp, Homo sapiens
gtctgcgagccaggattcccgtcaggatggctaaaggtgaccccaagaaaccaaagggcaagatgtccgcttatg

SEQ ID NO: 103033 - DNA, 100 bp, Homo sapiens
tcaggagagcccgctcttcaacaacgtcaagctacagcaaccagctcatgtttggaaaaggaatcttccactgaaacatttggatacccgacgttctccc

SEQ ID NO: 103034 - DNA, 74 bp, Homo sapiens
tccgctccccacttcagacgagctcttcctgcctggaatctgttgcagaggaaagtggtcgcttatggtcagag

SEQ ID NO: 103035 - DNA, 82 bp, Homo sapiens
gaacagttcattgaagctatcactgtcagtgctggttgctgcttttgctcagaggacatccatgaccctaatggtctttttg

SEQ ID NO: 103036 - DNA, 75 bp, Homo sapiens
cttgagttctgcaaaagctcaggttaatccagaatgacgtggccgcacttctgaaacccatatcggaaaagattc

SEQ ID NO: 103037 - DNA, 82 bp, Homo sapiens
aaacaccctgcaatctttcagacaggtttcaggtgttgaccaggggcaagaactgctctgttgcaagatggcactattgaca

SEQ ID NO: 103038 - DNA, 98 bp, Homo sapiens
cccccaaagagcaactgaagattcatacgcagctggcagatattatcatagttgctgcaggtattggctgggatccaccaaaacttcaatcaattttc

SEQ ID NO: 103039 - DNA, 99 bp, Homo sapiens
gggcctcagtgtcttctccatgctctgctgcttctggcctctgggcatcgcagccttctacttgtcccatgagagtgcacatttggccatgatcgatac

SEQ ID NO: 103040 - DNA, 100 bp, Homo sapiens
tctcacccgcatggggtgaagcgttcagcctccccagacgacgataagacttgcactatctgccagatgctgcttcctaaccagtgcagttatgcatcac

SEQ ID NO: 103041 - DNA, 74 bp, Homo sapiens
cagcagtggcaagatctcatgtccatcatggaaatgcaggtggtttttccccatcatcggccacatgggcatct

SEQ ID NO: 103042 - DNA, 100 bp, Homo sapiens
cggttcctttttgcgagctttccgagtgccaggcgccggccggctgcgaagacgcggtgggccgcccctccggactatgatgccttctttgaagccagag

SEQ ID NO: 103043 - DNA, 125 bp, Homo sapiens
agatacaaatttttggatgatgatggatccatttctcctattgaggagtcaacggaaaggcgtaggaggaggagcaggagttcttccagatcgccaagaacatcaaaaaccataaaaaggaaatc

SEQ ID NO: 103044 - DNA, 75 bp, Homo sapiens
gctcagtcctcggcgcccgcctgccgcctccggagcgcctgtgtgggtcactcctggaagcaaggcggctctagc

SEQ ID NO: 103045 - DNA, 75 bp, Homo sapiens
ctgctacctgcagcgccgtgtggcacgacacaaaaatcagggggtgaatctctacattaagaacttggatgacac

SEQ ID NO: 103046 - DNA, 100 bp, Homo sapiens
tcggcttgaaattaccaactgctttcctttccctcagcacacagaggatgatgctgactttgatgaaggtttatggctacaaatgatttgatgacggaac

SEQ ID NO: 103047 - DNA, 75 bp, Homo sapiens
tttgaagacttgctagttaggattttattactggcagcatgtatatcttttagctattctcaagctggaataact

SEQ ID NO: 103048 - DNA, 96 bp, Homo sapiens
gatctgttggtttcaaggttaactacaaagtgattgcagatcggcctcccccagttattcgacaaggtcctgtgaatcagactgtagccgtggatg

SEQ ID NO: 103049 - DNA, 82 bp, Homo sapiens
cgaagaggctggactcggattcgttgcctgagaaatgcatcttctgcagacaccgggttaagagggtctctggagcctgcat

SEQ ID NO: 103050 - DNA, 82 bp, Homo sapiens
gtttgtagaagaggagcatctgctccagacctgcctagagctggaacgttacctccagagcgagccctgctatgtttcagcc

SEQ ID NO: 103051 - DNA, 74 bp, Homo sapiens
aagagagagcttgtgaaactgagggaatagataaagctgtacaccaagcatgggactttgaaataccagacaga

SEQ ID NO: 103052 - DNA, 90 bp, Homo sapiens
aagactggtattacgctcaacttcagaatctcactaaaagaatagatagtcttcctttaactgaaaatgagagccaaattgaaagccgac

SEQ ID NO: 103053 - DNA, 75 bp, Homo sapiens
gaagcagagtggctatggtgggcaaactaagccgattttccggaaaaaggtatgtcctggatgatgaatacacaa

SEQ ID NO: 103054 - DNA, 100 bp, Homo sapiens
actacctggcattgccttttgttgaggctggcaagcgactcccaagcccagccctgtggtgggtgaatgggaaggggaaggaattaatgtggaatttcag

SEQ ID NO: 103055 - DNA, 75 bp, Homo sapiens
actgctttggacgtgggagtcacctgaaagccaggaaatggtgtttgccgcctggtcctggtcgtgctgagcctg

SEQ ID NO: 103056 - DNA, 94 bp, Homo sapiens
gctgctggtgggccgcgtcgaagacatggaccagggctacggagtaagactttgaccccgacgcaggcttcagtgattgccgcggatcagaagc

SEQ ID NO: 103057 - DNA, 100 bp, Homo sapiens
acaaaatgtcaacaaattgatggaaccacacgatgagccagcacgcacagtgagggatcgctcaacaggacacctctccgcagaaggcttgccggagacg

SEQ ID NO: 103058 - DNA, 100 bp, Homo sapiens
gttacgatttggttccattgaaaaatggtggagttggaataaagacacctagctcccctgtttgacaaccctaagttggataaggagctgcgggcaatgc

SEQ ID NO: 103059 - DNA, 74 bp, Homo sapiens
agtgcatcaagtgccacatcaacgtgtatccacacaagcaggatagtggctacccagagacgctggtcaacctc

SEQ ID NO: 103060 - DNA, 98 bp, Homo sapiens
ggcactttattatgcaggtggtctgtgaagccacacagtgtccagatacgaggaaacgactggagcagcagaagccgacagtgattgcaacttccact

SEQ ID NO: 103061 - DNA, 100 bp, Homo sapiens
cagcatctaactaacacggtttttattgacagagctctgatagttgttccttgtgcagaagctgctgaggagcttgatatggaaaatgaatttttattac

SEQ ID NO: 103062 - DNA, 51 bp, Homo sapiens
cttgaatagaggaaatgggatatcatctggagccaaaaacctgtatatcat

SEQ ID NO: 103063 - DNA, 82 bp, Homo sapiens
taacattgttacactggacagattaattctctgcctggcagaagtcaattcatctggaaagactatctctgagtcagactta

SEQ ID NO: 103064 - DNA, 75 bp, Homo sapiens
cgaaatgaaggagttcacccctgaatacaaaggccctgtttgtgctcttcgtcctggcctacatccacatcgtct

SEQ ID NO: 103065 - DNA, 50 bp, Homo sapiens
ctcaacagaaggtggtcatcaccaaggtcctgttctcgaacatcgaagac

SEQ ID NO: 103066 - DNA, 99 bp, Homo sapiens
aagacccacctgctgagcttgtcctccctcacctaccaacggcatagcaatcgcacagctgaggagtgtgagccactgccccatgttgtgttgatgcca

SEQ ID NO: 103067 - DNA, 75 bp, Homo sapiens
ggcggccggaatccgcgcgcagcccggatctttaagcaagcgacaatgaaggcattgcggaaaaaatctgttttg

SEQ ID NO: 103068 - DNA, 98 bp, Homo sapiens
acagaaatgctggataatttacctgagcatatgagaaattctttcattctccagatgtgtatatctcatgattgatatggagaaactagtcatgggcc

SEQ ID NO: 103069 - DNA, 101 bp, Homo sapiens
gtacatgtgtcgtatcatagttcattttatgtgggaggatgttcagcagcgcggcagagtcatggggatgtccagctcgccgctgtccaagaaacgtcgcg

SEQ ID NO: 103070 - DNA, 75 bp, Homo sapiens
ccatgatgtccttcatcctcaacgccctcacctgctaggctagcctccaagctggaagctgaattgacagttgaa

SEQ ID NO: 103071 - DNA, 80 bp, Homo sapiens
agtcctcgtcagcactgactttcagctatggaatcgatctgtggctggactgtagttgcagcaggccccagagagtgagg

SEQ ID NO: 103072 - DNA, 100 bp, Homo sapiens
ggattcaagacttcaaaacccattttcttgtaagaagactgttagaatgccctcggtaacacagaggctgagagatcctgacataaatccttgtttgtcg

SEQ ID NO: 103073 - DNA, 100 bp, Homo sapiens
acctagtacctcctaccattgtcaactgtctgcgggccaggcatcgacatccgcaacgactatcagcagctgaagcgcctggagaactgcacggtgatcg

SEQ ID NO: 103074 - DNA, 100 bp, Homo sapiens
cgctaagctgatctcctgtacagtagtgctacttaaaatatgctggggaccatcaccatcacagggactttgaacatgtcggggatcgccctcagcagac

SEQ ID NO: 103075 - DNA, 83 bp, Homo sapiens
ggccacccattgatttgatgcataaaggcagctttgaaacatctttcccagggaactccgatgaagtgttccaacaaaatgag

SEQ ID NO: 103076 - DNA, 100 bp, Homo sapiens
cttgctgtggtgcgtttacaagaagacaaagtacgccttctcccctaggaattctcttccacagcacctgaaagaggtgaacaacctttggacaaaacag

SEQ ID NO: 103077 - DNA, 100 bp, Homo sapiens
ggattggattggcatctttagagaaattctgaaacagccacacctacaaatgtagacttgcctcaggtcatccccaagtctgagaacagcagccagccag

SEQ ID NO: 103078 - DNA, 99 bp, Homo sapiens
aactgggggcctactatgtgactggaaaagtttgcttgcctaaactggacttgaagcaatttaaactactggagatctgccattttataatatcacaat

SEQ ID NO: 103079 - DNA, 115 bp, Homo sapiens
gacggggccctgacacggccaccctactgcctggaggccggggagccgacgcctgcaagagtgagccatggagctacgtgtggggaacaagtaccgcctgggacggaagatcggg

SEQ ID NO: 103080 - DNA, 100 bp, Homo sapiens
gcggctgccggggcggcgaggcgcgaggagctaggtgtggccgacgacgatgccctcgctgaggagcgcatgcggagaggccagaacgccctgccagccc

SEQ ID NO: 103081 - DNA, 83 bp, Homo sapiens
ttaagagagctctggacaagctggaatgcatccaagagaatccctcaacatgctggcgggcagggctgggcagcggcctgagt

SEQ ID NO: 103082 - DNA, 85 bp, Homo sapiens
ccgggagctgtacttctatatctacaagggggtccgcaaggcactaaaggccactggactgcagacatcagatcctcggctccga

SEQ ID NO: 103083 - DNA, 100 bp, Homo sapiens
tggagaagatggcgcctggcagggcagccagctggccaggggggcccgtctgggccagccacctggtgtccggctgctgggcctttgcaacaacttctct

SEQ ID NO: 103084 - DNA, 98 bp, Homo sapiens
ttgaagcaacaccctagatggatgtacagccatcaagaggatcttaaagtgtggtctttagtggaaaaaaaggccatatgaaatggaggcaatttgtt

SEQ ID NO: 103085 - DNA, 88 bp, Homo sapiens
gacaaccatccgtgtggtgtccatggacagagactaccacgtggcatgttaccactgtgaggttcattttccagacactgaaagagca

SEQ ID NO: 103086 - DNA, 87 bp, Homo sapiens
ggctttgggaccgtggctgctggcatggtgttggacatcgtgcagggtcatctagtagcaggcacccaaatcaggcaactcccaaga

SEQ ID NO: 103087 - DNA, 100 bp, Homo sapiens
tggggagcgcctcgtcgacatgagtgatgtggaggaaaacaacttcgagggcagagactctccttcagcaactccagaagcttcagactttggtgatggg

SEQ ID NO: 103088 - DNA, 75 bp, Homo sapiens
ttaccaaaaggagatttcttccctcctgagcgtccacaacaacttccccgagacattgacatttagggatgtggc

SEQ ID NO: 103089 - DNA, 100 bp, Homo sapiens
gctcaggaaattttccaagacaactgtgtgttctcatttcacccaaaacctttggacagtgcagggcatagaagattcattccacaaacttataccaaaa

SEQ ID NO: 103090 - DNA, 101 bp, Homo sapiens
gtcgcccaggagtcatcggacgccagaatctgcttcggaaccaaaaagaagcttcccagagccggggccaggagccccaagcgccctctagcagcaaacac

SEQ ID NO: 103091 - DNA, 98 bp, Homo sapiens
gttctatttctctagctattgccttattttttctcatggatgttcttcttcgagtatttgtagaaggactagacgcttgaagcaaagctgccatccca

SEQ ID NO: 103092 - DNA, 98 bp, Homo sapiens
ccagcgacctcagccacaggaactagagacagcttgctttctgtcgtggcaatgttttgaaactggcaaaatcaggtttgtgctttctggaaatctgc

SEQ ID NO: 103093 - DNA, 100 bp, Homo sapiens
gttggcgggcaccataggccgaagcacccggggcctaaggatcattttctcggatgcatcacggctcatcttccggctcagttcctccagtggtgtgcgg

SEQ ID NO: 103094 - DNA, 82 bp, Homo sapiens
gggtaggtactgggcaccacctctctcgcctgctgaggttatggaaacaaaggacatgctttacatcgtcactgaatttgct

SEQ ID NO: 103095 - DNA, 50 bp, Homo sapiens
cttcaagctctgtaagacatgactcagtggcctctgaggatgtggctgtg

SEQ ID NO: 103096 - DNA, 100 bp, Homo sapiens
ctggaccgaaccaaaatcatcttccaagctggctctgaagcaccgacaaggcaagaatcacaagatgcgcatcattgcctttgtgggaagcccagtggag

SEQ ID NO: 103097 - DNA, 88 bp, Homo sapiens
ctggggttcggcgctatggaggagctcgatggcgagccaacagtcactgtccctgtacccctacccgaccggcgtcgccgcttcctag

SEQ ID NO: 103098 - DNA, 98 bp, Homo sapiens
gcagctcgctctgggagcctagaatgcatcagtgcccttgtggcgaatggggctcacgtcgagaactgcaagcacatgttgaccagataactgaaatg

SEQ ID NO: 103099 - DNA, 75 bp, Homo sapiens
atgaacccgagctatagagaaaggagatgaggaacatgcttgccaactcagccagcgtgaggatcctcatcaagg

SEQ ID NO: 103100 - DNA, 75 bp, Homo sapiens
tctgcccatcacgtgccacatttgcttggggaagatattgaaatggattccaggcgtgtgcctcgagacaagctg

SEQ ID NO: 103101 - DNA, 100 bp, Homo sapiens
gactggcccccttgagcctgtcccaagccctggtgccaggtgtccatccccgtgctgaggattctgagaaacgaacccctcttcatgtggccgcatttct

SEQ ID NO: 103102 - DNA, 100 bp, Homo sapiens
ggttggcaccactgaagtgaccgaatgagttctggacatggcaagacatgtgccactctatcgggcactgctggaattgcttcgggccattgcttcttgt

SEQ ID NO: 103103 - DNA, 100 bp, Homo sapiens
tggcaaatcaagcctagtgcttcgttttgtgaaaggccaatttcatgaatttcaagagagtaccattggggtgataatatgcagcatgcatactgggaac

SEQ ID NO: 103104 - DNA, 111 bp, Homo sapiens
tgtagttcagcacttggtctctaccagtgggactttgccagttatgatattctcaggttgcaaattcgtgaagaatcagcatcatgtttggcagctgagtattggagccag

SEQ ID NO: 103105 - DNA, 100 bp, Homo sapiens
gagccatccaacatttagctgggatgaaagacagcaagtatcctgtggagcacccagacaaattcctgaagtttggcatgacaccttccaagggagttct

SEQ ID NO: 103106 - DNA, 96 bp, Homo sapiens
agatgcgggccctgctggaccagctcatgggcacggctcgggacgggcgtctctggccgagcctctttttgtggaaaacgacagcagcagcagtgg

SEQ ID NO: 103107 - DNA, 75 bp, Homo sapiens
cggagctggaatgactggcaacccagaatgtgacagtgatgataacatgggtgccaaaaatacttcaataggaga

SEQ ID NO: 103108 - DNA, 100 bp, Homo sapiens
tgctgactggtagaagcattcgtgcagacagggcaaagaaaatgggactggttgaccaactggtggaacccctgggagtctactcttcatcttgtgttga

SEQ ID NO: 103109 - DNA, 51 bp, Homo sapiens
ccaaaaagcaactacagctgatgctgcacagttggggatcttcaaaccaag

SEQ ID NO: 103110 - DNA, 74 bp, Homo sapiens
ggatcctgaaccgcgcggccgaaccctccgatgaaggatttgggggcagagcacttggcaggtcatgaaggggt

SEQ ID NO: 103111 - DNA, 90 bp, Homo sapiens
ccgtgagccggctgagcaggaagcggccgccgtcagctctaagcgaaagacatgaggcctcagcctgaaatgaggttgttttgaggtcat

SEQ ID NO: 103112 - DNA, 75 bp, Homo sapiens
cgccacgcagccggccaccgccgagacccagcacatcgccgaccaggggtctcgggaacagcttgcgattgcaga

SEQ ID NO: 103113 - DNA, 74 bp, Homo sapiens
gttaaggattccaagtaactcttatttgaaccactcacgaattcttgtttggtgcccttgctgaactggttgat

SEQ ID NO: 103114 - DNA, 75 bp, Homo sapiens
gtccacccaccgccgccgcctcccagcaacagtatcaaagtgctctattttgggcagataaagtagcttcactct

SEQ ID NO: 103115 - DNA, 82 bp, Homo sapiens
atgggaaaaaggacttccctagaattttccaagagataacttcaccaagatgtccagtgataggcaaaggtccgatgatgag

SEQ ID NO: 103116 - DNA, 74 bp, Homo sapiens
caggcttctcctttccccgctgtacctcatgatccagcagactccatttgtgcgccgtcaagtccgcaaacttc

SEQ ID NO: 103117 - DNA, 82 bp, Homo sapiens
ctgcgctgtgatgcctgcagagctgtggcttaccaggttccaaggagcaggggcctcgacaaaggaagggagcagccccagc

SEQ ID NO: 103118 - DNA, 75 bp, Homo sapiens
agggagttttccggggccctctcagcaagaacgggaacaaaactctggcatctttcaacctcatgtgcgacacct

SEQ ID NO: 103119 - DNA, 49 bp, Homo sapiens
gctttccaagcagctgggaccacagagatggggtttccccatgttaccc

SEQ ID NO: 103120 - DNA, 100 bp, Homo sapiens
aacagaagaagatggggttccttccaaagtgcagcgctgtgcagtggtcaaaatgcagatcttcgtgaaaacccttaccggcaagaccatcacccttgag

SEQ ID NO: 103121 - DNA, 73 bp, Homo sapiens
cgggcggcaaaggagcagccatgagggccgggcccagtcaccgaccgccgccgcccaccgcccgccgccatgg

SEQ ID NO: 103122 - DNA, 97 bp, Homo sapiens
aaaaaggtgaaaggtattcttgtggatattgggcttgacagctgcaaggagttactgaagaaatgcttccatcatttcttcagaaagttgaagttgt

SEQ ID NO: 103123 - DNA, 100 bp, Homo sapiens
cgcgtgtcctcggagcgcggtccctgtattggtctcctgctcctagaggtccggcctctttggcctacccccgttggctccgctgccccaggtcgatgag

SEQ ID NO: 103124 - DNA, 100 bp, Homo sapiens
gtggcccccgagaccccgtcggacccatggtttccagtgcagcgcggagtgggcgatgccagcgtgccaggaattgaatgatctggcacgggaccctcca

SEQ ID NO: 103125 - DNA, 98 bp, Homo sapiens
gcgtctttgctcccggagcgcttgaaggagctgcgggcacggatgggcagaagcctttgcaggtatcagaagttcacatatcaaatatatctgcccgc

SEQ ID NO: 103126 - DNA, 88 bp, Homo sapiens
cccagggtgctttctggagacccccagaacctgtgcatctgggtcacaggccccagttccaccccctgaagcacggatttgatgagtg

SEQ ID NO: 103127 - DNA, 75 bp, Homo sapiens
cggcagcaagaacagagagagaggtggacagatctgagagatactgaggttgtacatcctggagacctgaagaat

SEQ ID NO: 103128 - DNA, 95 bp, Homo sapiens
cgcggcctggggcgctgactcccctcacttggaacaatgcagatcttcgtgaagactctgactggtaagaccatcaccctcgaggttgagcccag

SEQ ID NO: 103129 - DNA, 75 bp, Homo sapiens
ccgtcttcggtctcctggggtcggcgccgagtgggaggatggcggaaatggattaccgggccttggtgcatgagc

SEQ ID NO: 103130 - DNA, 75 bp, Homo sapiens
gtctgccgcagagtcggcacctgaaggacatggagctgagatctgtatctgtggacctgaatgttgatccctcgc

SEQ ID NO: 103131 - DNA, 87 bp, Homo sapiens
gagctgagtggttgtgtggtcgcgtctcggaaaccggtagcgcttgcagcatgatgcctgaggaaacccagacccaagaccaaccga

SEQ ID NO: 103132 - DNA, 100 bp, Homo sapiens
cccccttctttcgatcagagatcggcggagaccctcgaagtgcgcaaacttgacactcaccctgaccgaaaatgtgccagaggaacttcaagaaccattt

SEQ ID NO: 103133 - DNA, 82 bp, Homo sapiens
cagccgcaccatgccgctcctaagcctgcacagccgcggcggcagcagcagtgagagaacctgagagccagaagcaacaaag

SEQ ID NO: 103134 - DNA, 83 bp, Homo sapiens
cagcgacacccgaggggctacacagtatataaggtcaccgcccggttgttgacctcctgtactggagagacattaagaagact

SEQ ID NO: 103135 - DNA, 75 bp, Homo sapiens
gggggacgagcagcagcggctcctcaacacccctcgaaggtgcaaatgtcaattgtcaagccttggacaaagcta

SEQ ID NO: 103136 - DNA, 83 bp, Homo sapiens
cccggccccgcccgcgccggaagagccacgccgtgcagagcagagcgggcggaggaccccgggcgcgggcgcggacggcacgc

SEQ ID NO: 103137 - DNA, 100 bp, Homo sapiens
ggtgctcttcatcaccttcgtggtcgtctggtcctactacgcgtacgtggtggagctctgcgtgtaatctggccaacctatttgtggaaatggaatggta

SEQ ID NO: 103138 - DNA, 100 bp, Homo sapiens
tgggtcctcgacctgcagggagcagaggggacagaggcaccaaggacctccaagacaggcacagactgccaaggctgggggcaacatatctgtatcaaaa

SEQ ID NO: 103139 - DNA, 96 bp, Homo sapiens
aacagttctgggggtcgtccgatcctgcaggttgggcatggagggactagagactgcagaagggtccaactctgagagttcagatgatgacagtga

SEQ ID NO: 103140 - DNA, 100 bp, Homo sapiens
cataaattgattattcctcgcccacatctgtgccagatctgccgacaccccaggccatcgagccccaggccatcgtgcagcaggtcccagcccccagtcg

SEQ ID NO: 103141 - DNA, 90 bp, Homo sapiens
gcaggatatacagcagcgaggaggggaagagaggagcagtgaggagaatgaataccttccaagaccagagtggcagctccagtaatagag

SEQ ID NO: 103142 - DNA, 100 bp, Homo sapiens
cgcacccacacgggcgagaagccctacgagtgcaacatctgcaaggtccgcttcaccagatgaagactggcccatttgcagagcactccaaccagctgtg

SEQ ID NO: 103143 - DNA, 82 bp, Homo sapiens
cctcagcacacagaggatgatgctgactttgatgaagaactgaaggcagaagctagtctaatggaccagatgagtagttgtg

SEQ ID NO: 103144 - DNA, 82 bp, Homo sapiens
ccccagcctctcgagtagctgggattacaaacgtgccccaccacacccaggccaatgagtgccaggagcgccctgttgagtg

SEQ ID NO: 103145 - DNA, 101 bp, Homo sapiens
cagggatgaacgatatcgatcagcattaaagctaggtcctgaatcattcaagtttgatggtgcagtggaggctgtggctgtccggcaggctgaaaagtatt

SEQ ID NO: 103146 - DNA, 75 bp, Homo sapiens
ccggaatcctggtcccggcgtgcacttctgaaggacttcaggaaatctggcattttttaaagtttgcgccccaca

SEQ ID NO: 103147 - DNA, 90 bp, Homo sapiens
ctgcttttcccaagaggagagaatggctgctgggtacctgccccgctggtcccagactggatacacgtctgtttaactacgcaaaaggta

SEQ ID NO: 103148 - DNA, 75 bp, Homo sapiens
tctgcatcagcctcccgaatagctgcgattacaggttcccagtctaagtgggtgactttccaagatagaggcaga

SEQ ID NO: 103149 - DNA, 100 bp, Homo sapiens
tctggcctgggggcccgagaagcttcctctcagtgcctggatcaaagtggaacagctgaagccatatcatgctcataaagaggaaatgataaaaattaac

SEQ ID NO: 103150 - DNA, 82 bp, Homo sapiens
ctgtgggcgctgctggcgctctggctgtgctgcgcggcccccgcgcatgttttccaagagataacttcaccaagatgtccag

SEQ ID NO: 103151 - DNA, 90 bp, Homo sapiens
cgaaatggtctgaggcagagtgtggttcagcagatcgggagcggtgccgagaaaaatttccttactagatgacatttcatcgcaatgtcc

SEQ ID NO: 103152 - DNA, 98 bp, Homo sapiens
gagaagcttagctccatcaaatctcaaacaatttatgagattattgataattctcaaggattctacgtgtctggatgtaccgactgcttttggaataa

SEQ ID NO: 103153 - DNA, 83 bp, Homo sapiens
agaggtgggcggctttgaccgagaggctgctggagctcgtgtttggacgcatccggaacatggtggcggtgctggaagtcatc

SEQ ID NO: 103154 - DNA, 101 bp, Homo sapiens
atacttgagccattgtgcagtgtatgctgatgactgggtaacagatccccgttttctaataggtctcggtgattcagaatacacctacttttgcaatgggg

SEQ ID NO: 103155 - DNA, 100 bp, Homo sapiens
ttagaccctcaacccaaaggagcaggagatttcggtagcgttttaactttatctcagaatctgaaagcggaaggaacgtcaaggtcgtgggaaataaaag

SEQ ID NO: 103156 - DNA, 75 bp, Homo sapiens
gggagatgcagctcatgctatagtgccgttttttgggcaaggaatgaatgcgagagctgtagtacacatggatga

SEQ ID NO: 103157 - DNA, 127 bp, Homo sapiens
ggaaatgataaactaattaaggaaggagatatagtgaagaggacaggagccattgtggacgttccagttggtgaggaagaggatggagatgaagatgaggaagctgagtcagctacgggcaagcggg

SEQ ID NO: 103158 - DNA, 98 bp, Homo sapiens
gcggctttggaagccgtgcggagcgagttacgagaattcccggccgctgcaagggatacgggaatatgaatggattcattcccaaaccaaaagattga

SEQ ID NO: 103159 - DNA, 75 bp, Homo sapiens
aaagactctccctatgaattgaagaaagggtcctcactgagcagcgagtcgtcccccgtgtcctctccggccacc

SEQ ID NO: 103160 - DNA, 80 bp, Homo sapiens
aggacggtcggactcccgcggcgggaggagcctgttcccctgagatttttggaagtaccagcacagtgacgcttcctgaa

SEQ ID NO: 103161 - DNA, 90 bp, Homo sapiens
cgcgactcgggctgagggagctcgggccaatcagagggacggccccagaatggcatggtagagttggctttgtgggacacagctgggcag

SEQ ID NO: 103162 - DNA, 97 bp, Homo sapiens
gatgtgaagatccattgctcccattgaggcagacaagttgcatttgctggtctggcctttgcgtccttctacctggcagggaagttacactgcttca

SEQ ID NO: 103163 - DNA, 90 bp, Homo sapiens
tcatcaccggtatcacaggccagatgccttcaattaagttgcagagttctgatggagagatatttgaagttgatgtggaaattgccaaac

SEQ ID NO: 103164 - DNA, 100 bp, Homo sapiens
agcgcgaagtgaagctgtgggacacgcggttcttctccagcgccctggcctccctcaccttggacacctcgcttgggaactgtggctgcaccatctgtct

SEQ ID NO: 103165 - DNA, 83 bp, Homo sapiens
cttagctgtgctcgcgctactctctctttctggcctggaggctatccagcatggcccactgcgtgaccttggttcagctgtcc

SEQ ID NO: 103166 - DNA, 74 bp, Homo sapiens
tgaacacatgccttcaggaactcggaccattggagccagaatctcatcactgaaaacgcaaatccaatctcagg

SEQ ID NO: 103167 - DNA, 106 bp, Homo sapiens
ctctcagcaagaacgggaacaaaactctggttattgttgtgggtaatccagccaataccaactgcctgactgcttccaagtcagctccatccatccccaaggagaa

SEQ ID NO: 103168 - DNA, 83 bp, Homo sapiens
ccaaattcgagaccaagagcgcgcgggtcaaagacccaacatgagtgaagtttcctgcaagaaacgggacgactatttggaat

SEQ ID NO: 103169 - DNA, 75 bp, Homo sapiens
actacctggcattgccttttgttgaggtgggggagtggtactaaggatcaagtatactgttaaaagaaaacaaaa

SEQ ID NO: 103170 - DNA, 98 bp, Homo sapiens
cgccgtggatttcgctgagcggcacggctacatcaagggcatcgtcaaggtgacataccgcgtagtccaggtgactgatggtcagctggacggccagg

SEQ ID NO: 103171 - DNA, 82 bp, Homo sapiens
aaccacggacgaccaccttctccgctgtgcggcacagtccacaggtcctggctaccctgggaagagacaagaagtaaatgaa

SEQ ID NO: 103172 - DNA, 82 bp, Homo sapiens
atgggagattatgcgatcatgtttccacaggctggcaggaccagatgctgtgttggggaggacaatctggggagttttaggt

SEQ ID NO: 103173 - DNA, 100 bp, Homo sapiens
agggaatgccagtacaacagccacaaggggtcttcctgtggccctcaaacaaaaaatcactgcattacatcagcagattctataccagactgttacagga

SEQ ID NO: 103174 - DNA, 98 bp, Homo sapiens
gccagatgatccacaggatgctgtagtagcaaatcaggttgcaatgaatgtgtatgagttatcatcagctgccggattaccttgtgagattgatcctg

SEQ ID NO: 103175 - DNA, 108 bp, Homo sapiens
ctggagaaggacttcagcagcatgaagaagtactgccaagtcatccgtgtcattgcccacacccagcacatcctttactgcattgtggacagcgagtgtaagtcaagg

SEQ ID NO: 103176 - DNA, 108 bp, Homo sapiens
ttccattttgccctgaaagtcccagatttttgctcattaacagaaaagaagaggagaatgctaagcagaccgaaggagtaaaggtgctgcaatgatgttagctgtggc

SEQ ID NO: 103177 - DNA, 88 bp, Homo sapiens
aggatctttccctggaggaaattcagaagaaattagaagctgcagaagaaagacgcaagtgagggtcgctgtctgcccattgatagag

SEQ ID NO: 103178 - DNA, 100 bp, Homo sapiens
gcctggcttgtgccaaggaggaaagtgaatggcttggaggaaggcgtggagttcctgccagtcaacaacgtcaagaaggtggaaaagcatggcccggggc

SEQ ID NO: 103179 - DNA, 74 bp, Homo sapiens
tttacttttaattttgcaaagaatccaggacaaaaaggattagcacctcaatgacctgaagaaggagaacttca

SEQ ID NO: 103180 - DNA, 50 bp, Homo sapiens
ccggtttctcggcgaatgacagcacaggtacccagactcatggtatcgtg

SEQ ID NO: 103181 - DNA, 100 bp, Homo sapiens
gcagaaggcctctctcctgatacagcaggcgctcaccatgttccctggagcttgctatggcatcgttcaggtgccaacgggaccctggttctgccggaaa

SEQ ID NO: 103182 - DNA, 51 bp, Homo sapiens
ctcacagccaccggtaccttcttccaggtttacccaaggtccagcctagcc

SEQ ID NO: 103183 - DNA, 124 bp, Homo sapiens
aaacacactgtccttcagaatatgatgcagctgcgccagctagatatgaagagaatcacgcttcagtatcagacacagcacagcagccatctgaagagcaaagcaagtctcttgaaaaaccgaa

SEQ ID NO: 103184 - DNA, 75 bp, Homo sapiens
ctgtgttaaattcagcccctcttccagataccatttggctttcggctgtgcagtttgcagttaacatgtttcgaa

SEQ ID NO: 103185 - DNA, 90 bp, Homo sapiens
ggatggccgagtggtctaaggcgccagactcaaggtctccaggaaacctagagaaaaaccgttatggggatgtaccctgcctggaccaaa

SEQ ID NO: 103186 - DNA, 100 bp, Homo sapiens
ctacttgcagcatattacctatcaggagaggagcccatgactgaagagttgctgaaacaacaaaagctgaattcacatgagaccactataactcagcagt

SEQ ID NO: 103187 - DNA, 96 bp, Homo sapiens
ccgcatgctggggcacctggtctccaatgccccccgactcatccgcccctacatggagcctattctgaaggaggctgcattgaggcgtgagcaaaa

SEQ ID NO: 103188 - DNA, 100 bp, Homo sapiens
tgctccagcagcgccctcaacaaggccggcgacagcagcaggttccccagcgtcaagctgtattagtcgacaggaccatttacatttcaggacagatagg

SEQ ID NO: 103189 - DNA, 90 bp, Homo sapiens
ctggaatctcacaacaataccttagttgacccttgtaacccctgaacagtgcccaagtgttgtctctttgttgtcagagagttacaaccc

SEQ ID NO: 103190 - DNA, 80 bp, Homo sapiens
aatctaaaagcatggatgccatcagtgggcatccccaccatcagatggtgcggggcagagggggactacaacgtcatggt

SEQ ID NO: 103191 - DNA, 100 bp, Homo sapiens
cagggcccgcgggccaggagagcgctcggcgggctgaacaagctccaaacacttgtgaatgtcatgtttgtaagcaggaagcttctggactgacaccatc

SEQ ID NO: 103192 - DNA, 100 bp, Homo sapiens
cagggaggctttcagccggagaagcgagtttcagctgatggacaagaggaaagacccttcttccgttgatatcaagaaagtgctgttagaaatgaggaag

SEQ ID NO: 103193 - DNA, 50 bp, Homo sapiens
ccagtgcccatgaaggtcagactgaggttatacattggctcttcaaagac

SEQ ID NO: 103194 - DNA, 95 bp, Homo sapiens
gccaacgtggtgggacccaaaatctgcctggaagataatgtgaaagcagatggtggagctgaatatgccacttaccagactaaatcaaccactcc

SEQ ID NO: 103195 - DNA, 87 bp, Homo sapiens
caggagacccgcggttacatccaggcccggctccacctgcagcatgagaatcggcagcagaaacttgggtccctgaacaatgagcct

SEQ ID NO: 103196 - DNA, 75 bp, Homo sapiens
ctgagaccagagttagtggaatccacatatctcctctaccagatcccagatgcagtgactggttactacctgaac

SEQ ID NO: 103197 - DNA, 75 bp, Homo sapiens
ttagaagtggtgatgcaagaagtttctaggaaaggccggacaccagccccgaaactacctcaacaccctgtccac

SEQ ID NO: 103198 - DNA, 74 bp, Homo sapiens
acagaaacccctcctcccctagcttcactcaatgttagtaagaaggccaatgatgaggccaatcagagtgatac

SEQ ID NO: 103199 - DNA, 75 bp, Homo sapiens
ggaaaattcagttgttgtgcctcatggagaataccctctaccatctgctttggtcagggtgccgctcgaggattt

SEQ ID NO: 103200 - DNA, 82 bp, Homo sapiens
cggccgtctctggagagcagcaggaaccacgtgaatgttgagggggcgacacacaagcaggtggtggacctgattcgagcag

SEQ ID NO: 103201 - DNA, 50 bp, Homo sapiens
aggagattaacccacaaactcctgtggacatctctacagcaatgagtgaa

SEQ ID NO: 103202 - DNA, 98 bp, Homo sapiens
gagctccgagaaattatgggtacccctgaatatgtggatttgttcccgacaaggagttttctggttcagaccgtagacagagaggccgagaaggacca

SEQ ID NO: 103203 - DNA, 102 bp, Homo sapiens
cagtatatcacgcgcttctgcaatccaagccgactgatgactggagaggatggctactatttcaccaatctgaggctgggcactcactgcagctggctaatg

SEQ ID NO: 103204 - DNA, 75 bp, Homo sapiens
aaaccaagatggaagaattcaaggaccaattacctgctgatgagtgcttatgaggtgatcaaactcaaaggctac

SEQ ID NO: 103205 - DNA, 100 bp, Homo sapiens
tgagggggactggcctggcgtgcactccgcacctcggggacattattgcgcgtggaacggctgcttttggaagcattccacgcctacgggaaggcaggca

SEQ ID NO: 103206 - DNA, 82 bp, Homo sapiens
ctgcctcgcgcccgggagcaggaggagctgctggcgcccgcagatgcaaattgtggctactaatttgccccctgaagatcaa

SEQ ID NO: 103207 - DNA, 75 bp, Homo sapiens
ccaatcctcacctcactgctgtgctccagaacaagatgccaacgtccggcggtacctccagctgacacagtcaga

SEQ ID NO: 103208 - DNA, 100 bp, Homo sapiens
aatgctgtggatcaagcctccccaaccccaccatcccaccaaagggggctgctgaccgagagagctcactcagccagggtgtcaaattgagaaccaggta

SEQ ID NO: 103209 - DNA, 100 bp, Homo sapiens
ttcttgcagcccttcaagaaagacttgatggtctggtagaaacaccaacaggatacattgaaaggaaattgcaagacctaacatggctgaaagagaaaca

SEQ ID NO: 103210 - DNA, 100 bp, Homo sapiens
agataccagagaggcctagaaaggaatgatagctggggttcttttgacctgagggctgctattgtatatcacactaaagatggggtttcaccatgttgcc

SEQ ID NO: 103211 - DNA, 97 bp, Homo sapiens
ccaggaatccgcccgcaagagcgagccgcctgccccggtgcgcagacagagctattccagcaccagcagaggttttgtcctggtcatcgggctcgtg

SEQ ID NO: 103212 - DNA, 125 bp, Homo sapiens
ctttggagctgtaggattgaatgactggcctactgggttttggacgttcatgtatcctgtctcggcgcggaagatggccggcggcgtggacggccccatcgggatcccgttccccgaccacagca

SEQ ID NO: 103213 - DNA, 100 bp, Homo sapiens
ggtgaggacccagtggcataggagctgaggagggtaaaaaacttgttgctgcaagtcaagctgccttaggcttataacatcacatttaaaagcatctcag

SEQ ID NO: 103214 - DNA, 98 bp, Homo sapiens
caccatcctgcgcgtcgtgtcttgggtttgtctacagattttgagcgttcgaagttgacccctgactaagtatactttgctgctccctcagcctttga

SEQ ID NO: 103215 - DNA, 101 bp, Homo sapiens
cattgagagaaccatgatggtcaattgccatgcacacttctgggtttgtaaaagaatggacttggtctgccagagaatgttgaatcagggatttctgaaag

SEQ ID NO: 103216 - DNA, 50 bp, Homo sapiens
caccaagtcacatgacaagcagcatgcatatcattctgtttcaactcccc

SEQ ID NO: 103217 - DNA, 96 bp, Homo sapiens
gtgggatagtcttggagaggagcaaaaacaggccccatcacaggtatatggaggagtgacctactataaccccgcccagcagcaggtgcagccaaa

SEQ ID NO: 103218 - DNA, 100 bp, Homo sapiens
atttttccctctaccttaaggatgtgcaggatcttgatggtggcaaggagtcagaagccaatgacctggccctgaggctggctcgccactacacgggaca

SEQ ID NO: 103219 - DNA, 87 bp, Homo sapiens
gggctgtagtgaggaaggacctgctgatgaatattacatcatataccgaaatgtttttgataagagtgatcagcagctggactgtgc

SEQ ID NO: 103220 - DNA, 55 bp, Homo sapiens
cgcggagctggaatgactggcaacccagccacaatggtgcgcatgaatgtcctgg

SEQ ID NO: 103221 - DNA, 75 bp, Homo sapiens
cttcattcgtctgattgatgcattcaaaggagtggtgatgcacacatttgggattcccgtcgtaacttaaaggga

SEQ ID NO: 103222 - DNA, 100 bp, Homo sapiens
aggtacttaaagtgctttccgaagctgctatttcaggtgactgccaacagccagcccaatgtcgaatccagaaatgcaccacggacttcgtgtccctgac

SEQ ID NO: 103223 - DNA, 82 bp, Homo sapiens
aggctgagtacgacagcctcaaacaggagctggagcagctcaaagagacaatgcagatcttcgtgaagactctgactggtaa

SEQ ID NO: 103224 - DNA, 100 bp, Homo sapiens
cgccagcatgtctgacaaactgccctacaaagtcggtacaccaggggttggaaaaaccacactaggcaaagaacttgcgtcaaaatcaggactgaaatac

SEQ ID NO: 103225 - DNA, 82 bp, Homo sapiens
tggcctgaccctctcacagcataatttcccggcacctgctatgtttccagtgtcctctgggtgtttccaagagcaacaagaa

SEQ ID NO: 103226 - DNA, 107 bp, Homo sapiens
tctctggggactctgaacttccctggtcgaacagttttttctaatggctattcaagaatgcttccaggaccactcatgatgtaccagtttcaaagaagtttcatcaa

SEQ ID NO: 103227 - DNA, 83 bp, Homo sapiens
cgccatgggtgttgtccgcagccgcagcaatggctgccatccggaagaaactggtgattgttggtgatggagcctgtggaaag

SEQ ID NO: 103228 - DNA, 83 bp, Homo sapiens
gggaaggcactcaaaagtggggggcaggaaagtgatgccacgcttcgctgaacaagtagaggttgccattgaagccctgagtg

SEQ ID NO: 103229 - DNA, 100 bp, Homo sapiens
agttgcagggtcacagaaacatcgaacatcgatatattgaactcttcttgaattctactcctggaggcggctctggcatgggaggttctggaatgggagg

SEQ ID NO: 103230 - DNA, 90 bp, Homo sapiens
gaaggccgagggcttcgtggatgccctgcaccgggtccggcagtgccggtggtggtgtgcacattgagccccggtatagacagttccccc

SEQ ID NO: 103231 - DNA, 100 bp, Homo sapiens
gcgggcccggcggcggcggcagcggggtccgggtccggagcgccacaattctgtttctggcgtctgcatacgcaagtccccaactcgctgaggagagctg

SEQ ID NO: 103232 - DNA, 75 bp, Homo sapiens
caagttaaggtccaaaaaaactccagctgtgaaagcaacataaatgcttcagaggatgattccgaagaagacgga

SEQ ID NO: 103233 - DNA, 75 bp, Homo sapiens
gacaacgtggatcgttgttttgaaacgtatacagaagatgggtgtccacataagaaattctttcacacacgtttt

SEQ ID NO: 103234 - DNA, 82 bp, Homo sapiens
cagagcgccgcgcacttcgtcatgttcttcgcgccctgtttatgtgaagaaccagctcagtgggactctacagattaaacca

SEQ ID NO: 103235 - DNA, 100 bp, Homo sapiens
gaggacggggcgccggcgccgccgcccccgggctcgcggcctgcaggttgggacaaacattcctatggttaccatggtgatgatgggcattcgttctgct

SEQ ID NO: 103236 - DNA, 75 bp, Homo sapiens
cttcaggccggctccggtggagcgatcagagatttgggccaggcttagtcatctattggtatggatttatccagg

SEQ ID NO: 103237 - DNA, 74 bp, Homo sapiens
agaatgatcaggatacttgggactacacaaaccccaatctcagtggacaaggacgatgaggtggtcctgcagtg

SEQ ID NO: 103238 - DNA, 100 bp, Homo sapiens
gatggcttcagacagcatatttgagtcatttccttcgtacccacagtgcttcatgagagttggagaaggaggagcagatacacagtgtggacattgggaa

SEQ ID NO: 103239 - DNA, 89 bp, Homo sapiens
gtcttcggcatcgggcgacagcaggtcacagtggacgaggtgttggcggaagtgaaagccctgtgtaaggaatgtgtagtagaacgttg

SEQ ID NO: 103240 - DNA, 75 bp, Homo sapiens
ccgaaaacgcaagaaagatttaacacagactgcttcaagcaccgcaagggaagatgagaatgtgcctactgctcc

SEQ ID NO: 103241 - DNA, 100 bp, Homo sapiens
attaagaggatccggctggtcacttgcctggagaggatcctgcatgctgatagtgctgaggcacctgccagctaaggacaggcgacactaacaggtgaag

SEQ ID NO: 103242 - DNA, 75 bp, Homo sapiens
gagcccggcgcaggtgaccggcgcgcgggagcgctacggccccaacggttcgagaacttgtcttggacaattgca

SEQ ID NO: 103243 - DNA, 82 bp, Homo sapiens
tctgcggaagtgcagctgcctcagttcttagcgcaggacagaactgtaccgctctctttttggccagctccaccctcccgac

SEQ ID NO: 103244 - DNA, 100 bp, Homo sapiens
agcctcctgccgggatgattctgagtgtatcacaaggctatgcagttctaggtctcgttccagatcatattctccagctcataacagagaaagaaaccac

SEQ ID NO: 103245 - DNA, 100 bp, Homo sapiens
gggactggaaccatctcagaagccatgcccctcaggctggaacttgccctgtctcctcgcagatgaggtggaaaaggattattcatacctgaaggagata

SEQ ID NO: 103246 - DNA, 100 bp, Homo sapiens
aagcataggtcaaagctgtttggagaaaatcagaagtacagttttatctagccacatcttggagatatggagtttggacctccaacagttaatgataaac

SEQ ID NO: 103247 - DNA, 74 bp, Homo sapiens
gtgcccctacgtgcacaacatcacccgcaagcaattaccagctctggctgggtcgccacaacttgtttgacgac

SEQ ID NO: 103248 - DNA, 75 bp, Homo sapiens
gaactactgccggagcttctgccaggtggtggtgaagtttattaagaaggagaaggtcttggaggattgttggat

SEQ ID NO: 103249 - DNA, 74 bp, Homo sapiens
gtcagcagaagccaatcttaaatctagctccttgaggagaatgaccagctgatccgctgtattgtggagtatca

SEQ ID NO: 103250 - DNA, 75 bp, Homo sapiens
ctcacccgaaggctgattactttgggagtgcatccgccccaacccttttccccctcgtctcctgtgagaattccc

SEQ ID NO: 103251 - DNA, 87 bp, Homo sapiens
attctggatggcacctgaggttctccgagatgagccctataatgaaaaggtgcccctgaccccacagctggggccagcattgacgat

SEQ ID NO: 103252 - DNA, 90 bp, Homo sapiens
taaccctgccaaatacatcagcttgtaggagacagaggtttatgtctcattggatcaacctgtgactgctttaaatcttttcaaacaagg

SEQ ID NO: 103253 - DNA, 100 bp, Homo sapiens
ccggtttgctggaagcgttcggaaatggcaacttgcgcggtggaggtgttcgggctcctggaggacgaggctcaacgagaacctttgacaagagcacgaa

SEQ ID NO: 103254 - DNA, 100 bp, Homo sapiens
aagaattccttgctgattggactttcaactggtctgtttgatgcaaacaacccaaaggaactcattatacaatgacaaatggaggcagcattaacagttc

SEQ ID NO: 103255 - DNA, 100 bp, Homo sapiens
aatcaacctatcctccttcaggaccaacttacttcaatgagaatcaatacccagatgaagcaaagagggaagaaattgcaaacgcttgcaatgcagttat

SEQ ID NO: 103256 - DNA, 75 bp, Homo sapiens
taagactacctttttcagaaatgcgcagagcaaacatctttcaaaggtccggcgccagctgccagtcgaggaacc

SEQ ID NO: 103257 - DNA, 83 bp, Homo sapiens
cctagtgcgccagggcctcaagtgcgatgattagaagcccaggacccaggaaggagacacaggaaatttattcaaagtcccca

SEQ ID NO: 103258 - DNA, 76 bp, Homo sapiens
cccgccggggatgggaagaagccctccattgccgccgctaaagaacgtgccaatggaatggagcttgatgggcgta

SEQ ID NO: 103259 - DNA, 98 bp, Homo sapiens
gaagagattgcctgattaatgctgctaagacatccatgtcttccaaaatcattggaatcgacgaagcggagcaggtgtgggtgtgggagtacgagacg

SEQ ID NO: 103260 - DNA, 51 bp, Homo sapiens
ttcaagaacaaaggccgcgacttggagtgtttctgaaagatctatccagca

SEQ ID NO: 103261 - DNA, 51 bp, Homo sapiens
gttttgccggaggagcccctcaggccgtggagattctggacgcaaagacaa

SEQ ID NO: 103262 - DNA, 90 bp, Homo sapiens
ctgtggttcatgccacagccaaagcctgcaaaccattttaggtgtgccatccctagaagaagtcataaatccaaaacaagtaattcccca

SEQ ID NO: 103263 - DNA, 100 bp, Homo sapiens
cggcctcgtgcgccgcgctttgagaatttaagggacgctgtgaagcaatcatggatgcaatgaagagagggctctgctgtgtgctgctgctgtgtggagc

SEQ ID NO: 103264 - DNA, 100 bp, Homo sapiens
ctgaccatgctgcttaccaccccttccgccgtctggccatctgtgctgcggatcggcctgctgggctgcaatgccacccgcgagaatgtggaccgcgtga

SEQ ID NO: 103265 - DNA, 82 bp, Homo sapiens
ggtgaagacagatcatgggactgataaattggtcagatgtaccaacagtaccagcaacaggccggctatggtgcacagcagc

SEQ ID NO: 103266 - DNA, 101 bp, Homo sapiens
tgtgtgattgtgtctgttctgaccaacgtgctcgtgggtggaaacaccccaaggaaggtaagaatgattgatgttggctgatattggagtgctcattcaca

SEQ ID NO: 103267 - DNA, 89 bp, Homo sapiens
cgaatgataactattgatgggaaacagataaaacttcagatatgggatacggcaccacactgtaactcgaggcatcaccaaaggcgtga

SEQ ID NO: 103268 - DNA, 98 bp, Homo sapiens
aatatttggcttgttgatgggtacccttcaaaaatttaaacaagaatccactgttgctactgaaaggctgcaagctttcttcctggtggcagatgaca

SEQ ID NO: 103269 - DNA, 74 bp, Homo sapiens
agcgtcctcttgtcaccgacagggcgattgcagtgcgttccgcttcagaatggaaagtgcaacttaaaaccaaa

SEQ ID NO: 103270 - DNA, 112 bp, Homo sapiens
gcggctcttcccgcccgccttccgccgtctcttcgagttcttcgtgctgctcaagacaatgcagatcttcgtgaagactctgactggtaagaccatcaccctcgaggttgag

SEQ ID NO: 103271 - DNA, 49 bp, Homo sapiens
ccggtggtcttctcagaaagcagagaattatatccagatcgagagacag

SEQ ID NO: 103272 - DNA, 74 bp, Homo sapiens
gaaggagcaccacctgaagacaaggatacctacctggtttatattctaaatgaattggctggaaactcctttat

SEQ ID NO: 103273 - DNA, 93 bp, Homo sapiens
ctgtcttcggtggactccttcggcagtccacccaccgccgccgcctcccagctgtggcggggccttcgtgggcccgcgatgccaggaccccaa

SEQ ID NO: 103274 - DNA, 98 bp, Homo sapiens
ctgagtttgagccctatgagcagtggaacctaggaatgtaaaaagggcagctctctggcatgttcctgactgaggatctcataacatttaacttgagg

SEQ ID NO: 103275 - DNA, 90 bp, Homo sapiens
gctgccccaatccccggcagctctctcaggctggagcattggatttgctaaaggagcttaagaatattcctatgaccctggaattactgc

SEQ ID NO: 103276 - DNA, 74 bp, Homo sapiens
gctcaggtgctgcaggcacagcccgagaaaccgcagcactacacgcctatgaaaggaggttccctacatgtcct

SEQ ID NO: 103277 - DNA, 51 bp, Homo sapiens
ccgaggcaggcggatcacccgagatacaaactggactctcaggacaaaacg

SEQ ID NO: 103278 - DNA, 75 bp, Homo sapiens
caggatattatgaagttataaggttccccatggacctgtcgcgaaatcgcctttcagaaattcctatagaagcat

SEQ ID NO: 103279 - DNA, 96 bp, Homo sapiens
cctctctcaactgtatagctatcctctttttaagggctgggagaactcaggaagcctggaattgaatgatctggcacgggaccctccagcacagtg

SEQ ID NO: 103280 - DNA, 82 bp, Homo sapiens
ccgcgcacagctgctcccttcgccttcgccctttccacctcgcggcagttcgttggagtgcttagtgcagttggtgagagcg

SEQ ID NO: 103281 - DNA, 71 bp, Homo sapiens
aatctgacactatggacttcagacatgcagggtgacgcatcacgtttgcagggggccccggcagggatggc

SEQ ID NO: 103282 - DNA, 129 bp, Homo sapiens
aaatgaaatgatggccacgcgtcggactggtctgtctgagggagatggtgacaagctcaaggcctgcgaggtcggagtgcagtggcacaatcatagctcactgcagccttcaactcctaggctcaagtg

SEQ ID NO: 103283 - DNA, 101 bp, Homo sapiens
gctccacctgtaagaacagaaaatcgtcttatagttgagaatttatcctcaagagtcagctggcaggttatgatgatggttcttcctttattgatatttgt

SEQ ID NO: 103284 - DNA, 90 bp, Homo sapiens
aagaccactccagcgatatgttcaactatgaagagcgccatgctgcactgcccctactggaacaccttctcgctgccgccataccctgcc

SEQ ID NO: 103285 - DNA, 90 bp, Homo sapiens
gcggcgccgagaggccgtgcgggacgcgggcgccaggaccggccgaacgcagagatgcctttgaagatgagaaacccccaaagaagagcc

SEQ ID NO: 103286 - DNA, 75 bp, Homo sapiens
agcgggccctggccgctcacccgtggaaagtacaggtcctgacagctgcccccctggccacagagaggagcctta

SEQ ID NO: 103287 - DNA, 100 bp, Homo sapiens
cagcctcctgagtacctgggattacagcatacatctgtggatggatatactgaaccacacatccagcctaccaagtcgagtagcagacagaacatccccc

SEQ ID NO: 103288 - DNA, 90 bp, Homo sapiens
aggggccccagcagcccccgaaggccctatcaggacatggagtatgaaagacgatgagtgtgggtcagagagccaaactgactatatctc

SEQ ID NO: 103289 - DNA, 90 bp, Homo sapiens
cgcgaatatcgtcatcgttagaaggagcttcctggacgatttaacaggtcctcaagcgagtcttcaaagaagtgaaaagaaaatggatcc

SEQ ID NO: 103290 - DNA, 100 bp, Homo sapiens
cgccgggtttggggcgccgcagtcccgggaacggagcctatcacatggaaagaatttgcaaacatccacccctttgtgcctctggatcaagctcaaggat

SEQ ID NO: 103291 - DNA, 96 bp, Homo sapiens
gttcttactggccctgagtctttgggggcagcctgcagaggctgcgatctttctcctggcctgccctccatgtcggggagctatcgtcgtcttcaa

SEQ ID NO: 103292 - DNA, 90 bp, Homo sapiens
ccggctcctgggaggagcagacctggcgcaggggaaccacagtggggcccgcaagaaactgaagaagagaaagtctgtgattgctgtgag

SEQ ID NO: 103293 - DNA, 137 bp, Homo sapiens
ctcgggcctcagaagtccgtgccagtgaccggaggcggcggcggcgagcggttccttgtgggctaggaatggatgtatatggctacctactggcacgagaagggcggctagaggatgttgagaaccttggatgccgc

SEQ ID NO: 103294 - DNA, 98 bp, Homo sapiens
aacgggaggtgaatttccatgtcaacatagtcctgcagcagctgaggcgactcaggagacagtggagtccctgatgcagaagttcaaggagagtttcc

SEQ ID NO: 103295 - DNA, 74 bp, Homo sapiens
cagatccgcttcagcaacatttccgccgccaaaggggtgctttccagacaggccaaggacctctcgatgcccaa

SEQ ID NO: 103296 - DNA, 100 bp, Homo sapiens
ggacgccattttcttctgcacttctgtctggagaggttggtcaaagaaaaagtgatgtatgaaaaagaggcaaaacaacaagaagaaaagattgaaaaaa

SEQ ID NO: 103297 - DNA, 100 bp, Homo sapiens
acaacggctcactgaactcctggagaatgacccatcagtaaggggctatctgatgggttagagtgcctttgagaagaaatcagtggatactggatttgct

SEQ ID NO: 103298 - DNA, 83 bp, Homo sapiens
ccgggtgtccggccgtgtcccgaggaagtgcaagacccgacccctctgccatgaaccagtccatcccagtggctcccacccca

SEQ ID NO: 103299 - DNA, 90 bp, Homo sapiens
agaaaatctacaatttcttcgagacactcatataaaggtccccttcccctgagcccatctacaatagcgaggggaagcggcttaacaccc

SEQ ID NO: 103300 - DNA, 101 bp, Homo sapiens
ctccagctgaaggtgcgagaagaagtcagaaatctacagttactcacacaaggcatcagatgccagctctgaaaaactcttcaacactgttattgtaaaca

SEQ ID NO: 103301 - DNA, 95 bp, Homo sapiens
gaggaaggaacgaggcaaggagctaaagcagcgtgcgttcagccctggggtagtaaacctattgatggcaattttgctgactgtggaagtgactc

SEQ ID NO: 103302 - DNA, 82 bp, Homo sapiens
ggtcgtgaaactgcttcccgaggagcattggaagctgggtccatggctggcagtggaaatccctgatctgattcagaagggc

SEQ ID NO: 103303 - DNA, 83 bp, Homo sapiens
gcccgccggcagcgccgctccccagggagggagtccgcagcctgaggaggcagttcccatgttatacgcagcagatacttacg

SEQ ID NO: 103304 - DNA, 100 bp, Homo sapiens
aggagtcgccgccgccccgagtcccggttttgcacactagggaccaagaagccctcggggacactgctgagaaaagactgccgaagggaagaccagcggg

SEQ ID NO: 103305 - DNA, 100 bp, Homo sapiens
atttgtagaagccatgattcgtcaacttaaagaatcattgaaagcaaacaattataatgaagccgtgtatttggtgtcccgatttcttcatacctactca

SEQ ID NO: 103306 - DNA, 75 bp, Homo sapiens
gatttgttaaggattccaagtaactcttatttgcaagtgcagccgcggagccctgtacacaggcttttccatcct

SEQ ID NO: 103307 - DNA, 90 bp, Homo sapiens
agtgatgaggaaagctgtgaaagttctcaaggttcgctgtgatcctgagattcaagaactgcgtcagtggcagaagaaacttcgcgaggc

SEQ ID NO: 103308 - DNA, 100 bp, Homo sapiens
tgaaaaccttcagaagatggaaaatgtgcttgatctttggagttcaggtcttaagggtacagagaaagcactttcaaaacttcacgagtatttccctgaa

SEQ ID NO: 103309 - DNA, 100 bp, Homo sapiens
ttacgtcgggtggttttactggagtattggaactcagatgtcagtattgaatatggtggtgaggcgtgaccctggcaacactgaacctgtgaaagccaag

SEQ ID NO: 103310 - DNA, 73 bp, Homo sapiens
gctggatagataccgaattcttatcacaaagatggggtttctccagttggtcaggctggactcgaactcccga

SEQ ID NO: 103311 - DNA, 100 bp, Homo sapiens
agaacttgagagcatccgaactcctggatttcaggacaaggacctttgtgctgctcctgcaaatggtggaaatgtctccaggcctccagtgaccctgcgc

SEQ ID NO: 103312 - DNA, 75 bp, Homo sapiens
attaatcataaatacactctgcctttccgctgtgcccattgccattactcctgcaacatatctggctctctgaag

SEQ ID NO: 103313 - DNA, 100 bp, Homo sapiens
ctgcacttcctcaaccctcaggaagctcagcggtgggcagtcctagtccgaggtgccaccgtggaaggacagaatgattattgccaagcgcctcccccca

SEQ ID NO: 103314 - DNA, 50 bp, Homo sapiens
gttctgagtcacccgggactggaggggcggcgactggcggcgcgatggac

SEQ ID NO: 103315 - DNA, 83 bp, Homo sapiens
gtctggggcaaagggaccacggtcaccgtctcctcaggtgcgcgcggagccatggttatcatgtcggagttcagcgcggaccc

SEQ ID NO: 103316 - DNA, 100 bp, Homo sapiens
ctggtctacatcctgcgggtgcctttgaaaatcaacgacaacttgagcacagcctaaacccaccaagggacgaatgcgcatccactgcttagagaatgtg

SEQ ID NO: 103317 - DNA, 96 bp, Homo sapiens
cgggtgctggagctatacagcggcgtgggcggcatgcaccacgcgctgagaggtatgagttaatacagaaaggagtgactgaacttagaactgttg

SEQ ID NO: 103318 - DNA, 100 bp, Homo sapiens
caggagcctgccccgccctggggacgaagagctgcagctcctcctgtgcggatagctgatcagcttccttgggttttgctgatgacacaagagagctttg

SEQ ID NO: 103319 - DNA, 96 bp, Homo sapiens
gtgccgtggtgcgcatgggtatctacgtgggggccaaggtgtacttcatctacgagaaactggcgatggaatatgagaggagccctctggaaagaa

SEQ ID NO: 103320 - DNA, 97 bp, Homo sapiens
ttttcaggaccaaaattgtggaaaagtcactctgagacacgctgtgaacaagacaggccttccccaaccacagcgccccctgcgccacccagcccct

SEQ ID NO: 103321 - DNA, 90 bp, Homo sapiens
ccgggcggctgccgagaaggagggaggggaaacacaaagccggctacgcgctgcgagatcctgataacttaagtgactctctcttttccg

SEQ ID NO: 103322 - DNA, 75 bp, Homo sapiens
tcagctacatattctgccttttcaacactacacagaaatgggacgtcggtcatcagatactgaagaagaaagcag

SEQ ID NO: 103323 - DNA, 100 bp, Homo sapiens
ccgaccctccaagttagctgacttctgggggaacaacaacgagatcctcagtgggctggtggacgaagccattgataccaaatctctgttggatgcttca

SEQ ID NO: 103324 - DNA, 100 bp, Homo sapiens
gagtgaacgctgctgatgggagataccatgtcctgtttctcggaacaggatcgaatcatcaatttagttgttggcagcttaacatccttattgattctag

SEQ ID NO: 103325 - DNA, 83 bp, Homo sapiens
gagccgggaaagagcagacggcaccgatggagaaggaggagacaacccgggagctgctgctgcccaactggcagggtagtggc

SEQ ID NO: 103326 - DNA, 100 bp, Homo sapiens
cgttgctcttgcttttcctcgctggggtgtacgagagcagagctgacatctgataaagacatgtaccttgacaacagctccattgaagaagcttcaggag

SEQ ID NO: 103327 - DNA, 83 bp, Homo sapiens
ccgggaattaagtccagtttcttttcaatataggtcctggaggctggaagtgcaaaaggaaggtgtcggcaagatcgtttttt

SEQ ID NO: 103328 - DNA, 75 bp, Homo sapiens
cgtggtctgcctgctgcactgctttgatgcttcaggactgccccaaggcccgcagggaggtggagctgcactggc

SEQ ID NO: 103329 - DNA, 97 bp, Homo sapiens
ccgactgagcaggagtcgtccgcttatagtggaggctgctaggagccggtcagagggaatagagctgtgcccccctggaaaacggttcatgattacg

SEQ ID NO: 103330 - DNA, 98 bp, Homo sapiens
tgccgtttgaggatgacaaccgtacccggctgtaccggcagatcctcaggggcaagtacagttactctggggagctggtccacgacaaagagttggca

SEQ ID NO: 103331 - DNA, 98 bp, Homo sapiens
tgggcaggcggagcagggccttggaccccgcggcgcccctcggcctcggagcaacgagcgcagcgccgaaacttccaattgaagacactgagctgaac

SEQ ID NO: 103332 - DNA, 75 bp, Homo sapiens
gttcattcttagtgtcttctgaaataaaattaggtcatactccctgtcacaaactccagctgaactaacttggag

SEQ ID NO: 103333 - DNA, 75 bp, Homo sapiens
gtgggcgagaacgtccactgcgggccggcgaaagctgtttggtgccctggttgtcagatgttggaaagcagtagg

SEQ ID NO: 103334 - DNA, 75 bp, Homo sapiens
gatttcctcctggccattctcacgcgttgtcagattttggtttctacaccagacttctgcctggtgtcgaaggtg

SEQ ID NO: 103335 - DNA, 74 bp, Homo sapiens
tggctgggaccgtgcgcgtgcgcctgggggcaccgctgccgttccgagggtaccgtgagggttttctctggaag

SEQ ID NO: 103336 - DNA, 50 bp, Homo sapiens
agcaaagaacactgttgttgccacagggttgtgggctgcacactgcagaa

SEQ ID NO: 103337 - DNA, 51 bp, Homo sapiens
ggcatctctcggaataaccatagggccagtatggaaattaccagcagtaag

SEQ ID NO: 103338 - DNA, 112 bp, Homo sapiens
aaatatccgcctggctggattagagtatgttctgcacttcactgcactgaatgggaagatttactttcgaagctataaatctgagtgggacatacttttgaaggatgtgcaa

SEQ ID NO: 103339 - DNA, 74 bp, Homo sapiens
ttgcgatggcgcagaaaccccgttgacaaggcactgctttttcatgacggtggggcaggggtttcgggctggtg

SEQ ID NO: 103340 - DNA, 90 bp, Homo sapiens
tgggcgctgccaaccgtgggcgagctctgggtgtgcgggcggcctggcgcggcgctccgacctggacaaacaccagactcagacgtaccg

SEQ ID NO: 103341 - DNA, 82 bp, Homo sapiens
cctgcccaaaaaattcctggaaaattgactagtattaagtgtgagtaaaaggaggaagaacgtgcaaaacgtgaggagctag

SEQ ID NO: 103342 - DNA, 104 bp, Homo sapiens
gaggaagcctgtccattgaaaccagcaaaaggacttatgagttacaggataattacagcggcccctttgttgctttatgcaaacagacgggacttgcgattggt

SEQ ID NO: 103343 - DNA, 100 bp, Homo sapiens
cgggagtcctgggcccagagccgagatgagcagaacctgctgcagcagaagagtgatgaatcaccaacaccagcagcagatggcccccagtaccctgagc

SEQ ID NO: 103344 - DNA, 75 bp, Homo sapiens
tggactctcagaataaaggaaagacctcagagtgttctcagtatttcatggaaacttggagagagaaaagtgatg

SEQ ID NO: 103345 - DNA, 101 bp, Homo sapiens
tattaatggagtcctccgtacagcacattcattatttaaaagaaatactgctgacatctctgcaccaggacctcttaaggaaaccactgtacaaatgacac

SEQ ID NO: 103346 - DNA, 100 bp, Homo sapiens
gaagattcgaggcggcgggggacaagtcggcgccccagagcggacgaggtggggaccaaggcatactgaacacattttttagcagctgggcaacaacaga

SEQ ID NO: 103347 - DNA, 100 bp, Homo sapiens
actctttgctaattgtgatcggcgatatcggtacagagagtcagctgagggccgtgcgggcccaccttgaacaagaataactgtgtagaatacattgagg

SEQ ID NO: 103348 - DNA, 100 bp, Homo sapiens
tctagtcaaagaacgctttctgttcaagaggcagctgcgtatttaaaagtatgaaattgaaggctgtgaagtgatttgggccattaaagataaagctata

SEQ ID NO: 103349 - DNA, 90 bp, Homo sapiens
gctgtcttgaatgccttggataaaattgtggaagaaggcaaagtccgcaaagagccagcctggaatgcccttcaatcagctgggcaccct

SEQ ID NO: 103350 - DNA, 82 bp, Homo sapiens
ccgaactccaagcgtgaccagctttctgttgggaacactcaaaggttaaaggactggatgcatttgttctgagcctgctcac

SEQ ID NO: 103351 - DNA, 100 bp, Homo sapiens
tcgagtgcctgcaggatgtgagggaggaagccagttgagggaagttctccatgaatgtacgtcacaatgatgatgaccgaccaaatccctctggaactgc

SEQ ID NO: 103352 - DNA, 75 bp, Homo sapiens
ttctggtgcccaaagaatcttatgtgaatctcactctgttgcccaggctgaagttcatggcgcgatctcggctcg

SEQ ID NO: 103353 - DNA, 100 bp, Homo sapiens
tcccgctggcgcgcagcctcagctaggttgtttacattcagagctctatcaataagaggaatacatattacagtgaattcgacaaccgcacaagttggca

SEQ ID NO: 103354 - DNA, 100 bp, Homo sapiens
cccaaaaagtttgccccggtagttgctccaaaacctaagtacaacccatacaaacaacctggaggtgaggagatcccagaagacccacttgtggctgaag

SEQ ID NO: 103355 - DNA, 100 bp, Homo sapiens
ccacttgcatgggccttacttctataacaggaccgccgggagagcctgcccacctccccaccctggacgccgggcgcgtcccggccccccagcagcctag

SEQ ID NO: 103356 - DNA, 98 bp, Homo sapiens
cagctcttcgcgcccctgggagggaggtgggaggctctaggctccaagacgccgtcgcttgaggtggtaaattcactccagcagcaacctcaggctgc

SEQ ID NO: 103357 - DNA, 101 bp, Homo sapiens
cttcaagtcgagactactggccgaaggggcgtctgcggctctccgccgtccccagccctgcctctccctgggctctgggagaagatgtcaaccggacacta

SEQ ID NO: 103358 - DNA, 75 bp, Homo sapiens
ccagaagaggaggttgcccagaagaaaaaggatggccaggccatgttatgggatctcaacgaaggcaaacacctt

SEQ ID NO: 103359 - DNA, 100 bp, Homo sapiens
ggatccccagtatgcatctcaagatgtgttgatggagaaccttgtgacctgtctttgaatataacctggtatctgaaaagcgctgattgttacaatgaaa

SEQ ID NO: 103360 - DNA, 100 bp, Homo sapiens
cagcatcttcagctcttgggtttagcaaaagttcatctccttctgcatccttaactgagaatgaggcaggcattccagaccctccaaacatgtcagcaga

SEQ ID NO: 103361 - DNA, 90 bp, Homo sapiens
tgactgcgccttcctggagggccgtgtcaacgtgtctgaggctgtgagaagacatttatcacagtgagtgccctgttttcccataaccga

SEQ ID NO: 103362 - DNA, 82 bp, Homo sapiens
gacatggaccgcggcgagcaagatatggctcgtggacagcagaaaattcagtctcagcagaaaaatgccaaaaagcaagctg

SEQ ID NO: 103363 - DNA, 90 bp, Homo sapiens
gcatcatcctcctatcagaggaggacctccaggtaccattgttggatactggtgacatcatcattgacggaggaaattctgaatataggg

SEQ ID NO: 103364 - DNA, 90 bp, Homo sapiens
ctgtcgcggaggcttgtcattctgacccggggattcctcacagcgtctggcagggaaaatggagctgatagtatcctggatcttggatta

SEQ ID NO: 103365 - DNA, 75 bp, Homo sapiens
cgtcatcatgctgaccaccaatcagatccgtaagcgggccccactggctctgccagctcttctgcccgccacctg

SEQ ID NO: 103366 - DNA, 90 bp, Homo sapiens
tgataagttttctcatgaagaatatagtaatggtgcactttcaatcttgcagtatccatatggaaagattcgaagaatctcggggatcag

SEQ ID NO: 103367 - DNA, 100 bp, Homo sapiens
tttcgcttttgtggaactactctacggcatctggagcaactgcatatgggtgattttggaagcattcatagacccggaattgttgttgactatcaaaaca

SEQ ID NO: 103368 - DNA, 89 bp, Homo sapiens
aaagctcacctgaggactcacactgcgttcctggataaccctggcatcctgagcgagctctgtggaaccctgtcccgcctggccattcg

SEQ ID NO: 103369 - DNA, 123 bp, Homo sapiens
gttgcctactgctctagtccaggaccagagacccccaactatatagcagatggaacagatttggagttgaggctggtcaatggagacggtccctgctctgggacagtggaggtgaaattccag

SEQ ID NO: 103370 - DNA, 109 bp, Homo sapiens
acctcctgcgaggcctcccgggctccgggaaaactacactggccagcagccattgtttgatgtcctgtgactgagaaaccaggctttaaactttatgcctttggagatg

SEQ ID NO: 103371 - DNA, 100 bp, Homo sapiens
aggatctactctgaagatccctgtggtagagagaaaaatcctggatctgtatgctttgagcaagggacagtggccttagagctattgagaatttgatgca

SEQ ID NO: 103372 - DNA, 100 bp, Homo sapiens
ggttctttcctttgactccgctggacaaacactaggctcaggtttagtgagttcgattagccgcgtgctcagaatcaagttcgggaagaaagaggaggag

SEQ ID NO: 103373 - DNA, 102 bp, Homo sapiens
gagctcagctttgaacagttccatctcttctataaaaaacttatgtttgaacagcaaaaatcgggccacgactgcttcccggtgctgttcacctatgacgcc

SEQ ID NO: 103374 - DNA, 80 bp, Homo sapiens
tcgggttattcgagtgaccgagaccgcggccgggaccgaggtgaacacttgtcctgctccttcacctttttcttgcatgg

SEQ ID NO: 103375 - DNA, 90 bp, Homo sapiens
aggatccagtgttcaccatcctggccccggaagggtaatctacagttgctgcagaactgcctggcagtgttaaatggagacacataagcc

SEQ ID NO: 103376 - DNA, 97 bp, Homo sapiens
ccgaccatttccggccacctttgaggacgcccatgctgcagagcctgctgggccatctggccatggacagccagcggcgcccgctcctgctgcaggt

SEQ ID NO: 103377 - DNA, 100 bp, Homo sapiens
ggcccaggcagccgcgcttcgaaggacgccgccgggagctgcggagactcccaagacagctgggctgcgaccaatggaaacaaaggacattccagtagtg

SEQ ID NO: 103378 - DNA, 85 bp, Homo sapiens
agctgtcaagccagatgactgcttcttggacacttaatgattgttggcaagaaatgtgctgctgatctgggcctgaataagggtt

SEQ ID NO: 103379 - DNA, 80 bp, Homo sapiens
cagacagctgggccggagcagccgcgggcgcccgaggggccgagcgaggaattgaatgatctggcacgggaccctccagc

SEQ ID NO: 103380 - DNA, 83 bp, Homo sapiens
cccaactcttcgccagcatatcatcccggcaggtttccaatacttatctacaggaatcgccatgaccccagctctgagggagg

SEQ ID NO: 103381 - DNA, 75 bp, Homo sapiens
ctggccgggagcggagcccctgtgggaaattcgaaatgagtcccatgactatcctcatagagtggccaagtttcc

SEQ ID NO: 103382 - DNA, 51 bp, Homo sapiens
cgggaactctgaacctcaataacgagctctctatcaatatcagctcacatc

SEQ ID NO: 103383 - DNA, 100 bp, Homo sapiens
gctaaagtgggttgaattgccatggctgctggaagaagtctcaaaaagctcccgactagccttgataaatttgctgaagttccttatgtcaaatgagact

SEQ ID NO: 103384 - DNA, 87 bp, Homo sapiens
tgatgaatctgaaaggaaatccggaattatcacagagacagagcgggatgccaccagcttgtccaaagggaagttccaggagctcct

SEQ ID NO: 103385 - DNA, 74 bp, Homo sapiens
ttctgaactcaggacttggcaagtagaattgggctatttgctgaagcttcttggtggcccttgctagcccagga

SEQ ID NO: 103386 - DNA, 75 bp, Homo sapiens
aaaaggcaacatcctgtcacaggccatgctctggcaaaaacgagcgtagagtggcagctctccaagaaattgttc

SEQ ID NO: 103387 - DNA, 90 bp, Homo sapiens
cctcggctttagtgctgtctccgcttttctttcaccttcacagagggatatgtggtgcctgtcataagctccagagagctgccttccaca

SEQ ID NO: 103388 - DNA, 98 bp, Homo sapiens
aagacctcagatgtgaagtccattaaagcttgcttggctcaggaacaacagaagagaataaagaaaatgacctcagaccttccttacctcagtcttat

SEQ ID NO: 103389 - DNA, 101 bp, Homo sapiens
actgctggcaggctgccttccctgacccccagttacgcctggaatatgaaggcttccccgtcccggacccagatgatgtggtaccagttggccaaagaaga

SEQ ID NO: 103390 - DNA, 74 bp, Homo sapiens
gccgcctcaactgccgcctcgcctactcactctggagccgtactccaaagattcaggtttactcacgtcatcca

SEQ ID NO: 103391 - DNA, 51 bp, Homo sapiens
caaattcgtcagatcaaagaacaagaggaaggaacagagccacagagaaaa

SEQ ID NO: 103392 - DNA, 82 bp, Homo sapiens
caagggcctccgtctggatttccaaggaagaatttcctctgaagcaccgatgacaacggcaacacgacaagaagtccttggc

SEQ ID NO: 103393 - DNA, 100 bp, Homo sapiens
gaaaagttcaaacacacgtcagcagacttgtcagcttgtgggaaagtgacatcagcgtccacccgctaaccctgccctctgcaacctgcttggagctgct

SEQ ID NO: 103394 - DNA, 86 bp, Homo sapiens
gctcctgcctgcgcgcggccaagccatgctcggccccagtgcaaggatgatgctgaaaggaataacaaggcttatctctaggatcc

SEQ ID NO: 103395 - DNA, 75 bp, Homo sapiens
cttcaccacgcggctgcacaactgcaggaacaccgtcacgctgctggaggaggagttaaagttcctcgtaatttt

SEQ ID NO: 103396 - DNA, 100 bp, Homo sapiens
ctcagaagcaggagaccgctaacagcctgccagcccctcctcagatgcccctgccggagatccctcagccctggctgacatgcaagaaagcacttcagcc

SEQ ID NO: 103397 - DNA, 100 bp, Homo sapiens
cagtgtcctactattgaagcctgcacctgctgcattgctgttttcctgattgaaaaggaagatcaggccaaccccaaagaagaagtgaccaaggaggagt

SEQ ID NO: 103398 - DNA, 82 bp, Homo sapiens
gtcaggagcagccgcagcgacggcggcgacagcaggtttggtgcacctcgatttggaggaagtagggcagggcccttatctg

SEQ ID NO: 103399 - DNA, 83 bp, Homo sapiens
gccgaaaacgcaaggccgaagccaaagccaggaattgaatgatctggcacgggaccctccagcacagtgttcagcaggtcctg

SEQ ID NO: 103400 - DNA, 98 bp, Homo sapiens
atcattgggagaaatccccactcctccaagaaccaacccccaaattggctgggacaggaagaggatcacctagcccgggtagaagaggcaatcacccg

SEQ ID NO: 103401 - DNA, 50 bp, Homo sapiens
aatctgtcttggaggacatcagaagtcgtttcctgctgtgactaagtcag

SEQ ID NO: 103402 - DNA, 87 bp, Homo sapiens
agaagaaatcttcaaactcagattaggtcatcttaaaaaggtgaatgaaaactttgccattgatttgatagcagagcagcccgtgag

SEQ ID NO: 103403 - DNA, 83 bp, Homo sapiens
tcgcgcagaaggtcaacatgctcaagcactgcaagcggcacacgggttgacatcatggacatatgtgagtccatcctggagag

SEQ ID NO: 103404 - DNA, 100 bp, Homo sapiens
gttctccaatgcaatgctgtttgccctgaacatcatgaattcccaagaaggagagcctggagaaagttcttgtggaattcagtcacaaggagttgtttga

SEQ ID NO: 103405 - DNA, 75 bp, Homo sapiens
ggccagggaactcaaacagcagatgcaggatactgtcatgaagcagacacatgctgacacacctgttgatcattg

SEQ ID NO: 103406 - DNA, 82 bp, Homo sapiens
cccaagcccgccacgccgcccagcccggccccgcccgcgccggaagagccacgccgaacccagtgacttgattgtaaaaatt

SEQ ID NO: 103407 - DNA, 58 bp, Homo sapiens
cgggagttcaaggaggtgctgaagagcgaggagagaacagcccatcttcaccacccga

SEQ ID NO: 103408 - DNA, 75 bp, Homo sapiens
cccctttgaattaattatggctaacaagttgaaatcatcgcagaaggataaagttcgtcagtttatgatcttcac

SEQ ID NO: 103409 - DNA, 100 bp, Homo sapiens
tgtgcaaacccgagagaactgggcgccccagcgggatcccagagaaggatctgcacagtgttatggcaccctacttcctgcagcaacgggacaccctgcg

SEQ ID NO: 103410 - DNA, 131 bp, Homo sapiens
gtagggaccacatcaaagacagctttcacagtttgcgggactcagtcccatcactccaaggagagaaggatgtacagttacccagcacgtgtacctcctcctcctcctattgctcgggctgtagtgccctc

SEQ ID NO: 103411 - DNA, 100 bp, Homo sapiens
ctggcgagccccgccgctgagagcagcagcccgacaatggaggccacccagccaacgcggtcgccatggagacgccggtgactccagaccaaggaggatg

SEQ ID NO: 103412 - DNA, 100 bp, Homo sapiens
ggcataaggaactctatcccaggaatacagctttgcattagaacatgcttaatagacgatcttttagtgatgtcttaccagagtcacccaagtcagcgcg

SEQ ID NO: 103413 - DNA, 75 bp, Homo sapiens
ggcgcaccagatgtaccggaccctgttcttcaggtgagaagccctaccactgcaactgggacggctgcggctgga

SEQ ID NO: 103414 - DNA, 100 bp, Homo sapiens
gctgtcttgcttaaaagaagagatgcctccccaggagctcacccggcgactggccacagtgatcactcatgtcgagggtgttttaacgctgcgggcaaaa

SEQ ID NO: 103415 - DNA, 90 bp, Homo sapiens
aatgaccctaaaaatggcgattctgcaaccaagcacctgaaacagcagggtttttaatgaccacaacaagcaagcatgcagcttactgct

SEQ ID NO: 103416 - DNA, 75 bp, Homo sapiens
taccgcatgcagcagtacgacctgcagggccagccctacgatatggctcgtggacagcagaaaattcagtctcag

SEQ ID NO: 103417 - DNA, 100 bp, Homo sapiens
tgcgttatggatacataacctgaggagccgggggaagctggccttgggatgttcctcctgctgatcaagagaagctttttatccagaagttacgtcagtg

SEQ ID NO: 103418 - DNA, 75 bp, Homo sapiens
gaggaaatagtggcaggtgacagtctgcatgtgcagttttcaggtggaatatgtgatcaagtgtgacatgtcagc

SEQ ID NO: 103419 - DNA, 100 bp, Homo sapiens
tccgcttcttcaactccttcaatgaggccaccatggttctggtctcctggatcatgtggttcttgatacatatttgccagacttcaagatttcagaaaag

SEQ ID NO: 103420 - DNA, 96 bp, Homo sapiens
gcggacttggttcggagggacgtccgcttctggtggacagattgagcaaaggttttgggatttgagattgacgcggtgaactctgtccagttttca

SEQ ID NO: 103421 - DNA, 101 bp, Homo sapiens
aacggccaacttcggcaagatccagatcgggatttacgtggagatcaagcgcagcgatggtacagcaatcatttgaaactccaagggccaaagctcaaatg

SEQ ID NO: 103422 - DNA, 51 bp, Homo sapiens
ctctgaaaacgtattttaaagatggcaagctgacaagacctacatgttacg

SEQ ID NO: 103423 - DNA, 75 bp, Homo sapiens
caagaagactgatggagcaggcttgcaatattaaagaagaagaatttggacttgatgaagaagatgaagatgagg

SEQ ID NO: 103424 - DNA, 97 bp, Homo sapiens
gctgctgctgctgctgctgccccggacccgggcggacgagcacgaacacacgtatatattcttccaacttccatgcagtgaagagggaatcagacgg

SEQ ID NO: 103425 - DNA, 90 bp, Homo sapiens
agcgtcgggattaggtgaaagccaggaatagttgctgaacaccccaggcctgctgaggtccctccttgagtctcatgttcaagcagtctt

SEQ ID NO: 103426 - DNA, 50 bp, Homo sapiens
agctgctaagaagaaacttcaatctactctccagaaagagcaacagtaat

SEQ ID NO: 103427 - DNA, 101 bp, Homo sapiens
ccgcaggagagacacgctgggccgaccccagagcggcgctggacagcgtcagcctcgagtttgaccagcagcaggggtcggtgtgtccctctgaatctgag

SEQ ID NO: 103428 - DNA, 83 bp, Homo sapiens
ccgctcccagccacagcctcccgcgcctcgctcagctccaacatgacagaaccaagttgtattgttagacacactggaacaag

SEQ ID NO: 103429 - DNA, 87 bp, Homo sapiens
tcgagggtgacgctcgctccgctcgtcccgctcgtcatggcctacccgggatacggaggagggcccgaccctgcccgccctggactg

SEQ ID NO: 103430 - DNA, 87 bp, Homo sapiens
aaaataaaacagatattacctaccatttacaaaaaaatggagctggcgctggtgcctgtgagcgcccacggcaacttctatgagggg

SEQ ID NO: 103431 - DNA, 75 bp, Homo sapiens
cgagcagatcgacaagtccgggagctgggcggccatttaccaggtgtgagatgcacaatgcgaaacctaggcccc

SEQ ID NO: 103432 - DNA, 102 bp, Homo sapiens
gggggagatgggcatctaccagatgtacttgtgcttcctgctggccgtgctgctgcagggcacacgtgtttcacgttgacaggtttgcttgggacgctagta

SEQ ID NO: 103433 - DNA, 50 bp, Homo sapiens
gagcagttccaactggccatcgagttgacacttactttgacaaaggcaaa

SEQ ID NO: 103434 - DNA, 54 bp, Homo sapiens
gcggagacgggagtattatgaaaagatcacctacgtctaccagtggccctggac

SEQ ID NO: 103435 - DNA, 97 bp, Homo sapiens
ctgcgaggaaaatggcggcgggaggtgtgtagctgggacggtgctggtctgagctggaccttgtctgatggcttcctccaaccctcctccacagcct

SEQ ID NO: 103436 - DNA, 100 bp, Homo sapiens
cgccgggagaggccggcagccccgggacacccccgcaagcgagcagggagatacttcaggggattaccggaagattctgctgaagatctgtggtggcaat

SEQ ID NO: 103437 - DNA, 126 bp, Homo sapiens
gcagctgcattttcagaagattgtgattcagcctctactaaagttgtcatccgtggagcaggaaaccagtgggctcgggatgagtttgaaggcctcttcaagcagccagcagaaaatgtcaaccag

SEQ ID NO: 103438 - DNA, 50 bp, Homo sapiens
ctggtgcagaacattgcgcggcaggcctgtgggacactatgaagaggtgg

SEQ ID NO: 103439 - DNA, 100 bp, Homo sapiens
gaaaaccagatccagaaactggaggagtcccgctcgaagctagatgtgaatgaatgtgaactgctcagtggggtgtgtggtgaagccttctgtgaaaacg

SEQ ID NO: 103440 - DNA, 100 bp, Homo sapiens
caactgaagacggaggtgcccaaggtcagaaggaagcaccacacagaggtcacagaattttccacactccttgacagaggtgcttaacccttatccatca

SEQ ID NO: 103441 - DNA, 98 bp, Homo sapiens
gctgaatgactacctgaaccgcatcttttcctcttctgaacatgcacccccagcagccaccagcagggattagaaaatgagtatcaggaagaagggca

SEQ ID NO: 103442 - DNA, 130 bp, Homo sapiens
ctgcaggtcacctgggaggacagcaccaccggcaaggaggacacgggcacctttgacaccgtcctgtgggccatagagggagcactatgtctgcggaagtccccgaggcagcctccgcggaggagcagaa

SEQ ID NO: 103443 - DNA, 100 bp, Homo sapiens
gttttagcctagctgttctcaaggcggattaattagcccaagaaacattatattcattctatgcagatggtagtatatgtctggacatacttcagaaccg

SEQ ID NO: 103444 - DNA, 83 bp, Homo sapiens
gaaaaatctaagagcccagaaaaagtgtcatcgttctcaaactcctcctccaacaagatagaagagtgatggatgtcatttct

SEQ ID NO: 103445 - DNA, 75 bp, Homo sapiens
gcagtacctgcagaaggtctctggagacatcttcagcagctcattgctatggacagtgctatcaccctgtggcag

SEQ ID NO: 103446 - DNA, 96 bp, Homo sapiens
ttccacccaaacttgctggtcactgggagactgtgccctgtccacggtgcctcctgcatgtcctgctgccctgagctgtcccgagctaggtgacag

SEQ ID NO: 103447 - DNA, 100 bp, Homo sapiens
cggaacagcgccgaggccttcaagtgcatgatgtgcgatgtgcggaagggcacctccacccggaaactctttatacagtgaaacaggaggaaagaaaaat

SEQ ID NO: 103448 - DNA, 90 bp, Homo sapiens
atcagcagcttggaaattcaagcacgtgatctggcgggatgggcgtttgcctaacgtatttaatggagatggagtctcgctctgttgccc

SEQ ID NO: 103449 - DNA, 98 bp, Homo sapiens
tattccacagccatggaatccatccagggagaggctcgacggggtggtaccatggagactgatgaccagcgatcattatttcgaagttctagtattct

SEQ ID NO: 103450 - DNA, 100 bp, Homo sapiens
ctcatgcccagcagcagcaagcaggacctagatgtgaaggctggtggaggctgtgtaatgaccattggagaaatgctacgatcttttctcacaaaactgg

SEQ ID NO: 103451 - DNA, 90 bp, Homo sapiens
gtggaggtcgacgactccgtcgcagactacggacctgtctgggtctcagccgccaaagaccccgtccgatgagacccacccatcggagcc

SEQ ID NO: 103452 - DNA, 75 bp, Homo sapiens
ccccctgccacctcagatatttaatggcgaccgatactgtggaatacactgaagagatggtgccttggcaccctt

SEQ ID NO: 103453 - DNA, 97 bp, Homo sapiens
ggaagaatggcagtgctcaaactcaccgaccagacccctgggcatactccttccttaagatgggatgagacaccaggtcgtgcaaagggaagcgaga

SEQ ID NO: 103454 - DNA, 100 bp, Homo sapiens
gttcacgactactagaaggggaggggagtggaaaggctctcagtgaaaaaggtccactggctattctgaggtgatagttgtcgttggaggatgtgagcga

SEQ ID NO: 103455 - DNA, 90 bp, Homo sapiens
aaggggcttcttccagagccaaggaggaagggttgtccggagatggagtttcactgtgtcagccaggatggtctcgatctcctgacctcg

SEQ ID NO: 103456 - DNA, 49 bp, Homo sapiens
cacattcttacgacagggagcccagaagttccagagagaaggactccct

SEQ ID NO: 103457 - DNA, 100 bp, Homo sapiens
atgaagagactccagaaagggagatgcaaccactgcatgaagataatttctcacgagagaagacagcagaacttaatgtgcaggttcctgaagaacccac

SEQ ID NO: 103458 - DNA, 75 bp, Homo sapiens
gcgggatggaggcggcggccgatgggctatgtgcgggagtatattctgtgggcagcgtctaaatcccagcttctg

SEQ ID NO: 103459 - DNA, 75 bp, Homo sapiens
agcagctgcttgccggccccaacacggaccttgggcggcgactggcggcgcgatggacctgaccgggctcctgct

SEQ ID NO: 103460 - DNA, 76 bp, Homo sapiens
ccggacaccgacgcgctcatctgctggagcccgcttgccagcaaagcacggacagagaaggaggagaagctgagcc

SEQ ID NO: 103461 - DNA, 100 bp, Homo sapiens
ggaccgacgcctcggaccgggctgcgccgcgggagttcgagtgtactaatggtcacttgatgtgcgctggctgttttatccacctactagcagatgcccg

SEQ ID NO: 103462 - DNA, 75 bp, Homo sapiens
tgttttacattgaagctgcatataaaactgctgacaggaagatgtcacccaagcgcatagctaaaagaaggtccc

SEQ ID NO: 103463 - DNA, 99 bp, Homo sapiens
gccaagttagatgccgattacccacttcgagtcctttattgtggaggccaccagtgacttctgtgtggctcctgacaccttcatcctgaacgtcacgga

SEQ ID NO: 103464 - DNA, 99 bp, Homo sapiens
agaaacacttggagagcactgagtttagtaataggtgactgccggaaaaaagggaactttgaatattgtcaagtatcagatgtagaaggtggtgatgga

SEQ ID NO: 103465 - DNA, 73 bp, Homo sapiens
cctatgggtactcagcagcctcagcctgaaggaaagacttcagatgatggtggtgctaccccagtacaggatg

SEQ ID NO: 103466 - DNA, 75 bp, Homo sapiens
accacctggaagcctagaaatggcatagagattttatgagaatgttttggcatcaaggtttttcttggaattttt

SEQ ID NO: 103467 - DNA, 98 bp, Homo sapiens
tcaaggcaagcctattgagttaacacctctgccgctgctaaaagggacagatctggaagcatctttgctaagttttgaaaaacttgaccgtgcctcac

SEQ ID NO: 103468 - DNA, 101 bp, Homo sapiens
gcgttaccatgcatcctgccgtcttcctatccttacccgacctcagatgctcccttctgctcctgagctccaaacgagaatggaagccgctggaggaccgt

SEQ ID NO: 103469 - DNA, 97 bp, Homo sapiens
ggagaagccgcccaaagaactgagcatgaataatctttcatttagtgagctatgttgcctcttctgctgtccaccttgtccagggaagattgcttca

SEQ ID NO: 103470 - DNA, 90 bp, Homo sapiens
tatatgttgtcgggtacattgatatatgtaaattacggaagatcatttatatacacatgctggagaatgctggaggagaccttaaggatg

SEQ ID NO: 103471 - DNA, 80 bp, Homo sapiens
agataaaccaccgcttacagatattggtgacgagtagcacagcccctctatggtttagatggcagtgctgcaaaggaggc

SEQ ID NO: 103472 - DNA, 82 bp, Homo sapiens
ccgaggccaagatggcggtgctgtcagtgtgtcccggcatggatatccggaacaacctcactaggttgcatgagctggagaa

SEQ ID NO: 103473 - DNA, 85 bp, Homo sapiens
agtcagctgttgtcagcagcccagaccccatcagaggagaggttatagatgataagggcaacgtcctgccccccggcacagaagg

SEQ ID NO: 103474 - DNA, 80 bp, Homo sapiens
ggttaaacccccagtgcataccctacaccctgcagaatcactattaccgcaacaatagcgtccagaggaccagaggttaa

SEQ ID NO: 103475 - DNA, 75 bp, Homo sapiens
ggagaacgagtccctcttcactttcctcggcaagaaatgtgtgacccaacatgagtgaagtttcctgcaagaaac

SEQ ID NO: 103476 - DNA, 95 bp, Homo sapiens
gaaaaagcttggagataaagttgctttttactggttccatgcctctgcagcggtgcctcatgtttgctgtgtagttgctgtcctaacagtaagaa

SEQ ID NO: 103477 - DNA, 100 bp, Homo sapiens
aagtattttacagacgaaatgaaagtgaactggtgtcacaagctttggaactgcgacataactagcgatggctgctgcgatctcacaaagcttctccaag

SEQ ID NO: 103478 - DNA, 100 bp, Homo sapiens
agatgttctgggtgcgagcccggggctatattgagaacactggatctaatgaacggaacatctatattgtggtgggtgtggtgtgcaccttgctggtggc

SEQ ID NO: 103479 - DNA, 82 bp, Homo sapiens
tcaccgcccagcccaaaccaggagattgcgagggagcgatgcggtgcagcgcggatatgtgatggcgtccagtttggagctg

SEQ ID NO: 103480 - DNA, 82 bp, Homo sapiens
tctcgggctcggaacgagactgcacgaccagcagaagtagacactgtggatgcattccagggtcggcagaaggattgtgtta

SEQ ID NO: 103481 - DNA, 74 bp, Homo sapiens
caaaaggcaaagtgtgttttgagatgaagttgctctatatgcaatcagtgctgtctactttgctggagtgatgg

SEQ ID NO: 103482 - DNA, 100 bp, Homo sapiens
tgataacagttactccagtatatgctgatggaccaggaagccctgaatccataaaggcataccttaaacaagctcgaatctttctcagccaagatttgcc

SEQ ID NO: 103483 - DNA, 101 bp, Homo sapiens
cgcattgaagactaagaatatgagaaacctgaatccagaagatcataggtatattgaactgttcctgaattcatgtccaaaaggaaaataagactctaggg

SEQ ID NO: 103484 - DNA, 90 bp, Homo sapiens
cgaagcacgagcagatcctggtcctcgatccgcccacagacctcaaattcaaagaacttggtcctgatgtctgaccatggagatgtgagc

SEQ ID NO: 103485 - DNA, 98 bp, Homo sapiens
gcgcaaccgtcggtgggtcggggatcggtcgcctgagagacaatgcagatcttcgtgaagactctgactggtaagaccatcaccctcgaggttgagcc

SEQ ID NO: 103486 - DNA, 98 bp, Homo sapiens
tggacatgaagaggaggatccacctggagctgaggaaccggaccccggcagctctgtcaataccagcaaatatgcagaaagctatcggatccaaacct

SEQ ID NO: 103487 - DNA, 82 bp, Homo sapiens
gcaaaaacattcaagaatgagagcgagaacacctgtcaaggacagtcattttgtttactcattcagccctgttgcaggtccc

SEQ ID NO: 103488 - DNA, 88 bp, Homo sapiens
gagaagcagcgcctgttcccggggcagatccaggttcaggagaaaatgtccaccttggttctggtgatgggcagtcaaaagattctgg

SEQ ID NO: 103489 - DNA, 97 bp, Homo sapiens
agcaccggaggcccaggtctccgtgcagcccaacttccagcaggacaaggcctccgcccccgccgcggaccctccgcggtacacctttgcacccagc

SEQ ID NO: 103490 - DNA, 50 bp, Homo sapiens
cacagctcctggagccccacaggttgccacatttctccaaagtgagggcc

SEQ ID NO: 103491 - DNA, 100 bp, Homo sapiens
caagccctcaagggaccctgagactcccagatcttcagcaaaccagtccagctacgggggcccagccagccagcagctgagtgggggttacggaggcggc

SEQ ID NO: 103492 - DNA, 75 bp, Homo sapiens
tttgtacagaaattgaaaggcttcaaagctagcaggactccctggaggaaaagcggaagcggcagcggtctgaac

SEQ ID NO: 103493 - DNA, 82 bp, Homo sapiens
tgatgccaacagtgtaccagcagggcgttggctatgtgcccatcacagaattcagaaggagctggcggacatcactttagac

SEQ ID NO: 103494 - DNA, 100 bp, Homo sapiens
tatgaaaattcctactggacaagaatatgctgccaaaattatcaacaccaaaaagctttctgctagggtatcagcaaacctggtatcatgaaggaccaaa

SEQ ID NO: 103495 - DNA, 97 bp, Homo sapiens
gaaagctgtaatcatgtcttctgtatgacttgtattcttaaatgggcagagaacactcctatgccaccttcaccagctgtacaagtgcagggccagc

SEQ ID NO: 103496 - DNA, 90 bp, Homo sapiens
gagccttgaaggaagttagcaaggtatttaccttgctgtggattgctgactggatggtccatcacttctggaggaaaggaaaggacccgg

SEQ ID NO: 103497 - DNA, 82 bp, Homo sapiens
gtgagtcaatcaaggagggaagccacaagcagactgacaacgtttctaggtgacagagctgaatgaacctctctccaatgaa

SEQ ID NO: 103498 - DNA, 100 bp, Homo sapiens
gaagaatattagcagcagcttgtgccagccgggatggatatccaattatttcactcccgatttggaaaaacaaccaaatgaaaatggtgtatctgttcag

SEQ ID NO: 103499 - DNA, 90 bp, Homo sapiens
cggcgaatacagtgaagatgtgcacctgcacacgcccccggcacctgaatttcagaatgcatggatagtgaagctgagaccgtcatgcag

SEQ ID NO: 103500 - DNA, 100 bp, Homo sapiens
ggggtgaaactgaccacagtgctcaccacccaccaccactgggatgacatttctccatgtttgtcaggccttggactctctacgtcaggtgatccatcca

SEQ ID NO: 103501 - DNA, 90 bp, Homo sapiens
cgctccgcggagggaagcgccttccccacagcaaatggttatgagccttagagtttctgaactccaagtactgttgggctacgccgggag

SEQ ID NO: 103502 - DNA, 100 bp, Homo sapiens
ccaggcttctgcgcagaatgcttctcagcagcaacatccccaaacagcggcgtttcacggtggcacatacatggtatcctttgtgtggctgatcagtgtc

SEQ ID NO: 103503 - DNA, 100 bp, Homo sapiens
tcaagaaccatttccaaacaaggacatggagggaaggcttcctaagggactgaagaaaccttataatcctatacttggcgagactttccgttgtttatgg

SEQ ID NO: 103504 - DNA, 152 bp, Homo sapiens
tggggactccgaaaaaacaaaacaaatatgaactatgataagctgagcagagccctgcgatactattatgacaaggaactccatctcaggaaacttggccaggtatttcttcaaatgaggagttcaagaactacaactttccaaaatataaa

SEQ ID NO: 103505 - DNA, 74 bp, Homo sapiens
tttccccccaaactgcaataagccgccttccaaggtgaccagcgccatgtccagccaggtggtgggcattgagc

SEQ ID NO: 103506 - DNA, 100 bp, Homo sapiens
aaagatgattttacatccattattgggaaatgtcaagcagagtcacctgatatgaaaaaggagcaagacccccctgccaagtgccacaccaaaaagcaca

SEQ ID NO: 103507 - DNA, 82 bp, Homo sapiens
tattttccctacgaaaaacagatctttttaagggagagtcacaccgggacagctcatgtcctatattcagctcttcaagaac

SEQ ID NO: 103508 - DNA, 75 bp, Homo sapiens
ctaggccttttagaaaacatgaaaccatcatagcctttgcctgggaaccaaatggaagtaagtttgctgtgctgc

SEQ ID NO: 103509 - DNA, 97 bp, Homo sapiens
tctagatcttcactatccaatacggttcccaacaaggctacgcagaagaacccccttgactgaagcaatggaggggggtccagctgtctgctgccag

SEQ ID NO: 103510 - DNA, 90 bp, Homo sapiens
atgtactggtgtgtggggccggaggagtcagctgtgtgtccagaacgtgccatggagacgcttaacggtcctatggcagcgtatacaaag

SEQ ID NO: 103511 - DNA, 90 bp, Homo sapiens
ggcggcagcagcaccaggctctgcagcggcaacccccagcggcttaagccatggcactacgtctactttgagaactcctccagcaaccca

SEQ ID NO: 103512 - DNA, 99 bp, Homo sapiens
taaagttggaacacagcagagggtgtgtaataaaatacagccttaatacagatattggcagctgctgcagctgagcgagatgtggtttatttcaccttt

SEQ ID NO: 103513 - DNA, 88 bp, Homo sapiens
tgagggtccagtgtccaaccagggctacatgccttatttaaacaggttcattttggaaaaggctaggaattatctgtgaatgtaggac

SEQ ID NO: 103514 - DNA, 100 bp, Homo sapiens
ccgctgcctctaggttctgggaagatggcgaaggtctcagagctttacgatgtcacttgggaagacatatgtagagtgtgtcggtcagaaggaacacctg

SEQ ID NO: 103515 - DNA, 97 bp, Homo sapiens
ttttccccatagtgtttcctctctggattacgttacctgacgttcgcaaacctgtggacttagtagttttaagcagaaccatgaaaacctctgtgac

SEQ ID NO: 103516 - DNA, 98 bp, Homo sapiens
aggaccctaacgacaggcgcctccggcccatttacggttatgaagacagtatggagtttccagaccatagtagacatttgctacagtgtctgagcgag

SEQ ID NO: 103517 - DNA, 75 bp, Homo sapiens
ctggaggaaggaagtgcggagccagcctgagttgggagaagagctccagagaaatatgacagatacctagcatct

SEQ ID NO: 103518 - DNA, 75 bp, Homo sapiens
cgcctctcgaacgagtgtgggcgcgaggcaggcgccatgtcagaaccggctggggatgtccgtcagaacccatgc

SEQ ID NO: 103519 - DNA, 100 bp, Homo sapiens
ttggagtgaatcaacctggaccttatatcatgtatacaactgtagatgcaaatgggtatctgaaaaatggatcaggtttgttccaagatgaagattcatg

SEQ ID NO: 103520 - DNA, 100 bp, Homo sapiens
gcgggtcccaagaccatccccctgtgcaggctccaccaccgctgtgctaactggaccgcggcagaagagtggggtatattaagtcagagtcaggataaat

SEQ ID NO: 103521 - DNA, 100 bp, Homo sapiens
atatcggcattctgtgctacgaagatctgggacatgagcgatgatgagaccatctgagatggccccgctgtggggctgacttctccccggccgcctgctg

SEQ ID NO: 103522 - DNA, 100 bp, Homo sapiens
atccacgaaaggtgctaatagtagctggccatcacaactggattgtagctgcatatgcccattttgctgtgtgttacagcctgcctagggtagttaaaag

SEQ ID NO: 103523 - DNA, 98 bp, Homo sapiens
gggtggctctgaggtcgcctggggaccccagaaggaagctgcacaagccttaatttatgctgagatggcaggatcaagcctagaaaatattcaagaaa

SEQ ID NO: 103524 - DNA, 80 bp, Homo sapiens
cttcattcccatcggcattggcatttttgtcacctccaacaacatccgcgagatcgagatctctgtggtaagaagtgcta

SEQ ID NO: 103525 - DNA, 83 bp, Homo sapiens
aagtggcagcagtggaaactggaggcatcactcagcacattggtgcctttcttggacatggatttgattgacatactttggag

SEQ ID NO: 103526 - DNA, 83 bp, Homo sapiens
gaaggatcactgaggaaggggaagtgggcaaagcagggggcttgtacatgacagctggaatagcctccagttgaggggcttgg

SEQ ID NO: 103527 - DNA, 90 bp, Homo sapiens
tcacctttgctgctgaccctgaggacatctgctgataaagactatttcctgattgtgattcagaatccaaccgaataagccactctcttg

SEQ ID NO: 103528 - DNA, 114 bp, Homo sapiens
ccttcggggcgatgtgtagtgccttccatagggctgagtctgggaccgagctggaaagggctacccctgcaaaacatgtaagatagtgctgaactccatagaacagtaccaagc

SEQ ID NO: 103529 - DNA, 83 bp, Homo sapiens
cgctttcttcctggagcggagcgcaggcgccgagactgacaacgcggtcccacaggcctcctgctccacgacgtgaccatggc

SEQ ID NO: 103530 - DNA, 100 bp, Homo sapiens
ccaagctcgtagcctgccactccgtgcttacagaatgtctgaaggggacagtgtgggagaatccgtccatgggaaaccttcggtggtgtacagatttttc

SEQ ID NO: 103531 - DNA, 90 bp, Homo sapiens
gtcctggagccctcctcaggtgagctggagctgcccggctcggcagcgggaagtattccactgaactgaagaaactctactgccaaattg

SEQ ID NO: 103532 - DNA, 51 bp, Homo sapiens
ggccaagaaagagtccttcggtggtcaggcgggtaaacaccaagaatatga

SEQ ID NO: 103533 - DNA, 101 bp, Homo sapiens
cccgggacaatcagggcagaatccctgaggtaatagcctgcagctggtgttttgagaagccctactgctgaaaacttaacaattttgtgtaataaaaatgg

SEQ ID NO: 103534 - DNA, 100 bp, Homo sapiens
gacaaaatggcgaagatcgccaagactcacgaagatttacttacagcctcgaagatggagttccacgatcaacaggaattgactccctctacagctgagc

SEQ ID NO: 103535 - DNA, 98 bp, Homo sapiens
ggaggtggcagccatctccttctcgacatgagaagcctacagatccagatgacccccttgctgatcagaatattaaagaccgttattacggaatcaat

SEQ ID NO: 103536 - DNA, 97 bp, Homo sapiens
gaaggaacgaggcaaggagctaaagcagcgtgcgttcagccctgggaggccacaagaggaagctgaatgaagaggacgccgccagcgagtccagcag

SEQ ID NO: 103537 - DNA, 100 bp, Homo sapiens
cacaaaataaccacttaccccttctcaccgaggaagagcgggagaaagggtgctggaggtggtgagagccaactatgacacgctcacgctgaagctgcag

SEQ ID NO: 103538 - DNA, 101 bp, Homo sapiens
ctactctgaagatccctgtggtagagagaaaaatcctggatctgtatgctttgagcaaggaattgaaagatgttggccatcgtgatcagatggctgcagct

SEQ ID NO: 103539 - DNA, 90 bp, Homo sapiens
gtgtgaagaagaagctgagcgttgtcgccgccgctatggggtggccttatcactcctggaggcttttcatcagtgcctgctggaatggag

SEQ ID NO: 103540 - DNA, 83 bp, Homo sapiens
gagacggcggccttcgaggaggtcatgaaggacctgagcctgacgcgggccgcgcggccatgccagtgacggtaacccgcacc

SEQ ID NO: 103541 - DNA, 100 bp, Homo sapiens
cagaaaacctcagacaccatagccccctggttccatgaatttctctgcaaagaatgtccaaaaattcatattcacattgatcgtatcgacaaaaaagatg

SEQ ID NO: 103542 - DNA, 75 bp, Homo sapiens
catcctgtcacaggccatgctctggcaaaaaccagaaaacaacagccttgacacagatgatcactttaaaccatc

SEQ ID NO: 103543 - DNA, 90 bp, Homo sapiens
tatgctgcagaaatcatttcggctctcatgttcctccatgataaaggaatcatctataggtcccgcagcccccggaagccaatagactcc

SEQ ID NO: 103544 - DNA, 100 bp, Homo sapiens
ggggctaaccagttagtggtgctcaacgtgtacgacatgagtgatcagcagctggactgtgccttggacctaatgaggcgcctgcctccccagcaaatcg

SEQ ID NO: 103545 - DNA, 83 bp, Homo sapiens
tggagcaaaaagaggttgattacagcggcctcagggttcaggcaatgcaaataaggtaatagcctgcagctggtgttttgaga

SEQ ID NO: 103546 - DNA, 100 bp, Homo sapiens
ccagaagtcaatccccactggcaccatcctggccatcgccaccacctctgctgtctcacggatgataccatcggggaccttaagaagctgattgcagccc

SEQ ID NO: 103547 - DNA, 88 bp, Homo sapiens
gtgagatgtcctcactgtttcaggaggtgctggagaatctggtaaaagcaccattgtgaagcagatgaggatcctgcatgttaatggg

SEQ ID NO: 103548 - DNA, 90 bp, Homo sapiens
tgccgcttcagttctcccggtgtggccacgagtcgggccggtctaattgaagccaacggagaactcaaggtcttcatagaccagaacctt

SEQ ID NO: 103549 - DNA, 90 bp, Homo sapiens
gcttccgtcgaagaggagggggctgcggtggccaccgcggcggagcccgagagtttcaagaagtttttaaccgaagtgtcatgattattg

SEQ ID NO: 103550 - DNA, 50 bp, Homo sapiens
gatgacaaaaaagccttcatagtcccggagctggcagcacgtgggatcat

SEQ ID NO: 103551 - DNA, 82 bp, Homo sapiens
cggggttcgggtgtctcgtgtgtgaacatcacaggtatcatgatattagctggtttgacatcaagtcatttgtgagtcatca

SEQ ID NO: 103552 - DNA, 75 bp, Homo sapiens
tgggaatggcaaactgtagaagctgtggccaccggactccaggtcattacattagtgatgtatatgacattaaga

SEQ ID NO: 103553 - DNA, 75 bp, Homo sapiens
gtccgaagcaaggatttccgggactacctcatgaggaccatggccaacctggagcgcaccttcatcgccatcaag

SEQ ID NO: 103554 - DNA, 75 bp, Homo sapiens
ggaatgcactacaacaggaaaatcatattatagatggagtaaaggaacttctgattgacaaatttcgtgacccac

SEQ ID NO: 103555 - DNA, 75 bp, Homo sapiens
tgcagtggccgaggagattcaggatgaagttggtaagaatgattgatgttggctgatattggagtgctcattcac

SEQ ID NO: 103556 - DNA, 80 bp, Homo sapiens
cactaccccagacctcatcatcaactccatccaacacttcgtttactccgacttgttcgctgatatctaaattaagaagt

SEQ ID NO: 103557 - DNA, 100 bp, Homo sapiens
tctcgctctcgcacaggatcacagtatggatattccaagtcaagaccaactgaagagtgaagaccccgttgtgggacatctaggcacctcaactgaggag

SEQ ID NO: 103558 - DNA, 78 bp, Homo sapiens
atcctatggctcaaagaaagatgattatatccatccttttacaatccctgctattattcgtccattcagcgtattgaa

SEQ ID NO: 103559 - DNA, 75 bp, Homo sapiens
cgataaggagacctgctttgccgaggagaggggcttccacacgtttgtgctgaggccacactgtggggaggctgg

SEQ ID NO: 103560 - DNA, 51 bp, Homo sapiens
atcatctgggcactgctggatactgagtgcagcggaactgctgcctgacgc

SEQ ID NO: 103561 - DNA, 74 bp, Homo sapiens
tcaacatcgtaatttctattagccatttgtcatcactgggaaccagagacacccatccctacgccagcttgagc

SEQ ID NO: 103562 - DNA, 82 bp, Homo sapiens
agcaagcagataaactgttgaagaaacataaggatcttcattgtgctaaggtccaggaggcccaggaggtcctgggggaccc

SEQ ID NO: 103563 - DNA, 90 bp, Homo sapiens
ctgttcctggcggcgtagggcccatgacagttgcaatgctcatgcaggtcatcacttcaggcatcgcagccatcgtgttgtcacgctacc

SEQ ID NO: 103564 - DNA, 100 bp, Homo sapiens
tcagcaacaattgctttgaacacctcactcggctcattcagaacagcaagaccgtggtagggaccgacattgcggagcttctgttacgagaccacagaac

SEQ ID NO: 103565 - DNA, 100 bp, Homo sapiens
acgccactacagttcatcaacatcaactacgtccctctgaagccctggtacctgacagtgtaaagaaggagctcctacaaagaataagaacattccttgc

SEQ ID NO: 103566 - DNA, 75 bp, Homo sapiens
cgactggacttacgaggagcagtttaagcagacctgcctagagctggaacgttacctccagagcgagccctgcta

SEQ ID NO: 103567 - DNA, 48 bp, Homo sapiens
tttggaactgtcaggtacctcaaagctgcagattgctgtctgaagctc

SEQ ID NO: 103568 - DNA, 82 bp, Homo sapiens
ctgcatgccgctcaccgtagacgaggctgtgagcgggaccgcctgtccttcgggttctgcgagacgctgcgcctactgggcc

SEQ ID NO: 103569 - DNA, 97 bp, Homo sapiens
tacagtttgaagagaaaaagaaacagcgtgaaattgagctcaccatctgctacctggatatgctgatgaccagtgaggagcgccggaagcagctgag

SEQ ID NO: 103570 - DNA, 51 bp, Homo sapiens
gtctgcaaagtgtccccggcaagaaggtgaatgttggatgtgtacccaaaa

SEQ ID NO: 103571 - DNA, 116 bp, Homo sapiens
catcctgccgtccttctccactttcgccagcccgtgccgcgagcgcggcctgcaggaggaggctactcacagtcgaactacaactccccggggtccggccagaactacagtggccc

SEQ ID NO: 103572 - DNA, 100 bp, Homo sapiens
tgaccctgctgagatctcctaagcggcactcagtgcaaataacaatagcaactcccccagcaggtgcaccgggtataatttcttcaccatatgcaggggc

SEQ ID NO: 103573 - DNA, 90 bp, Homo sapiens
ccgccacccgatggaagattcgatggacatggacatgagccccctgaggccccagaactatcttttcggatccttcatctgtacctaatg

SEQ ID NO: 103574 - DNA, 83 bp, Homo sapiens
gggctgcctgccgggcggccgggcgcggcgagcccaggttacccatgcagttgttactgtaccagcctattttaatgatgccc

SEQ ID NO: 103575 - DNA, 104 bp, Homo sapiens
ctcctcgtccgacctcacaggccgacaagatacctctcgcatgtccacctcacagccgcggcgagtcctttgcacatgttggcaacacacgcatccgcatcggc

SEQ ID NO: 103576 - DNA, 100 bp, Homo sapiens
cgcagctgggaaagctgctcaaggagcagaagtacgaccggcagctgaggtatatttgaaggctcccatgattctgaatggagtctgtgttatctggaaa

SEQ ID NO: 103577 - DNA, 98 bp, Homo sapiens
agtggttggttgcagttgtgtagtagttaagaatcctcgcaaggctcgtgtaactcggcgtttcattgtagtagaaggattgtatatgaatactggaa

SEQ ID NO: 103578 - DNA, 97 bp, Homo sapiens
agacagtttgctgcggtcagcatcacaactaatcaggctggagtctgcgattgtggaataatgaacttcgaatgatgtgattctggatgaggacttg

SEQ ID NO: 103579 - DNA, 100 bp, Homo sapiens
ttggacctatcaacagtgttgccttccatcctgatggcaagagctgctcatccgaaatggctctgaggtgcgggacccactggttacctacgaaggctcc

SEQ ID NO: 103580 - DNA, 98 bp, Homo sapiens
ccaaagacaactataaacgagtgactgggacaagatgctgggctcttgcactgtttggtggaaatggtgagacaggatttgagcaaaattctacttat

SEQ ID NO: 103581 - DNA, 75 bp, Homo sapiens
gcggaactcggccaagggaaaggtgcccaagtcggcactgggtttctgaaggattgtcattcttgcatagcagtg

SEQ ID NO: 103582 - DNA, 75 bp, Homo sapiens
gagactcggggcgccagtccgggcaggggcagcgggagccggccgggtaatagcctgcagctggtgttttgagaa

SEQ ID NO: 103583 - DNA, 101 bp, Homo sapiens
cttgagtgagaacaagagagaggacggcagcgccaagcaggagctgaaggacttcaggttgcaatgaatgtgtatgagttatcatcagctgccggattacc

SEQ ID NO: 103584 - DNA, 100 bp, Homo sapiens
ctacgggcctttacctgcgacgacctgttccgcttcaacaacatggtttggaaatcccttgtctccaggttgctgggattgacttcttgctcaattgaaa

SEQ ID NO: 103585 - DNA, 75 bp, Homo sapiens
cagatgttcattcatctggatcttcagatgcacatgagctagagttaatgccaaagacagcaaatggttgacacc

SEQ ID NO: 103586 - DNA, 83 bp, Homo sapiens
acttgctcgtgccttagacaagaaactcctttccttaaaggtcagcttttgccaactgttttcaaatcacatgcatgggggat

SEQ ID NO: 103587 - DNA, 100 bp, Homo sapiens
aaaaagctgaggccagatattggaaaggctgggaggcggcagaatgcagccagaggagggcacaggctggctgctggagctgctgtccgaggtgcagctg

SEQ ID NO: 103588 - DNA, 75 bp, Homo sapiens
caaaaaacagccaccgattttgctatgtctctgagctgcgaggtgaaaaattagacgatttcaagaattggagct

SEQ ID NO: 103589 - DNA, 75 bp, Homo sapiens
agaggaaagtcccttattgattggccaacaatcaacagcctccacaaatgggaagtgttcctgtaatgacgcaac

SEQ ID NO: 103590 - DNA, 75 bp, Homo sapiens
ccggcacacagatgctcacaataagcctcccgcgacgatgcccctcaacgttagcttcaccaacaggaactatga

SEQ ID NO: 103591 - DNA, 75 bp, Homo sapiens
catcaccctggagccttccctcctcttcccagcaggccaggttgctgctgactcagccattctagaagttcttca

SEQ ID NO: 103592 - DNA, 100 bp, Homo sapiens
actcaacattcctccctcttcatgcttaatgaagtaaaacgggcccaaagacaggttctgtcagatagtgagaaacggaaacagtacgatacttatggtg

SEQ ID NO: 103593 - DNA, 80 bp, Homo sapiens
gtgctatgcctgtaacaagagcatcacagccaaggaagccctcatctgcccaaaccaaatacacgctgatcgatgagcag

SEQ ID NO: 103594 - DNA, 75 bp, Homo sapiens
tccgagactggcagcatgagcagcatgagagcttccatatggctgggaaaaaatcgatgatcccatttatggcac

SEQ ID NO: 103595 - DNA, 100 bp, Homo sapiens
ctggtgtgacaaatcagatgaagatgattggtcaaaaccactcccaccaagtgaacgcttggaacaagtaccaagttcgatccatagcaagtcatgttcg

SEQ ID NO: 103596 - DNA, 88 bp, Homo sapiens
tacggggtgtacttgggaacgaggggtgaagcggcccaggtgaggatccgatcacataggacagtatgcaccttaagatcctgaagaa

SEQ ID NO: 103597 - DNA, 87 bp, Homo sapiens
cgggataacgcctgcaacgacatgggtatgtctttgcaagactccactctttccagagaggggaaaccagagggagagattatggct

SEQ ID NO: 103598 - DNA, 75 bp, Homo sapiens
tggagaacctgcagtcctttaacgagatcactgctatgactctgatgccagtatggactggagatgatgggagcc

SEQ ID NO: 103599 - DNA, 83 bp, Homo sapiens
tagacgacaaaatgcaaaaaaggaggccaaagactttatggtcttgctgcattcagggcttttttaaagtcggaattctgtga

SEQ ID NO: 103600 - DNA, 98 bp, Homo sapiens
catcgacccgaagttgcggattgcagccgagaacgagctcaaccaggatggaatgggaaacctgaggatcacagaaaaaggtctaaagctagaaggag

SEQ ID NO: 103601 - DNA, 75 bp, Homo sapiens
atagctaagactccaggacacccctgaagccgagaaatgaattcagatattcctatactcttcagtctacaacgt

SEQ ID NO: 103602 - DNA, 50 bp, Homo sapiens
tgtgaacagtacgcagtgaatgttatgcctgtgaggagccaccaacattt

SEQ ID NO: 103603 - DNA, 100 bp, Homo sapiens
aggggtccacctgccttttgtgggctactcctactcctgcatggccctcagaaaccagcctggacaccaagtctgtgtcagaaggccacctcaagaggaa

SEQ ID NO: 103604 - DNA, 90 bp, Homo sapiens
ctgtcccgggcctaccccctggactccctggagaagcagatggaaaagaacgctttggataaacaagaagaattgacacctcttggagtc

SEQ ID NO: 103605 - DNA, 100 bp, Homo sapiens
ggagcttgataaatttgataacctagatgctgaagctgatgaaggttgggcaggcctcctttcatgtactctgcccaacggttttgggggacaatctggg

SEQ ID NO: 103606 - DNA, 75 bp, Homo sapiens
cttctgcctcagtctcccgagtagctgggactttagtcttggtgatgccttggacagcagcaactccatgcaaac

SEQ ID NO: 103607 - DNA, 100 bp, Homo sapiens
aacggtccatatcccaggagctcgctgcctgtaccttagatttgatagcagatgctcttcgcaatatgactatgacaaacatccaagagtaaggtatgca

SEQ ID NO: 103608 - DNA, 87 bp, Homo sapiens
atcgactcacaaatacctgtgatttctctccccgtctccacctccaggtggtatcacggaaaacttgacagaacgatagcagaagaa

SEQ ID NO: 103609 - DNA, 100 bp, Homo sapiens
cgcggagtcttcggcgagacctaccgggccctgtctgtgccggccgtgagctgcggcaggacggctggagcttttgcgagaattgaagcaccctaatgtg

SEQ ID NO: 103610 - DNA, 101 bp, Homo sapiens
gtcgccatcttggatccgcgggacaagaaaattcatgcggttcgagaacttgtcttggacaattgcaaatcaaatgatggaaaaattgagggcttaacagc

SEQ ID NO: 103611 - DNA, 97 bp, Homo sapiens
tggaggctgagctggcccagagaattgcagccctcaccaagaactacgttacttttaacccaacaaataataaagaattggtgagcaatagtaaaac

SEQ ID NO: 103612 - DNA, 100 bp, Homo sapiens
aagactgaaatgggggcgaccattcttaggttgaaatcacaaagattagacacctttttagataggtgttcttcagcaccactgacaacacggttctgac

SEQ ID NO: 103613 - DNA, 99 bp, Homo sapiens
atggattacagccactgccaaggcaaccgatggagacgcagtaagcgagacggaagtgaaaatgtgacaggattggacctttcagatttcccagcatta

SEQ ID NO: 103614 - DNA, 98 bp, Homo sapiens
ccgagagcgcgaatatcgtcatcgttagaaggaattgccacaagcagtctgtgagatccttgggcttcaaggcagtgaagttacaacaccagattcag

SEQ ID NO: 103615 - DNA, 97 bp, Homo sapiens
tggtggcaagtgacatgatctcactggaccgcagcgtcaatgacttacgccaagaagagttcagggagattactatggagatctggctgctcgcctg

SEQ ID NO: 103616 - DNA, 98 bp, Homo sapiens
tcaatgagaaaatctccctgctccgcagcgacatcaccaagctggaggtggacgccatcgtcaacgccgcacctgtggaatcctctcaagaggaacag

SEQ ID NO: 103617 - DNA, 75 bp, Homo sapiens
cggagctgtagccactgtagcagcaagctcctacagaagaagggaaaaaagagctgctgttcctaagtaacgcga

SEQ ID NO: 103618 - DNA, 83 bp, Homo sapiens
cacatacttaccttaatccacctaacatggagactggtatgtgccacaccagaggaatataatacagttgtacagaagccaag

SEQ ID NO: 103619 - DNA, 75 bp, Homo sapiens
gttgcacatttcctgcaaggactccaaagtggtgaggtctggagaaaatgatgtggaatataacaacatggaatt

SEQ ID NO: 103620 - DNA, 90 bp, Homo sapiens
cctggagggaccccagggcaacagcgcaacagctgagtcaggcactgggtcaggggaggtggggaagacagggctccagctaccacagga

SEQ ID NO: 103621 - DNA, 75 bp, Homo sapiens
ccctccggctccaagaaggttatctcctcagccaacagagctgtggttgatttgttcccgacaaggagttttctg

SEQ ID NO: 103622 - DNA, 83 bp, Homo sapiens
taagcctgatctaacccctagaaacaggacaaagcagttccaattccagagaaaatgagtgaatgggcacctcgacctccccc

SEQ ID NO: 103623 - DNA, 90 bp, Homo sapiens
attttggcattgacatttaattttagggtcctttatatagaagggagagtaggtaccccaagaagctagtgcagacttattcagtgtttc

SEQ ID NO: 103624 - DNA, 134 bp, Homo sapiens
cacccaggccttctcgcgctgcctggtcgctggtgaagcccgcggcgcgcgcctctcccggaccctgcagggaaacttggatttaactggccagaagcaggtattcaaagcagagaacaatccctgggtgaccc

SEQ ID NO: 103625 - DNA, 83 bp, Homo sapiens
ctcctggtgaccagcattcaaggggaggagccccagccccgcgacgaggaggaagcggagctggagctgctgaggcagtttga

SEQ ID NO: 103626 - DNA, 51 bp, Homo sapiens
gtattgccgcggtggaaatggagaattttgaacagaaaatgctgaaaaaag

SEQ ID NO: 103627 - DNA, 71 bp, Homo sapiens
ccaaagtgccatgtctttaatgtacccattcctggcccagtgggtaacaagagaatggttcatttttcccc

SEQ ID NO: 103628 - DNA, 75 bp, Homo sapiens
aagccgggcggcctgccccgccggagcagcatcatcaaggtaactcgggaccaaatgaagatgtttatacagcag

SEQ ID NO: 103629 - DNA, 100 bp, Homo sapiens
aggatatgatatcatggaaccagcagcaaagaagtgctatctggaaagagaggtacggcttgtagatgcaggctttgtttggactgagcctcattctaag

SEQ ID NO: 103630 - DNA, 89 bp, Homo sapiens
cgcccagccgctcgcaggcgccgcacggagttgcgtcccggggacttggggccgcagggaggtgagcatgggtttatgcgtcttaggca

SEQ ID NO: 103631 - DNA, 83 bp, Homo sapiens
atatgcatgcatgtaccgaccttctgaacaaggccaacacctatgcaggcctgctggtgggtacccttgatgttgtgttggac

SEQ ID NO: 103632 - DNA, 83 bp, Homo sapiens
ttctccactgttcctggaggaatccgagaagagcagagcggagggagccccagacacggaactgtggctgcaccatctgtctt

SEQ ID NO: 103633 - DNA, 75 bp, Homo sapiens
gaaacagaggactaattttggcagttctaaatttgaatttgagattggaccagtggatcacattgaattctcttc

SEQ ID NO: 103634 - DNA, 100 bp, Homo sapiens
ctgaaaggaattctcaaaatccagcccttgagtggaatatggccagcagatatctgagaaatatgggctgcccgtggagaagatagcaaagctttacaag

SEQ ID NO: 103635 - DNA, 101 bp, Homo sapiens
tgatcgaggccacagcccaggtcacagtgaaagagttgctggagaatgtaaccctaatccataaaccagtgtcgttgcaaccccgtgggctgatcaataaa

SEQ ID NO: 103636 - DNA, 100 bp, Homo sapiens
ggctcgtgtggaccccagagcatgcacaggctgctcctccaggtcccggggctctgcatcctgagctatccaacaccactgtactttgggacccgtgggc

SEQ ID NO: 103637 - DNA, 50 bp, Homo sapiens
gtgagtgatcactctcaatcccgggttaaaaagatcaagtggcatgagca

SEQ ID NO: 103638 - DNA, 98 bp, Homo sapiens
tttatgcctagttgttaaggaagaaccagttgctttctgcaatggagagcactgcttctttagagaaaatgcctgctgcgttttcccttttcgaacat

SEQ ID NO: 103639 - DNA, 75 bp, Homo sapiens
gacggagaccagatggagtggaaggagtcagccagatgttacatcctgtccactgcagacaacgtattgactttg

SEQ ID NO: 103640 - DNA, 88 bp, Homo sapiens
gaactcgtcatgctctttgtagcgtggtgcttctgttgctcacagcaggatggcccaatggaatcagctacagcagcttgacacacgg

SEQ ID NO: 103641 - DNA, 89 bp, Homo sapiens
ttcccgctgcgctaggggaagcgggcaggtagttccaatttgccagcagaatgagtacagaaagagactcagaaacgacatttgacgag

SEQ ID NO: 103642 - DNA, 125 bp, Homo sapiens
caaaacccagggctggaagatgtggcagccggccacggagcgcctgcagggccatcgatgcacccctcggagctaatagcggagatgagaaacagtgggtttgcactgaaacgaaatgtactggg

SEQ ID NO: 103643 - DNA, 75 bp, Homo sapiens
gaccgcaagtcccgtcttatgggacttgaggccctcaagcctcagagagttgtgatcacatgccctcaggacttc

SEQ ID NO: 103644 - DNA, 97 bp, Homo sapiens
aaggcagtggacacacagcatggagaaatccttcgcaatgtcaccatcctacgagccctcttggaacagagatcatgatgacacggcatctactcgt

SEQ ID NO: 103645 - DNA, 75 bp, Homo sapiens
tggctccaacacaagacaactggacgcaagaggtttggtgcacctcgatttggaggaagtagggcagggccctta

SEQ ID NO: 103646 - DNA, 83 bp, Homo sapiens
aggtgggcccggacggcacaccctacgttaccgtgctcaaggcgtccgagctgggccacagcctgaacgagaacgtcctcaag

SEQ ID NO: 103647 - DNA, 90 bp, Homo sapiens
cgcaactcggcagcctccacccaccggcccaccctacatttagcgcatcatgtgatccggtactatactggcaattgctggagaagattt

SEQ ID NO: 103648 - DNA, 74 bp, Homo sapiens
gtgattcccggaccctggaagagaagagggtggctaatgattaagacagccgctcaggaagcaatcttgcatgc

SEQ ID NO: 103649 - DNA, 100 bp, Homo sapiens
ccgatcttccaaagacaaggaaaatgccaagtctctggacaaacctgaacatgattgacataaaactggaaaagcctcaggagcaaccagtcagtgaagg

SEQ ID NO: 103650 - DNA, 85 bp, Homo sapiens
caggcagcttatgatgccaatttgtcccatggtgaactgtcacccctacaactcagcttgcaaccagccctggccaccagtttcc

SEQ ID NO: 103651 - DNA, 100 bp, Homo sapiens
tcaagatgaatatgaccctatggaagcagaagaagctgaggatgaagaagatgatttcagaagaaagtggtagcttcctttccaagaacagttctgagca

SEQ ID NO: 103652 - DNA, 50 bp, Homo sapiens
gcgctgacaagggtccagcctccgatttcatggcccaggggaagacaggg

SEQ ID NO: 103653 - DNA, 83 bp, Homo sapiens
gtgaccggatattcagttgcacatccccacatcaatgcactgccaatgtgttcggctaatgaatgagttcactaatatgccag

SEQ ID NO: 103654 - DNA, 99 bp, Homo sapiens
cctcaagctcctcagcgtggtgcccgtccctgaaggtcggagctcttaggcctgctgaaaacctacaactgctaccatgagggcaagagcttccagctg

SEQ ID NO: 103655 - DNA, 85 bp, Homo sapiens
aagcccaatggcgagaagccggacgagttcgagtccggcatctcccaggttatcagtgagctgaatggaaaaaacattgaagacg

SEQ ID NO: 103656 - DNA, 96 bp, Homo sapiens
gaggagatgaagggcaagggccaaaatgatggtgcaaaatgagttgataacaaccagaagttgacttgttagtgctgtgcttctactcgagcttgg

SEQ ID NO: 103657 - DNA, 101 bp, Homo sapiens
agacaaggattgatagaaaaggcagttccacgaggcttaatgccagaccgggagttggaggtgtccgatctcgagttgggatccagcaaggccttctcagc

SEQ ID NO: 103658 - DNA, 75 bp, Homo sapiens
cattgctctttggcgactcttattgtttaaggaagaaatctctaaacgttttaaatcacatactgaccaacttgt

SEQ ID NO: 103659 - DNA, 83 bp, Homo sapiens
agaacaagggccgcgatgtggaagtcagcccaaggccaaccccactgtcactctgttcccgccctcctctgaggagctccaag

SEQ ID NO: 103660 - DNA, 83 bp, Homo sapiens
ggattccaacaacaattccgatggcaaagccgttgccaagttgttgacctcctgtactggagagacattaagaagactggagt

SEQ ID NO: 103661 - DNA, 83 bp, Homo sapiens
gcctgaggtccttgttggctgcttgctggagagaccatttcagagatgtcttccagaagtaccaaagatttaattaaaagtaa

SEQ ID NO: 103662 - DNA, 100 bp, Homo sapiens
gcttccaggcagaacagcccatcactgccagatgcgagcagttcttccacttggtcaactctgagatgaaaaagcttgcggaggctaagcaccagtacag

SEQ ID NO: 103663 - DNA, 100 bp, Homo sapiens
gtactatcggggggcccaggctgccatcgtggtctatgacatcaccaacacaccttacggacatccaaaaattgcttggaactgacttcatgggtaccat

SEQ ID NO: 103664 - DNA, 140 bp, Homo sapiens
cactctcattagtgagaatggtcatgctgccgacaccctgacggccacgaacttccgagtggatctttaatctcatgaagtacgacagctacagccgcttcttaaagtctgacttgtttttaaaacacaagcgaaccgag

SEQ ID NO: 103665 - DNA, 76 bp, Homo sapiens
caaaatccatagatggaaaagatggtactacattaaaccttctgaagtttcctatttgcaacccaactccttacag

SEQ ID NO: 103666 - DNA, 76 bp, Homo sapiens
ccccgcaggtggttattcgccaagcccgaatctccgtgaactcaggtgaacggaagagtccttatgttgcagtatg

SEQ ID NO: 103667 - DNA, 100 bp, Homo sapiens
ggagacccgagaacaggtcaaagaaatcacctatccgcgatctagggcagccctgcagaggtacctgttctactgtaatcgctatatgaaccacatgcag

SEQ ID NO: 103668 - DNA, 96 bp, Homo sapiens
cggggcgctgtgtccccaagctccccgtcctcggtgtatgtggtagaagaccaaagaagagatgagctaggaccatccacctgcctcacagcctgc

SEQ ID NO: 103669 - DNA, 96 bp, Homo sapiens
gcagatcgtattccttcagaggccagttatgtggaattcagctgctcaaacaccagatttatcaggaactgttgccgttattacatcagatgggag

SEQ ID NO: 103670 - DNA, 83 bp, Homo sapiens
gggaggtgttcgagaacgaccccgagacgaataccctctaccatctgctttggtcagggtgccgctcgaggatttaaaagcaa

SEQ ID NO: 103671 - DNA, 100 bp, Homo sapiens
ttcagaggggccggtctctctaaatatgccccagatttgtgacacagactatatccagtacccaaactactgttccttcaaaagccagcagtgtctgatg

SEQ ID NO: 103672 - DNA, 73 bp, Homo sapiens
cagagcgagaagcccggaggttgcgctgagcttggctgctcgctgggttggattgctcaagagttgtgctgag

SEQ ID NO: 103673 - DNA, 119 bp, Homo sapiens
ctcatcacccagtacgagcgggagaaggcgctgcgcaagcacgctgaggaggaacaagatcactcaaggtgaaggataatctactaataccagcactttgaatgaaaatttgtttctct

SEQ ID NO: 103674 - DNA, 100 bp, Homo sapiens
aagccacgggtcggcccgagtgcttcctcacaatcttatggcaagggccttatatgacaatgtcccagagtgtgccgaggaactggcctttcgcaaggga

SEQ ID NO: 103675 - DNA, 95 bp, Homo sapiens
ggcctattcagctgtaccagtccgccattttgctaccaagaaagccaaagaacagcatgatcctctctgctgccatcttcatcaccctcttaggt

SEQ ID NO: 103676 - DNA, 82 bp, Homo sapiens
acaaaaagagccttcagatcctacatacttttaccaacagtgtgaccaagaatatggcccaggtgaccaaagccctggacaa

SEQ ID NO: 103677 - DNA, 75 bp, Homo sapiens
tggcggcggcgccatggcagggcttgcagctgctgatgcaaggaatcccctgggctcccgtccactccactgctg

SEQ ID NO: 103678 - DNA, 83 bp, Homo sapiens
gataatttccccagagcgtcttgatccttttgcagatggtattcccatctgtcgacaacacttaatttggaataacatggaac

SEQ ID NO: 103679 - DNA, 83 bp, Homo sapiens
ccacggctccggcaggcgggccggggaccggccgaacctgagttgacggtggaggggctcggatggagtctcgctgtgtcgcc

SEQ ID NO: 103680 - DNA, 75 bp, Homo sapiens
tcgggttattcgagtgaccgagaccgcggccgggaccgaggtggagcgagaccgtgccctgggccaccaggagcc

SEQ ID NO: 103681 - DNA, 81 bp, Homo sapiens
gcacaatcgggcggaggtggcgctgccccttcagggaagaggaagaacgtctgagaaataaaattcgagctgatcatgaga

SEQ ID NO: 103682 - DNA, 100 bp, Homo sapiens
accctgggccagcacatctccacctcatcaggaaacagctgagacagacatccacgacagcgatggcagttccagcagcagccaccagagcctcaagagc

SEQ ID NO: 103683 - DNA, 59 bp, Homo sapiens
agaggaatctccttcagcccctggaagccatacacctgcctgtggccctttctcagccc

SEQ ID NO: 103684 - DNA, 75 bp, Homo sapiens
gaacctcaccccaagatcttcacattctggatctcagctgctcttgaaggacctcagcagccatgtcgaagcccc

SEQ ID NO: 103685 - DNA, 101 bp, Homo sapiens
ctggacccctccttcacgcacgccctgcgcctggtgaaccaaggaatacaaacagaagcttgcacgagtaacccaggtccgcaaggaactgaaatcccata

SEQ ID NO: 103686 - DNA, 50 bp, Homo sapiens
gaggggcttgcctgaagcgaggggctccctggggaagggaatgcagggtt

SEQ ID NO: 103687 - DNA, 100 bp, Homo sapiens
gttgttctttgccatttggccaatcatgtgcgacctcgatctgtcccaagcattcatgttccctcaccagctgtactccttgaggagaatgaccagctga

SEQ ID NO: 103688 - DNA, 90 bp, Homo sapiens
gttcactggaaggaaaatgggacattagttcaagtagcaactatatcaggtgaccaagaatatggcccaggtgaccaaagccctggacaa

SEQ ID NO: 103689 - DNA, 100 bp, Homo sapiens
gccagctagaactgttttatttacaaatgcccgcaaatttgatgggaaggatttccgatggctgtgccctcctggctgaagaagccccaagacagccagc

SEQ ID NO: 103690 - DNA, 98 bp, Homo sapiens
gaacttgctgggcatgtgagtgcaccaccttgaaagtagagcctcaacccctggtcaagccatcaggaatagccaggccagaagaaggaaggcctgtg

SEQ ID NO: 103691 - DNA, 75 bp, Homo sapiens
cgagcggcggcggtggcggcgaaggccgaggcggtggtgacgggctcagggctggacagccagaagtcagacgag

SEQ ID NO: 103692 - DNA, 100 bp, Homo sapiens
cgttggtcggcggcagtcgggccagacccaggactctgcgactttactagttcggtgtagcactgtttgcggcgaggagaaaggaaggagaggagaaaac

SEQ ID NO: 103693 - DNA, 98 bp, Homo sapiens
ccccctgtgcgccaccattgcagccaaaggttctcagaggcactgtgactgacttccctggatttgatgagcgggctgatgcagaaactcttcggaag

SEQ ID NO: 103694 - DNA, 100 bp, Homo sapiens
ccaccaaaagccctttcaagataccaccggtaactttcatcaatgaaggaatacctccacgggcccattcccgagattctagtgattctgctgatggacg

SEQ ID NO: 103695 - DNA, 78 bp, Homo sapiens
gaaagtcatgttacccaacaccggatggggagtaggaggcaatgaggaagtcaagaggaaggggatctgaagtactcc

SEQ ID NO: 103696 - DNA, 90 bp, Homo sapiens
cagaggatggcgcctgtgggcacagacaaggagctcagtgacctcctggacttcagcatgaaatcttcccaaggctgcagacaccgacgg

SEQ ID NO: 103697 - DNA, 90 bp, Homo sapiens
tggtcggcttggtgtggtgtgcggaggagctccaggcccgtcggcgcggagcattagtgccagcagtagttcccaagggctgtctcagcc

SEQ ID NO: 103698 - DNA, 100 bp, Homo sapiens
ctgactgcacttcttttttgagaaaggaaggaatatatcctgactgattgtggtcaaggtgaagccccatgacaaggatgccaaaatgaaataccaggag

SEQ ID NO: 103699 - DNA, 100 bp, Homo sapiens
gcactgagtaaaagaagcaaggaagctgaagcagctttcttgaatgtctacaaaagattgattgacgtcccagatatttggagttcttacaacatggcag

SEQ ID NO: 103700 - DNA, 90 bp, Homo sapiens
aattattcgtgctataaacactggcaatttgaacttctgaattatacaccagcagattatggctccctacacaccttttctcactgaatt

SEQ ID NO: 103701 - DNA, 75 bp, Homo sapiens
cgcgccttcgcccagaagatcagcagcatttaaatcaaacggtattgagatggattgggttatgaaacataatgg

SEQ ID NO: 103702 - DNA, 100 bp, Homo sapiens
tttaagaaaggaatgaacatgtatttaaccaagttccaacaaaagaatgctgccgcagagaacacgtagcgactccgaagatcagccccaatgaacatgt

SEQ ID NO: 103703 - DNA, 50 bp, Homo sapiens
cgggaccgccgccgccgccgccaccatgcctgccctcaagtatgtgttgt

SEQ ID NO: 103704 - DNA, 100 bp, Homo sapiens
ttcagctacttgaagatagccatcagccgctacgtgactcttttctccagttacagatgtagagctaaaacgactgaaggatgctttcaagaggacctgt

SEQ ID NO: 103705 - DNA, 101 bp, Homo sapiens
gaagcggaagtatgagttggggcgcccagctgccaacaccaaggaaattttttcatcactgagaacatggaactgaaggtgggggattttgggctggcagc

SEQ ID NO: 103706 - DNA, 90 bp, Homo sapiens
agaaggaatagaaaattttgacgtttatgcaattaaaccaggccggccccgggctccaccgcccccccagcccacggtgtcacctcggcc

SEQ ID NO: 103707 - DNA, 49 bp, Homo sapiens
atgtctcctgggataattccaccaacagccaaatttgtatcctactgtg

SEQ ID NO: 103708 - DNA, 82 bp, Homo sapiens
ccgctcttgccttctccacacttgtttggtctaccccgaggtgaaggatagtaaccaggcctgcctgccccccagttccttt

SEQ ID NO: 103709 - DNA, 100 bp, Homo sapiens
ttcacctggcacagtcacttcacaagttgtctaccgcctgtccaggaaggggattaaagcctgtggtttccacagaagcaccacctatcatatttgccac

SEQ ID NO: 103710 - DNA, 82 bp, Homo sapiens
ccagaagtccagagctgaggactgcctgtttgcagacttcccaagtaagaagcggaagaggagccgctggaaccaagacaca

SEQ ID NO: 103711 - DNA, 75 bp, Homo sapiens
gccgcccctggtgcacacaccctcgtattctcctgcccttccccaggatccctgctgccttggtgatcccgggct

SEQ ID NO: 103712 - DNA, 75 bp, Homo sapiens
ccggaatcattcccttggctgttaatttctcagagtgatcctggtggagggattgaaatgtctgagttcatccga

SEQ ID NO: 103713 - DNA, 100 bp, Homo sapiens
agcagatcaagaccctcaacaacaagtttgcctccttcatagacaaggtccaggtgcaggtacagcagtctccgcaacaggtctcggctcagctctcccc

SEQ ID NO: 103714 - DNA, 100 bp, Homo sapiens
gctgtggggttagaaacctttaatagagcacgctataggcagtttgtgaagcgaattggttatatgatcagtgagatggaagattttcgaggtatagcag

SEQ ID NO: 103715 - DNA, 75 bp, Homo sapiens
aaggcgcatcactcccagctgcgcaaagcttgcgaggtggcgttaggaggagacatcacagctttcccagatcgg

SEQ ID NO: 103716 - DNA, 101 bp, Homo sapiens
gtgcgacctcttctgcggccggcctgggcaggtgtcttcctcgagaggcaggcaggggatcccggacgttatttggaaatagcggtgcttgcagcgcttgc

SEQ ID NO: 103717 - DNA, 50 bp, Homo sapiens
cggacggacgctcgcctgccggctgagttcagggcgacagctcagtgaag

SEQ ID NO: 103718 - DNA, 98 bp, Homo sapiens
aagcaccatgacgtccatccatttcgtggttcacccgctgccgggcaccgaggaccagctcaatgacagcttgaaatggcgattgaaaacctccaaaa

SEQ ID NO: 103719 - DNA, 75 bp, Homo sapiens
ggagcgtccggagctagctggatcctctaggcagtaaagatgacggcgccttgaggtaagctacaggcaacacca

SEQ ID NO: 103720 - DNA, 82 bp, Homo sapiens
ggcccccgagagctctagccgtcgaggagctgcctggggacggtgatgatgaacagtctacacagatggctgcaagttggga

SEQ ID NO: 103721 - DNA, 100 bp, Homo sapiens
cgggcagctacacatcttgaaagagaagctcttcctgtgagatggtcctagaacaattggagattcatacgcacacaaagaacctcaacccttacctcac

SEQ ID NO: 103722 - DNA, 75 bp, Homo sapiens
gtgaaatcagaggagatgtaactatcgattatttactggcaagatgagcaggattaccatgaaagaaaagtccag

SEQ ID NO: 103723 - DNA, 97 bp, Homo sapiens
tcagttagaaagaacacgtcagcgaaacccatctgatcgacatgttattatgccgctatcaccatggggatggttcttctaaatgaagcagcaactt

SEQ ID NO: 103724 - DNA, 100 bp, Homo sapiens
ccgaggacgaaaagaagggggagaagatctacctgtacacgcacctgaagcaacagcccatctgttcaatcaatgtactgaatataactgctgaagaaat

SEQ ID NO: 103725 - DNA, 100 bp, Homo sapiens
tgaaagaggacacgggaagaacaaagacttagactcgatgggagaagaagttgtccatgttcacactgggtgaaggaagctgaaaccacagacatgactg

SEQ ID NO: 103726 - DNA, 100 bp, Homo sapiens
ggcgggatggagaaaagtaggatgaacctgcccaaggggccggacacgctctgcttcgacaaggacgagttcatgaaggagatggtaacctgcacctcaa

SEQ ID NO: 103727 - DNA, 100 bp, Homo sapiens
tcaggccttgcccaaacctgcaagccccaagaagccaccccctggcgagcggaggatgtgaacctgaagatgccccggaacaaccagctgctgcacttcg

SEQ ID NO: 103728 - DNA, 51 bp, Homo sapiens
aaaggatgagcggaaccttggaaaaggatgaaacaagtgaagatgctaact

SEQ ID NO: 103729 - DNA, 100 bp, Homo sapiens
cacctgggccccagaccgtgctgatcttcgatgagctctcggattccttatgcagagtggccgacttgactctaaaatagagctcaagcttgagaagaga

SEQ ID NO: 103730 - DNA, 100 bp, Homo sapiens
tgaagagggtctggaggagccttctcaagaacagaggttcctacaaacttgatgacttttgagtagaagcctgagaaaaaaagagaggtgaactgttgct

SEQ ID NO: 103731 - DNA, 73 bp, Homo sapiens
tgctcattgccatgaaggaactcaagtttacccaaggtccagcctagcccctaggcaccatgtcggacagtga

SEQ ID NO: 103732 - DNA, 100 bp, Homo sapiens
gcggctctgactctggaggaggagctgcaggaagcgatccggagggcgcaggtgtcatggctgggtgaagagcctgtggctggggtgtggtcagagaagg

SEQ ID NO: 103733 - DNA, 100 bp, Homo sapiens
aggagccccactggctgtttgggaccatggagcggtgtggatgtggaagcagccaagcgggcagaagaggaattgctccttcatgacacgaggtgctggc

SEQ ID NO: 103734 - DNA, 80 bp, Homo sapiens
acttttcttatgctgggatgtgccttagaggattatggacctgcctagagctggaacgttacctccagagcgagccctgc

SEQ ID NO: 103735 - DNA, 100 bp, Homo sapiens
cagattctagaggaagaagtcgaacaaaaatggtgtctcaatcacagctgtgatgccattagtgtattggagaaagaacatgactacagagatgaacatt

SEQ ID NO: 103736 - DNA, 50 bp, Homo sapiens
gtggtcattggaaaggtgttcatgcagacttaattcagtgcacaaatgag

SEQ ID NO: 103737 - DNA, 75 bp, Homo sapiens
actttccatttgccttcctgggtggaagtgctgcatcagtaaatgctaattttgctcattttgataacttcccca

SEQ ID NO: 103738 - DNA, 100 bp, Homo sapiens
tgttgcctgggtaccaccagagggaaagctggggcgaatgattatgagcctagctgtgggcgttctttacgcaggacacagcgcaaacgtcagcatactt

SEQ ID NO: 103739 - DNA, 82 bp, Homo sapiens
ttgaggaggaggctgcacaccatagtcaccagcaagttattcagcttctcaaggctggaaaagcgaaggaagtttcctacaa

SEQ ID NO: 103740 - DNA, 107 bp, Homo sapiens
tgaagttggccggtatgtcgcaaaagacttcttagtcaacaactggcaagctgtgagtaaaagcatgaagaaagcagtgtcactgataaatgcaatagatacaggaa

SEQ ID NO: 103741 - DNA, 100 bp, Homo sapiens
ccgacacctctgagataaaagggcccctttcgactagcctctgctgaaagcaaaaagaagctctgtgccctctatgggaagtggactgaatgtttataca

SEQ ID NO: 103742 - DNA, 82 bp, Homo sapiens
ctgcctctccaggatgtctacaaaattggtgcaattctggggtcagaagccatggagtcagcattatcaccaaggatattat

SEQ ID NO: 103743 - DNA, 100 bp, Homo sapiens
aaaaagatcaatagattgcctacccccattgcaggactggttaccttccgaacaagaatctatcactgtaatattaacagccaaggtgtgatctgtctgg

SEQ ID NO: 103744 - DNA, 100 bp, Homo sapiens
caaccacctcgagcggctgctggacgaagatgtaaacagtgttctagtttgagatccatacaaaatctaaattccctggttgataaaacatcgtggattc

SEQ ID NO: 103745 - DNA, 75 bp, Homo sapiens
agagttgggtccaaactcttctttgacaagagagacaactctgactttgatttacagagtaaatttgtggccaaa

SEQ ID NO: 103746 - DNA, 100 bp, Homo sapiens
tggagaattctcactgcagagttcaaatgcatcaaagctttctcagtgctctagtaaggactctgattcagaggtagcagtagctgatgtgcagtttggc

SEQ ID NO: 103747 - DNA, 101 bp, Homo sapiens
agcaggagctggaggaggagccgccgccgccaggtgaaagtgggagatacattggatcttctcattggagaggataaagaagcaggaacagagacagttat

SEQ ID NO: 103748 - DNA, 88 bp, Homo sapiens
atttccagcaacaagtgctttgggggattgcagaaagtttttgaacatgacaggttcatcatgcctagtggcgtataagaagaccccg

SEQ ID NO: 103749 - DNA, 83 bp, Homo sapiens
ctccttcggcagtccacccaccgccgccgcctcccaggaaaacgaagccccctcctgtattgacagctgggaattgtggagtc

SEQ ID NO: 103750 - DNA, 128 bp, Homo sapiens
agccagtattataggacacttctcagactgagagcccaatgtcgttggaaaccactgggccacaggaaaggcagtttttggagccgtgagggatacagcagtttggtcaatattgtcttaacatgctt

SEQ ID NO: 103751 - DNA, 98 bp, Homo sapiens
ttccatccaaactcttgccctttgagggaccaggaagagagaagggcacagttacctaagtatcaacgtaatcttcctcggccaggacaggcccccat

SEQ ID NO: 103752 - DNA, 75 bp, Homo sapiens
ccgcggccgctgcggacggacgctcgcctgccggctgagatccaggatgagaagactgataaaagaagaagctag

SEQ ID NO: 103753 - DNA, 100 bp, Homo sapiens
cctcaatgactgccctctaaaggaagaggattgaaagaaggtggcaagaggaagaagcagaagcagagagaggagtcgaagaagaagaagtcgaccaaag

SEQ ID NO: 103754 - DNA, 100 bp, Homo sapiens
cactgtccgccagacctgctgctgcttcaatgtccgcatcgcaaccaccgccctggccatctaccatgtggtcctagcttactctgccaccactgcccgg

SEQ ID NO: 103755 - DNA, 100 bp, Homo sapiens
aggtcctggggctgggcatcaacggcaaagttttgcagatcttcaacaagaggacccaggagaaattcgccctcaaaatcactattatcttcaaagccca

SEQ ID NO: 103756 - DNA, 96 bp, Homo sapiens
ttgggaagctgagggcagagttggacgaggtcaacaagagctctgagcccagaggaagccgagtcagccctggaggcggcccattatttcacagag

SEQ ID NO: 103757 - DNA, 100 bp, Homo sapiens
gccatcaatgtgataggagtaactctgaaggatatggtggtaccaggagacgataaagtagaaagttggagtcaaacactggatgcagaaattttggatt

SEQ ID NO: 103758 - DNA, 90 bp, Homo sapiens
agaatccagtatctaaaccatataacaagaactacgcaatgggagcgcccaacacgtcaccagtgccaactcaaggagcccagccagccg

SEQ ID NO: 103759 - DNA, 100 bp, Homo sapiens
gttcatcaggtgtacatcagggcaggagagtgccattctgcagtcattcaagcagtagaagacttggatttgtctaaagttcttcctttaggtcgtcagc

SEQ ID NO: 103760 - DNA, 75 bp, Homo sapiens
gtttgtgcaggacaccgacatggaacagggactcactggggatgccgacaaaaggatcaaggtggcgaagcccgt

SEQ ID NO: 103761 - DNA, 100 bp, Homo sapiens
aggcccagacaagggagctgaggttaaagaaaaacatccacccttgggttaaacagatggcatctgagcgagaaggctctggaagttctggcactgggga

SEQ ID NO: 103762 - DNA, 100 bp, Homo sapiens
cagaattggacccgaaaccatgcctcactgtcctaggcaaggaagtctgcggtcttgcagttcttcagactgctttaataaagtgatgccaccaaggaaa

SEQ ID NO: 103763 - DNA, 100 bp, Homo sapiens
atgctctgcggtttttgggctgtgttgacatcaaggatctaccaggttttaaaatcaaagatgggaaaatcggagaaaattgcccttccccatggccagc

SEQ ID NO: 103764 - DNA, 75 bp, Homo sapiens
gataactgactctgatctcaacattttggctgaagaggcaagtgaggcctatctggttggcctttttgaagacac

SEQ ID NO: 103765 - DNA, 96 bp, Homo sapiens
cctccctcgtgagttgggcttggtaccgtgctgcccagaatgcccttcgggaggtgatggtgtggatccacggtggtgcgcttgtttttggcatgg

SEQ ID NO: 103766 - DNA, 82 bp, Homo sapiens
cgtgattgcgttacaagctttgtctccttcgacttggagtctttgtccaggacgggcactgtgttggcactcactgaaaata

SEQ ID NO: 103767 - DNA, 102 bp, Homo sapiens
ctttgtccagggatctgaaaccactttgcagtcgacatactcggataccagcgctcagcccacctgtgattatgacgcaaacatgcagatctttgtgaagac

SEQ ID NO: 103768 - DNA, 101 bp, Homo sapiens
caggcgttgaagcgcgcgggcaaggaagtgctgctggaaggctaatggaggttggcaggatgctactaccccttcatcagtgacctcccctacagaaggcc

SEQ ID NO: 103769 - DNA, 100 bp, Homo sapiens
cccaggtgagccccatgcactgcctggacgaggaaggcgatgactcagatggggtgacgatgcctggggagcctgtggacgtggcatgtggcgtggacca

SEQ ID NO: 103770 - DNA, 100 bp, Homo sapiens
accgctctcgagaacgcaaggtgcctgcctcccgcatcagccgcttggccaactttggggcagaacagccctgtggcccccacagcccagcccaaagccc

SEQ ID NO: 103771 - DNA, 98 bp, Homo sapiens
gtggagggtgcaggaggaaggcatggactcggagattggctgcctcatccgcttctatgcaggtaaattgggatattcacaatgtatggaaacagagg

SEQ ID NO: 103772 - DNA, 76 bp, Homo sapiens
ggctggaactgggggacagtgaaatttggtgaaacaccatctgattcagatcacaagaagaagaaaaagaaaaaag

SEQ ID NO: 103773 - DNA, 98 bp, Homo sapiens
gactgaaaatggggcggaagaaaatacaaatcacacgcataatggatgaaaggaaccgacaggggtagaaatatttctgtcatggctcattcaaagac

SEQ ID NO: 103774 - DNA, 73 bp, Homo sapiens
atgatggaaatcatgacccgagaggtacttcgacctggtgtcctgtggtttctaaggaatttgaatgatccag

SEQ ID NO: 103775 - DNA, 87 bp, Homo sapiens
tgcccggtttggcactgctcctgctggccgcctggacggctcgggcgctggaggacactattgaggacaaacttgacaccaaacact

SEQ ID NO: 103776 - DNA, 100 bp, Homo sapiens
gtgggagttggggagctgctccggcttcggcgcggaggggcggcggccggggaggcggcggcggcggcaggagtctcgctctcagtcaaaatctccaacg

SEQ ID NO: 103777 - DNA, 50 bp, Homo sapiens
cgaaggtgaagccacggaagataaggggcatggtctagtggcccagtcag

SEQ ID NO: 103778 - DNA, 100 bp, Homo sapiens
ttcagagtgatagtttgtggcttgtagaattctatgctccatggtggcccagtatataaagttcgagatgccggtacttaaaagcttcattcagaagctc

SEQ ID NO: 103779 - DNA, 100 bp, Homo sapiens
gggagtgatgtcttccagactcggtgctgtacccgccgaatacaggagtttccagaaaatataaaaaattgtaaagttttgacaattgtggaggccagtg

SEQ ID NO: 103780 - DNA, 100 bp, Homo sapiens
tggagacatggaccgcggcgagcaagtctcttgttttcagcagccactgtaaagcagtgagtggctactcagaccaggttgtccatcagcggagatcagc

SEQ ID NO: 103781 - DNA, 78 bp, Homo sapiens
gcgggttcaggaggtacccaaactgaaggtatgtgcaagaggtgaaataattggcgtgaaagttctaggcatattggc

SEQ ID NO: 103782 - DNA, 50 bp, Homo sapiens
cggcgagcagaactacggcgagcgggtaaaaatgtctccatcgtatcatc

SEQ ID NO: 103783 - DNA, 51 bp, Homo sapiens
agccagaacatcgttctcaatggcaagatgatcagtagaattgaatatgtg

SEQ ID NO: 103784 - DNA, 126 bp, Homo sapiens
gatctggtgtaccaggcgaagctggccgagcaggctgagcgatacgacggttaatttggagtggcccctggagtcagtttcctacaccatccgaggccccacccagcacgagctacagcctccacc

SEQ ID NO: 103785 - DNA, 100 bp, Homo sapiens
ggctgtgctgcgcgacccccgcgcatgaaatggctattcctacaaagtggcagtcgcattgtctctttttcttggatggttgggagcagatcgattttac

SEQ ID NO: 103786 - DNA, 100 bp, Homo sapiens
cgggctcagacagttggcaagaaaaccccgaggagccctgttccaaagcctcctggaccgtccaagaagattcgctaaatattgtaatggatcaaggaga

SEQ ID NO: 103787 - DNA, 75 bp, Homo sapiens
gccctccccgccaaggcccgtgcgagactctcagcgttctcatctctcttccttcaccatgaagctgatggacaa

SEQ ID NO: 103788 - DNA, 74 bp, Homo sapiens
gcctgctcccggagggagacgcgctgccgaggagaacccagcggttccagggtctccctccactgctgtagtaa

SEQ ID NO: 103789 - DNA, 75 bp, Homo sapiens
cagatggcaagtggagacagcaatctcaacttcagggaaaagaagatctcccggagcagtgccctgaaagtgctg

SEQ ID NO: 103790 - DNA, 82 bp, Homo sapiens
atgttcatcgccacgttccactttcctcaccccaaatatgtggacctgtacaaggtcgcgtggggcaggcagtggcgctgcg

SEQ ID NO: 103791 - DNA, 99 bp, Homo sapiens
aggagatgtactgtgcttggctggaaaaccccaaaagtgtacataagtatcagatgtagaaggtggtgatggactgcagctcagaaaggaacatactct

SEQ ID NO: 103792 - DNA, 100 bp, Homo sapiens
gggatatcaagagtataatgtctatggtgaagtcttttgtacagtggttaggccaaaaagcaaatggatttccacctgacaaatcttcgggatccaagaa

SEQ ID NO: 103793 - DNA, 100 bp, Homo sapiens
actgaggaggaagggatggctgtggatctgctgtctgctcaggctggaatctagtggcacaatcatggctcactacagccttgacctcctgaggttcaag

SEQ ID NO: 103794 - DNA, 88 bp, Homo sapiens
tactcaagccaggtggaatttggataaatctagcagcaacaactccaggcccagcatttatcacatggacatggtctccccgtacctc

SEQ ID NO: 103795 - DNA, 98 bp, Homo sapiens
acagtcgaccggcccaaggactggtacaagacgatgtttaagcaaattcacatggtgcacaagccggagaggaacgaagggcatcctacgactataac

SEQ ID NO: 103796 - DNA, 75 bp, Homo sapiens
gagaagaaggccttgactacggaggggttgccagattcacaatgacatcctttcaagaagtcccattgcagactt

SEQ ID NO: 103797 - DNA, 90 bp, Homo sapiens
agaccacagttacatgtatggagaatggctggtctcctactcccagatgcatccgtgtcagtgattggcgaggacaacgtggcagtcccc

SEQ ID NO: 103798 - DNA, 74 bp, Homo sapiens
tactacagagtgtgcacactggctatcattgatccagattgccagtagaaagccaacagacggtgcttcctcat

SEQ ID NO: 103799 - DNA, 90 bp, Homo sapiens
cgtccgggacgcggagcccggagctggggcgacgaggcgattgcgggggcctgggctaggtcaaaatgcagatcttcgtgaaaaccctta

SEQ ID NO: 103800 - DNA, 78 bp, Homo sapiens
cccaccaacaacaccacaataatccacagccaagaatggagatgtatgcatttcgattcttcatccgcctgtagatga

SEQ ID NO: 103801 - DNA, 100 bp, Homo sapiens
ggaattccacctctgcgtttttccctccagcggatcgtgtgaagaagggatttgacttccagtggccccaacccgataaaccgatgttcttctacgtgac

SEQ ID NO: 103802 - DNA, 100 bp, Homo sapiens
gcgcattcgcaagagtcgtgtctctggcaagaagcgggctgctaatgccagcagcaaggcgggcagggctgggcagcggcctgagtctcagcggacttgt

SEQ ID NO: 103803 - DNA, 75 bp, Homo sapiens
ttcagggttcttgagccccttcacgaccgtcaccatggaagtgtcaccattgcaggctctgcgaacatcaataga

SEQ ID NO: 103804 - DNA, 98 bp, Homo sapiens
ggacctttgagcatacaccgagagagtgaggagccagacgacaagcacacactatggcgctgaaacggattaataagagtctcgctctgtcgcccagg

SEQ ID NO: 103805 - DNA, 98 bp, Homo sapiens
ccgcccaccagttcgcccgtccccctgccccgttcacaatcgcgagcttcggcctcggctctgtaccatgaagaagggccccagtggctatggcttca

SEQ ID NO: 103806 - DNA, 96 bp, Homo sapiens
agaaatcaaaaatctggtgaaattgccggcaagagggagttaaggacattccaggcagaggcaagaaactgcttggaaactccctgctgaaactgg

SEQ ID NO: 103807 - DNA, 75 bp, Homo sapiens
agagcagagcggagggagccccagacacggtgtgggccaggtcgtgctccaggttgctgctgccaccaactgcaa

SEQ ID NO: 103808 - DNA, 51 bp, Homo sapiens
aaaatccagaagtacaagcagtctggtattgttgcagcatctggcagtgag

SEQ ID NO: 103809 - DNA, 51 bp, Homo sapiens
gcactatcccaagactgctggcaacaggccctcgggaccaaggatcacgtc

SEQ ID NO: 103810 - DNA, 100 bp, Homo sapiens
agggaaaggcaaaggcaaaggcggctcgggagattcagccgtgaagcaagtgcagatagatggccttatccagtttgctgaccagaagcaagaattcaac

SEQ ID NO: 103811 - DNA, 91 bp, Homo sapiens
cgccgtcaaggaccggcacaaggacgttctcaagtggggcgatgagggctgatggagttatgagaacaatgaacacagaaaaactcctaaa

SEQ ID NO: 103812 - DNA, 96 bp, Homo sapiens
attggccagcaccattttgactcctgtggatggaaggtgactgagatgtaccagttcaaattcaaatacacgaaagaaggagccactatggatttt

SEQ ID NO: 103813 - DNA, 127 bp, Homo sapiens
agtgaagctcaagttgctactcgggacgctgcacctcccgcgccgcacggtggacgagcgctgtgcttcgccgtgagccgctcgctgctgctgacgtgcctggtgccggccgcgctgctgggcctgc

SEQ ID NO: 103814 - DNA, 82 bp, Homo sapiens
cggctaccactgcggctactgcgattccaaggagggcaaagcgtcctgcgttacagaatgtctgaaggggacagtgtgggag

SEQ ID NO: 103815 - DNA, 72 bp, Homo sapiens
cattgataactctggacttctcaaaggatctagtgaaaagccatttgatgtatgcggtcagagaagaagtgg

SEQ ID NO: 103816 - DNA, 87 bp, Homo sapiens
aactcaagctcaacaactgtggcatgggcattggcggcggcaaggaaatggctagtgatgagctgaaagagatgcggaaaaacttga

SEQ ID NO: 103817 - DNA, 75 bp, Homo sapiens
gacaagccgttatgaaagagatgaaaagtggggattttgccctgatcccacaactttcattgttagagagaggag

SEQ ID NO: 103818 - DNA, 100 bp, Homo sapiens
ctacaacactccaggctctttcacgtgccagtgcaaacctggttatcagggagacggcttccgttgcgtgcccggaggtcccagaacagttttcttctgg

SEQ ID NO: 103819 - DNA, 100 bp, Homo sapiens
aacctgaggaccattattttttaatggttgcctgtgatttgcttcggaggattattcgtatcttgaatctcagtaagagactccaaggacaactgcaagg

SEQ ID NO: 103820 - DNA, 100 bp, Homo sapiens
atgggtttgtatggacaggcttgtccatctgtaacttcattaagatatcattgaaatggattccaagcgtgtgcctcgagacaagctggcctgcatcacc

SEQ ID NO: 103821 - DNA, 97 bp, Homo sapiens
tgcgggagagccgggtaccggccgtggaagcggccaccgactactgtcagcagctgtgccagatcttggcatatacagaagggctgcatggaaaatg

SEQ ID NO: 103822 - DNA, 75 bp, Homo sapiens
cacaggtgctaaagagagcagtaccctgatggagtcccttgcaggtaagaatgattgatgttggctgatattgga

SEQ ID NO: 103823 - DNA, 100 bp, Homo sapiens
gatcctctagtagccacggtgtggcagctgctctgaaccaggacctggacccggacccaaagtgccatgtctttaatatacactgcctctaggactggga

SEQ ID NO: 103824 - DNA, 108 bp, Homo sapiens
ggttacccagcagaccatagagctgaaggaagagtgcaaagactttgtggacatttgaaattggcacaatggaagaagctggaatttgtgggctaggggtgaaagcag

SEQ ID NO: 103825 - DNA, 100 bp, Homo sapiens
gggagttccaggagattcaaccaggaggttacacatcattttggaatgactgtatatcatctggattacgtggctgtatgttaattgaattagcattgag

SEQ ID NO: 103826 - DNA, 74 bp, Homo sapiens
cgctgtccagcctgccgcgtgccctaccagcagcgatgacatgaccctcaccagccccagcatggacaactcca

SEQ ID NO: 103827 - DNA, 75 bp, Homo sapiens
cctggatgggggactttgtcacagcttggatggttttacagaaggcgacacatgttgttcagagtgaagtggaca

SEQ ID NO: 103828 - DNA, 75 bp, Homo sapiens
cagaatacctcaaacgtctaccattacagtgagaggcagaaaataagctggaacagagccagaaaatggtaattg

SEQ ID NO: 103829 - DNA, 122 bp, Homo sapiens
aatcgcttgtacaaaggagagtttaaacagccaaaacagttcattcatattcagccgttacagtgtttctgccacctctgtacaaaagacaattttacttgtgtgacagatgggctctgctt

SEQ ID NO: 103830 - DNA, 99 bp, Homo sapiens
gaagcctcatctagcccagaggatcggaatgacagatgtctgctgagaacagacccagtccctgaggaaggagaagatgttgctgccacgatcagtgcc

SEQ ID NO: 103831 - DNA, 96 bp, Homo sapiens
gaggagaagaaaaccttgaaaaaaatctccctgagtttgcctttccagaacctgggaatccagtgtgtgaagaagcgggacctggagcaggctatc

SEQ ID NO: 103832 - DNA, 83 bp, Homo sapiens
cttcaagcaggggctgatttaggtgagaaggactggcagaaatacgagactgctcggcggctgaaaaaatgtgtggacaagat

SEQ ID NO: 103833 - DNA, 88 bp, Homo sapiens
acaaatctggaacgggtggccgattactgcgagaacaactacatacaggcatcaagcatgatggaaccatgtgtgatacctgccgcca

SEQ ID NO: 103834 - DNA, 73 bp, Homo sapiens
gttcagtgcagtgtctgacttgtgacagggatccaacgcatgcctggagtggaggactagatcatcaattgaa

SEQ ID NO: 103835 - DNA, 119 bp, Homo sapiens
gagctcagacctgccaatttaccagagataattgataacaccctgtaacagctgaaatggtcctagtgccagatcgtgtcataaaatgtgcattgatattcaacggaggcaaatctaca

SEQ ID NO: 103836 - DNA, 83 bp, Homo sapiens
agtgactgggcggtgccggcgccggagacgatgccgttgtgagaagccctaccactgcaactgggacggctgcggctggaagt

SEQ ID NO: 103837 - DNA, 85 bp, Homo sapiens
agtttatggacagccgtatgcagctggccaaactctgctatgacccagattttgagcatggggtcggcctttgagcgggtagtcc

SEQ ID NO: 103838 - DNA, 49 bp, Homo sapiens
cataggaggaaaattcatcatctgcgtggtgatggtggatgaggcacac

SEQ ID NO: 103839 - DNA, 100 bp, Homo sapiens
caaagagtgtctgacatttcttttgtgcaagatgagcctcaagtgcttctgcattacaatgcagtggcagaacgtggagcacgttggtgaccagagcccc

SEQ ID NO: 103840 - DNA, 75 bp, Homo sapiens
ctgatcgagtccctccggaactcacactccagttccatctctcttatgcagagaaagatttgttggagagagagc

SEQ ID NO: 103841 - DNA, 75 bp, Homo sapiens
ccggtttctcccacatcgacctgaagaagatagtggtgagctggcaaagccaaagattggttttccagagacaac

SEQ ID NO: 103842 - DNA, 96 bp, Homo sapiens
cgaatcggaaccgtcgggccgcagccgccggcaatgccgcgaaggaaggtggatcatccatgccatggagtatgaacttcagatccgtggcggaga

SEQ ID NO: 103843 - DNA, 138 bp, Homo sapiens
ctgggatactgcctgacctcattcgaagctgccattgaatatattcggcaaggaagcctctctgctaaaccccctctaaacctattcgtcccgggcaacatccagcagcttctccaactcacccaagtgcaattcgtg

SEQ ID NO: 103844 - DNA, 83 bp, Homo sapiens
ggagcctggcgggcgtgggaacccaggccccgccgaggcggccaggtcgcgtggggcaggcagtggcgctgcgggccaaggcc

SEQ ID NO: 103845 - DNA, 76 bp, Homo sapiens
ggcagtcgcgaagcagcaaccatggtgctggagaatctggtaaaagcaccattgtgaagcagatgaggatcctgca

SEQ ID NO: 103846 - DNA, 98 bp, Homo sapiens
gatcctccaaagacagatctgagccccaacggtaaactgactgatttcctgagcttctatacgctcccctccacggtgatgcaccaccctgctcacaa

SEQ ID NO: 103847 - DNA, 82 bp, Homo sapiens
acttaactgcaagacctattattgattctgtacttgaaggctacaatgcaaattgatggagaagcatttctacttatgactc

SEQ ID NO: 103848 - DNA, 96 bp, Homo sapiens
tcccaaggtgctgggattacagtccgcttccggacaacaacagggcttgattctgcagtagatcctgtccagatgaaaaatgtcacctttgaacat

SEQ ID NO: 103849 - DNA, 75 bp, Homo sapiens
tgaggacttaaatgaagccactgattagcaatttaaagatcctctccaaggcagccttaagtgccttgaaacaat

SEQ ID NO: 103850 - DNA, 96 bp, Homo sapiens
cgctgccgtgatgtggaggaggaagagctcaggtggagaaggggtgacaatctccaatagacttgtgtcttcaccttgctgcattgtgaccagcac

SEQ ID NO: 103851 - DNA, 90 bp, Homo sapiens
cgaagccccttcccaggtcctcaactttgaagagatcgactacaaggagatcgaggtggaagaggtgattgtgtccaggggggggcgctt

SEQ ID NO: 103852 - DNA, 100 bp, Homo sapiens
ctgggttccacttccagcaacagctcctgcagcagtaccgagtgccccggggaagccattccccaccccccagtgcacagccagagaacaacacatcaca

SEQ ID NO: 103853 - DNA, 75 bp, Homo sapiens
cctcctcctctccttctacctgctggggttgcttgtcagtagcgggcaaggaatatgatgaagaatgggctaaga

SEQ ID NO: 103854 - DNA, 100 bp, Homo sapiens
aggcagagcgggacagccaggaggaagggcagcttggcagagcctcagtgtactaatggtcacttgatgtgcgctggctgttttatccacctactagcag

SEQ ID NO: 103855 - DNA, 90 bp, Homo sapiens
gctaacagcaacacagaaatttagaaagctgctttctaaagactgtgatcaaccactctatgattgtcctatgtgtgggctcatatgtac

SEQ ID NO: 103856 - DNA, 100 bp, Homo sapiens
cggcaggaaggccactcacagggcttcaacaagctagctgaggcaagtgtcaattgaggagggagagaggaaagccaaagagctgaatgttatgtttatt

SEQ ID NO: 103857 - DNA, 98 bp, Homo sapiens
tctccgccactgcgcacattttgcagcctgcaccggccaacggcgagaaccactgtctctgatcaacgtgcggaagaggaacgtggaatctggggaag

SEQ ID NO: 103858 - DNA, 90 bp, Homo sapiens
ctcacggatatcctctgttgggggagaaggatgccaggccaaggtggagcaagcggtggagacagagccggagcccgagctgcgccagca

SEQ ID NO: 103859 - DNA, 98 bp, Homo sapiens
gggaaccgcctgggaactccgccatgtcatccacttcgcccaacctccaggaaagaatttaatgtttctggtgttgcgagatggtacaggttatcttc

SEQ ID NO: 103860 - DNA, 78 bp, Homo sapiens
cctgaggtcctactgcacagcgaaggggctgccagcagcagcgtctgcaagctacgtcaaaagctacctcctcccgga

SEQ ID NO: 103861 - DNA, 96 bp, Homo sapiens
aagcagatgcagaagagaatttggaagatgccatggagtgtttgggaaatgggaagtaatgacagctggcacctgaactaagtacttttataggca

SEQ ID NO: 103862 - DNA, 50 bp, Homo sapiens
gcaccttcccctgccttggaaaggaggtggtccaggccacgctggtggtc

SEQ ID NO: 103863 - DNA, 89 bp, Homo sapiens
ggagatggggaccgccctggacatcaagattaaaagagcgaataaagtttatcacgccgggatgtgtatatctcatgattgatatggag

SEQ ID NO: 103864 - DNA, 100 bp, Homo sapiens
gcggacctgagtcttcaatgaaagagcactgcagtttcctcctgaaggctggctccggctctccctcaataatggcagcatcacccacctggtgatccga

SEQ ID NO: 103865 - DNA, 83 bp, Homo sapiens
gggtctgtcatcatgtcgcgttacgggcggtacggaggagtgcagagcagagcgggcggaggaccccgggcgcgggcgcggac

SEQ ID NO: 103866 - DNA, 75 bp, Homo sapiens
aaagagcttgctccctacgatgagaactggttctacacgcgagctgggctactacaaagttctgggaaagggaaa

SEQ ID NO: 103867 - DNA, 75 bp, Homo sapiens
catcaccgcggagggcttcaccgacattgacctggggtgagaactctgtctcagtcgacgggaagtgcagtgact

SEQ ID NO: 103868 - DNA, 75 bp, Homo sapiens
aagaaggtgccggtggtgcgagtcttcggagcgaccccggcaggacaaaagatccttcatcaccgaagtgacgtt

SEQ ID NO: 103869 - DNA, 80 bp, Homo sapiens
tcttgtcactttagccactgctactacaggccaagtcctgtatctgccatgtctgtggcgtccacctcaacaggctgcat

SEQ ID NO: 103870 - DNA, 82 bp, Homo sapiens
cccactccgagggcgacatgcacggcgtagacagtcaaagaggcagctccggaatgagaaagataagccactgcctccactg

SEQ ID NO: 103871 - DNA, 90 bp, Homo sapiens
gtcgccggccgctcgcagcgttgtggaggggcgggccggacgctgagcggagcagctgcgccacgataaagccaccaatccttccaaccg

SEQ ID NO: 103872 - DNA, 87 bp, Homo sapiens
atattgcatcttcctctggctctacagcggaaccataaatccatggctaaccttgacaaatacactgaaacattcaagatgggtagc

SEQ ID NO: 103873 - DNA, 80 bp, Homo sapiens
cgcccgggcatgcgaagccgtccctccccgggttttaaaatcaaagatgggaaaatcggagaaaattgcccttccccatg

SEQ ID NO: 103874 - DNA, 100 bp, Homo sapiens
caggcttcgatgggctcggtggccggacaaaattcatccagcctatgtatgtccctgggaagctgcatgatgtggaacacgtgctcatcgatgtgggaac

SEQ ID NO: 103875 - DNA, 100 bp, Homo sapiens
gagttgcgtcgccttagtcctcctggctgccgccgtcagctgtgccgtcgcgcagcacgcgccgccgggattcttcagcaagcgcctgaaaggctccatc

SEQ ID NO: 103876 - DNA, 99 bp, Homo sapiens
ctgcagtcgttgctgtaatcaagaaatccctggaaaatttatgggctatacagcaaatgaagaaacacccctgccgccagtgtgacaagtctttcagct

SEQ ID NO: 103877 - DNA, 100 bp, Homo sapiens
cgaggcctacagaacctagcctatcagctggggctggatgagtactatatcatcatgtacatagaaaaatccaaaggattctgcaaaaaagctactagaa

SEQ ID NO: 103878 - DNA, 88 bp, Homo sapiens
aaaaagccatgtagaatgcctgccttttgaagaccacttttaaggtgtctagtaagacagcagtcttgctctgtcgcccaggctggag

SEQ ID NO: 103879 - DNA, 75 bp, Homo sapiens
tgatagagcagagtggaccaccccatgaacctcggtgaagattttactgaagtacatcagaattggaatgctcat

SEQ ID NO: 103880 - DNA, 75 bp, Homo sapiens
cgtgtcaggcggagagacccgccgccagacaagcttaccattgttcagaagcaaacagtttgcagtaaaaagaag

SEQ ID NO: 103881 - DNA, 75 bp, Homo sapiens
aagagctatcaggggaagatatgcatcagttccatcgagccattactacaggttgacctgacagttcaagaaaag

SEQ ID NO: 103882 - DNA, 98 bp, Homo sapiens
ccctgtgcccctgaagaagcgcggatacgatgtcaccaggaaccctcatctcaacaaggccacagaaacactattcagaatgggtgtagcaagaggaa

SEQ ID NO: 103883 - DNA, 90 bp, Homo sapiens
gccaaatatgaatttttatttggcagatctgaagggaaagctccagatactatcctcctgcatatgcccaagaggattgggagtggaatg

SEQ ID NO: 103884 - DNA, 90 bp, Homo sapiens
gcatggccccgcaggtcttcacccaggccctggagtgcatgcgcaggtccccttcccctgagcccatctacaatagcgaggggaagcggc

SEQ ID NO: 103885 - DNA, 117 bp, Homo sapiens
gggtgccctggctaccatggaccatcctgctggtcagcactgcggctggtgacaaaacacgacagccttcttcaagcccctccagtattatccgacgcacttcctccctggatactc

SEQ ID NO: 103886 - DNA, 97 bp, Homo sapiens
gcctccctcccgcgcgtgctgcgggtctgctcgggggtctacttcgagggtctcctctgagcctccggcctccataagacccaaaacagatgacacc

SEQ ID NO: 103887 - DNA, 74 bp, Homo sapiens
ccggtgcaagaggcgcaaacaagccaatcccaggaggaaaaacgatgagagtccggagtgttgtcatgtgaagc

SEQ ID NO: 103888 - DNA, 105 bp, Homo sapiens
tgttccgagcggcggctccggggcagctccggcgggcggagcatctttccttgaagaagtacattattgacattgtggttgaaagtacagctccagcagaagctt

SEQ ID NO: 103889 - DNA, 110 bp, Homo sapiens
tgagagttggaggcttctcagcgtggccgagaggagttactacttggagaaagccaaactagagaaggaaggtttggatcctgttgttagcgacatgagtacagggtctg

SEQ ID NO: 103890 - DNA, 50 bp, Homo sapiens
agcaggcgctcaccatgttccctggaggtcacgagaagagaatgccttct

SEQ ID NO: 103891 - DNA, 90 bp, Homo sapiens
cttccagtcacaaaaatgcagcccagctcactctgaggaagaagcaggacttggggatgccaatgtccagattgctagtatctcagagga

SEQ ID NO: 103892 - DNA, 75 bp, Homo sapiens
agctgagcctttctggacagaccaacctgtcagtgctgcaagacgactgggtttggattcagaagaggattatta

SEQ ID NO: 103893 - DNA, 100 bp, Homo sapiens
gtcttgaaacacaaatggtttttggatattccccgagtccctccggtggctaatggccacccagcagtttgagtctgcaaagaggctgatcctccacttc

SEQ ID NO: 103894 - DNA, 86 bp, Homo sapiens
gtgacattggctgacatcacagttgtctgcaccctgttgtggctctataagcagatgcttgctctgtcaaggcacagcctattgtc

SEQ ID NO: 103895 - DNA, 50 bp, Homo sapiens
gcgagtcttcggagcgaccccggcagatcggggagttactaagcaccacc

SEQ ID NO: 103896 - DNA, 80 bp, Homo sapiens
agagcttgctccctacgatgagaactggttctacacgcgagctggtttccttgttgcagaatgaaagtgtagaaaaaaac

SEQ ID NO: 103897 - DNA, 82 bp, Homo sapiens
cagggtggacctcaggagcctcctaaaaccacagtttgcagatggcgtgtacctggttctgctcatgggccttctggaagac

SEQ ID NO: 103898 - DNA, 100 bp, Homo sapiens
ttcccctctggcgcctttgctgctcctctctctgcacggcactgttggataagaagaataaagttcttgaagtaaagaaaccccctcgcttccttcaaag

SEQ ID NO: 103899 - DNA, 83 bp, Homo sapiens
cagcgcggagttaccccagacccctcagcgtctggcatctgagtgggaactggtggtgctggggaagttgaagtggaacctgg

SEQ ID NO: 103900 - DNA, 100 bp, Homo sapiens
agagatcggggtccaaaatcatgataaggtgcggcggcagcacatggagcgttgtaccagcttcctggtggatgagctgggcgtggtggatcgatcccag

SEQ ID NO: 103901 - DNA, 90 bp, Homo sapiens
gttctttgtcatgtgctcggcctttgctgcaggccccttcacagatgtagtcactacaaatcttaaattgcgaaatccatcggatagaaa

SEQ ID NO: 103902 - DNA, 51 bp, Homo sapiens
ccggagctgcctggaggcggccgcactcggccaaagacagcagcattccca

SEQ ID NO: 103903 - DNA, 83 bp, Homo sapiens
gccgagcgcgagcagttcgacaagacccaggtgtccctggccagtgtccttccacctgtccacaagcatggggaacatcttcg

SEQ ID NO: 103904 - DNA, 50 bp, Homo sapiens
cgcagaaatgttggatttgaactgctgcagcagtgccgcctggtggagcg

SEQ ID NO: 103905 - DNA, 75 bp, Homo sapiens
acttggagtctttgtccaggacggcaaggtgcccggcgacgactgcccgctggtgtggggccagtgctcccactg

SEQ ID NO: 103906 - DNA, 74 bp, Homo sapiens
tgaaatcctgtcctgaagactgtaagctgagatctgtatctgtggacctgaatgttgatccctcgcttcagatt

SEQ ID NO: 103907 - DNA, 73 bp, Homo sapiens
gttccacatgtatgaagggtacccactctggaaggtagtggtagcagagaattttgatgaaatagtgaataat

SEQ ID NO: 103908 - DNA, 75 bp, Homo sapiens
ctatagaaatggctgaaggaaaacctccttatgctgatatacatccaatgaggggcaccgttgagctgttgcaac

SEQ ID NO: 103909 - DNA, 50 bp, Homo sapiens
cacctgagaaccatgctcaccgaccctgcctatgaaaggaggttccctac

SEQ ID NO: 103910 - DNA, 100 bp, Homo sapiens
ttatactgtaaagttccttgctgtgctattgctctgcaatatttactttaccctgttaatgaacaggacaaaatggttaaaaaagagataagcgtgcgtc

SEQ ID NO: 103911 - DNA, 75 bp, Homo sapiens
tccctaccccctccctgaggaaattaggaacctgttggcaggtggccacgtcttttattagaacaatagagcttg

SEQ ID NO: 103912 - DNA, 75 bp, Homo sapiens
tgctggccaagaagatcatcattaaggacggaggcacgcaaggacacccaggcccattattttcctccagcctcc

SEQ ID NO: 103913 - DNA, 83 bp, Homo sapiens
ggagcccatcagaatggcagatggcttatgaaccacaggtacatcaggaacgtctctatcaagaatacaatttcagcaaggct

SEQ ID NO: 103914 - DNA, 100 bp, Homo sapiens
ggaattgaagactcggaggctgtgtacacttaaagcgttctgggaatatgaatcccttctgcaccctggaatcaccagtccagccatgcatggagctggg

SEQ ID NO: 103915 - DNA, 100 bp, Homo sapiens
cagagatggacggtcactcagcctatggagctgggtggcgatgagaaggttctggagagctgcttgagcctaggtggccaccgagcccctgtggtcaccg

SEQ ID NO: 103916 - DNA, 90 bp, Homo sapiens
gtaagttgatccatccagatgaggatatatccctggtgcttttgaagatgatgatatcacgcacgttgaaggaagtgtagatcctattcg

SEQ ID NO: 103917 - DNA, 100 bp, Homo sapiens
taggcttcgttgggcctttgaaaagccaggctttgattctgataactcttctggggaattttcagaggcaaatcagaaagtcacgggaatgattgactta

SEQ ID NO: 103918 - DNA, 82 bp, Homo sapiens
ggccgtggttgtggggaccataactgatgatgtgcgggttcaggaggtacccaaactgaagcctggtccgacccccagtggc

SEQ ID NO: 103919 - DNA, 82 bp, Homo sapiens
gccgctgagcagtggagccagccccagcgcgatcacagattctgctggccatattctctactccaaagaggatgcaaccaag

SEQ ID NO: 103920 - DNA, 100 bp, Homo sapiens
cacagattctcatgtatccagttctacctcagttcgattttatccacatgatgtgtcagatggttggaatcgagtacatccttttgcatgctcaagagcc

SEQ ID NO: 103921 - DNA, 100 bp, Homo sapiens
gggagcttctcagccattttccacagatcagccttttgtcatacatgatatggagacactgtgtatggctgagaagacgctggtggccaagctggtggcc

SEQ ID NO: 103922 - DNA, 82 bp, Homo sapiens
gtgcaagtcgatcgaggtcaagaacacgatcacgttctagatcacatactccaagaagacaatggagtgaaggtacctgagc

SEQ ID NO: 103923 - DNA, 100 bp, Homo sapiens
ttacctgcaggtattgggagatccacagctaagacgccaggacccactggaagcctagaaatggatccggaaagtatggcagaggaggaagtgttcagtc

SEQ ID NO: 103924 - DNA, 51 bp, Homo sapiens
catccagcactttgctgataagggtcatgtggttatgggtaacaatgcagt

SEQ ID NO: 103925 - DNA, 88 bp, Homo sapiens
aggatgacatatttttggacctgaaacagaaattctggaacacctatatgctccagaacctgggtatcaacccagcaaacattggctt

SEQ ID NO: 103926 - DNA, 100 bp, Homo sapiens
ctcagatctccagcggaggttgaggggatcgtcagtagagatgctgcagcggacaaggcaaaatctcagcaagttcggacctctagtacaataaggcgaa

SEQ ID NO: 103927 - DNA, 100 bp, Homo sapiens
gagccatggggaatatgaggaagacctactggagcagtcgcagtgagtttaaaaatgatgaatcaccaacaccagcagcagatggcccccagtaccctga

SEQ ID NO: 103928 - DNA, 147 bp, Homo sapiens
agggcgcacaacgtgcctttgaagctgccgatgccagagccaggtgaactggaggagcgatttgccatcgtgctgctgctgtggtctgtgtgacacttctcgacagactcgactgtgatcagatcaacttgcctcatgatgtcctgg

SEQ ID NO: 103929 - DNA, 90 bp, Homo sapiens
aagtgggcgagagacattttaatctggaagagtcttgtgatttgggagacagatgagtgtgggtcagagagccaaactgactatatctcc

SEQ ID NO: 103930 - DNA, 100 bp, Homo sapiens
gatgcagacattggaaggaaaagttcactggagcaagctaacaatgctaagagaggcctctgatgaaattgtggctgaaaaagaggctgaagttaaattg

SEQ ID NO: 103931 - DNA, 71 bp, Homo sapiens
cccgtcgaggtgcgcggctccaacggggccttctacaaggtccatctggttggtattgacatctttactgg

SEQ ID NO: 103932 - DNA, 100 bp, Homo sapiens
aattctttcaggagtttacccaagaaccattggtggagatagaagttccaatgacaggatttacacagagagcaactattgatccagaactgaatgaaat

SEQ ID NO: 103933 - DNA, 82 bp, Homo sapiens
ggaggagtacgcgcgagagccttgacagtactactggtatgacgagcgggggaagaaggtcaagtgcacggccccacagtac

SEQ ID NO: 103934 - DNA, 73 bp, Homo sapiens
tccggagtaacttggccaggctggccccgagcggaactggagaaagctgaggcatgcagccagtaaagatccc

SEQ ID NO: 103935 - DNA, 80 bp, Homo sapiens
cctgcggcagaagccgagttcaacatcctcctggccaccgactcctacaagcccagggccttgctgccgccatgactgag

SEQ ID NO: 103936 - DNA, 101 bp, Homo sapiens
ttcatcaaaaatagtgatagctttgataaagttttccgtctgatgaaggttggccatttgcaaagtatcttggagcttgtggaagaatggtggctgtaaat

SEQ ID NO: 103937 - DNA, 97 bp, Homo sapiens
atgggagacgacagaccgtttgtgtgcaatgccccgggctgtggacagattctccgggcccaaagccgaagtgcaagtggaaggaagatctctgaaa

SEQ ID NO: 103938 - DNA, 87 bp, Homo sapiens
tgccggctcccctctcaggacaacccagatgtgcaacaaagtgcgatgacccaacatgagtgaagtttcctgcaagaaacgggacga

SEQ ID NO: 103939 - DNA, 83 bp, Homo sapiens
cagctcatcatgatggacttggagctgccgccgccgggactcccgtcccagcagaaagaagatgctgatatgctacaacacgg

SEQ ID NO: 103940 - DNA, 99 bp, Homo sapiens
catctttgtcagtgcacaaaatggcgccctacagcctactggtgactcggctgcagcatatgggtgattttggaagcattcatagacccggaattgttg

SEQ ID NO: 103941 - DNA, 49 bp, Homo sapiens
cgacaacagcctaagagtttgaagtagcacttgtaccatgggcttagtt

SEQ ID NO: 103942 - DNA, 75 bp, Homo sapiens
catcgacatcaagtcggccggggatttagacggggcgggcaccatgaacaagttacggcagagcctgcggcggag

SEQ ID NO: 103943 - DNA, 87 bp, Homo sapiens
aattgaccctcaaaacatgttcgagttctgggattgtggggtgatcagccccagatttgacgtgcaactcaaagacctggaaaaatg

SEQ ID NO: 103944 - DNA, 97 bp, Homo sapiens
tcactttagaccctccacctaattgcaggcctgatggaattgggactgtttcagtggaagaaaaagaaagatttgaggagataaaagagagactctc

SEQ ID NO: 103945 - DNA, 100 bp, Homo sapiens
aactgtcgaagtatacgagtaggaacactcttccggctgttaatagagcctgtaattccacgaggaggggtggaagaaggccctacagtattgagaaagg

SEQ ID NO: 103946 - DNA, 80 bp, Homo sapiens
acagaagaaactctacagagatgtgatgcaggaaacattcaagaacctggcatctatagagatctaccgcatcgtgtcac

SEQ ID NO: 103947 - DNA, 96 bp, Homo sapiens
cagaggcccaccttcaagcagctggtggaggacctggaccgtgtccttaccgtgacgtccaccgacttggtgttggtattaggagatctgcacatc

SEQ ID NO: 103948 - DNA, 101 bp, Homo sapiens
gcgtctgcggctctccgccgtccccagccctgcctctccctgggctctgccacaagtatatggttatgatgacttgcagatgcttcagacaagatttccat

SEQ ID NO: 103949 - DNA, 100 bp, Homo sapiens
gacaaagggagagggtgaccgacatcccaactaggagcgagaacccgagcagcgccatgagcaacactaccgtcgtccccagcactgcaggtccgggccc

SEQ ID NO: 103950 - DNA, 75 bp, Homo sapiens
cctgtgtctgcataccctgatgttcggtgcccagcttagagaaggagaaggtgtgcaacttgctttggtgtttgc

SEQ ID NO: 103951 - DNA, 82 bp, Homo sapiens
gtgaaggcgaacgcggtctgcaagctgacgtatgtgagaagccctaccactgcaactgggacggctgcggctggaagtttgc

SEQ ID NO: 103952 - DNA, 50 bp, Homo sapiens
taagcaccgttggtatcctcatggacgattcaagtcaatctgaaagtccc

SEQ ID NO: 103953 - DNA, 100 bp, Homo sapiens
tttcaggtcaccactggatatcagttgcctgtatataattatcagaaaggagatgtaagattcttgatttgcacagatgtagctgctagaggaattgata

SEQ ID NO: 103954 - DNA, 90 bp, Homo sapiens
atatgatggcacatacataactttggagagcaaagacatcagtcggaattgagatgggcgattggcaggaagtctgggatgagaacacgg

SEQ ID NO: 103955 - DNA, 90 bp, Homo sapiens
ggaagccacgtgcagacatctacaaccttcgatctcctgacgaccaaggccacctttgatgccatttctaagacctacagctacctgacc

SEQ ID NO: 103956 - DNA, 75 bp, Homo sapiens
aagccaccgcggctccaggagtcctgtgactcaggaagctcttcgtgggcggtcttgactggagcacgacccaag

SEQ ID NO: 103957 - DNA, 90 bp, Homo sapiens
ctcaaccctcaggaagctcagcggtgggcagtcctagtccgaggtgccaccgtggaaggacagaatggtagtttcttcaaacctgtatac

SEQ ID NO: 103958 - DNA, 100 bp, Homo sapiens
gctccacctcccatgtcggcacagttcttctcaccactaaatccaatacgagttcatattgatattggagctgatggcagagccacaggagaagcagatg

SEQ ID NO: 103959 - DNA, 75 bp, Homo sapiens
agcaaggagaatcatgctttaggtgatttgatgaaggctgctgcaggagagttcgcagatgatccctgctcttct

SEQ ID NO: 103960 - DNA, 100 bp, Homo sapiens
ggcagatttctgtgaccaacagctgcgcaaggaggaagagaatgcatcagttttgcaggctttggaggtactcccagtagcaccaccacctgagccaaga

SEQ ID NO: 103961 - DNA, 75 bp, Homo sapiens
aagattccaagttcaggagaactcgaccgtccgtggtggatgactggattgaatcatataaacaagacagggaca

SEQ ID NO: 103962 - DNA, 90 bp, Homo sapiens
attaaggaacagcgagctgtttgacccctttgacctcttcgatgtgcgagactttggaaaggcatgttatttgaaagcaattgagacgca

SEQ ID NO: 103963 - DNA, 80 bp, Homo sapiens
tcgaagaagaaagagaagaaacgttttctcagaccctcaaactgacacaagacctacagagaaaaccctttgccaaatct

SEQ ID NO: 103964 - DNA, 88 bp, Homo sapiens
cggaggctgaggagaaggaggagcgggccgtggaggcttcgccgcctagtaacagagtatgcaagaggaggagacctgcacaactgga

SEQ ID NO: 103965 - DNA, 73 bp, Homo sapiens
tggaaaggcccagatgatatcctactaggcatgttttatgacacagatgcctccttttagaggactcagaaga

SEQ ID NO: 103966 - DNA, 100 bp, Homo sapiens
gaaaatttcaaagtaaaggatattattagaattctgccatgcaaggcttcctgaggctgcggtggtcacgcttcgcccgtgtcctcctcacccgctcctg

SEQ ID NO: 103967 - DNA, 75 bp, Homo sapiens
gctgggcaccttcatctggaataagcgcctggccggagcaaccctcctcatctttgctaataagcaggacctgcc

SEQ ID NO: 103968 - DNA, 74 bp, Homo sapiens
gtgagaagcccttcgcctgcacctggccaggctgcggctggaggccaccagcttgggctccccacggagggcag

SEQ ID NO: 103969 - DNA, 90 bp, Homo sapiens
agagatccggaagcacagccccgaggtgtgcgaagccaccaacaacttgagttggtggaaccaagtggctggattcatgttcccttaact

SEQ ID NO: 103970 - DNA, 75 bp, Homo sapiens
aagtctataagctttgcaacagaattacagagtatgatccctactgccaataaagggaaaataagagatgctcat

SEQ ID NO: 103971 - DNA, 96 bp, Homo sapiens
aaggaaggcctttcggctgccagacaacagaatagggaggaaattttccatcatgaatcaggttggaagcgaagtggaagcactgaacctccaggt

SEQ ID NO: 103972 - DNA, 87 bp, Homo sapiens
ggcaagcaccaaccccataaagtgacacagtacaagaagggcaaggattctctgtacgcccaggttagtgattggcaactttggcct

SEQ ID NO: 103973 - DNA, 75 bp, Homo sapiens
tgacaccagcgcagctctcttgatttcacacattgtgcaatgctgcctctaagaatcaaacttcactcttgggag

SEQ ID NO: 103974 - DNA, 75 bp, Homo sapiens
actgactttcagctatggaatcgaccgtgcagtccctcggcttcgccatctaccgcgcgctggactgggggctgg

SEQ ID NO: 103975 - DNA, 100 bp, Homo sapiens
gacgcgcacagtccctccacgcggaaagaagtaccttcgccggtcaccggctcctgcaggaaactgccaagttttggaccttatctggaacagcgcaaga

SEQ ID NO: 103976 - DNA, 88 bp, Homo sapiens
gtccagcttcccttcctcaaataaggaaattgacacctggcgtgctgcaagctttcttcctggtggcagatgacatcatggattcatc

SEQ ID NO: 103977 - DNA, 90 bp, Homo sapiens
gccacgtctggaaggcggtgaccaagacgctgcgggagcccggcgccggagcccaaggaaacttggatttaactggccagaagcaggtat

SEQ ID NO: 103978 - DNA, 100 bp, Homo sapiens
cccaacttatattgtgaactgccttctcttcatcccaacattcctgatgttgctgtgtctcagtttacagatgttaagctgactccactggaacccattc

SEQ ID NO: 103979 - DNA, 101 bp, Homo sapiens
cgagactctccttgcttggaattctgcccactctgcggagttagcagtcacgacctccagcacaggttatgaagacagtatggagtttccagaccatagta

SEQ ID NO: 103980 - DNA, 78 bp, Homo sapiens
gaggctgcggtgtctgctgctattctccgagcttcgcaatgattctctttgtggccagatgggtttgtatggacaggc

SEQ ID NO: 103981 - DNA, 97 bp, Homo sapiens
atctttgatgactttgcacattatgaaaagcgtcaagaagaggaggaagccatgcgtagggtggatgcccggagcataccagtgttagcaaaatggc

SEQ ID NO: 103982 - DNA, 111 bp, Homo sapiens
ctctttgcaacatttcaggaaaacagagaaagaagtgataggagggctctgtaggcccagctgagagccagcctggaggttacccagcagcaggccacccaggccgaaggc

SEQ ID NO: 103983 - DNA, 50 bp, Homo sapiens
gaactctttccagcttgtgtctgatcatccagcccctcttagaacttgac

SEQ ID NO: 103984 - DNA, 75 bp, Homo sapiens
gtgaaagagaagggaatgctaagaactgctgggaggatgacaaggaagaatacaagcgattgagtgaagcactag

SEQ ID NO: 103985 - DNA, 75 bp, Homo sapiens
ggccatgactgatctcattttgctgatgggttgacatcatggacatatgtgagtccatcctggagaggaagcggc

SEQ ID NO: 103986 - DNA, 86 bp, Homo sapiens
tgctccactccggtctacccgtggatgcagcggatgaattcgtgcaacagacctgaacccgcggcgggacatctcctcctggctgg

SEQ ID NO: 103987 - DNA, 97 bp, Homo sapiens
gaaactatgcagtcgaactcgtgaatgacagtctgtatgattggaatgtcaaactcctcaacactgctccgtgtggagatggcgccctctttgacaa

SEQ ID NO: 103988 - DNA, 100 bp, Homo sapiens
aggtgttcggtccttccgaggaagctaaggccgcgttggggtgagaccctcacttcatccggatgagtagtatgtcagcactctttcagctatctatgtg

SEQ ID NO: 103989 - DNA, 75 bp, Homo sapiens
taccaatcgtgaaaactatattcacagtttagaagaagaatgtgaatcctctctttgcacatctgcgttaagagc

SEQ ID NO: 103990 - DNA, 100 bp, Homo sapiens
actgggagaattggtacataatggttgcattaaagcattaaaggatagttcttcaggaacagaacgaacagatgaaaggttgtatcaaagttcttaagga

SEQ ID NO: 103991 - DNA, 83 bp, Homo sapiens
ggtcttcagcggggcgctccaggaggcactcacagcatcaagatggtgctcatgtggaccagtggtgacgccttcaagacggc

SEQ ID NO: 103992 - DNA, 95 bp, Homo sapiens
tgcggttggggcgggaagagccggggccgtggctgacatggagcagctcaccatggatgatgatatcgccgcgctcgtcgtcgacaacggctccg

SEQ ID NO: 103993 - DNA, 50 bp, Homo sapiens
ctggtttggaagttgcaatcaaaatgttggtggctaaaggagttaagagt

SEQ ID NO: 103994 - DNA, 82 bp, Homo sapiens
ggaacccacaggagtcgctggatagactgcacaaggtgaagactgtctgcagcaaggtttggtgcacctcgatttggaggaa

SEQ ID NO: 103995 - DNA, 82 bp, Homo sapiens
ccggctggtgcgcgagacgccgccgagaggagcatcagatccatgctgctgctgactcggagccccacagcttggcacaggc

SEQ ID NO: 103996 - DNA, 75 bp, Homo sapiens
gaaaatgcgctcgggctggaccagcaggcgaacagctgcttggagaactacaagtgaagaaaagaaagcattaga

SEQ ID NO: 103997 - DNA, 96 bp, Homo sapiens
ggatgaacctgggcggatgtcagaccagagaagagcacagaatgtaccagagagaaatgactgctgtccatgcaggcaacataaacttcaagtggg

SEQ ID NO: 103998 - DNA, 51 bp, Homo sapiens
gaacagaaacaaccccagtttcatcatgctttaccgatttgttacaactca

SEQ ID NO: 103999 - DNA, 98 bp, Homo sapiens
acagaagaagccctttgaggagcactggaggaagcacaccctgtcctatgtggacgttggcactgggaaggagtcagaaataccatcagaggaggggt

SEQ ID NO: 104000 - DNA, 51 bp, Homo sapiens
cctgggtcctttccccaatcttacagaaaagcacttggttctgcttcgaga

SEQ ID NO: 104001 - DNA, 97 bp, Homo sapiens
tcctttttcgtttttcggatgatgccttcaatactacctttatttccaccataggtgtcatggagaaactccagctgggcccagagattctgcagcg

SEQ ID NO: 104002 - DNA, 82 bp, Homo sapiens
ggacttcccgtccgcggcgtggagggtggtgttcccactgatgaagagcaggcgactgggttggagagggagatcatgctgg

SEQ ID NO: 104003 - DNA, 100 bp, Homo sapiens
aaagagaacctccatcaccccagggtcgatccagcaattctaggcatgtgagcagcagtgacagagtgggcaagccttaccgtggcgtaaagcctgtttt

SEQ ID NO: 104004 - DNA, 83 bp, Homo sapiens
ctcgactttggagaaaccaccgtgctggaccgcttttacaatgcagggagcacagaggagggaaagaccttgtctgttctgtt

SEQ ID NO: 104005 - DNA, 75 bp, Homo sapiens
ctgccaccaaagatcggaactccaacaagaccctgccctctaccacctgacagccctcagcgcctttttccagga

SEQ ID NO: 104006 - DNA, 82 bp, Homo sapiens
tgaagatggcggcagccgaggccgcgaactgcatcatggaggagcaggccgggctctcgccatgggtcactgtcgcctctgc

SEQ ID NO: 104007 - DNA, 90 bp, Homo sapiens
tcgctgtcctgccctacgagctgcggttcaaggagcccttaccggaatacgtgcggctggccgactccctggaccctgagaagctattgc

SEQ ID NO: 104008 - DNA, 50 bp, Homo sapiens
ccaccgtcaaggtcgtcatacaggactttaaagaatactgtcagaagttc

SEQ ID NO: 104009 - DNA, 100 bp, Homo sapiens
ccgcaacccggtgttcccgcgctttatcaagattatcgagattggctctaccagtgcacctggacagggaggaatcctggctcagcgggagtttgacagg

SEQ ID NO: 104010 - DNA, 90 bp, Homo sapiens
gagaacacagccacgcttacgtgtgcaaagatccaccttacaaagtagaagaatctgggtatgctggtttcattttgccaattgaagttt

SEQ ID NO: 104011 - DNA, 75 bp, Homo sapiens
agagaaaaggcaacatcctgtcacaggccatgctctggcaaaaacgtgtccctggccagtgtccttccacctgtc

SEQ ID NO: 104012 - DNA, 83 bp, Homo sapiens
caaatatgaactatgataagctgagcagagccctgcgatactattatgacaagctcattgctatggacagtgctatcaccctg

SEQ ID NO: 104013 - DNA, 88 bp, Homo sapiens
ccaccaactagtcccgttgcaggtgaaatgcaaagactgtgaggagagcttaatagaagaaggaggagactgggacaggagaaaccgc

SEQ ID NO: 104014 - DNA, 76 bp, Homo sapiens
acttggtattccaggtacaaggaagttgggatgaatgggttccggagagcagagtactcaaatacgtggacaccaa

SEQ ID NO: 104015 - DNA, 50 bp, Homo sapiens
ttaaatttctttacatcatcaccaagagttttactacccttggatgctgc

SEQ ID NO: 104016 - DNA, 75 bp, Homo sapiens
ggaggcctgactctgggagcacgcaattcctggtcgggtggcttccagtggtcttcagtctgtcgtgcaccgatg

SEQ ID NO: 104017 - DNA, 100 bp, Homo sapiens
aaatctctgcactcccggccgggtggtgggcgcatatcctgggtagcctctaggaagcgctagacacatgagcgagaacccgagcagcgccatgagcaac

SEQ ID NO: 104018 - DNA, 82 bp, Homo sapiens
gccgaagaagcatcgttaaagtctctcttcaccctgccgtcatgtctaagtcagagcctgctcaatgtgaagagacaaggat

SEQ ID NO: 104019 - DNA, 74 bp, Homo sapiens
agccatgtcatcttatctacgaaatgattcagaattcaaagaagctttttcactatttgacaaagatggtgatg

SEQ ID NO: 104020 - DNA, 123 bp, Homo sapiens
tctctcttggctcctgtcccgctggccctctgtctgcctgtgtccctgaccatggctccctgcagtaccctttaacgcggaagatccatccaaaagctatgtgaaattacgagactttgtgct

SEQ ID NO: 104021 - DNA, 120 bp, Homo sapiens
aacgacttactggggagagaaagaaaaggaacgggagctgagaggccatcgaagacggcaatttggaggaaatggaagaggaagtacggcttaagaagcgaaaaagacgaagaaatgtgg

SEQ ID NO: 104022 - DNA, 75 bp, Homo sapiens
aggcaatgctggatagataccgaattcttatcacaaagggtagggctctacttcactgggcctgtgatcgaggac

SEQ ID NO: 104023 - DNA, 100 bp, Homo sapiens
caactgcctatgcaacgctgggcatgaggagcggagcggagaatgccaaggtcgtccttggtggaaggaaccatgaactggcatctccccctcttcctct

SEQ ID NO: 104024 - DNA, 76 bp, Homo sapiens
gacggcgcgggaactctacgccaacgtggtgctgggttgaagactgggatagtttccaagctattttggatcatac

SEQ ID NO: 104025 - DNA, 50 bp, Homo sapiens
gctggacgccaacacggcggcgcagaggtatgttatgcataaaagtggat

SEQ ID NO: 104026 - DNA, 87 bp, Homo sapiens
cgtccaacatggaccgggagatgatcctggcggattttcaggtgttggggatgtcctttgcactgaccctgaactgccagattgaca

SEQ ID NO: 104027 - DNA, 100 bp, Homo sapiens
ccagagaattatgatcaacttcaaccctcacttcgatttggaggacagagactgcaacattagtgccagcagtagttcccaagggctgtctcagccatcc

SEQ ID NO: 104028 - DNA, 100 bp, Homo sapiens
cctttgactatgagatgatcttcaggggaacaggagcattgatatacgtcattgacgcacaggaacaaaatgtcagtggcaggtgggagttcaagtgcca

SEQ ID NO: 104029 - DNA, 83 bp, Homo sapiens
gttcttcagcatcaagcctacaggaacatagaaagtttaatggatcgagaagtggcgttgcttgctgaaatggacaaagtgaa

SEQ ID NO: 104030 - DNA, 90 bp, Homo sapiens
ggcggcggcggcagcggggtccgggtccggagcgccacagggacatcacccagaagggctatgaaaagaaaaggtccaaactcctatctc

SEQ ID NO: 104031 - DNA, 89 bp, Homo sapiens
cggtgaagaagtcgaaaatggagcacgtccaggctgaccacgagcttttcctccaggcctttgagagtcaaatgaagcgcaacagaggg

SEQ ID NO: 104032 - DNA, 100 bp, Homo sapiens
cgtggaggaggtcggctcagccgggcagtttgaggagctgctgcgcctcaaagccaacttccagggaaaaagacaactaaactttgggttccagatgaag

SEQ ID NO: 104033 - DNA, 100 bp, Homo sapiens
atctaccccatctttgtcacgtctggaggccaggaaaatgtcaatggaaagcagctagcatgaagaccccacagtgttcctccctctagtagtctggtat

SEQ ID NO: 104034 - DNA, 78 bp, Homo sapiens
gctcccccagactctgttggatcagaaggtcaagatcctgaaggacacgcaggtgactcgacaggccttaaatgagat

SEQ ID NO: 104035 - DNA, 100 bp, Homo sapiens
cgggtgcacccagtttccaccatgattaaggctgttgagctaatggaccgaactgaaatgccatgccaggcattagtgaggatgctagccaagaaacctg

SEQ ID NO: 104036 - DNA, 75 bp, Homo sapiens
ccctaggtatccgcactgctcagggccagtaatgttaaagtagagactcagagtgatgaagagaatgggcgtgcc

SEQ ID NO: 104037 - DNA, 96 bp, Homo sapiens
gacctgctaacaggagagacaaaggatgacctcattctgaaagtatacattgccggtggtggtgtgcacattgagccccggtatagacagttcccc

SEQ ID NO: 104038 - DNA, 83 bp, Homo sapiens
ccaactgcgggacaggaagtggccgtagcggcttgttggataaggcgactgataacgttcaatgaagcggacgaaagtgtgaa

SEQ ID NO: 104039 - DNA, 75 bp, Homo sapiens
tttagttgacatagaagaggcacaaaggagttacatcttaacacagggttttttatcagcaattggacacccttt

SEQ ID NO: 104040 - DNA, 75 bp, Homo sapiens
ccaaccttcccgccagactacggcttccccgaacgcaaggagcgcgatctttgtggagttcacctctgtgtttga

SEQ ID NO: 104041 - DNA, 75 bp, Homo sapiens
ggagcgctacgggaaaacactttccttctcaagtttgctcccgggcagagaagaaagcagagcccccacctagca

SEQ ID NO: 104042 - DNA, 100 bp, Homo sapiens
aatcaggaatagattctcttgaccatgtgacatctgatgctgtggaacttgcaaatcgaaggtaaaccaggtatttatgaagacagagaccccctgcgag

SEQ ID NO: 104043 - DNA, 100 bp, Homo sapiens
cctaggagtgctgagcccgcggaaccgcagccatggtttggtgcacctcgatttggaggaagtagggcagggcccttatctggaaagaagtttggaaacc

SEQ ID NO: 104044 - DNA, 75 bp, Homo sapiens
actcagaatgagctcaccagggagctgaaactcaagatggggtgcatgaagtccaagttcctccaggtcggaggc

SEQ ID NO: 104045 - DNA, 100 bp, Homo sapiens
cgggagctctgaccgaggcgcctcgctggggcggggaccttgccttgcccgggaaatgggacgtcggtcatcagatactgaagaagaaagcagaagcaag

SEQ ID NO: 104046 - DNA, 80 bp, Homo sapiens
ccactcggagatgggccgctacaaggagatgctgaagcaagatggaattggggaggaggtgctcaagatgtccacggagg

SEQ ID NO: 104047 - DNA, 101 bp, Homo sapiens
cgggggacgtcgggctgggcctggccagtcccccagagcttgggagatggcctgatatgaaggagtcacgcctcccgcctcccggagctgcccagtggctg

SEQ ID NO: 104048 - DNA, 100 bp, Homo sapiens
gtttcgtgtggtacatggataatccacagatgagatctcactctgatgcccaggctgaagtgcagtggtgcagtcatagctcactgcagcctcgaactcc

SEQ ID NO: 104049 - DNA, 100 bp, Homo sapiens
attatttatccaacagctcctcccagtatattcggtgctcttcgaactggtgcttatatggtgtacattttgatgaccaaaggcctgaagcagtcagttt

SEQ ID NO: 104050 - DNA, 101 bp, Homo sapiens
caaccagtctattgttgtcagtggagagagtggtgctggaaagtgagcgtcaccctggacccacagtcggccagtgggtacctgcagctgtcagaggactg

SEQ ID NO: 104051 - DNA, 100 bp, Homo sapiens
agacccagtgaacaaatccgggggcaaggccaaaaagaaggcgtcctgcctctgcggctctgccccctgcatcctgtgcagctgctgccccgccagccgc

SEQ ID NO: 104052 - DNA, 100 bp, Homo sapiens
cggggagctgcaggaaccagactgggggcgagctgagcacctgtagtcaatcacacgcaggttctggctccttggcagcaatggctgtatttgaagataa

SEQ ID NO: 104053 - DNA, 100 bp, Homo sapiens
gggtgaagtggcaggaggaggaggaggggctccggctggtctgtggtgagttttgctgctgcagcccattgagagtgacgacatggagcacaagaccctg

SEQ ID NO: 104054 - DNA, 86 bp, Homo sapiens
tgaaatctcttttaggggattctgcaccaacactgcacttaaataagggcacacctagtcaggacacagcattgttggttttgcca

SEQ ID NO: 104055 - DNA, 83 bp, Homo sapiens
ccgtcccggctcacctggcggtgcccgaggagtagtcgctggagtccgcgcctccctgggtttggacatatttgactcttttc

SEQ ID NO: 104056 - DNA, 50 bp, Homo sapiens
gggcgtcatcagcgtctccgaggacagtctctgtagaaacgctggaaaag

SEQ ID NO: 104057 - DNA, 76 bp, Homo sapiens
ctgagactcctgctcagtgtagcattaaggtacatgtcccagagcaagcacacggaggcccgggagctcatgtact

SEQ ID NO: 104058 - DNA, 75 bp, Homo sapiens
ttcacaatcaagaaatgcagaaacgtaaagaaatgcaattgagtgctttgccaaagatcattaaggctgggtttg

SEQ ID NO: 104059 - DNA, 100 bp, Homo sapiens
ttgatgaggatttcgaggaggaacccacatcccccataggtcactgtgtggccatctaccactttgaagcacaacctccaagagggaaaacatttctcca

SEQ ID NO: 104060 - DNA, 100 bp, Homo sapiens
gtcaggacaaagatgctcaggctgctcttggctctcaacttattcccttcaattcaagtaacagtcagcagataagcagagagccctagaagaaaccaaa

SEQ ID NO: 104061 - DNA, 100 bp, Homo sapiens
ccagcgccaccatcgcctgtcacctggacccgcgcgtgttcgtggacggcctgtgccggcaaatttccgtcaggaaaaacagccttgttgctgtcccgtc

SEQ ID NO: 104062 - DNA, 98 bp, Homo sapiens
ccgactacggccgcctcagcagccggctgcaggccagagagggcctcgggaagagatgcgaggatgacaaggatctgcaggcccaagaccgagctcac

SEQ ID NO: 104063 - DNA, 100 bp, Homo sapiens
gtgctttcatttgtaaaacaagaattgtcagatgcggaaaacgccatgcggtacataaatgggacgcgtctggatgaccgaatcattcgcacagactggg

SEQ ID NO: 104064 - DNA, 99 bp, Homo sapiens
caccactgcagccatgatctccttaacggacacgcagagtatgaaattgaaggctgtgaagtgatttgggccattaaagataaagctatagggaatact

SEQ ID NO: 104065 - DNA, 121 bp, Homo sapiens
ctagtcggacaaaatgcagccgagaactccgctcgttctgtgcgttctcctgtcccagaaacctaacagtatcctgaaacctgattaccagcccttggccataaagaacatttccaccctg

SEQ ID NO: 104066 - DNA, 74 bp, Homo sapiens
aaaagtagaaggaaaaacagaacgttgcaaactctggaaaaaaacttggtccactgcttttaaggccctgcact

SEQ ID NO: 104067 - DNA, 50 bp, Homo sapiens
tccaccgccatccgccaccatgttggaatcgaagcctcttaaaatggcag

SEQ ID NO: 104068 - DNA, 76 bp, Homo sapiens
aaggccagggaacggcagcaacagggccgttgctccagggagaactgcaaatatcttcatccacccccacatttaa

SEQ ID NO: 104069 - DNA, 100 bp, Homo sapiens
tgccaccgtggtggacgtggagaagcggaggaacccctccaagcactacgtttattttcttgaaaaggctccaggcttcggcttggaaaatcccaccgcc

SEQ ID NO: 104070 - DNA, 75 bp, Homo sapiens
cagggctcggacaccgcctggagggtcccggagccaaaaacctgtatatcatctccgtgaaggggatcaagggac

SEQ ID NO: 104071 - DNA, 50 bp, Homo sapiens
tgcagaacccccagaccatcatgtagtgaagcgcgcagtggcgagccagc

SEQ ID NO: 104072 - DNA, 99 bp, Homo sapiens
aagagcattttggaacacatccaggaaaagataactttcgacacacctgtagacgttcgccaggtaaaggttcatctgcagaagccagcggacgcctct

SEQ ID NO: 104073 - DNA, 50 bp, Homo sapiens
gaaacttgtttctaaaatccagaaaaggaaccagtgatttacttgcttgg

SEQ ID NO: 104074 - DNA, 73 bp, Homo sapiens
gctgatgtggtgttgctgcagaagctgcagttgcacgtgcattatttaatcacatagacaagtcaggattgaa

SEQ ID NO: 104075 - DNA, 97 bp, Homo sapiens
cggcgccgcgccgagccacccgcccgcccaaggtctctcgcgggcgggagaacggaaaactcccaacttcctgctgttttcactcattagctcctga

SEQ ID NO: 104076 - DNA, 90 bp, Homo sapiens
tggtgatgcaagaagtttctaggaaaggccggacaccagggtgagcttgtcggccacagactgctacattgtgcatgagatctacaatgg

SEQ ID NO: 104077 - DNA, 100 bp, Homo sapiens
aggagaacacaggcgccgaccgcctcatgacccaggggaaggctactggccggaaagcgccgctgtggctgagagcgaagtttcagagactcttatttaa

SEQ ID NO: 104078 - DNA, 88 bp, Homo sapiens
aaagagatctgcttgcagtcggccagagagacagaaccagggcagtggaaagatacaaaattcttgtgtgcagcctcttttggactcc

SEQ ID NO: 104079 - DNA, 80 bp, Homo sapiens
gaggaggcgcgggaggtgttcgagaacgaccccgagacgccagagccagagagcttgggccctgggacgcctgggttccc

SEQ ID NO: 104080 - DNA, 100 bp, Homo sapiens
cctccaggagataatcaaagaaatctctataatgcagcaatgtgacaggccttcctggatgctctgcagaaccaggctgaggccagcagcaagatcatcg

SEQ ID NO: 104081 - DNA, 50 bp, Homo sapiens
cagcaagaaagaccatcaagtttaccagggtagagaagatgaagtccatg

SEQ ID NO: 104082 - DNA, 83 bp, Homo sapiens
ggcagatgttacagctgctcatgaaccacttggcaaaagatgccctgtatccaagcccaatatgggacaccagcaccgagtcc

SEQ ID NO: 104083 - DNA, 80 bp, Homo sapiens
taccaatcgattggagttagcctgtgagtacctgatggagggcagctacaacaaagtgttcctggccaagggtaacatcc

SEQ ID NO: 104084 - DNA, 75 bp, Homo sapiens
gtcacgccttggccaagatgacccaactccctcgagtactatactggcaattgctggagaagattttgcaattgt

SEQ ID NO: 104085 - DNA, 75 bp, Homo sapiens
agttttgaaatcgacacacaaagaatagagttgagcctgtgggacacttcgggagccgaggaggtgctgctgctg

SEQ ID NO: 104086 - DNA, 100 bp, Homo sapiens
aggagaagagccatggatcataaagagacacataccaaattggatctatccaggttatacattggctcttcaaagacgttcacctcatcagagaaatccc

SEQ ID NO: 104087 - DNA, 74 bp, Homo sapiens
aaaaaggctcagaaagatggatttttgcatgagacgcttctggacagatttgagttctgtgaacctgcatttgt

SEQ ID NO: 104088 - DNA, 50 bp, Homo sapiens
caccatgtcatcgtcaccgtgcccttaggacgactgggtttggattcaga

SEQ ID NO: 104089 - DNA, 75 bp, Homo sapiens
acacagaatcagcaaagaggaggccatgcgctggttccagcagaaggaaagtaatggaccagtgaaggtgtgggg

SEQ ID NO: 104090 - DNA, 75 bp, Homo sapiens
aagaggggccgttccactccctgccagatgtgctggaggtgggggcttcagaggaggaagaggtggtggtttcag

SEQ ID NO: 104091 - DNA, 83 bp, Homo sapiens
gttggaagcagccgatccagcctgcggagcctgtggggcagtgagtgtgtccgcttgaaaccaactgacatacagcccgacat

SEQ ID NO: 104092 - DNA, 82 bp, Homo sapiens
tgaagatctggaagacgcgctcctgcgccgttcaaatctgaacatcaatgatgtactagggaactactcattgactcttgtt

SEQ ID NO: 104093 - DNA, 76 bp, Homo sapiens
ctgaacaaaagaagctggaagccgcagaccttgtgatattccaggtgaaaggtgtagcagtcactcggcctacacc

SEQ ID NO: 104094 - DNA, 97 bp, Homo sapiens
aaagggactttggaaaaaggctgtctctagacagcagtcttgtgagcctgtgtcatcttgggggtgatattccttctgtcatccatatgtatagtgg

SEQ ID NO: 104095 - DNA, 83 bp, Homo sapiens
cgctattcagcagagagctattattccctgtattaaaggattatattccatcacaacaagatattctgcttgccagaagaccc

SEQ ID NO: 104096 - DNA, 82 bp, Homo sapiens
caaggagctaaagcagcgtgcgttcagccctgggattacaccaccaccttcactgtcagatccacttaaagagctttttcga

SEQ ID NO: 104097 - DNA, 100 bp, Homo sapiens
gagtgacattggctgacatcacagttgtctgcaccctgttgtggctctataagcagtttaattggttggggtcagataagaagaggagtgacaatcaagc

SEQ ID NO: 104098 - DNA, 83 bp, Homo sapiens
cctttccgagtcaactggcccggcaccgagttctctctgggtttgaacatcctcatccctgtgttagaccggatccgatatgt

SEQ ID NO: 104099 - DNA, 96 bp, Homo sapiens
cttccattctttatcgactctggaaattcggcgccttcatcagtatgtgaaatttgctgtccaagatgtgaatgatgttctagacttggagtggga

SEQ ID NO: 104100 - DNA, 100 bp, Homo sapiens
tatcttcgtctatttcatcacaaaactgtcccgggtgggaagaggaacagcctatgtgggcttccacggaggtgaatcagtggctaacctggttagaaac

SEQ ID NO: 104101 - DNA, 50 bp, Homo sapiens
ctgagaagctgtgcagtcgatggttttcggctttgtgagaaaccttacca

SEQ ID NO: 104102 - DNA, 98 bp, Homo sapiens
gagtggtgggagaaccagccgactggagcaggcagcagcccagggcgccctgcgtccggcagaggaggcgagcatcccgctcaggtgatgaggaaccc

SEQ ID NO: 104103 - DNA, 100 bp, Homo sapiens
cctcgccagcagccgtccggagccagccaacgagcggcctccccatggccacccatggaccagtcggcattcacttcctcccttctgcggcccataaaag

SEQ ID NO: 104104 - DNA, 50 bp, Homo sapiens
ggggtcactggtgtatgtcatggaagatctttaatctcatgaagtacgac

SEQ ID NO: 104105 - DNA, 75 bp, Homo sapiens
tgggtgctgggacttcccgtccgcggcgtggagggatctgtgccagttcagaagcaggcgagcctcttccctgat

SEQ ID NO: 104106 - DNA, 75 bp, Homo sapiens
tggcaagcaagtttaatcagacctgctcacacttcagaatagagaagaagaacatgagctgcctgtggacatgga

SEQ ID NO: 104107 - DNA, 74 bp, Homo sapiens
taagagctgggcaccaggaagcgaaggctggggatttgggagcagcttgtcttacacaaggacgaaggaaaagg

SEQ ID NO: 104108 - DNA, 85 bp, Homo sapiens
gaccgcgcgcagggcctgcagcgggagctggacggcgagcgcgagcggcgcgagaaactgtgagccgtgagctttgaggcggtgg

SEQ ID NO: 104109 - DNA, 100 bp, Homo sapiens
cccggcctcccacactcctgagccaggaacagatcaagcctggagatttgaaaaagagaattgaatctctgatagacagagactatatggagagagacaa

SEQ ID NO: 104110 - DNA, 75 bp, Homo sapiens
tcttcatcgagcacgtggccgatgtggggttggctgtgttccggccgcagagcaccgtctgcgtgaggagatcct

SEQ ID NO: 104111 - DNA, 75 bp, Homo sapiens
gccgcggcggcagcagcagtgagagtgcacagccagagaacaacacatcacacacaggaaacagttgtgctcatg

SEQ ID NO: 104112 - DNA, 98 bp, Homo sapiens
ccgggagcacgtcatcgccatcgaagtacatccagcagtggtcattcgacaacgaaagtcataccgtagaaaagatggcgtgtttctttattttgaag

SEQ ID NO: 104113 - DNA, 80 bp, Homo sapiens
agagcaactgaagattcatacgcagctggcagatattatcatagttgctgcagcggacaaggcaaaatctcagcaagttc

SEQ ID NO: 104114 - DNA, 98 bp, Homo sapiens
caaattcaaaaaggataaggagatcatagcagagtacgatactcaggtcaaagatctgttacctaaagcaataaaaaatggccagaggatcagtgtcc

SEQ ID NO: 104115 - DNA, 74 bp, Homo sapiens
tgggatttacaggaaagctcgagccaggctgtgacatcaactagtcaggcagtcttccgtctccagtctggcat

SEQ ID NO: 104116 - DNA, 75 bp, Homo sapiens
gtggatgggggtcaccgtccagagccaaggtccagggggcaaggtcgtgatcctgtttgaccaaactcagagatc

SEQ ID NO: 104117 - DNA, 89 bp, Homo sapiens
tctgcttgacatctctgctgtagtggacaaagatttccttgataatttcaaccacaccacgggcttttgaccacacaaaacagaaccag

SEQ ID NO: 104118 - DNA, 90 bp, Homo sapiens
aaaaaatccagaacaccacccaggagttacaatgcatcgcgaagatctcgtagttccagcagctggtcacctgacttttgaatgccgcaa

SEQ ID NO: 104119 - DNA, 100 bp, Homo sapiens
ttgaagtacaccgtggtgacattgtatcattggtttactggggcttccggatgcagatgacgatgcgtttgaagagtacagtgctgacgtggaagaagag

SEQ ID NO: 104120 - DNA, 75 bp, Homo sapiens
aactcttggcatttggctttgcctttctggacacagaagtatttgtgacagccttacgaaggatgaatccaaaag

SEQ ID NO: 104121 - DNA, 101 bp, Homo sapiens
ttggctgagcggagtcgtgcggttggtgggggagccctgccctcctggttcggcctccccgcgcactagaacggtatgtcgagagtaccaacgtggcaatt

SEQ ID NO: 104122 - DNA, 90 bp, Homo sapiens
ggatccttttccacggtgtgttctatgccgggggctttgccattgtgtattacctcattcaaaagaatgtaactggtcactacatttccc

SEQ ID NO: 104123 - DNA, 90 bp, Homo sapiens
gcccgttcgctggactgcaaaccgagctcccgtctgccttgcaggaagcatagtgagtgtgggcgatcctaagaagaaatatacacggtt

SEQ ID NO: 104124 - DNA, 75 bp, Homo sapiens
tgtgcagaagggtgaatgccatgtcaactttgttcggaaggttctcagaggcactgtgactgacttccctggatt

SEQ ID NO: 104125 - DNA, 101 bp, Homo sapiens
agatgaactaatgagagcagcaggatcagatggtactgaactttttgatcagacactcctagaatatgcagagaaatggaaaacttcagaagatcctttac

SEQ ID NO: 104126 - DNA, 80 bp, Homo sapiens
cttggactgagtcctgcaggacacagttccttggacacagcatgaatttgagttggcccaatgggccttccggaaatgga

SEQ ID NO: 104127 - DNA, 74 bp, Homo sapiens
agctaaggccgcgttggggtgagaccctcacttcatccgtcaccaggagactaaagtccatcaaaaacatccag

SEQ ID NO: 104128 - DNA, 75 bp, Homo sapiens
ccagtaaggatatctttgttaaattgacaacaatggccatgtatccattgtaaaccatggctgtgtggatacaag

SEQ ID NO: 104129 - DNA, 100 bp, Homo sapiens
cctgggcactatggaggtgaagagcaagcgtggtaccatgcgacgacgctatgaagatgatggcatttcagatgatgaaattgaaggaaaaagaactttt

SEQ ID NO: 104130 - DNA, 90 bp, Homo sapiens
caccacaaggccaagggcaagtgatttgacagacaggggcaagtgtccgagtggtgaatcagctacttacagagatggatggtctggaag

SEQ ID NO: 104131 - DNA, 98 bp, Homo sapiens
aaaggccgcatccagcgccagctggagataagaatccagcactacgccctgccctctactgactggaggcaggcctctgcctactttagaagttaaac

SEQ ID NO: 104132 - DNA, 80 bp, Homo sapiens
gaactgctcttggtctccatgaaggctactggcaggagcacatgagagagtgtatgcagagaatatttccaaaatggtgg

SEQ ID NO: 104133 - DNA, 100 bp, Homo sapiens
ccttgatgttcctgacccttttgtgcctgaccctactgggtggtgaagcacttgcccaaagcccacatcttggcctgcgctccatccaactcaggggctg

SEQ ID NO: 104134 - DNA, 82 bp, Homo sapiens
tggaatgaatccttctagagacgtccacgtccagttacaacacagggatcacaacaaacacaaccgccacagaagcactatg

SEQ ID NO: 104135 - DNA, 101 bp, Homo sapiens
ttgatgaggtggatctgacagatgccagcgtagctgaatccagtaccaaaaacgtcaacaacagttttacggtaacacaagtggcaagacagccgggaacc

SEQ ID NO: 104136 - DNA, 98 bp, Homo sapiens
gtccgcaaggccggagaaggccgccgggcccgggcatggtggtctggggcaacgcggaagtgtggccagactccactgatgatagctgccgaacaagg

SEQ ID NO: 104137 - DNA, 74 bp, Homo sapiens
cgccggggtggcggagccggaggcggccggcaaggagaaggaccgtccccacgaggggacccggcccgtgcgtg

SEQ ID NO: 104138 - DNA, 74 bp, Homo sapiens
tttgcccagcacgccaacgccttccaccagtggatccaagagaccaggtcagcgtttctcgcagcacacatccc

SEQ ID NO: 104139 - DNA, 99 bp, Homo sapiens
cgcaaattcactccccagtacaaaggtgaccaagaatatggcccaggtgaccaaagccctggacaaggccctgagcaccatggacctgcagaaggtctc

SEQ ID NO: 104140 - DNA, 51 bp, Homo sapiens
ttatttagtccctctatcaagcaaggagctgcggcgccaagatgagtggag

SEQ ID NO: 104141 - DNA, 75 bp, Homo sapiens
cttgccctcatcctggttctggaatcctcagttcaagatttgcggcaggaactggccgtgcagcagaagcaggag

SEQ ID NO: 104142 - DNA, 50 bp, Homo sapiens
ttccatagggctgagtctgggaccgagctttctgaaaaggatatgagcat

SEQ ID NO: 104143 - DNA, 82 bp, Homo sapiens
cggagatgtgacccggcagtacggcaaatatggcggaggtagatgacattaatgctgataagaatatctcttctgcacagat

SEQ ID NO: 104144 - DNA, 100 bp, Homo sapiens
gcacgttctcatggggaaccaggtgatctggaaaagcagagacgtggacctcgtccagtcagcttttgaagtacttcggcgtctggaggagatcatgaag

SEQ ID NO: 104145 - DNA, 100 bp, Homo sapiens
gaaatgaaaggagattccaacctacttcagtcgtcattgaattttgagaagcattctgaaaactttgcatggacagagaatcgttatgatgtgaaccgtc

SEQ ID NO: 104146 - DNA, 82 bp, Homo sapiens
agcacaaagagcttgctccctacgatgagaactggttctacacgcgagctggtgtcgtgaaaactacccctaaaagccaaaa

SEQ ID NO: 104147 - DNA, 100 bp, Homo sapiens
cggcagcgtcagtgactgtaagtcccatgaagctgaggtcttgaagcagctggctgagaaacgagagcacgagaaagaagtgcttcagaaggcaatagaa

SEQ ID NO: 104148 - DNA, 95 bp, Homo sapiens
acatactgccttatgggacagatcaagcatgtactggcattgaaaacattgacgaagctattacattgcttgaacaaaataattgggacttagtg

SEQ ID NO: 104149 - DNA, 90 bp, Homo sapiens
gctggctgtagctggccaaggagttctcgattaaagaggaaggggcagtgctcacatttctgggcagaaggccagggatgtaccgcctac

SEQ ID NO: 104150 - DNA, 80 bp, Homo sapiens
gagccgcggcggagccggaggaagctgatggtcatcttttccaagccaccagcttgggctccccacggagggcagcaagt

SEQ ID NO: 104151 - DNA, 83 bp, Homo sapiens
cccagccttctcagcaccactgcagaggacagccttgggccgagaactactggtggcgtggccagaacacacggacgctgtgt

SEQ ID NO: 104152 - DNA, 75 bp, Homo sapiens
cgcagcaacgtgcggtgggaccacgagagcggctccgtggcctatgtgccccagcaggcatggatccagaactgc

SEQ ID NO: 104153 - DNA, 98 bp, Homo sapiens
ctaattttgagccaggaaagaagaactttctgcatttgacagataaagatggtgaacaacctcaaatactgctgccaaaactggacaagccaaggcat

SEQ ID NO: 104154 - DNA, 82 bp, Homo sapiens
cagcaccatcattgcatttacctcggatcatgaagaagctcattcacacagaagacccatttaatgatgaacatcaggagag

SEQ ID NO: 104155 - DNA, 100 bp, Homo sapiens
ctccatcgtctgcagcgtcccgcacacctggcagcaaaagaggtactctatcatcacccccaacatcttgcggctggagagcgaggagaccatggtgctg

SEQ ID NO: 104156 - DNA, 101 bp, Homo sapiens
gtggataatagtctactgtccaattctgtttactctgaattaccatcagctgaagggaaaatgaagatgtgttcagagcaacattgttttgttgacacaag

SEQ ID NO: 104157 - DNA, 100 bp, Homo sapiens
ccgagctggagctgccgcggcgcagccaggtcatcctgcgcacagtcggtgttagtggcactcaggctcctctgctgtggccatggaaattagataaccg

SEQ ID NO: 104158 - DNA, 100 bp, Homo sapiens
cggaagcagctgagggaccagtactgctttgaatgtgactgtttccgttgccaaacccaggacaagccatatacaacttccaaggcagcggagcccccca

SEQ ID NO: 104159 - DNA, 97 bp, Homo sapiens
atcaaggtgaacgggcggcccctggagatgattgagccgcgcacgctacagtacaagggcgggctctacgaggcggtgaatgaggtctacaagaacc

SEQ ID NO: 104160 - DNA, 71 bp, Homo sapiens
atcgtgcccatggggatcagccccaaaaagatctcctacaagaagcctgggaattcctggggaagtcggag

SEQ ID NO: 104161 - DNA, 99 bp, Homo sapiens
gttggcttcacttaatcatatccgagctgaatgacaattctaggtacaacttttggcatggttttttctttacttcaagtcgtttctggagaaagtggc

SEQ ID NO: 104162 - DNA, 75 bp, Homo sapiens
tcggatttcaccacaagaagggctgccaggactgttaaagattcactccagtcagtccagtccgcagcaggccgt

SEQ ID NO: 104163 - DNA, 60 bp, Homo sapiens
gccagcaatcctcagacgcctcacttaggacaagtcaaaatgcagatcttcgtgaaaacc

SEQ ID NO: 104164 - DNA, 58 bp, Homo sapiens
ccgcctcgtcatggcctacgaggagaatttcaactgcttctgagggagcatcttcctt

SEQ ID NO: 104165 - DNA, 97 bp, Homo sapiens
tggagtttcaaaatactcagtcctactggggaacctcagaacctgttctggatccacagcaaatccaagcatttgatcagctttgccgtctctaccg

SEQ ID NO: 104166 - DNA, 99 bp, Homo sapiens
cttcccggtctcctttcccggccgcacaggttgatgcggatgaaattaaaaggctaggaaagagatttaagaagcttgatttggacaattctggttctt

SEQ ID NO: 104167 - DNA, 101 bp, Homo sapiens
ctccttcttcaggagagcgccccagggcaagccccgctccggccaacaagattttttatcaagcagaaatgcatcgaacaacgagaatcaagatcactgag

SEQ ID NO: 104168 - DNA, 100 bp, Homo sapiens
gaaagctgaaattgagaagctttgtgagaagggcagaagattatttactggcaagatgagcaggattaccatgaaagaaaagtccagatggactgaggaa

SEQ ID NO: 104169 - DNA, 98 bp, Homo sapiens
ttgtctcctggacctgctgcctgactacctggctgccatagatgaggccctggcagccttgcacgtgacggtgcccaccagctgacctctcctccttc

SEQ ID NO: 104170 - DNA, 80 bp, Homo sapiens
ccgggactgcctggccgacgtggacaccaagaaaaggtggacaagtcctattttcaagagaagatgacttttaacagttt

SEQ ID NO: 104171 - DNA, 90 bp, Homo sapiens
ctggcccgctccctggcggtgcagagaccagcatccttggagaaggtatccaagcccaccaatgggatctgtctcagcacccaacctgcc

SEQ ID NO: 104172 - DNA, 100 bp, Homo sapiens
taatgagagaaaaggccaaagagaggtgttctgaacaagttcaagacgaagttatacggaagcgtctcctcattgatggagatggtgctggagatgatcg

SEQ ID NO: 104173 - DNA, 75 bp, Homo sapiens
ttaaggattccaagtaactcttatttgggccaattcctgtccccccagcagcatggcatcgtgtgctgaaccctc

SEQ ID NO: 104174 - DNA, 90 bp, Homo sapiens
cctgactttgcccactgtctgctggtctgtggcccctctcgcaccaaccccagcatgatgattgatgacctcctgactccatgctcacca

SEQ ID NO: 104175 - DNA, 83 bp, Homo sapiens
cactgtgcccctggctgggggctcgcagttacttatgaaatgaagacaaagaaaaggtttggtaataagaggagaagccatgc

SEQ ID NO: 104176 - DNA, 98 bp, Homo sapiens
tggtcttcttcctcctggaggtcttcaacaacatcatccagtaccagtttgatggctcccagccccattgccaataccttcctccactatcgaaccag

SEQ ID NO: 104177 - DNA, 75 bp, Homo sapiens
gtccagacaatttacaagaaaggacgtgggcaagcctcatgcaaagttttttgcatgtctgacacccatgactcc

SEQ ID NO: 104178 - DNA, 100 bp, Homo sapiens
acatgtctttaacccaggagcccaggggtagacaaaggaggactaagttttgtcagcctggcgggtggcagctgtccagagagaggaagcagccaacgtt

SEQ ID NO: 104179 - DNA, 98 bp, Homo sapiens
gcttcttcaaaccagaatatcagggttccaatgcagtttcctcagctcttggggcctgtttgctgctccgggtgatggcacgcctggagcctgacgct

SEQ ID NO: 104180 - DNA, 95 bp, Homo sapiens
cttctacttctgttatcgctggttcctgctggattttaagagagctttctgaaaaggatatgagcatgctcgaggagaggattaagcggtcagca

SEQ ID NO: 104181 - DNA, 98 bp, Homo sapiens
gtggctgaaggtctgacatgtttgatcaaggtgggagctgaggctgatcagaactatcagaactacatcttaagggatggtgagaacaagaccaagat

SEQ ID NO: 104182 - DNA, 73 bp, Homo sapiens
ttttcttatatgtggtgctacgggccaggtactgggaccctggtcctcgagctgacccctttgaggacatgcg

SEQ ID NO: 104183 - DNA, 100 bp, Homo sapiens
caacaacctgctgggcaccttcatctggaataagtgcaggtcagctctgcggacgctcggctcatggtctttgacaagacggaagggacgtggcggctgc

SEQ ID NO: 104184 - DNA, 114 bp, Homo sapiens
ccagctgaagagcgacaagccgctggcagccgcggatctcaccgccgctcaggcaaaatgatgcttcaacacccaggccaggtctctgcctcggaagtgagtgcttctgccatc

SEQ ID NO: 104185 - DNA, 75 bp, Homo sapiens
aattttgctactgtcagatggattgactatggaaaagttgccaaattgaatccagcaactatcacaagaatactc

SEQ ID NO: 104186 - DNA, 82 bp, Homo sapiens
ccaccgcatcctggatcaactggcccagaatgtgttcagtatcttcaacaagaatacctgccctccttgcaagtagctccag

SEQ ID NO: 104187 - DNA, 83 bp, Homo sapiens
tcgaacaaagagatctttctgagagagctcatttcaaattcatcagatcaaaccagtccagctacgggggcccagccagccag

SEQ ID NO: 104188 - DNA, 90 bp, Homo sapiens
gcccgcagagagttaacttctgtttacatggaactcagacatctgcaaatcatggggatgtacgtatttttgcatgcagtgaaaggaaca

SEQ ID NO: 104189 - DNA, 75 bp, Homo sapiens
atgacattgccaagatatcccaagagctgtgggaggacccctctgagttccggcctgagcggttcctcaccgccg

SEQ ID NO: 104190 - DNA, 100 bp, Homo sapiens
ttccccaatgtggggggatttttgtagaaggcatggagagtggtgaaggaagcagtggctgggacaagctgtggaaaaagtacggatcacgctttcccca

SEQ ID NO: 104191 - DNA, 98 bp, Homo sapiens
cccgacgcgctgcagccggcagcccaccgccgccttcttggcgcgaccccaacccagccccaggaggacatgtatgcccaggactctatagagctact

SEQ ID NO: 104192 - DNA, 83 bp, Homo sapiens
cgtcgtggaagcaggactgcgccgcgtcttcctcaagggccggagttaagatgagtccagcgaagtgcctagagtaccaaatt

SEQ ID NO: 104193 - DNA, 76 bp, Homo sapiens
ttttctatggatattattgattccctgaggaaatgaaaggttgtatcaaagttcttaaggaccaacctcctaatag

SEQ ID NO: 104194 - DNA, 75 bp, Homo sapiens
gtggacccttggagccatcctctacaggacccgctttctaccattaagacctgcaggctgggacaatgaaaagaa

SEQ ID NO: 104195 - DNA, 90 bp, Homo sapiens
ggaatacctggcattgacctctcagatcccaaacaactggcagaatttgctaggtatggaacgccgtggactccgggcactgcctgcaga

SEQ ID NO: 104196 - DNA, 82 bp, Homo sapiens
atggaacagacaagcaggttgtcttggtatcatgaactgatcactaaatatgggaagttggagcctttggcagaagtggacc

SEQ ID NO: 104197 - DNA, 51 bp, Homo sapiens
aagccccactgactcccactgggtgaccatcacaggcaggctgtgcccaca

SEQ ID NO: 104198 - DNA, 100 bp, Homo sapiens
acaacagtgagtggagggatctcttcccgacaagtggttgtggagggaagaacaggtgattatgggagtgctattgagacactggtaactgcaatttctt

SEQ ID NO: 104199 - DNA, 100 bp, Homo sapiens
gcagcattcagccagtattttagtacaaaattggacagctgtacatgatcagcaaacacagccatgaacagagtgaccggggagaaggggtggaggtcgt

SEQ ID NO: 104200 - DNA, 95 bp, Homo sapiens
gggcgaggagggcacaaggccaggttcccaagagctcaggctccgtgtgtttgacagtggcgtcatggtaattgagcttcagtctcacaaggaag

SEQ ID NO: 104201 - DNA, 100 bp, Homo sapiens
atgaaagttttcagcctcatccagcaggcggtgacccgctaccggaaggccatcgccaagccattacagcagcagatcatcagactccaccaagagcttg

SEQ ID NO: 104202 - DNA, 50 bp, Homo sapiens
gacagggcacaccaaactccatctggcgatgacccaggatgcagccaggg

SEQ ID NO: 104203 - DNA, 100 bp, Homo sapiens
ggcatggtggtctggggcaacgcggaagataatcagacagctaaatggagtctgagcagctgttccatagaggctactatagaaacagctacaacagtat

SEQ ID NO: 104204 - DNA, 90 bp, Homo sapiens
acaaccagcctaagggtttctctactatgtccaataacaacgaacttgatgcaagtgataggtttgccaaggtcagacctctcatcatcc

SEQ ID NO: 104205 - DNA, 100 bp, Homo sapiens
cttctactgcactgtcctggtctgctccaaagagatctcagcgctcaccgacttctctgcgtgaagacacagcgcatctccccgctgtaggcttcctccc

SEQ ID NO: 104206 - DNA, 75 bp, Homo sapiens
ggggcttacgcagaaggacctggccacgactcggtgaaatacctggagtgctcagctctcacccagagaggcctg

SEQ ID NO: 104207 - DNA, 83 bp, Homo sapiens
caaggacaggtcaccctggagcttgctgtgtacagttttaaaatcaaagatgggaaaatcggagaaaattgcccttccccatg

SEQ ID NO: 104208 - DNA, 100 bp, Homo sapiens
tccgtctcctgatagtgccagcctggcctggtttcctgtttggcggctatgagaggttttcctccgagtacccagaattctgttctaaaaccaaggccct

SEQ ID NO: 104209 - DNA, 74 bp, Homo sapiens
ggaactcctttataagtgtcagctgtgaggaccctgatgctcccataagacagaaaatgccccttgatgatctg

SEQ ID NO: 104210 - DNA, 100 bp, Homo sapiens
ggcttcgatctctcaagagcctagtttagcagacataaaagcccggattcaggattcagatgaaccagggaagccgtggcggacggagcagacggaggac

SEQ ID NO: 104211 - DNA, 75 bp, Homo sapiens
tagaattacctggaacttcatcatcatctacttcacaggaattgccatttgtgcacttcacattcagaaacgcca

SEQ ID NO: 104212 - DNA, 82 bp, Homo sapiens
cgcgcctgggctgccggcacttcgcggcagggcttgtcaatgaggcagatcagattcaggttcgacgggcagccaatcaatg

SEQ ID NO: 104213 - DNA, 96 bp, Homo sapiens
cacctacctgtgccgtctcagtccagaagcaaggaaagcttgttaccgggtttagcaatggctccatctctttggctggagtgcaatggtgaaatc

SEQ ID NO: 104214 - DNA, 89 bp, Homo sapiens
cagtgcggcctccagagccggcatgtggcgctgtcggtgggcggccgcgagatcctcaaggacgccaggaaagcatgtgcagatgcaac

SEQ ID NO: 104215 - DNA, 75 bp, Homo sapiens
gccattatttatgtcatcaagaagaatgacgatggaagtgtacaagccccgtcggaaatacaaacgccaccaggg

SEQ ID NO: 104216 - DNA, 82 bp, Homo sapiens
cgcagaagtcgcgtgtctaggtgagtcgcggtgggtcctcgcttgcagttcagcgaccacgccgcttacaaacacgcagatg

SEQ ID NO: 104217 - DNA, 74 bp, Homo sapiens
tgttggttatgagagatttttgggacctgaaatcttttttcatccagagagtggagactgctgcacggactctg

SEQ ID NO: 104218 - DNA, 100 bp, Homo sapiens
ggagcacttcctattccactggattgggaaagaccatggcaggtgttagtggtgtgtttcactgtttttggaggactcatggcttttaactacaatcggg

SEQ ID NO: 104219 - DNA, 50 bp, Homo sapiens
gaggacactgaagatcacagactgaaagaccacagcaagattctttcatt

SEQ ID NO: 104220 - DNA, 75 bp, Homo sapiens
gtggatcgctgtgatcgtcacttgcctgtgatcagctgtctcttggggtggctgccatcttcgggccttcacaca

SEQ ID NO: 104221 - DNA, 98 bp, Homo sapiens
tttgagaccgtgaagagaaagatgcagctttctgaaacaaagactcattttgaagatgtttaacaaatcatttggaacaccctttgggggtggcacag

SEQ ID NO: 104222 - DNA, 100 bp, Homo sapiens
ccacaatgtgcctttgcaggggagcctgagagccacaggaatcagtgtctgtccctgaagggtcattaaatcagctatgttcttcagaagaaccagaaca

SEQ ID NO: 104223 - DNA, 101 bp, Homo sapiens
gtgcaagtattttcagcgagggtactgtatttatggagaccgctgcaggtaccaaccaagaagctgaagaaatatgagaaagaatatcagacaatgcgaga

SEQ ID NO: 104224 - DNA, 131 bp, Homo sapiens
cgacgcgtcaggcctgcctagacggtgctgggagcgcgtctccttgaacgttgtcccgcctgggattgcgaggtggctgggagcccgagccccacacctgccgggcagcaggtgctggacgtcgacagctg

SEQ ID NO: 104225 - DNA, 75 bp, Homo sapiens
tccgccgcccaccatggcttccgaggagctgtacgaggaatgtatcctgtcaggtataatgtcagtgaatggcaa

SEQ ID NO: 104226 - DNA, 74 bp, Homo sapiens
ctgcacgacagcttccccaagcccagacgcggttgggcccgaaggcatcctgcagaacggggctgtggacgaca

SEQ ID NO: 104227 - DNA, 96 bp, Homo sapiens
atcgccaacccggactggatcaacaccggggagtctgcggggaccgacgtcatggttcggtgcctcaagctgctgaaggaatttaaacggaatgac

SEQ ID NO: 104228 - DNA, 119 bp, Homo sapiens
tttcttgtggatattatggctaataacacaacaagtttagggagtccatggccagaaaacttttggggtgattcgcaaggggtggctcaccatcagcaacattggcatcatgaaaggcg

SEQ ID NO: 104229 - DNA, 100 bp, Homo sapiens
gaagacctcagtcaccctgtggcagagcccagctcgagccaggctggcagcatgagcagtgcaggcagctctgtggccatggatatgttccagaaggtag

SEQ ID NO: 104230 - DNA, 80 bp, Homo sapiens
cccaagaccaggaactcctgctgcaaaaatggaacaagttccagcacaagtgatttcctttgacctcgctgagtacactg

SEQ ID NO: 104231 - DNA, 106 bp, Homo sapiens
tgaccttgacgatgtcattgaagaggtagaagactcaaaaccagataccactgctcctccttcatctcccaaggtgtttggagaagagggattgaccctgaatctt

SEQ ID NO: 104232 - DNA, 97 bp, Homo sapiens
ccgcagttctagcttcaccttcacgatgtttcccttggtcaaaagcgcactaaatcgtctccaaggaagatgagaatgtgcctactgctcctgatcc

SEQ ID NO: 104233 - DNA, 75 bp, Homo sapiens
cattaacggagatgatgccgaaaacgcaaggccgaagccaaagccaggaagctcttcgtgggcggtcttgactgg

SEQ ID NO: 104234 - DNA, 100 bp, Homo sapiens
ttctgcgatacctgcctgcaggagttcctcaggtttatgctaaaactatcgatgggcaacagactattattgcatgtattgaaagccaccagtttcagcc

SEQ ID NO: 104235 - DNA, 81 bp, Homo sapiens
attgctggctacagcttcagaagaccgaagcgttcgtatctggaagtgcctccggagccagcgtggtggccatagacaaca

SEQ ID NO: 104236 - DNA, 112 bp, Homo sapiens
tggttccgcctgggcggggcccgcccgctcatcccgttgggcccgaaactgttttggctgggcctacttcacctataccttctctgggaaatgtgagtgaaactgcatctgg

SEQ ID NO: 104237 - DNA, 100 bp, Homo sapiens
ccagaatgttgagattgcccgagaagtgaccccagcaaaagaaaaatattgctgtacctaaattcaagctgaagaaaaagtcccagtcggtggatattaa

SEQ ID NO: 104238 - DNA, 50 bp, Homo sapiens
gcgcagcccgggctgggctcgcaagccacaggacgaagtcttcaggctgg

SEQ ID NO: 104239 - DNA, 100 bp, Homo sapiens
tgaagccacacagtgtccagatacgaggcttggttctacagccattgggatccagacatcagagggtgtgtgcctagctgtggagaagagaattacttcc

SEQ ID NO: 104240 - DNA, 75 bp, Homo sapiens
tgattgaggacgttcccttcacggagaaagattttgagtggcaagtgcaggcagctgtcccggttatgccggaat

SEQ ID NO: 104241 - DNA, 82 bp, Homo sapiens
ctttttccagagaagagaagctttactggtgttccagccctaaggcttgttagcagtggcacaagatcttacagaggatgaa

SEQ ID NO: 104242 - DNA, 75 bp, Homo sapiens
attaaacctggctcaatgggaaaaccttctcctgctttcgatgttaaggagggacgaagatggtgtgcagatgac

SEQ ID NO: 104243 - DNA, 100 bp, Homo sapiens
ggacagcttcgacttagccctgctccaggaatgggacctcgagtcactgtgaaactatgttccaacttcctgtcaacaatcttggcagtttaagaaaagc

SEQ ID NO: 104244 - DNA, 100 bp, Homo sapiens
ctccgccgcgcggagcccacgaaggggacagcgcagccggcccagagctcgggtctccggggaccgaggtcatgttggcagcttcctattggtctcttct

SEQ ID NO: 104245 - DNA, 100 bp, Homo sapiens
aacacaagatcaagaactccatctgatcggacagctggcttttaaaggaatgaagagactcaatagaatccagtcaatagtgtttgagactgcctacaac

SEQ ID NO: 104246 - DNA, 100 bp, Homo sapiens
gagatcttgcgggaaaaggagagctcggctgttccagccagggcctgagggaagacatgctggagaccctggttcccaaggcagagggtgaccgtgtgat

SEQ ID NO: 104247 - DNA, 90 bp, Homo sapiens
agctcgggagcaggcgctggcagtcagtcggaactacctctcccagcctcgcctcactatgttagatactaaagaaggcttccccacaac

SEQ ID NO: 104248 - DNA, 82 bp, Homo sapiens
agaatatggggaccagcaccttttatagaccaccagaatattgaagcagagcatcctggccagaacaagccaaggagccaag

SEQ ID NO: 104249 - DNA, 83 bp, Homo sapiens
tggacaggatggattgccagggcttcctggcccgaaaggagagcctcccacttataagaagcgaaggttggatgagtgtgaag

SEQ ID NO: 104250 - DNA, 74 bp, Homo sapiens
acgttcggccaagggaccaaggtggaaatcaaacctgaagacctaactgcagcatgtctgtatttggagatggg

SEQ ID NO: 104251 - DNA, 83 bp, Homo sapiens
gtggagggacgagacctgaccttgcagtacaacatctacaatgttggctcaaggatcaggattcctgtcatccatctgctggc

SEQ ID NO: 104252 - DNA, 51 bp, Homo sapiens
aaggacgcaaagttctccggcgagagctgaagaagcaggtggagagtgccg

SEQ ID NO: 104253 - DNA, 100 bp, Homo sapiens
ctgaagccgacctgggtcaaccacaatggcctggtctccaagtcctctcctaagaagcctcgtggacgtaacatcttcaaggcccttttctgctgttttc

SEQ ID NO: 104254 - DNA, 75 bp, Homo sapiens
gcgcggggggcgagtaagccagcggcaggaccagcgggcgggggcccacgaacccaagaagcttcgcttccaccc

SEQ ID NO: 104255 - DNA, 51 bp, Homo sapiens
acagattggcacccattgggacaatgtgtattcctccatcatatgctgacc

SEQ ID NO: 104256 - DNA, 100 bp, Homo sapiens
tcttcatgggaacagaggtgtttaccatgacgataagcaaccagcatttagagctgtttatgaagcactgagaaatgattttcaaaatggctgcagctcc

SEQ ID NO: 104257 - DNA, 100 bp, Homo sapiens
agagagctcagctgttgcccggcgcgtccgcgggcggctcggcggccggcggggctggggagcctcccggaccaagaatcgccttcagccctgtctggtg

SEQ ID NO: 104258 - DNA, 75 bp, Homo sapiens
tagagtcgctggagcgggcggagctgtgcgagagcctcctcacttgggtgaaaggtgtagcagtcactcggccta

SEQ ID NO: 104259 - DNA, 82 bp, Homo sapiens
aaagaattcgaagggagttggtaaacgctggaactgtggctgcaccatctgtcttcatcttcccgccatctgatgagcagtt

SEQ ID NO: 104260 - DNA, 100 bp, Homo sapiens
ccagaagagtcttcatgtggacagtctcagggacaccatgtagagaattttggtctcgattcagaaaaggcgacggcggattgacagaagtatgattgga

SEQ ID NO: 104261 - DNA, 96 bp, Homo sapiens
ggattccaagtaactcttatttgaactgagctctccatagacaaacataagtagcataacacagtgtctttcctcagacatcattctgtacagtaa

SEQ ID NO: 104262 - DNA, 75 bp, Homo sapiens
tcattcctagtcattctctgtaaagacaagttggatggcttgaggactggtactaaaaggaaacgtgactgggag

SEQ ID NO: 104263 - DNA, 50 bp, Homo sapiens
tcacttttgagtgcaactgccttccagcatgcagccagtaaagatcccag

SEQ ID NO: 104264 - DNA, 82 bp, Homo sapiens
acactacgcttatgcctggatgaacttaacaggtatttgggaataagatgatcattccttccctggatggagccctcttcca

SEQ ID NO: 104265 - DNA, 100 bp, Homo sapiens
atcgaggggaccaaactctccatcacccaggcaggagcattggtttgaaaaggccctacgagacaagaagggcttcatcatcaagcagatgaaggaggat

SEQ ID NO: 104266 - DNA, 82 bp, Homo sapiens
tagcggtgaaggcgaacgcggtctgcaagctgacgtatacctgcctgaccagtgcacgcccaacccctgcgataggaagggg

SEQ ID NO: 104267 - DNA, 100 bp, Homo sapiens
aagagactatattcccctgaacagcattctatcatggaaggaggagatgaagggcaagggccaaaatgatgaaggaagaggcccagcagaagggactcgc

SEQ ID NO: 104268 - DNA, 100 bp, Homo sapiens
gtgtcaaaagcgaaatgggcccctggatggatagctactccggaccttacggggacatgcgagtcgacttcaatgttcctatgaagaacaaccagataac

SEQ ID NO: 104269 - DNA, 100 bp, Homo sapiens
catgctaatatgttccctcacctgaaggttggactccatgaaagaattgcacaaaacaaatcgacagcagcatgagaaacatctgcaaagccgagtggac

SEQ ID NO: 104270 - DNA, 90 bp, Homo sapiens
ttggcacttagaaccgcagcagggacgtcggtttgctatcgggactcggcgaggacgctatgctaagaaggaatctgatcttaatggcgc

SEQ ID NO: 104271 - DNA, 50 bp, Homo sapiens
ttttcttttttggaactcatgagacagatagaatctcactatgttgacca

SEQ ID NO: 104272 - DNA, 75 bp, Homo sapiens
acgagatgggggtgaagctggagatatttcggcgcaagacgttcaaagaacactttagaaagaacacattccatg

SEQ ID NO: 104273 - DNA, 100 bp, Homo sapiens
aagggacgtcttctccacgccgctccgactccaggggagccgtggcctcctctccgccctagcgctgaggtgagaagccctaccactgcaactgggacgg

SEQ ID NO: 104274 - DNA, 55 bp, Homo sapiens
gaagaattgaaagaacttcttaataagggagctaaaaaagttcatttgggtgaag

SEQ ID NO: 104275 - DNA, 74 bp, Homo sapiens
gtcaccgccggaacctggcgcaggtcatgaaacgagtgcgtaccgagcagattcagatggcagtgtcctgctac

SEQ ID NO: 104276 - DNA, 100 bp, Homo sapiens
caagtcaattctggagacctgggtgtgggtcaagcaaccagatctgtttgaggagatggtgcctgtgtcagtgtggcagtctttggctgcctgtgatcag

SEQ ID NO: 104277 - DNA, 74 bp, Homo sapiens
gaagcaaggcccaatgacccaggcgtctcaaagtggtgaaggaggcagtgttgactacagttatctgcaaccag

SEQ ID NO: 104278 - DNA, 82 bp, Homo sapiens
catcatcaaggacttcaccaagcagatggagttttaacattgaatgcggagaacactaattatgcctatcaagttccaaact

SEQ ID NO: 104279 - DNA, 89 bp, Homo sapiens
gtggtcaggagcccgtgccagctatggggtcagaaggggccgtgtatgcttcgagatgaagggctgtaatccccttgcacaaaccggcc

SEQ ID NO: 104280 - DNA, 88 bp, Homo sapiens
gaccagacatcaatgtggatgtggcactgaccatgcccagggcctccatccctggaccagcttcgagctgaacgtctgcggagggaag

SEQ ID NO: 104281 - DNA, 97 bp, Homo sapiens
ctcatgtacttgtctgttgggggcttgtgttgatcaggagtgaattcacagtctaccatgaattggaagtcgttcccagatttcctaaactttccag

SEQ ID NO: 104282 - DNA, 95 bp, Homo sapiens
gagtaattgcctgctttgattccctaaaggccattgaacacccagttcgaaccaatcagattccacgtcagattcctgaacagtcgttctacacg

SEQ ID NO: 104283 - DNA, 128 bp, Homo sapiens
tctgaaggtgtcgggacctcttcatctgagagcactcatccagaaggccctgaggaagcactttaaggatttaattcgtttacgtcggacagcagaatggtcccgttctaatttagacacagaagtta

SEQ ID NO: 104284 - DNA, 90 bp, Homo sapiens
caagaacaagaggaataccagcgggaagggatcccctggaaacatatgaggaaacagacttggagaggttaagtgacatgctcaagacaa

SEQ ID NO: 104285 - DNA, 100 bp, Homo sapiens
gtttggtgtacccatgtgactaatttgtccaaagagaggtgcctggaaggggtccagatgggaatgcacacaacctccgctttgaagggatggagaggca

SEQ ID NO: 104286 - DNA, 100 bp, Homo sapiens
ctgacgggcctgcgagggttgaagattgtgaagcaatagcctaagggggtgagtggtgcactgacagtgcttatgaaggacgcaatcaagcccaatctca

SEQ ID NO: 104287 - DNA, 99 bp, Homo sapiens
aggcccccccgcgccgaccgcgttcctatggacagacgcacagacacctgcaggtccgggcccaccagctggtcttgccaccttgcgacgtagtgatca

SEQ ID NO: 104288 - DNA, 108 bp, Homo sapiens
ccgtccttctccactttcgccagcccgtgccgcgagcgcggcctgcaggagggactttgaacatgtcggggatcgccctcagcagactcgcccaggagaggaaagcat

SEQ ID NO: 104289 - DNA, 98 bp, Homo sapiens
cacaaccctcccgagaagcccagctccttctggacgaatgtccatcgttaagaacctgcagaacctggaccccagccacaggataagtgaccgggact

SEQ ID NO: 104290 - DNA, 100 bp, Homo sapiens
gcctgggccgcgcgctatggcaccttcgcctggcccaccactcccagagggactggtgattgcagctggaagtgcccatgaccgagctggcgtcctccgg

SEQ ID NO: 104291 - DNA, 74 bp, Homo sapiens
gcagcaacgtgcggtgggaccacgagagctgacaacactgcagctgaaggaggagttgctggatggagaggatt

SEQ ID NO: 104292 - DNA, 97 bp, Homo sapiens
attctaataatgatctcctacattccaagttatggaggttttgatgactatggtggctataataattacggctatgggaatgatggctttgatgaca

SEQ ID NO: 104293 - DNA, 51 bp, Homo sapiens
gcgcagactgtggacgctctggtgacggcctctctcttaggtgcaccttct

SEQ ID NO: 104294 - DNA, 113 bp, Homo sapiens
cgccaccctccgtggcaaggcgaggccccgggggcgggccggggtcaccacgcctgccccagggaaccgcacagcactctggcccccagaagcttctccacattgcccaggag

SEQ ID NO: 104295 - DNA, 100 bp, Homo sapiens
atggatgtcaaatactttgcacaggaagctataagtgcatttaaatcaaacggtattgagatggattgggttatgaaacataatggtccaaatgacgcta

SEQ ID NO: 104296 - DNA, 51 bp, Homo sapiens
ctcagcttgtctggtattggtcgatttggcagctgatcggaagctctttcg

SEQ ID NO: 104297 - DNA, 87 bp, Homo sapiens
ggaaggcgcgagtgaggaaaggaggtactgtagtcttcccaagggattgttgaagaaacttctgaagagggaaactctgtacctgct

SEQ ID NO: 104298 - DNA, 75 bp, Homo sapiens
ttcgaggcactcaagtcctggctcagcaagactctcgagcccatggatattggagaagatattccactagacaaa

SEQ ID NO: 104299 - DNA, 100 bp, Homo sapiens
ggcggcggcggtggggactgcacgtagcccggcgctcggcatggctctcctggtgctcgactggtgaattttcagctcgtttccttttgaagctgcccgt

SEQ ID NO: 104300 - DNA, 100 bp, Homo sapiens
gcctcttcatgcagttctccatcgtgccagccgagacgcatccagagctttcgtgaccggggactgttctgaagcaggcctcgtggatgacgtatccgac

SEQ ID NO: 104301 - DNA, 74 bp, Homo sapiens
ccggcggctgcggcggagccgaaccggccacaccgctgaaggccaaagaggccacaaagaagaaaaagaaacag

SEQ ID NO: 104302 - DNA, 101 bp, Homo sapiens
tgtacctgaggctgttcaaactgaagaaggaaaatgctctgaagtactcaaagacactgacagagcacctgaagcttgcagtttgacccagcacctcgtag

SEQ ID NO: 104303 - DNA, 100 bp, Homo sapiens
cgacctgtttgagagtgggaacatgacgcaggtgcaggtgtctcttctcgccctggcggggaagtttgatgaaggccggaacaactttgaaggggaggtc

SEQ ID NO: 104304 - DNA, 75 bp, Homo sapiens
gattctggaactgggagaagatggctttaaagaatacacttcaagatctgcctacaaactggtttgctactttac

SEQ ID NO: 104305 - DNA, 82 bp, Homo sapiens
aaaacgtgtgggtacgaccttggagagaagaccaagaggtcggagaagaggtagaaaatgtggcagaggccataaaggagaa

SEQ ID NO: 104306 - DNA, 95 bp, Homo sapiens
cctggtcccggagtcgccgctgggcctgtccgctggcgtcatgactcagatatcagtgatcttattagctttttcacaagccagaacataatggt

SEQ ID NO: 104307 - DNA, 98 bp, Homo sapiens
gaaaattcacccttgtagagtcattcctgcctttgagcggactcccttttaaggaagcatctcaattctccctactatattgtacctcacaatcgggg

SEQ ID NO: 104308 - DNA, 100 bp, Homo sapiens
cccagctgcacacgacctgttccatgctgtcatgggccgtacactcagcatgaccctggcggcttacagggagaacacagttggcctccaccgtttctgc

SEQ ID NO: 104309 - DNA, 100 bp, Homo sapiens
tcagaggattaattcctgctggaacacagcatagcatgattgcaaccacaggaaaaggaacagtgttgataaagactgctgaagaattgatgaattttag

SEQ ID NO: 104310 - DNA, 83 bp, Homo sapiens
cattcaaattgctcacagctgatcctaaggttttaaaatcaaagatgggaaaatcggagaaaattgcccttccccatggccag

SEQ ID NO: 104311 - DNA, 90 bp, Homo sapiens
gctggccgacgagcggagcctcaggagccggcggggacgccatgcgagccaggctactgcagcactggggtgtcagttgttggtccgacc

SEQ ID NO: 104312 - DNA, 74 bp, Homo sapiens
tccctgtgtgtcatcctgcctgtcaacctctcaggggacttgctggtgacattctacgaatggattccaccaat

SEQ ID NO: 104313 - DNA, 100 bp, Homo sapiens
gtggagcccgcggccggggacctggacaacccccctaagaagttccgtgggtgtgtccgcagccggccaggtggtatccctgaaggtgtggctgattgac

SEQ ID NO: 104314 - DNA, 51 bp, Homo sapiens
ccgcgtttcccgggtaaaggggtagacgttacatccaagaggaaataatcc

SEQ ID NO: 104315 - DNA, 100 bp, Homo sapiens
ccgccaccggccgccgccgccgccgcccaggcgcaggatcgctgaggtgctctcagtgcaagcagacctactattgctccacagcatgtcaaagaagaga

SEQ ID NO: 104316 - DNA, 100 bp, Homo sapiens
cctcctgccagccccagcccctggagaggatgcaggatgacgacagatatgagcaggcgagtgacgtccgggcacagctcaagttttttgaacagcttga

SEQ ID NO: 104317 - DNA, 75 bp, Homo sapiens
gggcatagaaggagaaaatcgggtgcctgttgtctacattgctgaaagtgatggaactcttaaaacgcctagatg

SEQ ID NO: 104318 - DNA, 110 bp, Homo sapiens
tggtgacaagctcaaggcctgcgaggtacatccccagcttactccgacctctctgaacttcctggaccagatctgtttcctctgcctgcatgctctagcctaccatcttc

SEQ ID NO: 104319 - DNA, 100 bp, Homo sapiens
ggcatcctccttgaagtatttggctgaggagttttcaatcccattcaattttgtggggaaattgcttggaccaagaggaaactccttgaagaggctacag

SEQ ID NO: 104320 - DNA, 75 bp, Homo sapiens
gacagcagcgcagtaccaccttccagagatggtttggattcaggatttgttcctagtgtccaagattttgataag

SEQ ID NO: 104321 - DNA, 90 bp, Homo sapiens
ctgtgtcctgatttcccgctggagctcactcagaaagcagccagatttccatgaggacaacttacaaggacctgtatggcctcattttag

SEQ ID NO: 104322 - DNA, 77 bp, Homo sapiens
cagattcgcagtggtcgcttcttctccttgaaatgctgctcatggattctcccttattcaggtggacaacacaaagg

SEQ ID NO: 104323 - DNA, 143 bp, Homo sapiens
ccaaagtcatcaatgataagcatgatgatgtcatggccaagtttggcgctattctggcccagggcatactggatgcaggagtctatattctgatcggagccggcgccctcatgatgctggtgggcttcctgggctgctgcggg

SEQ ID NO: 104324 - DNA, 100 bp, Homo sapiens
atcattctgccttattacgccgtctccaagatgtagctaatgaccgtggttcccactgaggcaagccaaattagagctgagagttgctgtagcaaaagtg

SEQ ID NO: 104325 - DNA, 75 bp, Homo sapiens
ggagatagtgcaggagggaatttagctgcagcagtgactcaacaggtccaagaaactggagacattgtcatttca

SEQ ID NO: 104326 - DNA, 74 bp, Homo sapiens
cgtccgcgggttgctgcagacagagccccagaacaaccaggcccctcggctccctcccagatcccacccccagc

SEQ ID NO: 104327 - DNA, 101 bp, Homo sapiens
ctgctcccggaccgggccgcgcacgccgcctcaggttttaaaatcaaagatgggaaaatcggagaaaattgcccttccccatggccagcttgttcatggta

SEQ ID NO: 104328 - DNA, 90 bp, Homo sapiens
gcaccatgtcagacaaggaaattactcatgatgtcaaagacttaattcagtgcacaaatgagatgaatgtgaacatcccacagttggcag

SEQ ID NO: 104329 - DNA, 83 bp, Homo sapiens
ggaccggcgtccccggcgcgaagaggctggactcggattcgttgcctgagaagccaggagaaaggccagactgaagtgacctg

SEQ ID NO: 104330 - DNA, 100 bp, Homo sapiens
gcgaggacgagagcgacatcctggaggaaagcccgtgtggtcgctggcaaaagcgacgggagcagggtccccagccccaccccagccccaaaggaggctg

SEQ ID NO: 104331 - DNA, 75 bp, Homo sapiens
gaagccttccgctattcagcagagagctattattccctgtattaaaggtgtcatcctacggtgggaccctccgtt

SEQ ID NO: 104332 - DNA, 99 bp, Homo sapiens
cagggacgtgatgttggagaactacaggaacctgctttctctcgatgaggataacatccctccagaagatgggacagttgacattcaaggatgtggcca

SEQ ID NO: 104333 - DNA, 82 bp, Homo sapiens
ctcgtcagcctcccgccggccgtctccttaacaccgaacaccgagaactacgatgacccgcacaaaacccctgcctccccag

SEQ ID NO: 104334 - DNA, 91 bp, Homo sapiens
tcagcatggcctacgggcagattggaatgatccaggccctgggaggcttctttacttactttgtgattctggctgagaacggcttcctccc

SEQ ID NO: 104335 - DNA, 83 bp, Homo sapiens
tgcaagaaacctcaggacttgagtaacagcaacatggtgtggacactgccagcggctgcagccgacttggaatgacctgggag

SEQ ID NO: 104336 - DNA, 100 bp, Homo sapiens
attgacaaatgctctccacccctagagttcttggatgactctgactctcatttagaaatccaaaagggaactctaatgatccaggacaaagaagttaccc

SEQ ID NO: 104337 - DNA, 75 bp, Homo sapiens
gcgtcaatcagagcgtcctgtgcggctacttcacccccctcaacaccccacagagctatgaaaccctggaggagc

SEQ ID NO: 104338 - DNA, 100 bp, Homo sapiens
gttaggaccaaacctcaaagcatggctaagagtgttcagtagaaatgggatcactactcttggaatcaaagataaatccaaatactgcatatcagaaaca

SEQ ID NO: 104339 - DNA, 75 bp, Homo sapiens
ccctccgagcagcccggggatccagcacgcaggcatgcggctaccaagggcatccttgtggctatggtctgtact

SEQ ID NO: 104340 - DNA, 98 bp, Homo sapiens
ggacctctatctcgcttttcccctggccttctgtatcttcatggtgcggctcatcttcgagagattctggaacttttcaaagcctgactctcttcttg

SEQ ID NO: 104341 - DNA, 83 bp, Homo sapiens
attacctggtccggaaacgagtaggagacaatgacttcctggaggtcagacgcccactattgcttggttctacttcctttatc

SEQ ID NO: 104342 - DNA, 75 bp, Homo sapiens
gtgacgccgagcaccgtgctgcttcaggtgcacattcaggttcccgagcacaaacatcaagataacgttcactgc

SEQ ID NO: 104343 - DNA, 100 bp, Homo sapiens
caggacacccctgaagccgagaaatgtgatcttccattgtttgaagcactggacctttaatccactgtaggtatggacagggaagaaaggaagaccatca

SEQ ID NO: 104344 - DNA, 116 bp, Homo sapiens
gggcagtgaccggcaccttctgtgcgtcctggactcctctgagaaacaggggtttgttaaagttgttaagaataaggcctactttaagagataccaagtgaaatttagaagacgac

SEQ ID NO: 104345 - DNA, 100 bp, Homo sapiens
agggtcctttatatagaagggagagtagatacagcagcagcaacagcagctgcagcgaatagcacagctgcagctccaacaacagcaacagcagcagcag

SEQ ID NO: 104346 - DNA, 83 bp, Homo sapiens
cgggccaagagaagaggcggtggaggacacgacgcgcttaaaggggggcatcccggggcccatcgccttcggctgggtgatcg

SEQ ID NO: 104347 - DNA, 75 bp, Homo sapiens
ctaaagcagacggctcgcactgcgacccgaagagccatccaaaactctgtttgtcaaaggcctgtctgaggatac

SEQ ID NO: 104348 - DNA, 74 bp, Homo sapiens
gatgccaggaccccctgggaagcctagaaaaatgatggcctgtgagtatctgtctgtggaagtaatggagcgct

SEQ ID NO: 104349 - DNA, 82 bp, Homo sapiens
cacggcccctggagtgtaccatccgggctggtgaggacactggcctgagactgtctgcagttgcaccgcagatcctcctgcc

SEQ ID NO: 104350 - DNA, 98 bp, Homo sapiens
tttcatgcaatactgtggcacaagcatttggatgatgcatgtaaaagcaacaggcctcaggccataggaaaaggatacagagtagagtttcatgaacc

SEQ ID NO: 104351 - DNA, 89 bp, Homo sapiens
ctggcagagaaaaaggccaccgatgctgaccggttccctgatgtgttacctgcttctgctactgatccaaactgcagaacttctcattc

SEQ ID NO: 104352 - DNA, 98 bp, Homo sapiens
tgggatccggctcctccagctaccggcccaaggccatctacctggacatcgatggacgcattcagaaggtgagcatgggtttatgcgtcttaggcatt

SEQ ID NO: 104353 - DNA, 83 bp, Homo sapiens
atgagcgtgcgggactgcgcttggctgcgcaggagcccagaacccagcgggtgccgcttctccacccgaggcttccacctcca

SEQ ID NO: 104354 - DNA, 82 bp, Homo sapiens
cctgatccgggagagtgagagctccccaggggagttctctgtgtctgtgaagggataaaaacattcagatggcagatcacag

SEQ ID NO: 104355 - DNA, 90 bp, Homo sapiens
atcacagagcctatttacccagaagtagtccatatgatggatcctgagcttgaaaaaaaactgaaagagaataaaatatctttagagtcg

SEQ ID NO: 104356 - DNA, 90 bp, Homo sapiens
aagatgggaagttggggcatggcaacagaagaacattagcagtgttgtggctgcattttccgaccttcttcacgtccgaatccctaacag

SEQ ID NO: 104357 - DNA, 76 bp, Homo sapiens
gatttgtttggcgtgccaagcttctctgtgaaagagcacagaagcagagattgatattcgtttgagagaggaattt

SEQ ID NO: 104358 - DNA, 73 bp, Homo sapiens
tccgtgcaggcacagccttttacattgatcagccaaaggtcattccaaatgctatatgtggaatttgtctgaa

SEQ ID NO: 104359 - DNA, 50 bp, Homo sapiens
cagtggtcaggcggccggcatgaggttaaaatctggtttcagaaccgcag

SEQ ID NO: 104360 - DNA, 100 bp, Homo sapiens
agcgcaggacagcgcaggagccccggcgcatcgcggcgcgcacagacccaggtgctggagaatctggtaaaagcaccattgtgaagcagatgaggatcct

SEQ ID NO: 104361 - DNA, 100 bp, Homo sapiens
acctactcagagaagtccctccaccggctctgtggaccagaggagcgagagcagcaagaaccacacccagcagcaatgtcagcggaagtggaaacctcag

SEQ ID NO: 104362 - DNA, 100 bp, Homo sapiens
ccggggcctgactgcccacggcatcaacatcaaggctggcaaagcacacaggctgagcgctgaggagagggaccagctgctgccaaacctgagggctgtg

SEQ ID NO: 104363 - DNA, 74 bp, Homo sapiens
tgcgcagggccaagttcaagtttcctggccgccagaagatccctacaccgcctcgctgaggagtgagattgagt

SEQ ID NO: 104364 - DNA, 100 bp, Homo sapiens
acctcggtaccctggaggtccaaggcccccattgaggatacctaatcaggatgctaaagagcaggtaagccctttggaaacaacattggaaaagttccag

SEQ ID NO: 104365 - DNA, 75 bp, Homo sapiens
aaggaacttctgcacaaggagctgcccagctttgtggggtggcctgaagcacgaggacaaacgtggaggtagcgg

SEQ ID NO: 104366 - DNA, 83 bp, Homo sapiens
acggctgtctctggactggacagcagtggcgtccgcttttctctaaggaacccggccatgcggaccctcagttggaagcacac

SEQ ID NO: 104367 - DNA, 80 bp, Homo sapiens
aaccactaccaccacgaccatcatctgatcagtctagcagttcctaatgtggatctaccacccctgtgttcatcgagatt

SEQ ID NO: 104368 - DNA, 96 bp, Homo sapiens
tatgactccaggtcttcagcacccacccaccgtggtacagggaaatcctcattgacgattcaatttgttgaaggccaatttgtggactcctacgat

SEQ ID NO: 104369 - DNA, 83 bp, Homo sapiens
cttttcaagacaccaagtgagaggccaaccagatgcttcaggactgccccaaggcccgcagggaggtggagctgcactggcgg

SEQ ID NO: 104370 - DNA, 80 bp, Homo sapiens
agaggaagtgagagcattccggcccccccaccccaaccccggccgctggccctctggcattgacatgtagagaagaactc

SEQ ID NO: 104371 - DNA, 100 bp, Homo sapiens
gccggcccgcctccctggccggggcgcagttcggaggttcagagttgaagtattgataacaccaaggaactctatcacaatttgaaaagataagcaaaag

SEQ ID NO: 104372 - DNA, 90 bp, Homo sapiens
ccaagttgacccccctgcacctcgctgtccaagcaggctcagaaattattgtccgcaatttggcctttgcccagtttgatgctgagggtg

SEQ ID NO: 104373 - DNA, 78 bp, Homo sapiens
aacaatgagatcgtggacaagatcatgggcaaaggacagatccagtggtgatcgccgctcgggaatgcgggcgtgaag

SEQ ID NO: 104374 - DNA, 101 bp, Homo sapiens
atagattctgcttcatccgtgagagagaataagcaacctgaaggtttggaattaaaacaagattggttgtgatcgtagccaaaaccttgtggacatttgta

SEQ ID NO: 104375 - DNA, 100 bp, Homo sapiens
tccgtctggcgacgcccgccgcctcactgtttctagccttcagactgtcaagaacaagtatgccacatcgaagcatgctaagatcagcactctaccacag

SEQ ID NO: 104376 - DNA, 83 bp, Homo sapiens
acgacagcctcaaacaggagctggagcagctcaaagaggttgacatcatggacatatgtgagtccatcctggagaggaagcgg

SEQ ID NO: 104377 - DNA, 89 bp, Homo sapiens
cccaattttggttttgttgtgtttgatgattctgagcctgttcagaaagtccttagcaacagggctattgagggcacctacattgacaa

SEQ ID NO: 104378 - DNA, 98 bp, Homo sapiens
agctccggcccgggcgagcgggtgcgtctgccgcagagtcggcacctgaaggacatggagaatggctggtgctccagacccctcacctggagttccag

SEQ ID NO: 104379 - DNA, 82 bp, Homo sapiens
aagaagatgcctcgaactaaacaaattcatcccagaaatctaagagaacccagtgacttgattgtaaaaatttacagagcgg

SEQ ID NO: 104380 - DNA, 100 bp, Homo sapiens
gttgcagcgggactttattaccgctttaccagaagttgcttgatagatttgactatgatgatgagccagaagctgtggaagaatcaaagaaagaggatac

SEQ ID NO: 104381 - DNA, 99 bp, Homo sapiens
gaccgccccgcgtcatgcggctcctcggctggtgtcatcaggtactcacaggttgactgcagaggagaggaaccaagctatacttgaccttaaagcagc

SEQ ID NO: 104382 - DNA, 74 bp, Homo sapiens
ccagctgcttcaaattggacttaagtctgaatttcggcagaatttaggtctctggacctctgactgacactgtg

SEQ ID NO: 104383 - DNA, 50 bp, Homo sapiens
ccgtactcaccagtgcagtcccaggtgccgtgagcgatgtggagatgcag

SEQ ID NO: 104384 - DNA, 100 bp, Homo sapiens
gccagtcctgacaaaatgcttcaggtccaggttcacactagaaggccaaaacttccgcaaacatctgatgatgaaaagaaagatttttgagactgcagcc

SEQ ID NO: 104385 - DNA, 126 bp, Homo sapiens
ggggtgaaatgtgaggcgtgtcaccagtttatcacagggaaagtcctggagccctggaacagctgctgacagagttggatgacttcctcaagattcttgaccaggagaacctgagcagcacagcac

SEQ ID NO: 104386 - DNA, 83 bp, Homo sapiens
ccgatggaagattcgatggacatggacatgagccccctgaggccccagaactatcttttcgagctcttcagtatccccatcag

SEQ ID NO: 104387 - DNA, 100 bp, Homo sapiens
tgtacggacataagttgtcatttctcttgagtaaatacctaaaagtgggcttgctgggaaccagtgaccttcaaggacgtggccgtggacttcacccaag

SEQ ID NO: 104388 - DNA, 90 bp, Homo sapiens
gagattaaagatgcagtacgccacggggccgctgctcaagttccagatttgctgcagatctgggacacggccggccaggagcggttccgc

SEQ ID NO: 104389 - DNA, 100 bp, Homo sapiens
gggcaccaccaagcgctttcccgagaccgtcctggcgcgatgcgtcaagtacactgaaattcatcctgagatgagggaaatcctcattgacgattcaatt

SEQ ID NO: 104390 - DNA, 83 bp, Homo sapiens
gccgatccagcctgcggagcctgtggggcaggtacatccccttcttcctcatcctcttcatgtacttcagcggctgctttact

SEQ ID NO: 104391 - DNA, 82 bp, Homo sapiens
cgtcaatctctttcgaagccattcagtcctcaatctccttttccttggctacccgctttatcctgtggataaacgcagagtg

SEQ ID NO: 104392 - DNA, 74 bp, Homo sapiens
ttcagccagtatcaacaccagtaacagtgtgtggagatatccatggacagcctcagccaaacagcaaatacaag

SEQ ID NO: 104393 - DNA, 82 bp, Homo sapiens
ctggccagcctgctcatcgcctactgcagcgccatcgggggtgcaggtgctgatgagtgccacccggagtgcatacatggag

SEQ ID NO: 104394 - DNA, 88 bp, Homo sapiens
acccccgtggattccagtgggcccgacagcgcaacagacttaattcagtgcacaaatgagatgaatgtgaacatcccacagttggcag

SEQ ID NO: 104395 - DNA, 75 bp, Homo sapiens
ctatggaagttgataggctgaaaaaccgaactcctgttacagtgacagaaatgttggtaaatgttctgagtattt

SEQ ID NO: 104396 - DNA, 75 bp, Homo sapiens
gccgtgccgtgggcctggggtcgggggagcagcagaccgggaagcaccgtccctgtgcgttttattgcgacctgc

SEQ ID NO: 104397 - DNA, 90 bp, Homo sapiens
ggccgccggccccgcgccgccccccggccgcccccgggcgcagatgccgcatctgaggaagaccgagacatgggtgcccggcaccgcgcc

SEQ ID NO: 104398 - DNA, 90 bp, Homo sapiens
cactgctctgctgtctcctgcaagaactggctcaagaaatttgcctcgaaaaccaatgttctaagaacggaagcatctgggctggatgga

SEQ ID NO: 104399 - DNA, 80 bp, Homo sapiens
gaagactccctgcctcctgagtcccaagccagtcttggtgctctgtgttcacctggttcatctgaggagctgcatctacc

SEQ ID NO: 104400 - DNA, 98 bp, Homo sapiens
tccaaacccctagccacgacatggaagaatttttgcaacgcgccaaatctaaactggtcaatgagctgaaggagaaaggcaacaaggccctgagcgtg

SEQ ID NO: 104401 - DNA, 115 bp, Homo sapiens
cccggccaagatgtctgacatggaggatgatttcatgtgcgatgatgaggaggactacgacctgagatttaccgcattgtttctcagaagcaaatgtcagacagacgcgaaaatg

SEQ ID NO: 104402 - DNA, 80 bp, Homo sapiens
atgtaaagaaaaagtgttgagttggcttttagccaaaccaaacaggaagcttacttttctctacctagccaatgatgtca

SEQ ID NO: 104403 - DNA, 73 bp, Homo sapiens
attaaagtgtcaatgtgtgcggataaggtgagcactgtgggctatgggatggatgaggtggagcaggaccagc

SEQ ID NO: 104404 - DNA, 75 bp, Homo sapiens
aatgagctcccaaagccatccagttgcaggaccagctctgccccctaattataaaagcagtagttcagattcatc

SEQ ID NO: 104405 - DNA, 92 bp, Homo sapiens
gccctctgtctgcctgtgtccctgaccatggctccctgcagtaccctttaacggtttcgtagcttaacgacagcgttcttcagagatgctat

SEQ ID NO: 104406 - DNA, 83 bp, Homo sapiens
gtggcgaagggaatcgcaaggctcttccctgaccattttctactgtccctgcgcgagcatgactatatgaaggaagaggaagg

SEQ ID NO: 104407 - DNA, 105 bp, Homo sapiens
cctgccgtccttctccactttcgccagcccgtgccgcgagcgcggcctgcaggaggtgtttgagaagtcccccctgcgggtgaagaacttcgggatctggctgcg

SEQ ID NO: 104408 - DNA, 82 bp, Homo sapiens
ggagattcgggccgtcaccctgcctcccctgcgtcccgccaccggccgcttctgtcctcggggatttgggagcagcttgtct

SEQ ID NO: 104409 - DNA, 75 bp, Homo sapiens
tacaggctcagtctgcggccaagactccatcctgcaaggtgactacacttgtcaacacaagcaacaaaggcccat

SEQ ID NO: 104410 - DNA, 100 bp, Homo sapiens
tggggtttccggctgcagggcggtaaggatttcaacatgcctctgacaatctctagtgttgggataattcttcactattccacccttgccacagtactat

SEQ ID NO: 104411 - DNA, 75 bp, Homo sapiens
gtgacattttatttacccttcctaacctctccaaaaaaggaagcaattttggaggtggtggaagctacaatgatt

SEQ ID NO: 104412 - DNA, 75 bp, Homo sapiens
ccgggaggggcgaaggcgggcggcagaggcgatcaggggttggccggagacctacgacatgaatacctcggagcc

SEQ ID NO: 104413 - DNA, 59 bp, Homo sapiens
acggagtgaccaagagcaggtttgagtcaaagaagtttggcagagatcacggagctaat

SEQ ID NO: 104414 - DNA, 110 bp, Homo sapiens
cggcagcggcctgcacaccaagggcgcccttcccctggatacggtcactttctacaaggattttttatcaagcagaaatgcatcgaacaacgagaatcaagatcactgag

SEQ ID NO: 104415 - DNA, 75 bp, Homo sapiens
aggtgtcggaggtctcatctttgaactactgccggagcttctgccagagtcctccctgctgctgtgtggacgaca

SEQ ID NO: 104416 - DNA, 100 bp, Homo sapiens
cgttgaggatctttgctcttccatccgcctttgatcgtcttcctcttcagccatccagattaagcctgatcaagatgacaacctcccaaaagcaccgaga

SEQ ID NO: 104417 - DNA, 101 bp, Homo sapiens
caactccggccttccctgccctgacctggaacctctgggagggctgcagagatggatagaatgacagaagatgctcttcgcttgaatctgttgaagcggag

SEQ ID NO: 104418 - DNA, 75 bp, Homo sapiens
gatctagaatcaactgagagagatgcttaaaaatcaccagttactttaatgagttgaatacaaagacttccccaa

SEQ ID NO: 104419 - DNA, 75 bp, Homo sapiens
agatgaggatcgaggtcggcctggaccttctgcactttgcattagttgacaaggtcacaggcaggtttaatggcc

SEQ ID NO: 104420 - DNA, 95 bp, Homo sapiens
aaaacgtcttgcacgtgcgaggggcatttcaggagtttcctgtctgtcagacaatgcagatcttcgtgaagactctgactggtaagaccatcacc

SEQ ID NO: 104421 - DNA, 98 bp, Homo sapiens
gatgcgtctcgctcaagtgatctttgataagaatgattcagattttgaagctaaagttaagcagtaaatggggagcaggagaaccgagtgcagaaggg

SEQ ID NO: 104422 - DNA, 100 bp, Homo sapiens
gtacttcctggacaacttggaccggatcggccagctggagcgggacggtatgcgggccatcctggggtcctacgacagcgagctgaccccggccgagtac

SEQ ID NO: 104423 - DNA, 74 bp, Homo sapiens
atcttgagccccttgaacctgaacagcatcccagacattgaggctttatcctgtggataaacgcagagtgaacg

SEQ ID NO: 104424 - DNA, 90 bp, Homo sapiens
gcccaaggagaatgcgctcttcaagcggatcttggtattagtcactgtaccactggctttactacagaaaggtgccattcagtttaatcc

SEQ ID NO: 104425 - DNA, 90 bp, Homo sapiens
tgcctcgcaatgagggagcatgtaccccagagcacccacggtgttccccgaaatgtggacgagctgtcaagcctccagtcttcagcggac

SEQ ID NO: 104426 - DNA, 80 bp, Homo sapiens
ctgccactgtgacgggcgtgggggcctcaagctgtcccaggacatggacacctgtgagatccgcctcacggacacgctgg

SEQ ID NO: 104427 - DNA, 75 bp, Homo sapiens
tggttcatccacccttggatccaagtcttcagatggagtcatcagaacccactgtgaggaagtgacttctccttg

SEQ ID NO: 104428 - DNA, 75 bp, Homo sapiens
ggaaatgtagcttaatgacctccttgtcctggagtctcccttaatacagaaaatttgaagccattacttccagct

SEQ ID NO: 104429 - DNA, 100 bp, Homo sapiens
caacatccccaaacagcggcgtttcacggtggcacatacatgactccgacctgagcatgcgcacactgagcacgcccagcccagccctgatatgtccacc

SEQ ID NO: 104430 - DNA, 74 bp, Homo sapiens
ccctcactatcgacaagctctagacatgatcttggacctggagcctggaaaccgaatgcggtgctacaactgtg

SEQ ID NO: 104431 - DNA, 100 bp, Homo sapiens
aagcttggaatgatcatcaaacagctatggtgatgattagagacatactaatgtacatggtggagcagttctggaggttttatagccacatggtacgtcc

SEQ ID NO: 104432 - DNA, 75 bp, Homo sapiens
ggaggggccgcgggagcccgaaagcgagaataccctctaccatctgctttggtcagggtgccgctcgaggattta

SEQ ID NO: 104433 - DNA, 90 bp, Homo sapiens
tgcctgtaggtttaattgcaggtgccagccaaatttgtatcctactgtggggcttcaaacaccaggagaagtggtcgatgccaattttgg

SEQ ID NO: 104434 - DNA, 90 bp, Homo sapiens
gtggggggattctcgacctgctaacagaactggaccttttcgggtctccgtctctccaccgggggcttcatccttccagggaggagaaga

SEQ ID NO: 104435 - DNA, 100 bp, Homo sapiens
agagacttctcagatcagcaggaactggaatgtgttcaagtcttggcagagccaggtttctgcggcactgaaacaaggccaaattacaccaacagagctc

SEQ ID NO: 104436 - DNA, 100 bp, Homo sapiens
cgaaaactccaccgtagcccttgccaaaggacactgcccatctctaagataagaacctggaaaggggactctgttggccattggaaattgcagaataatg

SEQ ID NO: 104437 - DNA, 102 bp, Homo sapiens
caccagcaatgagaggacccgcgtgggcaccctgcaggtggtcagacatgtcatcaactcagctggttaatttggagtggcccctggagtcagtttcctaca

SEQ ID NO: 104438 - DNA, 100 bp, Homo sapiens
ttggacaacatgtcccaacattacatcccaagagttggaaactcaactattggaacaatgtactgttgacacaagtgttgctaaagaacagagccttccc

SEQ ID NO: 104439 - DNA, 83 bp, Homo sapiens
cgggccgcatggcgggggccatcgcgcagggcctcatcagagcagacaatgcagatcttcgtgaagactctgactggtaagac

SEQ ID NO: 104440 - DNA, 96 bp, Homo sapiens
gcccgtagccgggctgggccagaacagcccaagatggccgacttcgatgatcgtgtgtcggatgaggagaagttcgtgccctcgtgaggctggcat

SEQ ID NO: 104441 - DNA, 82 bp, Homo sapiens
gccgattcctcctccttggtcgccgcgtccttggctggcgtattctgaaagtcaagaagacatcatccggaatattgccagg

SEQ ID NO: 104442 - DNA, 100 bp, Homo sapiens
tcagttatcaagctttagagcctggctactcacagttgaagcctgattgcagggctccatggagaacgagcctgtagcccttgaggaaactcagaagaca

SEQ ID NO: 104443 - DNA, 83 bp, Homo sapiens
ccggcaaggaggacacgggcacctttgacaccgtcctgtgggccatagggatttcatgcatcaccctgacagccagtggaagt

SEQ ID NO: 104444 - DNA, 100 bp, Homo sapiens
gaaaaaatggaaatactgtgctgtctattacatcatccagatacattttgtcaagggcagaagctcctcctggggtagagacagatcttattgatgttgg

SEQ ID NO: 104445 - DNA, 90 bp, Homo sapiens
ctgggagcagtggccatgctgtgcaaagagcaagggatcactgtgctgggcacagtcgtagtgccaactctggactctgttttgtatgac

SEQ ID NO: 104446 - DNA, 98 bp, Homo sapiens
gcgagcgggtgtgggcgctgttcgacgtgcggcccgaatgccagcgcctcttctaccggggcaagcagccgcggcgagtcctttgcacatgttggcaa

SEQ ID NO: 104447 - DNA, 90 bp, Homo sapiens
ccaggcgcggagggaagacgccctggtgctcaccaagcaagctctgcttatgataatgtcaacaaagttcgagtagctatcaagaaaatc

SEQ ID NO: 104448 - DNA, 83 bp, Homo sapiens
ctaaaatttgatggttgttactgtgacagtttggaaaatttggcagatgcccaagaagatgaaaggattgttcttgttgacaa

SEQ ID NO: 104449 - DNA, 90 bp, Homo sapiens
gctagaactcagttgtgcgttgcggccagtcgccactgctatgatgattattctccaccgtctaagagaccaaaggccaatgagctaccg

SEQ ID NO: 104450 - DNA, 75 bp, Homo sapiens
tggcagtacctgaccactctctcccagaaactgaggcttcttgaagagcttgaagacacttggctcccttatctg

SEQ ID NO: 104451 - DNA, 75 bp, Homo sapiens
gggcggattccagccccgagcgggacagcgcggcggggagcgacgagacagagcgggatgccaccagcttgtcca

SEQ ID NO: 104452 - DNA, 100 bp, Homo sapiens
ccttcacctttaaatggatgaccatgtcacaatcaggaagaaacatctccaaagacccatctttaggatcttatgaatccttcagtggtctcccttacac

SEQ ID NO: 104453 - DNA, 75 bp, Homo sapiens
acagaaacctcgtctccctggaattacctctggactacaaatttacaagattctcttcaagcaattcaaaaacag

SEQ ID NO: 104454 - DNA, 75 bp, Homo sapiens
cccggcccacagtgggggtgtgcaaacccgagagaactgggtcacggtctagatcacattctcgatccagaggaa

SEQ ID NO: 104455 - DNA, 95 bp, Homo sapiens
gccccgctccccgaaacgtgaccatgtggattcaacagcttttaggactcagaaacttgaagggtcaaagtgcaaagggcagcttttgatttttg

SEQ ID NO: 104456 - DNA, 90 bp, Homo sapiens
ggacccccctcagcccctccctgcagattgcatgtcccctggaaggaggtcctgctcacaggattcactccttctccagttgcacagcca

SEQ ID NO: 104457 - DNA, 73 bp, Homo sapiens
cctgagcgcaactagcggcgggtcgtgggcacctccagattgaagatggaaaatccccaagacattttctcaa

SEQ ID NO: 104458 - DNA, 90 bp, Homo sapiens
acaaagcgaggggcacacctgaaccggggctggcgggaagaggagccttatgtatgtggttgaaaccacctgtactactggaatgaaagc

SEQ ID NO: 104459 - DNA, 100 bp, Homo sapiens
gaggggaacactggagactgggagatggcagctgcacttcttgcggctggatcacagatatgcaaaagttataagggagagggtcggcagcagatttgta

SEQ ID NO: 104460 - DNA, 102 bp, Homo sapiens
ttccgggagcggatggagaagcagcaggttcgagtctccacgccgtcagctgagaagagtgagggccgaatccgggtgcatggtattggcgggggccacaag

SEQ ID NO: 104461 - DNA, 117 bp, Homo sapiens
ctcgagcgctcaggatggaggaagactcgatccgcctgcctgcgcacctgcaaatggctgcaagcaactgacctcactagagaagtgtaccagcatttagcccactatgtacccaaa

SEQ ID NO: 104462 - DNA, 96 bp, Homo sapiens
cggcaagctgccactgtgggcaaagcggctgccctgccctctgagctcaggccccgccccttttaaattctgtgcagaccatagtgctgctcaacc

SEQ ID NO: 104463 - DNA, 74 bp, Homo sapiens
tttaaagctgagctgcgaggaaaatggcggcgggagatggcagaaacggtggacacaagcgaaatggtcaacgg

SEQ ID NO: 104464 - DNA, 100 bp, Homo sapiens
gtactgtgggcctggagccaagcccctcttcaggagtaagattttgatccaaacaatatcttcaaggcattctttggcggtcctggcggcttcagctttg

SEQ ID NO: 104465 - DNA, 98 bp, Homo sapiens
cgcgccaagatcgccgccaacctgcagtggatctgcgccaaggcctacggccgaggacccagtggcttttaaggatgtggctgtgaacttcacccagg

SEQ ID NO: 104466 - DNA, 90 bp, Homo sapiens
gacgggttgggcagcctgtgccgccgccgccgctttgtaagaggcacattggcagttcaaaaggtgatgacctatcaacagccattctca

SEQ ID NO: 104467 - DNA, 50 bp, Homo sapiens
cttgggccggggatttaacacagggattgtggtccatcaggagtctgtgt

SEQ ID NO: 104468 - DNA, 90 bp, Homo sapiens
aagaatttcaacaatctctatggcaccaaagttcctcagagccttcaaactttaagattgaaatcaagacagtctgcttggctaatgaac

SEQ ID NO: 104469 - DNA, 100 bp, Homo sapiens
ctgcctttgacctttttgaagcctttgcaaaataccttctccaggcaaattccgttcccctgcagcaccatctcctttggctcttcggcaaccagtgaaa

SEQ ID NO: 104470 - DNA, 76 bp, Homo sapiens
ttcgaagtctcagcggtattctggtgcttatggtgcctcagatacactctgtgcagttttagagagagacacactc

SEQ ID NO: 104471 - DNA, 100 bp, Homo sapiens
acacagtcacggcagcccacatcaagaagttcaccttcgtctgcatggctctgtcactcacgtggacagaggactgcagaaaatcaacctatcctccttc

SEQ ID NO: 104472 - DNA, 75 bp, Homo sapiens
gcagatttcccaagagcagcggaaaatgatccagtcacagcatgttggcagataaattgaacatgactccagaag

SEQ ID NO: 104473 - DNA, 75 bp, Homo sapiens
aagaacggaatttcaggccagggctggatctccagaactgttctctggaggaccctggtccaaactttcatcagg

SEQ ID NO: 104474 - DNA, 100 bp, Homo sapiens
aagttctccatcttctattgagagtgaagatagtccaagtcctaagagacagcgcctctctcattcagtctttgattatacatcagcatcaccagctccc

SEQ ID NO: 104475 - DNA, 101 bp, Homo sapiens
ctggagcctcagttggaagcagccgatccagcctgcggagcctgtggggcaggatgccggaccagatctctgtctcggagttcatcgccgagaccaccgag

SEQ ID NO: 104476 - DNA, 75 bp, Homo sapiens
aacgagtactgtgggcctggagccaagcccctcttcaggagtaaggtagaagagctgggcctggaacccagccct

SEQ ID NO: 104477 - DNA, 90 bp, Homo sapiens
gcagtctttgctacgtacagcaaaaggtcctagcagaagatgtgactcagactgcctctgggtggggctggctggcccacagatcctgcc

SEQ ID NO: 104478 - DNA, 99 bp, Homo sapiens
aattggtgtaagacatcacaatcccattattcagagcgcgtatggagtggaaacgcttgtagggcttcaccaggaatgtatcctgtcaggtataatgtc

SEQ ID NO: 104479 - DNA, 50 bp, Homo sapiens
cagcttccccattatttcgaggaaggaattgttgacctcctgtactggag

SEQ ID NO: 104480 - DNA, 75 bp, Homo sapiens
aaggtctctggagacatcttcagcaggtacctcaataataatgagttgacagcggtaccatccctgggcgctgct

SEQ ID NO: 104481 - DNA, 74 bp, Homo sapiens
gcagccgtccggagccagccaacgagcgaccagcattctcgaaattggaggactcctttgaggccctctccctg

SEQ ID NO: 104482 - DNA, 83 bp, Homo sapiens
cgagcccaaggcaattgatcccaagttgtcgacgaccgacagggtggtgaaaggatgattgactgggtgtcctggcccctggg

SEQ ID NO: 104483 - DNA, 82 bp, Homo sapiens
cagagctgtgcctcccagcaccacagtccttctgcagtccctcgtccagccacccccagatcagtaaccctgtacagggact

SEQ ID NO: 104484 - DNA, 82 bp, Homo sapiens
ccaagacagagcgctactcctggcagtgcgtcaatcagagcgtcctgtgcggcttgggcactgtttaaaggaaagttccgag

SEQ ID NO: 104485 - DNA, 75 bp, Homo sapiens
tgttggattgaaacagctaatcgtttttagaacttcagccataaaaatgggcagaattttccttgatcatatcgg

SEQ ID NO: 104486 - DNA, 98 bp, Homo sapiens
ttgctgcagcagcaggaggaggaccgcagcaaggctgaagccgacgtagcttctctgaacagacgcatccagctggttgaggaagagttggatcgtgc

SEQ ID NO: 104487 - DNA, 100 bp, Homo sapiens
tctaattttcattccttcaaagcgtgccctggacttcagggagagcagggaagctgagccccacccgctgtgggagtacccatgccgcagcctctccgag

SEQ ID NO: 104488 - DNA, 82 bp, Homo sapiens
ccttagctgtgctcgcgctactctctctttctggcctggaggctatccagcgtaggagatcaaatcattgaaatcaatgggg

SEQ ID NO: 104489 - DNA, 135 bp, Homo sapiens
aaggaagatgcattttctaagctgaaggagaagtttatgaatgagttgcataaaattccatgtaatacaggagttgatggcaacgatggttactcattatgaaccacactgaaacgaccttcaattcaatttcca

SEQ ID NO: 104490 - DNA, 75 bp, Homo sapiens
catcgacacccccgggatcctgtctggagagaagcagcggatcagcagaggcagtggctggcctacagccgcctc

SEQ ID NO: 104491 - DNA, 100 bp, Homo sapiens
tttacatgttgaatccttgcagcactaaaatttggtatgatctcgtgaaaccttgagagaaactgaatgacgaatgaaactattgttcctgtttcacaca

SEQ ID NO: 104492 - DNA, 100 bp, Homo sapiens
aggcgccgagagcggctccgcggcggggctgctacccaccagcatcctccaaagcactgaacgcccggcccaggtgaagttcatccacgaccagacctcc

SEQ ID NO: 104493 - DNA, 96 bp, Homo sapiens
tccttcctcatcgtgcttgtcaacaaggcgctgctgaccacctacgggaaggagggagccccaggaacaggagtcccaccgaagaactgctctctg

SEQ ID NO: 104494 - DNA, 100 bp, Homo sapiens
gcacctcttactgcctcctcactctggaaccaaatgccttactatggagaacttaatgttctggatgatattttaactgaagtaccagaacaagatgatg

SEQ ID NO: 104495 - DNA, 83 bp, Homo sapiens
gttttgacaacatcgacatcaagtcggccggggatttagacctgcctagagctggaacgttacctccagagcgagccctgcta

SEQ ID NO: 104496 - DNA, 96 bp, Homo sapiens
tgagaagtcgtcctcttcagaaagtgagggagataaatctgcaggacatcaaggaagatttagaattggatccagaggaaaacagcaccctgttta

SEQ ID NO: 104497 - DNA, 51 bp, Homo sapiens
tggagatatggcgcaactgcggcgcatcatggaagggaagtggttgctgtg

SEQ ID NO: 104498 - DNA, 99 bp, Homo sapiens
gaaaggtcatctatgaagggctcaccaactacgagaaggccaccaatgccaatccctcccagctcttcggtgcgggcggcacccagagactcacccgtg

SEQ ID NO: 104499 - DNA, 98 bp, Homo sapiens
tggagaagaatggaggaccatccataattcctatctttaaaagagcgcctttccttcgaggagctcaaggcatttttcaaaatctgacagtttttctc

SEQ ID NO: 104500 - DNA, 100 bp, Homo sapiens
tcaggctccggcgtctgcgcttccccatggggctggcctgcggcgcctgggcgctctgagagaccatggcgagcccagggaaagacaattatcgaatgaa

SEQ ID NO: 104501 - DNA, 82 bp, Homo sapiens
agacatcgagatcaatgaacctttagatgaatttacaggtattcttggctgaacagtttgagttccttcagccacatctgga

SEQ ID NO: 104502 - DNA, 73 bp, Homo sapiens
ggacaatgataagactcgctatatggggaagggtgatgtgtccaatctagatcccaacttctcatttgaaggc

SEQ ID NO: 104503 - DNA, 106 bp, Homo sapiens
tgaccttcctcagactgagaactgtttccagtatatacatcaagtcactgagctctggattaatcgaattacagctgctagccaggaacatggactgaagtatcca

SEQ ID NO: 104504 - DNA, 100 bp, Homo sapiens
cctttggggagctcagattggagtaaggcattgctgtcccttgcagggttccctctcccagcctgtgctgactcagccatcttcccattctgcatcttct

SEQ ID NO: 104505 - DNA, 106 bp, Homo sapiens
tgaaatctggcatattagcgctagccctgcagacagaggtgtgctgacgacctgctacaacagaatacgaggatgtcgtccaggaaagattgtgcagatgactgaa

SEQ ID NO: 104506 - DNA, 82 bp, Homo sapiens
gaagttctcgcgagagtcgtctcctcgataccaagtttggtgcacctcgatttggaggaagtagggcagggcccttatctgg

SEQ ID NO: 104507 - DNA, 51 bp, Homo sapiens
ctctatcccaggaatacagctttgcattagctccggaccaaaatttaacag

SEQ ID NO: 104508 - DNA, 96 bp, Homo sapiens
cttatccagctccagcattaaatcgggatccagttcttccagcatcccagaacctatctacaagacctcttgtgctttgactattcatgctattgg

SEQ ID NO: 104509 - DNA, 90 bp, Homo sapiens
tggagggagaatttcaagaactgcaggtaccaggatcatctatgaccggaaattcctgatggagtgtcggaactcacctgtgaccaaaac

SEQ ID NO: 104510 - DNA, 50 bp, Homo sapiens
ggaaacacatttcatatactgcagcaggggaaatgctgtctgtagctgag

SEQ ID NO: 104511 - DNA, 100 bp, Homo sapiens
gccttctggagagctgaccaaacactaagggcaaactgtccttggaagaattcatcagaggtgccaagagcgacccctccatcgtccgcctgctgcagtg

SEQ ID NO: 104512 - DNA, 50 bp, Homo sapiens
agccaatgcccaagacattataaacattgccacaatctctccaggaatgg

SEQ ID NO: 104513 - DNA, 75 bp, Homo sapiens
cggtcaaaaaggccaaaagcccaacaccgagcccatcaccgccaagagatgtacgaagtaggtccaaagttgttg

SEQ ID NO: 104514 - DNA, 74 bp, Homo sapiens
cgggcatcctggtgcagctcctggtgcgtggcccagcctcagagattttttatcaagcagaaatgcatcgaaca

SEQ ID NO: 104515 - DNA, 100 bp, Homo sapiens
caaaactgtcccgggtgggaagaggaacagcctatgtgggcttccacggaggcaacaagattgacctggctgaaaggagagaggtttcccagcagcgagc

SEQ ID NO: 104516 - DNA, 51 bp, Homo sapiens
ggggcagaatacagagatatggaatcagagcatgtaacttctaatgccagc

SEQ ID NO: 104517 - DNA, 125 bp, Homo sapiens
cgcgcgggtaggaaccgtccacggccttaaagaagcctcctcaccagagcagcccgacggccatggaggctgaagagacgatggaatgccttcaggagttccctgaacatcataaaatgatcctc

SEQ ID NO: 104518 - DNA, 50 bp, Homo sapiens
ttcaacccgtggctgatagctgaaagtttgaagaaaacaggtctgaaaca

SEQ ID NO: 104519 - DNA, 100 bp, Homo sapiens
tacagatcacacgcccactaaagcccagaagaatgtggctaccagcgaagggtttcgaaaaaacgatgaaatgaaagctatggatgttttaccaattttg

SEQ ID NO: 104520 - DNA, 96 bp, Homo sapiens
aagcgccctggagagaggagagaaaatgtccactggacctctgtccagattgagaggatccagaatccagatctctggaatagctaccaggcaaag

SEQ ID NO: 104521 - DNA, 100 bp, Homo sapiens
tgcattccagtgaagctgcaataatgaataattcccaaggggatggtgaacattttgcacacccaccctcagttgttgacctcctgtactggagagacat

SEQ ID NO: 104522 - DNA, 100 bp, Homo sapiens
gtgaagctggaacagccagaattggacccgaaaccatgcctcactgtcctaggcaaggcaattcaggactcggaagtgacatcactcatctggtctcagg

SEQ ID NO: 104523 - DNA, 100 bp, Homo sapiens
aacaaaagaaaacgaaaacgcgtactaaaatctaaaacttacctggatggggaaggctgcatagatgcctgtcttagatgtcaagctgaaaacaaacaag

SEQ ID NO: 104524 - DNA, 100 bp, Homo sapiens
gactcatccccgccctgtgggagaagcacagtccacaggagtcggtgatggaggcaacgagcttgggatgggtaaagtcaaggaggctgtgaggaggcac

SEQ ID NO: 104525 - DNA, 50 bp, Homo sapiens
ggaccaatgggtccccagctcttcatatggagcagcatattgtatgggac

SEQ ID NO: 104526 - DNA, 83 bp, Homo sapiens
ccacgcgggtggaggtgtccgtgtcctgcagcagcctcccgcgacgatgcccctcaacgttagcttcaccaacaggaactatg

SEQ ID NO: 104527 - DNA, 89 bp, Homo sapiens
cctcctcctaagagatctgcaccttcaggaccagttcgcagtagcagtggaatgggaggaagagccctttggaagatcattaagtttca

SEQ ID NO: 104528 - DNA, 76 bp, Homo sapiens
actcctcagatgccaccaacaactccatccagcagtttcttcaccaagagaatggatcttggagaatgtctgaaag

SEQ ID NO: 104529 - DNA, 78 bp, Homo sapiens
cagatattcaaaacgtcagcaaccaaaggcaccggccttgatgaggcaatggaatgtgttgatctacagcagcaaatt

SEQ ID NO: 104530 - DNA, 82 bp, Homo sapiens
gaggccactaagcatttagaaggtaaaggagctggaagtgcgaaaattgatgcatgtgagaggagatggaccctggtattac

SEQ ID NO: 104531 - DNA, 97 bp, Homo sapiens
cacagagcagattctgaaacttcttgacaatttgcttgcgcttataaggcctgatcacttgaacggacatatcaagcaggtgcacacttctgagcgg

SEQ ID NO: 104532 - DNA, 100 bp, Homo sapiens
ctagcggcgggtcgtgggcacctccaggcatgaattgctggaggaagcccggagacaaggtttaccttttgcccaatgggacgggccaacggttgtggtc

SEQ ID NO: 104533 - DNA, 90 bp, Homo sapiens
cccagctcaagaacggcagccttgactccccagggaagcagggagcgctgacccagctgatccagctctatcatcgcttccaccgggtgc

SEQ ID NO: 104534 - DNA, 80 bp, Homo sapiens
ctgcaacggaaggaagatagttcgagagaagaaaattttagaagttcatattgacaaagtttttcagaagaagtgaagtc

SEQ ID NO: 104535 - DNA, 82 bp, Homo sapiens
gacaagctgagcttgccgcacaaaaagctagagaggtgtaaactgttttacaagaaagacaatgagtttaaagagaaaggca

SEQ ID NO: 104536 - DNA, 100 bp, Homo sapiens
ggtgtctacggcaccagcctcctgcgccacgccaaggtcgtctgggagatgctcaagtttgaagtggcgctcagaggtggggctggtgtccgagcacttc

SEQ ID NO: 104537 - DNA, 71 bp, Homo sapiens
gggagaaagctccgggaaaccctgagcagccagtgagccagagcgaggaaggctaactccctcaccagaca

SEQ ID NO: 104538 - DNA, 75 bp, Homo sapiens
ggagatgtattacaacccccaggaactagtggtgattgatatgcccgagcacaaccctggcaatttgggaggaac

SEQ ID NO: 104539 - DNA, 74 bp, Homo sapiens
agatattctccttttcaaaaatcttgatcagctttctccatctctggtgaaagtagccaagtggtcatgatcgc

SEQ ID NO: 104540 - DNA, 82 bp, Homo sapiens
acaacgaactagcacaacgaggaattagtaagctgtgtgggctggactactgctgaagagctgtattcatgtagtgatgatc

SEQ ID NO: 104541 - DNA, 95 bp, Homo sapiens
cgacctcttctgcctcttcatggcaataagagctaactgccatcaagagccatcagtatgtcttcaagctgcatgcccagaaagctggattggtt

SEQ ID NO: 104542 - DNA, 74 bp, Homo sapiens
tggcggatgcggtcgtgaagataggatgccttccgcgccttccaccctgacctggaattcgtgggcaagttctt

SEQ ID NO: 104543 - DNA, 89 bp, Homo sapiens
ctgatgccaacagtgtaccagcagggcgttggctatgtgcccatcacaggtgagcgagtgctgtgctttcatgggcctcttctttatga

SEQ ID NO: 104544 - DNA, 83 bp, Homo sapiens
aggattccaagtaactcttatttggtcacttggtacatatgaccgtggtctccggcagcaacgtgactctgaacatctctgag

SEQ ID NO: 104545 - DNA, 100 bp, Homo sapiens
tggtcgatggaacgattgcaggcacctccgaaacccgattcaggtttgctggatggatttatgacgaatgacatcttcgagtggtccagggaccaccgag

SEQ ID NO: 104546 - DNA, 98 bp, Homo sapiens
cgctgggcgtgaggggggccttagagggcctccccaggccgcctccgcccgtgaaggagccgaaccaagaacatgatgtggtatggagttcttggaac

SEQ ID NO: 104547 - DNA, 100 bp, Homo sapiens
atgctcatctgaaattcatcacctctctggagtcttcaaactgaccaagcattgaaaaggagccaaaaacctgtatatcatctccgtgaaggggatcaag

SEQ ID NO: 104548 - DNA, 137 bp, Homo sapiens
ctttacccagaaatacccaccagtaaagtttttatcagaaaaggatcggaaaagaattttgcccagcgacttctccgtgtcccttaaagcgtcagggaagaacaaacacttcaaggtgcagctcgtggacaatgtct

SEQ ID NO: 104549 - DNA, 106 bp, Homo sapiens
ggagtttgtacggaaagaagatatgacctatgcagttcgaaaactggataacactaagtttagatctcatgagcttcagctttagctgcagctgcctctgttcagc

SEQ ID NO: 104550 - DNA, 100 bp, Homo sapiens
ctcaagcggaggcgcgcggaacagtcgccgaggcgattcccgcccagacgtcctggggtagaaacagcttccagcaacacccatggcaattaacacagag

SEQ ID NO: 104551 - DNA, 100 bp, Homo sapiens
atgactggctctgaagagggagatccccgaacaaagagcagccttggaaagtttgacaaagtggttgtgtcaaaccgattggtgacatctccatgctgta

SEQ ID NO: 104552 - DNA, 51 bp, Homo sapiens
gccggtggacgtacccagcgctcggttatctaccttgcctgctcctatgcc

SEQ ID NO: 104553 - DNA, 89 bp, Homo sapiens
atcggcggagaccctcgaagtgcgcaaacttgacactcaccctgaccgggactttcagttaccttgatgatgtcccatttaagacagga

SEQ ID NO: 104554 - DNA, 75 bp, Homo sapiens
ggacatgaagttcacctactgtgatgacagccacctcctaagctgcccaacggtgtgttcacccccgacttccag

SEQ ID NO: 104555 - DNA, 98 bp, Homo sapiens
cctgtcggcagactggtgacttcacttttgagtgcaactgccttccagagttgctggagaatgtaaccctaatccataaaccagtgtcgttgcaaccc

SEQ ID NO: 104556 - DNA, 98 bp, Homo sapiens
cgttgtcgtttttagaggcatttcgtgatccatggttgcgctcccgtgaagagcgagtctagagaaggaatccgaagtttggaaattttagcattcag

SEQ ID NO: 104557 - DNA, 75 bp, Homo sapiens
caacgacgttccatctgtggaaggacctaccaaccagtaaaggcatgacttcctggcaccacagggaaaatcggg

SEQ ID NO: 104558 - DNA, 76 bp, Homo sapiens
cccggaggctccagaaacgggtcctgctgctcaccaaggtcctctcagggtgcgccatcattgtccgaggtcagcc

SEQ ID NO: 104559 - DNA, 74 bp, Homo sapiens
ctgaagtcccaaggagccgccctgcagttacagaatgtctgaaggggacagtgtgggagaatccgtccatggga

SEQ ID NO: 104560 - DNA, 80 bp, Homo sapiens
agagtttgaggagctaagatcatgtagagagtgatagatggggcaagctaccattatcacctaaacaaaaaactacattt

SEQ ID NO: 104561 - DNA, 80 bp, Homo sapiens
cacttccctgtactctcatcgctctcggcctccgacacggtgaccattgtgaggtagatattttgttctaattttccaga

SEQ ID NO: 104562 - DNA, 82 bp, Homo sapiens
gagaactataagagcctggtgagacggagctatcggcgccgcggcaagagccagatcagaccaaacattgtctggcttgcac

SEQ ID NO: 104563 - DNA, 90 bp, Homo sapiens
aaagaatatagatggttttgaaaagttcatgctgtcccttcattgaattttaggttgcttatcaagtgtcccacaaatgaaaaaaatttc

SEQ ID NO: 104564 - DNA, 78 bp, Homo sapiens
attttccttgatggtcaaaagattaagctccagagtttcctattttggagaagcagaactggttgattcatcttcatt

SEQ ID NO: 104565 - DNA, 83 bp, Homo sapiens
tgggaacggagggctgcagcgcccaccctgcgccagagaccagataaattaattggccttggtcctcacagctccaaaaagaa

SEQ ID NO: 104566 - DNA, 80 bp, Homo sapiens
cgcggatcccagcttcctgcagccaggctgaaggtgatgtggccgccctcaaccgacgcatccagctcgttgaggaggag

SEQ ID NO: 104567 - DNA, 82 bp, Homo sapiens
acccaccgccgccgcctcccaggatcagttcttaagagcagccccggtaactggaggaatgggagccgttttgatgagaaaa

SEQ ID NO: 104568 - DNA, 50 bp, Homo sapiens
caacaggaaaggcaatgttatattaaggaattacatgaacgacagccttc

SEQ ID NO: 104569 - DNA, 50 bp, Homo sapiens
gctgcatcatgcggcagtgcatcgcgcttcccaagctcttccttcagtcc

SEQ ID NO: 104570 - DNA, 75 bp, Homo sapiens
tgaatcaagctgcaaagtaactagtcatacaggagtggcagaagagaggcggacagccctggcagctcatcgagc

SEQ ID NO: 104571 - DNA, 74 bp, Homo sapiens
agaacagacctatcaacatgaagaagatgaagaggacttctatcaaggacctctggtcctcaatcgagttcctc

SEQ ID NO: 104572 - DNA, 90 bp, Homo sapiens
tcaacaccattaaggaatggcttgccaagaatcaccatgagcatggtaagacacaaggatggtggctattccgaggaagaggacgtgaag

SEQ ID NO: 104573 - DNA, 88 bp, Homo sapiens
ggaacgggtgtcctgctactcctgctggggctcctccagccccacagagcaggtgttgccaatgctgcggttcgtgcagaagcgggga

SEQ ID NO: 104574 - DNA, 85 bp, Homo sapiens
gagggtgaagctggcggagcaggaggatgggcgataaaaatttccaatgggcaaatactggagcagctgtgtttggaacacagtc

SEQ ID NO: 104575 - DNA, 75 bp, Homo sapiens
ctgtccttcatgcagtctctcattggcttctttgagactgaaatggcagggtatcagctctgtgataacagcgtg

SEQ ID NO: 104576 - DNA, 100 bp, Homo sapiens
cggctcccctctcaggacaacccagatgtgcaacaaagtgcgatggttttaaaatcaaagatgggaaaatcggagaaaattgcccttccccatggccagc

SEQ ID NO: 104577 - DNA, 83 bp, Homo sapiens
cccgagagcaacaaagcaggcgactacagccacgtgaaggagtgcctgtgaagaaaacggggtattgccctgaggcttatatt

SEQ ID NO: 104578 - DNA, 82 bp, Homo sapiens
cgcttcggccgaaggcccgagcgcccgaggcgtctgggatggtgtgggaccggatgtgaagttcatttccaatccgccctcc

SEQ ID NO: 104579 - DNA, 75 bp, Homo sapiens
tcacgctgctcaatgagctgaagcgccgtgggaagaggtgcacaaatggagtccagaggaggctgtaagagccat

SEQ ID NO: 104580 - DNA, 97 bp, Homo sapiens
ggactctttcaggttctgaaagtcttagagagcctccttgtgtctctggtaaccaccgtggtggtgtttgtggcctcgatggtgttaggagaatgcc

SEQ ID NO: 104581 - DNA, 74 bp, Homo sapiens
cgcacgccgcggccgaaaccgggtagcagtcaccattatgctcaaagcggtgatcctgattggaggccctcaaa

SEQ ID NO: 104582 - DNA, 89 bp, Homo sapiens
ttccagaagaatcatggcacagaactagaggctgctatccagccagatactagcctggtgtcagtcatgactgtgaacaatgagattgg

SEQ ID NO: 104583 - DNA, 100 bp, Homo sapiens
gcgcgcggcaggggcggcggcggcgacggccggaggtgtacggtcacatttagggcaggcaaaacataagggatatagccctcctgagagtagaaaatct

SEQ ID NO: 104584 - DNA, 50 bp, Homo sapiens
cttctcctgctgcgtgccagatcctgcgagcccaaatcttgtgacaaaac

SEQ ID NO: 104585 - DNA, 96 bp, Homo sapiens
gtgaaacagattggaaattaattgctatcaatgcgaatgatcctgaagcctcaaagtttcatggatcttcagcctgttaaacaagaaaacgaaaaa

SEQ ID NO: 104586 - DNA, 82 bp, Homo sapiens
caagagaaagaaggttaagctggctgtcctgaaatattataaggtaactaggatttctacctcaaccgcgagacctatgcaa

SEQ ID NO: 104587 - DNA, 101 bp, Homo sapiens
ggacactttgttattggagaaacatgcagattatatcgcatcctatggctcaaagaaagatgattatatagtcgtgcaagcactgcagtgttcccattatt

SEQ ID NO: 104588 - DNA, 100 bp, Homo sapiens
tgatgaattgcaagtttgtgccccatagctgcacagattaaatctcttgatgaacagtgtgtggttggcaaaatttccaagcactggactggaattttga

SEQ ID NO: 104589 - DNA, 100 bp, Homo sapiens
tttgtgaattcacatcccaagagttggataatcttcccctccatcgaggtatccagctcacatagaagacattgactacgaggaaggaaaagtactcatc

SEQ ID NO: 104590 - DNA, 75 bp, Homo sapiens
atgatggatccatttctcctattgaggagtcaacccatcactggtgcaagctatatttaacggagatcctgatga

SEQ ID NO: 104591 - DNA, 75 bp, Homo sapiens
caccgacagccgacgcgcagatagcagagccatccttgggatgcgtctgttactagagtggagagtctaccttcg

SEQ ID NO: 104592 - DNA, 50 bp, Homo sapiens
tgaaaagggatggaactacattcttgagtcataccctaatgatcccagca

SEQ ID NO: 104593 - DNA, 75 bp, Homo sapiens
cgggccttcaggatcttctccagccagtggatgtccaaacggggattcagcgtccgatcctttggaacagggact

SEQ ID NO: 104594 - DNA, 100 bp, Homo sapiens
cagacctacggagggagctggaaattcctgacgttcattgatctgaacaaatcacctgctgcagtaacagaaccagagacaaataaatttgatagtaccg

SEQ ID NO: 104595 - DNA, 80 bp, Homo sapiens
ggccaagaacccccaggagcagaagtccttcttcgccaaatacgagaactacgatgacccgcacaaaacccctgcctccc

SEQ ID NO: 104596 - DNA, 97 bp, Homo sapiens
tttgtaatggcagctgggacagcaaataccatgcacttattgattaagtaccaaaaacttctgtggacaggttctgatgactgtcttgtgaaaatat

SEQ ID NO: 104597 - DNA, 98 bp, Homo sapiens
ggagatgcagctcctgcttaccgtctactacctggtccagctggtgcgccgcgtggctcctcgtttctccatccctcccagcagccaggaggtgatgc

SEQ ID NO: 104598 - DNA, 89 bp, Homo sapiens
aggacatcttcttctctataggattcggaaggacgttgtgagttattctccccacctcagaagtaccagcttttggtgtatcatgcaga

SEQ ID NO: 104599 - DNA, 99 bp, Homo sapiens
gccagatctcagaggagcctggctaagcaaaaccctgcagaacggctgcctaatttacagcaaccatgagatcaagggaagtagccttggaagcacaaa

SEQ ID NO: 104600 - DNA, 74 bp, Homo sapiens
ccagttcctcgtgcccatcgccacgagggtgtgaagacagagaatgaccacatcaacctgaaggtggccgggca

SEQ ID NO: 104601 - DNA, 100 bp, Homo sapiens
tctacgttcattcagggcctgctgtggaagaccagccccaaaggaactgatgaggagtttcaacagagacaggcggattttttgtgccattctctccact

SEQ ID NO: 104602 - DNA, 75 bp, Homo sapiens
cagcgggcactaccaccctcaccccgtcctcacaagtggtgtctatcgaagatccctttgaccaggatgactggg

SEQ ID NO: 104603 - DNA, 83 bp, Homo sapiens
caccaaagcagtgtcctccgtgaaattcagcccgaatggagagtggctggcaagttcatatagaagaagtcagagatgccatg

SEQ ID NO: 104604 - DNA, 100 bp, Homo sapiens
ttctctctcctccaactttgttggagggtccactcagactctcacctttgcttccagggggaggaggaagagttacaggcccaaaaactgcgactggcat

SEQ ID NO: 104605 - DNA, 99 bp, Homo sapiens
taacaacgcgcgcttgagttggtataaactcctgaagggagatatacttcccaattcatcagattataagtcctcactcatagcactgactgctcataa

SEQ ID NO: 104606 - DNA, 75 bp, Homo sapiens
cactactgcagagccaccgtgtgctgggaactaaagctacccactgctgaaactccccttgccaggaacaggacc

SEQ ID NO: 104607 - DNA, 102 bp, Homo sapiens
gccgggggcagccgccatcggcagcgccaggttgaatcaagggattctttgaatagcatagccctgaagtttgatacaacacctaacgaacttgttcaatta

SEQ ID NO: 104608 - DNA, 51 bp, Homo sapiens
gcgcaaccacgagacggccttccaaggctctccagcagaactatctcctac

SEQ ID NO: 104609 - DNA, 74 bp, Homo sapiens
acggaccggaagtgctccagaactcaaggtaatagcctgcagctggtgttttgagaagccctactgctgaaaac

SEQ ID NO: 104610 - DNA, 99 bp, Homo sapiens
gagatgacctgctccatcaccaccacgtaaaataccatgaagattttgaaaaaacaaaggggagaggctttactcccgtcgtggacgatcctgtgacag

SEQ ID NO: 104611 - DNA, 50 bp, Homo sapiens
tggacctgtctgcgccatcttctcttgaggactcttgtgaagatatgagt

SEQ ID NO: 104612 - DNA, 100 bp, Homo sapiens
cggctctgtaggaaggaacttggttccccctccctcagcttccgccccaaaaggttgtatccacgccatgcaagtgcgctcaacaaccttggaacactga

SEQ ID NO: 104613 - DNA, 82 bp, Homo sapiens
agacctttgtgataatccacttccacttaatagtttactcctggcttgggggcattaggaagcactggaggctcttcgggaa

SEQ ID NO: 104614 - DNA, 100 bp, Homo sapiens
ctacagacagcggacattagtattgaagaaatgattgaaaagttacagaaggtctgccagcttacatttacccaaactgtccattactggaacctatgat

SEQ ID NO: 104615 - DNA, 100 bp, Homo sapiens
agccattttaccaagaaagttgggtttcttttactggcaaatagtacttcaagagcacagtcttatgtaagggcaagcaggaggacttcaagacgacagt

SEQ ID NO: 104616 - DNA, 100 bp, Homo sapiens
atgggctttacagatgtgggcccagaaaacaagccagtcagacctgtcatttactccatcctttatagtgatgctacaggacgaagaggaatggataaaa

SEQ ID NO: 104617 - DNA, 82 bp, Homo sapiens
caaagggctgggtgagatcagcgcggcctccgagttcaagacgcagccagtccagaatatgccttctgcatcctgtgataca

SEQ ID NO: 104618 - DNA, 82 bp, Homo sapiens
gatgagttgctattcacagggtccaaagcatggaagctccacaaagcagcagcctggtcaccttttctcttccaagtgccca

SEQ ID NO: 104619 - DNA, 83 bp, Homo sapiens
caccctcgtattctcctgcccttccccaggtactccaaagattcaggtttactcacgtcatccagcagagaatggaaagtcaa

SEQ ID NO: 104620 - DNA, 83 bp, Homo sapiens
atctaattttcttccagaatccaaaatcatttttcttgaaaaaggacaaggatttctctgcctcttccaaacttttcctccct

SEQ ID NO: 104621 - DNA, 90 bp, Homo sapiens
cttcatgaaaaagtaccattttgctgcttaagattagacaaggtaattaataatgcttgtgctactcaagccatagtgagtgtgttactg

SEQ ID NO: 104622 - DNA, 100 bp, Homo sapiens
gagggggaaaaaatcccaaggtctgcaaagaatgttgtaccatctttgggtaggcagacttccctgacgacatcagtgatacccaaagctgagcagagcg

SEQ ID NO: 104623 - DNA, 78 bp, Homo sapiens
gcaatgcctactctagtccaagtgtagtcctggcctcatacaatcatgatggagaaggtgcctgtaaaaagatgcaca

SEQ ID NO: 104624 - DNA, 75 bp, Homo sapiens
atgcatacttggaatgaatccttctagagacgtccacgggaaatcctcattgacgattcaatttgttgaaggcca

SEQ ID NO: 104625 - DNA, 82 bp, Homo sapiens
catggcccaggcagaccttgcagtcaaagtcaaaatgcagatcttcgtgaaaacccttaccggcaagaccatcacccttgag

SEQ ID NO: 104626 - DNA, 100 bp, Homo sapiens
ggccacgacccacgagatcatggggcccaagaaaaagcacctggactgacatgtctcaggaaggctatggaactagatctcaacctcctctggcccccgg

SEQ ID NO: 104627 - DNA, 90 bp, Homo sapiens
tgttcttcttcgagtatttgtagaagggttatcttatgatgaggcttttgctatggctaatgatcccttggaaggcttccatgaagtaaa

SEQ ID NO: 104628 - DNA, 83 bp, Homo sapiens
ttgatggaagcttgtctaggtggagagctctggaccattctcagggataggagttggcgatttcagcgtgtgggagttctctg

SEQ ID NO: 104629 - DNA, 100 bp, Homo sapiens
cctggatccccaggatctccaggctctcctggatccgtacctaaaaatacatctcagacggcagctattactacaaaggaagttctccagcagctgattg

SEQ ID NO: 104630 - DNA, 97 bp, Homo sapiens
aaaacccccatcctgggaaaaatggggaagctggataacaaagccattgacctttgccgattgtgttggggacgaacttcctttaggatgggaaacc

SEQ ID NO: 104631 - DNA, 100 bp, Homo sapiens
gaaacgatccgctcccaaaacgggtgaagtgatgaacctcctgatgttcctgtcgacgtgggatgggaaggtcccacagccggccatcctaaagccccgg

SEQ ID NO: 104632 - DNA, 87 bp, Homo sapiens
agaaaagcctctgggagcagaagggaggctccaagacctcatcaacaattaagagtcatcctttttgaacttccatgactcagactg

SEQ ID NO: 104633 - DNA, 50 bp, Homo sapiens
gccgatgaagtgcagaggtttttttctggggtattgaatggacaagtttg

SEQ ID NO: 104634 - DNA, 75 bp, Homo sapiens
cagcagccttgttagggcgtggcctgaggcttggataagtgggaaacaagtcaccaagctctccagaacatgccc

SEQ ID NO: 104635 - DNA, 100 bp, Homo sapiens
gaacgtgattgggaacctgctgacgtgcactgtgcccctggctgggggctcgcaggacttcactgaggatgtcaactgtgcttttgagttcctgctgaag

SEQ ID NO: 104636 - DNA, 80 bp, Homo sapiens
aggagagccctgctgctgaagagcagctcttgggagaggttggtgttcgaggaagagacattgttgttcttggtgtggag

SEQ ID NO: 104637 - DNA, 75 bp, Homo sapiens
aaagtatgagtggatatctctcaggtatatttgcttacttaaactaccatgttcctcgaacgagacgagaaatcc

SEQ ID NO: 104638 - DNA, 75 bp, Homo sapiens
ttacttttaattttgcaaagaatccaggacaaaaaggattagagtgttgcggagataggaacatgggagagaaac

SEQ ID NO: 104639 - DNA, 95 bp, Homo sapiens
gaaaagaactttgagagagctttgaaatacttcttacaggctacccatgttcagccaggtgtcatggagaaactccagctgggcccagagattct

SEQ ID NO: 104640 - DNA, 75 bp, Homo sapiens
gtccgtatcggctggtccctggactcctgcagcacccagctagctgtgtggagctgaaccggtctgcattcctgg

SEQ ID NO: 104641 - DNA, 100 bp, Homo sapiens
cccttctcaatggggctgccatcttctttcctaatcgacagacccgacggaaccatctcttcaccatgatggtttggggacgacatccctggaatggaag

SEQ ID NO: 104642 - DNA, 90 bp, Homo sapiens
gtgacatatcgttggacccagaattgaggaacaagaccctgcagatggagaagatcaaggctcgtttgaaggctgagtttgaggcacttg

SEQ ID NO: 104643 - DNA, 100 bp, Homo sapiens
ccgagaagcgctgtttcatcgaggaaatccccgacgagaccatggtcatcggtcaggcgggctgagggtggggacgcacatccgcgccaagaggaagcgg

SEQ ID NO: 104644 - DNA, 80 bp, Homo sapiens
ctcctactcctctttcacctgccaggttcaagtgtggtcactcacctgtctaccactcccgtgaaatggcagctcgtgcc

SEQ ID NO: 104645 - DNA, 50 bp, Homo sapiens
gaaaaacctcagcgacctgatcgacctgtgattcgcctttgccagtctca

SEQ ID NO: 104646 - DNA, 75 bp, Homo sapiens
accggatcaacttcgacaaatagaaaaggccgtggccggcaggtgatcgctgtggcgcgcacggctgacgtcatc

SEQ ID NO: 104647 - DNA, 82 bp, Homo sapiens
gttttctttgtggacatctgatcatggacatgatgcttcaggactgccccaaggcccgcagggaggtggagctgcactggcg

SEQ ID NO: 104648 - DNA, 98 bp, Homo sapiens
ccgccgccacccgcctcccaccatggctctgaagagaatccacaagattgtctaaagccccaggaaaaatggtggaaaattcaccgtcgccattgcca

SEQ ID NO: 104649 - DNA, 83 bp, Homo sapiens
gctcacagctgcccagctgaaagccaaggacctgaagaagtacggggctaccactgtggtgcgtgtgtgtgaagtgacctatg

SEQ ID NO: 104650 - DNA, 100 bp, Homo sapiens
gctaaatggctccctgattcatggagtttccagatgtcttggaatgcactgtatctcatgcagtagaaaagataaatcctgatgaaagagaagaaatgaa

SEQ ID NO: 104651 - DNA, 98 bp, Homo sapiens
cagccagttactatggcagttgcaaaatattcaggagaccgtcgttgccttgtatttccagagaacagccagagactgctgctactttgaaacgtacg

SEQ ID NO: 104652 - DNA, 101 bp, Homo sapiens
ccctggaggacacgctgctaggctaccttgctgatgacctcacatggtgtggtgaattcaacacttccagaaatttgtacatagattctaggcaaaatctc

SEQ ID NO: 104653 - DNA, 94 bp, Homo sapiens
attgaccccaaagttgcatttcctcgtcgagcgcaacccaaggtttggtgcacctcgatttggaggaagtagggcagggcccttatctggaaag

SEQ ID NO: 104654 - DNA, 116 bp, Homo sapiens
cagcatctggttcagctttatctatattttttgactgctctgctcctctatgctggacatcaaatttccaggccaggggttatcaccatgcaagctttgtcggaagaggaccggag

SEQ ID NO: 104655 - DNA, 99 bp, Homo sapiens
atcagtgctgctttctttaggacgaaagagaatgcagcttcatgagggaagacccaaacaaaaaagacaccgttgcagaaaccccaataaactagatgt

SEQ ID NO: 104656 - DNA, 74 bp, Homo sapiens
tgatggaggcagaggtaaacttggagagaaagagacaagcagtgccctgacccatgctggagcccatcttgacc

SEQ ID NO: 104657 - DNA, 121 bp, Homo sapiens
tctggacagctgcgacggcgcgctgggctggcgcggcctggttatttgaaggattgaaggcatttcgaggagtagataataaaattcgactgtttcagccaaacctcaacatggatagaat

SEQ ID NO: 104658 - DNA, 50 bp, Homo sapiens
ttctgctgcatttcctgcccagagctggttcctggaggagaaggacctga

SEQ ID NO: 104659 - DNA, 75 bp, Homo sapiens
ggaatcgtgagcgggcgggaggaggccggggaccacacagtgtgctgctctggttggtgaagaccagcctctttg

SEQ ID NO: 104660 - DNA, 75 bp, Homo sapiens
cccagacctgcagggttcgtggataataaactcaagcagcgagtcatccagccgattatgtttcgaggggaagta

SEQ ID NO: 104661 - DNA, 75 bp, Homo sapiens
tgcagttctttaattatgtcatgagaaaagatattgatgatgctcaaatacttccccgctcaactagagtcagac

SEQ ID NO: 104662 - DNA, 98 bp, Homo sapiens
gggaaagaggaagcaaatataataatggcagcacagagctacattcgagaaatgagccgtcagactgctacagcattacctaccggtacctcgaagtg

SEQ ID NO: 104663 - DNA, 90 bp, Homo sapiens
actgtctaaaggacctcttatctgctggaaaggtacttaaacttcacccttgtttagcccctattaaggttgctttggatgtaggaagag

SEQ ID NO: 104664 - DNA, 101 bp, Homo sapiens
tacaagtggaccaactatctcacaggaaatctactttcttcaatgtgttaaccaatagtcaggcttcagcagaaaacttcccgttctgcactattgatcct

SEQ ID NO: 104665 - DNA, 100 bp, Homo sapiens
aaaaataccaatagcaggaacggtggtgactagattagatgaaattgaagggaatgactgcacatttgaaatcactgatgacggtggatattccatgaat

SEQ ID NO: 104666 - DNA, 74 bp, Homo sapiens
cggccgtccgcgcccggagcaagacaccctgactgggatgcgcacaggtccatgactaccttcggagcaagctc

SEQ ID NO: 104667 - DNA, 75 bp, Homo sapiens
gactggtctgtctgagggagatggtgacaagctcaaggcctgcgaggaacgccccatgtgtctggtgggaagatg

SEQ ID NO: 104668 - DNA, 51 bp, Homo sapiens
tcccagcgctttgggaggccgagttccagttcctagcagatttaatagacg

SEQ ID NO: 104669 - DNA, 73 bp, Homo sapiens
gatgatggaaatcatgacccgagaggtactgcaaaagactatgggattttgttaccagattcttacagaacca

SEQ ID NO: 104670 - DNA, 82 bp, Homo sapiens
ctgagtgccgcactgtccgggaggagatgggcgatgagagcgaggagttcctgcaggatatatcccctggggcagctggtgg

SEQ ID NO: 104671 - DNA, 100 bp, Homo sapiens
gaaagaggatttggccagagcgttttgtgtaacaaacctgaatttggcaactggcatcataaacagaagcagtgcttcagctcccccaaccctccgaccc

SEQ ID NO: 104672 - DNA, 82 bp, Homo sapiens
aagactttatgatatcttggctttgttacctccaaaaacttatgaagatttaggcctattaaaggaaggcaggaagaactaa

SEQ ID NO: 104673 - DNA, 83 bp, Homo sapiens
cctcggaccgggctgcgccgcgggagttcgagcaattctgtggtgttcttggtcacacatttatggagtttctgaagggcagt

SEQ ID NO: 104674 - DNA, 50 bp, Homo sapiens
cgccgacccgccgagcaaaatgtgtggtgtaaaggaattcattagccatg

SEQ ID NO: 104675 - DNA, 75 bp, Homo sapiens
atccgcagggttcggatgagaccagggaagaaggagaaagggccaacccctgaagaagcaatacagaaactgaag

SEQ ID NO: 104676 - DNA, 73 bp, Homo sapiens
catgttgttcttcctcatcatgaactttctggaggaggcccagaagattaacaatggctcaagccaggcggat

SEQ ID NO: 104677 - DNA, 88 bp, Homo sapiens
gctggaagaccttcagagagaagaaagctccattccgaaaacctgtgaggagaggggccactgaaaacttcccaggatttaattcatc

SEQ ID NO: 104678 - DNA, 74 bp, Homo sapiens
acagtcctccagggtatacttcgtggcctgcaccatcggcttgcagggtggcccccgctccgacttcgacatgg

SEQ ID NO: 104679 - DNA, 100 bp, Homo sapiens
agatgtgatgttggagaactacagaaacctcgtctccctggatttattccccatgtttacagataccgctaataaattgcagtagtccttcccatggagc

SEQ ID NO: 104680 - DNA, 75 bp, Homo sapiens
gtgaagcagctggcctgttccatcgtggaccagaagcatggctcactctttcggggagagctaccgggtgggcag

SEQ ID NO: 104681 - DNA, 82 bp, Homo sapiens
gacaagtgctactggtgtcagacccatcgcccaacactgatcctgctaagtactctggtggacgtgccccatgtgaaatgca

SEQ ID NO: 104682 - DNA, 75 bp, Homo sapiens
ggaagggacgtgggggcggccacggcagatccaaaattaacgggacaggctcttattccaggatcagtaatatac

SEQ ID NO: 104683 - DNA, 97 bp, Homo sapiens
tggccctgggctttaccatctttgtggctgtgcttgccaggcctggctccattggttagtctgctgctaattggaattgctgcgtggggcattggct

SEQ ID NO: 104684 - DNA, 100 bp, Homo sapiens
cctggccaccctcaccaaataccctgaatccagggacagtatggaaattaccagcagtgaaaaagtacttacattccagtagccagtatctattagcagc

SEQ ID NO: 104685 - DNA, 100 bp, Homo sapiens
aatcgaaattataacatcagacactgctgaaagagtcctagagatccttgccagcacattacagaatatttttgttgaaccttcttgagaattcagagaa

SEQ ID NO: 104686 - DNA, 90 bp, Homo sapiens
gctttccagagaatgtttcagagaaagttacgtggagcgtgggcgtttcgcagactcctaagtccccaaagctccagagatagatccagt

SEQ ID NO: 104687 - DNA, 95 bp, Homo sapiens
gcaagcccagacaatgccggtggaggaatttgtggctggctggatctctgttgccactctaaattcagaagaggagagcgaccctccaacctaca

SEQ ID NO: 104688 - DNA, 87 bp, Homo sapiens
tgctgtaaccacctcacagattccagcttcggaacaagagaccctgatttagctttggagtcaaacccttctgaccatccaagggca

SEQ ID NO: 104689 - DNA, 100 bp, Homo sapiens
agccccgacggcaccgtcaccgaggcgccgcgcacagtcaagaaggagaactgcgacacatcaccaagctgaagccctggagcctctttgatgtacttgt

SEQ ID NO: 104690 - DNA, 100 bp, Homo sapiens
cgcctcagctctgtggaggagcagcagtagtcggagggtgcaggtgtcgtgaaaactacccctaaaagccaaaatgggaaaggaaaagactcatatcaac

SEQ ID NO: 104691 - DNA, 121 bp, Homo sapiens
gtcaagttgctcccatcaaaattagccagcgttctcttttcccatcatagagtgactgttttgcagccaaaatctcctgctcatttgtccttgataagagaagctgcaaacttcaaactca

SEQ ID NO: 104692 - DNA, 74 bp, Homo sapiens
gagaatggagaagtaaagattttgctgaaaatgagtgatagttgcttcaggaatcttgcagaagaccgcagtgg

SEQ ID NO: 104693 - DNA, 76 bp, Homo sapiens
gctgtgggtgctgggacttcccgtccgcggcgtggaggtgttttccaagcagtgaagcacttgccgtgttgaactg

SEQ ID NO: 104694 - DNA, 75 bp, Homo sapiens
ccaaacatcgaggctctgaatggcaactgctctgacactgagatggtgccaactggctgacttttttctgccagc

SEQ ID NO: 104695 - DNA, 82 bp, Homo sapiens
tgcgatcacctccttggacctcagccccaacggcaagcaacttgattggcggcagtaagcacacaatgaatgatcacctgca

SEQ ID NO: 104696 - DNA, 83 bp, Homo sapiens
cacaaatgtttttctgttttgcctgaatacatgatttaaacaagagatttccacagaagccatgccagtgacggtaacccgca

SEQ ID NO: 104697 - DNA, 89 bp, Homo sapiens
cccagaaccactgcctacaaaccaccctctcctgaccctgaagaactgtggagaagatggtataaactggtccatcagtgacaaagaca

SEQ ID NO: 104698 - DNA, 100 bp, Homo sapiens
gatgcccaacatgatcttcattggtggtatcaactgccatcagggaaagccgttgcctatgaccatcatcaaagaggggatgctgaccaaacagaacaat

SEQ ID NO: 104699 - DNA, 100 bp, Homo sapiens
ccgggaggaaggaacgaggcaaggagctaaagcagcgtgcgttcagccctggggaggatacgaagcgttttcggcttcctgcccggagctgtgcagcaaa

SEQ ID NO: 104700 - DNA, 75 bp, Homo sapiens
ggggaggttacgcagcaaaccatccagaaggtactccaaagattcaggtttactcacgtcatccagcagagaatg

SEQ ID NO: 104701 - DNA, 83 bp, Homo sapiens
ctgagcccggcgcaggtgaccggcgcgcgggagcgctacggccccaacgtgtactaatggtcacttgatgtgcgctggctgtt

SEQ ID NO: 104702 - DNA, 101 bp, Homo sapiens
cgaccggctccgcagcaagatggcggacgagaaggacagggaagggaagatgtgagaacagcaaacgtaattgctgcagaagctgtaacctgccttgtgat

SEQ ID NO: 104703 - DNA, 87 bp, Homo sapiens
cggcagctgaggcggaggctgacgaggaggcggatcccccggcgtcagggaagaactgctaaagctttgaggtcattacaatttacg

SEQ ID NO: 104704 - DNA, 97 bp, Homo sapiens
tcatccagcatctgaaggagcacctgctgcacggcaacatgaccagcagtgacatcctcctgtgctacaccacgaccctgatgatccgagactggtg

SEQ ID NO: 104705 - DNA, 100 bp, Homo sapiens
ccgcgctcgtactggagcgaagagcggcctcctgaaggaggggaagggacgtgggggcggccacggcaggtgcagtcagcctcagtttccaaagccggaa

SEQ ID NO: 104706 - DNA, 100 bp, Homo sapiens
ccggctgaaattaagtgaggaattgagtggtggtagattgaagggaagaggaagaacgtctgagaaataaaattcgagctgatcatgagaaggccttgga

SEQ ID NO: 104707 - DNA, 90 bp, Homo sapiens
ctccagttaaggttggaaagatggatgctacttcctattctaacgttccatcctcagagcagcctgaactgttcctaaagaaacttcagc

SEQ ID NO: 104708 - DNA, 119 bp, Homo sapiens
gccgccgcgccgccatcatggacaccagccgtgtgcagcctatcaagctggccagggcattgtttccaagtcgtacgagtgccgtctaaagggacaaggagccaccttcgtggagacag

SEQ ID NO: 104709 - DNA, 82 bp, Homo sapiens
ccagaagttgttctaacgctgcctttgctttaaaacagtattacttgcggtcaagggctcagaggtttgcagggccctcctg

SEQ ID NO: 104710 - DNA, 99 bp, Homo sapiens
ttcggcttctgagacggcggcagcagcggcattcagcatggtgacatggaccagaaggagagagatgttatcatgagggaattccggtcagggtcaagt

SEQ ID NO: 104711 - DNA, 82 bp, Homo sapiens
atccccgttcctggagattctgattgaggtatcacctcttctgggctcaagatggacaacaagaagcgcctggcctacgcca

SEQ ID NO: 104712 - DNA, 75 bp, Homo sapiens
tgtcagacgcagccgtagacaccagctccgaaatcaccaccaaggtccaggggcaagttcatcctactctcgagt

SEQ ID NO: 104713 - DNA, 100 bp, Homo sapiens
gcaccctggacctggacaagggctgcacggtggaggagctgctccgcgggtgcatcgaagccttcgctcgtgtgggcgctcgtccacaaacactccgtgg

SEQ ID NO: 104714 - DNA, 76 bp, Homo sapiens
agaacctgcaattacatcgcagaacagccctgaggcaagagaagaaagaacttcccttaagagtcatccagctctt

SEQ ID NO: 104715 - DNA, 83 bp, Homo sapiens
gttcgtccggctcccttgcggtggtgttgggaaaaatggctacaaacttcctagcacatgagaagatctggttcgacaagttc

SEQ ID NO: 104716 - DNA, 74 bp, Homo sapiens
accatacaggaacagggcagacgttagcgtgagtgatcactctcaatcccgggagacacacggacatcgggaac

SEQ ID NO: 104717 - DNA, 113 bp, Homo sapiens
ggagcggccggagtcagcgatggtgcccggcgaggagaaccaactggtcccgaaagagatgtccagaaggcttcttgggggaatattgtcaacatcgagacccctgtgagaag

SEQ ID NO: 104718 - DNA, 85 bp, Homo sapiens
ccaccccacctgccaccgaggccccctcttcgcctcctccaggaggaggaagccaagaatctggtgagcgaagccatcgcagctg

SEQ ID NO: 104719 - DNA, 122 bp, Homo sapiens
tgatagtttcacagtgcgggcactactgaaggccacgcatgaaggcttaaatgcacacctgaagcagagctacagagacttctgaagtggagagtctgcgacctcctcggttcttcaatgaa

SEQ ID NO: 104720 - DNA, 75 bp, Homo sapiens
gccgggcctcaggttcgacaacatccaggaatgctgtctctgcaatttgagaggaggtgctcttaagcaaacgaa

SEQ ID NO: 104721 - DNA, 100 bp, Homo sapiens
aaccagattcattgccaccagcgctcacctcgcctgacttaaaaaaaagaattaaacaaccaccatgtcgagcaaaaaggcaaagaccaagaccaccaag

SEQ ID NO: 104722 - DNA, 90 bp, Homo sapiens
gatagtttgagagtaaatgggttaccagaggaagagctaagcggatcctctggttggaagcatagccactcagtatttgaccaacagagc

SEQ ID NO: 104723 - DNA, 55 bp, Homo sapiens
ctgaggagtcgccgccgccccgagtcccgcagaaatgatggaagaattgcatagc

SEQ ID NO: 104724 - DNA, 83 bp, Homo sapiens
ccgacaacgccgagctggtgctgctcaccttgggccaggcctggcagggctgttgaaaggattgttgacaaaaggaaaaataa

SEQ ID NO: 104725 - DNA, 100 bp, Homo sapiens
ccagattctgccaattcgttttcaggagcatctccagcgatgccctcctagctagccgtcacgggatggagggcttcatggactcagggacacagacgga

SEQ ID NO: 104726 - DNA, 82 bp, Homo sapiens
cagccgaggccgccgccgcctctccttgctgcagccatggaacttcccaagtaagaagcggaagaggagccgctggaaccaa

SEQ ID NO: 104727 - DNA, 100 bp, Homo sapiens
tcgctctgtgacctgcgggtattggatgattggtagctaagactcccgaatacttcagaagtggggaaatgggatgtttcagcagcccctgagaaggaag

SEQ ID NO: 104728 - DNA, 75 bp, Homo sapiens
ttaggggccacgtgagccacggccacggccgcatagcgggccaatccgagcctacatccttgcccacaaggatgc

SEQ ID NO: 104729 - DNA, 75 bp, Homo sapiens
gaagaaaatacaaatcacacgcataatggatgaaaggaaccgacagattgctgcagcaaaaccaactccaccaaa

SEQ ID NO: 104730 - DNA, 100 bp, Homo sapiens
cacggccggaccgaaggtgcggcggcggaggggagccagggcgccccagcagtgagtccatgacagaagaaaccctgaaaagggcaaaggagattgggtt

SEQ ID NO: 104731 - DNA, 80 bp, Homo sapiens
gccgagggtggccctaggggcagcgagcaagacagcaagcagctacaccaaaattgcattgagccaaacttgccaccaag

SEQ ID NO: 104732 - DNA, 50 bp, Homo sapiens
gttactcagatcctgcaaagtcctatcctgataacttaagtgactctctc

SEQ ID NO: 104733 - DNA, 100 bp, Homo sapiens
aataacagagggtgcatcaattcttcgacaggaaaaaaatttgctggatattgatgcgccagtcactggagtctccaagagcttttagattaccccgggg

SEQ ID NO: 104734 - DNA, 100 bp, Homo sapiens
ggaaggtggcaagatggtgttggaaagcactatggtgtggagctcttgtccctggcaaagcgaaagcgcagtgactctgaggagaaggagccgcctgtga

SEQ ID NO: 104735 - DNA, 100 bp, Homo sapiens
ctcggggctgccggggtctcccgggtgtctttggtgcaacactaacaaggcttgtctggactacccagttacaagcgtcttgccaccggcttccctttgt

SEQ ID NO: 104736 - DNA, 90 bp, Homo sapiens
gctggcccacaagatccagtccccacaggagtgggaggcgatccaggccttgacggacggcggctccctggaccaggtgctgaaagaggc

SEQ ID NO: 104737 - DNA, 82 bp, Homo sapiens
gggaaaaggcaaaaatcccatctaccgcaactctcagttcgagagtaaagggccagcttctgagcatcccggcagcctatgg

SEQ ID NO: 104738 - DNA, 50 bp, Homo sapiens
ggaaaatgtgatgcatgtctcagtggtgttaaaaaagatattgagaagct

SEQ ID NO: 104739 - DNA, 82 bp, Homo sapiens
ccggagcaagcggagctcccccaagagccggaaaggtacatgtcccagagcaagcacacggaggcccgggagctcatgtact

SEQ ID NO: 104740 - DNA, 100 bp, Homo sapiens
atggcctgagctaaacatctaactagaagggatacccttccatttcaaagaacagaatgctaaggaagctgtggcaataacaaatgtggcaattattttg

SEQ ID NO: 104741 - DNA, 100 bp, Homo sapiens
ctggcaggggccgcgctctgctgcttcctcgtcctagtgatccacgcgcagttcctcaaagaagggaacccgagcgtcatgttagggtgaagcagaggac

SEQ ID NO: 104742 - DNA, 82 bp, Homo sapiens
tggtgatgcaagaagtttctaggaaaggccggacaccagctcctggtaacgtttttatccatggatgacttgcttgggtaag

SEQ ID NO: 104743 - DNA, 98 bp, Homo sapiens
gggatgtcgctgctggttcgggcagagtccgacgcaacatctgaatgaattgatgacgaagaagtggctattagggtcaaacgctgtagacattatct

SEQ ID NO: 104744 - DNA, 100 bp, Homo sapiens
ggaaggaggccgagccgggatctcaggtcctcgggggcggcggccacgccaaggacggttgatattcactgatggactccaaagaatcattaactcctgg

SEQ ID NO: 104745 - DNA, 75 bp, Homo sapiens
gctgcaggacggctcggcctataccattgactggagccgggagcccttgccgggcctacgaggacaagcagaaac

SEQ ID NO: 104746 - DNA, 100 bp, Homo sapiens
tgaagatgaagatgaaaatgcaatggatgctgatggtggtgatgatgatgatcaagattcctcagttccttttagatgattgctttaaaaatggtatccc

SEQ ID NO: 104747 - DNA, 100 bp, Homo sapiens
ataacagcacgacccaccgcgggggccacgtggtggtgcaggctgctggacaaagatagataccagctggggatgtgcacagatattcattccaagtgcc

SEQ ID NO: 104748 - DNA, 100 bp, Homo sapiens
agaaagtgtccttcgaggccagcgtggccctgctggaggcctcgctgaggaacgacgccgaggaagattgaaactcccatgatgaacatcatcccagggg

SEQ ID NO: 104749 - DNA, 100 bp, Homo sapiens
tatgccactcacagagacagctattctggaggcgttgtcaataagacgagttgtactgctgtcacaggaaatggacgctggattacaagcatggcagctc

SEQ ID NO: 104750 - DNA, 100 bp, Homo sapiens
ggacagaggacaatggcttccatgggcaattgaaggaacagactaaaaatcgtgtcctggaaggaaactacaggtactaccagggattttcagtctgaag

SEQ ID NO: 104751 - DNA, 101 bp, Homo sapiens
cggccggtgccagcacctttcggcttctgagacggcggcagcagcggcattcagacaaatttacatgtattggagaccagaccagaagcccttctgaatta

SEQ ID NO: 104752 - DNA, 100 bp, Homo sapiens
caatcccagtctcatgcttccagcctggataatgattgagccacctgtccaggtgatagctgtggtcatggacatgttcaccgacgtggacatcttcaag

SEQ ID NO: 104753 - DNA, 75 bp, Homo sapiens
cgaaaaccgtgtatgagggattcatctcggctcagtggctgctaatttacagaagattgtagatgatcccaaagc

SEQ ID NO: 104754 - DNA, 100 bp, Homo sapiens
agagtctggcgaagtgagcatcttgattagaagcaggcacctggctgcagtggaagaaagaaagatcaagtccctggtagctctcttggttgagacacaa

SEQ ID NO: 104755 - DNA, 58 bp, Homo sapiens
ggccgagttccccacctgcgattgcgtcgaaaccgaaacttcattgccccttcaatgt

SEQ ID NO: 104756 - DNA, 88 bp, Homo sapiens
gatctgcacttcgcattttggcattgacatttaattttagggtcctttatatagaagggagagtagggagcgcgagcagcgggagcgg

SEQ ID NO: 104757 - DNA, 100 bp, Homo sapiens
acccgaggccgctgctgtgcggagacccccgggtgaagccaccgtcatcatgtctgaccagattaaagagtctattgttggggaaatcagacgggaaatt

SEQ ID NO: 104758 - DNA, 74 bp, Homo sapiens
cagcaggatggagggaccacagggaccaccaagaaggcccggaggccgcggagctggtgacccagaactgcgag

SEQ ID NO: 104759 - DNA, 102 bp, Homo sapiens
agaggatctggtgtaccaggcgaagctggccgagcaggctgagcgatacgacgcaagagtgagccatggagctacgtgtggggaacaagtaccgcctgggac

SEQ ID NO: 104760 - DNA, 101 bp, Homo sapiens
caagttccccaacggctccccgtcgtcctggtgctgcagcgcatccacccgttttgtcaagtgtgaaaagtgtcatcatttttttgttgtgctatctgaag

SEQ ID NO: 104761 - DNA, 74 bp, Homo sapiens
acgcgggcgccaggaccggccgaacgcagagaccatggtgaatccgggcagcagctcgcagccgcccccggtga

SEQ ID NO: 104762 - DNA, 75 bp, Homo sapiens
gaacctcgagaccaacgtggaggagctgtgggtggaaggtaacaattgcttgtgatgcagttctcagctcaaaat

SEQ ID NO: 104763 - DNA, 75 bp, Homo sapiens
ggtgtcgccatgggccgccgccccgcccgttggtagctacagcaagctgggtagcaggcagatccaaaggatatc

SEQ ID NO: 104764 - DNA, 100 bp, Homo sapiens
aagcactcagcacagtccttggaacaagcacaagcagcgctgccctgtgctggaggaccagttggtggatctggttgtttatgccatggagcgatctgag

SEQ ID NO: 104765 - DNA, 75 bp, Homo sapiens
ctgccgtgaataggcagcctaaaggtgaaaggtgtagcagtcactcggcctacacccacagcatcgaccttgtga

SEQ ID NO: 104766 - DNA, 100 bp, Homo sapiens
gatcaaatggcacttcattggccacctacagaaacaaaatgtcaacaaattgatggaataatccagaatggctactctgatctatgttgataaggaaaat

SEQ ID NO: 104767 - DNA, 101 bp, Homo sapiens
tgtctggtacctggtacccggcacactgtgagttcctggacatcaagggctggtgaagaagctaagtctcagaaagataactcacccaagaggacacaagg

SEQ ID NO: 104768 - DNA, 101 bp, Homo sapiens
aaaacttcccaaagaactcctgttacgattgtaaaccatggctgtgtggatacaagctcagcagctccaaggagaagcccttcatcagatgcaagcgttat

SEQ ID NO: 104769 - DNA, 98 bp, Homo sapiens
gatgaagtttaacacaggaatgagaagtagagcacatagctgctaagataaggatctagtgaaaagccatttgatgtatgcggtcagagaagaagtgg

SEQ ID NO: 104770 - DNA, 95 bp, Homo sapiens
ttgccaaagaccagctgaagtcccttcatggaactgttatgaaaattaaccaggagcgagcagagacacctcagcttggtctcaaaactaatcca

SEQ ID NO: 104771 - DNA, 85 bp, Homo sapiens
ggtgagcatgaaaggcagccgcgtggagcgcgcggaagaggcacttgcccacatgggcagctcctacaagttgtgcaaagtgagg

SEQ ID NO: 104772 - DNA, 75 bp, Homo sapiens
cttggtctcaccattacagataatggtgttggctatgcttttataaaggttggcatcactctcttcactgtgtct

SEQ ID NO: 104773 - DNA, 75 bp, Homo sapiens
ggcatttttcaacaatgcttcaggtgatctgcaactctttcaccatctgtaatgcggagatgcaggaagttggtg

SEQ ID NO: 104774 - DNA, 82 bp, Homo sapiens
cgcgttgcagcaagagagatgaaggaggaggcctcaggggggcccacagcccccaaagctgagagtggtcgaagcggaggtg

SEQ ID NO: 104775 - DNA, 97 bp, Homo sapiens
tcaaggttataagaaaggtgcagaagtcattttaaactatggacgactccgaggaacattgaggtgttggagcgggccggagagaagtagagtgggc

SEQ ID NO: 104776 - DNA, 100 bp, Homo sapiens
gccggatcaggagccgccgccgccatatcagtttgcttgcctaaactggacttgaagcaatttaaactactggagatctgccattttataatatcacaat

SEQ ID NO: 104777 - DNA, 119 bp, Homo sapiens
caagtttccaagtctcttaaggagcgattaggcatgtcagctgatccagataatgaggatgcaacaggctggaggacgtgtgccagtgttagacacactcatagaacttgttacacgag

SEQ ID NO: 104778 - DNA, 83 bp, Homo sapiens
gcctttagtgcactcttctccttcacagtaaagtggctgggaatctaagggaggaaattatcaactgtgcacaaggaaaaaaa

SEQ ID NO: 104779 - DNA, 99 bp, Homo sapiens
agaaggtgtctaagcgctcgcggaaggaggagagtgatcagcagctggactgtgccttggacctaatgaggcgcctgcctccccagcaaatcgagaaaa

SEQ ID NO: 104780 - DNA, 80 bp, Homo sapiens
cattttcctgcttatcacctgaactgtgtgaagctcgtgtgtggagtgccacggtacaatcagacgacagatggacagtg

SEQ ID NO: 104781 - DNA, 75 bp, Homo sapiens
caagggtgttcccgaactagagtgggaacagcatatgccatatatgagctggctgtggcttcatttcccaagaag

SEQ ID NO: 104782 - DNA, 98 bp, Homo sapiens
gcaaaatggcggatcatgtgcaggagattacctggggcaattgatgttatcggtcagactataactatcagccgagtagaaggcaggcgacgggcaaa

SEQ ID NO: 104783 - DNA, 96 bp, Homo sapiens
gggggtctctcagtaatgctggggaccctgagatcgtcaagtctcccagcgaccccaagcaataccgtctcttgcatggcaccaagaatgttacca

SEQ ID NO: 104784 - DNA, 75 bp, Homo sapiens
acaatattaaaactttacctgggacaatgcagatcttcgtgaagactctgactggtaagaccatcaccctcgagg

SEQ ID NO: 104785 - DNA, 75 bp, Homo sapiens
ggcccgcgggggagccccgggagccgcacggctgtgacagtgaggaactccatggctaagtctctgtatagtgcc

SEQ ID NO: 104786 - DNA, 75 bp, Homo sapiens
tggtggttctgtcgatcgtcttggaaggacccacgcagccacccagcctcagcactcatctgcgcagccatggag

SEQ ID NO: 104787 - DNA, 83 bp, Homo sapiens
caggaagaccgtgatgggagctgcagcacagtcgggggtgtaggttatggggcctgtggacatctctacagcaatgagtgaac

SEQ ID NO: 104788 - DNA, 83 bp, Homo sapiens
gctggaggaccacagctacctgcccgtgggcagtgtcagcttccaggtatttgccttatccacacatccttatggctgccgag

SEQ ID NO: 104789 - DNA, 50 bp, Homo sapiens
caacatctctcagagacgaaagaatgccagaggacttggatctgagctaa

SEQ ID NO: 104790 - DNA, 90 bp, Homo sapiens
gaaaacgctacgtgagctgggccctgggccagaggcagaaaacggacggaagaaaaggtctggccggtcccccacggcccttcaggatga

SEQ ID NO: 104791 - DNA, 92 bp, Homo sapiens
ccgtgcgatctggacgcggcgctgctgaccgacatcgaagggatccaggtccggcacgatcaagacccaggctacatgcatcacaagtttgc

SEQ ID NO: 104792 - DNA, 75 bp, Homo sapiens
ggacaagaccatcgagctcatggctaaaataaatgaagctgtagaatgcttactgtccctgaaggctcagtataa

SEQ ID NO: 104793 - DNA, 74 bp, Homo sapiens
gcggccggagcggcgagcatggcccgcgcggcgccgggcgctgactgaggtacggaatggccacatcaaaagaa

SEQ ID NO: 104794 - DNA, 100 bp, Homo sapiens
ttgatcaaattcaggcaagtgaggaagaaataatgacccaattacaagttctaaatgcctgtaagattggaggtctccttgaagaaaatgatattttcag

SEQ ID NO: 104795 - DNA, 74 bp, Homo sapiens
ccgagagatgaggccggagcccaccaagttctgggaaccctgggcgctgcctatggcacagccaagagcggtac

SEQ ID NO: 104796 - DNA, 100 bp, Homo sapiens
acctcatcagatacactcatgcagcaaacacagttgtttacagctctaacaaaatagacgctttgacagatccaaatgcttctgctgcccagcaggctgt

SEQ ID NO: 104797 - DNA, 51 bp, Homo sapiens
gaccagggctcctgtggctcctgctggagttgtaaagatgtggcacctgtg

SEQ ID NO: 104798 - DNA, 100 bp, Homo sapiens
cacgtgagaaaactgcgagccagcattacccccgggaccattctgatcatcctcactggacgccacaggggcaagaggaactcgattgaggaccagaggt

SEQ ID NO: 104799 - DNA, 86 bp, Homo sapiens
gcagggcctgcagcgggagctggacggcgagcgcgagcggcgcgagaaaggcgtctctggccgagcctctttttgtggaaaacgac

SEQ ID NO: 104800 - DNA, 75 bp, Homo sapiens
tcagacctgccaatttaccagagataattgataacaccctgtaacagctgaacaagttggatggcttgaggactg

SEQ ID NO: 104801 - DNA, 100 bp, Homo sapiens
agagagccactggcatcagctttgccattcatggaaacttttctgggatgatgcagtgtgtgattgcagtcgcggacaaagtattcgatgccttcctgaa

SEQ ID NO: 104802 - DNA, 75 bp, Homo sapiens
gatcatgggcaaaggacagatccaggcatccgtgtcattctggaccttactcccaactaccggggtgagaactcg

SEQ ID NO: 104803 - DNA, 76 bp, Homo sapiens
caggcaattgaaaacactgcctcagtatctgaacacaagagtattggaacagttgtgctgctgccagcgatccgtg

SEQ ID NO: 104804 - DNA, 100 bp, Homo sapiens
aggggttaactccttcatggtttatatggcttataaggatttgtatcaagtatctaacacagagggtggctttgagtataagcgcgctatcgtggactgc

SEQ ID NO: 104805 - DNA, 75 bp, Homo sapiens
atacaggaacagaaatttttatgaactgagccctcacattgtcctggcacttccttagttccccaagaaacgcta

SEQ ID NO: 104806 - DNA, 74 bp, Homo sapiens
gggctgagtccgcctgccggcagggtgtgggccgaagatatgctcatgtggtgttgaggaaagcagacattgac

SEQ ID NO: 104807 - DNA, 78 bp, Homo sapiens
tggacacggagaccgggctggagccggacgagctgtcggaatccagcaactatcacaagaatactccttagccacttc

SEQ ID NO: 104808 - DNA, 128 bp, Homo sapiens
tgagtgaacccatcctgccgtccttctccactttcgccagcccgtgccgcgagcgcggcctgcaggaggtgcgcgcggagccatggttatcatgtcggagttcagcgcggaccccgcgggccagggtc

SEQ ID NO: 104809 - DNA, 75 bp, Homo sapiens
caaacagtgtttttgacttccagaaagcttacaagctgactgaagaggaggctcctacaaccccctgaccctcgg

SEQ ID NO: 104810 - DNA, 83 bp, Homo sapiens
ggacgttcggccaagggaccaaggtggaaatcaaactacagaacctgctaaggccatcaaacctattgatcggaagtcagtcc

SEQ ID NO: 104811 - DNA, 96 bp, Homo sapiens
gcatgacgtgaggccgtggatgcaggcattaagggatttagtgcaagaagaagaacagttgatggaagaaaagaaaaagaaaaaagacgacaagaa

SEQ ID NO: 104812 - DNA, 96 bp, Homo sapiens
agttgttggggttggtgctgttggcatggcctgtgccatcagtatcttaatgaagaatgttccagtggaaaacttctttgtgaaatgcaatggagc

SEQ ID NO: 104813 - DNA, 100 bp, Homo sapiens
gctgcttcaaacgggcagggctctaggaaacatatgttacgatagccttacatcatgctgatgacagcttcctggtcctcaccacagatggaattaactt

SEQ ID NO: 104814 - DNA, 74 bp, Homo sapiens
gaacggggaggtgaagccgctgccccgagagccccccaagatgaacccagtggtggagccactgtcctggatgc

SEQ ID NO: 104815 - DNA, 100 bp, Homo sapiens
cacaacccaaaaacgatacgccatctgttctgccctggctgcctcagccctaccagcactggtcatgtctaaaggccatgaaagtcaaaacacctttgag

SEQ ID NO: 104816 - DNA, 100 bp, Homo sapiens
gcagacctcgaaatgatagacgaataactgaagtgaagtgatggactccgatttggagagtagtaagacgtgaaaggaatacacttgtgtttaagcacca

SEQ ID NO: 104817 - DNA, 75 bp, Homo sapiens
ctgggattggagattccacccaaacttgctggtcactgggagaagtccattggaatattaagcccaggagttgct

SEQ ID NO: 104818 - DNA, 90 bp, Homo sapiens
ggaccacatgtgggccttgttcaagccaggttctattattgtcaaggtcccatcttcacttcaagctcatttacagttatcagggaaaga

SEQ ID NO: 104819 - DNA, 83 bp, Homo sapiens
aacatcgtgggggatctcttacggaaagtaggggtttggtgcacctcgatttggaggaagtagggcagggcccttatctggaa

SEQ ID NO: 104820 - DNA, 88 bp, Homo sapiens
gcctgaagatatggaatgcagtagggtggttctcttcccaaagtggaagccaaattcatcaattatgtgaagaattgcttccggatga

SEQ ID NO: 104821 - DNA, 82 bp, Homo sapiens
cctcatcaccccctggcacctggggctgccttgcttgcctaaagccaatccagaatgacagggtccagaaactggcgagcca

SEQ ID NO: 104822 - DNA, 83 bp, Homo sapiens
tcagaagagatagaaaatggcagtagttcttcagattccactatgatgacgcaggaacaaatccagaaagaatatgatgcact

SEQ ID NO: 104823 - DNA, 100 bp, Homo sapiens
agctatccagcatctttgggcagccattgagattatacggaaccagaagcagattgccaacattgaccgtattacaaaggaccatggctaaacctcctgg

SEQ ID NO: 104824 - DNA, 100 bp, Homo sapiens
ttgacatttaattttagggtcctttatatagaagggagaagcatgtcctttgcaacctgatcacacaaatgatgaaaaagaatagaactttctcattcat

SEQ ID NO: 104825 - DNA, 101 bp, Homo sapiens
ggcagcacttccctgagccactctccaggctgctccagtactcaagggaacggtttgaacgccatgaccctgtggatgggagaattactgagaggcagttt

SEQ ID NO: 104826 - DNA, 100 bp, Homo sapiens
cacggcagccaccatggcgctcctgctgtgcttcgtgctcctgtgcggagtagtggaaatacatgctacaggatttaactatcagaatgaagatgaaaaa

SEQ ID NO: 104827 - DNA, 100 bp, Homo sapiens
atcaagtcatattatacagtgcgacagctagaattggaaaaccttacagaaaggccattgctgctctggagctgtgtgtgtgtgtgatgactaaagcaaa

SEQ ID NO: 104828 - DNA, 50 bp, Homo sapiens
acgaaacctggcacggctcttgcttccgatctgaattctacaaacacatt

SEQ ID NO: 104829 - DNA, 100 bp, Homo sapiens
ccccgcggggaccctgctggcctcgtgcggcggcgaccggagaatccgcatctggggcacggagggttacttcttgctgcagattctgcgcaggatcgga

SEQ ID NO: 104830 - DNA, 100 bp, Homo sapiens
tcacctgctcaagaagaggaagtggcctctgaagggctggcacaaggagggtgcatctgcccggaagactcagactcctgcagcccagccagtaccaaga

SEQ ID NO: 104831 - DNA, 75 bp, Homo sapiens
agagaacttcccagcatacctgagaatattcatgcccaagcacaaaacaacccatttaaagaagatgctcggcct

SEQ ID NO: 104832 - DNA, 74 bp, Homo sapiens
tgaagaccacttacaaggcttccaccagcaaggccagctgcgggccgtccagcggctgtgccacttctacagcg

SEQ ID NO: 104833 - DNA, 51 bp, Homo sapiens
gttttgctggtgttgtccctcccgtggcagaatacagattctgttcatctt

SEQ ID NO: 104834 - DNA, 75 bp, Homo sapiens
tgttcataagatctacccaagtgcatatataaagtgatcggagggtatggttggcatggaattgaatttcatctg

SEQ ID NO: 104835 - DNA, 50 bp, Homo sapiens
gaaagaggagcggcagagcctgctggatggagcctcgctctgtcgccaag

SEQ ID NO: 104836 - DNA, 100 bp, Homo sapiens
gaagtcgacggcgccggcggctcctggggcctgtgaagcctccctggcctgctccacctgccatgtgtatgtgagtgaagaccacctggatctcctgcct

SEQ ID NO: 104837 - DNA, 75 bp, Homo sapiens
gtcataaagaaatttccaaggtgtgccgaaggctatgcactatacgcccaggtatcagaacaaggtttaatagaa

SEQ ID NO: 104838 - DNA, 74 bp, Homo sapiens
gtgaagttacttccaccggactttgaaaaggaagggaatggccagatattcgaagcttacaacatggcagcttt

SEQ ID NO: 104839 - DNA, 82 bp, Homo sapiens
accagcttccagttagtggatatagcacaccatccccagccagaggagatgttaaagtaacccatcttgcaggacgacattg

SEQ ID NO: 104840 - DNA, 51 bp, Homo sapiens
gctgaaaagctagaccagcaattcagggcggcgactggcggcgcgatggac

SEQ ID NO: 104841 - DNA, 100 bp, Homo sapiens
agacggagtcctgttccaccttcagagcgtcacggcgtacgccctcatggggaaaatctccccggtgactttcagctgggatctagcaattgggaggcag

SEQ ID NO: 104842 - DNA, 88 bp, Homo sapiens
ccccagtgagaaaggtcaccgcaagtacagagagtacagccccccatatgcgccgtctcttcaagaaaatgaggaggaggagattggg

SEQ ID NO: 104843 - DNA, 100 bp, Homo sapiens
ggccgcttccgactcagcctcttcagcgacctgcccgaggacctgaaggagaagaaggagaaggtggaggagaaggcaagccggaaagagcgaaagaaag

SEQ ID NO: 104844 - DNA, 90 bp, Homo sapiens
gcggcaccaaggcccccaagccctccttcgtgtcgtacgtacgccctgagaaatgacagactttttcattgaatgatgaggacacagcag

SEQ ID NO: 104845 - DNA, 82 bp, Homo sapiens
acttgagcgaagttttatgcaaggctgaccccgcactacatctacccaccagccatcgtgcagcccagcgtggtgatcccag

SEQ ID NO: 104846 - DNA, 75 bp, Homo sapiens
gaggaggtgcagatggcactttccaaagtggatgcctccggggaggaatactcccccagttgcaagaggcgcagg

SEQ ID NO: 104847 - DNA, 100 bp, Homo sapiens
gcatgaacactttgttacctccttggcttcttggacacttaatgattgttggcaagaaatgtgctgctgatctgggcctgaataagggttatcgaatggt

SEQ ID NO: 104848 - DNA, 100 bp, Homo sapiens
acctagtcgtggccggaggagtctcagagctgtcagaaagttcaaacgatatgtcaataaacttcgaagcaagagtacagttttcaaaaagaagcatcag

SEQ ID NO: 104849 - DNA, 98 bp, Homo sapiens
cggaaggtccgggagtgtccgccataaagtcgtttgaggtcctgaggcacgtgaatggccaggatcagattgtgcccggcctgtacgcctgtggggag

SEQ ID NO: 104850 - DNA, 100 bp, Homo sapiens
tgacagagctttgatagtcgtaccatatgcagaagggagtgatatggagctggacttgttagcagcagctgaaacagaaagtgatagtgaaagtaaccac

SEQ ID NO: 104851 - DNA, 85 bp, Homo sapiens
gtaacttttgatgatcatgatacagttgataaaattgttgaattagacctttacgagaagcacagttttgtcttcagtttcctct

SEQ ID NO: 104852 - DNA, 114 bp, Homo sapiens
gttctatcagtgcattgctgaaaatgatgttggaaatgcacaagctggagcccaactgataatccttgaacatggtgagcgagtgctgtgctttcatgggcctcttctttatga

SEQ ID NO: 104853 - DNA, 83 bp, Homo sapiens
cttggccatcccaaagctattctgggggcaacagagtctattatcctcccagtccacaacgctgaaccgtggctggacgaatg

SEQ ID NO: 104854 - DNA, 100 bp, Homo sapiens
tggagataaagttgctttttactgggctaccacccgatgccccatgaagtggagatcgcacacaccaagaagctgttccgcaggaggagaaatgatcgaa

SEQ ID NO: 104855 - DNA, 90 bp, Homo sapiens
gcgaccgccgagcctgcagcctgccccgcggccaacatgagcttcttgttacctttccagctcacccccagggccttatggtcaagaaat

SEQ ID NO: 104856 - DNA, 101 bp, Homo sapiens
gcagccgtggtggtggtggatatggtggcagtggggatggctataatggatttggtaatgatggaggaagccagtgaaggtggaggaaatgatcgtgtgcg

SEQ ID NO: 104857 - DNA, 100 bp, Homo sapiens
gttgcaacagcatctcaattctcatgatgagaaactagatgtgtttagcaggagaatgtactactcatcacctcccacctgtgaaagcccctcttcagac

SEQ ID NO: 104858 - DNA, 100 bp, Homo sapiens
agactctcaagaggacactgcagtattatgaacatcaagttattgggaggagtgggattatctggacccagctcagagaagcctgtataaagatgtcatg

SEQ ID NO: 104859 - DNA, 97 bp, Homo sapiens
tctgaacagagatcaagcactctctattatagccagtttgccccaatgtcagatgacgagagccctacatcatcctcggcagaagagtagccgtgag

SEQ ID NO: 104860 - DNA, 100 bp, Homo sapiens
atcggaggaatgcctgagcgggacatggactcaacagatctgtctgcctgcaatctacaagggtctcctatggacagaagtgcgggcaaggagctttgtt

SEQ ID NO: 104861 - DNA, 51 bp, Homo sapiens
aacctgctgacagtgagaagaacaatgatgcaccagcaaggaatactgaag

SEQ ID NO: 104862 - DNA, 96 bp, Homo sapiens
cagcatttagagctgtttatgaagcactgagaaatctgcctactgaatcactcttctatcgtgctgttcttcaggatattattaaagattgttatg

SEQ ID NO: 104863 - DNA, 80 bp, Homo sapiens
cttttgtatcaggacgaggaggcgctgaacgactccattatttctgctggagaagaagcaggcgctccctccattccagc

SEQ ID NO: 104864 - DNA, 100 bp, Homo sapiens
attctcttgaccatgtgacatctgatgctgtggaacttgcaaatcgaagagacggggttttgccacattggccaagctgatctcgaactcctggcttcaa

SEQ ID NO: 104865 - DNA, 75 bp, Homo sapiens
caggcgagaagaccatctctgtggtcctacaggtatctcgggggagctttgtgccttgatggatcaagttcatca

SEQ ID NO: 104866 - DNA, 74 bp, Homo sapiens
cagaactgcacactcagtccctctgtgctccaggactccctcaataatgtgtccagtgtgaagtgcagctggtg

SEQ ID NO: 104867 - DNA, 100 bp, Homo sapiens
cgcgggtgcaggagcaggacttacggcagtgggggctgacaggtaaggagtgccaatggaccgatgcctgcctgtctcatccctgtgcaaatggaagtac

SEQ ID NO: 104868 - DNA, 80 bp, Homo sapiens
gcggggaccgctgtgctctcgagctcccccatccaggaatccactgctcccgagctgccttcggagacccaggagacccc

SEQ ID NO: 104869 - DNA, 75 bp, Homo sapiens
cagatagctgaagaaggtgacgataatttggctaaagtgactggacaaccccaaaatgcatcttttgtcaagagg

SEQ ID NO: 104870 - DNA, 101 bp, Homo sapiens
tgacagcagatttgctggatacgtgacatcaattgctgcaactgaacttgaagatgcacgtggaggagttcagccccagagctgtctacaccagtggtaaa

SEQ ID NO: 104871 - DNA, 76 bp, Homo sapiens
ggatagctggccttggtggaggatttgaaataggaattgagatacctctaacctatttggaaacagtggggccaag

SEQ ID NO: 104872 - DNA, 82 bp, Homo sapiens
tagataccttcaatcatcattttgagctcaaagatttggactgagcaacaaatttgaatctgaattcccttcttcattaact

SEQ ID NO: 104873 - DNA, 82 bp, Homo sapiens
ggggctccatggaatccctggccctgtctaatgcaacaggccaatatacccagtagaagaattagaagaagaaagcgttgca

SEQ ID NO: 104874 - DNA, 96 bp, Homo sapiens
gaaatgttgttagatattgccttgaagctcttcaagactggtttgatgctattaacttcgtagacgaggatccaacgcatgcctggagtggaggac

SEQ ID NO: 104875 - DNA, 87 bp, Homo sapiens
cattgccgtcgacggcgagcccttgggccgcgtctcctttgaggcttattgcagtatattatatctaaagccaagaatgcagatcat

SEQ ID NO: 104876 - DNA, 100 bp, Homo sapiens
aggccgagcgcagagcattggcaggaggggcaaggtggaacagggacatcgcggtggaggaagatctcagcagcactcccctattgaaagacctgctgga

SEQ ID NO: 104877 - DNA, 83 bp, Homo sapiens
gaacgactacaaaatattgaggcccacttgcggttacagacagagcgaaaagctgttgctatatgatacagtccagagtgaac

SEQ ID NO: 104878 - DNA, 85 bp, Homo sapiens
aagaagaccattcagatgggatctttccggatcaatccagatggcagccagtcagtggtggagggaaatgcaataccttatttcc

SEQ ID NO: 104879 - DNA, 112 bp, Homo sapiens
gtcaaaacaaaacaaaacggaaaaaacaagacttctggccacaggccgtcatgattggggacgatatcgtgggcgacgtcggcggtgcccagcggtgtggaatgagagcgct

SEQ ID NO: 104880 - DNA, 83 bp, Homo sapiens
aaataacttttccttggagagtcataacatatcactgactgggccgttgctccagggagaactgcaaatatcttcatccaccc

SEQ ID NO: 104881 - DNA, 99 bp, Homo sapiens
gagaagtaccagagggacttggagagccttaaggccttcatgccccgaggactagcagacaaacaaggacctgaggaatgtgatgcagttgctctttta

SEQ ID NO: 104882 - DNA, 96 bp, Homo sapiens
ctggagagcgtcaacaagctgtaccaggacgaaaagattgccacggcagtgaagtttctacagaattcccgggtccgccagagcccacttgcaacc

SEQ ID NO: 104883 - DNA, 74 bp, Homo sapiens
ttgccgatccgccgcccgtccacacccgccgccaggtgactgcaaggagcctgacaagtgctgctggagacaca

SEQ ID NO: 104884 - DNA, 51 bp, Homo sapiens
ttccccttcaacctcttgctcaagacctgatggccaaaagaaaggaagaaa

SEQ ID NO: 104885 - DNA, 100 bp, Homo sapiens
gaggaagctgagttacccagactggggaagcggatgctatcagggaacctagaaaagttgttcttcatcgtggctcaacgggccttggtttcaacattgt

SEQ ID NO: 104886 - DNA, 98 bp, Homo sapiens
cagtccccagtgagggtgtacaaatacccctttgaattaattatggcttaggataagttctgaacgtcgaaaagaaaagtctcgagatgcagccagat

SEQ ID NO: 104887 - DNA, 98 bp, Homo sapiens
ccggagtcgaggattccagggtcgaacactcggagtaccttagatccacagaagatgctcttgtcatgggatggaggggaaagtaggagtcctgtaca

SEQ ID NO: 104888 - DNA, 90 bp, Homo sapiens
tcgtcacctaccccaagtccgggtgcttcaaggatgaccgcatcgtcttctggacttggatgttctccacctacttcatggagaaatggg

SEQ ID NO: 104889 - DNA, 75 bp, Homo sapiens
tcagccaatagtttatatgagcctggtgccgtgagcgatgtggagatgcaggaacactatgatgagttttttgag

SEQ ID NO: 104890 - DNA, 83 bp, Homo sapiens
tgaaactgaaacatacagtcagatctcaggaatggaaggcccaagaaacagatattttcaagaaaaagaagaggaaaggacag

SEQ ID NO: 104891 - DNA, 75 bp, Homo sapiens
taggtgtatcaagtaatggtgcaaagcctgaaaaactcatcgcatacgggcacatcactggcaacgcccctgaca

SEQ ID NO: 104892 - DNA, 73 bp, Homo sapiens
agacagatcgctgtcaaaaccctagcattttgaaagcgaagcagaagccgtagaatcagcggcgagcctgttg

SEQ ID NO: 104893 - DNA, 100 bp, Homo sapiens
gagaggcatcctccttgaagtatttggctgaggagttttcaatcccagaaacttttgagaagaactttgaaagagaaacccataaaataagtgagcaaaa

SEQ ID NO: 104894 - DNA, 83 bp, Homo sapiens
gctacagcatcgtggcgctgggcaatgacatctacgtgacggtgcctacaccaactaatgttacaattgaatcctataacatg

SEQ ID NO: 104895 - DNA, 100 bp, Homo sapiens
aaggtggaggaatcctgatactgagcgctgggaactgctggctccgtcaagcgaagaacggccgctgccaggtcctgtacaagaccgaactgagcaagga

SEQ ID NO: 104896 - DNA, 75 bp, Homo sapiens
aaggcaagagtaacagcagcgccgtcccgtccgacagccaggcccgggagaagagtgcctgtgaagaaaacgggg

SEQ ID NO: 104897 - DNA, 100 bp, Homo sapiens
agagggtggcccatgagccggttgcgccacccgaggacaaggcctatatgaacccaatagcaatggcgagatcaaggggtccaatccagtcttcagggcc

SEQ ID NO: 104898 - DNA, 98 bp, Homo sapiens
acgcgccccgcctcccccgtccggtccctctctccacggctgagtatgagtttatcagctctggtctctacctagtggtgttattgcacttgtgcgaa

SEQ ID NO: 104899 - DNA, 100 bp, Homo sapiens
caaggagagaattcagctccagttcaaaagcctacaaaatctgagactgtcattgcttttataagagcgtccagttgtaaatgccaatgtctcagtgcca

SEQ ID NO: 104900 - DNA, 100 bp, Homo sapiens
cacagatttgcttttacaccaaggacttacccttttgtaacctcttcaaattgtactgttggaggtgtttgtactggtttgggtatgccacctcaaaatg

SEQ ID NO: 104901 - DNA, 50 bp, Homo sapiens
tgccccagctccgtctcggcggcggcggcaacgatccacggtggcatcca

SEQ ID NO: 104902 - DNA, 75 bp, Homo sapiens
caaaattaaacaactacctgctgaaattggtatgttatgcataaaagtggataatttacatgataaatgaaaatg

SEQ ID NO: 104903 - DNA, 128 bp, Homo sapiens
cgtcggcagcaagaacagagagagaggtggacagatctgagagatactgaggctcacgaggcccagggaatcctctggaccatcagattaccaatgaaagaggagaatcaagctgtgataggttaacc

SEQ ID NO: 104904 - DNA, 75 bp, Homo sapiens
ggcagacggattcatttagagctgcggaacaggacgccctctgatacacgatgaggcgagtggtacgacagagca

SEQ ID NO: 104905 - DNA, 104 bp, Homo sapiens
ggttgctgacccagaggagagttctccaaacatgatcgtttactgcaaagtgtgcaactgaggaacatggctcaagaaactaatcacagccaagtgcctatgct

SEQ ID NO: 104906 - DNA, 98 bp, Homo sapiens
cgaagatccggactctgggtgttttgctaccgtgaccgtttagttggaagatgctggctcaagtagtttagataatctactaagtagatacatctcag

SEQ ID NO: 104907 - DNA, 101 bp, Homo sapiens
acggcaaagccattcctgacctcaccgcgcccgtggccgccgtgcaggcggccgtcagcaacctcgtccgggtactaggttttgacaagcttgcatcatgc

SEQ ID NO: 104908 - DNA, 75 bp, Homo sapiens
aaaatctgtacctggctggaaatcaaagtccaccatgtgcttttgcacatccagcactggtgaggtggattgatg

SEQ ID NO: 104909 - DNA, 98 bp, Homo sapiens
tgctactgacgttgcactgggacaggagaggcctcgtggacagagagattcaagctattattgggaaatagaagccagtgaagtgatgctgtccactc

SEQ ID NO: 104910 - DNA, 74 bp, Homo sapiens
ccaggcggctgctcggcgttctctcaggtgactgctcggagttctcccagcgggtcacagaaagtcgagagagc

SEQ ID NO: 104911 - DNA, 100 bp, Homo sapiens
gttcaattgaagattttaaggatcacattccaagggaaactgatatgaaggttgcaaatgctgaaagcttaaatgcaattggtgtgttgatatacatgga

SEQ ID NO: 104912 - DNA, 90 bp, Homo sapiens
cagcacagttcctgggaaggtggagccaccagcctctccttgtattctaccttgtaaatactgttatttgtatatactgtaaatgatgac

SEQ ID NO: 104913 - DNA, 89 bp, Homo sapiens
aagagcagctgggagaacgtccgagctgctgcacccctgttcaccggcaagcacgaggagcggcaggacgagcatggctacatctcccg

SEQ ID NO: 104914 - DNA, 96 bp, Homo sapiens
ggcgccgagggcttggaatctcgagcgggaaaaggtcgagtcccagacaccagaagtctgaatttggagaaggctggggtagatactagccccgac

SEQ ID NO: 104915 - DNA, 50 bp, Homo sapiens
gtgaagctgcagaccttcgtgtctgcgctcctcagaccaccggcaggtga

SEQ ID NO: 104916 - DNA, 90 bp, Homo sapiens
gcgccggccgcgaggccacggagagctcgccttggagagcccaggagcaggggagacatgattaatgatgttttgcagcagttttctacg

SEQ ID NO: 104917 - DNA, 100 bp, Homo sapiens
tatggtagcctttcagctgtttgacaaagctggcaaaggagaagtaacttttgattggagcatatgatcaacaaatatgggaaaaatctgttgaacagag

SEQ ID NO: 104918 - DNA, 100 bp, Homo sapiens
ctgggagcgtcctctaacacattcagactacaagtccagacccaggagagcaaggcccagaaagaggtctggtccgagagcaggaggctgggctgctgca

SEQ ID NO: 104919 - DNA, 98 bp, Homo sapiens
caagcttaggaccacccaccatgcctatccagtcaccaggagactaaagtccatcaaaaacatccagaaaattaccaagtctatgaaaatggtagcgg

SEQ ID NO: 104920 - DNA, 100 bp, Homo sapiens
ttttcacttatcatctattccaccgtgttctgggagtacgagagggcctccaaagtggaccagtttgtgacgcgcttcctgctgcgggagacggtgagcc

SEQ ID NO: 104921 - DNA, 82 bp, Homo sapiens
cccacgcaaccccagatccatttacactttacagttgaaaggattgttgacaaaaggaaaaataaaaaagggaagacagagt

SEQ ID NO: 104922 - DNA, 123 bp, Homo sapiens
cagctcaccttctatgcaggccccaatggcagccagtttggattttcactggacttccacaaggacagccatgggagattttacgctgcagaaattgccatcggtctgttcttcttacagagt

SEQ ID NO: 104923 - DNA, 100 bp, Homo sapiens
agcgcgaatatcgtcatcgttagaaggtgggatgtgtgtgggctgaaattccgagctgcggttgtgcatgagaatacacccttcgtggtaccccatctcc

SEQ ID NO: 104924 - DNA, 75 bp, Homo sapiens
gccggagctggacgccgccgccgccaccgccacctgcgcggcagtcatcaagagttcctgagttggaggtagaag

SEQ ID NO: 104925 - DNA, 75 bp, Homo sapiens
actgctgtgcctcctcctcctgtggtggaggagaaggaaagctatcatggtgaacttacttcagattgtgcggga

SEQ ID NO: 104926 - DNA, 100 bp, Homo sapiens
ggcagtccgtaacatccacaaactgatggacgatgatgccaatggtgatgtggatgtggaagaaagtgatgaggttctgtacagagtaatgagatgtgtg

SEQ ID NO: 104927 - DNA, 75 bp, Homo sapiens
tggaccagctcgagtctcaagtggacaatgttccaagattatcccctaaaactcatagacccaggtctcccagac

SEQ ID NO: 104928 - DNA, 82 bp, Homo sapiens
aagaagtagagtatttcaaccataaagacatcttaattgggcacgaaagagtgtttgatgatggtgatgagcgaacattgag

SEQ ID NO: 104929 - DNA, 100 bp, Homo sapiens
ttgtatgtattgatagaccggacagcggaggaaatcaagcaaggcaatgacaatggtaaaaatgcatttgcaaagggagaaaatgaaggccaaacagaag

SEQ ID NO: 104930 - DNA, 90 bp, Homo sapiens
ctcacatttgtttcattgaagaaatagttaaggtagtgtgccagtatttgaaaaatcccaatgtatctgattcactgctgctgcagaata

SEQ ID NO: 104931 - DNA, 82 bp, Homo sapiens
tacaaggccaagttcatctcctccgtcaccagccacatctaccaggccctgggctgcatcttgtacctgctgtgcttccggc

SEQ ID NO: 104932 - DNA, 75 bp, Homo sapiens
cagtatgaagaaaaatttcagaaccatcacaaactggaactgcaagcacatgttgaccagataactgaaatggca

SEQ ID NO: 104933 - DNA, 100 bp, Homo sapiens
tcagagctacttttcaacagccttctcaattttctttctcagaaagcagaggctcagagcttggagacagacgctagaacgagtaaatctgtctgcagcc

SEQ ID NO: 104934 - DNA, 76 bp, Homo sapiens
aggacagcaacaacaggatctgccccatactgatggagaagctgaacaggtgactctgacatcattagaagcatgc

SEQ ID NO: 104935 - DNA, 100 bp, Homo sapiens
cccaagtcaccacaaaaacctatcgttagagtcttcctgcccaacaaacagaggacagtgattaaagactttacctgtaatccattaaacagtatcagtg

SEQ ID NO: 104936 - DNA, 100 bp, Homo sapiens
gaacaacggctacgtggagctctccttccgggccaggaagctggacgacaagtttgacaagtatgcgcccaagctggacagcccctacttccgacattcc

SEQ ID NO: 104937 - DNA, 100 bp, Homo sapiens
gcacttcttttttgagaaaggaaggaatatatcctgactgattccttctcttggagtcaagaagcctaccaaagccctgctctttgtactcttgagccca

SEQ ID NO: 104938 - DNA, 80 bp, Homo sapiens
ttctagaagacccattacagagggagccagcaccgctctttgaccttgccatgcttgccttagatagtccagagagtggc

SEQ ID NO: 104939 - DNA, 74 bp, Homo sapiens
cagcggagagcccccccagtgcaggagtcctgagggggagcaagaggacaggccctggccaacgtcaacattgg

SEQ ID NO: 104940 - DNA, 100 bp, Homo sapiens
cctttgcctatggaggctggaactttctgaattacgtgactgaggagcttgttgatccctacaaaggagaaggcagagcccccccaggctatgaatgccc

SEQ ID NO: 104941 - DNA, 83 bp, Homo sapiens
gcgacggcggaacccgtgggcctgtggactgcagcctcggcggtcagcagggtttgccttcccggattgggcctacaagccag

SEQ ID NO: 104942 - DNA, 82 bp, Homo sapiens
ggaccatgtccgggaggcgcttccacctctccaccaccgaccgcgtcatcaaagatatgatgcttcctggtgtgtttagtgg

SEQ ID NO: 104943 - DNA, 90 bp, Homo sapiens
ggaacttcgttgcttgcttgcctgtgcgcgcgtgcgcggacatggcctcaaacggttaatttggagtggcccctggagtcagtttcctac

SEQ ID NO: 104944 - DNA, 83 bp, Homo sapiens
ggtgcaggcgctgcgccgcaacgccgagcgcaccgacatctgcctgctcaaaggttgctatcaagatcatagataagacccag

SEQ ID NO: 104945 - DNA, 100 bp, Homo sapiens
ccacacgacaggcctacactctattcaaacaggttcagggcttctggaaatcttgtaatcacccgtgagattgatgtggcaaaaaatcagtccttttggt

SEQ ID NO: 104946 - DNA, 83 bp, Homo sapiens
cacaaaggcaacggtgactttcaaatggcagaaatctgaagctatcatggaacaattgaagtcttttcaaataattgctcatc

SEQ ID NO: 104947 - DNA, 100 bp, Homo sapiens
gaattttggaagaagagacgaactgtgaggagagtaaaccaagaagaaatccacagatttagttctgaaaatgttggggcttttcaggaagcataataag

SEQ ID NO: 104948 - DNA, 98 bp, Homo sapiens
tactataccaaggaaagctctttgtatcagaaaactggatttgttttcattccaaagtctttggaaaagacacaaagactgcttttcaggaagccttg

SEQ ID NO: 104949 - DNA, 99 bp, Homo sapiens
tgtgcagatcattctcgcctcgtggaatccaaagttgagcttaatgatgtgtttcacatggtagttgaagtaccacgctggtctaatgcaaaaatggag

SEQ ID NO: 104950 - DNA, 82 bp, Homo sapiens
ccatctacacctgcctcagggagatccaggatgagaagactgataaaagaagaagctagctgaacagctgtaaaatgcccaa

SEQ ID NO: 104951 - DNA, 83 bp, Homo sapiens
gtggctgcacagtttctctggaatgcactttatcgctaccgagaacacagatatgtagaactcttcttgaattctacagcagg

SEQ ID NO: 104952 - DNA, 100 bp, Homo sapiens
cttggaataagctataagggaattggccaatatgatatacaagacaaggtgaagcctcggaaggaacaagaccattttgttttactttaacctgttacgc

SEQ ID NO: 104953 - DNA, 75 bp, Homo sapiens
aggacaacccagatgtgcaacaaagtgcgatggacagagcgggatgccaccagcttgtccaaagggaagttccag

SEQ ID NO: 104954 - DNA, 100 bp, Homo sapiens
ttcttagggagttttcagctacagtcgtttttagaaggagcactgacagcgagtatgtgcagaagcttataatcctgatgaagaagaagatgatgcagag

SEQ ID NO: 104955 - DNA, 100 bp, Homo sapiens
tgaaatggttaaagatggagaaattgtatacactggaacagaatcaacccagaacggatagctccctcctggaaaaggatttgacgggatctgaactata

SEQ ID NO: 104956 - DNA, 83 bp, Homo sapiens
ctgggtcagtccgccgctcaccccgcggccgcaccttcccgccttctcagcaaacggggattcagcgtccgatcctttggaac

SEQ ID NO: 104957 - DNA, 100 bp, Homo sapiens
ctgatacccaaacttccccagagccaggcacaaggatgaacattctgccgaagagaacaagacgtgtgaagactcaggatgggtcttccatgatactgaa

SEQ ID NO: 104958 - DNA, 100 bp, Homo sapiens
gtgcaggactccatccaccgctgggagcgccggcgtactctcaacaaggcccgggcctcccgctcctccgtacaggtggccaagcaagaggagttcttca

SEQ ID NO: 104959 - DNA, 83 bp, Homo sapiens
ctgcgatccgcgcatataacggagcatcagatccatgctgctgctgactcggagccccacagcttggcacaggctctctcagc

SEQ ID NO: 104960 - DNA, 50 bp, Homo sapiens
aggattccaagtaactcttatttgtcacagagtgaaaaggtgagattaca

SEQ ID NO: 104961 - DNA, 110 bp, Homo sapiens
ccgtggcgtcccccatggacgacgggtttgtgagcctggactcgccctcctatgtcctgtacaggaggagacatcacagctttcccagatcgggaggaaaaatatggaat

SEQ ID NO: 104962 - DNA, 100 bp, Homo sapiens
ggatgccggggggcaagagagggctggtggcaccgcagaacacatttttggagaacatcgtcaggcgctccagtggacccagatgatgtggtaccagttg

SEQ ID NO: 104963 - DNA, 118 bp, Homo sapiens
aaaaagaatgggtcaaccaagaacgtcaaacactccaacgattgagagcatttaaagatgaactttatattgctgttggaatatctggagccatccaacatttagctgggatgaaaga

SEQ ID NO: 104964 - DNA, 100 bp, Homo sapiens
atgcctccccaggagctcacccggcgactggccacagtgatcactcatgtcggggaaactgactctactctgtgatgccaagacagatgggagtttcctt

SEQ ID NO: 104965 - DNA, 75 bp, Homo sapiens
gtgacatgcccatgcgagtacctgaggaaggtggaaaaccatgaattccttgtaaaaccttcatttgatcctaat

SEQ ID NO: 104966 - DNA, 83 bp, Homo sapiens
ttccactccattgttgttagaagccagaatgaaactagtgatcgagaagatggcctccccaaaggacatcatgtgacagactc

SEQ ID NO: 104967 - DNA, 98 bp, Homo sapiens
gggtgccctcaatgagcacatgaccagcttagcttctgtcctaaagggggtgaagccagccagttttgacaaagtagcaattcctgaagtgaaggaaa

SEQ ID NO: 104968 - DNA, 100 bp, Homo sapiens
cctcgcttctccagcgctccttgctcgcaaggcgggggaggcggcggcccagccacgatgatacagaattcgttgttgggaaggactggggaaacagctg

SEQ ID NO: 104969 - DNA, 83 bp, Homo sapiens
cccaattggaatgttagttctgggaaacaaagtcaaagcagtgggagaggttcactattatgaagatggcaatgttcagttgg

SEQ ID NO: 104970 - DNA, 75 bp, Homo sapiens
caagaatgtgcttaagaagttcatctgcatatctgaccttcgggcccaagttttggctacgggcctccacctcca

SEQ ID NO: 104971 - DNA, 90 bp, Homo sapiens
gaattcgaaaagcagttcaacgagaatgaagccatccaatggatgcaggaaaactggtgggtttggaggatttgggacaacatctacaac

SEQ ID NO: 104972 - DNA, 83 bp, Homo sapiens
gtttcgacagcgaacatgtcgcggcctgtcagagaaagatgctggtttcgagttttggagatccttgttttttatggaacaca

SEQ ID NO: 104973 - DNA, 100 bp, Homo sapiens
tccggcaagaacatcctggtcttcgagtttattaaccacttaacctctcagaactgaacaaagacaacattgttcctggaacgccctctttttaaaaaag

SEQ ID NO: 104974 - DNA, 100 bp, Homo sapiens
gcggcgcctgggactgcaccgcaccgagggcgagctccagacctacaacggccagagcgagaacaacgaagactatgagatccccccgataacacctccc

SEQ ID NO: 104975 - DNA, 120 bp, Homo sapiens
aacctctctgaaatctgacacctgctctcccggcaaggaaacttcgcaggctggtgcagctaaatcaagtccagcagctaaaccaggatccacaccttctcgaccctcatcagccaaaag

SEQ ID NO: 104976 - DNA, 97 bp, Homo sapiens
attctgaaagaaagaaaacaaagaaaaacatactccagaattcctaatagaacaggcggcgacgacctggaccccaactacgtgctgagctcgcggg

SEQ ID NO: 104977 - DNA, 80 bp, Homo sapiens
cggttgcgcgcggcttggggcaaaggcggggtttcaccatgttgcccagactggtcttgaactcctgagcttaagcaatc

SEQ ID NO: 104978 - DNA, 101 bp, Homo sapiens
gtcgcccagcgccgccccgtcgtcgtctgccttcgcttcacggcgccgagccgcggtccgagtaataaaaggcctgacatatctgagggagaagcacaaga

SEQ ID NO: 104979 - DNA, 74 bp, Homo sapiens
ccagttccccagttctggcagattctggaaactgtacattgaagcagaggttttttgcatgtctgacacccatg

SEQ ID NO: 104980 - DNA, 75 bp, Homo sapiens
gctgccctttccgtttccagggttccgaccagggaatgacaccactccactgggcggctttccacaaccagcctc

SEQ ID NO: 104981 - DNA, 82 bp, Homo sapiens
ccagtagcagttctcaagagacctagccagctaagcagaaagctctagaccaagatagaacagcccttcagaaagtgaagaa

SEQ ID NO: 104982 - DNA, 75 bp, Homo sapiens
gctcctgggaaacctgctcagccccgacaatgtggtccggaaacaggcagaggacccagatgatgtggtaccagt

SEQ ID NO: 104983 - DNA, 90 bp, Homo sapiens
cagctgctagagcacaggttcgactacatcttcttcacagagctcccagctcctccagcagccgacaggaggcccgtcaagatgcaggca

SEQ ID NO: 104984 - DNA, 95 bp, Homo sapiens
gactcccctgtgtgggtgattctgagcgagatcatggaagggaagtggttgctgtgtatgttactggtgcttggaactgctattgttgaggctca

SEQ ID NO: 104985 - DNA, 75 bp, Homo sapiens
ttccttgtatggtagcgataagtttgatttgccctatgggatgagaacatcagtgtcgacttcttccactacaaa

SEQ ID NO: 104986 - DNA, 137 bp, Homo sapiens
aaacatcgacgaggaggcctccatgatggaagacgtggggatgcaggatgtccatttcaacgagagctccgagaggccttcagagaattcgacaaggacaaggatggctacatcaactgccgggatctgggcaactg

SEQ ID NO: 104987 - DNA, 82 bp, Homo sapiens
cccggagcaagcggagctcccccaagagccggaaaggtgcgcgcggagccatggttatcatgtcggagttcagcgcggaccc

SEQ ID NO: 104988 - DNA, 100 bp, Homo sapiens
cgcgagggcagcggccgcggcgtcttcaagccgtgggaggagcggaccgaccgctccaaggagaaggagcggcagcgcctggagaatctgcggcggaagg

SEQ ID NO: 104989 - DNA, 100 bp, Homo sapiens
ccgacttcgatgatcgtgtgtcggatgaggagaaggtctcagccttagatccaaggacagtccaaggaagtcctaagaccatggagttggtgatctggga

SEQ ID NO: 104990 - DNA, 75 bp, Homo sapiens
ctcggtcctccacctgtccgctacgctcgccggggctgcggccgcccgagctgtttgcagacaaggtcccaaaga

SEQ ID NO: 104991 - DNA, 75 bp, Homo sapiens
ttgacacggctttggaaacgacgtcatgtgttagctgtcccctttcctccaacccaacggcttactttcaaggaa

SEQ ID NO: 104992 - DNA, 100 bp, Homo sapiens
ctacaaatttgactattctaggtacttcatgcttattgtgtaacagaacctggagcaggctctgatgtagctggtataaagaccaaagcagaaaagaaag

SEQ ID NO: 104993 - DNA, 98 bp, Homo sapiens
caggctcttgtggcggtgggagaccatgcaagcaagcagatggttaaatttgctgccaagagtgcccgtgcgcagcggagatgccaccttccccaaag

SEQ ID NO: 104994 - DNA, 100 bp, Homo sapiens
ttggtggtccttacctcatttggaaactattgtctactcacagtgatgaagtaacagcattgtgcttcccagtactcggagcttttagagaccactgaga

SEQ ID NO: 104995 - DNA, 100 bp, Homo sapiens
agtcgctgttggatcgggttctaaaggaaagtatttcgggctgctgtggatctggaaatatcatctgcttctagaacttgcactttcttgccaccttttc

SEQ ID NO: 104996 - DNA, 83 bp, Homo sapiens
tcctggcctgggcgctccggtggcggcggaggaaggtgggagtcaatcattttgacaagtctcctgaaaggaacagctagcag

SEQ ID NO: 104997 - DNA, 90 bp, Homo sapiens
tcgaattcgtcagcaaacagacatttacaaacagatacgtgctaataaggcatcctgtcggctcacaagataatagccagctccccagaa

SEQ ID NO: 104998 - DNA, 87 bp, Homo sapiens
actttctaatttagccaaggaagcctaccgatgttcaccgtgctcaggaaattcaccattccacttaccttacttctggaaaccatc

SEQ ID NO: 104999 - DNA, 73 bp, Homo sapiens
acttaccagaatactacgttcagctaaattaagctcgaattacatctttacaagaggaggtgaagcatctcaa

SEQ ID NO: 105000 - DNA, 100 bp, Homo sapiens
gccggttaaacaatgcattcatcagttatgcttcaccagattcccttcagggaaccagggtggagctggccccagtcagggcagtggaggcggcacaggt

SEQ ID NO: 105001 - DNA, 98 bp, Homo sapiens
ctgagttccgtgtgcagttccaggacatgtgtgcaaccattggcgtggatccgctggcctgaggagctggctctgtgtggctccaggctgctggtctt

SEQ ID NO: 105002 - DNA, 74 bp, Homo sapiens
gaggacgcggcagtgtgtgcagtggccttcatagggtgtccacctccgcctaagacccctaacgggaaccatac

SEQ ID NO: 105003 - DNA, 82 bp, Homo sapiens
cgccggctatggccgtgccctggggctgagccctcagctcacaggcgcctgaagtacatatccctagctgtgctggtggtcc

SEQ ID NO: 105004 - DNA, 97 bp, Homo sapiens
ggaccagcggctggcacagagcgcggagatgtaccactaccagcaccaacggcaacagatgctgtgcctggagcgctccctggccctgctccgggag

SEQ ID NO: 105005 - DNA, 74 bp, Homo sapiens
gaaatccttcggatggtgaactcattagaagtggccagcatcgaaatgttcagccttttagtgatgaagatgca

SEQ ID NO: 105006 - DNA, 80 bp, Homo sapiens
gacaacgccttaacccaaggaagtgactcaaactgtgagaacttcaggcttgaccactatgctatcatcaagtttccgct

SEQ ID NO: 105007 - DNA, 100 bp, Homo sapiens
tttgaccttcatcacgaggccacccagtcccacttcaaacattcgtctcggaaaccccgcctcttacagtcacgaggaacgtcaggatcagattctccag

SEQ ID NO: 105008 - DNA, 75 bp, Homo sapiens
tttacttcctaacaaaatcacaggaggaatgtttcttgaacctagaggctcctatatcaagagtatgtggttatg

SEQ ID NO: 105009 - DNA, 83 bp, Homo sapiens
agcgcggacctagacctggaatcgcccaagtccctctactcgcgaggacagagcgggatgccaccagcttgtccaaagggaag

SEQ ID NO: 105010 - DNA, 100 bp, Homo sapiens
aagaaaagaaactgacaaaaacatttctgaggaacaggcctttgagagcagccagaagtacaaagaggggaagtacatcattgaactcaaccacatgatc

SEQ ID NO: 105011 - DNA, 75 bp, Homo sapiens
cttactcctttaagaaactttatagaaggagattacaaaacaattgctatgatacataccttttctcgatgtgtg

SEQ ID NO: 105012 - DNA, 75 bp, Homo sapiens
tcatccagtttgctacggtctacggggcagagcagggtgactatgaccagagcaggaccaaagtgctgcacatga

SEQ ID NO: 105013 - DNA, 88 bp, Homo sapiens
acagtgggggtgtgcaaacccgagagaactggaggcggggtttcaccatgttgcccagactggtcttgaactcctgagcttaagcaat

SEQ ID NO: 105014 - DNA, 80 bp, Homo sapiens
aatatgccaaggaaaaactggagagcttcatcaaaaatagtgatagctttgataaagcttttctggaaaaagaagaaaag

SEQ ID NO: 105015 - DNA, 100 bp, Homo sapiens
agcaagaggaccgggctgggcgcgcccggccgcgacgcccgggacccagattgcgggttcaggaactttcagaaaatgaagtggttggatcttatttctc

SEQ ID NO: 105016 - DNA, 82 bp, Homo sapiens
gtgacggtggcgccgcccggggcgaggcagggccagcagcaggcgggagttgactatattgtggagtatgactatgatgctg

SEQ ID NO: 105017 - DNA, 98 bp, Homo sapiens
tcttcacgcctgtgattaatggagccgccgggcgtgagacgcggtccctcggtgcagacaccaggccgggcgcggctgggtcccccgggggccctgtg

SEQ ID NO: 105018 - DNA, 75 bp, Homo sapiens
tgcagatttggcacatatggggcggtcaagagaagaccccgctgggatgggattattgcatcgagcttttagtgt

SEQ ID NO: 105019 - DNA, 80 bp, Homo sapiens
actcaccggaggaagcggcgcgagcgccccgccatcgtcccgttccagggtctccctccactgctgtagtaacccgggtc

SEQ ID NO: 105020 - DNA, 100 bp, Homo sapiens
gccctctgcatcctgcctggagtgggcaccaagatcacagattctgctggccatattctctactccaaagaggatgcaaccaaggggaaatttgccttta

SEQ ID NO: 105021 - DNA, 98 bp, Homo sapiens
agtgaagaaattattggtacctgcatgctcggccttgttctccccatgtgggccatagccctcatttcctttggtgtcgccctcctgttcgctttttt

SEQ ID NO: 105022 - DNA, 74 bp, Homo sapiens
gcgaatcatggcggccgccaaggggagtaggttgcatctttgttgaaatgatccaaggagttgctgcttttcca

SEQ ID NO: 105023 - DNA, 100 bp, Homo sapiens
cacaaagttacctacgtgttagaaataaatctgatattgcaccttcacagcaacaaggtgacttaagagattaaaattaatttggttgctgttggttctg

SEQ ID NO: 105024 - DNA, 101 bp, Homo sapiens
cgcagtccgctgtcctgctgagcccggaggccgcctggatggagccgccgctcccggtcggagcccagccgcttgcctatgtctaccttcggcagcggcga

SEQ ID NO: 105025 - DNA, 74 bp, Homo sapiens
ggacatcgggcagcactgccaggtggagcattgccggcagcgagtacacagtgtatagtcaagccagcaccatg

SEQ ID NO: 105026 - DNA, 99 bp, Homo sapiens
acctgtttttccagctcacccactgccagcagagcttctcagatgaccaagatggtgctgcagatggtgctgaggatggagaacccaccaagccccgct

SEQ ID NO: 105027 - DNA, 75 bp, Homo sapiens
ccctcaagaagtaccatggctggatcgtgcagaagatcttccagatccagctccaggtcccacaggggctcttct

SEQ ID NO: 105028 - DNA, 90 bp, Homo sapiens
cagccccggctctgggctacggactatgggcgaatagctctgaccacccggcgaagtgcacttggaggctcctcagctcttcatatccca

SEQ ID NO: 105029 - DNA, 82 bp, Homo sapiens
tctgactctcggactgagaaacgcaaggacctatatccagactttgcctgacactgcagggtccaagagaattaaagaaata

SEQ ID NO: 105030 - DNA, 101 bp, Homo sapiens
accgcggggttagccactgctggctgcttccagtgttcgccgagaggcataatcaccagcaacacccgggacaataatacgggggccacctacccccacct

SEQ ID NO: 105031 - DNA, 83 bp, Homo sapiens
atcgcctcgcgccggctgctctttccggacccgtgcctgtatattccacgctttgcgcacctgctggaattcggggagaagaa

SEQ ID NO: 105032 - DNA, 75 bp, Homo sapiens
caagcttagagcgtctggccaagaatcagaggaagtggccaaaatgaagtttaatccctttgtgacttccgaccg

SEQ ID NO: 105033 - DNA, 73 bp, Homo sapiens
tataatcatatgtattcaggggttcagataagattgaatttagtggaagcttttgtagaagatgcagaattga

SEQ ID NO: 105034 - DNA, 100 bp, Homo sapiens
gagaccgtgaccgagagcgtgaccgagagcgcgaatatcgtcatcgttagaaggcatggaggagtgacggcaggaactttctgtgctctgacaaccctta

SEQ ID NO: 105035 - DNA, 99 bp, Homo sapiens
ctgatctctggcagaactgtagcacctcttcctcaggaaatgtccaccactgtttctcatcatcaccaaacgccaggcccagacatgtccgtccttgta

SEQ ID NO: 105036 - DNA, 75 bp, Homo sapiens
ccgcccgcacgcgcgacctacctgggcgctccgcgcccccggatgctgcagtttcaccagtgatcattaaagaat

SEQ ID NO: 105037 - DNA, 98 bp, Homo sapiens
ctcctgcgtagctgggactacaggaaagtggacacttaagttatgcctgtccgaaaaatatgctcggagaacgtgagcctccaaagaagaaagaaaaa

SEQ ID NO: 105038 - DNA, 89 bp, Homo sapiens
ctggcagatgccggctatggcgaacaggaactggatgccaactctgcccttatggaattggacaaagaatcaaagaatcttcaggatgg

SEQ ID NO: 105039 - DNA, 75 bp, Homo sapiens
aaattgctgaagaactcgcaagctcctacgaaagaaagctcatcgagatggagcagatggtgctttttacccaga

SEQ ID NO: 105040 - DNA, 98 bp, Homo sapiens
cctgagaacatcaccgaaataaggcaacagactactgcaacagaaactatccttagatgggaaccccaaacctatacatggaacaacagagaggtcag

SEQ ID NO: 105041 - DNA, 83 bp, Homo sapiens
cgcagtctccacggcgcaggcccacggtagcgcagccgctctgagatgatatcatcaagttgaatcgaaaggaagggaagaag

SEQ ID NO: 105042 - DNA, 100 bp, Homo sapiens
tgaatctcagagtgaagatgagttgacaccttttgacatgagcatccagggttggggtctgctaggtccccggaatgagttgtttgacgcagccaaatac

SEQ ID NO: 105043 - DNA, 100 bp, Homo sapiens
aagaggatgagaaggagagaggaggagacttaattcagtgcacaaatgagatgaatgtgaacatcccacagttggcagacagtttatttgaaagaactac

SEQ ID NO: 105044 - DNA, 90 bp, Homo sapiens
atccaataaagagaggcagcttggaagtcgagcctcttaggcagagtttaacacatgggagctgcctgcctgctgctgctgctgcttcct

SEQ ID NO: 105045 - DNA, 50 bp, Homo sapiens
gagctgaggactgcctgtttgcagggcagatgattctggaccagatgaag

SEQ ID NO: 105046 - DNA, 98 bp, Homo sapiens
aattgttgataccaatggaatcacggtttttggaacaaggattttggatgaagaagtttttgaggtgagcatacttgattcagaggaggtgtgtgtgg

SEQ ID NO: 105047 - DNA, 75 bp, Homo sapiens
cctttccaactgggcaaaccccgcttccagcagggcagcgggtggcatgagacgtgggaacatgggccacctcac

SEQ ID NO: 105048 - DNA, 109 bp, Homo sapiens
tttgaggaagaacgcgccagagcaaaatgggacacaatcctctgccttgtcaatgttagtcacaatggtgtgagtgaatcagaactgatggaactctatcctgagatgt

SEQ ID NO: 105049 - DNA, 100 bp, Homo sapiens
ttgacctaccccttgcacacctaccctaagggcgttacctactgcagagaaagttcagcaagcagtcttaccatggcccatgtgccctggcatgaggaag

SEQ ID NO: 105050 - DNA, 100 bp, Homo sapiens
aagttttggagcaaagacaacagcagtttccaggaacatcaatgtgtgatgaaccaaggagtggcccctatggtagggactccagcaccaggtggaagtc

SEQ ID NO: 105051 - DNA, 98 bp, Homo sapiens
tggattccagcagtatcctcaacaattcatgatgaccaataaactggacacggcaatgtggctttctcgcttgttcacagtttactgctctgctctgt

SEQ ID NO: 105052 - DNA, 73 bp, Homo sapiens
tgtgacatctgatgctgtggaacttgcaaatcgaaggtgggatgatgacgttgtcttcaagaactgtgcaaaa

SEQ ID NO: 105053 - DNA, 100 bp, Homo sapiens
gggaagcacgcgaggctgcccggagtccggataagccgggcgggagcccctcggccaggtttcggtctaagtaccacccagatgaggtggggaagcgtcg

SEQ ID NO: 105054 - DNA, 90 bp, Homo sapiens
cagataaagatggtgaacaacctcaaatactgctggtgtgttctactccctcttctgggaatgaagcctccccagcaaagcctatacctg

SEQ ID NO: 105055 - DNA, 100 bp, Homo sapiens
ccgccggcgctgacggactgggggcgccgcccgcgcccgggaccgacccctctgctcgcggccgcgcctttgagtagcaggacccagtgctccataaagg

SEQ ID NO: 105056 - DNA, 100 bp, Homo sapiens
aggactccatccaccgctgggagcgccggcgtactctcaacaaggcccgggcctcccgctcctccgtacagctactctcctctgcaaggcctaccgtggg

SEQ ID NO: 105057 - DNA, 100 bp, Homo sapiens
gcatcggcctctgcgggcagctgtgatgtaccctcgcccttcaaccatcgaccaggccctaccgcccccagccctaccagccgcccgccctgggctgtgg

SEQ ID NO: 105058 - DNA, 95 bp, Homo sapiens
tgggatgtgaaaactctgttactgaagcaccgaacaagatttgtgatgaaatggagcctggaacaaactcttttcgggtagaatttcctgatttt

SEQ ID NO: 105059 - DNA, 51 bp, Homo sapiens
gtacgccgcgcggcgcggacggcgcacgcaaacatgcagatctttgtgaag

SEQ ID NO: 105060 - DNA, 50 bp, Homo sapiens
caccaacccggccttcaccaaactccctaaacactttgtgctactctgtg

SEQ ID NO: 105061 - DNA, 74 bp, Homo sapiens
caggctcgcctcgactccaaatggttgaaaacagatatacagctgtggattcaaactctcaaactttgcaacca

SEQ ID NO: 105062 - DNA, 100 bp, Homo sapiens
gagaattgtggctggaggttcggtcgctgccgggaggaggactctgtcgctggagctgaggctggaaaaacttatgcagagatggaccccaccacagcag

SEQ ID NO: 105063 - DNA, 51 bp, Homo sapiens
cgtcgttcacttcaggcccaacttcagagccctattcctaacatggctgat

SEQ ID NO: 105064 - DNA, 100 bp, Homo sapiens
cgccgtcttctttatgatccccacctgggttctggtggacctctcggctttcctggtcagcagcgacttgctggtcatcaatgctgctttgggatttgac

SEQ ID NO: 105065 - DNA, 82 bp, Homo sapiens
gcgggagccacgcagaggacgccggaacaccctggaagccgagaaatgttcaaagaggaaatctcccggaggtttaaggctc

SEQ ID NO: 105066 - DNA, 82 bp, Homo sapiens
aaacaagctcagggctcccacggattctacattatgtttcagaatggcttcggttattgcctttccttggtgtactcgcact

SEQ ID NO: 105067 - DNA, 99 bp, Homo sapiens
ggtggagatcaagctggaacaggagttccgatcgacccggtaccaagaaggggagtgcccgcggcagtgcactggtgattgctgcggtgtttgaccgag

SEQ ID NO: 105068 - DNA, 100 bp, Homo sapiens
caaccaaacacattcaatgcagttagaaggaaaaggtcaactcgatccaatacagaccgtgtcatggagaaactccagctgggcccagagattctgcagc

SEQ ID NO: 105069 - DNA, 83 bp, Homo sapiens
ttcagcctcagtgatgtccatgagatggggacattggttttggacctttacaacagaggatgtctgaagaagtttctttccag

SEQ ID NO: 105070 - DNA, 75 bp, Homo sapiens
ctggaattttggcatcaaggacaaacccaccttcatcaaagggtataccaacagatgttttaaagattgtgtatt

SEQ ID NO: 105071 - DNA, 96 bp, Homo sapiens
cgctttacgcttcttcaaaccctgagtatctcagtgccagtgatgaagccagctgaagatgagtggggtaaaaccccagacgccatgaaagctgcc

SEQ ID NO: 105072 - DNA, 50 bp, Homo sapiens
cgaggagctctccgagaagcaatgagggaacaagctgccaataatgtctg

SEQ ID NO: 105073 - DNA, 98 bp, Homo sapiens
acccggttcgtcaccgctgctctttccactcggctggcctctgcgcctttctctcatcccgggaaaagcttcactctgaccatcactgtcttcacaaa

SEQ ID NO: 105074 - DNA, 100 bp, Homo sapiens
agaaacaataggacggaaacgccgaggaacccggctgaggcggcaggtgatgttctgcaccctgaacacccacaaagtggacatggacaagctcctgggg

SEQ ID NO: 105075 - DNA, 50 bp, Homo sapiens
ccggtttctcccacatcgacctggaagatgagaatgtgcctactgctcct

SEQ ID NO: 105076 - DNA, 100 bp, Homo sapiens
agctgaagcaggccctctcaggtttcgtttgcagttaacatgtttcgaacattaccaccttcctccaatcctacgggagcggaatttgacccggaggaag

SEQ ID NO: 105077 - DNA, 90 bp, Homo sapiens
cccagggcccacgggccagccccgccgccctcgcaacctggcagccgccgccgtggaaggcgttgacccggacgacacctataatgagac

SEQ ID NO: 105078 - DNA, 100 bp, Homo sapiens
aagaactgctctccatggagagagtaactctgtccttattatcggaccccgaggatcaggaaaaactatgaggcttcgtgacggagttatcagagacatt

SEQ ID NO: 105079 - DNA, 75 bp, Homo sapiens
gattggattcgttactgctttgcaacgcgcacctaactccaggttacacgcatggggagatactctggaggaagc

SEQ ID NO: 105080 - DNA, 74 bp, Homo sapiens
gaatttccatgtcaacatagtccaggattttttatcaagcagaaatgcatcgaacaacgagaatcaagatcact

SEQ ID NO: 105081 - DNA, 100 bp, Homo sapiens
ttcccatgcacctaatgctgtgaaaaccgcattttatttagcagagttttttgttaatgaagagaagagaaggtgttcttagatcagaagatgccattgt

SEQ ID NO: 105082 - DNA, 75 bp, Homo sapiens
cggtcacctacccccagcaccacctccagcccctgcgcctcgaattttgagactgaagaagtagaactttccttc

SEQ ID NO: 105083 - DNA, 75 bp, Homo sapiens
cagactgctgtcagcctcagagaacttgaggaagagaacacgagcttgaagcctgtggacatctctacagcaatg

SEQ ID NO: 105084 - DNA, 75 bp, Homo sapiens
cgaagcctcccgggtggcttacagacgctgccagcatcgccgccgccagataccagcgggcaagcagaaaacaag

SEQ ID NO: 105085 - DNA, 90 bp, Homo sapiens
ctgctcttggctctcaacttattcccttcaattcaagtaacagtgctggtcccaaaggcgataacatctatgaatggagatcaaccattc

SEQ ID NO: 105086 - DNA, 100 bp, Homo sapiens
cctggcccagctgcctcagagcctgtcctgcctccgctccctggtcctcaaaggtgccatcgcctgcaggattctttattcagctctgacagtggcttca

SEQ ID NO: 105087 - DNA, 100 bp, Homo sapiens
tcttatttagttctggggagcgcctcgtcgacatgagtgatgtggaggaaaacaacttcgagggcagagaggcaaaaccttcaactgaggacttggggga

SEQ ID NO: 105088 - DNA, 100 bp, Homo sapiens
gaaatcccctctcactctccaattctgttgttgcctccatgcgccaatccaaaccgaaagccagaaggctttcatgagaaggacaagaagccatattgcc

SEQ ID NO: 105089 - DNA, 82 bp, Homo sapiens
ccgggctccgggaaaactacactggccagctctggattaatcgaattacagctgctagccaggaacatggactgaagtatcc

SEQ ID NO: 105090 - DNA, 73 bp, Homo sapiens
gggcatctaccagatgtacttgtgcttcctgctggccgtgctgctgcaggaagaaatgttggctatttggcga

SEQ ID NO: 105091 - DNA, 50 bp, Homo sapiens
ggagagggaggtgaatccgtggcagaggatgtggtaccacagattgtccc

SEQ ID NO: 105092 - DNA, 98 bp, Homo sapiens
tggacgccgcgatcgtggggcccgcgaggcgggcagccggggcgtccaggcttcctgttggataaaaaaattggagtaaatcaaccaaaacgaattga

SEQ ID NO: 105093 - DNA, 101 bp, Homo sapiens
taaatacagaaggacatgcaaaacttgcagattttggggtagcaggtcaacttacagatctagtgaaaagccatttgatgtatgcggtcagagaagaagtg

SEQ ID NO: 105094 - DNA, 74 bp, Homo sapiens
cggagcttctcagaagacagagggttttcttttgaggcaagaagctcttctggctgccattagtgaaaaagacg

SEQ ID NO: 105095 - DNA, 100 bp, Homo sapiens
gccagttcatgaaggccggcagcatcaatgtctggaacatctgtcccttgttcaaaggtggtctggacttggctattgagggcccctcaaaagcagaaat

SEQ ID NO: 105096 - DNA, 75 bp, Homo sapiens
caagaatgtctgcctgtcattctggatgtgggaaccgaaaatgaggttctcagaggcactgtgactgacttccct

SEQ ID NO: 105097 - DNA, 100 bp, Homo sapiens
ttgcgtggtgatctggggtataccgttttagtcttgggggtagagtgactgcttgcgaaccagttcagcagtgcctcagatatgtgttgagacggattct

SEQ ID NO: 105098 - DNA, 80 bp, Homo sapiens
agagaaagagccctggatggttgtaaggaaagaaacaagcagacggtatccaggcccaagtctgttttggtggtctgaga

SEQ ID NO: 105099 - DNA, 80 bp, Homo sapiens
ccatacccaataaccaggtgcttggcaaaatcgagcgggccattgatatggctcgtggacagcagaaaattcagtctcag

SEQ ID NO: 105100 - DNA, 83 bp, Homo sapiens
cgggggtgatgcccacccgggcgagaaagcttcgagagctgtgcccaggagtgaacaaccagccctacctctgtgagagtggt

SEQ ID NO: 105101 - DNA, 82 bp, Homo sapiens
gaaaatggagcccttcaccaatggcttatgcaagcaaagatctggaggagcagttacggtctgtgtccagtgtagatgaact

SEQ ID NO: 105102 - DNA, 82 bp, Homo sapiens
tgtcaagcgaagccttgaaaaagctgccctgagacggtgtcccgccgaaagcggacaaggcaaaatctcagcaagttcggac

SEQ ID NO: 105103 - DNA, 50 bp, Homo sapiens
tgagagcatcaagctcgtgtccatcggaaagtgactattttaccccacag

SEQ ID NO: 105104 - DNA, 96 bp, Homo sapiens
ctggtccaggccttccagtacacagacgagcatggggaagaagaaattgcttcagagaattcagattgcatctttccttcagctcctgatgttaag

SEQ ID NO: 105105 - DNA, 75 bp, Homo sapiens
cctttagatctatggcccggtgcgggtcgggggtcccgtgtgcatgattttttatcaagcagaaatgcatcgaac

SEQ ID NO: 105106 - DNA, 80 bp, Homo sapiens
gaagcatttgaaatgatggagaaggatgagctatgacttgctaaacaatctgttggctggagctactcggccagggttta

SEQ ID NO: 105107 - DNA, 75 bp, Homo sapiens
aagaattttgataaaatcagagtgtggctgcaaagtgaaaagcttgaacgctaagtcctatcagccatggaaaca

SEQ ID NO: 105108 - DNA, 75 bp, Homo sapiens
atgatagcttctggaggcagttcaagcactctgagaagtggatcaatcttcctgtcctacaactgacaaaggatc

SEQ ID NO: 105109 - DNA, 82 bp, Homo sapiens
ggctgttagaagaattcatgctcatccgggtgagaaaccttaccactgtgactgggacggctgtggatggaaattcgcccgc

SEQ ID NO: 105110 - DNA, 50 bp, Homo sapiens
cggggaggaggacgcggtggaatggggccagtgaagaagcaaaggaagac

SEQ ID NO: 105111 - DNA, 75 bp, Homo sapiens
cccggagtgtatgtctttggagaacttctggagctggccaacgtgcaggaggttcttttagagcaagatatattt

SEQ ID NO: 105112 - DNA, 75 bp, Homo sapiens
aaagtcttaggactgctgggcaggagaactggcctgtgttcaaggtatgtgcaggaggttatgcggcggggacgc

SEQ ID NO: 105113 - DNA, 74 bp, Homo sapiens
tctggagtcatgcctgaaatgccagaggacatggagcagcttgcgcgatctctggcctcttcaactgcatcacc

SEQ ID NO: 105114 - DNA, 82 bp, Homo sapiens
cagacggattcatttagagctgcggaacaggacgccctctgatgtgtggacactgccagcggctgcagccgacttggaatga

SEQ ID NO: 105115 - DNA, 100 bp, Homo sapiens
gactcctggagatcgacccgtacttgaagccctacgccgtggacttccagcgcagggtatttgaagtataccatacaactgttttgaaaatccagcgtgg

SEQ ID NO: 105116 - DNA, 75 bp, Homo sapiens
tttacaaatcttcagggaatggccaagtgacaaagtaactctgggtggattttaactacaactcttgtcctctcg

SEQ ID NO: 105117 - DNA, 75 bp, Homo sapiens
gtgctgcaggagatagaggctcacatcgagggcatggaggatctttgtgtccctggtgatgttggaacattaatg

SEQ ID NO: 105118 - DNA, 87 bp, Homo sapiens
cccacgtcccatttcgcccctcgcgtccggagtccccgtggccaggtcactcctggaagcaaggcggctctagctaatttatgtatt

SEQ ID NO: 105119 - DNA, 82 bp, Homo sapiens
ggcctagcgctatgcctgcggcggagactgcatcaggctctcgtgaagatagtgatccggggagacaggaacacgggcaaga

SEQ ID NO: 105120 - DNA, 51 bp, Homo sapiens
atcgacatcagtgaagaagatcagaaagtctttatctcttgcaaggttcag

SEQ ID NO: 105121 - DNA, 100 bp, Homo sapiens
gctgtcctccggcagctggagatgtccgagcccaaggcaattgatcccaagttgtcgacgaccgacagggtggtgaaagcagcgtgcagggtcaaagaca

SEQ ID NO: 105122 - DNA, 75 bp, Homo sapiens
cttctgtccctactacgatgcaatcctgagtgttcagtgtgaggtggagctgatagagtccatagaggacctgag

SEQ ID NO: 105123 - DNA, 73 bp, Homo sapiens
ttgatggcttcgaggtgaactggaccgagcagcagcagatggccagctttgctccaatggaggacaaactcaa

SEQ ID NO: 105124 - DNA, 98 bp, Homo sapiens
gcaggaggcaggatggtctggaggctggtcctgctggctctgtgggtgtggcccagcacgcaagtgtgtaaatatgttgctgtggagctgaagtcagc

SEQ ID NO: 105125 - DNA, 96 bp, Homo sapiens
tgaacctgcataccatccgcgaccgagtctggcagatccagtcttgctcagctctcacaggagagggcgttcagacatatctgaagagatggatta

SEQ ID NO: 105126 - DNA, 90 bp, Homo sapiens
gaaagattgacagtcgatgaagacctcagtgatattgaaagggctgtttatctgctcaggatcagttcgacagcttagacaagcatacac

SEQ ID NO: 105127 - DNA, 98 bp, Homo sapiens
gtggaatatgagtgatgacaaaccctttctatgtactgcgcctggatgtggccaggtttttcgttggaatatacgttgcacatttatggcgattctga

SEQ ID NO: 105128 - DNA, 100 bp, Homo sapiens
caaggaccaaaagggcagaaaggtgagccttatgcactgcctaaagaggagcgcgacagatatcgggttttcctttggaatatggataaatacaccatga

SEQ ID NO: 105129 - DNA, 82 bp, Homo sapiens
aagaaggcaacgacgttccatctgtggaaggacctaccaaccaggttcgagaacttgtcttggacaattgcaaatcaaatga

SEQ ID NO: 105130 - DNA, 90 bp, Homo sapiens
gccctacaatcctgaggaaagaccaacaactgctgcaggcacaagcttggaccggctgaagcctccccagctttctgaggatgatatctg

SEQ ID NO: 105131 - DNA, 83 bp, Homo sapiens
ggattacaggcgtgagccaccacgcctggcctcactcaaacagtaaacgagatcccaccaaatattttggttgtgagctggga

SEQ ID NO: 105132 - DNA, 75 bp, Homo sapiens
aagggaaaggcactggaagtggctgagtacctgaccccggtcctcaaggatcttacctagccatatggcctgctg

SEQ ID NO: 105133 - DNA, 115 bp, Homo sapiens
tccagttcagacatcataagagatcttttagaagaagaggaagcctgggaagcatcacataagtgctctgaagattcctcgaaaatacatctgagaaattcttttgacatcccgg

SEQ ID NO: 105134 - DNA, 124 bp, Homo sapiens
ggtggatttagacaagtaacagctgctcagcttcacctgagggatccagtggcatcccttccagctggctttattcagccccacgtgtccaagcattgtctgggatagccttgtattggaaaac

SEQ ID NO: 105135 - DNA, 100 bp, Homo sapiens
ctggaaggggtgggcacctgggggctgcggcgagtggcgatgggcgagccggacttgcacgtggagaaagcgatataagtatccagtatatggtgtccag

SEQ ID NO: 105136 - DNA, 100 bp, Homo sapiens
tggaaaaccagttattgaatatcaagaggaggagttgttggctcgtgctgtcttggaaagagaatttaacaaccttttggtcatggggactgatagaagg

SEQ ID NO: 105137 - DNA, 75 bp, Homo sapiens
cttggcagaaagtgaggaggaaaacacccccattgaactttatattgctgttggaatatctggagccatccaaca

SEQ ID NO: 105138 - DNA, 50 bp, Homo sapiens
aaacgatccgctcccaaaacgggaagacatgtaaggaatttgcataagac

SEQ ID NO: 105139 - DNA, 78 bp, Homo sapiens
agctgaacactttccagccttgtttttcagcagctttgaggaaaagtataggccaagcccagcattcggtgcttcatt

SEQ ID NO: 105140 - DNA, 100 bp, Homo sapiens
tgatgagctgatcttaatcaaaaactttgtgtccctggtgatgttggaacattaatgatggaacatggccaaacttcagtcatgatcctgaagccatggt

SEQ ID NO: 105141 - DNA, 100 bp, Homo sapiens
tgggattggagattccacccaaacttgctggtcactgggagctgctgcacaggttctggaacctctggcggtctcagattgagcagaaaaaggaaagaga

SEQ ID NO: 105142 - DNA, 73 bp, Homo sapiens
tgcctgtggcataaacccggaaaaaagcatccttttccaacaatctcaggatacatgatcccttaattcaggc

SEQ ID NO: 105143 - DNA, 100 bp, Homo sapiens
cgagacccatggggaaactggtgtgatgcaaaggacttagaaggacaaacgtttgagtgaaaaatgtactctgacctgaatcctgaattttccttgatgg

SEQ ID NO: 105144 - DNA, 82 bp, Homo sapiens
ctgcttttctgtggactcctcttctacatcaacttggctgaccattggaaaggatttctctctgatcaaacggacagttcag

SEQ ID NO: 105145 - DNA, 100 bp, Homo sapiens
ccatgcccggtgaccacttttggaccaaaggcctgtgtgctgcagaacccccagaccatcatgaatagcacatttcaaacctacaagaaagaagtgtgcc

SEQ ID NO: 105146 - DNA, 75 bp, Homo sapiens
gaatttcagcagctctatgtgaagatacttgccagaactaatacagctgatgaaatacctgaccttttctgctcc

SEQ ID NO: 105147 - DNA, 75 bp, Homo sapiens
gcgccacccgccgacgcctcagccgcttggggcccgcacggaccctctacttcaacttcgacccccaccacttct

SEQ ID NO: 105148 - DNA, 90 bp, Homo sapiens
aagaaactcaatgatcgtgtcatgagagttgcactccaggacttgcagacgaactccaagattggggcactcctgccttactttgtttat

SEQ ID NO: 105149 - DNA, 75 bp, Homo sapiens
gtgggtgagcggcgcagcggcggcagcggagagcgagagaggggagcaggtaaagctttccagtttgaatttaga

SEQ ID NO: 105150 - DNA, 80 bp, Homo sapiens
ctcggtacgccgccgcctcgcacccgcagcctcgcgcccgccgccgcccgtccccagggcgtctctggccgagcctcttt

SEQ ID NO: 105151 - DNA, 83 bp, Homo sapiens
attcaactagccaaggaaaaaaagcagagaggagcggggagcaatgcaggtgaatgaaaactttgccattgatttgatagcag

SEQ ID NO: 105152 - DNA, 51 bp, Homo sapiens
ccgttatgtgggaagcgaatccaataaacaggggtcacatgacgacagaag

SEQ ID NO: 105153 - DNA, 93 bp, Homo sapiens
ccaacttcagcctggagcggacactggcagccgagatgggcattgggatcccgtggcagttgcagcactgaagtggagaaggagacccaggag

SEQ ID NO: 105154 - DNA, 83 bp, Homo sapiens
tcatggagcctatatatccttttgcacggccccagatgaataccaggaagcatcggagagcaagagacaggtccagatcctcc

SEQ ID NO: 105155 - DNA, 100 bp, Homo sapiens
gcgcttcagcgtcccggcgccgtcgcgccactcctccgagccgaatacatcaagcaatggtaacatctttaaatgaagataatgaaagtgtaactgttga

SEQ ID NO: 105156 - DNA, 74 bp, Homo sapiens
tttcccaacttttggagactcccagagtgactatgatacgctggatgaaaaagaaagtcggcgtctgttccaac

SEQ ID NO: 105157 - DNA, 90 bp, Homo sapiens
aaacaaatttccatcggaatatgtaccgactactctgatgccagtatggactggagatgatgggagccagttggatagccccatggaaat

SEQ ID NO: 105158 - DNA, 100 bp, Homo sapiens
gatcacggtgctgtctgccatgacagaggaggcagctgttgcaatcaaggccatggcaaaataactggctcccaggtgccagatgtgccatccagatgac

SEQ ID NO: 105159 - DNA, 75 bp, Homo sapiens
ataggaacctggtctccctggatctctttaaggaagttgcagggccaacagaaatgtgtgaccagaggcagctgg

SEQ ID NO: 105160 - DNA, 75 bp, Homo sapiens
caaatgaagaacactttcaagaaccagctatcatggtgaacttacttcagattgtgcgggaccactgggttcatg

SEQ ID NO: 105161 - DNA, 75 bp, Homo sapiens
cggctgtacttgagcagtcacctggcacagaacaagttgaaatcatcgcagaaggataaagttcgtcagtttatg

SEQ ID NO: 105162 - DNA, 90 bp, Homo sapiens
ctgtgacctgtggagacacggccagatctgccctccagtactctttgagcacatcaaattcttccattgccgctcttctctgtgcccttt

SEQ ID NO: 105163 - DNA, 100 bp, Homo sapiens
ggatatgggccagggcatcccattcaagccaggcacatttgatggttgcatcaggtccacatcacgctgagcacccatgagtgtgccggcctttcagaac

SEQ ID NO: 105164 - DNA, 75 bp, Homo sapiens
agatgatcaggaagtcattcgcttccagaagaatcatggcacaaccagtgtgcttttcttggagaaagaagaaaa

SEQ ID NO: 105165 - DNA, 82 bp, Homo sapiens
ctggagagaagcagcggatcagcagaggttttaaaatcaaagatgggaaaatcggagaaaattgcccttccccatggccagc

SEQ ID NO: 105166 - DNA, 87 bp, Homo sapiens
catgtggaggctgctggctcgcgctagtgcgccgctcctgcgggtgcccttgtcagctgctacaggagctgagagaccctaccctca

SEQ ID NO: 105167 - DNA, 100 bp, Homo sapiens
gcagttacaacagcatacagcatttctcccaccagattttccagcaaataacattgtgaagttcctggtaggctttaccaacaagggtacagaagatttt

SEQ ID NO: 105168 - DNA, 100 bp, Homo sapiens
agtctagcagatcagccagtctctttcatcatcaagcagacatactcaagcttgatttggaaggcaccagaatccggaggaaaaaacctctgggggaaag

SEQ ID NO: 105169 - DNA, 104 bp, Homo sapiens
aagatggccgcagtcggcaaggagagacgtcgctgaggggcttgcctgaagcgagggatcctggtgtatagcctggaagcaggacgccgcctcttgaagctggg

SEQ ID NO: 105170 - DNA, 100 bp, Homo sapiens
gccggggggctatgggcccatcgactacaaacggaacttgccgcgtcgaggactgtcggatgggagttttgtggttcatgatataccttctggatcttat

SEQ ID NO: 105171 - DNA, 75 bp, Homo sapiens
gtagtcctgtgctcaacattgcttatcggtgacttcatggtcatgacgattttcttcaatgtgagcaggcggttt

SEQ ID NO: 105172 - DNA, 51 bp, Homo sapiens
tcctgctgacttacgcttgtttgagggccgagatctggacgataaaattca

SEQ ID NO: 105173 - DNA, 75 bp, Homo sapiens
gaccttcaagcctgagcagatgaatgactccaggaagaaggcactggtgagaaaaattgatgcctcagacaatat

SEQ ID NO: 105174 - DNA, 100 bp, Homo sapiens
attaaaagaatatttagtaactttagctaaaggggacttaaaatttcccctgaagatatttcagcattccaaaccagatatccatatcatagattttgac

SEQ ID NO: 105175 - DNA, 83 bp, Homo sapiens
aaacttgactgtatacagaatcttgaatcagaaattgagaagctggttgcaaaagcttctcatttcagagagatgccaggatc

SEQ ID NO: 105176 - DNA, 96 bp, Homo sapiens
aaggacttcctgctcacagcccgacgaaaggatgccaaatctgcatatctatgtgagactgaattttcctcttagacttcagctaaaactgtgtat

SEQ ID NO: 105177 - DNA, 82 bp, Homo sapiens
gacccagactgacttgttcacatgtggcaaatgtaaaaagaagaattgcacttacacacagcttaaagcttttcaagccagg

SEQ ID NO: 105178 - DNA, 82 bp, Homo sapiens
gtggcccaggccgtgctacagccaccagcccctcgggttccaagatgcagctactggagacagagttctcacacaccgtggg

SEQ ID NO: 105179 - DNA, 51 bp, Homo sapiens
atggatcaacattctcttctaactttctcttgcatggcaccaagaatgtta

SEQ ID NO: 105180 - DNA, 90 bp, Homo sapiens
gctgccgctcggtcacgcttggtatgatctcgtgaaatcttgagagaaactgaatgacgaatgaaactattgttcctgtttcacacagaa

SEQ ID NO: 105181 - DNA, 51 bp, Homo sapiens
catggttcactccagcatgggggctccagggtctcactctgtcacacaggc

SEQ ID NO: 105182 - DNA, 82 bp, Homo sapiens
cgcagaccttcgttgccctctgtgccacaggctccccacaggtgcaggaagccgccgcccagccatggacggggaggagcag

SEQ ID NO: 105183 - DNA, 51 bp, Homo sapiens
ctgagactacaggtgttccaaagtggataaggaagcctgtgtgggtaccaa

SEQ ID NO: 105184 - DNA, 83 bp, Homo sapiens
tgatttgttctgtatcagaagacaatatcatgcaagtgtggcaaatgaaacactttgtgctactctgtggggctttggaaaag

SEQ ID NO: 105185 - DNA, 89 bp, Homo sapiens
tattttgctgcattgtgaaaggacctctccagcaatgattacttcagaattaccagtgttacatgtctttctcgagaagcaggtggaaa

SEQ ID NO: 105186 - DNA, 100 bp, Homo sapiens
cgggggtgaagctttgcaggtggacaaaggcaattaagttggaatatgcaaggttggttaagttggcccaagaagacaccccaccagaaaccgattatcg

SEQ ID NO: 105187 - DNA, 100 bp, Homo sapiens
caggcattctctgagatgctccagagtttggtggtaaaagacccacatttggaaaatcttgacaccattattaagaaaagcacttggttctgcttcgaga

SEQ ID NO: 105188 - DNA, 75 bp, Homo sapiens
tcagtttacagttcattttttgcttggtttggaaaaatttcattagaggaagaagccatggatttaataaataga

SEQ ID NO: 105189 - DNA, 100 bp, Homo sapiens
gttgtgttgtgccaatggtggagaagaaaacttcggtgctactatatcggggccacagatgatgcagccaccaaaatcatcaatgaggtatcaaagcctc

SEQ ID NO: 105190 - DNA, 74 bp, Homo sapiens
cagcgttccaccgctcgggtttggctggacttatctaaaaacagactggttgaagttccaatggaattgtgcca

SEQ ID NO: 105191 - DNA, 100 bp, Homo sapiens
tagaggagcgtgtggctcatctacgaagagtccagttgagacgggagaagattgaccttgaaaatacattggaacaagaacaagaagcactagttaatcg

SEQ ID NO: 105192 - DNA, 88 bp, Homo sapiens
ccatcacccaccaacaacaccacaataatccacagccaagaaggctgaggagaatgcagagggtggggagtctgccctgggaccggat

SEQ ID NO: 105193 - DNA, 74 bp, Homo sapiens
ttccacatcagatgcttcacctgtcaagaagtctggacagctgatcacctgaaagagaggagccaagaaaacca

SEQ ID NO: 105194 - DNA, 98 bp, Homo sapiens
atccgcgaggcaggagagaggaggaggagtgcggcgcggcggccccgggaccaaggagctttcctgctctgggaccctaccaaggtgcccccacgact

SEQ ID NO: 105195 - DNA, 51 bp, Homo sapiens
tctggacacagaagtatttgtgacagtagagatggggttttaccatgttgg

SEQ ID NO: 105196 - DNA, 95 bp, Homo sapiens
cggaaaccacgcgtcctactacaaagatgctctgcggtttttgggctgtgttgacatcaaggatctaccagatgagagctattgttcacataact

SEQ ID NO: 105197 - DNA, 75 bp, Homo sapiens
tgctagctggttttggaacagtttcagctggcatggtactggatatagtacagggcacgaccataataacatccc

SEQ ID NO: 105198 - DNA, 82 bp, Homo sapiens
ctccttcctgcgcgcgcgcctgaagtcggcgtgggcgtttgaggaagctggggccgagatggacgaaaaaatgtggttcctt

SEQ ID NO: 105199 - DNA, 82 bp, Homo sapiens
ggctctgcagcgagcgctcgatggaacctcatcccagacaatgcagatcttcgtgaagactctgactggtaagaccatcacc

SEQ ID NO: 105200 - DNA, 75 bp, Homo sapiens
aattcccggaggactacagtgaccaggacatggatttgattgacatactttggaggcaagatatagatcttggag

SEQ ID NO: 105201 - DNA, 88 bp, Homo sapiens
cggctgcggaccctgccattccggaggagctcccctgggacctgtggccgccgcccacagaccatgctcctggggcgcctgacttccc

SEQ ID NO: 105202 - DNA, 75 bp, Homo sapiens
agcacattaggctttcttccctggcacatcagattgactgagattgtgtgatctgtgaaaatggttcgctattca

SEQ ID NO: 105203 - DNA, 100 bp, Homo sapiens
aggagcagcttccaggatcctgagatccggagcagccggggtcggagcgggttatcaatactctggctgaccatcatcatcgtgggactgactttggtgg

SEQ ID NO: 105204 - DNA, 90 bp, Homo sapiens
aattgccattgcctatgctacacttgagtatttcatcagagatttggtagctggcagtgttgtgatggcttttgaagaagtatgcccgga

SEQ ID NO: 105205 - DNA, 83 bp, Homo sapiens
ctcattcacttctagacgacaaaatgcaaaaaaggaggccaaagactttgtgtcgtgaaaactacccctaaaagccaaaatgg

SEQ ID NO: 105206 - DNA, 96 bp, Homo sapiens
cggctgcccgaggccggcgaagccatgggcgccgggaccccgccgccgccgccgccgccgccgtctggccccaggccaaacaccagagcaccctag

SEQ ID NO: 105207 - DNA, 100 bp, Homo sapiens
cgatgtggacgctctgtgccgggcgctgtcagctgtccacagccccaccttctgccagcccctcccagttcccccagggacggccacttcctggtccccg

SEQ ID NO: 105208 - DNA, 100 bp, Homo sapiens
tacatgtcaaatggatctctttctccacccatcccgagaacaatgctgtctttgcatttcaactacgcaacccagtgcacaatggacatgccctgttaat

SEQ ID NO: 105209 - DNA, 100 bp, Homo sapiens
atcaatgccctcattaaagcagccggtgtaaatgttgagcctttttggcctggcttgtttgcaaaggatactatttttgagacaacaaattaaggaactt

SEQ ID NO: 105210 - DNA, 100 bp, Homo sapiens
cggccgggctggatcaggatgagttacccagataatatcactcctgacactgaagatccagaaccaaaacctatgatcattggcaccaataatgtgtttg

SEQ ID NO: 105211 - DNA, 100 bp, Homo sapiens
ggcctggtcctggccccggagctgttgctggacccctggcaggcaacacagtcactcctggcggcaaaccaaacaaaaccagagtcatctggggaaaagt

SEQ ID NO: 105212 - DNA, 88 bp, Homo sapiens
gagaatccaagcaaacatgacagcttctggaacttggaggcctgtgcaacctgtgcccagacagggccaacaaggagcacatcctgca

SEQ ID NO: 105213 - DNA, 97 bp, Homo sapiens
ttcccagatcctcaaactatcgaagatgactttgaagaagccaaggaaattttgacaaagatgagatacttttcaaatatagaagaaaagatcaagt

SEQ ID NO: 105214 - DNA, 100 bp, Homo sapiens
gaagcagcgcctgttcccggggcagatccaggttcaggtatcctccatgaaatgtgggatccttccaatttctcaagagtctcttcttctgggagatgtt

SEQ ID NO: 105215 - DNA, 100 bp, Homo sapiens
cactaactggggctacgactctgatgggcaggtagcgctggtatatggtcaaatgaatgaaccacctggtgctcgtgcccgggtagctctgactgggctg

SEQ ID NO: 105216 - DNA, 101 bp, Homo sapiens
tccgaaagtggctctacaaacccaaggacttgaaaatactggaaatctgtccggatccaaattattttgcaagccagatgagtaaccagagggcatgaaag

SEQ ID NO: 105217 - DNA, 100 bp, Homo sapiens
cgagtggatgaacatgtgcttggtgtcgtttttccttgagctgaacgtcttgcaacagtggccgcacgcatagatgagttttgatcatcctgagaaaaat

SEQ ID NO: 105218 - DNA, 100 bp, Homo sapiens
gctgcagcggccctggcgggtgccctggctaccatggaccatcctgctggtcagcactgcggctggaaaaccagtagattcccagacatcgcgaagtgaa

SEQ ID NO: 105219 - DNA, 100 bp, Homo sapiens
cagatgcttgtttcttcaccatcaaccggacctacctccatcatcacatgaccaaagcattcctcttctatgttagagatgtttatgattacttccgagc

SEQ ID NO: 105220 - DNA, 88 bp, Homo sapiens
cttttctatttcgttttaactgttggcgaaaattatttggcccaatcaattgagcagagactgatgaaaatggatcacactgcaatcc

SEQ ID NO: 105221 - DNA, 100 bp, Homo sapiens
atcactacacacttcgagctgaagcacctctccagcggggacctgctccgggacaacatgctgcggggcacaggtgagtgaagatggcagagaggacgtg

SEQ ID NO: 105222 - DNA, 100 bp, Homo sapiens
cgggacatgaagaagttcgggggccccaacaagatccggcagaagtgccggctgcgccagtgccagctgcgggcccgggcactttcccacacaggatgga

SEQ ID NO: 105223 - DNA, 100 bp, Homo sapiens
atatgcctgttcctgtgatgtggaggaaattttccgcaagcagccaacagagcagtcagcagagcagccacgatgatgattctagcaggttcctgagtcc

SEQ ID NO: 105224 - DNA, 100 bp, Homo sapiens
ctggccctctcgctgttgctggtctctggctccctcctcccagggccaggcgccgctcagaacggttggattcagatgccgaggacacagtacttcctca

SEQ ID NO: 105225 - DNA, 82 bp, Homo sapiens
gaggaggcagccacggggcccctggtgtccacaggatgaaatgtccgagtcaggccagtcctcggcggccgccacacccagc

SEQ ID NO: 105226 - DNA, 80 bp, Homo sapiens
agccggccgtcccgggccgggggacccgcccgccatggccaccaagccatcgactacagtgacagcgccatgctccaagc

SEQ ID NO: 105227 - DNA, 100 bp, Homo sapiens
ccggaagggcggacacctccacatcgccttttgccacctttccctttatttccggaggaaactctttatacagtgaaacaggaggaaagaaaaatgcagc

SEQ ID NO: 105228 - DNA, 100 bp, Homo sapiens
ggaactctatcccaggaatacagctttgcattaggtctgtgagctttacttctctatataatttgctgaagacaaaactttgcccctatttctacgtttg

SEQ ID NO: 105229 - DNA, 73 bp, Homo sapiens
agagcctgagatggacgtaaggaagagaacggactggttcttgaagggaaacctcctcatcatcatcgtcagt

SEQ ID NO: 105230 - DNA, 90 bp, Homo sapiens
ggggaccacagctcccgaaagcgacgttcggccaccggaggagcgggagccaagcagctcaccatggatgatgatatcgccgcgctcgtc

SEQ ID NO: 105231 - DNA, 100 bp, Homo sapiens
agagcgcctgcgaccccagtcggtgctccggggaggtcacctgacgaggaggttctctacttaaaagacaatgactactgatgaaggtgccaagaacaat

SEQ ID NO: 105232 - DNA, 100 bp, Homo sapiens
ttacatcgatgaccttggacacctccatgttatggacacggtctttcttattcagattcgtattttacatggagaagtgaacaaagtgaaactggatcag

SEQ ID NO: 105233 - DNA, 100 bp, Homo sapiens
atccacagcctagatgaagtcaatttcatacagaaccttgtgttttacattgaagctgcatataaaactgctattttgtggaagtataatactttgtcat

SEQ ID NO: 105234 - DNA, 98 bp, Homo sapiens
ttgtcccagggaaggaaccaaggttctacactgcccctcagctataggtctgggatctcctggctgttgctgtcttctgctctcatcctgcaggtggg

SEQ ID NO: 105235 - DNA, 100 bp, Homo sapiens
ctgcccacgattcgcttctgagggagtgaaatattagggccaacactctcagaaacaagaccggaagcccttccacctccatctagcaatgaaacacctg

SEQ ID NO: 105236 - DNA, 96 bp, Homo sapiens
catggagatccagttcaattatgaatctcaggaacaccaccttctgtcagtttccctgaaacctgggctcttgaagacgcatcactggagcagatg

SEQ ID NO: 105237 - DNA, 83 bp, Homo sapiens
ctgtactgggagagctaggatggaaaacatatccattaaatgggcactatgggactgagtaacattctctttgtgatggcctt

SEQ ID NO: 105238 - DNA, 75 bp, Homo sapiens
gaagccggcggaccgcgtcctgcgccggagcagtttgctggaacattatcagatggcttagggaagacgatggac

SEQ ID NO: 105239 - DNA, 98 bp, Homo sapiens
gcaagacctaaatgagcctcttgccaaagtgtcccttttaaaaggaaattcttggtgcatcactttctgcacctttaacatcatacaaggtgatctat

SEQ ID NO: 105240 - DNA, 100 bp, Homo sapiens
cattccaacacataaaaattatttatccaacagctcctcccaggtgtcatggagaaactccagctgggcccagagattctgcagcgggaaaatccaaggc

SEQ ID NO: 105241 - DNA, 98 bp, Homo sapiens
gccgctggcgctgtcgccggctgcagtggccgccgctggagaccgcgggacctggcgctgcagcgagaaagtggtggagagagagctggatgctcttt

SEQ ID NO: 105242 - DNA, 88 bp, Homo sapiens
ggagcagccgaccatggagccccagagcagtggagtgggagtgaagaagctgtgtgaactgcagcctgaggagaagtgctgtgtggtg

SEQ ID NO: 105243 - DNA, 97 bp, Homo sapiens
gggcgtctagcccgtgttgagaatgtccttagcggccttggtgaagatgccagtaatgaagaaaggaatgtttctccatcccagagagatgaagtaa

SEQ ID NO: 105244 - DNA, 75 bp, Homo sapiens
cgactatttggcaagaagcagatgcgcattttgatggacagtgaccaacaccttcaggacgaacaatatccagat

SEQ ID NO: 105245 - DNA, 74 bp, Homo sapiens
gcggaatgacagcggcgaggagaacgtcccgctggatctgacccgagagtggagagatctacagaccaagtaat

SEQ ID NO: 105246 - DNA, 50 bp, Homo sapiens
cctgctaagccaaacagagaaggtggccagaatggatttgtggccagggg

SEQ ID NO: 105247 - DNA, 82 bp, Homo sapiens
gcatcatttacttatgtggaaaggaatttggataaagagagggcagtgctactacaacgccggaaaagggaaaatatgtcag

SEQ ID NO: 105248 - DNA, 50 bp, Homo sapiens
tttggaactgtcaggtacctcaaagctgtaaacaggaacatcgataagta

SEQ ID NO: 105249 - DNA, 82 bp, Homo sapiens
gtggtggagatcttttgggagaactactgggacgtcagagcttctccgtgaaagacccaagatttatgatattcagactggc

SEQ ID NO: 105250 - DNA, 82 bp, Homo sapiens
ccttgatttgtccctcccagttttagatgatcaggaagatgataagatcagatgggcgtctagatgggactatattctggag

SEQ ID NO: 105251 - DNA, 100 bp, Homo sapiens
ctgctgcgagccggcggcccggagtggggcggcgggatacagacgtccctcaccagtgccagcttggggtctgcagatgagaactccgtggcccaggctg

SEQ ID NO: 105252 - DNA, 98 bp, Homo sapiens
gataattgaaaacccagatgtcccacaggatttcgggaatcaagcatgccaatgaagatgtggaaagaatgttactaggaaacaagtgtgatatggac

SEQ ID NO: 105253 - DNA, 82 bp, Homo sapiens
cccgtggcccggatgcaggacagacccctcagcccggtcctttggagtagaatggattgcaagttggctagtggtcacggtg

SEQ ID NO: 105254 - DNA, 87 bp, Homo sapiens
tgcctgtgtcccacttgttcgcggcctataggagttcatgatcaagtgttgcccacaccaaatgcttcatccagagtcatagtacat

SEQ ID NO: 105255 - DNA, 83 bp, Homo sapiens
atcccgcaccccgatggtagccgaggagctggtgagaagccctaccactgcaactgggacggctgcggctggaagtttgcgcg

SEQ ID NO: 105256 - DNA, 100 bp, Homo sapiens
ctgaactgagcgtatgtgccacgccgcccaggagacccctctgctgcaccacttcatgatgttccaggtcatccagccagagcgtgcgctgtacatccag

SEQ ID NO: 105257 - DNA, 100 bp, Homo sapiens
gtctgcccagtaatcctgttcaagggcaagtcaggtcaattcagtgaagatatgatacccacagtgggcttcaacatgaggaaggtaactaaaggtaacg

SEQ ID NO: 105258 - DNA, 82 bp, Homo sapiens
ctgcagcggaaccggacccagtccctgagccgcccctacacccacagttcgtgtttagtaggagcacagtagctgtttgggg

SEQ ID NO: 105259 - DNA, 100 bp, Homo sapiens
gacgatgaggacgacagcaccttcacaataactgttgatcagaaaaccttccatttccaggtggagttgcagcagaaggaccgggcactggtggagctgc

SEQ ID NO: 105260 - DNA, 100 bp, Homo sapiens
caatggactgcgaagaactcctaaacaggtggatccaggtgaccgggttattgatgtgggatctgaatggcgaactttcagcaatgacaaagcaacaaaa

SEQ ID NO: 105261 - DNA, 50 bp, Homo sapiens
cccctgtcccctacgtcctacatgaggccacagttgtaagggatcttgtg

SEQ ID NO: 105262 - DNA, 82 bp, Homo sapiens
ccttgtttcagatcctgaatagaaagcagatggtggagctgaatatgccacttaccagactaaatcaaccactccagcagag

SEQ ID NO: 105263 - DNA, 74 bp, Homo sapiens
gatgatgaggaggaggatgaggatgaggatggagatgaagatgaggaagctgagtcagctacgggcaagcgggc

SEQ ID NO: 105264 - DNA, 75 bp, Homo sapiens
ccgggctgaagattgcttctcttctctcctccaaggtaagaatgattgatgttggctgatattggagtgctcatt

SEQ ID NO: 105265 - DNA, 82 bp, Homo sapiens
ctgtttaagggaagagaggagaatattggctgcagccaacatgcctgtccagctctctgatgtaaaggatggagtaaatcaa

SEQ ID NO: 105266 - DNA, 96 bp, Homo sapiens
gtgccaatggtggagaagaaaacttcggggcagcggcagtgatgacacggagctgcggtactcgtcccagtacgaggagcgcctggaccccttctc

SEQ ID NO: 105267 - DNA, 100 bp, Homo sapiens
tagggggtgagtggtgcactgacagtgcttatgaaggacgcaatcaagcccaatctcatgcagacactggagtgagaaagatcagtctaaagaaaaggag

SEQ ID NO: 105268 - DNA, 49 bp, Homo sapiens
ttgagagtgtccttctctcctgcaagctgatgtcaattttgcattggaa

SEQ ID NO: 105269 - DNA, 50 bp, Homo sapiens
cgtgtcgcctccggggggcgtagcaagggcatcttctctgcattcagttt

SEQ ID NO: 105270 - DNA, 111 bp, Homo sapiens
cccgactgcaactgctggattgctgcaaggctgagggacgagaacgagtcaagagaatccatcccattaaatgacctgaagtcagaagtatcaccacggatttcagcagag

SEQ ID NO: 105271 - DNA, 50 bp, Homo sapiens
cccatggcgctgaagaggattcagaaagtaggaggtgtgcaatctttggg

SEQ ID NO: 105272 - DNA, 101 bp, Homo sapiens
cgatgggcgagccggacttgcacgtggagaaagcttggttgaatctggcgatgtggaacccatggatatggagggctgactatatacaccatgttttttcc

SEQ ID NO: 105273 - DNA, 82 bp, Homo sapiens
tcgccgccacgctgtgcttctcgcttcagaacattttctccaaaaaggctgttcggctcttgaatcccagcgatgaaaccag

SEQ ID NO: 105274 - DNA, 110 bp, Homo sapiens
cggaacaggctaccaagtccgtgctgtttgtgtgtctgggtactccaaagattcaggtttactcacgtcatccagcagagaatggaaagtcaaatttcctgaattgctat

SEQ ID NO: 105275 - DNA, 101 bp, Homo sapiens
agaagtcacaaaacagcagatttcccaagagcagcggaaaatgatccagtcacaggtgttcaaagctgaaacaggagagaaacttctagaaatcaaggctc

SEQ ID NO: 105276 - DNA, 98 bp, Homo sapiens
tggacattttactggctcaagcagcaagctcattatgatgctatggataatgatatcgttcagggagcagaggaccagggaatccaaggagaggaagg

SEQ ID NO: 105277 - DNA, 98 bp, Homo sapiens
cggcatcgtctttccgtcctctgaggcgacggccgcggctgcacagcatctactacaagccttagtgggtctgatagtgagaccgaggggaaacaaca

SEQ ID NO: 105278 - DNA, 74 bp, Homo sapiens
cgaaatgatgggatagcgttgcaaatccttaaaagagtcttaacgcaatgtctcaggctgtgcagacaaacgga

SEQ ID NO: 105279 - DNA, 74 bp, Homo sapiens
cggctcacctgtgcgggatggaacaaaagattttgtacagcagcaatttcttactctctctgcaagttttcttc

SEQ ID NO: 105280 - DNA, 96 bp, Homo sapiens
cgtggactaagaacgcattgccgccggtcctgaccaccgtgaacggacagtcccccccagatgcagcagcttttttatgagaattacgagcagaac

SEQ ID NO: 105281 - DNA, 100 bp, Homo sapiens
caaaagaagctacagaagcaaaagctgcagcaaagcgggaagatcaaaaatacgcactaagtgtcatgatgaaggcttttgcagaaatgctgaaagtgaa

SEQ ID NO: 105282 - DNA, 85 bp, Homo sapiens
caaccacagatggcactgccaacagattctgaagactactttgaggtcaacattccaacagacctacgagcaaaacattctgggg

SEQ ID NO: 105283 - DNA, 97 bp, Homo sapiens
gcgtgatgaaatgctgggacttgtgcccatgaggtgcagtagacattgttgcaatcatgatcggcaatctgaaaggcacaaaaattctgcaatctat

SEQ ID NO: 105284 - DNA, 75 bp, Homo sapiens
ggctgagccagaggccaactgcagaggaactggaacagaggaacattttgaaaccaaaagactgttgaagtagag

SEQ ID NO: 105285 - DNA, 100 bp, Homo sapiens
gagcgtcctccttttgtgcgagcgccggcggctcggcttctcgaagtaactgagggcaaacccatcagacaaccagagccataatttgtggtcaccgctg

SEQ ID NO: 105286 - DNA, 80 bp, Homo sapiens
tcaccacaccaagaacagcgagcaggcgcgcagccacctggagaaggcgttttctggatatgccgcagaaggatccgtgc

SEQ ID NO: 105287 - DNA, 98 bp, Homo sapiens
cgtaaagcagtctcttatgcaaagtttgtgagtggtgaggaaattgtctctgcatgaagaacttcctgattacattatggtgatggtggccaacaaga

SEQ ID NO: 105288 - DNA, 50 bp, Homo sapiens
ggagaatatctgcttgctcaactttgcatgaagaccccgtttggaaaggc

SEQ ID NO: 105289 - DNA, 90 bp, Homo sapiens
gggcggaggcggaggcagaggtggaggcgctttgaaagagaaactccagaaaatcttgccaaacttctgaccaggatgtatttaaaatca

SEQ ID NO: 105290 - DNA, 101 bp, Homo sapiens
ttgctactgccctctgcgctcctgcatctgcctccccatgagcgggatgctgcactccaaccctggggactatgcctggggtcagacagggcttgatgcca

SEQ ID NO: 105291 - DNA, 100 bp, Homo sapiens
tttgaagtacaccgtggtgacattgtatcattggtttatctggaagtattttggatgtgtatagcggtgaacaaggaatttcaccaattaacatggggct

SEQ ID NO: 105292 - DNA, 100 bp, Homo sapiens
gccgccgcgccaccatctttcgggctgccgagggtgttcttgacgattaatcaacagaaaatgcttggacagaagagatgagtactatttccactaaggc

SEQ ID NO: 105293 - DNA, 75 bp, Homo sapiens
gccactacagttcatcaacatcaactacgtccctctgaaggctctacagattctcccctgcccctggagaaggag

SEQ ID NO: 105294 - DNA, 82 bp, Homo sapiens
ggacaccgagaaagattattaccactgtctgtcggatatgaagaccctggagtaggctgtgggtcatcttattgctgcagtc

SEQ ID NO: 105295 - DNA, 82 bp, Homo sapiens
ggcggtttctgaggttcttcactcgcgactgacggagctgcggtggcgtctccacacgtgtcaacagcatctccaccctgga

SEQ ID NO: 105296 - DNA, 75 bp, Homo sapiens
cagagtttgacagggagatagaccggggatccctcaaccctggaaaacagctgcgcagttgtgtagcagttgagt

SEQ ID NO: 105297 - DNA, 74 bp, Homo sapiens
tggcgttggtgggagccgtgctctacctctatccgtaagactttgaccccgacgcaggcttcagtgattgccgc

SEQ ID NO: 105298 - DNA, 98 bp, Homo sapiens
ttgatgaagaaatggagaatgaaatttgcagagtatgggatatgtcaatggatgaggtgatcccattaagatactaatgccatcactgtctcctacaa

SEQ ID NO: 105299 - DNA, 75 bp, Homo sapiens
gccggcacgcgaagtggccgcatccgcaagctcggcaagatgtcggtgaaggagggcgcacagcgcaagtgggca

SEQ ID NO: 105300 - DNA, 97 bp, Homo sapiens
tacagagtgtgcacactggctatcattgatccagggatttttgccaagcctgaccatgttaagatgacatatccaaagactcagcttcagcattcac

SEQ ID NO: 105301 - DNA, 99 bp, Homo sapiens
cttccctggatttttcttcaccttttccttactcatgagccaggcaattgttctcttaactgaattaattagggaaaacttcaggaacagcaaattaaa

SEQ ID NO: 105302 - DNA, 83 bp, Homo sapiens
tcttcctcatcatcgtcttcaggaagccagacagattcaagtattgaaggaactgtggctgcaccatctgtcttcatcttccc

SEQ ID NO: 105303 - DNA, 100 bp, Homo sapiens
agcgccttcctcaacgacgcggacatggtcatgagctttgtgaacctggagtgcttgtgatttcacgtatttttgctgaactcgtaaaagagacacttgg

SEQ ID NO: 105304 - DNA, 100 bp, Homo sapiens
aatgtgacacaaggaaagtattctacagagaacaccttctgcagtggggaccatgtgtcctggcacagccctttggataacagtgagtcaagaattcagc

SEQ ID NO: 105305 - DNA, 51 bp, Homo sapiens
actggttctgggaaatctttctggggtgatgatgaacagtctacacagatg

SEQ ID NO: 105306 - DNA, 83 bp, Homo sapiens
gcggcagcgagccgggtcccaccatggccgcgaatcctcctctattggcccaggaagcccacccagccccgccacgcagagcc

SEQ ID NO: 105307 - DNA, 96 bp, Homo sapiens
tgctggctgaccacgctcggaccatcactgtggcactggctgatggtggccggcctgacaacacagggcgtggtgccttgaaagaaataccatccg

SEQ ID NO: 105308 - DNA, 98 bp, Homo sapiens
cgaggagccctgttccaaagcctcctggaccgtccaagaagaatgtatcctgtcaggtataatgtcagtgaatggcaagaaagttcttcatatggatc

SEQ ID NO: 105309 - DNA, 51 bp, Homo sapiens
ggacagagacgtgaagcactgaatgtccacaaaaggtggctccgattcctc

SEQ ID NO: 105310 - DNA, 100 bp, Homo sapiens
tcgtctggtttgatcacaagacgggcaaggaagtttgtggtatatgaagtattgcgagaagatgagttttccccactaaagaatgctgatagtcagaatg

SEQ ID NO: 105311 - DNA, 74 bp, Homo sapiens
gcatccttggcagaaagtgaggaggaaaacacccccatttggatgaatacattgccattgccaaagaaaagcat

SEQ ID NO: 105312 - DNA, 89 bp, Homo sapiens
tgaagaagtaatttcaacactccactatttttccaaagtggtggatgaggtaccagccatcactctaactgctaatattatttggtttc

SEQ ID NO: 105313 - DNA, 100 bp, Homo sapiens
caaagatattcaaactctaaaccatctgaattggctcaatgatgagagcagcccgacggccatggaggctgaagagacgatggaatgccttcaggagttc

SEQ ID NO: 105314 - DNA, 75 bp, Homo sapiens
ccaccctccaactttgcgacggaaatgtgtcatcgaaagccaggttttgggatttgagattgacgcggtgaactc

SEQ ID NO: 105315 - DNA, 50 bp, Homo sapiens
ctgcagaggttcctctacagcaaggttcaaaatcaaaggaagcccagaag

SEQ ID NO: 105316 - DNA, 100 bp, Homo sapiens
atggcctgagctaaacatctaactagaagggatacccttccatttcaaagaacagaatgctaaggaagctgtggcaaatctttgtagaatttgatggctg

SEQ ID NO: 105317 - DNA, 75 bp, Homo sapiens
gctctgatccccccctgccggggagggcccagcgcatccgacagggccgttgctccagggagaactgcaaatatc

SEQ ID NO: 105318 - DNA, 90 bp, Homo sapiens
aaaggtgttgcggctttataagcgggcgctacgccacctcgagtcgtggtgcgtccagaggtcaatgtgacggtggactacattagacca

SEQ ID NO: 105319 - DNA, 82 bp, Homo sapiens
agctggtggaacagctacgcatagaagccgggattgagcgcatcaaggctgcaagatcaaggccctgcgggccaagacaaac

SEQ ID NO: 105320 - DNA, 100 bp, Homo sapiens
acccgtgaaggcaatgatttataccatgaaatgattgaatctggtgttatcaacttaaaagatgccacctctaagagtcatattaaatctgtagactcag

SEQ ID NO: 105321 - DNA, 90 bp, Homo sapiens
ggttctggggatgctacagttcatcagcatcttcatgatacagttaagaggaatcttgacagcgccacttcccctcagaatggcgatcaa

SEQ ID NO: 105322 - DNA, 98 bp, Homo sapiens
ctcgcctcgactccaaatggttgaaaacagatatacagttcacagccatgaatgaaccacagtgcttctacaacgagtccattgccttcttttataac

SEQ ID NO: 105323 - DNA, 76 bp, Homo sapiens
gagaatctcagggctctgatggtttagaagaaagtgggaccttgcttaagtgtgtaatgctgtgtcatggagctaa

SEQ ID NO: 105324 - DNA, 82 bp, Homo sapiens
cccggacagtggcagtgaaacaggctggaatgaactcctcattgcctccttctcacaccgatccattgatgttcgagatggc

SEQ ID NO: 105325 - DNA, 100 bp, Homo sapiens
agtgccagtttttccacaaagagcggatggaggtgggaggattgcttgagcctgggaagtagaggctgcagtgaactataactgtgctagtggccgggcg

SEQ ID NO: 105326 - DNA, 100 bp, Homo sapiens
tgttcacggctccatcgctgttaggtgagcccatcactttctgtgaggagagttttgtaaagcaccgctcaagcgtgatgaaacagttcctggaaactgc

SEQ ID NO: 105327 - DNA, 90 bp, Homo sapiens
gtttggcaatgacatctcccctgagattggggagaaggtgcggactcttgttcttgcactggtggcgcagaatccgcatttgctgtgatg

SEQ ID NO: 105328 - DNA, 88 bp, Homo sapiens
gggcacacagacactgtcactggagtggccttcaacccatcagcgccccagacgcaggaggagggagacgcactgatgacatcgggcc

SEQ ID NO: 105329 - DNA, 83 bp, Homo sapiens
cctgaacctggaagttgtgctttttaaggtgtgagatgcacaatgcgaaacctaggccccagcttttacaccatgatgcgcag

SEQ ID NO: 105330 - DNA, 87 bp, Homo sapiens
aaaaccacaaatgtttttctgttttgcctgaatacatgatttaaacaagagatttccacagaagctgtccccaatctcttcatgctg

SEQ ID NO: 105331 - DNA, 75 bp, Homo sapiens
attataaaggagaagtggagaagcacacatctcagaaaggctcagcttagggaccgtcacctccaggaagccttc

SEQ ID NO: 105332 - DNA, 89 bp, Homo sapiens
gctaaatcgagagaactttccagagtgatgatgcgggtgtgctggttggtgagacaggacagccggcaccagcgaatcagacttccaca

SEQ ID NO: 105333 - DNA, 100 bp, Homo sapiens
cttgatccgggagtctttccactgggaagctattgaatccttcaaagaagctttgaagcagaaagttgactttattgatgcatataaaagtctagggcag

SEQ ID NO: 105334 - DNA, 100 bp, Homo sapiens
caaaactccagtatgggttcgagaagaagagaggtcttacaggtttgaaaaatattggaaatacttgttacatgaatgcagctttgcaggctctttctaa

SEQ ID NO: 105335 - DNA, 75 bp, Homo sapiens
tcggactcccgcggcgggaggagcctgttcccctgaggtgaccattgtgaggtagatattttgttctaattttcc

SEQ ID NO: 105336 - DNA, 100 bp, Homo sapiens
gtttatggcttccagtggaggcattttggggcagaatacagagatatggaatcaggtggagccgccaccaaaatgcagattttcgtgaaaacccttacgg

SEQ ID NO: 105337 - DNA, 75 bp, Homo sapiens
ccacatcatcggcgcagtgggcatcggcattgccgtggtcatggaagtcggcttggccctgaggacattattggc

SEQ ID NO: 105338 - DNA, 83 bp, Homo sapiens
cgactgcggaggccgggcgaggccggtgaggacgcggcgggcgagcgagaggccgagggcctcagcaactgttgccattccca

SEQ ID NO: 105339 - DNA, 90 bp, Homo sapiens
tctttccggatcaatccagatggcagccagtcagtggtggagggggccgaaggccagagaccaggatttggctacggaggcagagcgtcc

SEQ ID NO: 105340 - DNA, 100 bp, Homo sapiens
aaccaattgttttacagtctgttccacatgatcattgtaataagaaggatgccctgcagtggtctcgccatccagctacagtggagggagaggagccaga

SEQ ID NO: 105341 - DNA, 74 bp, Homo sapiens
cttcaacagaatgtggcaaccagggtgtcggttggtggaaatatgaattctgctatggcaaacatgtacatcaa

SEQ ID NO: 105342 - DNA, 89 bp, Homo sapiens
tcctggtgtgcccgctctccaagaagccgctcagttgtcatggatgcactggtagaagatgatatctgtattctgaatcatgaaaaagc

SEQ ID NO: 105343 - DNA, 89 bp, Homo sapiens
aacttttatttccttatcatatttctggtgcagaacttgttggagaaagtggcacagaaaatgcaagctccccataaaatccactggat

SEQ ID NO: 105344 - DNA, 101 bp, Homo sapiens
aatgatttacaacccctgctagcctggcttaaggtcatggagaaagcccacatcaacctggtgagcactgccagtgaaagatgtagaagataaacctgaac

SEQ ID NO: 105345 - DNA, 82 bp, Homo sapiens
ccttctctttgatgactctttcctgcatgctgcgttccatgaaggaaggacctgtttatctctgatttctggagttcagcac

SEQ ID NO: 105346 - DNA, 50 bp, Homo sapiens
ggccaagaggcagacctaggaaatggatgctggttgccaacattgacttg

SEQ ID NO: 105347 - DNA, 110 bp, Homo sapiens
aagatgctcagaacagagcagaaatcaaattgaagagagcagttgaagaagtgaagaaattattggtacctgcaataaactgtgtgacgttccctcacccagacacgatg

SEQ ID NO: 105348 - DNA, 98 bp, Homo sapiens
aaacgtcctagtcaggaagaggacacacagagtattggtcctaaagtccagagacagagcactaattaggtagtgggcagcagtcagtgacaggtgta

SEQ ID NO: 105349 - DNA, 83 bp, Homo sapiens
gagagccgccagcagcccagctcgggacgcggggagccagtcttggtgctctgtgttcacctggttcatctgaggagctgcat

SEQ ID NO: 105350 - DNA, 75 bp, Homo sapiens
cgcgtgtctaggtgagtcgcggtgggtcctcgcttgcagttcagcgaccacgaacatccagtcatggataaaaat

SEQ ID NO: 105351 - DNA, 100 bp, Homo sapiens
ctcagacctgccaatttaccagagataattgataacaccctgtaacagctgattcagatattttggatggcagtagtagcagcagtggcttatcctcaga

SEQ ID NO: 105352 - DNA, 75 bp, Homo sapiens
gcgagaacgtccactgcgggccggcgaaagctggatgctccaggatgaaacgccataggcctgtcagcagcagtg

SEQ ID NO: 105353 - DNA, 75 bp, Homo sapiens
ctgaagtcagcatcgaccagtccaagctgcctggagtcaaggaaggtgtgggccatgtttgaggattgccccagc

SEQ ID NO: 105354 - DNA, 98 bp, Homo sapiens
gaagcatcgaaagcgttggagaggtgttaccggaacggcggcgacaagggtgttcccgaactagagtgggtggtggagacactgccacttgctgtgcc

SEQ ID NO: 105355 - DNA, 100 bp, Homo sapiens
agagagactgcatggggagcttctcctgcagcaaaaaattattcctgatcaggaccaactgatggcaatagcactagagtgcatctatacctgtgaacga

SEQ ID NO: 105356 - DNA, 100 bp, Homo sapiens
gccttttacagttctggccatggaacttcagagaaggtgtgatgaatgcagactctgctaccattttggctgtttggatcctcctttgaaaaagtctcct

SEQ ID NO: 105357 - DNA, 75 bp, Homo sapiens
agacagtcctcgtcagcactgactttcagctatggaatcgcccagctcaacattggcaatgtgctccctgtgggc

SEQ ID NO: 105358 - DNA, 100 bp, Homo sapiens
attttggggcaaagcctttccaactggacagcaccatgtccaccaaagcggagcagtgaggacgaatccatgaaccaaccaggaccaatcaaaaccagac

SEQ ID NO: 105359 - DNA, 75 bp, Homo sapiens
ttcggccccgccatgggctgctgcagctccgcctcctccgccgcgcaggtttttctatatgagtggagaagacag

SEQ ID NO: 105360 - DNA, 74 bp, Homo sapiens
gggtactctacacttgcttccaatccatacaggcccaaaagagttcagattttctggatatgccgcagaaggat

SEQ ID NO: 105361 - DNA, 75 bp, Homo sapiens
accattgctccaaatatccgttgaagcagcaagccacccgaggggactgcctggccttccagatgcgagctgggt

SEQ ID NO: 105362 - DNA, 83 bp, Homo sapiens
tgggcagacggattcatttagagctgcggaacaggacgccctctgatcaacatggctgacaaggccaagcctgccaaagctgc

SEQ ID NO: 105363 - DNA, 75 bp, Homo sapiens
ctgagtttgtagaaaaacggagagcagctcttgaaaggcagacctgttatcctaaactaggtgagtcagcttttg

SEQ ID NO: 105364 - DNA, 50 bp, Homo sapiens
cgatgtgaagaaggaaacagggtctcctctgagcctccggcctccataag

SEQ ID NO: 105365 - DNA, 83 bp, Homo sapiens
gccgccggccggcgcgtcgtccccacaggtgacagagttagtccttgataattgcctgtgtgtcaatggggaaattgaaggcc

SEQ ID NO: 105366 - DNA, 51 bp, Homo sapiens
gtcgacactctcgcgcccggaggaagcaaaatgtggattcagcaaacaaat

SEQ ID NO: 105367 - DNA, 74 bp, Homo sapiens
aagtgcgtctggatgactactaagaaaggggccaggggtcaagctttctgcaggctctgctgccctgaggtgcc

SEQ ID NO: 105368 - DNA, 100 bp, Homo sapiens
aagatacacagtctgtttctgctataggccataggaaaaggatacagagtagagtttcatgaacctgaaacttggtggaaatttgatcctgaagaattag

SEQ ID NO: 105369 - DNA, 100 bp, Homo sapiens
atgctcataaggattgtcctctttctacaaaaggaggaagttaagtcttcagagcctactgaggatgtggagcccaaagaggctgaagatgatgatacag

SEQ ID NO: 105370 - DNA, 75 bp, Homo sapiens
gcccgggatcccagagctacccttcttggagcccacaggggaactgtggctgcaccatctgtcttcatcttcccg

SEQ ID NO: 105371 - DNA, 100 bp, Homo sapiens
gtttattgaagcttgcctccgatgcctgcgtaccatcttcaccagtcctgtcactccagaggagctactgtatacagtcaagagcaatctgaatccaaat

SEQ ID NO: 105372 - DNA, 100 bp, Homo sapiens
gctggccagcttcatcctcgtcttctttgtggagtatctgcggggactgtgtccaggggcagagggcccacccagggtacctcgtggagaagggagagaa

SEQ ID NO: 105373 - DNA, 105 bp, Homo sapiens
agaaattttagaaggaagaactgaaaaatatgtggatactccatttggcaaggttccaactatgggagcccacgccccgcccatgccaacatgaatgccaatgcg

SEQ ID NO: 105374 - DNA, 90 bp, Homo sapiens
cccacccaatgcccggcagctggagaggtctccaacaagcttccaaaatggcctggacgactgggtttggattcagaagaggattattat

SEQ ID NO: 105375 - DNA, 75 bp, Homo sapiens
gattcagacagtgaagagcattccagatcagattctgtgacaggttatgtgaaattacctccagagaaatttgca

SEQ ID NO: 105376 - DNA, 75 bp, Homo sapiens
aatggttgcattaaagcattaaaggatagttcttcaggaacagaacgaacagaaatttctgaataaattggcaga

SEQ ID NO: 105377 - DNA, 100 bp, Homo sapiens
tgtggtggagtccaccccgctgtgctctactgagatgaagaaagaaaaagaatacctgctcagctccagagacacgtaaagggacagagattgggggaca

SEQ ID NO: 105378 - DNA, 50 bp, Homo sapiens
tcttggcctgatgctgaactctcgagggtttgttggcatccaaagctgtt

SEQ ID NO: 105379 - DNA, 75 bp, Homo sapiens
gctctcaactaactacaattgtattggcagctagagaggaccccactgatgactccaggcttcccagggccgaag

SEQ ID NO: 105380 - DNA, 100 bp, Homo sapiens
atcgcttcctagcagagaagcacctgctactttccaacaccttcctgcagttcttcggccgggtgccaacatcgcctctggtgaggaagtcgccatcaag

SEQ ID NO: 105381 - DNA, 75 bp, Homo sapiens
atctaaaaagccctcagtaccagagacagaagcagatggattcgtccttttagactcaatgatgaggcacggcgg

SEQ ID NO: 105382 - DNA, 75 bp, Homo sapiens
gaagctgattatcctggaaaacactatttacctattttccaagtataaccccgttttcacacgaatggccccttc

SEQ ID NO: 105383 - DNA, 100 bp, Homo sapiens
gatggagatgggcagacggattcatttagagctgcggaacaggacgccctctgatctgtgagaaacgaccgaaacaagaagaagaaggaggtgcccaagc

SEQ ID NO: 105384 - DNA, 97 bp, Homo sapiens
tgtcttcggtggactccttcggcagtccacccaccgccgccgcctcccaggtacgaggaacagcaaattcaggaaaaagtggcgacctttcgactca

SEQ ID NO: 105385 - DNA, 101 bp, Homo sapiens
agggaataggagctggggagcccttctgcgccacagacatccacgacagcgatggcagttccagcagcagccaccagagcctcaagagcacagccaaatgg

SEQ ID NO: 105386 - DNA, 50 bp, Homo sapiens
ttggaatccaccctgtctgtgcagagaatgaagagcttcgaaacttgtct

SEQ ID NO: 105387 - DNA, 97 bp, Homo sapiens
ctgtccccggactgggagtttgaccgcgttgacgacggctcgcagaagtgattctcatcagttccgtgtaatggcagctgtccttcgtcattgttta

SEQ ID NO: 105388 - DNA, 78 bp, Homo sapiens
acacatattcatcatcatgggtgcatcggctccataaaaatacagactcaccagttcctgctttgatgtgacatgtga

SEQ ID NO: 105389 - DNA, 90 bp, Homo sapiens
gctggggaccatcaccatcacaggtccaagacaactttgacaagattgaattcaataggatgtgttggaccctctgtgtcaaaaaaaacc

SEQ ID NO: 105390 - DNA, 100 bp, Homo sapiens
cagaaccacctcctttgcggagagctgcaagccggtgcagcagccttcagcttttggcagcatgaaagttagcagttatattaatgaaagtgggcacctc

SEQ ID NO: 105391 - DNA, 51 bp, Homo sapiens
tccctagtagctggaactacagtagatattcagactgacaatgatttgaca

SEQ ID NO: 105392 - DNA, 82 bp, Homo sapiens
ccaagaccagtttaatgaccttgttatcagtgatggctcttctctggaagatcttgtgagttatcattaccatgttggtgac

SEQ ID NO: 105393 - DNA, 88 bp, Homo sapiens
cagaggatcatctgctacttttcctgcagcagttggtggatatcaaagtattgcagagtgccttagcagccatccgacatgcccgctg

SEQ ID NO: 105394 - DNA, 126 bp, Homo sapiens
gcagggaagtgtggtttggattccatcagtctgttcggcctgccatgtggaaaatgatgcttaatatcgatgaagtgtatgctgacttgtaaagtgaagaagccagtggtgctgcgggtgttcttt

SEQ ID NO: 105395 - DNA, 100 bp, Homo sapiens
ttcgaaaggagtcagaagaagtctttgatgccctgatgctcaaaaccccatctttgaagggcttgatggaagctgttttgcactgattgcaaaaataaag

SEQ ID NO: 105396 - DNA, 75 bp, Homo sapiens
ggatggcttgcagaagacgctatttgtgttttagctcacttggaaaggctagagacccaagtgagcagatcccgt

SEQ ID NO: 105397 - DNA, 82 bp, Homo sapiens
gagcccccattggaccagtgtttgcttagcgtccgtctccaagagagtatgaagagagtgcgtctgtagggcagggaagatg

SEQ ID NO: 105398 - DNA, 100 bp, Homo sapiens
gtctctccttctgacctactggatgacaagactgcatctcccatcattttgcatgagaataatgctgataggaagatgtcttcaggaaatgctaaaattg

SEQ ID NO: 105399 - DNA, 83 bp, Homo sapiens
aaaacactttctgaagctcatgaagactgtgtaaataatatcagattggtgctgaagacatggacggcttccaggcagacacg

SEQ ID NO: 105400 - DNA, 87 bp, Homo sapiens
ctgctgtacaccctcaacaaacaccagcgctttggacaatgcagatcttcgtgaagactctgactggtaagaccatcaccctcgagg

SEQ ID NO: 105401 - DNA, 100 bp, Homo sapiens
ccgagtgactcactcggccaaggaaactcccagggcccgcccaggacccccaagccgccgcggacgcaggtttggtgcacctcgatttggaggaagtagg

SEQ ID NO: 105402 - DNA, 50 bp, Homo sapiens
ctcagcaaacggtcctgcacaacaggcaaaagatgtgattgaagagcatg

SEQ ID NO: 105403 - DNA, 100 bp, Homo sapiens
ctcgcccatcagcgcggcgctggccgagagccgcggctccgtgtttctggaaagtgacagcagtttgtttcgacgccggaccgcgtaagagacgatgatg

SEQ ID NO: 105404 - DNA, 100 bp, Homo sapiens
agaacttccccataaaagccagactggcatcagtactatgacatagtttatatgaagcctcatgggagactccagaaagtcatgaaccacatcacagacg

SEQ ID NO: 105405 - DNA, 51 bp, Homo sapiens
ttgtgagaagacgtctgtgtcgtgcggaaatctgcatgctgccagctcccc

SEQ ID NO: 105406 - DNA, 100 bp, Homo sapiens
gttcctggccccctccagtgcaaatgaccctgggccccaaggctccgaacacccgcccctctgctccagcactgctcagcacgcaggcatgtgaggaagc

SEQ ID NO: 105407 - DNA, 87 bp, Homo sapiens
gaattacctggaacttcatcatcatctacttcacaggaattgccatttgtggagagtatagtgaagatgatgtaaatgaattagtga

SEQ ID NO: 105408 - DNA, 74 bp, Homo sapiens
ttccattgaatgggctgaagtggtgatcaatgtgaacaatattctcaagtaaccggtctccatgatgttgatga

SEQ ID NO: 105409 - DNA, 140 bp, Homo sapiens
ctcggagacagtctgcgaccggacgggtctaggtgagacagaagccaaacaggaggaggaagtggagggtactccaaagattcaggtttactcacgtcatccagcagagaatggaaagtcaaatttcctgaattgctatg

SEQ ID NO: 105410 - DNA, 75 bp, Homo sapiens
tcttctaatggatgggaacatgggatcctattgatcatcgcttcagttattgggatcattgtctataggctctcg

SEQ ID NO: 105411 - DNA, 100 bp, Homo sapiens
gcggaggagcgcggccgtcttagcctgcgccgcgaggtctgcggcctcgtggacgcggatgtcctcctggaggcctgctgtgcggacggacaccggatgg

SEQ ID NO: 105412 - DNA, 78 bp, Homo sapiens
gcggcggcggcggaggatgagcctgcagagcgcgcagtacctccgggatcatagacggtatttctatgtaaacgaaca

SEQ ID NO: 105413 - DNA, 80 bp, Homo sapiens
gcggactgggtgtcaggtcacttcccgtcgcccatccggctggagtttgagaaggtcactgcttctgttcggaacagaga

SEQ ID NO: 105414 - DNA, 74 bp, Homo sapiens
ggcataggatccggcaaagtcctgaagagggaattgcaacccagtgaagaagttacctggaagtaaagactggc

SEQ ID NO: 105415 - DNA, 100 bp, Homo sapiens
ggtcttggcagcagcattgggactcctccagaaggaccaaaagatctcagattgctataactgaaggtatatttgaacttccaaatctcacaattcaagc

SEQ ID NO: 105416 - DNA, 75 bp, Homo sapiens
ggcgtacgcctatctcttcaagtacatcataatcggcgacacagttaaaagagatgtttccaggttttcgactag

SEQ ID NO: 105417 - DNA, 100 bp, Homo sapiens
gcgttgcgagcgcgaatggcacgagctggagggagaatttcaagaactgcaggttggatccatgccgtctacacccctgtagactctttggtgttcggcg

SEQ ID NO: 105418 - DNA, 100 bp, Homo sapiens
gggtaacatggcggatgcggaagctccgggaggaagcctggcgggggtttgctgccttggacgaccccctggccgggcttctggacatgctggagagctg

SEQ ID NO: 105419 - DNA, 100 bp, Homo sapiens
gctggacctccggtacaatagaattaaagcgcttccttctgggattggagctcaccagacctgagctccttcgccatgccgctcctggacggagacctgg

SEQ ID NO: 105420 - DNA, 101 bp, Homo sapiens
aagaagcggaaaaaagaaaactctagaagtctggatgtcggtgggcctctgagatatgccgtttacggaaacattacccttttgcactatctcatcactat

SEQ ID NO: 105421 - DNA, 75 bp, Homo sapiens
agaaatccggaatttaacagtgattgagaggatccagaatccagatctctggaatagctaccaggcaaagaaaaa

SEQ ID NO: 105422 - DNA, 75 bp, Homo sapiens
cataactccagccgagacgtcatcaccctggtgaagtccatgctcttctacagccctggcaggtgcccggcccgc

SEQ ID NO: 105423 - DNA, 88 bp, Homo sapiens
tggtcttggtagcggaggcacccgaatgctgcccgggtgagacaggaagcactacttgcagccatcagtgaaaaagatgcaaacattg

SEQ ID NO: 105424 - DNA, 100 bp, Homo sapiens
gcaaattcaccaagagagacgtcttcctggagcggtggctgtcgctgggcgcggactccaacgggagcggcgtctctgtgctgctggagctggcacgcct

SEQ ID NO: 105425 - DNA, 82 bp, Homo sapiens
acgacaggacgttggggcggcctggctccctcaggtggaagttaaacgagctgagcctcgggacagcaagagccaagcgccg

SEQ ID NO: 105426 - DNA, 87 bp, Homo sapiens
gacaggtgtgcaggtttcggcacatggagattgatgcagagctgacctgtccggtaatcaaggcaatgcagccggccgcctagctac

SEQ ID NO: 105427 - DNA, 75 bp, Homo sapiens
actgaacaggaccgagttttcttcattaaggcaattgcccagttcatgataaggaaactgaggcacagttcagtc

SEQ ID NO: 105428 - DNA, 51 bp, Homo sapiens
tggcgggcgagacatgaagacattcaagaacaggcctttgagagcagccag

SEQ ID NO: 105429 - DNA, 83 bp, Homo sapiens
gttcgacaagaatctgcaggacttggtccgcggcatccgtaaccacaaggaggacgagatgagtttgatgcctacatcattgt

SEQ ID NO: 105430 - DNA, 50 bp, Homo sapiens
catcaattcatagaatgccagagtgtttctgcccagttttccttcatagt

SEQ ID NO: 105431 - DNA, 101 bp, Homo sapiens
taaatgttgaagtgtttcaggaattgtcttagaccttcttccttatctacacttcctctccaaacaagttggatggcttgaggactggtactaaaaggaaa

SEQ ID NO: 105432 - DNA, 73 bp, Homo sapiens
ggcgggagggccgccggaggaaacgctgtcactgtggaaacggtatgtgccctggaactttcatgagccctgg

SEQ ID NO: 105433 - DNA, 96 bp, Homo sapiens
gaaattccccccgaagaagactcccccacatctggtgtggacgaatgtggaacctcgctctgtggctgtgttcccttggcactccttagtcccctt

SEQ ID NO: 105434 - DNA, 97 bp, Homo sapiens
cagccacatactatccgtttgttcaggaaccaccagtgacagaatggagtttcactcttgttgcccaggctggagtgcaatggcgtgacctcggctg

SEQ ID NO: 105435 - DNA, 74 bp, Homo sapiens
gcgtgaccgagagcgcgaatatcgtcatcgttagaagccacctgtctttaccagtttccaagactatgttactg

SEQ ID NO: 105436 - DNA, 80 bp, Homo sapiens
cggcactgctactgcgaagacagctggcagtggagcccacagtgaccatctccccatccaggacagaggccctcaaccac

SEQ ID NO: 105437 - DNA, 82 bp, Homo sapiens
gtggatggcgtggagatatggcgcaactgcggcgcaatgaaacagtgattcagagtgcatataaaagcctcatacaacactt

SEQ ID NO: 105438 - DNA, 123 bp, Homo sapiens
cgtgcgggattccggcgccgctctccgagctcgatccgctgctcgcacgggagccagctgggtggatggcactggatctttaaaacgcagtggttcctttagcaaactccgggcttccattag

SEQ ID NO: 105439 - DNA, 100 bp, Homo sapiens
gggcacagcatggactacagccaggagatgcacctgaaaatgagcaagaaaatcgcccagctcaccaaggtgaagtattacagacacttagcacctgatc

SEQ ID NO: 105440 - DNA, 97 bp, Homo sapiens
tgcagccagcctcagcctgcagctgtccctccagagagagatcctgcaggagattcagcgtctccgcctggaacacgagcaggcctcccagcccacc

SEQ ID NO: 105441 - DNA, 100 bp, Homo sapiens
gctgattcacgcggccttaaactgcacctccagcgtccataagaacgtagcccgtgagaaagatcagtctaaagaaaaggagaagaaagtgaaaaaaaca

SEQ ID NO: 105442 - DNA, 74 bp, Homo sapiens
ggctgcgcctgcctgctccgccccagacctgtcggcgaaaggctgaactagatgcagagcacgcccagaaggtc

SEQ ID NO: 105443 - DNA, 80 bp, Homo sapiens
tggtagactgcagcaaccgagaagatatttacagctctgcaaagaagatgacagtcatgtccctttccagggacctcaag

SEQ ID NO: 105444 - DNA, 100 bp, Homo sapiens
ttcagttcgtcatggggctgtttggaaagacccaggagaagccgcccaaagaactgtgccctgccagaccgttttagattacttgaagatggttctgcag

SEQ ID NO: 105445 - DNA, 74 bp, Homo sapiens
ggggaggcgcgcggaggctggagctggaggcgcggcgccggtgagctgagatggtatagctgcatgctgggaaa

SEQ ID NO: 105446 - DNA, 75 bp, Homo sapiens
ggcggatgcggtcgtgaagatagagcagcccgacggccatggaggctgaagagacgatggaatgccttcaggagt

SEQ ID NO: 105447 - DNA, 95 bp, Homo sapiens
ggtgccagcacctttcggcttctgagacggcggcagcagcggcattcagatttgaaagttgagagcagcatgttttgcccactgaaactcatcct

SEQ ID NO: 105448 - DNA, 100 bp, Homo sapiens
gcacgggacaggagagcctgggcaagactggagagatggtggtggcctggggcaccggccaggtgggcctcggtggcgaggtggtcgttctggcaaaggc

SEQ ID NO: 105449 - DNA, 75 bp, Homo sapiens
ctgaaatacagactgcggtgttaatatccttttcttctgattgttattaacaggatccatcaattaagggaacct

SEQ ID NO: 105450 - DNA, 98 bp, Homo sapiens
tcacacagacttttgatggacaggagattgggagagtcatattaataccaaatggtcagcacctcagcagaattttttgcaggggaaaacatccagtg

SEQ ID NO: 105451 - DNA, 87 bp, Homo sapiens
aagaagcggggcgatcactttgtctacaagggcaacatcccgcaatacttccatgcaggaggcaatgggctgaagaaaaccttcctg

SEQ ID NO: 105452 - DNA, 98 bp, Homo sapiens
gccccctgcgccgcggctacgtgcgcgtccagtggtacccggagggcgtcaagcagcatgtgaaggagaccaagtgatgatggccaaagagaagccac

SEQ ID NO: 105453 - DNA, 76 bp, Homo sapiens
ctcagaggagtttgaagcagccatcaaggccattatgagaactcagggttgagttccagaataaattctacagcgg

SEQ ID NO: 105454 - DNA, 75 bp, Homo sapiens
ggaaatcgggctgaagcgactgagtccgcgatggagggaaatcgtggaacacatggtccagcactttaaaacaca

SEQ ID NO: 105455 - DNA, 100 bp, Homo sapiens
cccacctcgtctgggctcgcggcgtctccggggaaagccgtggccccgagggcggatccgaggtccctccttgtggtccatttctgggcaccatgggctc

SEQ ID NO: 105456 - DNA, 97 bp, Homo sapiens
cgcaggtggactcggtccgtggcttcggaggcaagtttggtgtccagatggacagagttgatcagttatagggatggcccaggtaatcctcttagac

SEQ ID NO: 105457 - DNA, 141 bp, Homo sapiens
gcggcggcctgggctgctgactgcgcacttggaatagtagcaggcggcggcggcggaacgccaggcaggtttttcgttggaatatacgttgcacatttatggcgattctgagtgtgagggcagacttctgccaggctcagc

SEQ ID NO: 105458 - DNA, 98 bp, Homo sapiens
ctggctgagggagtattgctgaggacctcacaggagcccacttcctcggaggcaacagatgccctttatgaggtgtttttgggaaacaggcttcgagc

SEQ ID NO: 105459 - DNA, 100 bp, Homo sapiens
aaattgttctggttgatggcactggcagattctaaaacaatgaaggcaatggtggaattccgagaacacacagcattattcaaccaagaagttcaaattc

SEQ ID NO: 105460 - DNA, 100 bp, Homo sapiens
aggaggagcgggcgagaagctgccgccgaacgacaggacgttggggcggcctggctccctcaggctgtggatccctcctctgttgccttggtaaccctgg

SEQ ID NO: 105461 - DNA, 137 bp, Homo sapiens
ccaacatctgctacaatgtactggatcgaaatgtccatgagaaaaagcttggagataaagttgctttttactggatcctagaatttgagaacccgcatgttaccagcaacaacaaaggcacgggctgtgaattcgag

SEQ ID NO: 105462 - DNA, 50 bp, Homo sapiens
tcagcagcgccaatatgatgtcagaccagatgatgtgcttctgcatcgca

SEQ ID NO: 105463 - DNA, 100 bp, Homo sapiens
gcggaaacagagcaacccccggcagatcaagcgatgggagtcccagcttctggagacggggttcctggggatcttcctgtgccctctgtggacgctgtca

SEQ ID NO: 105464 - DNA, 82 bp, Homo sapiens
gacaagaatcaccattgttattccaaggtctcttgcatccagaaaaatatgtcgtaactgcaagtgtggccaagaagagcat

SEQ ID NO: 105465 - DNA, 100 bp, Homo sapiens
gccagacccgaggcgctagggaagatcgcaccgcggacgcccgctgagcttggcgcacgggccgaccaggctggagtgcagtggcgagatctcgactcac

SEQ ID NO: 105466 - DNA, 100 bp, Homo sapiens
ggccaccagtttccggacagcttcgtgctgggcccgatgagagaaagggaaagttaaggatgctggagcagaacaatggatttctctttctctttcatgc

SEQ ID NO: 105467 - DNA, 96 bp, Homo sapiens
cgacgctgctgggtccgctgagcggggcgacccgagattgtctacaaagcctggctctgttcccagtattttgaagtcacacagtttaactgcaga

SEQ ID NO: 105468 - DNA, 90 bp, Homo sapiens
gcgatcctgaatgggggcggcgtgcccgccggggggctagtggccacgctgcagagcctcggtaccatggagagaagctacagccatttg

SEQ ID NO: 105469 - DNA, 100 bp, Homo sapiens
gcaggcgcctacatcctaactcgatttgctggcatccgcttcgatcctgaaattccgcaaacactacgactagagtttgctaaggcaaacacgaagatgg

SEQ ID NO: 105470 - DNA, 82 bp, Homo sapiens
tcaaggacacggtctacaccgacttcgacgagacaagaggagcagcagcggcaccgcccctcaccctggagggtcctgtaca

SEQ ID NO: 105471 - DNA, 83 bp, Homo sapiens
cgctgtgaccctgggagattactaccagggccggaggattaccatcaccggaattttctggatatgccgcagaaggatccgtg

SEQ ID NO: 105472 - DNA, 83 bp, Homo sapiens
gctgaatccgcccgggctacgctcctccatcacgtggtatggtttaggaatgatttattacaagcaagaaaaattcagccttg

SEQ ID NO: 105473 - DNA, 75 bp, Homo sapiens
gccgagctgaggcggtcgcggccatgaaggaactgtggctgcaccatctgtcttcatcttcccgccatctgatga

SEQ ID NO: 105474 - DNA, 130 bp, Homo sapiens
ggcggacggcgtggaccacatagacatttacgcggatgtcggcgaagagttcaaccaggtctaacttcaaacttgtggctgttaattcaaaactctatgccatcggagggcaggccgtttctaacgttga

SEQ ID NO: 105475 - DNA, 100 bp, Homo sapiens
caaagatgaagatgaaaccaagcccttggtcctcatgctgataccgccagtggatgccagaatttgcagtgtggttttcgagcctgctgccgctctggcg

SEQ ID NO: 105476 - DNA, 83 bp, Homo sapiens
ggccggaggaggaggagaggatgatttttggatcctgagaattgatctatgttggatcaagtccctgtgaagcaggaagagtg

SEQ ID NO: 105477 - DNA, 83 bp, Homo sapiens
gtgcccgaggagtagtcgctggagtccgcgcctccctggggcgctgttcctcctcagcaaggggatggtaagttgaggctggg

SEQ ID NO: 105478 - DNA, 75 bp, Homo sapiens
gcgaggccggtgaggacgcggcgggcgagcgagaggccgagggctccctgaaacaacagtaacctacccctgtgg

SEQ ID NO: 105479 - DNA, 74 bp, Homo sapiens
gagaacagttaaaagaaatatacccaagctggatgctcagaggtgtttgatcagagtgcgctttcaactgaagc

SEQ ID NO: 105480 - DNA, 111 bp, Homo sapiens
gagtgtatgatgaaaccacagtagaccctaatgatgaagaggttgaagctccattcataccaaagtttagaggctctggagataccagcaactttgatgactatgaagaag

SEQ ID NO: 105481 - DNA, 83 bp, Homo sapiens
gggcttctcctatgactacgtctttgactggaacatgctgaaattcctgcctgtggaggaaccgattgtgtccacagatgagg

SEQ ID NO: 105482 - DNA, 98 bp, Homo sapiens
atctgttccagatgaaattatactactacggtccttggaaaggcttgacctaagcaacaatgatattagtaggcaatttgaatcaacccatagaagtg

SEQ ID NO: 105483 - DNA, 100 bp, Homo sapiens
accctacggagctcgccccccagcaggtgccagtgtggacgaatgtggaacctcgctctgtggctgtgttcccttggcactccttagtccccttcctggc

SEQ ID NO: 105484 - DNA, 100 bp, Homo sapiens
cctccaaaagtgctggcattacagtctctgttggatgaacccaatcccaatagtccagcaaacagccaggctgctcagctgtaccaggagaacaaacggg

SEQ ID NO: 105485 - DNA, 109 bp, Homo sapiens
tccagagggcattcagactaaaatctacaaccttctcattcagacacacgatccctttgttgatctagcaagtggccaagttcctttgcctcctgctagaaggttacca

SEQ ID NO: 105486 - DNA, 75 bp, Homo sapiens
ctggcccgaagccttcctttatcgctttcagggaagcttctacatcacctctgagaactgcatgcagcacgcaca

SEQ ID NO: 105487 - DNA, 88 bp, Homo sapiens
caccgacagcacagacagaatccctgctaccagtggtgatgatgtccagcaactctgtgaagcaggagaagaggagtttttggaaatc

SEQ ID NO: 105488 - DNA, 100 bp, Homo sapiens
catgaccctgtgacggagtttataggcattgaagttgatatcgatgtggagcacggagggaaaagaagccgcctgacccccgtctctccagagagttcca

SEQ ID NO: 105489 - DNA, 101 bp, Homo sapiens
ccgctggcccaacggtttccccagcagtagcctctgcgaccagtcgtattggctgctatgtgaccatcttccaaaacatttccaacttgagggatgtcttc

SEQ ID NO: 105490 - DNA, 100 bp, Homo sapiens
ccggtggcggcggcagcagcggctgtggtggttccgggtgtctttgtccccccggtgtcgctgccctggcccgcagctaacaggcctcacctcttccatt

SEQ ID NO: 105491 - DNA, 100 bp, Homo sapiens
gaagagctcatcaaaaacgagccggaagctcttccaccaaagccacctaagccaatgacttcagcagttccaaatggaatgaaggacagttctgtttctc

SEQ ID NO: 105492 - DNA, 100 bp, Homo sapiens
ctgaaggaagagcggaccgcgctgcaggagcagctgctgcagagagaacaacctcctgcaccagcagatgctgcagtcggagatccaggccatgaagaag

SEQ ID NO: 105493 - DNA, 90 bp, Homo sapiens
catcctttcttccagctgccacacagaaggatggcccaacagcaggccttgaggttccgaggtccggctcccccaccaaatgcagtgatg

SEQ ID NO: 105494 - DNA, 75 bp, Homo sapiens
cggaagtatgagttggggcgcccagctgccaacaccaagactgattttgcacgatttagcggaacaaatgtggaa

SEQ ID NO: 105495 - DNA, 100 bp, Homo sapiens
cctggcttccctctggatgctgacagaaacaaggactgggctggcttagatgaagatgaagatgcacatgtctgggaggataattgggatgatgacaatg

SEQ ID NO: 105496 - DNA, 75 bp, Homo sapiens
gaagaagcagatcttcttttggagcagcagagactggttgcacacatgacgaaaagtgaaatgcatttgcatgac

SEQ ID NO: 105497 - DNA, 75 bp, Homo sapiens
acaggactaatagctggcaaatttctgttccatcagcgtttgtttgaaaccatcaatagatgtctcacaaaacat

SEQ ID NO: 105498 - DNA, 97 bp, Homo sapiens
tctgacgaactactctcaggcagtgttctcagtagtccgaactctaatatgagcagcatggtagttacagataatttctgctgctgaaacattgaca

SEQ ID NO: 105499 - DNA, 100 bp, Homo sapiens
ttcactttgggcagattttcaatttgcaaatagtcaactggccggagagtttaacacttcagttggagtgcctcaagcttattgcctctcaaaaatttac

SEQ ID NO: 105500 - DNA, 116 bp, Homo sapiens
gccagccgcaccatgccgctcctaagcctgcacagccgcggcggcagcagcagtgagaggctaaccttgccgcgggccgagccctgcctcgccatggaccaggactatgagcggcg

SEQ ID NO: 105501 - DNA, 96 bp, Homo sapiens
cggcaccatcctgctcggcgtctggtatctggcccctggccccaacatggcccgtcgctctcagagctcctcgcagggggacaacccactggcacc

SEQ ID NO: 105502 - DNA, 100 bp, Homo sapiens
caagatggagttcctcctggggaacccgttcagcacaccagtggggcagtgcctcggtgtcatggagaaactccagctgggcccagagattctgcagcgg

SEQ ID NO: 105503 - DNA, 100 bp, Homo sapiens
gtgaaaccttttaactctccacagtggagtccattatttcctctggcttcctcaaattcatattcacagtgagtccatgacagaagaaaccctgaaaagg

SEQ ID NO: 105504 - DNA, 83 bp, Homo sapiens
ctcctttccaactgggcaaaccccgcttccagcaggtaactaggatttctacctcaaccgcgagacctatgcaaggacggtgt

SEQ ID NO: 105505 - DNA, 126 bp, Homo sapiens
ggataacagattctcctaagaaggtgttggtcacaaggaagaaagatctttgtttaatccctctgaaaagggtcaaagaattgactgtagatccaactgctgctggtgatgttcgtccaataatgc

SEQ ID NO: 105506 - DNA, 80 bp, Homo sapiens
gcgcgcgcctgaagtcggcgtgggcgtttgaggaagctggggcagctgcaatgactctccgcacggtattattgtcattg

SEQ ID NO: 105507 - DNA, 88 bp, Homo sapiens
cagtgtttgttctgatgcagattgccagaggagaattctgcctaagccaactcgaaaaagccgtacaaaaaataagcaaaagcgtccc

SEQ ID NO: 105508 - DNA, 100 bp, Homo sapiens
agctaagactcccgaatacttcagaagtggggaaatggccccctcttctctcctggaggtcagccggccccttgtggctctcaggccagctggaccaagt

SEQ ID NO: 105509 - DNA, 101 bp, Homo sapiens
caaccctgccaacgtgcccactcacctcatggtgctctgctgcgtcttacgctccaaggctctcaggcccccgacgagccctggtgtgttcggggccttgc

SEQ ID NO: 105510 - DNA, 82 bp, Homo sapiens
cgcctggctcggagcagcagcctctgagggatccaggtccggcacgatcaagacccaggctacatgcatcacaagtttgcca

SEQ ID NO: 105511 - DNA, 90 bp, Homo sapiens
tatggaccaaggatggtcaaaagcatgtggtcacattacttcagagcaggaaagtccaatccaaccttttatctccagaagggctttcaa

SEQ ID NO: 105512 - DNA, 80 bp, Homo sapiens
ccaaaacctaccagcagcccaagtgcagtgggaggacagccatctgcaaggaggaggcagtggagaaggtgacacagcac

SEQ ID NO: 105513 - DNA, 97 bp, Homo sapiens
tcgcttggttaaaacctgacacttttaacagaaaggagaagatgagtatgccaacgttgatgccattgttgtatcagtgggtgttgatgaagaaatt

SEQ ID NO: 105514 - DNA, 75 bp, Homo sapiens
caacgtgttggaccttccggagcttctcagaagacagagggttttcttttgaggaaggaacttgaaaccttcaaa

SEQ ID NO: 105515 - DNA, 97 bp, Homo sapiens
ctgcccaatttgccaagcagacaggccagtggatcggaatggtggagaacttcaaccaggcactcaagatgggtgatctacaatgaccagaaagtgt

SEQ ID NO: 105516 - DNA, 83 bp, Homo sapiens
ctgaaagctgccgactgcgacctgcagatcaccaatgcgcagacgaaagaagcatcttcatgatacagttaagaggaatcttg

SEQ ID NO: 105517 - DNA, 98 bp, Homo sapiens
gggaggacgccagatacctcaaaagaggcacagagctttggcctgctggatcccaaactctgctacctgctggatggaatcctcttcatctatggtgt

SEQ ID NO: 105518 - DNA, 100 bp, Homo sapiens
cggcaaacatggcggtggactcggcgatggagctgttatttttagatacttttaaacacccgagcgctgaggaaatctgaaatagagtactatgctatgt

SEQ ID NO: 105519 - DNA, 100 bp, Homo sapiens
ttggcccaggtctgcacgaagttccggcgcatcctccacaccgacaccatctggaggaggcgttgccgtgaggggttattttagggacacagtgatgtac

SEQ ID NO: 105520 - DNA, 100 bp, Homo sapiens
aaaggaaagccactggctcttgtagaagaaatcagaaacagaaaggatgtgaaggtgtttaatgctgtgtttgatgtggacaagaagaaagggttgactc

SEQ ID NO: 105521 - DNA, 116 bp, Homo sapiens
ggaagaccgcgcgcagggcctgcagcgggagctggacggcgagcgcgagcggcgcgagaaactgtcgcctggttgggcccggaaatgggacgtcgcgctttctcagggagcgtaga

SEQ ID NO: 105522 - DNA, 83 bp, Homo sapiens
cattgacctcacaaccgagcaaattgaagagacgttaaaatacttccgcataatcaccagcaacacccgggacaataatacgg

SEQ ID NO: 105523 - DNA, 100 bp, Homo sapiens
acttcatcttctgatataaaagaccagtgtcttaagtaccagcaaacagcactgctcagcattttgaacttctgttcagagcttcagcacctcagtttag

SEQ ID NO: 105524 - DNA, 75 bp, Homo sapiens
agaacatcgactttgcagaagaagtatataccagagttgtccaatcatcctcttccagtggtagcgtgtttgggt

SEQ ID NO: 105525 - DNA, 112 bp, Homo sapiens
tttgacaggccggtggtcgtgtccaactgctcctgcacccgggaggactatgagtgatgccctgatgcagaaggctttcaactcctcgtccttcaactccaacaccttcctc

SEQ ID NO: 105526 - DNA, 100 bp, Homo sapiens
acagatacacccccaaagagcaactgaagattcatacgcagctggcagatattatcatagttgctgcaggcggttcaggaccatcatcctccatagccat

SEQ ID NO: 105527 - DNA, 75 bp, Homo sapiens
ggtgtggtggcggcggcggagactgcgggcccgtagctgggctctgcgagcacgtctgccatgtctctcctctat

SEQ ID NO: 105528 - DNA, 98 bp, Homo sapiens
attaagatgccttctttagggtctctgccttggggccattttacaggctgaagccgacgtagcttctctgaacagacgcatccagctggttgaggaag

SEQ ID NO: 105529 - DNA, 98 bp, Homo sapiens
tgagcccctggtgctatgtggcagagcacgaggatggtgtctactggaagtactgtgagatacctgcttgccagagaccgagatctcactcagcagac

SEQ ID NO: 105530 - DNA, 80 bp, Homo sapiens
cgccgtctccaagatgtagctaatgaccgtggttcccactgagctttcatgatgtaaaagattatattcaggaatatttg

SEQ ID NO: 105531 - DNA, 74 bp, Homo sapiens
agatatcaagaggatggattcgacttagacttgacctccctgaaaagcaaaggcctcatctccatggcacaggt

SEQ ID NO: 105532 - DNA, 96 bp, Homo sapiens
caaccactggttctccaggaaccgaaaaggcgaggagtatagtacggcaaaaaactgtcgaacacacgaggagatgccacagagcatcgtggaggc

SEQ ID NO: 105533 - DNA, 77 bp, Homo sapiens
ctcggacccccctacccacgctgaacgagagggacacggagcagaccttcactgcctggtgcaactcacacctgcgc

SEQ ID NO: 105534 - DNA, 97 bp, Homo sapiens
gtggttgtgcaggatggcgacggcggcctacgagcagctgaagctgttgtccttctattcaggccactcttcgttttccatgtactgcatgctgttt

SEQ ID NO: 105535 - DNA, 75 bp, Homo sapiens
gtttacagaaggcaattttgcaatcttggtgctgccatgcttactgagtcccttctctctccttctctatcatct

SEQ ID NO: 105536 - DNA, 75 bp, Homo sapiens
tgacaggccattcaccaggacaggcctgctgggcttcatcgggcctaacttcagtgaagatttcatacattggcc

SEQ ID NO: 105537 - DNA, 74 bp, Homo sapiens
atggcctacccgggatacggaggagggttttctggatatgccgcagaaggatccgtgccagaagcaagcctgtg

SEQ ID NO: 105538 - DNA, 95 bp, Homo sapiens
cgattctccctctcctagaggcggcccagaggcagagctacacaaccatggaatccaaattaattcctgttctgtgcgactggtggatataaaaa

SEQ ID NO: 105539 - DNA, 74 bp, Homo sapiens
ctggcattgggtcttcgggagtttcttgtgcaagatgaagattaagattgcggccctgcgcatgtatactagct

SEQ ID NO: 105540 - DNA, 97 bp, Homo sapiens
gtttcatcattggcaagaaagggcagaacctggccaaaatcactcagcagatgccaaaggtacatcaggaacgtctctatcaagaatacaatttcag

SEQ ID NO: 105541 - DNA, 83 bp, Homo sapiens
attgctgcagctattgctgctgtcaatgcattgcatggcaggtggtttgctgccctctctgggagatggttcaggatggcatt

SEQ ID NO: 105542 - DNA, 118 bp, Homo sapiens
ccgggtttcgccgcaaccaagacccagcgagtgcagcggcggccgccgaggagttgatcatggccttgccaggttggtgacagtatattgtgagcatggtcataaagctgccaaaatc

SEQ ID NO: 105543 - DNA, 90 bp, Homo sapiens
gaaaaacagtaaagatggaaaaccagttattgaatatcaagaggaggagttgttggtcacgagacatgtgtagaactgcttttagaacag

SEQ ID NO: 105544 - DNA, 90 bp, Homo sapiens
ggtaacccgagaatacaccatcaacattcacaagcgcatccatggagtgccttcccttcttcttggtggtgttcttgagtaagataatct

SEQ ID NO: 105545 - DNA, 80 bp, Homo sapiens
gcaaaaagtctcagatgagctcatgagtgaaagaaactaatctggattcactccctctggttgatacccactcaaaaagg

SEQ ID NO: 105546 - DNA, 51 bp, Homo sapiens
cagttacctaacggacaagggctgcaatacattacaagaagcggtgccaag

SEQ ID NO: 105547 - DNA, 95 bp, Homo sapiens
actcagatgagagtgaggatgaagaagatgactaccagggtgagaaaattcatgaagacatctttgacatcatagaccgagaagcagatggaagt

SEQ ID NO: 105548 - DNA, 100 bp, Homo sapiens
ctagagccttggatccaggagaacggcggctgggaggagccattggatgaaagctcagtgaagaaaatgatcctcacatttgaaaagagatcatataaaa

SEQ ID NO: 105549 - DNA, 97 bp, Homo sapiens
caatgctaccctgctttttctggtgtcctgaacctggaagttgtgctttttaaggttcgttggggtgataaaggatctactgaggaaggtgcaaggc

SEQ ID NO: 105550 - DNA, 98 bp, Homo sapiens
ccgaaggaggaagggaaccaacccactttctcggcgccgcggctcttttctaaaagtgatatccgacatgaagccagtgacttcccatgtagagtggc

SEQ ID NO: 105551 - DNA, 117 bp, Homo sapiens
gatggcggatctggaggagcagttgtctgatgaagagaaggcatgtcaacatcgctctaattcagagataatctgttgtaccactccttccctgcaacagctgaatctgcaactccc

SEQ ID NO: 105552 - DNA, 100 bp, Homo sapiens
ttgctaaacttaaaagcaagctggttctctgggatataaataagataaccacctgcctcaaagataatctgctcaaaagacttccatttcattctccacc

SEQ ID NO: 105553 - DNA, 74 bp, Homo sapiens
cccggagacagcggcacagaggtgcttctgccaggaggccaacggtcctgctgatggctacgcagccattgccc

SEQ ID NO: 105554 - DNA, 75 bp, Homo sapiens
aattatgctgcagcatattgtactggcctgctgctggcccgcagggtaattcaacaggcattgcatcggcccccc

SEQ ID NO: 105555 - DNA, 75 bp, Homo sapiens
agattgaggaacaaagataagggagaacaagcagaaactggtcagaggattcactccttctccagttgcacagcc

SEQ ID NO: 105556 - DNA, 100 bp, Homo sapiens
ggggaagggaggagagaagataaccagcccctatggaggtgtataaaagggccaaatccttgtagctgtcttcttgccccggtcagtgccagccgtacta

SEQ ID NO: 105557 - DNA, 50 bp, Homo sapiens
gccctgcttttatttcgtcgaggattaaagcaaggagagccaatcatgac

SEQ ID NO: 105558 - DNA, 75 bp, Homo sapiens
agaagtttgtgaagatcggccgcccgggctacaaagtgttctacgcagaaatagaagagctgaaactggtgtatc

SEQ ID NO: 105559 - DNA, 98 bp, Homo sapiens
cagtgatgaggaaagctgtgaaagttctcaagtgattcgcctttgccagtctcatctcgtgtctgctttgttaagttccatgatccagactcagcagt

SEQ ID NO: 105560 - DNA, 120 bp, Homo sapiens
tgcaacaagtgtctttggttataaattatgatctacctaccaatcgtgaaaactatattcacagagtgcttgtgcacagagctcgaaaactagctcaacaatactatcttgtgtaccaag

SEQ ID NO: 105561 - DNA, 99 bp, Homo sapiens
acttgcgagtgagacccggctggaggaatgttttaattcttcggaaataccaagtggtctctgtgctgggctgtgctgtggagctccctgatgtcagct

SEQ ID NO: 105562 - DNA, 75 bp, Homo sapiens
ggcttccgtgcccgctggcattgctaaacacgtggaaagaatcaatttggggaaagaccacagcaagattctttc

SEQ ID NO: 105563 - DNA, 75 bp, Homo sapiens
tgccagtctaaaaattgatataggagaaaatgcagaagtctccatggacgtttccctggcttaccgtgatgacgc

SEQ ID NO: 105564 - DNA, 101 bp, Homo sapiens
gcagtggtcgcttcttctccttggccatggatcatctgcagtcattcattgcagattgtgatcgtagaacagaagtggccaagaaaagattagcagaaact

SEQ ID NO: 105565 - DNA, 100 bp, Homo sapiens
cgcctcccggctctcgtcagcctcccgccggccgtctccttaacaccgaacaccgtggatccataaagaacccagccaacccgcagagggaggggagggg

SEQ ID NO: 105566 - DNA, 73 bp, Homo sapiens
agcggagctcccccaagagccggaaagaacagagagtacctgattgagaagctgcttacaagaacaccagaca

SEQ ID NO: 105567 - DNA, 82 bp, Homo sapiens
tttaagcaaggtcttcgctgtgctccggagagatgttggtcaaagaaaaagtgatgtatgaaaaagaggcaaaacaacaaga

SEQ ID NO: 105568 - DNA, 90 bp, Homo sapiens
cgccatttagcattgatgggaagatggtagctgtaaacctggccactggaaaacgaaggattcaggaatgtctggaagaaaaagaaaagc

SEQ ID NO: 105569 - DNA, 90 bp, Homo sapiens
ctcgcctatgccttcagacatcaccagccaggtttctctccatggaagaggagaagaccagaggcatctagtcagacatcttgaagccac

SEQ ID NO: 105570 - DNA, 100 bp, Homo sapiens
ggagatctgcaggtgtctgggaattagcctggaggaactccgaacccaaatcctgagtccaaacactcaagatgggtttcgaaaaaacgatgaaatgaaa

SEQ ID NO: 105571 - DNA, 83 bp, Homo sapiens
gcttcctggcctgggcgctccggtggcggcggagagagccttctccatggacgaccgcattgcctggacccacatcaccatcc

SEQ ID NO: 105572 - DNA, 147 bp, Homo sapiens
ctgaactccctgtcacatgatacagccactgggcttatacagtatgcattggaccagggcgtgaacgtcacccaggagctgaatgtttttcggggcaaatgtggaatgctctttcactatgactggattagcgtacccctcgtgtac

SEQ ID NO: 105573 - DNA, 100 bp, Homo sapiens
ccatctccctcaaggcagcttttggttcagtgaaacaactcctgctcaaacaactggattcaaaaagtgatgttcagtagatggcatctttggaaacagg

SEQ ID NO: 105574 - DNA, 74 bp, Homo sapiens
tgtgtgcatctggctgttagaagaattcatgctcatccggaaagggctattgcaagacacgaagtccgagaaat

SEQ ID NO: 105575 - DNA, 80 bp, Homo sapiens
tgctggtgcatgcgtcgtcggcctctgggcagcaggtgtggacactgccagcggctgcagccgacttggaatgacctggg

SEQ ID NO: 105576 - DNA, 83 bp, Homo sapiens
ctttagagaagttaagagaagaattagctatcaaatccggccaggttggctcaaaaacagaagttgctgagtgcaaggagaaa

SEQ ID NO: 105577 - DNA, 50 bp, Homo sapiens
ctttctcaagcactgtgatcttcaaatgatttaagtgccctgtatgctca

SEQ ID NO: 105578 - DNA, 100 bp, Homo sapiens
gaacacccagcccatggaggagatcggcctcagcccccgcaaggatggcctttcctaccagggaggagattggacaggctggactccccattgcttttct

SEQ ID NO: 105579 - DNA, 48 bp, Homo sapiens
agacttctccacgaacacaaagggtttttgagtcatgatgcaagaatc

SEQ ID NO: 105580 - DNA, 90 bp, Homo sapiens
tctacacctctctaaaattgctgcctctggtggggaagtggaaggttgtccccccggcacgctccacagctggtgacccgacagttcctg

SEQ ID NO: 105581 - DNA, 100 bp, Homo sapiens
tgacaccccacatcgacaatttggaggtggcaaacagcttcgcagtcactaatgcttccttgcaccagaatagagagatgatagacccagacaagttctg

SEQ ID NO: 105582 - DNA, 74 bp, Homo sapiens
ggcgcggcgcaggcaccggcccggggagaggcaccatgagcgatgcccccctcggaagcctggagaacgggaca

SEQ ID NO: 105583 - DNA, 82 bp, Homo sapiens
ggagcagtggtgctgtcagcgcggccgtcggagacatgggagacccggggtcggaagtcatcatcagatttgaaatatttaa

SEQ ID NO: 105584 - DNA, 100 bp, Homo sapiens
gcgggaggcaacggagctaccagccgggatcatggcccaagttgcaatgtccaccctccccgttgaagatgaggagtcctcggagagcaggatggtggtg

SEQ ID NO: 105585 - DNA, 100 bp, Homo sapiens
tcgggattttacttctgggaagcagcactgttactcagggtgttttgaatgctgtatcaaatgcctggggggcattccctatgcctctctgattgccacc

SEQ ID NO: 105586 - DNA, 83 bp, Homo sapiens
atcaatggcgagacagtgcctggggaacatcaggatttaagtgccctgtatgctcaaaatttgtatcctcagatgaaatggat

SEQ ID NO: 105587 - DNA, 50 bp, Homo sapiens
gcgagtccttctggaagagcaaggcaggcattcaacaacatgttttgctg

SEQ ID NO: 105588 - DNA, 98 bp, Homo sapiens
aactggagagcttcatcaaaaatagtgatagctttgataaggagagtcccgtattctcagagtaaaagttgtttctggaattgatctcgccaaaaagg

SEQ ID NO: 105589 - DNA, 100 bp, Homo sapiens
gtcaatccatccacttctagtcattttaccctctacatcagcatcagcatctgcgtcaccatttcaatctgcatggtatagtgaatctgagataactcag

SEQ ID NO: 105590 - DNA, 75 bp, Homo sapiens
ctctggactccagaggcagtgatagaacacccagacgcagagtcacctaaggtcctgcgagtacaagggtcgacc

SEQ ID NO: 105591 - DNA, 98 bp, Homo sapiens
ttacgtgaaatctcgagatgatagtcaactaaatggagattctagtgctttgcttgtgacagtggatagtggaaacaggagatcgtggatcctccttc

SEQ ID NO: 105592 - DNA, 82 bp, Homo sapiens
cacagaggaataacgagggagaggagaaagactgacttccttttggtagtactgcgtgatgttgttcaggcttatcctgaag

SEQ ID NO: 105593 - DNA, 82 bp, Homo sapiens
ttcagataacttctgtgaagctgatggaagaatgtggccattagccttcggttctggcatgggattaggaatggcttattcc

SEQ ID NO: 105594 - DNA, 83 bp, Homo sapiens
ggcacagcacgagagccgcacctttgccgtgtacctcaatagcactggctaccggacagtgagtgtgtccgcttgaaaccaac

SEQ ID NO: 105595 - DNA, 51 bp, Homo sapiens
ctcatggcctgccactgcgtgcgtccagccctgctgggagttttctgccac

SEQ ID NO: 105596 - DNA, 51 bp, Homo sapiens
cttaaagttccagaaagattttgaactatggaaatgatgttagacaaaaag

SEQ ID NO: 105597 - DNA, 100 bp, Homo sapiens
gaatggacttcagactggtggactgttcatcattctgttgaagaaacgcttaacccagagctgggatcatgtcagcctcattcactgcatttatatgttg

SEQ ID NO: 105598 - DNA, 100 bp, Homo sapiens
gcctcatcatcttcagtccaacaggttactttttctcgcggcacagatgatggtgagaacaagaccaagattggaaagccagcttcagaggagggaatta

SEQ ID NO: 105599 - DNA, 100 bp, Homo sapiens
cacagcttctagtgttgctttggatcttgtggaaagtcagagtggagcagttctggaggttttatagccacatggtacgtcctggggacctgacaggcca

SEQ ID NO: 105600 - DNA, 100 bp, Homo sapiens
ggctttcacaggcccgggagcggcgcggatggactctgtgactacatgactaataaaatatggcagaaatgacaccatgcagtttccaagcccaggcctt

SEQ ID NO: 105601 - DNA, 50 bp, Homo sapiens
gaaaactacaggcggggacggcttctcgatttaatccagagactgacttc

SEQ ID NO: 105602 - DNA, 96 bp, Homo sapiens
tgacatgtctgtgagctgcggaggctgcggcccccaggtctacttccccagcaggacagcatcattctcctatatcttctagacatcactcatctt

SEQ ID NO: 105603 - DNA, 100 bp, Homo sapiens
cacctgcccgggctccgggagcccctccacggagcccaccccagaggctggtacagccaaggccacctttgatgccatttctaagacctacagctacctg

SEQ ID NO: 105604 - DNA, 75 bp, Homo sapiens
ggatgatttcatccaagtcactaaaaatggatcagggcttcctactatgagatttcagttgatgatggtccatgg

SEQ ID NO: 105605 - DNA, 74 bp, Homo sapiens
ccaaatgtgctcacctttgacttcatgtcgaagccatctccagctcactgcaaatctaacttcatcatggtgaa

SEQ ID NO: 105606 - DNA, 87 bp, Homo sapiens
ggcccgcgcggagcggacgcgcgtggcgctgcccggctgaccggttccctgatgtgttacctgcttctgctactgatccaaactgca

SEQ ID NO: 105607 - DNA, 100 bp, Homo sapiens
atggcagcctgcagctaggactttaattgtctcaatttaaaatggtgaattactcctatgatgaagatctggaagagctttgtcccgtgtgtggagataa

SEQ ID NO: 105608 - DNA, 73 bp, Homo sapiens
ctccagcgactctgagagcgagagcccgaaaatggcacagaaatggtatcaagaaaccccgatcacaaagata

SEQ ID NO: 105609 - DNA, 87 bp, Homo sapiens
cgctccgtggccttagctgtgctcgcgctactctctctttctggcctggaggctatccagcatccacctccgacccttaagccagag

SEQ ID NO: 105610 - DNA, 50 bp, Homo sapiens
gaaatcttagataagaaggttgagaagagagaagaagaaggaggttcctg

SEQ ID NO: 105611 - DNA, 75 bp, Homo sapiens
acctgagcacgaagttttctttgtggacttaattcagtgcacaaatgagatgaatgtgaacatcccacagttggc

SEQ ID NO: 105612 - DNA, 100 bp, Homo sapiens
ctctgcgtgcattctccactgccgtctactcggccactccggtcccgacacctagcctgctgcaaaatggcaactcttaaggaaaaactcattgcaccag

SEQ ID NO: 105613 - DNA, 83 bp, Homo sapiens
ggcgagtccggtctcaaaatggaggttttttattggcacctcagtctcaacattttcttttcggattcatgaggaaagagaaa

SEQ ID NO: 105614 - DNA, 75 bp, Homo sapiens
gccatggactgcagcctcgtgcggacgctcgtgcacagatacggcctgctttcttccccgggcgatgtgcagaga

SEQ ID NO: 105615 - DNA, 83 bp, Homo sapiens
ttcttgaaacagttcatagatactacactgaatttcctacagttcttgatattacagggagtgcatccgccccaacccttttc

SEQ ID NO: 105616 - DNA, 90 bp, Homo sapiens
gaaaattgtgaactaaggccccctgcccccttttcctggtgcatgtgaagttatcaaaaacagggaaatcctcattgacgattcaatttg

SEQ ID NO: 105617 - DNA, 83 bp, Homo sapiens
aggagctgtgcagccgcgaggaggcgcgggaggtgttcgagaacgaccccgagacgccacacccactcgcccgggtctatggc

SEQ ID NO: 105618 - DNA, 50 bp, Homo sapiens
ggaaattgtcccgaatccctgcagaaagggctattgcaagacacgaagtc

SEQ ID NO: 105619 - DNA, 82 bp, Homo sapiens
ggagagtacaggtccctaatggtgcaggagcagcggctggtgcatgacaatgcagatcttcgtgaagactctgactggtaag

SEQ ID NO: 105620 - DNA, 82 bp, Homo sapiens
gaacggctgaaggccctacgggagaaaaccgggcgcaaggtgagacacagtaacctggttgaactctgcatctggaaagctg

SEQ ID NO: 105621 - DNA, 50 bp, Homo sapiens
gcagtgaccccgctttcctcacgcccagccaaaacagagtggagtacgag

SEQ ID NO: 105622 - DNA, 76 bp, Homo sapiens
ccaattttgtaattctagaaacatggtccatttcttatcaggagaggatcaatggaagtgaaagcaaatgattttc

SEQ ID NO: 105623 - DNA, 99 bp, Homo sapiens
gaaacaaaatgtcaacaaattgatggagacggtctcgccacattgcccagactggtctgaaagtcttgggctcaagagatcctcccgcttccgccttcc

SEQ ID NO: 105624 - DNA, 100 bp, Homo sapiens
aaaatacgaaggtttctggctgggttggctatacagtgcgctttgatgatgtcacctcagaagacaccaggatcaagtttctgacagatggcatgcttct

SEQ ID NO: 105625 - DNA, 75 bp, Homo sapiens
ttgatattggctcatttgatgaagaggataccaaagggattaaggatatgggccctcacattttccaaacctgtc

SEQ ID NO: 105626 - DNA, 100 bp, Homo sapiens
tgctgaccgtgctcgcgctgctctcccaccgccgcatcctaatgtcctatgatcacgtggaactcacattcaatgacatgaagaacgtgccagaagcctt

SEQ ID NO: 105627 - DNA, 75 bp, Homo sapiens
ataagaagcctgcgggaggggtcatttttgagttttttgtagcatcagatccaacagttaaaacagatcgactgt

SEQ ID NO: 105628 - DNA, 100 bp, Homo sapiens
catgctggtcatctttggtcactgccctctctatggatatataagcaatgtgcaggaatatgatttggtggagaccatcctgggcctcacaggagcgacc

SEQ ID NO: 105629 - DNA, 100 bp, Homo sapiens
aaactcttcactgccattggttatagtgagagtacccacaacctaactttacctaagcagggagactcatgcatctgtatgccgtgtgcgtggactgcct

SEQ ID NO: 105630 - DNA, 82 bp, Homo sapiens
gatgggcgttttaaagacatctttcaggagatatatgacaagttgcccccaagtttcctggcagtgtgtgatactgaggagg

SEQ ID NO: 105631 - DNA, 100 bp, Homo sapiens
gaaccccgagtggaagtggttcatcgagcagaggctgctcatgttctccttcgtcaacgaccgccgaaggagtaaaggtgctgcaatgatgttagctgtg

SEQ ID NO: 105632 - DNA, 98 bp, Homo sapiens
ggatggatcaccaccagccggggactgggcgctaccaggtgatcttcttcagcagtatcgttctgctgtgtgcaaactagacagtgtgaataaggatc

SEQ ID NO: 105633 - DNA, 100 bp, Homo sapiens
cgcaactcggcagcctccacccaccggcccaccctacatttagcgcatcatgtgatccgggtgccaggtctcatctccaggcctttcctctaggccaggc

SEQ ID NO: 105634 - DNA, 50 bp, Homo sapiens
aacactctgaaaagatggctaaattaggtgaccctgagagtgtggctggg

SEQ ID NO: 105635 - DNA, 76 bp, Homo sapiens
cattttatgatttactggatgaactgataaaacccaccagtctaggtgtccaaggcagctgcagatttgatggcct

SEQ ID NO: 105636 - DNA, 101 bp, Homo sapiens
gccagcacacaccggcacctaccgcacgagcacagctcctgccctccactgactccagagagggagatccccagtacttgactccatcacgcagatgggag

SEQ ID NO: 105637 - DNA, 100 bp, Homo sapiens
cggcagagaggatatcttgggcgggggatgtgagcgctgagcccttggcagccgcagggccgtaggcagccatggcgcccagccggaatggcatggtctt

SEQ ID NO: 105638 - DNA, 74 bp, Homo sapiens
cgcactccgtggccccgatggagcggtacaaaggtacttggaaaaatggacaaggattgtgaaatgaaacgcac

SEQ ID NO: 105639 - DNA, 78 bp, Homo sapiens
acggtgaaaagaaatctgttgcttcttgcatggacaaggcgcctctgtcgaagagccttctgctggtccccagtgccc

SEQ ID NO: 105640 - DNA, 82 bp, Homo sapiens
cacagaaagagctgttaacacttcctagataacggggcagctgcaatgactctccgcacggtattattgtcattgcaagcac

SEQ ID NO: 105641 - DNA, 75 bp, Homo sapiens
gctcaacgccaggcgccgctcctttacaggcatgtggagaccccaaggcaaaaccatcctatcttatcgacaaaa

SEQ ID NO: 105642 - DNA, 98 bp, Homo sapiens
ccgtcgtcgtctgccttcgcttcacggcgccgagccgcggtccgagttggaagtactccatgacacacactcggagaaagtcccttcccatgctgagt

SEQ ID NO: 105643 - DNA, 100 bp, Homo sapiens
tggaagcttcctgaggccaccccagagtcagaagccgctatgcttcctggacagcttgcagaaccgttgcataccctgtcctgagggcgcggcacggagt

SEQ ID NO: 105644 - DNA, 98 bp, Homo sapiens
acctcatacggctgcttctggagaagctcccgtggaagtcgctgaccagcatcattgagtactactacatgtggaagaccaccgacagatacgtgcag

SEQ ID NO: 105645 - DNA, 83 bp, Homo sapiens
ccggcacccagacaggtggcgaaggcagaggagatctctctaggagctgacactcgaaccttcacgacccattcggatttttc

SEQ ID NO: 105646 - DNA, 124 bp, Homo sapiens
acttcagggatgatgatgagggtccagtgtccaaccagggctacatgccttatttaaacaggttcattttggaaaaggcacacaagtctctgaattttgtctcaacactgctccagattactat

SEQ ID NO: 105647 - DNA, 50 bp, Homo sapiens
ttacgtggagatcaagcgcagcgatgtctccacaaaccggaggactaccc

SEQ ID NO: 105648 - DNA, 83 bp, Homo sapiens
actgttcctggaggaatccgagaagagcagagcggagggagccccagacacggctgaaggtgatgtggccgccctcaaccgac

SEQ ID NO: 105649 - DNA, 100 bp, Homo sapiens
cgggacggaggacgcgctagtgtcttctctgttggttgaaatgtctatgattttatctgcctcagtcattcgtgtcagagatggactgccactttctgct

SEQ ID NO: 105650 - DNA, 75 bp, Homo sapiens
gagaagcaagaaggccctggacacagcaatatctctgggctttcacagcttcgagcaaatgctctcatcaaaaga

SEQ ID NO: 105651 - DNA, 100 bp, Homo sapiens
cgatccagcctgcggagcctgtggggcagtgcattaaaggagttcgagcaggtgccgggacacttgactgatgagctccacctgttctcccttgaggacc

SEQ ID NO: 105652 - DNA, 50 bp, Homo sapiens
aagacatggagattctcttaaaaagggccgcgatgggcctcttggaacat

SEQ ID NO: 105653 - DNA, 75 bp, Homo sapiens
caatccagatggcagccagtcagtggtggaggatacttttgtggaactctatgggaacaatgcagcagccgagag

SEQ ID NO: 105654 - DNA, 85 bp, Homo sapiens
cgaaatggcggggactgttggtctcggccctgcggaagaattggagcgttattcagtatattaatgtcttattgataatggcaga

SEQ ID NO: 105655 - DNA, 75 bp, Homo sapiens
gtcacaccttgctcctggagaaggaagtagccacgatggaggtgatgaacctgatggagcagcctatcaaggtga

SEQ ID NO: 105656 - DNA, 75 bp, Homo sapiens
tcggactcccgacccgccgccggctccggccgcgtttcccgggtaaaggggtagacttcgcttgaaaagatcgag

SEQ ID NO: 105657 - DNA, 51 bp, Homo sapiens
tgttcagtatgcatgcattggaaaaagtagctacagcaagctgggtagcag

SEQ ID NO: 105658 - DNA, 75 bp, Homo sapiens
tgcatcaggatattaatgattataaccggagattctcagggcaacccagatctttcctggtccagaactttacac

SEQ ID NO: 105659 - DNA, 100 bp, Homo sapiens
ccagttggaattgaagaatattcccaagtccttcacccggacttaattcagtgcacaaatgagatgaatgtgaacatcccacagttggcagacagtttat

SEQ ID NO: 105660 - DNA, 123 bp, Homo sapiens
aaattaccattttatgatttactggatgaactgataaaacccaccagtctagctttgactctcccggatcttgcagagcagtttgcccctcctgacattgccccgcctcttcttatcaagctc

SEQ ID NO: 105661 - DNA, 75 bp, Homo sapiens
tgtgaagagtttacgacttcagagaccacatatggtgcaaaccctgctcagaggccctatggacagcgatgacag

SEQ ID NO: 105662 - DNA, 82 bp, Homo sapiens
ccggctgccggtcgacgaccgccccgcgtcatgcggctcctcggctggtgggcaggatagcgtgtgccaatgtcctcagtga

SEQ ID NO: 105663 - DNA, 82 bp, Homo sapiens
cgagtgcaacatctgcaaggtccgcttcaccagccgcggcgagtcctttgcacatgttggcaacacacgcatccgcatcggc

SEQ ID NO: 105664 - DNA, 100 bp, Homo sapiens
acgaaggtgaagccacggaagataaggaaaccacccctactcctaatcccccgactacagaagaggagaaaacggaatctaatcaggaggttgctaaccc

SEQ ID NO: 105665 - DNA, 100 bp, Homo sapiens
acttctcctccacgccggctctgccaagaatatctggaaacgggcattgcctgcgaggctggccgagaaatcccgtgattttgacacttcatgacatgtc

SEQ ID NO: 105666 - DNA, 82 bp, Homo sapiens
cagaccctggagcctcagttggaagcagccgatccagcctgcggagcctgtggggcagatccgagcaccagccggcgcttca

SEQ ID NO: 105667 - DNA, 75 bp, Homo sapiens
gctgtggccatctgcaaagggatcatgtacctaggctcgggtttgtgctgtgtcggtgccttggctggcctctcc

SEQ ID NO: 105668 - DNA, 100 bp, Homo sapiens
aactatagcaatctggttttcttgggacacatgacggaagtgtgtatttttgggccactccacggcaggtccctagcctgcaacatttatgtcgcatgtc

SEQ ID NO: 105669 - DNA, 98 bp, Homo sapiens
gagttgtgagtctctttcctgtttacctccagtgtcccttcttccacatgaaaaggataagaatggtagataacgcagatcatctctggaaaggatat

SEQ ID NO: 105670 - DNA, 75 bp, Homo sapiens
ttccctgaagtacctgaagttgttgtatccaggtgcatgttacagatatgtgtcacaaagatgtctacacggaac

SEQ ID NO: 105671 - DNA, 100 bp, Homo sapiens
gccgccgccaacgccgcgcccgacgcagcgatgggcaacacggtgcaccggaccctgccagggtggttctcttcccaaagtggaagccaaattcatcaat

SEQ ID NO: 105672 - DNA, 59 bp, Homo sapiens
tttgaatatcgtaagcgcacgtttaaacatctcaagattctcagcgctgattttgagat

SEQ ID NO: 105673 - DNA, 100 bp, Homo sapiens
tttgccactgaattttttgaagatgacgccacattaaccctttcattttgtttggaagatggaccaaagcgatacaatctggaaagcatgaagactgggc

SEQ ID NO: 105674 - DNA, 73 bp, Homo sapiens
catttcttttcacaatatccacaatacatttgccacagccctctcaccctggtactgcatgcacgcaatgcta

SEQ ID NO: 105675 - DNA, 74 bp, Homo sapiens
gccgatccagcctgcggagcctgtggggcaggaccaagaatcgccttcagccctgtctggtgcatccttggcag

SEQ ID NO: 105676 - DNA, 75 bp, Homo sapiens
ttgtagcaagtggtgataacacactcagcatcactaaagtgactccaacaacctaaaactcaacaacgtgcgcct

SEQ ID NO: 105677 - DNA, 82 bp, Homo sapiens
ggagcctcagttggaagcagccgatccagcctgcggagcctgtggggcaggtgaccaggcattgatgcacccccaggaaggc

SEQ ID NO: 105678 - DNA, 75 bp, Homo sapiens
acctcgacgagtacatcgcaaggatggttcatgagaaagatcagtctaaagaaaaggagaagaaagtgaaaaaaa

SEQ ID NO: 105679 - DNA, 75 bp, Homo sapiens
caaaaacctttggacagtccaatgtcaacattgcccagcaagtggcaagaaaattggatgtatattttgaatatg

SEQ ID NO: 105680 - DNA, 98 bp, Homo sapiens
ccgccgcatcgcgggggtggaggacatcgacatccaggcgaactcggcctatcgctaccctccgaagtccgcaaacggggattcagcgtccgatcctt

SEQ ID NO: 105681 - DNA, 100 bp, Homo sapiens
ctgccggacgaggctcccgccgccgattgacccgcgctccgcccgtagtcgggccgatagaaccatgtagctgctgaaggaatgagcccatgatttctca

SEQ ID NO: 105682 - DNA, 74 bp, Homo sapiens
ataatcaacactacgagagatagagccgcctagaaccagaaagctgacttcatgagaccgaggatctcgttcgt

SEQ ID NO: 105683 - DNA, 98 bp, Homo sapiens
gaaaatcttcaggcaaatgagatcatgtggaataacttaacagcagaaagtttgcaagtaatgaggagatgttaaagtaacccatcttgcaggacgac

SEQ ID NO: 105684 - DNA, 99 bp, Homo sapiens
ttcagtctgtgcggcccgctgttgtctgcccgcacccgggcccgcaggccaggttatgatgtgattgctcaagcccaatctgggactgggaaaacggcc

SEQ ID NO: 105685 - DNA, 88 bp, Homo sapiens
cagttccaggaagtgaacaagtccaagaggaccttctgattagtccacagtcttcctctataggctgttttatgctgtggatgttgac

SEQ ID NO: 105686 - DNA, 51 bp, Homo sapiens
agagaagatccgcgaggttgtctgctatccctgtgttccagcgtggaggga

SEQ ID NO: 105687 - DNA, 83 bp, Homo sapiens
gaaatagcagtgcttcaggaatagaaatcttggcaatcgaaaggctgccagctgttggtatatccaggagcttttaatctgac

SEQ ID NO: 105688 - DNA, 98 bp, Homo sapiens
ggtacactccctttccaaggaaaagatcgaaaagaaacaatgactatgattcttaagtgttcgaaatccgcaccactgatgacctcactgaggcctgg

SEQ ID NO: 105689 - DNA, 98 bp, Homo sapiens
tgagaaacgcgcacaagatttggagatgatggctgatgacaatatagaagattctacagcaagggaatcatcatccagggacgtgccagaaaccacaa

SEQ ID NO: 105690 - DNA, 90 bp, Homo sapiens
cttggataagctgaaggaaagagctcaaagatttggtttgaatgtctcttcaatctccagaaagtttggaggcaaactggttacgtttga

SEQ ID NO: 105691 - DNA, 90 bp, Homo sapiens
caccacagcccatccccagaagatcctggtcccctgctttaaccatcgaaaatgagaccctgcgggagattgtgattggcgtcctgcacc

SEQ ID NO: 105692 - DNA, 90 bp, Homo sapiens
atgatctgtacatagattttggtggaaagtttcattgtgtatgtagaagaccagaagtggatggagagggcaagattcttgccaagagaa

SEQ ID NO: 105693 - DNA, 51 bp, Homo sapiens
ctcagttgttctgctgctttcagacccccatttcagaggctttgaaaaaat

SEQ ID NO: 105694 - DNA, 50 bp, Homo sapiens
gccaagatgagccccaaggacctgtttgggtccccagccccaccccagcc

SEQ ID NO: 105695 - DNA, 100 bp, Homo sapiens
caacaagcagcctattatgcccagacaagtccccagggaatgccacagcatcctccagcacctcagaaatgttgcagtctcttgcacagcgcccagctcc

SEQ ID NO: 105696 - DNA, 75 bp, Homo sapiens
ggaaaaggagcctcccaaacaagggaaggagaaggccaagaaggcagagcagtactcccctgccctcaacaagat

SEQ ID NO: 105697 - DNA, 75 bp, Homo sapiens
ccttattacgccgtctccaagatgtagctaatgaccgtggttcccactgagcaagctatagtcagcagactggac

SEQ ID NO: 105698 - DNA, 75 bp, Homo sapiens
caggcagtggaaccttcgggctcctgtcttctctgttggttgaaatgtctatgattttatctgcctcagtcattc

SEQ ID NO: 105699 - DNA, 99 bp, Homo sapiens
agcgacaggagaaggaggtcgacgaggacacgacagtcacaatcccctcggccgtgaatgtcggattgcacatcctattgtaaaatgtacttactgcag

SEQ ID NO: 105700 - DNA, 100 bp, Homo sapiens
ccggttttatggtgcagagattgtctcggctcttgagtacttgcactcgcgggacgtggtataccgcgacatcaagcaaatatgttgatgaggagaactc

SEQ ID NO: 105701 - DNA, 75 bp, Homo sapiens
tgtctctgatgagctgagaaacaaagccacccagccaatgaaggggattcgacattggaaatcacttctgtgagt

SEQ ID NO: 105702 - DNA, 75 bp, Homo sapiens
ggtacctgcggccaattcggtggaacgaggacgcggactgcgaaggcagtgtgaagtggaatctctgaaactcag

SEQ ID NO: 105703 - DNA, 152 bp, Homo sapiens
acaaaacgtaaactatcagggcggtcggcagtctgagccagcagcgccccctctagaagtttctgaggaacagtggaaagaggcaaaacctgatgaattaatggattccaaattgagatgcgtatttgaaatgcccaatgaaaatgataaat

SEQ ID NO: 105704 - DNA, 75 bp, Homo sapiens
tggaaagaaaccatgtgctgaaatgtttgacgacactgatggtttgggactggtgattgcagctggaagtgccca

SEQ ID NO: 105705 - DNA, 100 bp, Homo sapiens
ctcccgccgcggcggccggcgatagcccggcgctcatgacagaattgcttcagattgctggaattagcccacatggtaatgctttaggagcatcaatgca

SEQ ID NO: 105706 - DNA, 100 bp, Homo sapiens
ccggagcagagagctggcgagcaaggttcagccagtttcccggaagaagcttcaattagttgggattactgctctgctcttggcttccaagtatgaggag

SEQ ID NO: 105707 - DNA, 100 bp, Homo sapiens
gtggttgtggggaccataactgatgatgtgcgggttcaggaggtacccaaactgaagttcaggcttcagagagcccctgacgcctgcaggaacatggcag

SEQ ID NO: 105708 - DNA, 74 bp, Homo sapiens
tggggatgagtatgcggaggacagctctgatgaggaggctgaccccgcactacatctacccaccagccatcgtg

SEQ ID NO: 105709 - DNA, 83 bp, Homo sapiens
gggcagtgtccccagccgccatggatagcgacgacgagatggtggaggaggcggtggaaggcatggaagaggagatggttcgt

SEQ ID NO: 105710 - DNA, 75 bp, Homo sapiens
ctgctcctcactcaccgcgtggacacgatcggctcttcgtcagattgggcagaggacgataagcactgcttcccg

SEQ ID NO: 105711 - DNA, 101 bp, Homo sapiens
agcacgaagtattggtgctcagaaggctaaacttggacaggcaaagcagagagcagaggttcttcagtccacgcaacggttcttctctgaacagcaacaga

SEQ ID NO: 105712 - DNA, 82 bp, Homo sapiens
cgcctttccagcatgcaggggctgctcagtgatgctgcttcaaaagtcatggtggaattgctcggaagttacacagaggaca

SEQ ID NO: 105713 - DNA, 90 bp, Homo sapiens
ggcggaacgcaggagacacaagaagcggatccaggtatgtaggaaaccttcccagaatatttgactactcgcctttagatccaacacaag

SEQ ID NO: 105714 - DNA, 50 bp, Homo sapiens
accgggcgctggtctgctcccagccggcaccaccaagtctgaagatcgtg

SEQ ID NO: 105715 - DNA, 82 bp, Homo sapiens
tcactttcaggaaagtagtggaagagattgtgtcttgagaagacaggcattttagagttaattggccttggtcctcacagct

SEQ ID NO: 105716 - DNA, 74 bp, Homo sapiens
ttaaggattccaagtaactcttatttggaaacctcgacctgtctcccagttggttgcacagcaggttactcagc

SEQ ID NO: 105717 - DNA, 51 bp, Homo sapiens
gaagagacacaattacgattggttaagaatagacccaccagcatttcgtgg

SEQ ID NO: 105718 - DNA, 82 bp, Homo sapiens
gagcacacgtcctcgtctcgttcctgatcgaacgtggtggtgaaaggtgtagcagtcactcggcctacacccacagcatcga

SEQ ID NO: 105719 - DNA, 75 bp, Homo sapiens
ccacgaatctgcccacccctcctgtaacccagcctgtttcacttcttgctgccattcgatttcacatggaagatg

SEQ ID NO: 105720 - DNA, 80 bp, Homo sapiens
cgctactctctctttctggcctggaggctatccagcacttgtgcaccatggacaattttgctgagggagatttcactgtg

SEQ ID NO: 105721 - DNA, 100 bp, Homo sapiens
gagtaagagcccatagcagtctgccagacaatagagcatatggattagtgacaagagctggggttaggatccggttggactctgacatcggatgccctca

SEQ ID NO: 105722 - DNA, 90 bp, Homo sapiens
acccgagagaaggagcggggctggtggggctgctgcagccggaaagtacatcagccagggggcagtgtcagagacgcagcactgggagag

SEQ ID NO: 105723 - DNA, 87 bp, Homo sapiens
tcgcccaatccacatgcttttccagctgtcccctttcctccaacccaacggcttactttcaaggaagtatttgagaatgggaaacct

SEQ ID NO: 105724 - DNA, 100 bp, Homo sapiens
gtttctcagagccggcggatgttcatgggcagcaccatcgagccagaagcagtatttgtcctgtactatccttttctgggggatcctaggcagaagcgat

SEQ ID NO: 105725 - DNA, 87 bp, Homo sapiens
taatgtttctggtgttgcgagatggtacaggttatcttcagtgtgtcttggcggatgagttgggaaccttaagtaaatcagaatggg

SEQ ID NO: 105726 - DNA, 100 bp, Homo sapiens
cggatactctcccttcggagtttgatgtgatcgtaatagggacggatgaataatacggcagctagtccaatgtctactgcaacttcaagtagtggaagga

SEQ ID NO: 105727 - DNA, 89 bp, Homo sapiens
gcggcgacgcggacctgcggactagcgaacccggaggttgaaatcacaaagattagacacctttttagataggtgttcttcagcaccac

SEQ ID NO: 105728 - DNA, 75 bp, Homo sapiens
cgctaccaggaggtcaaccccgttgcatttgctggtctggcctttgcgtccttctacctggcagggaagttacac

SEQ ID NO: 105729 - DNA, 100 bp, Homo sapiens
agttgaaggaaggtcggcagatcaaaccttataccctcatgagcatggtggccaacctcttgtatgagaaacgcagcgtcaccctttacaccagaaagct

SEQ ID NO: 105730 - DNA, 117 bp, Homo sapiens
acaagtggagctccttttcctccacctaccttcccgagtgatgcaggttctgaatgctgatgccattgttgtgaagctgaactcaggcgattacaagacgattcacctgtccagcat

SEQ ID NO: 105731 - DNA, 88 bp, Homo sapiens
cttttggccctaggccccttcctgcccctgtcgtcagcagataacgaaggaggcccaacttcattcaataaggagcctgacggattta

SEQ ID NO: 105732 - DNA, 83 bp, Homo sapiens
cgctgctgctcttctccaggctctgtggggccaaaccagtgctcctgccacctctctggctgccccctagagcctgcccatcc

SEQ ID NO: 105733 - DNA, 50 bp, Homo sapiens
ccagagacatgctgaaacatcgaagtgttctaagaacggaagcatctggg

SEQ ID NO: 105734 - DNA, 100 bp, Homo sapiens
ccggaagcaccccggcggccgcggtaatgctggtggtctgcatcaccaccggatcaacttcgacaaatagtctactttgaggatgaggacagggcagaac

SEQ ID NO: 105735 - DNA, 74 bp, Homo sapiens
cctgccccttgtcaacagctacacacgtgtgcccccactgtcgttttcagtgagaggattggcatgaagaatcc

SEQ ID NO: 105736 - DNA, 75 bp, Homo sapiens
gatatctacagcacctatcacttgttccctccaagacaactgaatggttttggcacaaataccagtgggaatagt

SEQ ID NO: 105737 - DNA, 100 bp, Homo sapiens
tggacagtcaaagaagacagaaaaatgcaacaacacaaacagtcccaagtggaagcaaccccttacagtaaagttcaggagccctggaaaggagaaggaa

SEQ ID NO: 105738 - DNA, 100 bp, Homo sapiens
cctccagcctggtggtgccctgtccttgcaaaagcagatggaacatgctaaccagcagactggcttctccgactcacaagccacccgaggggactgcctg

SEQ ID NO: 105739 - DNA, 98 bp, Homo sapiens
gtgcagccgcgaggaggcgcgggaggtgttcgagaacgaccccgagacgctggtaggtgagtgctgtcctcggctcactttcctcaagctctccggct

SEQ ID NO: 105740 - DNA, 75 bp, Homo sapiens
ttccctgcttgacgacgagctcatgtctctggccccacaccagtgagaagcatcagcaccgtgaacttgtctgag

SEQ ID NO: 105741 - DNA, 87 bp, Homo sapiens
gactcaacagtttgtggcaagacaagctcagaactgagaagctgtcaccacagaggagaattctgcctaagccaactcgaaaaagcc

SEQ ID NO: 105742 - DNA, 83 bp, Homo sapiens
caacaatatcggcattctgtgctacgaagatatccttggaacagaagatcttattgtggaagtgacttccaatgatgctgtga

SEQ ID NO: 105743 - DNA, 99 bp, Homo sapiens
gagaggatctggtgtaccaggcgaagctggccgagcaggctgagcgatacgacggccacgtgctgtacgccgacatcaagatggagaatgggaagtcca

SEQ ID NO: 105744 - DNA, 75 bp, Homo sapiens
tctgcgacctggggccctgggtgaagtgctccgccgcccttgcctccaggctccgtatgtggatgtgatctgttt

SEQ ID NO: 105745 - DNA, 98 bp, Homo sapiens
tcaggtcaaagaatatggccagaagagggcattctgcacagattgggaagctgccaaagaatgtcgacgtcgaaagaaagaatatgtaaaatgtctgg

SEQ ID NO: 105746 - DNA, 100 bp, Homo sapiens
ctgtttgaccaggcccagaggtccgtgcggcagcagctccagagctttgtcaaagagtcattgattacaacggggaacgcacgctggatggttttaagaa

SEQ ID NO: 105747 - DNA, 100 bp, Homo sapiens
aagaagattgaactttattgtgaacaggtagagtacctgttgttgcagagttattttctgagtcagtttcaggaggcaagtgaggcctatctggttggcc

SEQ ID NO: 105748 - DNA, 75 bp, Homo sapiens
ttgagaaaaggcctaagaattttggcattgcccagctcaacattggcaatgtgctccctgtgggcaccatgcctg

SEQ ID NO: 105749 - DNA, 75 bp, Homo sapiens
acaaatgctccttctcctggagacgcaactcaaggtggtttttgctcttacagactttgtgatagaaaatcttgg

SEQ ID NO: 105750 - DNA, 95 bp, Homo sapiens
ctcccgagtagctgggaccacagttattaccccattcaagttgacaactgaggcaacgcagactccagtctccaataagaaaccagtgtttgatc

SEQ ID NO: 105751 - DNA, 100 bp, Homo sapiens
actacgattcagtgctactcccttagtaactatgcagttttaatgaaaaacacaccttgactttagtcagatacatcactgtctgttaaaggaaaccaag

SEQ ID NO: 105752 - DNA, 100 bp, Homo sapiens
gcatttgcaagaagaagcagaatagacacttcattgttccagcttctcgcttcaagctcctgaagacttgggaagacccagggcacaatgataaacatac

SEQ ID NO: 105753 - DNA, 50 bp, Homo sapiens
ggaatcagagggtgcattcaaagtcagccctgacaaaggtcagctagccc

SEQ ID NO: 105754 - DNA, 98 bp, Homo sapiens
ccgtctgcttcgggcctctggaatttagcgctcgcccagctagccgcagaattctgcttggtcagaatcgtgatggcattgtgttcagcactgatgac

SEQ ID NO: 105755 - DNA, 73 bp, Homo sapiens
ccgccctcgcctcacctggcgcaggaatacaaacaagtgatcctaatgctgtggtcatgggattggcaccaga

SEQ ID NO: 105756 - DNA, 89 bp, Homo sapiens
ctggggccagggaaccctggtcaccgtctcctcagattcttcgctgctgctgccttaccgccgagaaccaccacccgccaggcgtcttg

SEQ ID NO: 105757 - DNA, 100 bp, Homo sapiens
atcgtggtggtcggatttcaccacaagaagggctgccagatgatgactttgaccagtttgataagcctggcgcggaacggtcgtggagaagaagagctgc

SEQ ID NO: 105758 - DNA, 90 bp, Homo sapiens
ggagggcgccgcggggcagccgccgctcctccgggacacgatgaggcgagtggtacgacagagcaagtttcggcatgtatttgggcaagc

SEQ ID NO: 105759 - DNA, 111 bp, Homo sapiens
cttagagtttcccgcaagggatgtttatgttccaaacactacttacagggtgtactctgtgtgaccgcgcctatccctcggactgtcccgaacatggaccagtgacttttg

SEQ ID NO: 105760 - DNA, 100 bp, Homo sapiens
cgcagcaccatggcgaccaccgtcagcactcagcgcgggccggccaagtacctggcccagatcattgtgatgggcgtgcaggtggtgggcagggcctttg

SEQ ID NO: 105761 - DNA, 75 bp, Homo sapiens
cgcgctccgccccggcctagggccttgccccgggagcccgcgaggcttggaagctcgaagtctggctgtggccat

SEQ ID NO: 105762 - DNA, 105 bp, Homo sapiens
atgtatttggaacaaaaaaaggagatgcctggcagccccgctctctgcacattttgaaagcgaagcagaagccgtagaatcagcggcgagcctgttgaaagaacc

SEQ ID NO: 105763 - DNA, 100 bp, Homo sapiens
tgggatggaaattttttgatcatgcggcacatcttgggggagctctttttggaatatgcaaagtacagttcgagagcacagagatggaggtcatgcaggt

SEQ ID NO: 105764 - DNA, 100 bp, Homo sapiens
ggacgtcattgccgggaacgagcgagtcgccgctgcagccctagtgactgcggcctgcatcccggcctttgaactggccacaggtgactatttgtttgaa

SEQ ID NO: 105765 - DNA, 75 bp, Homo sapiens
ggtttgagtccgcatcgccacagctgaaggctgcgagggactaagagcagactgttatactttctgctgagtgcc

SEQ ID NO: 105766 - DNA, 101 bp, Homo sapiens
agtcaccactggacctccaaggaagccacgtgcagacatctacaaccttcgatctcctgacgagtatggaacccttcagatcaaagcttaccaataaattc

SEQ ID NO: 105767 - DNA, 75 bp, Homo sapiens
ctaccgttacttggctgaggttgccgctggtgatgacaagaaaggagccaggtgagaatttcaaggattatcgac

SEQ ID NO: 105768 - DNA, 99 bp, Homo sapiens
gaaaaggaagactattcagacagaacaatcagtgatgaagatgaatcgttccatgccattgcagtgtcaactaggcctcagttacttttcagtttgccc

SEQ ID NO: 105769 - DNA, 90 bp, Homo sapiens
aaatggcagaagaagaggagaggacatgatgcatccactcaaaaggagcgatatatagttatcagcaaagtagatgaagaagaacgcaaa

SEQ ID NO: 105770 - DNA, 104 bp, Homo sapiens
cctacctcacagcagggatgctggaccaacctggctttcccgactgctccatcgaggcagccatggtgaagcttatcacacagactttcagccaccacaatcag

SEQ ID NO: 105771 - DNA, 75 bp, Homo sapiens
tgttaaggattccaagtaactcttatttgatttgatggtagagtggtggcaaagcttccttttacccctctttct

SEQ ID NO: 105772 - DNA, 71 bp, Homo sapiens
agtatcatgctggccaagaagatcatcattaaggacggaggcacgactcagctttgcactccagggctgcg

SEQ ID NO: 105773 - DNA, 99 bp, Homo sapiens
tttgatgcgacagaatcccactgagacgcttcggagagtgttgccaaaagtcagaaacttgatagcccagaagagttagggaaaaagcgtatctgcagg

SEQ ID NO: 105774 - DNA, 96 bp, Homo sapiens
gactcctgaagtcatgtgggaaacctgtcgagcaagagtgagccatggagctacgtgtggggaacaagtaccgcctgggacggaagatcgggagcg

SEQ ID NO: 105775 - DNA, 100 bp, Homo sapiens
caccttcgacctgctcttcatctccctgctctggatcatcgaactgaatgaaaccactgattgcttgtgtggagaaacagctattaggagaacatttaac

SEQ ID NO: 105776 - DNA, 100 bp, Homo sapiens
gtatctacgtgggggccaaggtgtacttcatctacgagagcggcactgcagaggtggagctgaagaagggagccactctcaaaatcacgctggataacgc

SEQ ID NO: 105777 - DNA, 50 bp, Homo sapiens
gtgcacacatgtagagacctttgtatgggtctgtcctccagcctcagcag

SEQ ID NO: 105778 - DNA, 100 bp, Homo sapiens
ggggcagcagctgctgtaagacagtctaaactacgaaatacaccttatcagggttaaagcacgaattgggagctctcagcgacatcaccagtcagcagcc

SEQ ID NO: 105779 - DNA, 100 bp, Homo sapiens
aaagaatgttattctgtcttcacaaaccggaggctgctggtgaagaatattcagctggaggatggcaaaatgatcctggcctcgaacttctttaaggggg

SEQ ID NO: 105780 - DNA, 75 bp, Homo sapiens
ctacaacaccaacatcaccacagagaccagcaagattctggttggtgttcgaggaagagacattgttgttcttgg

SEQ ID NO: 105781 - DNA, 90 bp, Homo sapiens
ccagactggttttggaggtggcccagcatttgggttcaagcactgtcttcctgttggccctgacaatcatagccagcacctgggctctga

SEQ ID NO: 105782 - DNA, 100 bp, Homo sapiens
tgggagcctagaatgcatcagtgcccttgtggcgaatggggctcacgtcgacgtgaagcacatctcctgtcccctgctcatcctgcacgctgaggacgac

SEQ ID NO: 105783 - DNA, 75 bp, Homo sapiens
ccataatagctgacatgtgtatgcaaaagcctgagttctaccaagtatgccacaccaaaaaggattatgaagaaa

SEQ ID NO: 105784 - DNA, 90 bp, Homo sapiens
ctgtggacagcctccacccgggggccgggacagccaagcacccgccgccggcagcttcgctggaagaggagaggagacgccgtgagcggg

SEQ ID NO: 105785 - DNA, 75 bp, Homo sapiens
gagaccagtgcccatgaaggtcagactgaggtatgcagggagttccagcgaggaaactgtgcccggggagagacc

SEQ ID NO: 105786 - DNA, 83 bp, Homo sapiens
gaacgagattaagacccaattcaccacccgggaagagttctccggggtgctgcaccagtgtcacattttggcctctgagatgg

SEQ ID NO: 105787 - DNA, 75 bp, Homo sapiens
caggccaggtcaggctcaccaagcaggtgtggacactgccagcggctgcagccgacttggaatgacctgggagac

SEQ ID NO: 105788 - DNA, 86 bp, Homo sapiens
agttcaaattatgaagatgctttgccacccccatatcatcaggctctaccagaaagtggatctcttcagcctgggaattatcttct

SEQ ID NO: 105789 - DNA, 75 bp, Homo sapiens
gtaaccagcatgtcaataaggggtcataggtggaaaagacatggagtgtatctcgcagtcagcagtgaaaacaaa

SEQ ID NO: 105790 - DNA, 100 bp, Homo sapiens
ccaagctgtacttgtcacctcgaattgagcaacgggctcatcttcgcttgtgcctggagaagttgaaggggctggtgccacttggacccgaatcaagtcg

SEQ ID NO: 105791 - DNA, 75 bp, Homo sapiens
aacgcatcatgccagggagccaagcgtcctgcccggccgtaattttcggctttgtgagaaaccttaccatcaaac

SEQ ID NO: 105792 - DNA, 75 bp, Homo sapiens
acagcccccacctcgcaagagcagccgcggcgccactgtgctggagaatctggtaaaagcaccattgtgaagcag

SEQ ID NO: 105793 - DNA, 100 bp, Homo sapiens
gacacagtctggaattaatggaacttactctcgaacctggcttctgtatttaccatgtacctggagcattggtttggcagctgaaccaggttgttttcca

SEQ ID NO: 105794 - DNA, 101 bp, Homo sapiens
ccacgtcgggtcagatccgacagaaggtactccaaagattcaggtttactcacgtcatccagcagagaatggaaagtcaaatttcctgaattgctatgtgt

SEQ ID NO: 105795 - DNA, 75 bp, Homo sapiens
agccaccagcgcagcgctgccatggagcccagcagcaaggaaggtgctcgggtcttcggggcactgggtcccatc

SEQ ID NO: 105796 - DNA, 98 bp, Homo sapiens
tcagctgcgtgattcccgtgattgcgttacaagctttgtctccttcgacttggagtctttgtccaggacggtggatagatacttctcaagacatcaca

SEQ ID NO: 105797 - DNA, 100 bp, Homo sapiens
tttccaagcactagaagaaactacagaatatgacggtggctataccagggactctgttctgattagcttttgtctggtcctctgagccccagtgagagtt

SEQ ID NO: 105798 - DNA, 75 bp, Homo sapiens
tgctgtcagatagcacttgccttccccatattattcaggaagctttctttggaaaagatcttctagatacaagta

SEQ ID NO: 105799 - DNA, 100 bp, Homo sapiens
attagcactttacaagcccagctcagccagacacaggcagagcaagctgcacagacaagcttaccattgttcagaagcaaacagtttgcagtaaaaagaa

SEQ ID NO: 105800 - DNA, 98 bp, Homo sapiens
gatgctactaacactggaataaagctacatccgatactcccagatctgtgcaaaagcagtgagagatgcactgaagacagaattcaaagcaaatgctg

SEQ ID NO: 105801 - DNA, 76 bp, Homo sapiens
aatatacccttagaaaaaatgtggcagttctcacagaaagttctccgctcccagacatgggtccctcggcttcctg

SEQ ID NO: 105802 - DNA, 109 bp, Homo sapiens
accatgccgctcctaagcctgcacagccgcggcggcagcagcagtgagagggcgccaatgcttcggcattagagaaagagattggtccagaacagtttccggtcaatga

SEQ ID NO: 105803 - DNA, 100 bp, Homo sapiens
agcactggaaagagctgaagcagctggcagctgcccggctcgctttgatgctggagaactaatcacccagagagagctggtctccaggcaggtgagcgac

SEQ ID NO: 105804 - DNA, 50 bp, Homo sapiens
ctacccgcactggccggcccggtcctcccagaaaaagagctgtgtggaag

SEQ ID NO: 105805 - DNA, 98 bp, Homo sapiens
gtgaccaggcttgttctggatccctatttattaaagcaaatacttccctggacaagaaagccagatgaaactgatctaccagggccgcctgctacaag

SEQ ID NO: 105806 - DNA, 82 bp, Homo sapiens
cgaagcctaaattccaggagggtgtcgtgaaaactacccctaaaagccaaaatgggaaaggaaaagactcatatcaacattg

SEQ ID NO: 105807 - DNA, 50 bp, Homo sapiens
tccaggtccagcaggcggagcactgttcacagagtcagggcatgttggga

SEQ ID NO: 105808 - DNA, 100 bp, Homo sapiens
cagctccctgggcaccaggcagctaacagctgcggttggatttctcacgatgtccagtgttatctccatgtctgcccctttcttcctggggaagatcatt

SEQ ID NO: 105809 - DNA, 100 bp, Homo sapiens
ggatttgcagctccaggaagcgagatgtcgaagccgccacccaaaccagtcaaaccaggaaaagtctatagtccttcataaatcaaggaagaagtcaaaa

SEQ ID NO: 105810 - DNA, 50 bp, Homo sapiens
accaaattaagtcattttcgagaatcaatggtacaacagctccatgaacg

SEQ ID NO: 105811 - DNA, 98 bp, Homo sapiens
tgtgtgacccttcacctttgatcccctgacctgcattaccttggcagtcgatgatgtgaagaaaggttacatcaaagcagaagaaaagtcctatcaat

SEQ ID NO: 105812 - DNA, 100 bp, Homo sapiens
ccccggccacctcggcctcttcctgttgcaccaggttcttcgaaaactgaagcagatgttgaacaacaaggtccaatgatgcatcagcagcctccttctc

SEQ ID NO: 105813 - DNA, 98 bp, Homo sapiens
ccgggagcaccggggctccgtcatctgtctggaggaagaagggactctgatcatcgaggggctcctcaacattgcctgggggctgaggcggcccatcc

SEQ ID NO: 105814 - DNA, 112 bp, Homo sapiens
gaagggtatctgaaaaggaaaaggagagtattgccagagcaagagctggatctcgtctttctgacagtcattttgtttactcattcagccctgttgcaggtcccaataaact

SEQ ID NO: 105815 - DNA, 88 bp, Homo sapiens
cgcctctttccatcgaacattccgagaatgcgagagaaagagcctccgtcaccacatattctcctgtgcctcctgttggctctctttg

SEQ ID NO: 105816 - DNA, 85 bp, Homo sapiens
catctaccgctcactgtagaccatctcaagcaggtgaccgggctggtccacaagtgggcatggaccaaagacgacgtgatcctcc

SEQ ID NO: 105817 - DNA, 90 bp, Homo sapiens
ctgttttgcatcagaagcccgagagatcactgagagaggtatcatttatcactgtgatcttaccaaagaggagctggagccaagagtttt

SEQ ID NO: 105818 - DNA, 82 bp, Homo sapiens
gccaagatgccggcctattttcagaggccggaaaatgccctcaaacgcgccaacggtgtcgtgaaaactacccctaaaagcc

SEQ ID NO: 105819 - DNA, 75 bp, Homo sapiens
agcgaggcgccggcccagactccactccccagctgtgaaaggatgttaaaaagtgctctgggtgatcggattaaa

SEQ ID NO: 105820 - DNA, 74 bp, Homo sapiens
tggcttcacgccggctccgcctcaccagcaagcgcattcccagcaggtattaatctctggagaagacacatcca

SEQ ID NO: 105821 - DNA, 100 bp, Homo sapiens
ctgtcaatgaccaaccccccatcctcactacaaacacaggcctgcaggtgcaacacgcaggactacatctggcacaaggggatgcgctgcgagtccatca

SEQ ID NO: 105822 - DNA, 75 bp, Homo sapiens
tgatatcttcagcgaaagtgaaaccagggaaactactaaagttcctggggaagcaaagtagaatttcataagaac

SEQ ID NO: 105823 - DNA, 91 bp, Homo sapiens
gcacttccggtcacgccatcgttgctgccttcttcgtcaaggtccgggctctgtttccctgtgagaagccgcctcggcccaccgagatgtc

SEQ ID NO: 105824 - DNA, 100 bp, Homo sapiens
aacactccagtgggatgaacagacaaaccccacaagcactgcatacggcttctgcagaacccccaggtcaggccacatcattgaggctgcaggatctctc

SEQ ID NO: 105825 - DNA, 98 bp, Homo sapiens
ctaggagtgctgagcccgcggaaccgcagccatggtcaaaatgcagatcttcgtgaaaacccttaccggcaagaccatcacccttgaggtggagccca

SEQ ID NO: 105826 - DNA, 83 bp, Homo sapiens
gcagccctcggccaaacggccagacgccgacgtcgaccagcagagactggaacgtcaaggtcgtgggaaataaaaggcagttc

SEQ ID NO: 105827 - DNA, 100 bp, Homo sapiens
actaccaacatctgctacaatgtactggatcgaaatgtccatgagaaaaagcttggagataaagttgctttttactgccaagaaggatcaagaaggtgga

SEQ ID NO: 105828 - DNA, 83 bp, Homo sapiens
ctttcttggcccttgttcccccaaatgtctgactctgactctcggactgagaaacgcaagggagcatcgagtacagctgtccg

SEQ ID NO: 105829 - DNA, 100 bp, Homo sapiens
ccaccaatggaagcagctggcttcactgctcagcaatctgaagaggatgtaagtcagtttgattccaagtttacacgtcagacacctgtcgacagcccag

SEQ ID NO: 105830 - DNA, 49 bp, Homo sapiens
aaagcagaggccagggcgccggtttccaaggtgctattgggagctcatg

SEQ ID NO: 105831 - DNA, 111 bp, Homo sapiens
gatcggtgccgattcctgccctgccccgaccgccagcgcgaccatgtcccatcactgggggtacggcaaacacaacgataccatactcctcagcatctcctgggaattatg

SEQ ID NO: 105832 - DNA, 100 bp, Homo sapiens
acgcggaaagaagtaccttcgccggtcaccggctcctgcaggataatgttaattcaagactctcgaagagaagcttcagtgcagatggatttgagatgct

SEQ ID NO: 105833 - DNA, 100 bp, Homo sapiens
gcctgcgtgctggtgatcgcgctgatgttcctggcctggggggaagggacttaagtcacaacagattatctttcatcaaggcaagttccatgagccacct

SEQ ID NO: 105834 - DNA, 100 bp, Homo sapiens
tgcaggcgctttaccacgacccagatcccagcggaaaggagcgcgcctctttttggcttggggagctgcagcgttcggttgcctgtgatttgcttcggag

SEQ ID NO: 105835 - DNA, 90 bp, Homo sapiens
tgattacaagaatcctatagaccagtgtaataccctgaatcccctatgaaacccacgtagtcgaacaccgtgatgcttctcctgcagggc

SEQ ID NO: 105836 - DNA, 89 bp, Homo sapiens
gttccatcccacctttgagtcaggcccattacgcagtccaggcaagaagatcccggagcatcactaggaaaagaaagcgggaagactct

SEQ ID NO: 105837 - DNA, 98 bp, Homo sapiens
ctgctcgataaatcagacagaacagttaatcctcaatttaagcctgatctaacccctagaaacaggaatgaatctgaagtctgctgcagtaaaacaca

SEQ ID NO: 105838 - DNA, 75 bp, Homo sapiens
ggcagcccctaagggcccttcgcgggagagcgtcgtgcacgcgggccagaggcgagcttttcatcctactataaa

SEQ ID NO: 105839 - DNA, 82 bp, Homo sapiens
cccagctccatctcttcatcaccccaaaaggacctgactcaggcaaaggtgagaagccctaccactgcaactgggacggctg

SEQ ID NO: 105840 - DNA, 75 bp, Homo sapiens
gaaatatttggagcccaggtgtcctcggatggttttatctctgaaaggccgttaattaaggaaaagttgagccag

SEQ ID NO: 105841 - DNA, 106 bp, Homo sapiens
gaagatggcgccgccggtggcagagagggggctaaagagcgtcgtgtggcagagaaaattgcctaagaattatgacccaaaagttaccccagatccagaaagatgg

SEQ ID NO: 105842 - DNA, 115 bp, Homo sapiens
ggcggctttgcatcggaaatcagctctacagttcagaaggtagaagatagcaccatgccgattcgtcgaactgtgaattctacccgggaaactcctcccaaaagcaagcttgctg

SEQ ID NO: 105843 - DNA, 82 bp, Homo sapiens
ggaagctgcagtctacaccttcaccatgttcttctccacggagcgcctggaccatgctgctgagcgcctactggcacggcct

SEQ ID NO: 105844 - DNA, 82 bp, Homo sapiens
aatgaataacattgtggcaaatttgctcctcaacctaacgagatcagacactcctctaatttacaaagcagtgcccagctgg

SEQ ID NO: 105845 - DNA, 100 bp, Homo sapiens
aattgctcaactaagaccaagtcctcgctggactgctcagggtgccagacctcatcgttctgtttcaagctgattccagccatttgggattgccgcccac

SEQ ID NO: 105846 - DNA, 75 bp, Homo sapiens
agctgatggaagatctgtttgaaactattgcccccgaggaattagcacttgttcacaacttgaggaaaatgatga

SEQ ID NO: 105847 - DNA, 90 bp, Homo sapiens
ggcttttgaatctcagccagctgctccagctgtgcctagaatggtagtgctattggccttccagtcccacctatcacagccttaatcacc

SEQ ID NO: 105848 - DNA, 100 bp, Homo sapiens
catgtcaacgtttattatggccaggactatcggaacaaatacaaagcacctacagactattgtctggtgctgaagatattgtcagcatgtgctttgtgaa

SEQ ID NO: 105849 - DNA, 100 bp, Homo sapiens
atgagggaatctacacctgccaggagatcctgaatgtgactcagtggttccaagtgtggctgcaggtggccagcgcatttcacccagaacgtgtagggac

SEQ ID NO: 105850 - DNA, 121 bp, Homo sapiens
aaagcttgacgtcactgacctgcttgctgatcctgtggtccggatccagagaaagaaaatgtttataggaggccttagctgggacactacaaagaaagatctgaaggactacttttccaaa

SEQ ID NO: 105851 - DNA, 100 bp, Homo sapiens
cccccgacggctctgcagttaacgggaccagctctgcggaactatccccataaatacggtcctcaggggggctgtgcagatcattcagtatttgaaagaa

SEQ ID NO: 105852 - DNA, 100 bp, Homo sapiens
gtttgaagttggagatgctgaaaatgttgcttcatatgaatgttccatttaagcagacctcttccatagctgtagctggagcggtaattggagctgttct

SEQ ID NO: 105853 - DNA, 100 bp, Homo sapiens
ggcgcatccctgccccggcgccgtccgtgcccgcgggacctgacagccgggtcagaggagcaggccgggctctcgccatgggtcactgtcgcctctgcca

SEQ ID NO: 105854 - DNA, 98 bp, Homo sapiens
tgactcccccaaggccgaggtccgcggccaggtgctggcgccgctgcccctccacggaggtactccaaagattcaggtttactcacgtcatccagcag

SEQ ID NO: 105855 - DNA, 90 bp, Homo sapiens
cgatgtcagctcagtgctgtgcgggccagggaacaacctatcttcagcactcgagctcatgtcttccaaattgacccaaacacaaagaag

SEQ ID NO: 105856 - DNA, 100 bp, Homo sapiens
ctgctttgaatcagcagatcctgaaagccgtgcggatgaggaccggagcggaaaaccttctgaaaacccttaggagaaatcttgagagtggacagcaatt

SEQ ID NO: 105857 - DNA, 75 bp, Homo sapiens
cgatgcaccctttttgtcagattatcaggatgaggacatcgatgagtgtgctgaagggcgccattactgtcgtga

SEQ ID NO: 105858 - DNA, 82 bp, Homo sapiens
agtactgagcctgttggaggaactggcccggaaacaggaggacgaggcatacacggaatacctgaggagcatccactatatc

SEQ ID NO: 105859 - DNA, 83 bp, Homo sapiens
gaacgaggagttttttaggaagctgagccgcgagtgtgaggtagttgatgtcacttggcgatattcctgcaaacatgaagagg

SEQ ID NO: 105860 - DNA, 74 bp, Homo sapiens
cccactcctgggccgtccctgaagtccagcctagggtgaatgtttccccctccaagaaggggcccttgcagcac

SEQ ID NO: 105861 - DNA, 100 bp, Homo sapiens
cctgccgtacttctgattttgaaacacctgggtctgggcttcccgggcgagcggtggaaatgcactcggtgatggaaagagagccactattctgaagaac

SEQ ID NO: 105862 - DNA, 75 bp, Homo sapiens
gtggatcattgctgcctggaccgtccgtgtctgtgaaaggatgacatctgaactggagagcagcctaacgtctat

SEQ ID NO: 105863 - DNA, 101 bp, Homo sapiens
aaacatgatcgtttactgcaaattcagggcgacagctcagtgaagtcttcattcagttaccttcaaggaaagaattaccagaatactatgaattaattagg

SEQ ID NO: 105864 - DNA, 96 bp, Homo sapiens
aaagaatccaaaggaagctccaaagtccttcagcttcgactattcctactggtctcatacctcagcggtaaatgactcgtgctaccagaatgatga

SEQ ID NO: 105865 - DNA, 100 bp, Homo sapiens
caagcaggtgcagaagaagtttagcagggcccaggagaaggtactaggttttgacaagcttgcatcatgcgtgagtataagctagtcgttcttggctcag

SEQ ID NO: 105866 - DNA, 100 bp, Homo sapiens
gaagaaggaccgcacctgggccgaggctgcccgcctggttaaacccatccagagtaatggctgcggccttacccaggaccctgggggagttgcagctgta

SEQ ID NO: 105867 - DNA, 82 bp, Homo sapiens
aacagaacgacctagtatttgaatttgctagtaacgtcatggaggatgaacgacagctggagaagcgactggaggagtggtt

SEQ ID NO: 105868 - DNA, 104 bp, Homo sapiens
aagacctgcctcctgttccgcttctcagaggacgccttcaacaccaccttcatctccaccatcggtgaaacttccaccgatgatggaaatcataactgctgagc

SEQ ID NO: 105869 - DNA, 75 bp, Homo sapiens
cgatatggtttctgaagtcaatatgagccagctctcccaggcgctgaacggactgtcagacagggccaaagaagc

SEQ ID NO: 105870 - DNA, 83 bp, Homo sapiens
tgggcaactgagggcagcagagatggaggtcaaaatgcagatcttcgtgaaaacccttaccggcaagaccatcacccttgagg

SEQ ID NO: 105871 - DNA, 82 bp, Homo sapiens
caccaagtcgggctggccccgacagaacgaaaagaagccctccgagccgccaccggcacggccaggccagcatggtggacca

SEQ ID NO: 105872 - DNA, 100 bp, Homo sapiens
gcaagatttggttatagacttccagctgaaggtttaaagatgcagccgctctctgctccctgccccaatgaacatctgcactaggcccaagccttggagt

SEQ ID NO: 105873 - DNA, 75 bp, Homo sapiens
cagccttgggcctcgcgccggctatggccgtgccctggggctgagccctcaggttaatttggagtggcccctgga

SEQ ID NO: 105874 - DNA, 75 bp, Homo sapiens
cccacagcagaaccccagctctacccacgatggagcagcatattgtatgggacgtatgaattctgactgttggta

SEQ ID NO: 105875 - DNA, 87 bp, Homo sapiens
aactacttacatgatgaggcaattgttcccatcatccaccgcgaccttaagtccagcaacatgaaaatgcctcgtgtaaaagcagct

SEQ ID NO: 105876 - DNA, 87 bp, Homo sapiens
agaggaagaggaaagcgaactgcatgatgccttcttctgtagagtgggcgctttgcagaatacgtgttgaatgaaatcactgatcta

SEQ ID NO: 105877 - DNA, 89 bp, Homo sapiens
ggtggccatagaatggccgggcgcctaccccaaactcatggaaattgatcaggtcaaaatgcagatcttcgtgaaaacccttaccggca

SEQ ID NO: 105878 - DNA, 83 bp, Homo sapiens
gggtcaaaggagagcacaaccatcgcagttggaagcccatggggcagccccatctgtggggagtctctccccctcagcagtgg

SEQ ID NO: 105879 - DNA, 100 bp, Homo sapiens
gaaacctctgcgccatgagagccaaggtacccatcacgggtgtttgtgggagataccttctgttactttgctggcatgacctttgccgtggtgggcatct

SEQ ID NO: 105880 - DNA, 100 bp, Homo sapiens
gccagacactgaggctgtgctgaacgggaagggcctcggcactggtaccctttacatcgctgagaggaatctacttgaaaatggatcggtttatgttgga

SEQ ID NO: 105881 - DNA, 100 bp, Homo sapiens
ggctttcacttatattaatctggataaagcggttcttgtttccacgggctcccttgctcagcagtatgcgcaccctaacgctaccctgcacccacatact

SEQ ID NO: 105882 - DNA, 83 bp, Homo sapiens
ccaagatggctctgcccagccagcattccctgcaggagccctacacagcctccgtggaaactggcgatggaatatgagaggag

SEQ ID NO: 105883 - DNA, 93 bp, Homo sapiens
tccacattgagagcaaaatctacaagatgatgcagggaggagtttgcagatggcgtgtacctggttctgctcatgggccttctggaagactac

SEQ ID NO: 105884 - DNA, 74 bp, Homo sapiens
cggaatgtgatcacagagcctatttacccagaagtagtccatatggaaaatgtttataggaggccttagctggg

SEQ ID NO: 105885 - DNA, 141 bp, Homo sapiens
gggcgggcgaggcgcagggctctcccacacttcgcgccgccaatggcaagttggagggagagatgcaaataccagtcagcttacccgctggccgcctcctgacaagcgggagggatccgccgtggacccagggaagcggag

SEQ ID NO: 105886 - DNA, 74 bp, Homo sapiens
ctgcgggtctgctcgggggtctacttcgaggagcacttggagctaccttctgtttctttgctgtagaagccgtt

SEQ ID NO: 105887 - DNA, 100 bp, Homo sapiens
ccggctgccgaaggtcctcgccagagactttagaagacagctttccatcgacactaggccctttagaccagcctctgaagggaatcctagcgatgatcct

SEQ ID NO: 105888 - DNA, 82 bp, Homo sapiens
tttttgtccgacatcttgacgaggctgcggtgtctgctgctattctccgagcttcgcaatggctgaattcggtcagaagaga

SEQ ID NO: 105889 - DNA, 100 bp, Homo sapiens
gccggagttgcgtcgccttagtcctcctggctgccgccgtcagctgtgccgtcgcgcagcacgcgccgccggaaacttttgagaagaactttgaaagaga

SEQ ID NO: 105890 - DNA, 100 bp, Homo sapiens
gcagctggcaagactgcgggctgacgccaaccgcaaattcagatgcaaagccgtggccaacgggaaggaaaagaagatatgcttcttaaacaaggtcaga

SEQ ID NO: 105891 - DNA, 82 bp, Homo sapiens
ggagacatgaccaacaggaagttccgccatgacaaaagggtttacttgggctggtgaaactgcgtgctgtaagctgggacca

SEQ ID NO: 105892 - DNA, 100 bp, Homo sapiens
aatcttcacggggctggctgctctgtgtctcttccaagagagaagaggtactcccttatagggactcgtaaagacatagagcatctggaaattaactgcc

SEQ ID NO: 105893 - DNA, 75 bp, Homo sapiens
cgagctcgagtctggcatccccgcagccgagagccagatggagacctcacagacacggtcagtggtccccgctcc

SEQ ID NO: 105894 - DNA, 100 bp, Homo sapiens
cacggattaatatttctccctgtcttactcagttacataggagctgctcagagaccctctgtacatcggcctgaaacaccagcgcgtgcacgggaaggca

SEQ ID NO: 105895 - DNA, 50 bp, Homo sapiens
tcaatcagagcgtcctgtgcgacaatgcagatcttcgtgaagactctgac

SEQ ID NO: 105896 - DNA, 75 bp, Homo sapiens
aaaatcgcctgcaatctggcctggctggtggccaaagcctttgggacaggtacacagataagctgtttctctcca

SEQ ID NO: 105897 - DNA, 82 bp, Homo sapiens
agatctgcgcttccagagcgcagctatcggtgctttgcaggattttgcaggttaattcctcacacacgttcaccaggtactt

SEQ ID NO: 105898 - DNA, 76 bp, Homo sapiens
tgaaatacatccaggaaagacatggagattctcttaaaaagtaatctatgccagcaattatgacaatgttagcaga

SEQ ID NO: 105899 - DNA, 90 bp, Homo sapiens
ggggaagccttctcctgagtttttcaagtctgccctgcaagcgataggagtggaagcccaccaggtatatgaatggcacctgcccagaag

SEQ ID NO: 105900 - DNA, 50 bp, Homo sapiens
ccggatcccacatccaccatcaagccgtctctgctggatgaaccgaatcc

SEQ ID NO: 105901 - DNA, 75 bp, Homo sapiens
tcagtgactgctattgaaccaccaaaagtccattatgaaactggtgctggagaatctggtaaaagcaccattgtg

SEQ ID NO: 105902 - DNA, 100 bp, Homo sapiens
tcgggcaaaagttgtgcattggcccgatcaagcctgacttctagccaaggaggagtatttgaagacttctgagcggaggagtcgcatgtcagagctgtcc

SEQ ID NO: 105903 - DNA, 100 bp, Homo sapiens
ctcagctaccttcagacccaggatacagagcgatcgtcttctgatcaaaggaggtaaaattgttaatgatgaccagtcgttctatgcagacatatacatg

SEQ ID NO: 105904 - DNA, 83 bp, Homo sapiens
ccccggggtctatggaagtaatggaaggacccctcaacctggtatgtgaagacctacctgttgcccgacagatcctcccaggg

SEQ ID NO: 105905 - DNA, 98 bp, Homo sapiens
gcacctggagatctgcctgaaggacctggaggaggaccacgcctgcatccccatcaagatcgccacatcacagaatcgtatctatctcacagctgaca

SEQ ID NO: 105906 - DNA, 97 bp, Homo sapiens
aaggacgagcccaagagcggcgaggaggcgctcatcatcccccccgacgccgtcgcggtggactgcaagatctttctcctggcctgccctccatgtc

SEQ ID NO: 105907 - DNA, 89 bp, Homo sapiens
tcagacctgctcacacttcagaatagagaaggagccagatgaccaggatgccccagatgagcatgagccctctccatcagaagatgccc

SEQ ID NO: 105908 - DNA, 110 bp, Homo sapiens
ccggccagaagcgggcggcgcgggggagatgacaatgcagatcttcgtgaagactctgactggtaagaccatcaccctcgaggttgagcccagtgacaccatcgagaatg

SEQ ID NO: 105909 - DNA, 100 bp, Homo sapiens
tggcggacatcactttagaccctccacctaattgcagtgctactagaaaatagtggtatcctaaaccagatttctaacaagaaaaatgaacaacagtctt

SEQ ID NO: 105910 - DNA, 85 bp, Homo sapiens
gaggggagtcctgacggaggagcagatggcaagatctcccttgagtttagaaatctggctgagaaataccaaacagtgattgccg

SEQ ID NO: 105911 - DNA, 100 bp, Homo sapiens
gagcagtctcacatgaagaccaatttttacgtctagatttccatgcccatggaaggcagtagcagaatcccatggtagccaggtgggtgaaggggagcga

SEQ ID NO: 105912 - DNA, 82 bp, Homo sapiens
cgggagttcaagaagaacactccagagcaagagtgagccatggagctacgtgtggggaacaagtaccgcctgggacggaaga

SEQ ID NO: 105913 - DNA, 75 bp, Homo sapiens
gctaaacttttggccaagagaatgaaggagtgaacatggaaaggtttgcagaagaagcagatgttgtaatagttg

SEQ ID NO: 105914 - DNA, 82 bp, Homo sapiens
gtggtcatggtcacccaggagagtgacagcagctttctggtcaagaacatccagtcatggataaaaatgagctggttcagaa

SEQ ID NO: 105915 - DNA, 100 bp, Homo sapiens
ccggaaggggcaagacgggttcagttcgtcatggggctgtttggaaagacccaggagaagccgcccaaagaactgttacagatgtagagctaaaacgact

SEQ ID NO: 105916 - DNA, 88 bp, Homo sapiens
agctgcctggatgccttcccaaacctgaaggacttcatctcccgatttgaggatgctccagaccttgtatgattacttctggtgggaa

SEQ ID NO: 105917 - DNA, 83 bp, Homo sapiens
ctgggatcccggccaccagcaattgtccggctgtattcatcaccaaagaaaaaacttacaccaatgcagaaatcggttagtcc

SEQ ID NO: 105918 - DNA, 97 bp, Homo sapiens
gaacagcgggcggtgttcccggctccgtggggccgtcttcccggcgagtccgcgacggtcgccgcccacggcgagatggagcctcgctctgtcgcca

SEQ ID NO: 105919 - DNA, 117 bp, Homo sapiens
aggtattgggagatccacagctaagacaccgggacctcctggaagccaaaaatgaccttcacggcatggtgcaactcccacctgcggaaggcaggcacacagatcgagaacattgat

SEQ ID NO: 105920 - DNA, 82 bp, Homo sapiens
aaagattcgaaatgcacagttagcacagtataacttcattttaggtgtcatggagaaactccagctgggcccagagattctg

SEQ ID NO: 105921 - DNA, 100 bp, Homo sapiens
cacctaatgaataaacgagcaaagtttgaactgaggaagccattagtgctctggtctctgacccttgcagtcttcagctatgaagtcttacactccatat

SEQ ID NO: 105922 - DNA, 83 bp, Homo sapiens
ctcagatctgtggagcagatccgatggagaggctgagctgctccaggacttgggggtgccttcaccagggatggaagaggcag

SEQ ID NO: 105923 - DNA, 51 bp, Homo sapiens
aactccagcgccaagaaccatgccggattactacagcatcccatttcccac

SEQ ID NO: 105924 - DNA, 74 bp, Homo sapiens
aaaaagggcctaaagaagatgcaggcccgctacaacttcatccgaagcatggccgcctacagcctcctgctgtt

SEQ ID NO: 105925 - DNA, 100 bp, Homo sapiens
aaggattttaggagagtggaaaatgcttatcacatggaagcagagatcccataaaaactgcccaaggatctctctcactaaaggcatacagactgactcc

SEQ ID NO: 105926 - DNA, 102 bp, Homo sapiens
gcagatgactttccatgctattggaagctccattgaagccagccatgatcaggtgaccaagaatatggcccaggtgaccaaagccctggacaaggccctgag

SEQ ID NO: 105927 - DNA, 83 bp, Homo sapiens
gccagttttgaaatcgacacacaaagaatagagttgagcctgtgggacacttcgggcttgttagcagtggcacaagatcttac

SEQ ID NO: 105928 - DNA, 83 bp, Homo sapiens
tcccgaccctggccgccccgagcggagcctggagaaactatgttccaacttcctgtcaacaatcttggcagtttaagaaaagc

SEQ ID NO: 105929 - DNA, 74 bp, Homo sapiens
aaggattccaagtaactcttatttgctggacccacaaaccgtggagaccaagaactggcacacggacgtgattg

SEQ ID NO: 105930 - DNA, 60 bp, Homo sapiens
tctgtgcgcgcctccatctgggccatggatggattctgagaacaataactccacaatggc

SEQ ID NO: 105931 - DNA, 98 bp, Homo sapiens
gtcgtgaggatcgtgtgcattacaggagtcctccacttgccactggcccctctggctgtacattctggggcaagaagccatggagccgtaagaagaaa

SEQ ID NO: 105932 - DNA, 74 bp, Homo sapiens
ccgatccagcctgcggagcctgtggggcagaagctgaaacctatcaacactcttcaaaatgcaatggaatgtac

SEQ ID NO: 105933 - DNA, 82 bp, Homo sapiens
gctacgacacggatcaaggacgagtgttcgtgaaagtgaaccccaaggcggaggccaccagcttgggctccccacggagggc

SEQ ID NO: 105934 - DNA, 75 bp, Homo sapiens
cggaccttttaccatgaatagttctactccttctacagggaagaaggagaaagggccaacccctgaagaagcaat

SEQ ID NO: 105935 - DNA, 74 bp, Homo sapiens
ggtactgaaactttcgctgaccaccggccatccacggcttccgagagacagagaagtcgcgctggtcagaagcc

SEQ ID NO: 105936 - DNA, 105 bp, Homo sapiens
gccccagccagccccgacggcgccatgcggggtccgagcggggctctgtggctgctcctggctctgcgcaccggtgagaagccctaccactgcaactgggacggc

SEQ ID NO: 105937 - DNA, 90 bp, Homo sapiens
gtccaggtcgggcgcggcggctgagaaggcggactccagacagcgaccccagatgaaggccatccacggcttccgagagacagagaagtc

SEQ ID NO: 105938 - DNA, 80 bp, Homo sapiens
agatgcactgagatacaaacctacaaaacttgccaatggcacttccagtatgattgtgcccaagcaacggaaactctcag

SEQ ID NO: 105939 - DNA, 80 bp, Homo sapiens
gggcgagcggctgtgtggatgtcggcgaagccgcgggcgagacaccattcgcttttcacccaagatgatttgatgtctta

SEQ ID NO: 105940 - DNA, 98 bp, Homo sapiens
caaaaggaacaaaaggaattacaagatgttggacagtctcttcgaattaaagagcaagaggtatctgatgtgtagccatgcagaagacctacgtgcaa

SEQ ID NO: 105941 - DNA, 60 bp, Homo sapiens
caggaactctacaacccaatccaggcccccgacagctgctctcgggagccgcctcccgac

SEQ ID NO: 105942 - DNA, 100 bp, Homo sapiens
tgactattcagatcatccaagtggaggttcctacagagattcatatgagagttatggtgatctggaaagtgcaccagtgttgagaacttctggggaaggc

SEQ ID NO: 105943 - DNA, 74 bp, Homo sapiens
tgaatttctctctttgggaggaggaagggacaccgagggaccaaagggcgtccctcagcccgtacacctgtctg

SEQ ID NO: 105944 - DNA, 101 bp, Homo sapiens
atatccaccttcattaaaggagacctcaccatagctaatcttgggacatcagagggtcgcttcatgcagactcaatgatgaggcacggcggctcattgctg

SEQ ID NO: 105945 - DNA, 100 bp, Homo sapiens
cgtcggctgcggttctctctcgaccccttctgcccggcgcttcggcccgggccgctcaggtgcagctgtccctttccccccaacacatcgcttgacatct

SEQ ID NO: 105946 - DNA, 100 bp, Homo sapiens
cctgaccaatgtcatccttgcagacctcaacctctcagggagctactttgcccgagatgctgcatattcccaccactacagcaaatccgacacgcagacc

SEQ ID NO: 105947 - DNA, 101 bp, Homo sapiens
ccaaatttgactacctgaaggaggagagtatgaagagtgtaaagacctcataaaatttatgctgaggaatgagcgacagttcaaggaggagaagcttgcag

SEQ ID NO: 105948 - DNA, 115 bp, Homo sapiens
ctgaggatcagattttgaagagagatatgccaccagcatttattaagtttttcgttggaatatacgttgcacatttatggcgattctgagtgtgagggcagacttctgccaggct

SEQ ID NO: 105949 - DNA, 90 bp, Homo sapiens
tggagggtagacctgtgggcacggacgcacgccactttttctctgctgatccagatcttggcatatacagaagggctgcatggaaaatgg

SEQ ID NO: 105950 - DNA, 95 bp, Homo sapiens
aatagccatctcacctttgaaatcgccaaataaggttctcctgaaaagaaagctgaacattcatctataaatcaagaaaatggcactgcaaaccc

SEQ ID NO: 105951 - DNA, 50 bp, Homo sapiens
agggcctcgccatgtcctgctgcccggacacagagcacagccaagacctg

SEQ ID NO: 105952 - DNA, 89 bp, Homo sapiens
gagactgcctattctgaatcagccatcaactcagggaggcttctacagagcacaactgcatgaggacaaagagtcgagacccgctggcc

SEQ ID NO: 105953 - DNA, 74 bp, Homo sapiens
cgcccggcccggagcccccagcgcagcggccgcgaccttagctggatctccaaaatacaagtgaatcacccggc

SEQ ID NO: 105954 - DNA, 73 bp, Homo sapiens
cgggggcaccaccctccatgcctttgcaggcccgccaagctgccccctgtgtgctattctttgatgagctgga

SEQ ID NO: 105955 - DNA, 100 bp, Homo sapiens
ggccggagtcagcgatggtgcccggcgaggagaaccaactggtcccgaaagagggtgcaacaccggaggatttcagcaacctcccacctgaacaaagaag

SEQ ID NO: 105956 - DNA, 75 bp, Homo sapiens
tgttcctattcggacatcttggctcctcccgtgaggtcctatacgttgcttgtggaggcgtgggattccagtaat

SEQ ID NO: 105957 - DNA, 100 bp, Homo sapiens
tggccattgcgagcggcatctacctactgggtacctgctcttccgagacttctgcctgaaccacctggaggaggccaggcccttggtggaattctatgag

SEQ ID NO: 105958 - DNA, 100 bp, Homo sapiens
gggagtcccaccagcctagtcgccagaccttctgtgggatcatcggacccacctggaaccccacctgggatcaagtatttgctgggctagaagagcaagc

SEQ ID NO: 105959 - DNA, 100 bp, Homo sapiens
cgcgtccgccgattcctcctccttggtcgccgcgtccttggctggcgtgtacatgtcccagagcaagcacacggaggcccgggagctcatgtactcggga

SEQ ID NO: 105960 - DNA, 101 bp, Homo sapiens
tgtctggcgggagatctcggtctgtgggaatgtgtacacattgcgggacagccgctcagcccagcagcggggcaagctgggttgagttccagaataaattc

SEQ ID NO: 105961 - DNA, 82 bp, Homo sapiens
gcggaggccgcgccgggccctgtcgcgaacctccggcgcgctgccccgccggaccgtgtccacctaaacccactgtgttcat

SEQ ID NO: 105962 - DNA, 97 bp, Homo sapiens
acaatggttagagaagaattttccaaatgaatttgcaaaacttactgtagcttttccttccctccatgagaaagaagccagctctgtctgacggcag

SEQ ID NO: 105963 - DNA, 103 bp, Homo sapiens
cccgcgctggtgcagccaccctcgctccctctgctcttcctcccttcgctcgcaccatgaacccttaggagaaatcttgagagtggacagcaattgtgaagat

SEQ ID NO: 105964 - DNA, 98 bp, Homo sapiens
tttttcacttacaagggactgcgtatcttctaccaagaccgagtctcagtctgtcacccaggctagtgcaatggtgcaattttggctcactacaccct

SEQ ID NO: 105965 - DNA, 82 bp, Homo sapiens
gccacacaaaacctcttacatcatgggcgacttcaggaacagccatagattctgaggttgggaccaagaaggaactatctat

SEQ ID NO: 105966 - DNA, 75 bp, Homo sapiens
cagtggctctgttttcccacaacaggccgcctggacattggcgtagagcatgtgagtgactgtgagcgcctggcc

SEQ ID NO: 105967 - DNA, 74 bp, Homo sapiens
tccaagcattgtatcacttcatctgcaaatatttcaataagtacccaaaaggtcgtcttcaaaggtgaaaaaag

SEQ ID NO: 105968 - DNA, 75 bp, Homo sapiens
agtagtattactgtggaagtacctacaacttcagatcttaatatttgccagtgatgcctgcaaaaatgtgacatt

SEQ ID NO: 105969 - DNA, 98 bp, Homo sapiens
aaaatacaaactggaaaataaagattacagagaaaaaaccaacaccttcctgtgcagtcctgttggaatttctgacattatctctacggtagaattca

SEQ ID NO: 105970 - DNA, 102 bp, Homo sapiens
cggccgagcgggcggcttcctggcctgggcgctccggtggcggcggagaggccacaagaggaagctgaatgaagaggacgccgccagcgagtccagcaggga

SEQ ID NO: 105971 - DNA, 51 bp, Homo sapiens
gggcagaatacagagatatggaatcagaggctgggaggcggcagaatgcag

SEQ ID NO: 105972 - DNA, 51 bp, Homo sapiens
tgcactaccaggacagcctgcccagaaccaaggaaagcatgtaccactcac

SEQ ID NO: 105973 - DNA, 90 bp, Homo sapiens
ggaggaggaggaagaggaggaagaaaaatctgaggttatcaatgacgagcgctgtttgacactaatggatagaggatttattttcaattt

SEQ ID NO: 105974 - DNA, 74 bp, Homo sapiens
aaactaggtgtctgtgttcactccaggctgaagttacagtccagaacacatattacataatggagccgggagac

SEQ ID NO: 105975 - DNA, 83 bp, Homo sapiens
cgaagcacgagcagatcctggtcctcgatccgcccacagacctcaaattcaaagctgtttgcagacaaggtcccaaagacagc

SEQ ID NO: 105976 - DNA, 80 bp, Homo sapiens
cgaggaaagaggaggaaaacaaaagctgctacttatggaagatacaaaggacctgcctagagctggaacgttacctccag

SEQ ID NO: 105977 - DNA, 100 bp, Homo sapiens
ccctcagcttccgccccaaaaggaagagccaggacttctgaatttaccttgaatacagacaggaggatgttgcctaaggaatagcagagatcttgtctca

SEQ ID NO: 105978 - DNA, 83 bp, Homo sapiens
ctcgtggacaagtttgcagatcgggagcgcaaggtcgccctcaaggccatgatcaaaacgcactgccgccctgcactgtagca

SEQ ID NO: 105979 - DNA, 100 bp, Homo sapiens
caggaatgcatttgtcacgggcattgcaaggtacattgagcaggctacagtccactccagcatgtcgttgctgctcctagcttacctcataaggaatgga

SEQ ID NO: 105980 - DNA, 80 bp, Homo sapiens
cattggcagcaccagttatgtccatggtgacatacttaggactgagtaaggtaggagtcaatcccaccagcattgactca

SEQ ID NO: 105981 - DNA, 82 bp, Homo sapiens
tcacagtttaggtctcaaggcaagcctattgagttaacacctctgccgctgctaaaagctgaatgcaatatccatacatctc

SEQ ID NO: 105982 - DNA, 75 bp, Homo sapiens
aggaccctcttcgcgggcgattcgcgtagcctcagtcacgccgatgatggagctgaagcccaacgcaggtagcga

SEQ ID NO: 105983 - DNA, 75 bp, Homo sapiens
tggagggcgctgtcgggcttgctgccccccgacaccgctatcctgattactacagcatcccatttcccacaccca

SEQ ID NO: 105984 - DNA, 101 bp, Homo sapiens
gccagccgcaccatgccgctcctaagcctgcacagccgcggcggcagcagcagtgagaggtgctgacctggaggggaagcggcagatgaaggtcagtaatc

SEQ ID NO: 105985 - DNA, 74 bp, Homo sapiens
agatgtgagccacttcgcccagcccaccgttttatttttagacgggatctcgctttgttgcccaggctggtctc

SEQ ID NO: 105986 - DNA, 75 bp, Homo sapiens
gctgttgtgaacttgtaccaagaggtgatgaagcacgcaggctcgtttctggcgctggagacatcaaacttacta

SEQ ID NO: 105987 - DNA, 82 bp, Homo sapiens
ggcttacagacgctgccagcatcgccgccgccagttggattggatgctgctggcaagacaaccattctgtataaactgaagt

SEQ ID NO: 105988 - DNA, 75 bp, Homo sapiens
catggtgaatccactaggaatgtcattgacctgggttactaggtgtctttcagaagctgattgcatccaaagcaa

SEQ ID NO: 105989 - DNA, 135 bp, Homo sapiens
ggctgacacatgtcaacactggccgaaacctccatagtcaccacttcacttcacctctttctggaaaccaggctaagtcctatcagccatggaaacaccattgctctcttcttccggtcactgttgccaaactat

SEQ ID NO: 105990 - DNA, 75 bp, Homo sapiens
tgctcttcctgaggttttcctaagccatcccctggcggaaccgcccccaggtttatcttgcagattatggacttt

SEQ ID NO: 105991 - DNA, 100 bp, Homo sapiens
agaaagagagctccaaggagaaaatccagaagagcaaaggcgatgatgccacattacctatggaacagattaaaagggccaataaactgtttaccaatga

SEQ ID NO: 105992 - DNA, 88 bp, Homo sapiens
tcctatccattgcacagcagcgtggggaagcaccgttctctaccctccaacgccgaccaggcccttgacaggtttgcaatgaagaagt

SEQ ID NO: 105993 - DNA, 100 bp, Homo sapiens
gtctggggagtggggaatgaggcgggggtcggcccggggctcggagaatgggcaggactgatcctttgaaatactccagccatgactaaaagagaagcag

SEQ ID NO: 105994 - DNA, 50 bp, Homo sapiens
gtgtggcacccagcctggtccggatgtgttcagagcaacattgttttgtt

SEQ ID NO: 105995 - DNA, 100 bp, Homo sapiens
gttataaatgaaggctctcttgatgtacttgaagtttattgagttgcccttgactcagagaaagttttgtcaaacatgtcagcagttgttgttaccagat

SEQ ID NO: 105996 - DNA, 75 bp, Homo sapiens
gagaaacaataggacggaaacgccgaggaacccggctgaggcggcaggaacagctttctcaagttctcgatgcca

SEQ ID NO: 105997 - DNA, 90 bp, Homo sapiens
gacgggagtattatgaaaagatcggccatgtggaagagctgtggggcctggccacacaccccagtcgggcccagtttgtgacctgcgggc

SEQ ID NO: 105998 - DNA, 75 bp, Homo sapiens
ctgtgggacccgtgagcaagcagcgacgccagcggcggagaaccgacgaaaggttcttgttaaacctttgggaga

SEQ ID NO: 105999 - DNA, 82 bp, Homo sapiens
ggggagtctgaggccaatgtcagagaaatctttgacaaggtacagcaggtacagactgtgcagcaggtacaacatgtctatc

SEQ ID NO: 106000 - DNA, 90 bp, Homo sapiens
aggtgaaactctatgacattgagcaacagcagataaggaacgccctggaaaacatcaggaacatggagctgatccaggacacctcccgcc

SEQ ID NO: 106001 - DNA, 99 bp, Homo sapiens
ctcctcagcagaaaggccgagcagccagccagcccactgcagtctctagtgatccctgaaaagttccagcatattttgcgagtactcaacaccaacatc

SEQ ID NO: 106002 - DNA, 73 bp, Homo sapiens
aagagtcaaccagaaagagattgggtacttaatgctcctactccaatgtggccagatgacctgcaaaaccaca

SEQ ID NO: 106003 - DNA, 90 bp, Homo sapiens
cggggctgaccgctctggcccagggtgagacgtctcccacaacctgctccgggcgctggacgttgggctcctggcgaacctctcggcgct

SEQ ID NO: 106004 - DNA, 82 bp, Homo sapiens
cgggaaggtaccaaggattggagcacagaggctcagaagcaagtccaggttaatggcacagatgcagattatgaatatgaag

SEQ ID NO: 106005 - DNA, 76 bp, Homo sapiens
ggataaggagatcatagcagagtacgatactcaggtcaaagcggagctggagtttgttcagatcatcatcatcgtg

SEQ ID NO: 106006 - DNA, 98 bp, Homo sapiens
tgacagaagtgctccaaatattaaactgaaacctggagtcataccttctatctttgattctccatatcacctacaggatcccattgaagataccacgc

SEQ ID NO: 106007 - DNA, 76 bp, Homo sapiens
tgacctcctgatgcctcacttgggaggagagagcgatggcttttttcacccagaaggccagccccagcggcttccc

SEQ ID NO: 106008 - DNA, 100 bp, Homo sapiens
agggcggcggcctgtaatcccagcgaccgccaggggggtcctgatgacaacttaattgaaggtggaggaacaaaatttgtctgcaaacctggagccagaa

SEQ ID NO: 106009 - DNA, 75 bp, Homo sapiens
cttcccaccaccttaaaccactgttgacattttgctaaaggctgtgggagacactcctattatgaaaacaaagaa

SEQ ID NO: 106010 - DNA, 51 bp, Homo sapiens
gtttttagcacagacgctccagaggcaaaatctggtggaaagaagtctcta

SEQ ID NO: 106011 - DNA, 50 bp, Homo sapiens
ccaagccttgttgggcactatcagagaccccgcagatgtgtcttcagaga

SEQ ID NO: 106012 - DNA, 98 bp, Homo sapiens
cgggttctggccgtgacccagctgcggccgccgcggagatgtgacccggcagtacggcaaatatggcggaggccaagtcatcaaggcatgggacattg

SEQ ID NO: 106013 - DNA, 83 bp, Homo sapiens
accgtgaatggtgtctggaggagtgagagccggcaggctgctccagttacagcaccacccggccgctgcacccggctgctccc

SEQ ID NO: 106014 - DNA, 82 bp, Homo sapiens
caacacgtctctgttcgtcaggaacgtggccgacgacaccaggaccaaatggctcgaaatccagctgctattgacatgttta

SEQ ID NO: 106015 - DNA, 100 bp, Homo sapiens
agtgtggtggagaaagcaatggatgaaatcaaatcccaaggcaccacctacctatgatgccgtggtacagatggagtaccttgacatggtggtgaatgaa

SEQ ID NO: 106016 - DNA, 100 bp, Homo sapiens
aggagctggtgcctgtgcaagttgttgagtcaggatggctaaaggtgaccccaagaaaccaaagggcaagatgtccgcttatgccttctttgtgcagaca

SEQ ID NO: 106017 - DNA, 100 bp, Homo sapiens
ttcttgactgtgcaggcagctcggcaaaatgtagaccactcacaggaagcaggggttgtgtccactgtggtccccgactctgcccacaagctgttcatcg

SEQ ID NO: 106018 - DNA, 100 bp, Homo sapiens
ctgtcattcaaaggaaaaaagtagctgtcattggtggtggcttgtgataatatgcagcatgcatactgggaactgaagagagaaatgtctaatttacatc

SEQ ID NO: 106019 - DNA, 82 bp, Homo sapiens
ggatattctcacaatagacccctaacatgcatcatgtatgctatattccagataacgaaggaggcccaacttcattcaataa

SEQ ID NO: 106020 - DNA, 98 bp, Homo sapiens
accgcaggcgggcctcgcgggtccgggagcgcggcggagacgatgcctgagatcagagtcacgcccttggcacaccgttccggaaggcaaaagccttg

SEQ ID NO: 106021 - DNA, 98 bp, Homo sapiens
agaggtggctttcgtggttgcacagtttggctaacaggtggaaaacgaagctcattcccaacgtgcaaagccaaggcagcgaccccaggacctcttct

SEQ ID NO: 106022 - DNA, 83 bp, Homo sapiens
ggaagccttctgtcgagaagcagctacccaagctccaggagcttccgggttattttggagctgttggagcactccttgagctg

SEQ ID NO: 106023 - DNA, 74 bp, Homo sapiens
ctcgtgccgctgagcctggcgcagatcggtgaagcggtgagtgctggagatgcattatgtgaaattgagactga

SEQ ID NO: 106024 - DNA, 75 bp, Homo sapiens
ggaagcagtgggaaaatcgcaaggaagccggaaacctcgaccttgaagatggtgagtagccagccaaagtacgat

SEQ ID NO: 106025 - DNA, 83 bp, Homo sapiens
ctttggcttctcgactcggtcctgtttcgacagcgaacatgtcgcggcctgtcagaaagatcaactgaaatcggcaaacttct

SEQ ID NO: 106026 - DNA, 100 bp, Homo sapiens
tcctgcagccatcatgtccgccagcgccgtctacgtgctggacctgaagggcaagagaaacttgcccaggccaaagaagagaacgtgggcttacatcaga

SEQ ID NO: 106027 - DNA, 75 bp, Homo sapiens
cagaatgaagtgcttcctggagctaagcatgatgcagaagttgaacacttaaccgaagttcttaaggaaaagaat

SEQ ID NO: 106028 - DNA, 82 bp, Homo sapiens
ggggccgctctgggatcccggccaccagcaattgtccggtggggtggcagttgaaaaatttggtgaatgcactacgagagga

SEQ ID NO: 106029 - DNA, 100 bp, Homo sapiens
ctcctgcctcagccccctgagtagctgggattacaggcacgcgccaccactcccagatgatgtgcgaggtgatgccgaccatcagcgaagcagaaggccc

SEQ ID NO: 106030 - DNA, 75 bp, Homo sapiens
ccggggccgacccggcccgtagtgtggaagcagcttcagattcgaattgctgcagaaggaatcaatgggacagtt

SEQ ID NO: 106031 - DNA, 76 bp, Homo sapiens
cgagcagccgtgggcagcggtggagcatgagtctggctgcaggatggcccaatggaatcagctacagcagcttgac

SEQ ID NO: 106032 - DNA, 90 bp, Homo sapiens
ccccaatcattggaagatttggaacctcactgaaaattggtattgttggattgccaaatgttggtataaccccgttttcacacgaatggc

SEQ ID NO: 106033 - DNA, 82 bp, Homo sapiens
gctggcggtgcctggacgtacaaccactgttccatccctgacccatctttgtcgtttggaaattcggtccagtctaaaatca

SEQ ID NO: 106034 - DNA, 75 bp, Homo sapiens
gtggagcccccctttaaacctctgttgggaagtcgagataacatgagtattgtactagtttgcttttcaaatgct

SEQ ID NO: 106035 - DNA, 75 bp, Homo sapiens
ttgtacacatcttagctgcaataagatgcaagtggaccaggaggaaccacatgttgaagagcaacagcagcagac

SEQ ID NO: 106036 - DNA, 97 bp, Homo sapiens
tcagccccgtcctcttgtcctcctcagcctcggccaacatagccgaggtagaggtctccatccctgccaagctgcacaactccctcattggcaccaa

SEQ ID NO: 106037 - DNA, 100 bp, Homo sapiens
cttatatcgccagtccagcagctaaggatattttgtgcagtttgccaaggcacgagtaacaagctcacgcagttgggcacttttgaagatcattttctca

SEQ ID NO: 106038 - DNA, 83 bp, Homo sapiens
tgaagctcaagttgctactcgggacgctgcacctcccgcgccgcacggtggacgaggtcaaaatgcagatcttcgtgaaaacc

SEQ ID NO: 106039 - DNA, 75 bp, Homo sapiens
cgcacacaggagagccaggattcatgctctacatccccatagagctgggatagatgggcagcagaagatcatgtg

SEQ ID NO: 106040 - DNA, 74 bp, Homo sapiens
actgtcctggaaaaggcctgaagtggcactgaaatgaggcatagatgagaatcattgaaaaatggctctgctac

SEQ ID NO: 106041 - DNA, 83 bp, Homo sapiens
gttcctggatagtttgcggctgagaatgcacttactggctcattcaggttgtgaccgagattcccgacgagagagactgaggg

SEQ ID NO: 106042 - DNA, 98 bp, Homo sapiens
agatttcagtgcattgcctcccctgggtgctcttcatcttgggaggctctgtcggtggtgagcgacgaccagtccctctttgactcagcgtacggagc

SEQ ID NO: 106043 - DNA, 98 bp, Homo sapiens
ttggcttcaggttctgatgatgcaaaagatgatgactttgaccagtttgataagcctggcgcggaacggtcgtggagaagaagagctgctgatgagga

SEQ ID NO: 106044 - DNA, 82 bp, Homo sapiens
caaaagctagttgctgacagcaaggcctcacagcaaaagattctgagacacaacatttgcctgcaacaaggacagcggccag

SEQ ID NO: 106045 - DNA, 75 bp, Homo sapiens
tggcagccgcggatctcaccgccgctcagggttcgagaacttgtcttggacaattgcaaatcaaatgatggaaaa

SEQ ID NO: 106046 - DNA, 50 bp, Homo sapiens
caagaacaaaggccgcgacttggagaaatgcactcggtgatggaaagaga

SEQ ID NO: 106047 - DNA, 74 bp, Homo sapiens
ttggcccagcagaatttattcctcttcatccactaataacgtatagccttatgtttgatcatcggccaaggtcc

SEQ ID NO: 106048 - DNA, 75 bp, Homo sapiens
gcccaagtccctctactcgcgagaaataacatctgctttgctgccgagctcagaggagaccccagacccctcccg

SEQ ID NO: 106049 - DNA, 100 bp, Homo sapiens
ggtggaaggcagcttccgtcgaagaggagggggctgcggtggccaccgcggcggagcccgagggaaaagaagatctcccggagcagtgccctgaaagtgc

SEQ ID NO: 106050 - DNA, 83 bp, Homo sapiens
gagaatcttgtctttggcaaaggattccaagcaaagatcttccctgagagaactgtggctgcaccatctgtcttcatcttccc

SEQ ID NO: 106051 - DNA, 50 bp, Homo sapiens
gaagactgcatcgccaagatcatggacagagcgggatgccaccagcttgt

SEQ ID NO: 106052 - DNA, 74 bp, Homo sapiens
ctttgataatatttcttgtgatgacaatagggacgtccagatcggtgacatcgtcacagtgggcgagtgccggc

SEQ ID NO: 106053 - DNA, 100 bp, Homo sapiens
ccacaatgaagctgttagtcattacaagttgctgcttcagcaaaacaagaaatttcaaaacttgatcaaggctggagtgcagtggcgagatctcgactca

SEQ ID NO: 106054 - DNA, 80 bp, Homo sapiens
cagttggaagcagccgatccagcctgcggagcctgtggggcagtggtacatgatcagcattgtccacatttacaatcgat

SEQ ID NO: 106055 - DNA, 117 bp, Homo sapiens
gccggcttcagcaccttccgctgtccgccgctgcagccgcctcctcctccagggtgttttgaatgctgtatcaaatgcctggggggcattccctatgcctctctgattgccaccatc

SEQ ID NO: 106056 - DNA, 100 bp, Homo sapiens
cccccccttccccacgcaaccccagatccatttacactttacagttatgaagacagtatggagtttccagaccatagtagacatttgctacagtgtctga

SEQ ID NO: 106057 - DNA, 83 bp, Homo sapiens
actggaaagtgggaagatgataaagatgcagccaaggtcttagcagaagatggcctccccatggccacccatggaccagtcgg

SEQ ID NO: 106058 - DNA, 75 bp, Homo sapiens
aatgccaaatgattcagtccttgaaaacaaggattttgtgtggatgagggctcggctacagcaagaagtagagga

SEQ ID NO: 106059 - DNA, 75 bp, Homo sapiens
cgactacagtggtctcgaatatggcatgtgattggagatcacttcaataagctgctgatgaagaagcatttgaag

SEQ ID NO: 106060 - DNA, 98 bp, Homo sapiens
ttcagagcagatgtgatctgcgctaggtggcatctcctctcacggatgcctcggtcaagatgcaaaaaggtgagcgccagatggccaaaaggttcctg

SEQ ID NO: 106061 - DNA, 133 bp, Homo sapiens
cccagcgccaccatccacgccagccgcaccatgccgctcctaagcctgcacagccgcggcggcagcagcagtgagaggttaatttggagtggcccctggagtcagtttcctacaccatccgaggccccaccca

SEQ ID NO: 106062 - DNA, 97 bp, Homo sapiens
cagacttcaccggcaccatcaatagttcagaaggacggcccttccgacttggtactggcgccaacatggagaaagttgtgaagatggatcgagacat

SEQ ID NO: 106063 - DNA, 83 bp, Homo sapiens
ggaggactctggagctgacagcgcgcacttcacccgcagttgacctagaggatcaagacataatgggagcatttttagacaag

SEQ ID NO: 106064 - DNA, 100 bp, Homo sapiens
tcgggcgccggcgagatgcctttgttcaccgccaaccccttcgagcaagacgtggtttgcctgagaatacagatcaacccacagaacaaagcggatttcc

SEQ ID NO: 106065 - DNA, 75 bp, Homo sapiens
gcctgcctgaggaggcctcggttggatgcgaaggagctgcagcatccaggtgatcatggagctcagcttggtctc

SEQ ID NO: 106066 - DNA, 100 bp, Homo sapiens
gaaaatacaaatcacacgcataatggatgaaaggaaccgacaggaacttagtgatttggcccgtgaccctccagcacaatgttctgcaggtccagttggg

SEQ ID NO: 106067 - DNA, 74 bp, Homo sapiens
gacggctgacggctcacactgaggagatgttaaagtaacccatcttgcaggacgacattgaagattggtcttct

SEQ ID NO: 106068 - DNA, 51 bp, Homo sapiens
ctgcccggggccaacatgaccaggttgatgccttccctcccaatggttatg

SEQ ID NO: 106069 - DNA, 100 bp, Homo sapiens
ggacagtacctcttctgcaggtactggaaacccacaggcacacccaagtcctcagaatggttggaatgaccctccagctttgaacagagtacccaaaaag

SEQ ID NO: 106070 - DNA, 100 bp, Homo sapiens
atcaagtttataagacagttcgtaccaattaaactggagctctcaaacactgctgtcctgcaccagatgcggcgggaccaggtgacagacacgtgccgag

SEQ ID NO: 106071 - DNA, 80 bp, Homo sapiens
ttgatcccaagttgtcgacgaccgacagggtggtgaaagggtgaggtggctttgaccccgggttgcccggccagcacgac

SEQ ID NO: 106072 - DNA, 100 bp, Homo sapiens
tgcagcggctgcagacctggtggcacggggttctggcctgggtgaaggagaaggtggtggatctgctggtggccatgtgtagggcagctttagagtcccc

SEQ ID NO: 106073 - DNA, 82 bp, Homo sapiens
tggggactgcacgtagcccggcgctcggcatggctctcctggtgctcgggtagagtggagtgctgggacccaagaactcgaa

SEQ ID NO: 106074 - DNA, 98 bp, Homo sapiens
agagaagcagtgaaggagtgcagaggcatcacctgaaaggatttgcatgggcaactgatttgtctacagacttagaaagtcaactctctgttagttgt

SEQ ID NO: 106075 - DNA, 73 bp, Homo sapiens
ctggtcatacaccagtactaccaaggacagcttttttcctgcaaggtcctgatgaagttgtagggccagaagg

SEQ ID NO: 106076 - DNA, 75 bp, Homo sapiens
cctcggcagccaaggagggcattgaccgactcatcagtcacggggccgacatcctgaagcctgtaatgctcaggc

SEQ ID NO: 106077 - DNA, 100 bp, Homo sapiens
agacgtggaccctggaggagacctggccactgtcaacagtcagctcaagaagctgcagtacaatgccagtgtttcagtcccagacagcagtggccccgag

SEQ ID NO: 106078 - DNA, 75 bp, Homo sapiens
ggagccgcagaggctcccgggctggactcaggcttctcaggtctcggcgcggaagatggccggcggcgtggacgg

SEQ ID NO: 106079 - DNA, 93 bp, Homo sapiens
ccgcgaaccgcagtatcatgctggccaagaagatcatcattaaggacggaggcacgccagagactgctgctactttgaaacgtacgatagagg

SEQ ID NO: 106080 - DNA, 100 bp, Homo sapiens
cctcggctccctgctgggcgggaccctggtctccgcgtacggggccagatgcagatggctggagatgggtgcagatcccagggatctcgaaattctgaga

SEQ ID NO: 106081 - DNA, 75 bp, Homo sapiens
gctgggaccgggaagatcgggtcccctgcagagagctgtgacctgctgggtgacatccagacctgcatcaggaaa

SEQ ID NO: 106082 - DNA, 51 bp, Homo sapiens
cttagctgttctttatagccaaatggaggcatccgctcgacggcgggagat

SEQ ID NO: 106083 - DNA, 100 bp, Homo sapiens
caacaaaccagaaatccgtctacagtctgaaataaatcttctcaccttggaaaaggaaggatatggagtaatagtactaaatcccaatgaaaactatatt

SEQ ID NO: 106084 - DNA, 100 bp, Homo sapiens
ggaattgcatgggaaaatcatggaagttgattactcagtctctaaaaagctaagcttccctctgtgtgttgcagtcctgtggcattatgcatgccccctc

SEQ ID NO: 106085 - DNA, 82 bp, Homo sapiens
acctccgagcgcaaggacagcgcgaggtccgcgcagcccagcgcagccatagatgcgctggcagctgagcgagcagctgcgc

SEQ ID NO: 106086 - DNA, 83 bp, Homo sapiens
ggcgagcgcccggattggggatgagtatgcggaggacagctctgatgaggagtgcacgtgccggaaggacatggtcaagatct

SEQ ID NO: 106087 - DNA, 75 bp, Homo sapiens
gttttttctaatggctattcaaggaggaacatatgcagcagaaaaaagaggaggaagaagttcttaaagaagtaa

SEQ ID NO: 106088 - DNA, 83 bp, Homo sapiens
ccgaaacgtgaccatgtggattcaacagcttttaggactcagtgtgccgtgcaggtgaagctggagctggggcaccgcgccca

SEQ ID NO: 106089 - DNA, 100 bp, Homo sapiens
ctggctgctttcctttcctactgccctggaatgggtgttgctcttaggatgtatcccctcaatgtgacaccatcgccacaacaggctcgggtctgtcctc

SEQ ID NO: 106090 - DNA, 120 bp, Homo sapiens
tggagaacgaccggctcctgctcaagatctcagagaaggaggaggtgaccacgcgcgaggtccagcaccatgtgctaggtcactcccagcgcgaggccacacctgggccgtcggagcagc

SEQ ID NO: 106091 - DNA, 106 bp, Homo sapiens
ccggtgccagcacctttcggcttctgagacggcggcagcagcggcattcaggaactgtggctgcaccatctgtcttcatcttcccgccatctgatgagcagttgaa

SEQ ID NO: 106092 - DNA, 100 bp, Homo sapiens
aaactttatgaagaaggttccaacaaaagactttttaatgttgatcggcatgttggaatggacccatccattttcacagtattgactgctaagtctgtcc

SEQ ID NO: 106093 - DNA, 110 bp, Homo sapiens
tttctccattcgccgcgcacaatgccggattctctcattcacccgcggtggtgcgagcgaggctcagaaaaaatgtctgaatcagacttcccccatttctgctcccaaga

SEQ ID NO: 106094 - DNA, 88 bp, Homo sapiens
aagatggacagggatgataattgggcctccaagagtgaatgaaaactttgccattgatttgatagcagagcagcccgtgagcgaggtg

SEQ ID NO: 106095 - DNA, 83 bp, Homo sapiens
cttttggcggcctttctgctcctcgcggcccagaacaatgagatggtggagctacagagaatacggatgaaggatgaaatccg

SEQ ID NO: 106096 - DNA, 100 bp, Homo sapiens
cgggcggcggcggcggccggagcggcgagcatggcccgcgcggcgccgggcgctgactgagaggacagagctgcccagtccttactcaacaagctgatca

SEQ ID NO: 106097 - DNA, 82 bp, Homo sapiens
gccggggcgctagcgttcgccttcagccaccatggggaatgggatgaacaagagacaagaggagcagcagcggcaccgcccc

SEQ ID NO: 106098 - DNA, 85 bp, Homo sapiens
ggtggagctaagtagccaaggattctggaaaactggcatccgttctgatgtctgtcagtttcattgtactgacaacctcagctgg

SEQ ID NO: 106099 - DNA, 83 bp, Homo sapiens
ccggaagatcggcagcggctccttcggagacatctatctcgattgtctaaagccccaggaaaaatggtggaaaattcaccgtc

SEQ ID NO: 106100 - DNA, 133 bp, Homo sapiens
gtccagaacatccacggagctttcaatgctctcgggggagcagacagactcacctccaaccatttgagttttgtcaccggctcccacgtcggagagctgatcatctgggatgccctggactggaccatgcagg

SEQ ID NO: 106101 - DNA, 75 bp, Homo sapiens
gtagattgtgcagtgctcgactgtgaggatggagtggctgcaaacaaaaaggcatttccggagagttcttttgaa

SEQ ID NO: 106102 - DNA, 118 bp, Homo sapiens
cggatggtcgcggtgcctgggcccacagtcgcgccgcgctcgaccgcctggagaagctgctgcgctgctcgcgttggcatgtggagaccccaaggcaaaaccatcctatcttatcgac

SEQ ID NO: 106103 - DNA, 51 bp, Homo sapiens
tggattggacaagcaggcaaagctgaggtaacctgtgtatggtgactggag

SEQ ID NO: 106104 - DNA, 83 bp, Homo sapiens
gctgtctctgatccgcaagcatgctcagaccttcattgctctgtgtgccaccggtacaatgactcttcttgcttttcacctaa

SEQ ID NO: 106105 - DNA, 100 bp, Homo sapiens
cggagctgtgcgagagcctcctcacttggcctctgcgcttagataccttcatgaaaacagaatcatccatcgggatctaaagccagaaaacatcgtcctg

SEQ ID NO: 106106 - DNA, 75 bp, Homo sapiens
gcaggaaaacaagctcagggcttccactgattctacattatgggatcatggcccaagttgcaatgtccaccctcc

SEQ ID NO: 106107 - DNA, 82 bp, Homo sapiens
tcttgctcggccgatgaagtgcagaggtttttttctggccagcggagcctgcaccaccgtggagacaacctggagaccctgg

SEQ ID NO: 106108 - DNA, 97 bp, Homo sapiens
cgctgagtggtttttcggatcatgtctggtggctccgcggattataacaggaaaaccagtagattcccagacatcgcgaagtgaatctgaaattgtg

SEQ ID NO: 106109 - DNA, 98 bp, Homo sapiens
gacttcaggagtgcagctgcagaccttcacacctcaacaaagtgcttctggaaacaatgagagctctcaagttgagtcaacaaaggaaggaaatccaa

SEQ ID NO: 106110 - DNA, 75 bp, Homo sapiens
cagatcctgaggtgcagaggcaattcccggaggactacagtgaccaggaggaggaagccaagaatctggtgagcg

SEQ ID NO: 106111 - DNA, 100 bp, Homo sapiens
gttccagtcagggacagccgtggagagaccagggaccagttcacaaagatgtccaaaactaatggcttatcagaagatttgatatggcactgtaaaacac

SEQ ID NO: 106112 - DNA, 80 bp, Homo sapiens
cgaagaagcatcgttaaagtctctcttcaccctgccgtcatgtctaagtcagagaggctcaaggaactgaaacaaaggga

SEQ ID NO: 106113 - DNA, 75 bp, Homo sapiens
gggccagggaaccctggtcaccgtctcctcagaggaattacggaggttgagctggtccggaatccctaagccagt

SEQ ID NO: 106114 - DNA, 75 bp, Homo sapiens
ggaaagcagtttttaagacaaaaaacaccacagggatggcgagaagtatttgttgacattgatccacaggtttct

SEQ ID NO: 106115 - DNA, 118 bp, Homo sapiens
tgcacccacgaatctgcccacccctcctgtaacccagcctgtttcacttcttgagagacaagagagacacctccaacttcgacaaagagttcaccagacagcctgtggaactgacccc

SEQ ID NO: 106116 - DNA, 100 bp, Homo sapiens
gctgcagcagcggaagaccccagtccaggcctatgagagctacaagaagaaggactacacccaggtggactacttaatcaacgggatgtatgcggactca

SEQ ID NO: 106117 - DNA, 97 bp, Homo sapiens
gcagaaaccagaaactttaaatcttgagaaaagaagattgtctatcatgaaggagagctgtgttaaaagtgaccactcgtgctcgccatgtgctcca

SEQ ID NO: 106118 - DNA, 96 bp, Homo sapiens
ctggtaaatgcaggcttttatgcgagaggctccatggtccccttctcgatgcgcatcttgcacgcggagcttcagcagtacctggggaacccacag

SEQ ID NO: 106119 - DNA, 100 bp, Homo sapiens
ccaaagcgaaggcatccctgaaagtcccaagtgtcatgaaggaaatgggacatttgagtgtggcgcgtgcagaatgaagagttgagtatcttatatccag

SEQ ID NO: 106120 - DNA, 75 bp, Homo sapiens
caggaaccatgattgaatggggcaattactggctttggccagcataagccatgtggctcatgttactattacaac

SEQ ID NO: 106121 - DNA, 75 bp, Homo sapiens
gctgggggccgcccatgaaagcgcagccatggcgggtattgacctgatggacatggcttcggacatcctgcagcc

SEQ ID NO: 106122 - DNA, 75 bp, Homo sapiens
ccagataattccattaagatgcccgaagaggaagacgagcttggtgctaacagtggtttgcacatcatcatcttt

SEQ ID NO: 106123 - DNA, 100 bp, Homo sapiens
atccaaacctttgtagtgaatatgtgaaagatatttatgcttatctgagacaacttgaggccgactcgcgggccgctgcacccaccgccaaggacaaaag

SEQ ID NO: 106124 - DNA, 100 bp, Homo sapiens
gaaaagactcatatcaacattgtcgtcattggacacgtagattcgggctatcacagagctccagaagaatggaatgaatatgagtttttcgtttttgaat

SEQ ID NO: 106125 - DNA, 88 bp, Homo sapiens
ccagctggacgaggctggagaaagtgacgtgaacaacttgaccttaaaggctttgatccaggagagaaatactttcataacacatcat

SEQ ID NO: 106126 - DNA, 83 bp, Homo sapiens
gagagactcgccggccgagggtggccctaggggcagcgagcaagacagcaagcaggtactccaaagattcaggtttactcacg

SEQ ID NO: 106127 - DNA, 74 bp, Homo sapiens
gaattctggacaatcaaaacttaactcctggatacagagcgtttcccaaagtgtattctgcggaactagcacct

SEQ ID NO: 106128 - DNA, 114 bp, Homo sapiens
caccactggacctccaaggaagccacgtgcagacatctacaaccttcgatctcctgacgagaacagcatatgccatatatgagctggctgtggcttcatttcccaagaagcagg

SEQ ID NO: 106129 - DNA, 82 bp, Homo sapiens
tgtggaggagatgtactgtgcttggctggaaaaccccaaaagtgtacataaggatctcaaagatttcatgagacaagctggg

SEQ ID NO: 106130 - DNA, 82 bp, Homo sapiens
cacatgcccgctcacctgcgctgtgatgcctgcagagctgtggcttaccaggtttggggacgacatccctggaatggaaggc

SEQ ID NO: 106131 - DNA, 114 bp, Homo sapiens
gggggactggcctggcgtgcactccgcacctcggggacattattgcgcgtggaacggctgcttttggaagaaatgagccgtcagactgctacagcattacctaccggtacctcg

SEQ ID NO: 106132 - DNA, 75 bp, Homo sapiens
gggggtggcttgcaaagcaacgagctctatgccctgaacgaaaacatcagtcaccattactttaagtactgcaaa

SEQ ID NO: 106133 - DNA, 100 bp, Homo sapiens
cgggagccctcgcgacgcgcccggcccggagcccccagcgcagcggccgcggaagtttgtgtttttcaacatacctcagattcaatacaaaaacccttgg

SEQ ID NO: 106134 - DNA, 98 bp, Homo sapiens
cggcgggtcgtgggggctgactgtcgctctgcctttgacaggagaggctgcttcttgtagagtcactgcttcaaccacctgtgagaaattagaaaaag

SEQ ID NO: 106135 - DNA, 100 bp, Homo sapiens
atatctagtccagcaagaccttgctcttttgaagaggccatgaaagatcttctccctggggtactgccccaccggggagtggctggcagtgggcatggag

SEQ ID NO: 106136 - DNA, 100 bp, Homo sapiens
ccttcaggagctccttagtaaaggttaccttttcgacaaaatgattcatctagtcattgccagaagagtgggtctcctatttcctcagaagagcggcggc

SEQ ID NO: 106137 - DNA, 75 bp, Homo sapiens
cagcaactgaggcagcggcaggctcaggtgcagccgctgagtgctgatggcagagattggtgaggatttggataa

SEQ ID NO: 106138 - DNA, 100 bp, Homo sapiens
ttgatgactgtgccaaaatattttgtattagaattagcgacgatatagatgaccccaaatggacactttgcttgcagtttctgtagaaaatgtttcctga

SEQ ID NO: 106139 - DNA, 50 bp, Homo sapiens
ggccagtgttgtccctactgcatagatcctgctcacactaaaatatgaac

SEQ ID NO: 106140 - DNA, 99 bp, Homo sapiens
ctttcctcccccagctccagcctctctcatcttgggaatctgcgtcagaagtcactcgcagtcccgtcagcccagagcactgtcatccgtggtggccct

SEQ ID NO: 106141 - DNA, 83 bp, Homo sapiens
ctctggacaagctggaatgcatccaagagaatccctcaacatgctggtgtaccaacagtaccgttattgccaccacaagtaaa

SEQ ID NO: 106142 - DNA, 100 bp, Homo sapiens
gggatttggaaatgtcatccgatggcacaatcagactgctggagttaataccaccgacaaagagatggaggtgcttcacttaagaaatgtctcctttgag

SEQ ID NO: 106143 - DNA, 99 bp, Homo sapiens
gcagcccgagctgaccctaggcctccaccctggcaggaatcccaatttgcctccacttagtgagcggaagaatggtttgggccccatggtatccctgtg

SEQ ID NO: 106144 - DNA, 76 bp, Homo sapiens
tatacagatggtccaggagaagctttgaaggctgtgaagggcattttgtcagtgatgctgatctttgccttcttcc

SEQ ID NO: 106145 - DNA, 82 bp, Homo sapiens
ccggggctcgggcggtggaggcggagccggagcgcggccatggcgggacttcccaagtaagaagcggaagaggagccgctgg

SEQ ID NO: 106146 - DNA, 74 bp, Homo sapiens
aacatctgttgcagcgagccccagattattgcccagagacaatgtgtctctggagaatggttcgactgttgcct

SEQ ID NO: 106147 - DNA, 88 bp, Homo sapiens
aagaccatcatgctgcgcggccttcccatcaccatcacagagagcgattgctgcaggtggagaaattttcagcctgtgtttacctgag

SEQ ID NO: 106148 - DNA, 98 bp, Homo sapiens
gccttcccatgctatctgttgacatggaaaacaaggaaaatggctctgtcggtgtaaaaaagaattaaacatgggccagcgatgttcagatactagag

SEQ ID NO: 106149 - DNA, 51 bp, Homo sapiens
cgcagagccaaacagccaggcagcaaagttctcatatagatgtggttcgtt

SEQ ID NO: 106150 - DNA, 90 bp, Homo sapiens
taccaagtgcagtttaaataacttgaaagagggctccagaaaaagtagatgcgtatctgtacaaacagatcctactgatgaaattcccac

SEQ ID NO: 106151 - DNA, 130 bp, Homo sapiens
cctctcctaagagacccaggggaagacccaaaggcagcaaaaacaagagtccctctaaagcagctcaaaaggtgaccaagaatatggcccaggtgaccaaagccctggacaaggccctgagcaccatgga

SEQ ID NO: 106152 - DNA, 100 bp, Homo sapiens
ttcgtctcttacgtctgcggaagtgcagctgcctcagttcttagcgcaggctttgatgcggcctggaagaattgatagaatcatctatgtgcctttaccg

SEQ ID NO: 106153 - DNA, 100 bp, Homo sapiens
gtggacgtggtcaagtacgagagtggccctgacggaggggaggaattgagtggtgattttatgcaatggcttcaagccacagttcttcaccagtgcctca

SEQ ID NO: 106154 - DNA, 90 bp, Homo sapiens
taaaaacctggttcctgaagatgaggcaaatataggggcatcagaacattctagtatgccagtagaaaaaaatatcactttagaaaggcc

SEQ ID NO: 106155 - DNA, 90 bp, Homo sapiens
atttgaagatattagcctaacaagatggaagcaggtttaaaattttacataagaagttacctttttcagacaccaaatggattgcttctg

SEQ ID NO: 106156 - DNA, 98 bp, Homo sapiens
tattctgcatatgtggcaccttcatcttaaatctgtacaagcatgtttagccatgaatcatcttaatggacagaaaatgtatggaaaaattattcgtg

SEQ ID NO: 106157 - DNA, 75 bp, Homo sapiens
aaaaaagccggagtattttactaagcccctaaaatgtcgagatttgtacaaggcaaccagataaactggtggtag

SEQ ID NO: 106158 - DNA, 90 bp, Homo sapiens
gatttgaaaaacgtttaattttcagtttttctgaagtcatgtttgccatgaagcagtttgagcaggcaccatactggacataccttttat

SEQ ID NO: 106159 - DNA, 75 bp, Homo sapiens
agtacgcgaaggatatcggtttcattaaggggccttggacaagttgttactgactatgttcatggggatgccttg

SEQ ID NO: 106160 - DNA, 101 bp, Homo sapiens
ctcgccctggtcttcgggctgtcgctcgtctacttcctcagcagcaccttcaagcagctgctggagtacttagggaagggcaaaagcatcgtggatgtggg

SEQ ID NO: 106161 - DNA, 76 bp, Homo sapiens
aaggtcaagcttctgcgctcccttcctcagcgtttcaaggcagcctggcatcctcgctacaacctcattgttgtgg

SEQ ID NO: 106162 - DNA, 100 bp, Homo sapiens
ctacgacggcgttgatatcggtggtaacgacggcctcagcaggcggggaagatgaaaggcatcaacaacagcaacttgtgattggcggtgaccggatatt

SEQ ID NO: 106163 - DNA, 90 bp, Homo sapiens
gctgggctttcgggtcccgcgcccaggttttggcccgaaccgcgacttcaacaaaaaataagagaagaaaggaatattttctagctgtgc

SEQ ID NO: 106164 - DNA, 100 bp, Homo sapiens
atcagctataaatatcgagaggacttgtctgcacatctcatggtagctggctgggaccaacgtgaaggaggtcaggatccctgctgggcaccaacagctc

SEQ ID NO: 106165 - DNA, 75 bp, Homo sapiens
cgtaccctcgctacctcatgccggaggctgcacagatatgagatcctgactccaaactccattcccaagggtttc

SEQ ID NO: 106166 - DNA, 100 bp, Homo sapiens
ctcaaaacctcgctccggaaaggggacacctgttccactcttgtcctggggacccagctttaactttagcatctggtatgttgaacttagtggcattgat

SEQ ID NO: 106167 - DNA, 101 bp, Homo sapiens
cggccagggccaaggctctaggaagtgggatttctggaaataatgcaaagagagctggaccattcatccttgaggtatatggaggtcagtgggaacctgag

SEQ ID NO: 106168 - DNA, 75 bp, Homo sapiens
ctggagacatggaccgcggcgagcaaggtggtattaaagataatcaaacattatcaagaagaaggacaaggaact

SEQ ID NO: 106169 - DNA, 83 bp, Homo sapiens
cagccgagtctgacggcgccggttcgctgcccggtccgcccgcggtgagagacaggccgacggtcgcaaggtcctacggtcaa

SEQ ID NO: 106170 - DNA, 83 bp, Homo sapiens
cgggaagagccggggccgtggctgacatggagcaggctctgacgcccgctctgcggcttcggtgtttgaacaggccacagtcc

SEQ ID NO: 106171 - DNA, 83 bp, Homo sapiens
tagccggcgacttgagtgacgacacttctccaccgacccagtggccgcctccatcatgaagatctacacgttcaacaaagacc

SEQ ID NO: 106172 - DNA, 100 bp, Homo sapiens
atgatgttagggtaacccatcccagaactactccagtggatcctattgaccgaagctgtcaaaaggaaatggccattttcaagattgcagctctccaaaa

SEQ ID NO: 106173 - DNA, 73 bp, Homo sapiens
cctgggctccccagtgccacccgaagggcctgaggaggccatctgcaggaggaggtatctgagagcagctcga

SEQ ID NO: 106174 - DNA, 98 bp, Homo sapiens
ttcagaactcacgtccgtcgctgctgcaaccccaagatgtcggagacacggtggaaacgcttatgatttgaagaacccaagtgattcagcagtgcaca

SEQ ID NO: 106175 - DNA, 72 bp, Homo sapiens
gccgcacactgctacatcgatgacagaggattcaggatgatgagtttacacacctgtacacactgattgtgc

SEQ ID NO: 106176 - DNA, 99 bp, Homo sapiens
cccctgcctgctcagggccgcctccaagaccaaggacaaccctggcagcatcgggaaggtgagctgctccccggtgtctgcccagctcctgtcggtgct

SEQ ID NO: 106177 - DNA, 100 bp, Homo sapiens
ctgaagtatctgcccctgtcaaatcattccaggattcgataccagcatcttgccaatttgcaaggactcacttggctggatgtttaacagacttgataca

SEQ ID NO: 106178 - DNA, 75 bp, Homo sapiens
cgcgggacctgacagccgggtcagagaggaagttcagaagcagaaggaactttccaaagctgaaatccagaaagt

SEQ ID NO: 106179 - DNA, 100 bp, Homo sapiens
ccagcatggctacttcatattttggaaagcagtttttaagacaagtggagctgatcagaataatgttcagcatcaaccccctggagaacctgaaggtgta

SEQ ID NO: 106180 - DNA, 75 bp, Homo sapiens
cccccactccgcctccgggagaggtgagcctgaatttaaatacattgggaatatgcatgggaatgaggctgttgg

SEQ ID NO: 106181 - DNA, 83 bp, Homo sapiens
gaaggaggaaactatggcctccaggcttccgacggcctggtcctgtgtgtttgagaagtcccccctgcgggtgaagaacttcg

SEQ ID NO: 106182 - DNA, 100 bp, Homo sapiens
atagccaatgagactgtgaacgtgctgtggaatatatggaaggatttgatgccctggatccctttattcccatcctggtttccaactataacccaaagga

SEQ ID NO: 106183 - DNA, 74 bp, Homo sapiens
ggaggcctgttgaagacttaatccttcaaatgaaggcgctcaacgttgaaaagacaatgcagatcttcgtgaag

SEQ ID NO: 106184 - DNA, 82 bp, Homo sapiens
ggcgaggccctcatgtaccacacgcttgtcaaaattcccaaaaatgatcccctcaatgaagttcataactttaacttttatt

SEQ ID NO: 106185 - DNA, 75 bp, Homo sapiens
cgggcggtgagcgcccatatgggggttctggagagcggggtgtgggccgccctgcccgcaggccatgtggccccc

SEQ ID NO: 106186 - DNA, 98 bp, Homo sapiens
ctctagaggcgttttttggccaagggccttggagcatggcaagtccagagcaccctgggagccctggctgcatgggacccataacccagtgcacggca

SEQ ID NO: 106187 - DNA, 75 bp, Homo sapiens
cgactgttgacagagctataaactcaacccgaacacatttgtttgacagtcttcaggagacatatgaagcaaaaa

SEQ ID NO: 106188 - DNA, 75 bp, Homo sapiens
tcagtccattgtgaatggatgtcagaacactcgtgaaactgctcaggccatcaagggtatgcatatacgaaaagc

SEQ ID NO: 106189 - DNA, 75 bp, Homo sapiens
gacatcttctcagaccatcacaccatgtggcttgcagtaaggttgggctgctggcacgacccttacatccaccac

SEQ ID NO: 106190 - DNA, 75 bp, Homo sapiens
gagagaacacggccgaaggaaggatgggagatctataaggacaggcagaaattctcagaacaggttttcaaagtg

SEQ ID NO: 106191 - DNA, 100 bp, Homo sapiens
catcaacaacgacgccgagctctggggcgtcttgcagccctatgagcatctcatctgcggcaagaacgccaatggtacctttgacaggagcgtgaccctg

SEQ ID NO: 106192 - DNA, 90 bp, Homo sapiens
agatgaaaaaaatactgcactaaagaccattcagaaggcagctctcctttctccaggacccagtggtcttcagcgtgtagtaaaaccaac

SEQ ID NO: 106193 - DNA, 100 bp, Homo sapiens
gagttgtactgtacatgtttagaaaagaacatatgggattcagaggagtatgcatcagtcttgcagctgctgaggcattatccaattggtttgctatttg

SEQ ID NO: 106194 - DNA, 90 bp, Homo sapiens
tggagattttgatgtggatgatgccaaagttttattagatcctcagacagattctaagcctcctgagggattgttaggattccacacaga

SEQ ID NO: 106195 - DNA, 75 bp, Homo sapiens
gactagtaatggagaagttgatgactctcgtgaacatagctttaataggatgagagtccggagtgttgtcatgtg

SEQ ID NO: 106196 - DNA, 100 bp, Homo sapiens
tggatgatcgagaggatctggtgtaccaggcgaagctggccgagcaggctgagcgatacgacgcgcccgggggctggagaaggccaggcagcagctgcag

SEQ ID NO: 106197 - DNA, 90 bp, Homo sapiens
ggcggccgcagccatgtcccgggggcccgaggaggtgaaccggctcacggagagcacctaccgggtctcctctgagcctccggcctccat

SEQ ID NO: 106198 - DNA, 83 bp, Homo sapiens
cttcgcccggctttgcagcggggacttcggcggcggcgcctcaggcacctcggcccgggtattagaaaactactcggatgctc

SEQ ID NO: 106199 - DNA, 75 bp, Homo sapiens
ctttgtctccttcgacttggagtctttgtccaggacgaaatatggctacacacacctttctgcaggagagctgct

SEQ ID NO: 106200 - DNA, 89 bp, Homo sapiens
ttagatgggttttccagagatgcaaaaatgcaccctactccagcatcgcaccccaagaaaccagtacgaattggagcaatgttggctta

SEQ ID NO: 106201 - DNA, 80 bp, Homo sapiens
ctgaaaatgaaaaggaagcttcaggtggagacagcccgaaggttctctccataaatgaagaagggctaaggcgatgcgaa

SEQ ID NO: 106202 - DNA, 96 bp, Homo sapiens
gtcttcctgctggggctcatgtttgaggtgctgctggtgagtagcagccggtacccagaccagtggattgtcccaggaggaggaatggaacccgag

SEQ ID NO: 106203 - DNA, 82 bp, Homo sapiens
acgtgctggacctgaagggcaaggtgagaagccctaccactgcaactgggacggctgcggctggaagtttgcgcgctcagac

SEQ ID NO: 106204 - DNA, 75 bp, Homo sapiens
tgtagttactgtggaatcaataagccatggcatctaagaaatttgctgttaaaacacgatgaggcgagtggtacg

SEQ ID NO: 106205 - DNA, 100 bp, Homo sapiens
atcaggaccccagatgtctgacagccctgtgtgacaccaagataagtaacgcctccccatggccacccatggaccagtcggcattcacttcctcccttct

SEQ ID NO: 106206 - DNA, 75 bp, Homo sapiens
tggagtttgcaatccagccaaatacaactggaaaacagctttttgatcagttattgccttgtctgtcaagatccg

SEQ ID NO: 106207 - DNA, 82 bp, Homo sapiens
aaactgcaacaacagtttaacatggaatatgatgaagaatgggctaagaaaattcagagtgaaaagtttcgctggcataact

SEQ ID NO: 106208 - DNA, 100 bp, Homo sapiens
ggacgaacaatagaagatctaaaaatgtatgaacaccttttccctgagcttgttgatgattttcaggatgaatttacaggaattgaacccttgagcgagg

SEQ ID NO: 106209 - DNA, 73 bp, Homo sapiens
gctggtgcatctgtttgccggaggaaaaagcttgtggtgaaggggggcaaaaaaaagaagcaagttctgaagt

SEQ ID NO: 106210 - DNA, 75 bp, Homo sapiens
cctgagatcgtcaagtctcccagcgaccccaagcaataccgagaggtgtgggaaatggaactggatagactcaag

SEQ ID NO: 106211 - DNA, 100 bp, Homo sapiens
tggtgcagactttgctgagggtgacccagttggatcacaaggacgagtcataagttttgaggtacgaaaagaccaccatgatctggctaagaagaattac

SEQ ID NO: 106212 - DNA, 75 bp, Homo sapiens
atatatctgggatccacataatggagacattctgatggaatttggaatgcagtaatagtggccttgtcttcaaaa

SEQ ID NO: 106213 - DNA, 98 bp, Homo sapiens
ctgcaggcagcaccggaggcccaggtctccgtgcagcccaacttccagcaggacaagtttgtgggcatcacctatgccctgaccgttgtgtggctcct

SEQ ID NO: 106214 - DNA, 76 bp, Homo sapiens
ctgatattcgagatgctttcgggttttgatagcagaatcaaggtgtttgccaatgggaccctggtggtgaaatcag

SEQ ID NO: 106215 - DNA, 100 bp, Homo sapiens
gcaagcctctgcagaggcgctggagctgggtcagtccgccgctcaccccgcggccgcaccttcccgccttctcagtattctttgaaactggagaaaggag

SEQ ID NO: 106216 - DNA, 100 bp, Homo sapiens
agacgatctgcacttcgcattttggcattgacatttaattttagggtcctttatatagaagggagagtagtggactgcccctgatggtgattattcataa

SEQ ID NO: 106217 - DNA, 98 bp, Homo sapiens
gcctccttgatgaactggcaggcaagctacaaagcctagacctttcagccgctgccgaaatggatgctggtggactgtgtgcccctggtggaggtgga

SEQ ID NO: 106218 - DNA, 100 bp, Homo sapiens
agggagtcaccactggacctccaaggaagccacgtgcagacatctacaaccttcgatctcctgacgaggtaagaaggtggatggctctgtaaatgcctat

SEQ ID NO: 106219 - DNA, 100 bp, Homo sapiens
tgcgccagtacatcagcgtgaagacgcagagggagacaggaactatggaggccgcgcccgggacccccccgccgccgccatcagagtcgccgccgccgcc

SEQ ID NO: 106220 - DNA, 100 bp, Homo sapiens
tttcctgggagcggcggccacggaggcaccatgaagaagtcttactcaggcctctggctgtacctggcagggagcagcctgccctgtctcacgctgattg

SEQ ID NO: 106221 - DNA, 100 bp, Homo sapiens
cagcgctttcaggacgccgatgagaagttcatggaagtcatgtacgggaccaagaagaatccgtctcttgctcaagtgaaaattgaagaagcaaagcgag

SEQ ID NO: 106222 - DNA, 75 bp, Homo sapiens
ccaggccacccggccgtcagcagcatgcaggcctgtaactgcaacctgcatgcccggcgctgccgcttcaacatg

SEQ ID NO: 106223 - DNA, 50 bp, Homo sapiens
gctcgtatgattttactgtaagtttcaacgaaccaaacttttaaatggac

SEQ ID NO: 106224 - DNA, 100 bp, Homo sapiens
tattctgctcgaaggctacggaatgcaagagctcaaagcaggaagcagccttacgacagtctgcctacctcacagacctgcttcttccagctgaggctgc

SEQ ID NO: 106225 - DNA, 90 bp, Homo sapiens
caaggcctggttgcagttcccctggaggactttgacccatactatttgacgcagaaaagtggagactgctgcacggactctggaaccatg

SEQ ID NO: 106226 - DNA, 99 bp, Homo sapiens
tttacacagatggaaccagaaaagatacgaggctctaggagagcttgtcaaaattcccaaaaatgatcccctcaatgaagttcataactttaactttta

SEQ ID NO: 106227 - DNA, 50 bp, Homo sapiens
gtggagtgttctgcacttacacagagaaagtctgtgattgctgtgagctt

SEQ ID NO: 106228 - DNA, 90 bp, Homo sapiens
tcaagtgcagtacctggatctcatcaaaaaggacaccagcaagctgttcaatgaggaggtattagaaaactactcggatgctccaatgac

SEQ ID NO: 106229 - DNA, 92 bp, Homo sapiens
ccccggcctctcggcctctgccggagaaacagtgccggtggtggtgtgcacattgagccccggtatagacagttcccccagctgaccagatc

SEQ ID NO: 106230 - DNA, 75 bp, Homo sapiens
cgcgagaagcagcgggggggcaggcgatcgaaggcccctccagccagcgtcaggtgcagaatggcccctctcctg

SEQ ID NO: 106231 - DNA, 100 bp, Homo sapiens
gtgaagtgtctgcgctgcctgctctacgccctcaatctgctcttttggcctaaaatgaccaatgtgtgatttcagtggaataaatggcgtccaaagtcac

SEQ ID NO: 106232 - DNA, 100 bp, Homo sapiens
tctggttactgctgtgtggctgcactcactctacgtggagttgggccctgcaggaaggacggacttcaggggcagtgcacagccagagaacaacacatca

SEQ ID NO: 106233 - DNA, 82 bp, Homo sapiens
aggaaggggttcccagaagtcagaatccaagatggcatccaaacaattgactctacccaggctctgttccttccaattggag

SEQ ID NO: 106234 - DNA, 82 bp, Homo sapiens
gctttattgacctcgactcccatgcgaatttcatgtcatccatttgtaacagtctttttgaagcattgtttcctggatcttc

SEQ ID NO: 106235 - DNA, 100 bp, Homo sapiens
actggaaacaatggcatttacagaaagagtcaacagcagtggcaacagatccgcatttgctaccagcggcggccgcggcggagccaggccggtcctcagc

SEQ ID NO: 106236 - DNA, 75 bp, Homo sapiens
ccgctaccgggttgcggccggaagccgggcgccgcggctctgcttccctcgggcacttgtgttctgattagtggc

SEQ ID NO: 106237 - DNA, 75 bp, Homo sapiens
aaaaacattttaaagttgtaaaccaaagtttgatggtgacagtgcctacgtggggatgagtgacggaaacccaga

SEQ ID NO: 106238 - DNA, 82 bp, Homo sapiens
atgcagacagcttgtcaagctgtgcagcatcaaagaggcaggagaggtgtccctgcagacatccaaatagatattgatgaag

SEQ ID NO: 106239 - DNA, 75 bp, Homo sapiens
ctccagcggaagctacttcgtcaaggaccctcagggggtcctctctagagaatccagaaccccgaactcgggcac

SEQ ID NO: 106240 - DNA, 101 bp, Homo sapiens
gctgttctggacagctgcgacggcgcgctgggctggcgcggcctggcttttctgggagaagaggctacaaggacttagtgcatcagatgtaacagaacaaa

SEQ ID NO: 106241 - DNA, 98 bp, Homo sapiens
acgggaacccacgaccattatatgctggaatggttccttaaaccccgagactcttcagttgaagttcgtagtgattgggaagtgaaagaggaaatgga

SEQ ID NO: 106242 - DNA, 97 bp, Homo sapiens
aaaaggaagcatgttggacgatatctaatattacagctggaaatagggcacagatccaggccctggccaacgtcaacattgggagcctcatctgcaa

SEQ ID NO: 106243 - DNA, 51 bp, Homo sapiens
ggacgccgacatcgtgtgccgctgccagccctggtacctgacagtgtaaag

SEQ ID NO: 106244 - DNA, 74 bp, Homo sapiens
agaggttacgagcaaagggaataaggaatccggatcattctagagctttaacagacaactaaactggtaggtgg

SEQ ID NO: 106245 - DNA, 100 bp, Homo sapiens
tgtgctgccctcaacagcgccattttagatctgcgcctgcagctgctggacgtgaagaacaacccctacctgatcaaggccctctacggcctgctcatgc

SEQ ID NO: 106246 - DNA, 100 bp, Homo sapiens
tcttgaatgactggaaactgattggaaactctttgggaaagccactcgaaaaggtcaaagagttagtggaagcagagttatttgcccgttatgaccgcct

SEQ ID NO: 106247 - DNA, 80 bp, Homo sapiens
tccaaatcaaaaaatacatggtacattgatgaagtgtttgaagatactgtggaggagcgtgtcatcaatgaagaatataa

SEQ ID NO: 106248 - DNA, 74 bp, Homo sapiens
ttataaaaagcagcttaatgaggaactccagcggcgctcttcagcattagttatggatgtacaagcattcgaga

SEQ ID NO: 106249 - DNA, 85 bp, Homo sapiens
ttctgtggacagctgtgctattcctggaggctggaagtcatccacaacaaacacaaaaattggaagaaattaaagagaatgcaca

SEQ ID NO: 106250 - DNA, 82 bp, Homo sapiens
ggcgctctggctctggctgtgcgcgctggcgctgagcctgcagccggccctgccggtctcggcgcggaagatggccggcggc

SEQ ID NO: 106251 - DNA, 50 bp, Homo sapiens
caggactccaaaatggcgtcagttgagctacttcctcagccgagcccaga

SEQ ID NO: 106252 - DNA, 82 bp, Homo sapiens
caacgctgccgccgcagcccacacggtggtataagttgaaatccaaaccaggaaagaaggacaaggagcgaggagaaattga

SEQ ID NO: 106253 - DNA, 51 bp, Homo sapiens
ccgtcttcgaactcaggagaaggcaggcattccagaccctccaaacatgtc

SEQ ID NO: 106254 - DNA, 100 bp, Homo sapiens
caattttaatgacatagtgaagcaagggtacgtgaggatccggagcagacgcctcgggtactatactggcaattgctggagaagattttgcaattgttgc

SEQ ID NO: 106255 - DNA, 83 bp, Homo sapiens
gctgctgcccgcgctcgccgcacgagatgagccccgctagggccgccccgcgctgagagcccagccccgccgctgcccgcccg

SEQ ID NO: 106256 - DNA, 74 bp, Homo sapiens
ccagcaacttcctcgagatcgatctatacacagaatgggattttacatatgctggacagaaataagagaatcaa

SEQ ID NO: 106257 - DNA, 133 bp, Homo sapiens
taacgggttcattttgactgaaaaagcgaaggacttttttcaggcagaaaacaagtctcgtctggacgtgattctggacgtgggagcagcctcttagatagaaccattgctgacagacgacagcttaatacaa

SEQ ID NO: 106258 - DNA, 102 bp, Homo sapiens
cacgaagtccatctggaagacggtcctttccctgctgcccccagcaatcatcctcttccagtggtagcgtgtttgggtctggaaacactggaagagggggag

SEQ ID NO: 106259 - DNA, 82 bp, Homo sapiens
cagatttcagtgtcctccttagctctgcagggatgttcacggaacgccagccaccaaagggccaggaagcatccccctgcag

SEQ ID NO: 106260 - DNA, 97 bp, Homo sapiens
cctcaatatgtgccgccagtgtttccgtcagtacgcgaaggatatcggtttcattaagatggatcctgagcttgaaaaaaaactgaaagagaataaa

SEQ ID NO: 106261 - DNA, 98 bp, Homo sapiens
ccgggactcgcacgtggaggtggagcgcggacgcctccctcagccagggcaagactaaggagctgggtctctgaaagaagatgaatttggctgagatt

SEQ ID NO: 106262 - DNA, 83 bp, Homo sapiens
gccccgcccgcctcgcccgccgtgagcgcccggagcggtccgcgagccaccgaggcccagatgtgaagttcatttccaatccg

SEQ ID NO: 106263 - DNA, 74 bp, Homo sapiens
tacagccaagatggtgctgtcccagagacaacgagatgaactaattatatccagatcgagagacagaagattct

SEQ ID NO: 106264 - DNA, 95 bp, Homo sapiens
gaagagaaggggaataagactgcatctgttcatatgaggggctggcaaggtttaattgcttatggatgtcattcacttgtggtagtgattgattc

SEQ ID NO: 106265 - DNA, 100 bp, Homo sapiens
tgtgctcacagcttttgtcagaagtgtattgataaatgagatggtgaccttgctctgtggcccaggctggtctcgaactcctggactcaagcgatcctcc

SEQ ID NO: 106266 - DNA, 50 bp, Homo sapiens
agaaccaggacatcttactttgcggatactctgttttcaaggaagctgaa

SEQ ID NO: 106267 - DNA, 100 bp, Homo sapiens
atgcagagatgctgtggttcggggggtgctcgatgccatggacaatattaccaggcagaaccaattctacgatacccaagtcatcaaacaagaaaacgag

SEQ ID NO: 106268 - DNA, 100 bp, Homo sapiens
gtgattagcttcgcagtctggaaagctttaggagttcacagtgtcaagtcagaagaagtctttgatgagtgggtatcgaaacttcgccaccacagaatgt

SEQ ID NO: 106269 - DNA, 98 bp, Homo sapiens
gacttgattgatatatatgctgacgaggagttcaaccaggacactcaatcacttgtcggaagtccctcaacccgtatagcacctcatattattggagc

SEQ ID NO: 106270 - DNA, 75 bp, Homo sapiens
ggatgatgcggaaattaaccccaagagaacacgtagcgactccgaagatcagccccaatgaacatgtcagtgttg

SEQ ID NO: 106271 - DNA, 100 bp, Homo sapiens
caggagtgtttgacatagacctggaccagccagaggacgcgggctctgaggatgagctggaggaggggacggtctggaaaatcccgaagcagaagcccgt

SEQ ID NO: 106272 - DNA, 100 bp, Homo sapiens
atttatggtcgatcgtcttcctactgtcttgttttttccctgcaacagattgctcttctagacatcgatatatgtgggccatcgattcccaagataatgg

SEQ ID NO: 106273 - DNA, 100 bp, Homo sapiens
caacaaatggaaaaagttctgggtgatactgaaggggtcgtcactgtactggtatagcaatcaaatgttctatatccatttacagtcccaaggagaatcc

SEQ ID NO: 106274 - DNA, 75 bp, Homo sapiens
gaatccctcacgcgggcgcggatcgaccggagcagagagctggcgagcaaggcttgggcactgtttaaaggaaag

SEQ ID NO: 106275 - DNA, 90 bp, Homo sapiens
aaagctcatcgtggagcttgagaaaaagtgtggggaaggcaccttggcattgctcaagattttctaccctagcaaggatggtacgaagat

SEQ ID NO: 106276 - DNA, 75 bp, Homo sapiens
acttcctcaaggactacagtatgcacttaatgtccctatctatgccctcaacagagtcatgacagaactggagca

SEQ ID NO: 106277 - DNA, 100 bp, Homo sapiens
gtgtcccctgtggcctcggttccctggagaagccacagcttctgcaaagacaggaggagtgggccctttgtgggattttgcttatgtagcaagagataaa

SEQ ID NO: 106278 - DNA, 95 bp, Homo sapiens
cgaagtcagttccttgtggagccggagctgggcgcggattcgccgaggcaccgaggcactcagaggagcgtttagtgggctacagatggcatggc

SEQ ID NO: 106279 - DNA, 100 bp, Homo sapiens
gccgactggcactctgtagagcagacggaattcccttctgagaggtccaaggatcttataaaggaagctatccttgacaatgactttatgaagaacttgg

SEQ ID NO: 106280 - DNA, 90 bp, Homo sapiens
gcttcggcacaagggcccaactggaattccacttacggtcatccgtccttggctcaggatttggagagcttgcaccaccaaaaatggcaa

SEQ ID NO: 106281 - DNA, 100 bp, Homo sapiens
accagctacagcgtggggttgtggtcctggccaagagctacaatgagcagcgcatcagacagaacgtgcaggtgattggatgtgtccagttaataaagga

SEQ ID NO: 106282 - DNA, 100 bp, Homo sapiens
cccgtgtcctgcaggtattgggagatccacagctaagacaccgggacctcctggaagccaaaaatggcagctatttttgctatgataatcctgctgccct

SEQ ID NO: 106283 - DNA, 133 bp, Homo sapiens
atctgcacaaagggtggggacatcaactttgtcttcactgggttctctgtgaatggcaaggtattctctactgccgctgatggtcaaacgcaagtggaaattaaagtgtgtcagggtgaaagagagatggctg

SEQ ID NO: 106284 - DNA, 98 bp, Homo sapiens
cgtcttctaccgtccctacctgcagatcttcgggcagattccccaggaggacatggacggaatagccaggtctggctgggtcggcacaacctgtttga

SEQ ID NO: 106285 - DNA, 75 bp, Homo sapiens
tttgccgtcctgggcctcggggactcctcatacgccaagcaggggacacggtgggcgtggtacggcgggaggacg

SEQ ID NO: 106286 - DNA, 90 bp, Homo sapiens
ggcagcggcaggctcaggtgcagccgctgttgactaatctccttcagaatcaagcagtgaaaggaaaagttgctggagcactcctgagag

SEQ ID NO: 106287 - DNA, 100 bp, Homo sapiens
tccggcccggtttccctcggcgtgctactgtgcgctcgatccagcaccatggggaagcgggacaatcgggtggtgaatgaaaactttgccattgatttga

SEQ ID NO: 106288 - DNA, 100 bp, Homo sapiens
tatcgagcctgtgtggaaagaagtcattcaagaactggaagaattggtgaaagccctgtgtaaggaatgtgtagtagaacgttgtcgcatattgcgtctg

SEQ ID NO: 106289 - DNA, 83 bp, Homo sapiens
gttccatccggcgctcagctgggcttgaggtgcttgaggaatccaaagccctcgtgcgctgcaacatgaagatggagctggag

SEQ ID NO: 106290 - DNA, 100 bp, Homo sapiens
aagcggatggtggttcctgctgccctcaaggtcgtgcgtctgaagcctacaagaaaggcgccaagcccatctttgtgtgcttgcatccaactgtgatgag

SEQ ID NO: 106291 - DNA, 74 bp, Homo sapiens
gctgatagactccttccagaataactcaaagtaacaaatgtggcaattattttggatctatcacctgtcatcat

SEQ ID NO: 106292 - DNA, 60 bp, Homo sapiens
agttcatctacccggagaagcaggagccctactcggcagtgaccgaaggaagagaccaag

SEQ ID NO: 106293 - DNA, 95 bp, Homo sapiens
agaatcctccaaaaccagtcatgaccactagacccacagctgttaaagcaacaggaagcagtgtggttcctctccaacatcactgcaggaaatca

SEQ ID NO: 106294 - DNA, 75 bp, Homo sapiens
aagtctcccttaaaatgcaccctccttccacctggccaggaatcaggaactgtggctgcaccatctgtcttcatc

SEQ ID NO: 106295 - DNA, 75 bp, Homo sapiens
ccctgaaccccaaggccaaccgcgagaagatgacccagaaactcaggagtggctggaggagacggactcggaaga

SEQ ID NO: 106296 - DNA, 103 bp, Homo sapiens
cccctccagccttcgagtcgttcttgctcttcgagggcgagaaatgatgccagaagtccggggagccttgtttggtgcaaatgccaacaggaagtttttggac

SEQ ID NO: 106297 - DNA, 136 bp, Homo sapiens
ttggaacgtctttcccagttggactcttgtgttcatcctgttctagcatttccagatggcccggtacaagcagagccttgacccaactgtggatgaagtcaagaagctctgcacgtccttacgtcgcaacgccaag

SEQ ID NO: 106298 - DNA, 74 bp, Homo sapiens
atattatgaagttataaggttccccatggataccccatcagcctgagtctcttaaaggcctttatacacatatg

SEQ ID NO: 106299 - DNA, 88 bp, Homo sapiens
ctagcagaaaatcaaaacgctgattaaaagaagcacggactcgctgattcttgagaagagtcaaaactggagctctcaaaaaatggac

SEQ ID NO: 106300 - DNA, 98 bp, Homo sapiens
tgtcagtgttttctaccatccctgagcacacaaaattggcctcaagttgcctcttgatcctggatgacagtgatgggattccgtggtcagaagaacgg

SEQ ID NO: 106301 - DNA, 75 bp, Homo sapiens
gtcgtctcggtagcagccttcgccacgccggggtcttcagtgtaatgtgtacaattctggccaacggcggaagct

SEQ ID NO: 106302 - DNA, 100 bp, Homo sapiens
ccttttgggaccatgcgcggaggaggctttggggaccgggaccgggatcgtgaccgtggagggctggaggaagtacccctggaggtgctgaggcagaggg

SEQ ID NO: 106303 - DNA, 83 bp, Homo sapiens
tctcctggtagacctcggtccaaacagggccaaatccttgtagctgtcttcttgccccggtcagtgccagccgtactattcac

SEQ ID NO: 106304 - DNA, 98 bp, Homo sapiens
caaggaaggcttcgagaagattagcaaaggtgctaatccagtggaaatcaggagaggtgacatgtacagccatgatgggaatactgatgagccagaat

SEQ ID NO: 106305 - DNA, 80 bp, Homo sapiens
agggccccttagcctctgggtttgcgctagcagcgtaagatgcttcaggactgccccaaggcccgcagggaggtggagct

SEQ ID NO: 106306 - DNA, 100 bp, Homo sapiens
cagtttacctgactctagggacagagaagatcagctgcagacaactgaggaatcctttgcaaagcaattcacagaagctgtgagtccttcagtgctaccc

SEQ ID NO: 106307 - DNA, 100 bp, Homo sapiens
ataccactataagagagtggagagtccagcgatctataactacaatgcttctcaagatgtggagctctccttgcagatcggtgacacagttcacatcctg

SEQ ID NO: 106308 - DNA, 100 bp, Homo sapiens
gagttcgtctcttacgtctgcggaagtgcagctgcctcagttcttagcgcagcatcagacaacagtcagcgctttcgagaaacctgttttgcatttgcct

SEQ ID NO: 106309 - DNA, 82 bp, Homo sapiens
cagaaccgtcccaaaatatggcaaagaaacctattctgagatccccagagccgtgtctgtctaggccgggcacagagccagg

SEQ ID NO: 106310 - DNA, 101 bp, Homo sapiens
ggccggccggccatggaggctgatggggccggcgagcagatgagaccgctactcacccgggtaacgagcagggacaggaagataatatgacctcagtaaca

SEQ ID NO: 106311 - DNA, 75 bp, Homo sapiens
agagagcactcctggacaaggatctgcaaattgaagtgcagttaagcatgattgggacagaatgatagaagctgt

SEQ ID NO: 106312 - DNA, 74 bp, Homo sapiens
cttaccttaacatgttcttgaagtaccatggcgtggattaaaagccggatcgagctgggagatgtgacaccaca

SEQ ID NO: 106313 - DNA, 100 bp, Homo sapiens
ctactttgacgccctggtgaagatgggggagctggccagcgagagccagggctccaaagaactcgttcctgggcttcccgatggactcgagtttttacta

SEQ ID NO: 106314 - DNA, 83 bp, Homo sapiens
gagaatgggaattctcttcactagaatatggagactgttcaatcaccagggatgctccaggatgaaacgccataggcctgtca

SEQ ID NO: 106315 - DNA, 119 bp, Homo sapiens
ctgtcccatggaaatgctcaagattcagctgcaggatgctggacgcctggaatgtcaaaactggaccaatggggccaggctgaagtattgaactttctgctacgctaccaaccccgcag

SEQ ID NO: 106316 - DNA, 100 bp, Homo sapiens
ctccaggagttcgtctcttacgtctgcggaagtgcagctgcctcagttcttagcgcagccattaacaggccagatatcacagacacggaaatggaaactg

SEQ ID NO: 106317 - DNA, 74 bp, Homo sapiens
tctacctgtcctccttcgtgggcggcctctcggtcctgtaccacgccagcccttcccaccccatgaattcttca

SEQ ID NO: 106318 - DNA, 50 bp, Homo sapiens
ccgggagctattgggacctgcggggggcagtacccaaaggaaacgctacg

SEQ ID NO: 106319 - DNA, 96 bp, Homo sapiens
aatatgctgtgggagaagagtgtgacttcgaggttatcaatactctggctgaccatcatcatcgtgggactgactttggtggaagtccttggttac

SEQ ID NO: 106320 - DNA, 83 bp, Homo sapiens
acaaagatcctgcccttgtggaccttatgtgccagagattgttttacaaggacatgctacaagagtaactgctaaatctcaac

SEQ ID NO: 106321 - DNA, 100 bp, Homo sapiens
gatgacaccggagtttgacgaagaggtggtttttgagcctcctgacaaggtgatccgggcgggccccgcaggaattttatcccctcaccggcctcacact

SEQ ID NO: 106322 - DNA, 83 bp, Homo sapiens
ctttcacaataagagcagaggatggaacacttcagtgcattcaagaaaaattggaagctccaccacccaccccaggacagctg

SEQ ID NO: 106323 - DNA, 83 bp, Homo sapiens
ggcgacgctaagttgctgatcgtggcgagatgccctgtatccaagcccaatatgggacaccagcaccgagtccgggaccccgt

SEQ ID NO: 106324 - DNA, 75 bp, Homo sapiens
gctgggcacccacggagcctccggggctggagccaaaaacctgtatatcatctccgtgaaggggatcaagggacg

SEQ ID NO: 106325 - DNA, 100 bp, Homo sapiens
cgcctgcgacacggtgcgcgtcaaggccctcttcgccatctcctagctagcaacatggaccacagatatactggtgactccgctctcctctggccaagct

SEQ ID NO: 106326 - DNA, 82 bp, Homo sapiens
aacgaattcagtgatatcattaagtccagatctgataccatgtttgtgtggaagtgccccgtgtttgctatgccgatgctgt

SEQ ID NO: 106327 - DNA, 82 bp, Homo sapiens
ttgtacccagagtgcagagccgcctttccagcatgcaggggctgctcaggtgagaagccctaccactgcaactgggacggct

SEQ ID NO: 106328 - DNA, 75 bp, Homo sapiens
ctttaacagaactcaacaaatgctgtggcctttgtgtctgcccatgtaataggatgaagaggaagccggcttatt

SEQ ID NO: 106329 - DNA, 100 bp, Homo sapiens
gaggagcagcatggcatttcagtcactggtttgcagagtccaggccagttggacaaatgcgagtaaaaagcaacgtgaaaagctacttgagctgatacgt

SEQ ID NO: 106330 - DNA, 90 bp, Homo sapiens
gaaaagctgagaaagtttcgttttcgcaaagaaacgaacaacgctgctattataacatgatctatgttttggtgagctcttagaacaaca

SEQ ID NO: 106331 - DNA, 90 bp, Homo sapiens
gaaagatttgggcttgaagacccagaagatgacatatgcaagtgtgatgaatgcagactctgctaccattttggctgtttggatcctcct

SEQ ID NO: 106332 - DNA, 82 bp, Homo sapiens
gcaaccccagatccatttacactttacattgacattcgtgaaattaaggagatccgcccagggaagacctcacgggactttg

SEQ ID NO: 106333 - DNA, 100 bp, Homo sapiens
gctcaatgctgcagagacctgggttgatatatcttccaacactgccgggaagaatgtgacagtgatgataacatgggtgccaaaaatacttcaataggag

SEQ ID NO: 106334 - DNA, 50 bp, Homo sapiens
gaggacacttctctgtcgtcacagttagtgtcagcaaagaagccttaaac

SEQ ID NO: 106335 - DNA, 100 bp, Homo sapiens
gcaaaagtcactatcaagaaggaagatctggagctaatagtctccttccgctaccactgccagctgtactccgagtggagaaagaccaaccagaaagttc

SEQ ID NO: 106336 - DNA, 98 bp, Homo sapiens
ctccagccacagggcccgtgtggtgctgagctgggccgactacctcagaagagtggctcccacagggcagagcggcttgggtaaatccaccttaatca

SEQ ID NO: 106337 - DNA, 75 bp, Homo sapiens
aaggggctaaagagagcagcatctgccatatacaggatcgaggccatcaagctacagatggtcttacaaatggaa

SEQ ID NO: 106338 - DNA, 101 bp, Homo sapiens
gtggaggagatgaaggcagtggacacacagcatggagaaatccttcgcaatgtcaccatcctacgaggggaggagaaccagccaggctggctatgcccgga

SEQ ID NO: 106339 - DNA, 51 bp, Homo sapiens
agggacggacacgcggacgtctagcggagtaataaaagactagtggcctta

SEQ ID NO: 106340 - DNA, 100 bp, Homo sapiens
gtgagcgtgaggtgtgggtgttcgtttctcaggttacacatttggatatgactattcgtgagcacagaggagaaatggaacaaaaaataattaaattaga

SEQ ID NO: 106341 - DNA, 97 bp, Homo sapiens
gtccgggcctggagttcagtgggtgcagcctgcttgcgagctgaggccagacaggggggcgcctacggacggccctgtgtctaggtcgtttgggaaa

SEQ ID NO: 106342 - DNA, 83 bp, Homo sapiens
gaccagatgaacggagtggccggaggtcagcccaaggccaaccccactgtcactctgttcccgccctcctctgaggagctcca

SEQ ID NO: 106343 - DNA, 99 bp, Homo sapiens
ggcgggaggcggaggcgagggtgcgatggcgcggagcccgggacgcgcgtacgccctgctgcttctcctgatcttaatatttgccagtgatgcctgcaa

SEQ ID NO: 106344 - DNA, 100 bp, Homo sapiens
gttttgagaagccttccgctattcagcagagagctattattccctgtattaaagtgagggtcgctgtctgcccattgatagaggccagattgtcttggaa

SEQ ID NO: 106345 - DNA, 136 bp, Homo sapiens
cggtgacctggaccacggcgcagacgcgggcgagctgcggctcggacgccagcggacacgcgggcgagtaagactttgaccccgacgcaggcttcagtgattgccgcggatcagaagcctgagcactttggctcga

SEQ ID NO: 106346 - DNA, 80 bp, Homo sapiens
gcaacttcgcggtggtcaagcgggccacgcacctcgtcaccaaggccaaggtcactgcagccagaggggtccagaagaga

SEQ ID NO: 106347 - DNA, 100 bp, Homo sapiens
gccggctacagcgggaagagcggtgagcacctgcggatctgtccccagggctacacctgctgcaccagcgagatggaggagaacctggccaaccgcagcc

SEQ ID NO: 106348 - DNA, 74 bp, Homo sapiens
ccgctttggcgccaaatcctgagatatgtgtcacaaagatgtctacacggaactgccagggaatggactcagtg

SEQ ID NO: 106349 - DNA, 100 bp, Homo sapiens
ccttgatgaacagctcaaggtctttgtgtcccgacactctgccaccttctccagcattgtgaaaggttttgacaacttcgagcagctgctctcgggggct

SEQ ID NO: 106350 - DNA, 75 bp, Homo sapiens
cctggatctgtatgctttgagcaagaaattggagatattgctggtgttgctgatgttacaatcagacagtcctat

SEQ ID NO: 106351 - DNA, 100 bp, Homo sapiens
gaccctcgtcaatctctttcgaagccattcagtcctcaatctccttttccttggctacccgtaccgttttgcagagattcgctaccatcgccctgaggag

SEQ ID NO: 106352 - DNA, 101 bp, Homo sapiens
gggattcgtggtgaaggtccggggcttgccctggtcttgctcggccgatgaagtgcagaggtttttttctgagagctgacgccactggaggaggcctccct

SEQ ID NO: 106353 - DNA, 90 bp, Homo sapiens
caagcgccttctcattcagaagaactgcctcctcttgctcagtcgggtcacaaatcttcgaagagtgacatatgttgttttagatgaagc

SEQ ID NO: 106354 - DNA, 100 bp, Homo sapiens
acgctaattagactcatgccacttgagctgagatctgtatctgtggacctgaatgttgatccctcgcttcagattgacatacctgatgcgctcagtgaga

SEQ ID NO: 106355 - DNA, 100 bp, Homo sapiens
tgatcctcagcgtcgtgcccgagaagctaaacaaccagctcctgagcctcccaaaccttacaggaatcagagatcattgatttcttcctgggggcctctc

SEQ ID NO: 106356 - DNA, 76 bp, Homo sapiens
gacccaccacaagatgttgtttgcattgacttggatacgaacatgttatatgtgctcagtttatgaacctcttaaa

SEQ ID NO: 106357 - DNA, 90 bp, Homo sapiens
tcggcttccgcggggcgctgggccgccagcctcggcaccgtcctttcctttctccctcgcgttaggatgcgtattggatagcaatgaata

SEQ ID NO: 106358 - DNA, 50 bp, Homo sapiens
ccctgatggcctcagaggaggagatcatgtttgagaccttcaacacccca

SEQ ID NO: 106359 - DNA, 83 bp, Homo sapiens
tggaaagtcagcatgattttcgaaccccggagtttaacactcctatgccaccttcaccagctgtacaagtgcagggccagcct

SEQ ID NO: 106360 - DNA, 100 bp, Homo sapiens
gtgatgttggagaattacagcaacctggtttcaatggcattttgtgaccgacttattcttagatcattggttttccaaaggctttgtggccatgaagccc

SEQ ID NO: 106361 - DNA, 75 bp, Homo sapiens
cgcctccctccagctgcgagtgcggcctcggctggcggcggcaccagggaaaggtggcccagacagcgtgtatgt

SEQ ID NO: 106362 - DNA, 98 bp, Homo sapiens
accaggatgctgccttcttcaagagcatagcggcctgaccacaggggtggccttcgggcatcacgccaagttcatcgcttcaacaggcatggacagaa

SEQ ID NO: 106363 - DNA, 75 bp, Homo sapiens
gtgtatgttcacttacgcctctcaaggagggaccaatgaggtgaactgtcacccctacaactcagcttgcaacca

SEQ ID NO: 106364 - DNA, 100 bp, Homo sapiens
tcctattccactggattgggaaagaccatggcaggttctaggtcccaattctactgcaaatagtatcatggcatcttatcagcaacagaagacttcggtt

SEQ ID NO: 106365 - DNA, 97 bp, Homo sapiens
aggggcttagaaattaacaggatcttgtagaaaatttcagctgtagcccttggactagaagctgaaataacagaagctgtgtacgatgcattagggt

SEQ ID NO: 106366 - DNA, 101 bp, Homo sapiens
gcagagcgggacgtgagcctgagtttgctgcaggcgtgctctgtgtggtggctgggaatcaagagagacccggccaaggcttttgtgcccaggactgttat

SEQ ID NO: 106367 - DNA, 75 bp, Homo sapiens
gtctatatatttccccattcactggcaccagaatttcctgagtttgccactaaagtccaggaagctatcaattcc

SEQ ID NO: 106368 - DNA, 108 bp, Homo sapiens
gctgccgccatacgcgctctccctgtttaggccaaacgtaccaagaaagtcgggatcgtcggtaaatacgggacccgctatggggcctccctccggaaaatggtgaag

SEQ ID NO: 106369 - DNA, 83 bp, Homo sapiens
cgctgagcctgcagccggccctgccgttctccaaggagaagtacatcctggactcatcgccagagaaactccacaaggaattg

SEQ ID NO: 106370 - DNA, 50 bp, Homo sapiens
ctggacagttggaaagacctaaagggtatttgaagtataccatacaactg

SEQ ID NO: 106371 - DNA, 74 bp, Homo sapiens
cagtggtcgcttcttctccttgctctagccaagagcttagaagatgctctgaggcaaactgcaagtgtcactct

SEQ ID NO: 106372 - DNA, 100 bp, Homo sapiens
ctggagaccattggatgatgcattagattcctctagtattctctatgctagaaaggaaactgttaaggcagcaataatagaagagcagaaacgaagtgaa

SEQ ID NO: 106373 - DNA, 100 bp, Homo sapiens
tgtcccagatatagccgttggtacaaagaaaaagcttgtggtgaaggggggcaaaaaaaagaagcaagttctgaagttcactcttgattgcacccaccct

SEQ ID NO: 106374 - DNA, 83 bp, Homo sapiens
ctggctcccatcacctacccgcagggcctggcactggccaaggagattggcttgatggtgtcaggctatgctgtgactggggc

SEQ ID NO: 106375 - DNA, 82 bp, Homo sapiens
gaggacatggacctgtacagcatcaactacctgcactttggggagcctaagtcctgacctgcctagagctggaacgttacct

SEQ ID NO: 106376 - DNA, 78 bp, Homo sapiens
gaaatacatccaggaaagacatggagattctcttaaaaagctgagatctgtatctgtggacctgaatgttgatccctc

SEQ ID NO: 106377 - DNA, 74 bp, Homo sapiens
atttttggatcctgagaattgatctatgttggatcactgacgaagaatttgatgaactatgttttgaatttggt

SEQ ID NO: 106378 - DNA, 74 bp, Homo sapiens
gcaagaacagtacagtattaccttgtcggatggcagttcctgatctatgtggagccagcaccgctctttgacct

SEQ ID NO: 106379 - DNA, 115 bp, Homo sapiens
ctcggtgtcggcagaggagaccgaaaagtggatggaggaggcgatgcacatgcacacgacggttctgccctttatattaatcgagatgaggacatcgcaccatcagtatcccagc

SEQ ID NO: 106380 - DNA, 113 bp, Homo sapiens
taacaaatgtgatgacaagaaggagagatctctgctgcctgcattgaggggtgtgtgtggctgctgtggtgccctacgccccaggtacaaaaggctggttgacaacatcttcc

SEQ ID NO: 106381 - DNA, 83 bp, Homo sapiens
cttagctgtgctcgcgctactctctctttctggcctggaggctatccagcgctggcctgccactcctcctgctatgatgcctg

SEQ ID NO: 106382 - DNA, 124 bp, Homo sapiens
ccatgccgctcctaagcctgcacagccgcggcggcagcagcagtgagagacatgcaagaaagcacttcagccaagcagaagggagccagctggacgaggtgcgccaggccatgggcatgctggc

SEQ ID NO: 106383 - DNA, 75 bp, Homo sapiens
ctatgaataccgcttcctggagttcacgactctgagtgctgaaataaactatcaatcttgcccagactggagaaa

SEQ ID NO: 106384 - DNA, 75 bp, Homo sapiens
ctgattcctgggagcacatccatttcattggcaagcctcctgacaaggtgatccgggcgggccccgcaggaattt

SEQ ID NO: 106385 - DNA, 51 bp, Homo sapiens
cggggggaaaatggagcccttcaccaatggcctcatgcattgtgcgtcagc

SEQ ID NO: 106386 - DNA, 51 bp, Homo sapiens
ctgccgtgtggacccgtaaaataaaatggcaggaggatgcattagcacaac

SEQ ID NO: 106387 - DNA, 114 bp, Homo sapiens
ctcccagagccttgagatagaactccagtcccatctcagcatgagagattcccaagagtgcatcctaacggagacagaggctcgctacacggccttgctgacccagatccagag

SEQ ID NO: 106388 - DNA, 74 bp, Homo sapiens
gtttagcttcaaaaatgacaagttcgataaaagtgtgcagaccaagccttaccaataattctaggatcgtagga

SEQ ID NO: 106389 - DNA, 101 bp, Homo sapiens
tattattcagttgaaacagttacactgcttgtagctcttaagtggccaatccgccatggtatagttgaagattgggacttaatggaaaggtttatggagca

SEQ ID NO: 106390 - DNA, 100 bp, Homo sapiens
tttgaaattagagacgcagacaggacaatcatgaggaagactattttctgtatgtggcctacagtgatgagagtgtctatgggaaatgagtggttggaag

SEQ ID NO: 106391 - DNA, 75 bp, Homo sapiens
cttgatggttgtgcttctttgctgagggacattttgagaaatgaagattcagcgagtaaccagctcataaatcac

SEQ ID NO: 106392 - DNA, 100 bp, Homo sapiens
cgtgtttggggttgttgtggatgaggccattcagaaaggaaccagtgtctcccagaagggctgaagaagatgcagagcagcctgaagctggtggactgta

SEQ ID NO: 106393 - DNA, 82 bp, Homo sapiens
ccgcgcgcagggcctgcagcgggagctggacggcgagcgcgagcggcgcgagaaagtgacgcggcgcacggcgcggatggtg

SEQ ID NO: 106394 - DNA, 83 bp, Homo sapiens
ctttctgatttcagagactctccgcaacagaaccatctcaagagccctgtaatggccggactgcccttcacctcgcagtggac

SEQ ID NO: 106395 - DNA, 75 bp, Homo sapiens
gcagaatctgtcacagagggagatgtcaggtgggagaaagtgcgccgcgtggctcctcgtttctccatccctccc

SEQ ID NO: 106396 - DNA, 100 bp, Homo sapiens
aggattcaggccaaactggtaaatgacgaaggggcttcttccagagccaaggaggaagggttgtccggattccattggccgtgacatccccaaaatgctt

SEQ ID NO: 106397 - DNA, 100 bp, Homo sapiens
tgaagcaggccttgggggtcacgtccaggcgatagatgatgaggaagatcgcttccatggtgtgcgcctgcagacttcgcccccaatggaacccctgaac

SEQ ID NO: 106398 - DNA, 100 bp, Homo sapiens
gaaccagcacttctgggacgcacagagaccgtgaagattccaagttcaggagaactcgaccgatgccacagggcccagtgggctccgggtcctgccccag

SEQ ID NO: 106399 - DNA, 90 bp, Homo sapiens
aacacactcagcatcactaaagggcaccagctgagagacagaatttttggaagaacttaggaaagaaactaagaaaagacaacagcacac

SEQ ID NO: 106400 - DNA, 90 bp, Homo sapiens
ctgtcgagcagcggacgccggtctctgttccgcaggatggctgacaacagccctgattccaaaatctgcttctacgatgttgaaatggac

SEQ ID NO: 106401 - DNA, 98 bp, Homo sapiens
ccaaggaggacgagggccggttgccgggcgcgggcgagaaaggcccgatacttctccccacaagctcgccgtcgattccacgctgcccttgcttcttg

SEQ ID NO: 106402 - DNA, 51 bp, Homo sapiens
tctttccatcagtctcaacatagaaaccaccgctgaaacttcacttctaca

SEQ ID NO: 106403 - DNA, 82 bp, Homo sapiens
gatgagtcatgtggcagtggaaaatgcgctcgggctggaccagcaggtccggcctctttggcctacccccgttggctccgct

SEQ ID NO: 106404 - DNA, 82 bp, Homo sapiens
aaattaatcaaacttgatctccatggaaatcaggttgatggaaatcacaatcttctgacaaagctttctctggaagaggaaa

SEQ ID NO: 106405 - DNA, 98 bp, Homo sapiens
ctggactgaaacgatcctctcatctcagcctccaaaagtgctggcattacagatctggaaacagttgccacatctaaaggcagtcgtgatatataaag

SEQ ID NO: 106406 - DNA, 51 bp, Homo sapiens
agtggccctgacggaggggaggaagtgaatgaaaactttgccattgatttg

SEQ ID NO: 106407 - DNA, 83 bp, Homo sapiens
agctgggattggagattccacccaaacttgctggtcactgggagattgacgtgagtgaattcagatataactcaagcttgtta

SEQ ID NO: 106408 - DNA, 75 bp, Homo sapiens
aaacagatatacagatgtggagaagaaagttactgtggcccatgtcctaaaaactggatatgttacaaaaataac

SEQ ID NO: 106409 - DNA, 90 bp, Homo sapiens
ctgttctggctgctccagccccaggaaggacccaggacacccggaagccggaaatggtgtcttgtctgtataccctgggctacccgccag

SEQ ID NO: 106410 - DNA, 50 bp, Homo sapiens
gacatccgaggtgcctttctccaaaaggcagcttggatcttaaaagcaag

SEQ ID NO: 106411 - DNA, 98 bp, Homo sapiens
caatcaaggcaccaagacgcaggggggatatccacagttcgatcaagaaccaatttagaacttgaattgattcatcgaggaggcaatttgtgttcagg

SEQ ID NO: 106412 - DNA, 80 bp, Homo sapiens
aggtggtcttgaaggacactgggatcctgtaacacagatgaggaaactgagacccagaaaggtggaagcacttgtctaag

SEQ ID NO: 106413 - DNA, 83 bp, Homo sapiens
ccgtgccctggggctgagccctcagggatttcatgcatcaccctgacagccagtggaagttgcctgatttgaagaggcccagg

SEQ ID NO: 106414 - DNA, 100 bp, Homo sapiens
tgccagcaaagagaagggaagaagatctgtatttgcaactatggatttgtagggaacgggaggactcagtgtgttggagtctatggtgatgtacatcgag

SEQ ID NO: 106415 - DNA, 50 bp, Homo sapiens
ggaatcttggccaaaatcgtgcttacaacaggttgatgaacatagtaaac

SEQ ID NO: 106416 - DNA, 50 bp, Homo sapiens
cgagcgcctcgacctcggtctgaggggtgagcccctccagactccgaata

SEQ ID NO: 106417 - DNA, 96 bp, Homo sapiens
caagtattgtccttacaaaagaatttggatgccacagtcaccgcacttaaagaacagatcatatctgaagatattagtgagctacaaaagaatcaa

SEQ ID NO: 106418 - DNA, 102 bp, Homo sapiens
agctgcgagccgaccatgtcttcatttgcttccacaagaaccgcgaggacagagatgccatggacaatattaccaggcagaaccaattctacgatacccaag

SEQ ID NO: 106419 - DNA, 51 bp, Homo sapiens
cattatccggctcaccaaagggctgaactccagtgcacccagttagacttg

SEQ ID NO: 106420 - DNA, 48 bp, Homo sapiens
tcctggaagctaaagagctcttcagcaccaaggatgacattgatcttg

SEQ ID NO: 106421 - DNA, 75 bp, Homo sapiens
tatcagtgagctgaatggaaaaaacattgaagacgtcattgcccaggctgggagtgtccactcgccttccaccag

SEQ ID NO: 106422 - DNA, 89 bp, Homo sapiens
gttagcagaaccatccaccaacataagtttcccattggtcactgtacacttggaaaagtgtggtcactcacctgtctaccactcccgtg

SEQ ID NO: 106423 - DNA, 83 bp, Homo sapiens
ctctttgcaacatttcaggaaaacagagaaagaagtgataggagggctctgtaggtgaaaggtgtagcagtcactcggcctac

SEQ ID NO: 106424 - DNA, 100 bp, Homo sapiens
cctgaagatccaacccagtgctttctgctttttgccaaccaggtctgaaggagaaatgcgtcgacagcctggtgttcgagacgctgatccccaagccgat

SEQ ID NO: 106425 - DNA, 100 bp, Homo sapiens
tctggctgcgcggcctgcgcgcgcctcccgggcggattccagccccgagcgggacagcgcggcggggagcgacgaggtctcactctgccacccaggctgg

SEQ ID NO: 106426 - DNA, 76 bp, Homo sapiens
acaaagactctgtgtggcacggatgtggggaagtcctaaaagccaaaaacctcaaatatttgttgttaagtgatct

SEQ ID NO: 106427 - DNA, 83 bp, Homo sapiens
ccatctcattgccacggctgaaccctccttctcaatcttggaacagcacccccttctttaagcgccatgcttcttctagcgat

SEQ ID NO: 106428 - DNA, 98 bp, Homo sapiens
gccaagatgtctgacatggaggatgatttcatgtgcgatgatgaggaggactacgacctggcacgtctgagaatggtggatgtggtggagaaagaaga

SEQ ID NO: 106429 - DNA, 83 bp, Homo sapiens
gtctggagtgcgtgggggaccggctgttggcggaattcagaaggagctggcggacatcactttagaccctccacctaattgca

SEQ ID NO: 106430 - DNA, 100 bp, Homo sapiens
tttaaagatatcagcctgtctgactacaaaggaaaatatgcccaggttaccaacaatcctgaaaatgatggatgtataaatgcagtcttactggtttgac

SEQ ID NO: 106431 - DNA, 87 bp, Homo sapiens
cgggacgctgcacctcccgcgccgcacggtggacgagggccatgaagcccccaggaggagaatcgagcaatctttttggaagtccag

SEQ ID NO: 106432 - DNA, 100 bp, Homo sapiens
gcacatgccgtcggccatgactgtgtatgctctggtggtggtgtcttacttcctcatcaccggagatgatgaccactggatcgtcgacacagactacgac

SEQ ID NO: 106433 - DNA, 90 bp, Homo sapiens
tgctagttcctcatccatgaaaattccccttaacaatatcataatgaagacctggaaaaagacaaaacatcacaaaactgcctaggaaga

SEQ ID NO: 106434 - DNA, 83 bp, Homo sapiens
ctgaccaggaacctgggcgagcagcggcgggggcccgagggagtcctgtgtatggaaactcacatgagtcagctcagtctaga

SEQ ID NO: 106435 - DNA, 73 bp, Homo sapiens
tattcctgtccggagacagcctaaggataatgtacaacggccagccaattaccaaaatggcctgtggggctga

SEQ ID NO: 106436 - DNA, 101 bp, Homo sapiens
agtagttcaggaggggagtctgatattgaagaggaagaactgaccagagctgatcccgagcagcgtcatgtacccctgggcctttatcatctgctggactc

SEQ ID NO: 106437 - DNA, 100 bp, Homo sapiens
cacttctgatgacacctttattttaaaagctgatgttccaagatattgaaatggattccaggcgtgtgcctcgagacaagctggcctgcatcaccaagtg

SEQ ID NO: 106438 - DNA, 100 bp, Homo sapiens
agcaagcatgcagcttactgcttgaaaggaagcgggagaacagcctccaggaagacagaggcagcttcgttaccacccccactgcggagctgtccagcca

SEQ ID NO: 106439 - DNA, 100 bp, Homo sapiens
ggagcacctgctgagcccagccaggaaggatctgagtctctccctgcggagacagccctgaagaactcctgtaacgtcaagctggcaatttccaagaagc

SEQ ID NO: 106440 - DNA, 152 bp, Homo sapiens
cccgaaccctgaagagaacatgaagcagcaggattcacccaaggagagaagtccccagagcccaggaggcaacatctcatccctctctacctgccaacatcctgtattagagaacttgtggccggaggtgtggctgtggagagctggccggg

SEQ ID NO: 106441 - DNA, 100 bp, Homo sapiens
gtgctctgagggagggtccgagccagccgctgttttgccggaggagcccctcaggccgcatcaacgcacagagaacattaaagaaaggtctctacagtcc

SEQ ID NO: 106442 - DNA, 97 bp, Homo sapiens
gtcactgggggcaccattaacatgatggagtacctgttgcagggacagagcgggatgccaccagcttgtccaaagggaagttccaggagctcctggt

SEQ ID NO: 106443 - DNA, 83 bp, Homo sapiens
tatctgcgcaccttggagtccaagcttgtgctctttgcaggtggcctgacggagcaagagctgatggaacagctggaacactg

SEQ ID NO: 106444 - DNA, 98 bp, Homo sapiens
tggggactgtcactactgccacaggctcacgaggcccagggaatcctctggaccatcagattaccaatgaaagaggagaatcaagctgtgataggtta

SEQ ID NO: 106445 - DNA, 100 bp, Homo sapiens
gcccgagcgctcgccgcgcccggctgccggaaatctactttcttcaatgtgttaaccaatagtcaggcttcagcagaaaacttcccgttctgcactattg

SEQ ID NO: 106446 - DNA, 99 bp, Homo sapiens
cggtggccgtggtgcgggctctgcagcgagcgctcgatggaacctcatcccaggtatgactggtatcaaacagaatctcaagtagtcattacacttatg

SEQ ID NO: 106447 - DNA, 100 bp, Homo sapiens
ctgggctgcatctttgctgagatgtggctgtcgctgggcgcggactccaacgggagcggcgtctctgtgctgctggagctggcacgcctcttctcccggc

SEQ ID NO: 106448 - DNA, 74 bp, Homo sapiens
ctcagggccccacctttggaataaaagcaaaccagtccagctacgggggcccagccagccagcagctgagtggg

SEQ ID NO: 106449 - DNA, 76 bp, Homo sapiens
tacatctctgtaatccagagtatcatattcaaagctgcagtattgaagtatgagaacaatgttatgaatatcaggc

SEQ ID NO: 106450 - DNA, 82 bp, Homo sapiens
atataaagacagggatatgagtgaagaaaacacagagccaccctggaaaggagtcagagtcagaagcaaaggtagatggaga

SEQ ID NO: 106451 - DNA, 98 bp, Homo sapiens
aagaaactgaggcctggaatttgattaactcattcaaggttacccagttgatgaagatcgactttctagaagaaaaagcattgtggacaccgtatcca

SEQ ID NO: 106452 - DNA, 100 bp, Homo sapiens
ccaagaggcatactgactccattgacagaaggttttgttttgacatagaagctgctgatcgaccactcggccctgagtgcggcgaggaccctgtttgtgg

SEQ ID NO: 106453 - DNA, 82 bp, Homo sapiens
ccaagaacagcgagcaggcgcgcagccacctggagaaggcggctgttcggctcttgaatcccagcgatgaaaccaggaactc

SEQ ID NO: 106454 - DNA, 96 bp, Homo sapiens
ttgtagattttgctgggtccagcaaactccgcttccgattgggctaccacgccattccgagtatgagtttcggagcaacatcccctgtcacctggt

SEQ ID NO: 106455 - DNA, 80 bp, Homo sapiens
cttgctgcccttgttgctggtgtcgtctactggctgtacatgaagaagtcaaagaggtgaagtgaaatctgcaagagtcc

SEQ ID NO: 106456 - DNA, 101 bp, Homo sapiens
ttgctccgagctggggtctcatgtctgtggtgctggaatccagagccctgacgtgggtcctggccttcgagatcttcatccccctggtgctgttctttatc

SEQ ID NO: 106457 - DNA, 82 bp, Homo sapiens
ctccagctcaaccatctgaggaaggaccaggaaggaaagtccagaacacatattacataatggagccgggagacagactagg

SEQ ID NO: 106458 - DNA, 100 bp, Homo sapiens
acggaataccagtatttaggaagctgtcctggctcagatggctcggtcatcacggtgttatagttttgccgctggactcttccctcccttcccccacccc

SEQ ID NO: 106459 - DNA, 87 bp, Homo sapiens
cggcagagagggaatggtgcaggcaggcgctgagaaggacgcgcagtccatctctctcagccccgcagcgcctccaccccagagacc

SEQ ID NO: 106460 - DNA, 100 bp, Homo sapiens
tcaagcttaggaccacccaccatgcctatccagcttgcattcacaagagatgggctctgtggtctgtggaatgaaatggttaaagatggagaaattgtat

SEQ ID NO: 106461 - DNA, 49 bp, Homo sapiens
cccccaggcggtccttcctgggagctgctgctcttcctccagaacctgc

SEQ ID NO: 106462 - DNA, 74 bp, Homo sapiens
aaaatcaatgaaggtgacctaattgcagaggtccagctgggagctccccgacctccaggagggcaagatccaag

SEQ ID NO: 106463 - DNA, 102 bp, Homo sapiens
gatattcaaactctaaaccatctgaattggctcaatgatgaggaagatgttctgagcttactggaaaccttccagttggacacaaggctgcttcatcacctg

SEQ ID NO: 106464 - DNA, 110 bp, Homo sapiens
ccacctgctgatggtaatcaccgtgtgtttgcagtaagttgtgagatgcattgcctaatgtgctacctttaaatgaagatgttaataagcaggaagaaaagaatgaagat

SEQ ID NO: 106465 - DNA, 50 bp, Homo sapiens
caaacccacccggcccaactcactgtacatccaagcagaagtccagttcc

SEQ ID NO: 106466 - DNA, 49 bp, Homo sapiens
ttcaaagtactcaagatgaatttgagaagactgtgcagtctttgtaact

SEQ ID NO: 106467 - DNA, 100 bp, Homo sapiens
ctgcccggaaatatcagccaaaggccagcgcttcagcgccagtcagcaaagtaaataaatactgtgcttcttccaactttcattccacttggggaaaaaa

SEQ ID NO: 106468 - DNA, 71 bp, Homo sapiens
catgtctgcgagccaggattcccggatgcagcaccgaggcttcctcctcctcaccctcctcgccctgctgg

SEQ ID NO: 106469 - DNA, 100 bp, Homo sapiens
cctggagcagacgtaccaacaccatccgaggggacaagtacctccagtccactccctgctcctaaaaaacctacaggaggcatttcatccttcatgaagc

SEQ ID NO: 106470 - DNA, 75 bp, Homo sapiens
gtgacgatgacagtgaggaggaacaagaggagaaatgagccgtcagactgctacagcattacctaccggtacctc

SEQ ID NO: 106471 - DNA, 98 bp, Homo sapiens
cacgacctgcggatccccttgcacaacgaggacgccttccagcacggcatctgctttgaggccaagggacttgcaacaaagcattgccagagaaccta

SEQ ID NO: 106472 - DNA, 100 bp, Homo sapiens
aaagtagtgacgggagcatcaagattttctgccgtctcttggcaaaaatggcaaataatgatgctgttctgaagagactggagcagaagggtgcagaggc

SEQ ID NO: 106473 - DNA, 98 bp, Homo sapiens
tggtgatgacaggctcttcagctccctgcaagtgaccgggcctggggaacagagatcctgaaggagctagacgagtgctacgagcgcttcagtcgcga

SEQ ID NO: 106474 - DNA, 100 bp, Homo sapiens
caggaatctgatggaacccctgaaaacaaccctctggcaggacagagcgggatgccaccagcttgtccaaagggaagttccaggagctcctggtgggcat

SEQ ID NO: 106475 - DNA, 75 bp, Homo sapiens
atgcagagccccagctcctgtctggtctgtgagatgtcctcactgtttcaggagacaatgcagatcttcgtgaag

SEQ ID NO: 106476 - DNA, 75 bp, Homo sapiens
cggaaatcagctctacagttcagggcattcttagcagggttacagaatctgttaagaatattgtgccagggtggc

SEQ ID NO: 106477 - DNA, 100 bp, Homo sapiens
tccaaccaggaatggagacgccattggatgttttgtccagggcagcatctctggtgcatgctgatgacgaaaaacagcgggaacagcttccacgtgttcg

SEQ ID NO: 106478 - DNA, 74 bp, Homo sapiens
ggagaactgcaggaacctggcctcactaggtcaaggtgaagatgttcttaaagggtcccagattacgtatgtta

SEQ ID NO: 106479 - DNA, 75 bp, Homo sapiens
attatgcaaatgaaaaactacagcaacaattcaatatgattttttacccagaaactacagatatctatgatcgaa

SEQ ID NO: 106480 - DNA, 103 bp, Homo sapiens
aaaaagcatccccgaggaggaagacgaatcgttaaacatctgaaagggtcagattcacaatgacatcctttcaagaagtcccattgcagacttccaactttgc

SEQ ID NO: 106481 - DNA, 100 bp, Homo sapiens
attctcttcaagacagaattgatcgccttgctgtcaaagtcacccagctggattcaacagtggaagaggggatagtaaagctctgaaggatgaaaatcta

SEQ ID NO: 106482 - DNA, 75 bp, Homo sapiens
tgaaggtccaggagtacccgaccctcaagcttcggaaccaaaaagaagcttcccagagccggggccaggagcccc

SEQ ID NO: 106483 - DNA, 100 bp, Homo sapiens
ggatatgatgcttcctttggctatattcatgcaatcaagttagcccaacaaggaaacctcttagaaaaaagagtagacgccgacgctttctccgtggaag

SEQ ID NO: 106484 - DNA, 51 bp, Homo sapiens
gagacgcgaaggagaggccctagaaccttccagatgttgaagtgaaaggag

SEQ ID NO: 106485 - DNA, 100 bp, Homo sapiens
aaggcgcccaagcagcagctgccggagcccgagtggatcggggacggagagaacacgagcccatcaggcatcctctggtatcacgattccaaaaccccca

SEQ ID NO: 106486 - DNA, 100 bp, Homo sapiens
atcgcagtttgactctggagccactcaggtttttcctaagctcaactctagccagctaggttcctggtgctttgggggcaggaccagatgctgtgttggg

SEQ ID NO: 106487 - DNA, 100 bp, Homo sapiens
acttggaccgtttttccccaaagaggcaccacctacctatgatgccgtggtacagatggagtaccttgacatggtggtgaatgaaacactcagattattc

SEQ ID NO: 106488 - DNA, 98 bp, Homo sapiens
attcgcagtggtcgcttcttctccttgattttatggaaagaactcttcttatgtccatgggggattggattcaaatggaaagccagcagatgcagtct

SEQ ID NO: 106489 - DNA, 75 bp, Homo sapiens
caaatactgaagcactggacaagcttgaagagtggttccaatcacaagtgttaccttccaaggacaatgtcatcc

SEQ ID NO: 106490 - DNA, 83 bp, Homo sapiens
ggcttacagacgctgccagcatcgccgccgccaggtggatccataaagaacccagccaacccgcagagggaggggaggggctg

SEQ ID NO: 106491 - DNA, 75 bp, Homo sapiens
tgaaacctcctagtagaaaaagttcttgggacaaacttcatttgattgtgcttgagaacagtagtcgagaagaca

SEQ ID NO: 106492 - DNA, 50 bp, Homo sapiens
aattagtgcgtagtgctgaagatggtgtttgccaaactactgtgaacatg

SEQ ID NO: 106493 - DNA, 75 bp, Homo sapiens
ccagatgcttctgactaagctcccaacaattagtcaggtttgtgaaatggctgctgacatttctgaatccagcgg

SEQ ID NO: 106494 - DNA, 139 bp, Homo sapiens
tatgtctcaagatggcggccaatgtgggatcgatgtttcaatattggaagcgctttgatttacagcagctgcaggctgaaggtgatgtggccgccctcaaccgacgcatccagctcgttgaggaggagttggacagggc

SEQ ID NO: 106495 - DNA, 100 bp, Homo sapiens
tctggttctacttcacactgcagaactgggttctggactttgggcgtcccattgccatggagtccaatgtgctgattgctgctaacagtcagggtacaat

SEQ ID NO: 106496 - DNA, 98 bp, Homo sapiens
gaggaattttggattgattttaatcttgggagtcagactctctcattctacattgctggagataatgattagagacgggatttcaccgtgttagccag

SEQ ID NO: 106497 - DNA, 98 bp, Homo sapiens
ggccagaagcgggcggcgcgggggagatgataaagagttctatctgtcttctacgcgggaaaatctatgatgctctagataaccgaaccctggctacc

SEQ ID NO: 106498 - DNA, 75 bp, Homo sapiens
gcgacgctatggcgcactggagtaccctgttcctggcaggaacgtgatgttctcttcccggggtacacccatttg

SEQ ID NO: 106499 - DNA, 99 bp, Homo sapiens
cctgcagagtctagttgccaagtggaacattcttaatactacaacacatctttgcaggattctttgcaaattctgccattcctggatctccacaccctt

SEQ ID NO: 106500 - DNA, 100 bp, Homo sapiens
tccagtccatcaacaagcgcctggcgtcgccagtggctcctggggccttgactgctggagtgtagtggcgcaatcttggatcaccacaacctccgtctcc

SEQ ID NO: 106501 - DNA, 101 bp, Homo sapiens
gcttctctgctgctcccggagtccgccgccgcaggaggccaactgcaaaaaccacagagtgaaccgggtggtgttcctggggaacatgaagcggctcctca

SEQ ID NO: 106502 - DNA, 83 bp, Homo sapiens
agactccggcgctcgccatggccgacgaaaagcccaaggactgatcctttgaaatactccagccatgactaaaagagaagcag

SEQ ID NO: 106503 - DNA, 101 bp, Homo sapiens
aataatcaaggcaactcgtttcaggcaaagagagctcgacttaacaagattactgggtgatcagcccatgacctaaacctccagacaaaataaaacggaaa

SEQ ID NO: 106504 - DNA, 82 bp, Homo sapiens
gacgcccaggcggacgaggccgtgttagacagttaatcaactggcccatgcccttcacatggacaaagatttgaaagctggc

SEQ ID NO: 106505 - DNA, 90 bp, Homo sapiens
catcttcctcctgtgcaccctcttcatcagggtggacccgaactccccggtgctcttggaggacccagtcctttgtgccttggcaaaaaa

SEQ ID NO: 106506 - DNA, 100 bp, Homo sapiens
aggccccctcggggggcgccgcacgccagcgaccaggtgctggggcccggagtcacctacgtggtcaaggacaaggtggagcagacacctcgcagtcaac

SEQ ID NO: 106507 - DNA, 74 bp, Homo sapiens
agatcaaaatgtgtatcctggacccattgataactctggacttctcaaaggtacatcaggaacgtctctatcaa

SEQ ID NO: 106508 - DNA, 90 bp, Homo sapiens
ggagctcaacctcatgtagaatccaggccgctcctttgaacctgtaggtactcggccccgagtggactccatgagctctgtggaggagga

SEQ ID NO: 106509 - DNA, 95 bp, Homo sapiens
cgattaaaagaagaactcgcaaaagctcagagggtcagcccaaggccaaccccactgtcactctgttcccgccctcctctgaggagctccaagcc

SEQ ID NO: 106510 - DNA, 83 bp, Homo sapiens
cgccggccctgagctcccggcggcgcaggggtgagcccctccagactccgaataggagatcaagagtttgattcattgcctgc

SEQ ID NO: 106511 - DNA, 75 bp, Homo sapiens
caatacacaactgaaattgtgcagaacaacctcctggggtcccagggcgcacattactcgcagaaggaagacaga

SEQ ID NO: 106512 - DNA, 83 bp, Homo sapiens
ccacaagacatttcctgctcggaaccttgtttactaattagactaaggtgtcagtatgttcttcaagctgctctgctcctggg

SEQ ID NO: 106513 - DNA, 90 bp, Homo sapiens
ctggatgtcagcgaggagatcattcagtggggacccaaactgtatgcattgttccagatgcgctcttgccaaagcagcataaagcaaatg

SEQ ID NO: 106514 - DNA, 50 bp, Homo sapiens
tttggcttcaatgtcatattttgggggcaagattcttgccaagagaatta

SEQ ID NO: 106515 - DNA, 129 bp, Homo sapiens
ctgcaggcgggggtgctgcagaggacacgaggcggcgggctggagacatggaccgcggcgagcaaggttgattgtatatcctccaccacctactaaggggggattaggagtaactaatgaagatctgga

SEQ ID NO: 106516 - DNA, 89 bp, Homo sapiens
ttctgcgtgtcaggtgttactcggggtgcgccagtggaagcgggaggcagttgcagctttcaggtacctgtggaaaagtgaaaagccac

SEQ ID NO: 106517 - DNA, 90 bp, Homo sapiens
tttccgtcagtacgcgaaggatatcggtttcattaagggtctaatggctattgattgtccacatactggcattgtggactatcggcaggt

SEQ ID NO: 106518 - DNA, 98 bp, Homo sapiens
aggtggacgccatcgtcaacgccgtattctaccttgtaaatactgttatttgtatatactgtaaatgatgacatcggtgggcactaaccgagcccggg

SEQ ID NO: 106519 - DNA, 75 bp, Homo sapiens
gaaactgaaaaaacactctacctaatcatggaatatgcaagtggagggttcttgaagcttttgagattaacaatg

SEQ ID NO: 106520 - DNA, 90 bp, Homo sapiens
cagaagcatcgtgaaaagcctccttctggttccaaatgccaaaattgcctggaaaagagcagtgagaggagtccgggagatgtgtgatgc

SEQ ID NO: 106521 - DNA, 50 bp, Homo sapiens
cgcctgcaaggactggttccacggcaggcaccactggatcataccagtga

SEQ ID NO: 106522 - DNA, 90 bp, Homo sapiens
tcggagttggggctgagcagtcctcggggagagcgcgccaagaccgctgcagccgctggctgacacttgcacctcctgcgccgccgcccc

SEQ ID NO: 106523 - DNA, 80 bp, Homo sapiens
gcaagagggagttaaggacattccaggcagaggcaagcaggaacgaatgcaggaatttgggaactgagctgtgcaagtgc

SEQ ID NO: 106524 - DNA, 73 bp, Homo sapiens
ccttaaagaagttaggggtaaacaatatctctggtattgaagagtcttggacagtaaagcaccaaaaccagaa

SEQ ID NO: 106525 - DNA, 50 bp, Homo sapiens
gtgggcgtttgaggaagctgggtgacttaagagattaaaattaatttggt

SEQ ID NO: 106526 - DNA, 75 bp, Homo sapiens
gcccagggggccggagggccagggtctcccggaggacttctgccatgggcaagtgatgtggccacccctcagcgc

SEQ ID NO: 106527 - DNA, 50 bp, Homo sapiens
atcttctgcactgtttacaggcacaggaactgcaagcacatgttgaccag

SEQ ID NO: 106528 - DNA, 90 bp, Homo sapiens
gcgcatcatggaggattgcctcctgggaggcaccagagttagtctgcccgaggaccttctggaggatgatctggagtgggagagcaggat

SEQ ID NO: 106529 - DNA, 90 bp, Homo sapiens
cgccattccaggaaagaaagggtgggatgatgagacggacatggcccagctggaggcctgtgtgcgctctatccagctggacgggctggt

SEQ ID NO: 106530 - DNA, 98 bp, Homo sapiens
gtcctggatcagtttctttgtcatgtagccaagactggagaaacaatacaatgcagatcttcgtgaagactctgactggtaagaccatcaccctcgag

SEQ ID NO: 106531 - DNA, 100 bp, Homo sapiens
tatggccctgactgcttaggcgggagctgcgtgcagctcagcttctccggggcatttttttctacacgaactgataaatttcaaacggaagagagtggca

SEQ ID NO: 106532 - DNA, 50 bp, Homo sapiens
agcaccctctgcttaccacagccagggcaccgaggaagagaaccaatggc

SEQ ID NO: 106533 - DNA, 51 bp, Homo sapiens
ggccgggctgccccgcaggatcatcaagggaccagttactctccacaagaa

SEQ ID NO: 106534 - DNA, 80 bp, Homo sapiens
caaatgtctgactctgactctcggactgagaaacgcaaggttaaacccatccagagtaatggctgcggccttacccagga

SEQ ID NO: 106535 - DNA, 100 bp, Homo sapiens
gatgatttgaagatattagcctaacaagatggaagcaggtttaaaattttacataagaagttacctttttcaggtggaattctactaagtatcagtcggc

SEQ ID NO: 106536 - DNA, 116 bp, Homo sapiens
ccccgatggtgtcatcgaggtaagaaacggttgtggatcttgaagctttggaaagaaggcataaatattccagcagaccagccaattactaaacttaagaatttagaagatgttgt

SEQ ID NO: 106537 - DNA, 98 bp, Homo sapiens
caggactgaggaagaatttaagaaattcattagtgataaagatgcctctatagtaggatggatcttctcctgaactcccaagtcttgagagaaaaaat

SEQ ID NO: 106538 - DNA, 100 bp, Homo sapiens
gaggcaatgaaagaaattacagcaggcttaccagtgaaagttgtggtggatgtcttaagacaagcttctaagagtgcagtgggccatgagtatgttgccg

SEQ ID NO: 106539 - DNA, 101 bp, Homo sapiens
cacgcataatggatgaaaggaaccgacaggatctagtgaaaagccatttgatgtatgcggtcagagaagaagtggaggtcctcaaagagcaaatcaaagaa

SEQ ID NO: 106540 - DNA, 51 bp, Homo sapiens
cgacaggcggcgcgggcggcgggtcttgtcctgtcactctggctggaatac

SEQ ID NO: 106541 - DNA, 83 bp, Homo sapiens
gcgggtccgtggagctggagcagatcccccagccggctgagacagttggctggggaacagaccagggaattggtggatttgga

SEQ ID NO: 106542 - DNA, 100 bp, Homo sapiens
tttacagatggattcgggatgctctgagacccccattacaaaatataaactctgttcaggaaatctgtgtgggaattttaggtaatatggcctgtttcca

SEQ ID NO: 106543 - DNA, 82 bp, Homo sapiens
cttggactgagtcctgcaggacacagtcgtcactgcggacgtcttctttgccataaatgctcgaccaaggagattcctatta

SEQ ID NO: 106544 - DNA, 99 bp, Homo sapiens
caagcaagaagctatagatgaagtgaaaagacagtggagagaagaagttgcttcacttcaggctgttatgaaaggtgtttgaggcagagcagtttggat

SEQ ID NO: 106545 - DNA, 75 bp, Homo sapiens
ccctcacgcccggcgagcccgcgaggtgacttaagagattaaaattaatttggttgctgttggttctgaacaaat

SEQ ID NO: 106546 - DNA, 76 bp, Homo sapiens
ggaaaggtctgcagtatgaatgcacaggagggccctcctggacccgggagcggaccctggtggcggtgaagcccga

SEQ ID NO: 106547 - DNA, 100 bp, Homo sapiens
tccgggagcacgtcatcgccatcgaagggctcctgtatcaggaataccgagataaatcgactctccaagaaatcgaaaccaggaggcaacaggatgcaga

SEQ ID NO: 106548 - DNA, 95 bp, Homo sapiens
atgctttttcttctcaccatttctggccaaaactacaaacaagacttcgcaggagtcagccagcctgaaagagcaggatggatcttgatgtggtt

SEQ ID NO: 106549 - DNA, 75 bp, Homo sapiens
ctgggcagaggggtgagggattgcttcgaaaggatttcctaaagagcgacagagtccaggccctctcctatgcac

SEQ ID NO: 106550 - DNA, 100 bp, Homo sapiens
ccgagctgtagctgcaaaaggacaagggcaagtgccggcccgacctagagtgttgaaggagaacatcatgaaaaagctgtagaactgctgaaagccgcac

SEQ ID NO: 106551 - DNA, 101 bp, Homo sapiens
agaaataccagtccccagtgagggtgtacaaatacccctttgaattaattatggctgccgaatacatcaagcaatggtaacatctttaaatgaagataatg

SEQ ID NO: 106552 - DNA, 151 bp, Homo sapiens
cttttaagagccctttgttccaacgttagtgtggacgatgctcttgcaggatgcctttccttttgggtcttagacaggacttttttcaggagatattgcacctttaatgcaagaaaaagtactaagcgcagtcacatatgctgttgatgat

SEQ ID NO: 106553 - DNA, 75 bp, Homo sapiens
gagcgctccccgccctgcagtccgagctacgacctcacgggcaaggagccgtgtaaagccagtggaatatagtca

SEQ ID NO: 106554 - DNA, 96 bp, Homo sapiens
gggcgctttggagccggccccaggcagcgtgtgtcggtcgcctagtctggagaactagtcctcgactcacgtaaacggagttccctctcgaagtcc

SEQ ID NO: 106555 - DNA, 90 bp, Homo sapiens
cagattcgcagtggtcgcttcttctccttgtggtgtttccccaggatctgctggagaaaggcctcgaagcaaacaactttgccatgctgg

SEQ ID NO: 106556 - DNA, 75 bp, Homo sapiens
cagaacatacccaagaggacaaatcccccagtgagtgatggattggaactgagaccgaaatataatggaatttta

SEQ ID NO: 106557 - DNA, 75 bp, Homo sapiens
agattattcacgaagctctagaaaggtaccttgggatcacaaggcccctcacataccctgtgaggcagaatggga

SEQ ID NO: 106558 - DNA, 75 bp, Homo sapiens
ggggtaactgcacaggagaaggtgaaccaaaatgggcgcctcttaggggtttgtgccagtgtggacaactgccga

SEQ ID NO: 106559 - DNA, 100 bp, Homo sapiens
gcagtcctagtccgaggtgccaccgtggaaggacagaatgtggaatgcagtagccctctgggcctgggatattgtggttgataactgtgccatctgcagg

SEQ ID NO: 106560 - DNA, 100 bp, Homo sapiens
cttccgggttcgagtaattctcctgcctcagcctcccaagcagctgggtctacaggctgaagccgacgtagcttctctgaacagacgcatccagctggtt

SEQ ID NO: 106561 - DNA, 100 bp, Homo sapiens
tgtttccattgcaacctggaagccacacttgaaggccttgcacacctgcagccctaccaagttgacctgacagttcaagaaaaggagaaatatcttaatg

SEQ ID NO: 106562 - DNA, 100 bp, Homo sapiens
cagctcaaccgcttcgtgcaactctccgggcggccgcacctgccagtttctgatgaagaattgaaaagaagagtagctgaggagctggcattggagcaag

SEQ ID NO: 106563 - DNA, 75 bp, Homo sapiens
atagaatatgatgatttcgtagagtgtttgcttcggcagaaaacgatgaccaggataaaaaggtggaaactctca

SEQ ID NO: 106564 - DNA, 88 bp, Homo sapiens
cgggcatccaacgcaatgatgaacaacaatgaccttggtgctggagaatctggtaaaagcaccattgtgaagcagatgaggatcctgc

SEQ ID NO: 106565 - DNA, 100 bp, Homo sapiens
cctgcagatcttcgggcagattccccaggaggacatggacgaatcatgtccctaaggaggaagctggagctccacgaggggaggggccggccatcccagg

SEQ ID NO: 106566 - DNA, 90 bp, Homo sapiens
ctgcggaagtgcagctgcctcagttcttagcgcagaatctacctgttactcgtattttggacaatcttatggagatgaagtcaaaccccg

SEQ ID NO: 106567 - DNA, 91 bp, Homo sapiens
ccgacagccggggaccgcggccatgggagggctcgcagacaatgcagatcttcgtgaagactctgactggtaagaccatcaccctcgaggt

SEQ ID NO: 106568 - DNA, 100 bp, Homo sapiens
caaagatttatttctcttgacaaccaagggcctccgtctggatttccaaggaagaatttcctctgaagcaccgctgggagtgtccactcgccttccacca

SEQ ID NO: 106569 - DNA, 100 bp, Homo sapiens
cagaagtcgccgaacgttctgctgcagaacctgtgctgcaggatcctgggcaggagcgaagagcccccgaagaaaaagcggtctgtggtgttggacgaga

SEQ ID NO: 106570 - DNA, 75 bp, Homo sapiens
ctcaagctattctcctgcctcaccctcctgagtagataggactacaggcactcttaaaagacccattttacatgg

SEQ ID NO: 106571 - DNA, 90 bp, Homo sapiens
agcgcctcgtcgacatgagtgatgtggaggaaaacaacttcgagggcagagcttcaacggaccacaccaaaatgccatctcaaatggaac

SEQ ID NO: 106572 - DNA, 89 bp, Homo sapiens
ggagaggggcgaaccggccccccacagccactgcagaatgactgctgatggagcgccagaattgaagatagagagtctgaattcaaagg

SEQ ID NO: 106573 - DNA, 87 bp, Homo sapiens
cctcttagaggaaaaatactcaatgttcgagaagcttctcataagcaggctactgttggattgattcgaaatcttgccctttgtccc

SEQ ID NO: 106574 - DNA, 50 bp, Homo sapiens
tgaggattgtgcgatgctgcggccacaggactcattaccagagaagctgg

SEQ ID NO: 106575 - DNA, 74 bp, Homo sapiens
cgaatatcgtcatcgttagaagcttaggagatctgaggaggatgaagagaaagaagaggatattgaagttccaa

SEQ ID NO: 106576 - DNA, 98 bp, Homo sapiens
tcaggagggcctggacaagatcctagaggtaaactgtcttgagccccaccctcacctgcctgtgctggcaaccagtggcctagaccatgatgtgaaga

SEQ ID NO: 106577 - DNA, 75 bp, Homo sapiens
tattcctcggagaaatgaaaaagaccttgagggaatcccaggcaacggtgctggtgacagctttgtgggagctct

SEQ ID NO: 106578 - DNA, 100 bp, Homo sapiens
ctggccacttccgtacttccgctttccggcccagccagcgcccgcgatggcacagtaaccttggtgcacgaccgaaagggctgtctactctggtgaagag

SEQ ID NO: 106579 - DNA, 100 bp, Homo sapiens
agaagggaggctccaagacctcatcaacaattaaggtgctcctgacctctgataaagctgcagccaatttctcagatcgttctttgctgaagaacttggg

SEQ ID NO: 106580 - DNA, 75 bp, Homo sapiens
cggctcacctgtgcgggatggaacaaaaggttttggtgcctgggaccatatctgcaacatgagatacagagcctt

SEQ ID NO: 106581 - DNA, 90 bp, Homo sapiens
tgcagagaagggtatctgaaaaggaaaaggagagtattgccagagcaagagctggatctcgtctttctcctgagttctaccaagtatgcc

SEQ ID NO: 106582 - DNA, 75 bp, Homo sapiens
ggtcctcgatccgcccacagacctcaaattcaaagaactggacttgaagccatcatggagacatatgcattctgg

SEQ ID NO: 106583 - DNA, 83 bp, Homo sapiens
ctaaattctgccgaaaggactgaggaacggtgcctggaaaaggttttaaaatcaaagatgggaaaatcggagaaaattgccct

SEQ ID NO: 106584 - DNA, 74 bp, Homo sapiens
tccctcacaccccttccagctacatcgaaaccgagttcctggggaaaaccccagggcaaaacgctcagaaatgg

SEQ ID NO: 106585 - DNA, 75 bp, Homo sapiens
gacccctactgcctagtgaaagtggacgacgaggtggtggccagcagcctagggcctaggcccgggccaccatgg

SEQ ID NO: 106586 - DNA, 100 bp, Homo sapiens
ggactgtaattccagctacatgagaggattgcctgaggccaggagtttgagaccagcctgaacaacatatgaaaactcaaatgcagcatggattaatctc

SEQ ID NO: 106587 - DNA, 90 bp, Homo sapiens
gttcaacagctccggctggaggccggactcaaccgcgtaaaaagtattgggaaagggtcgttgtggtgcatagacccagagtatagacaa

SEQ ID NO: 106588 - DNA, 100 bp, Homo sapiens
atgggggcaaagacctacccagatactgattccttcaacactgtagcagagatcactgggagcaaatatccagaacagaaggagctggcaaacagccctg

SEQ ID NO: 106589 - DNA, 82 bp, Homo sapiens
ctagaatcaactgagagagatgcttaaaaatcaccagttactttaatgagatccacctctgatgttcagtgaagactaccag

SEQ ID NO: 106590 - DNA, 50 bp, Homo sapiens
tgacactggcatccagactctccacagctcgacctggccctgcgcaactg

SEQ ID NO: 106591 - DNA, 101 bp, Homo sapiens
catgggcaaggaggttggcttcttcatcatccgggccagccagagctccccaggggacttctccatctctgtcaggaaggagatgattcactacttataac

SEQ ID NO: 106592 - DNA, 98 bp, Homo sapiens
cagctccataggggaggagagccacgcaggatctcacagctgcagtctaatagtaacacagagccccactgcaggccccaccatggcgccgttcctgc

SEQ ID NO: 106593 - DNA, 82 bp, Homo sapiens
cgccgcgtcggtcggggtcagagtgcgcggaggtcaccggattgaaactgtctcaggaccttgatgatcttgccattctcta

SEQ ID NO: 106594 - DNA, 116 bp, Homo sapiens
tccttgtggagccggagctgggcgcggattcgccgaggcaccgaggcactcagaggagatcgcccaggaccacaccgcagcgtaactgcaggcctctcagcgaaaaagggggaaag

SEQ ID NO: 106595 - DNA, 100 bp, Homo sapiens
gccgtcacggccgcgctgctcatccccaaggaggacggcgtgatcacggccagcgaggacaggaggaaacacaattattactagaaaacctgcatgttta

SEQ ID NO: 106596 - DNA, 75 bp, Homo sapiens
ggattacaccgagaagctggccatgttcatgtttcagagatggacagagacgtatgtgcgttggtctcctaaggg

SEQ ID NO: 106597 - DNA, 82 bp, Homo sapiens
ccttctccactttcgccagcccgtgccgcgagcgcggcctgcaggagataccggggagaccacgacgctgcctcctgggcgc

SEQ ID NO: 106598 - DNA, 74 bp, Homo sapiens
cacgtgaccaagcgggccatcagcacccccgagatttaacccagaactggtgctggtctcagctggctttgatg

SEQ ID NO: 106599 - DNA, 49 bp, Homo sapiens
ttgtttgtcaccacaaaaaggacagatggagtctcccaggcgggaatgc

SEQ ID NO: 106600 - DNA, 88 bp, Homo sapiens
cttgccctggtcttgctcggccgatgaagtgcagaggtttttttctgattcatgttacatgtaaagctgtcctcatttgtgactatgg

SEQ ID NO: 106601 - DNA, 100 bp, Homo sapiens
agacaattcctggttcagaatttaaacatctttctaggaaggatcgagatcgagaccgggatcgtgaagatcggtctaaagatcgagaccgagaacgtga

SEQ ID NO: 106602 - DNA, 82 bp, Homo sapiens
cggcgtctcggcccttgcctgcgcgcctaccaggctcgaccccaggtcctggctataagtcaccatggcacagcaagctgcc

SEQ ID NO: 106603 - DNA, 142 bp, Homo sapiens
aaatgcgcacgaggaggacactgcgggggcacctggccaagatctacgccatgcactggggcacagactccaggcagaatccagagaccacatttgaagtatatgttgaagtggcctatcccaggacaggtggcactctttc

SEQ ID NO: 106604 - DNA, 100 bp, Homo sapiens
cgcaattgtacattttctattttttttcctaggttctctgctgtttaaaaagtatccctgtgctgcaagctttcttcctggtggcagatgacatcatgga

SEQ ID NO: 106605 - DNA, 83 bp, Homo sapiens
ctcattgacagctgcattcaatcttttggtgtggatgaggtcaccattgtcaacattttgaccaaccgcagcaatgcacagag

SEQ ID NO: 106606 - DNA, 106 bp, Homo sapiens
ctaccaggagctcatggttgagtgtacgaagaaatggtgctggagaatctggtaaaagcaccattgtgaagcagatgaggatcctgcatgttaatgggtttaatgg

SEQ ID NO: 106607 - DNA, 101 bp, Homo sapiens
agagtgacttcatattgtggattttcaccgcttacctctagaaacttgattcaggcatagacgtctcttccctttgccacaatggaggcctctgtgtcgac

SEQ ID NO: 106608 - DNA, 90 bp, Homo sapiens
gtctggagtgcgtgggggaccggctgttggcgggcccaccgtggtgcacgcaaaccacttcctggccatgcgctccctcctgcttctcag

SEQ ID NO: 106609 - DNA, 102 bp, Homo sapiens
gagagaccgagcatcggggtataggaagagaggtccgaaacccaagcggcttctgctgcagacctgcctagagctggaacgttacctccagagcgagccctg

SEQ ID NO: 106610 - DNA, 48 bp, Homo sapiens
agaactacagaaacctggtctccctagatctaattatcatggacctgc

SEQ ID NO: 106611 - DNA, 96 bp, Homo sapiens
gtgatctgcccatcttgttactccctagcagtgtggtaaggatatgggccctcacattttccaaacctgtccatctgctaactattttgactgcag

SEQ ID NO: 106612 - DNA, 101 bp, Homo sapiens
aagctttgtctccttcgacttggagtctttgtccaggacgggccctccagaatttccacagcatacacctggacctgttcccaacagtttcagccagcccc

SEQ ID NO: 106613 - DNA, 101 bp, Homo sapiens
gaacggcttacgaaaatttgtgcaacacatcaagaacaatgcagatcttcgtgaagactctgactggtaagaccatcaccctcgaggttgagcccagtgac

SEQ ID NO: 106614 - DNA, 83 bp, Homo sapiens
gcctgccaggcgctcgggggccgaactggccctggactacctctgcagtatggtttgaagtggtgaacatggatttttctcgg

SEQ ID NO: 106615 - DNA, 100 bp, Homo sapiens
aggcttggtgactccagtggcccaggtattgttgcagcatctggcagtgagactgaggatgaggacagcatggacattcccttggacctttcttcatccg

SEQ ID NO: 106616 - DNA, 83 bp, Homo sapiens
cccaggagcacgccgcggggagcgcgggcgtccggggctggagtcgcgcaggggagcgtgttcaatacgtggaaacccatgtg

SEQ ID NO: 106617 - DNA, 75 bp, Homo sapiens
aggtgtcaagaagctcagaatgactatctgttatagtccctgggtcaagacaacaatttttataccttcgtcgtg

SEQ ID NO: 106618 - DNA, 87 bp, Homo sapiens
ttccgccctaatggaggtctccagtttcgattagaagcccaggacccaggaaggagacacaggaaatttattcaaagtccccacgct

SEQ ID NO: 106619 - DNA, 74 bp, Homo sapiens
gggagcacatccatttcattggcaagaaactagaaaaactgcttttggaattatctctacagtgaagaaacctc

SEQ ID NO: 106620 - DNA, 90 bp, Homo sapiens
cttttaaactcattctactggagcaaatgctccagcagtacccgcggctacgggaggagatggagcgcatcgtgaccacccacatccggg

SEQ ID NO: 106621 - DNA, 75 bp, Homo sapiens
tttcatactctcttaacattggataataagcttttacaaactgatgactcagaattcatgattgaagaaatgcag

SEQ ID NO: 106622 - DNA, 82 bp, Homo sapiens
tgaattgcaagtttgtgccccatagctgcacagatcaggcctttgtgacactaaccacaaacgatgcctacgccaaaggtgc

SEQ ID NO: 106623 - DNA, 75 bp, Homo sapiens
cagcagggcctgtgtgggaaggcttagagatggacagtcattttgtttactcattcagccctgttgcaggtccca

SEQ ID NO: 106624 - DNA, 75 bp, Homo sapiens
aacgaacatcttctggacctttgtccaggcagcataattcgttgtatgaggcgcctggaagaattgcttcgacaa

SEQ ID NO: 106625 - DNA, 49 bp, Homo sapiens
ggaacgacaaactcaaagtccaggatgttgtacctcaggcgttgttaga

SEQ ID NO: 106626 - DNA, 100 bp, Homo sapiens
ccaagtgcggacgctgtgcgagaagataacaacgaacttgatgcaagtgataggtttgccaaggtcagacctctcatcatccggatgaactgcaatttcc

SEQ ID NO: 106627 - DNA, 100 bp, Homo sapiens
tcacttttgagtgcaactgccttccaggtacgaagatgccctggtgctcctgctcacagaggtgttgaatcgaatccagttcagatacaaccaagcccag

SEQ ID NO: 106628 - DNA, 82 bp, Homo sapiens
atcggggatgtggacgaaggggccgacctcctagctgctgcggactctggagcgtgagaaccagcgcctggaggctgtcctg

SEQ ID NO: 106629 - DNA, 100 bp, Homo sapiens
aaattcggcggcttatgggaaaaccacggaggttttgcacactagggaccaagaagccctcggggacactgctgagaaaagactgccgaagggaagacca

SEQ ID NO: 106630 - DNA, 75 bp, Homo sapiens
ggcaggaccaagggaagtgtcttcacaaagatgagaggaagaacttgtcgcttttcctaagcattagtttgttaa

SEQ ID NO: 106631 - DNA, 99 bp, Homo sapiens
atgacatccacacactgttgaaggtacaacagagcctgtatcatggaggggtccagcatgaggaattcggactggttttcatttgcccatttgctgaaa

SEQ ID NO: 106632 - DNA, 117 bp, Homo sapiens
attgaagctcaagaaggtgaagatgatacctttctaacagcccaagtcattgacgagactctggatgttaaggaaatgattttcaatgccgagagagttggaggcctcgaggaagag

SEQ ID NO: 106633 - DNA, 98 bp, Homo sapiens
ggaaaaggattacagtgcatctataaatagtttactagagaggctgcagagagactaagggcacttcctgaggttcattaccacctggggcagaagga

SEQ ID NO: 106634 - DNA, 75 bp, Homo sapiens
cagatgtgcaacaaagtgcgatgaagcatgttgtggagacattttttggatttgatgaggagtctgtggactcag

SEQ ID NO: 106635 - DNA, 100 bp, Homo sapiens
atgctctgagttcaatacgtctgaacctttgctgtctatggatctgctctaaaccttatagcctgcttatgggggaaggagctttgcgggcaacctgaac

SEQ ID NO: 106636 - DNA, 76 bp, Homo sapiens
aggagtgaattcacagtctaccatgaattggaagaccatcttaaatggagatgaaaacactttggtgttcgaaaac

SEQ ID NO: 106637 - DNA, 76 bp, Homo sapiens
tatcgtggtcgtaggaggctgtcctgtctgcaggcaatagccctctggaacaagacaattcatgtgagataagaaa

SEQ ID NO: 106638 - DNA, 82 bp, Homo sapiens
ttatacaggccgcttttgagaggacaagcccagattccaaaacttatgtcaagttgatgataattagaagcatgctttccac

SEQ ID NO: 106639 - DNA, 100 bp, Homo sapiens
gcaactcgccgtacatcgtgggcttctacggggccttctacagtgacggggagatcagcatttgcatggaacacatggcattttaaattatacctgacat

SEQ ID NO: 106640 - DNA, 82 bp, Homo sapiens
gtccaccggctgcgccagcggcgccgggagcgcatcgagtccctgattggagcaaactgagcaggccgggctctcgccatgg

SEQ ID NO: 106641 - DNA, 50 bp, Homo sapiens
aggctctaaaaatagtcatccaggctttaaaggagatagatgaagttggg

SEQ ID NO: 106642 - DNA, 96 bp, Homo sapiens
ctgcgggtccgggattcccagccatggcagattcctccgggcagcaggtggtctaccatcacggcaacagtgcgacgggcggccattacactacag

SEQ ID NO: 106643 - DNA, 50 bp, Homo sapiens
cgcctacgccatccagctgtgcatagtgtgtgctgtatttatggagttta

SEQ ID NO: 106644 - DNA, 112 bp, Homo sapiens
cgctgaccaagcaggacaccatgctgaaggccatgttcagcgggcgcatggaagtgctcaccgacagtgaagaaggcagacggtaacaagtactccttgctggattgaactt

SEQ ID NO: 106645 - DNA, 80 bp, Homo sapiens
acatgatggcgggagagaagaagcgcaggcacaggaagctggtgacggcgatgaacggctggagtgcagtggcatgatct

SEQ ID NO: 106646 - DNA, 83 bp, Homo sapiens
gctgtgcgcgctggcgctgagcctgcagccggccctgccggcctgggttctgaggaaaacgcaatggtggccatggacttggg

SEQ ID NO: 106647 - DNA, 98 bp, Homo sapiens
tcatgtctcagcgaagaagtcggagttcagcagccatcagaaccaaggcattcccatcaagagcaccatggacaaccccaccaccacccagtatgcca

SEQ ID NO: 106648 - DNA, 100 bp, Homo sapiens
aagggactcatctaatcatccagccctaacctaaaggcagacccagaagagctttttacaaaactagagaaaattgggaagggctcctttggagaggtgt

SEQ ID NO: 106649 - DNA, 83 bp, Homo sapiens
cgtgttctatatcttgagccccttgaacctgaacagcatcccagacattgagtgtgagacagctgccttgtgtgggactgaga

SEQ ID NO: 106650 - DNA, 82 bp, Homo sapiens
agtgactgaagcgcccgtccattccaaggtagagatcttttcctagcaagctgttcacaagattgcctgataagaatatgga

SEQ ID NO: 106651 - DNA, 75 bp, Homo sapiens
taggcatacctctgtaccatggctggcttgttgatccacagtttgtgaagaaatatgggaacctttttagcttgg

SEQ ID NO: 106652 - DNA, 75 bp, Homo sapiens
ccctgtacgacatccggactggaaaatgtcagatgatacagcagtgttcgagttgatacagctagttccaccagg

SEQ ID NO: 106653 - DNA, 73 bp, Homo sapiens
aaaaacaggtccctggcgagccccttgcagtactcccctgccctcaacaagatgttttgccaactggccaaga

SEQ ID NO: 106654 - DNA, 75 bp, Homo sapiens
gaaaggcatctgtcccaagcaggagaacattgcaggctccaccgaggacaccgcgtccagcttgtgtggcgagga

SEQ ID NO: 106655 - DNA, 83 bp, Homo sapiens
gtgcggaccctccggccgcagccatgtgggacccgcgggcagctagactgtgccctgtccacggtgcctcctgcatgtcctgc

SEQ ID NO: 106656 - DNA, 75 bp, Homo sapiens
ctgaggtttcagagcgcagccatcggtgcgctgcagatgtgaagttcatttccaatccgccctccatggtggcag

SEQ ID NO: 106657 - DNA, 75 bp, Homo sapiens
ctgcttcatctctaaaggtccttctaggagagaggtgaaaggcaggagtagggctgattggagccattgtacagt

SEQ ID NO: 106658 - DNA, 107 bp, Homo sapiens
ccatgtcagacgcagccgtagacaccagctccgaaatcaccaccaaggtgtccctggccagtgtccttccacctgtccacaagcatggggaacatcttcgccaacct

SEQ ID NO: 106659 - DNA, 100 bp, Homo sapiens
ggttcttctgcctgcggagcagctaccgctcaggaccgtggcaaggaggtgtacagccctgactttcatagcctcggaggagaaggtcttggtggccgac

SEQ ID NO: 106660 - DNA, 96 bp, Homo sapiens
ctacattcaattgaaataaattgagggacggcaagtgtgttggaaagaacaccgacttcattgagaaggtggatggaagcatgcctaggggaagat

SEQ ID NO: 106661 - DNA, 85 bp, Homo sapiens
cgcggcccgcctcagcatctggtacagccgaaagtccaaggcttgcgagaaggtcatttccgtgggtcaaacggtcatcacgaag

SEQ ID NO: 106662 - DNA, 75 bp, Homo sapiens
cgcaaacttgacactcaccctgaccgggtgttgaaagcagcaggggcctagaagacattaaaccgataccacaga

SEQ ID NO: 106663 - DNA, 90 bp, Homo sapiens
cttcccaggagagaggtgctgaagtccacgaagagaatttggcctcagtatgtcaaggatagaattcattccacctatatgtacttagca

SEQ ID NO: 106664 - DNA, 100 bp, Homo sapiens
cggacctgaagggcctgagcgtcggatgatggaaaattatcctttgaagaattcaaagcatattttgcagatggtgttctcagtggagaagaattacacg

SEQ ID NO: 106665 - DNA, 90 bp, Homo sapiens
gcctcggaggcgttcagctgcttcaagatgaagagctagagccggtgcaggccacgcagaacaagacagggaagtatgtgccgccgagcc

SEQ ID NO: 106666 - DNA, 100 bp, Homo sapiens
ttgcctttcttcgtagcacctttgctgtattcacacaccttcctgaggtatttaactgaaaggaatatctgcttcactgttgcaaccaaaccagatgcct

SEQ ID NO: 106667 - DNA, 100 bp, Homo sapiens
gccatcgttgctgccttcttcgtcaaggacctgaaggagaagaaggagaaggtggaggagaaggcaagccggaaagagcgaaagaaagaagtggtggagg

SEQ ID NO: 106668 - DNA, 96 bp, Homo sapiens
agcaaactcttccaccaccagtgttccagatgcttctgactaagctcccaacaattagtcagatcatggaagggaagtggttgctgtgtatgttac

SEQ ID NO: 106669 - DNA, 80 bp, Homo sapiens
cactcgcgcggggggtaattcggggtctgggttctggtgccgcgcagctttccccggctttcagtccagtgtaaagctgt

SEQ ID NO: 106670 - DNA, 115 bp, Homo sapiens
gaataccatgaggtcaaaaaggaaatcaccctgcttgagcaaaggaactcttttggtacaccagaaggccagaatggaacgacttcaaagagaacttgagattcaaaagaaaaag

SEQ ID NO: 106671 - DNA, 74 bp, Homo sapiens
caagcattgtatcacttcatctgcaaatatttcaataagtacccaaaaggtatcctgcaccccatgtaacatac

SEQ ID NO: 106672 - DNA, 100 bp, Homo sapiens
aaggaggagcctgttccagaactgctggaagctgagacgggcacactgcggttctgtgggaccacggagtttgccagcggccagtgggtgggcgtggagc

SEQ ID NO: 106673 - DNA, 100 bp, Homo sapiens
ctggtcgctggtgaagcccgcggcgcgcgcctctcccggaccctgcaggattacaacagcagtgaattgaaaacagcctgcaggaagcatgagctgtatg

SEQ ID NO: 106674 - DNA, 96 bp, Homo sapiens
cagacggggtggagcccatggaatcggtcctggaggacagtgatatcagtatcaagataaaagtttggaatgggagaaaaattctcaaagcctgaa

SEQ ID NO: 106675 - DNA, 101 bp, Homo sapiens
ctggggagtctgtgtccttccagctgcagatacggaggaggaagctggcccagttgcaggtggcctatcaccagctcttccaagaatacgacaaccacatc

SEQ ID NO: 106676 - DNA, 100 bp, Homo sapiens
agtgcgcgccctggcgggtccggaccaagttcactgagacttttttgacggagagggacaaacaatccaagtggagtggaattcctcagctgctcctcaa

SEQ ID NO: 106677 - DNA, 88 bp, Homo sapiens
acaaaactcccatcgcgtcgtggaggagtactttgtggcccccccaggtgctggagaatctggtaaaagcaccattgtgaagcagatg

SEQ ID NO: 106678 - DNA, 75 bp, Homo sapiens
ctcttcgtctccgccatcagctcggcagtcgcgaagcagcaaccatgatgggtgagtcaagtgaagacatagacc

SEQ ID NO: 106679 - DNA, 90 bp, Homo sapiens
acttaccagaatactacgttcagctaaattaagaggatcaactgaggccaaaattactgaggtcaaagtggaacctatgacatatcttgg

SEQ ID NO: 106680 - DNA, 100 bp, Homo sapiens
taagggaagctgttgttcttccaatgtggatgcctgactttttcaaagggattagaaggccatggaagcccgtggccacccaggagcccgatgtgcaagg

SEQ ID NO: 106681 - DNA, 75 bp, Homo sapiens
ttttgtcttggggcccaaatacagtcctcttgagtttttacgaagggttcaaaccttgtactactcagctgatca

SEQ ID NO: 106682 - DNA, 98 bp, Homo sapiens
atctgcctcttcctcaacactttcgtgccgggactgggcacgtgtggttctcaaatataggcattctgatgggaacttgtgtgttaaagtaacagatg

SEQ ID NO: 106683 - DNA, 90 bp, Homo sapiens
gaacgatactaagttagatggacctatattacagattctattcatgaacaatgctatttcaaagtgggggagtggtactaaggatcaagt

SEQ ID NO: 106684 - DNA, 100 bp, Homo sapiens
tcacttggaaacagaatcacgccttgtgaagagatcatccctaagcaggagagaagctactaaagcttccttcaaaatgtctactgttcacgaaatcctg

SEQ ID NO: 106685 - DNA, 96 bp, Homo sapiens
tttacaagagccctgagctgccacggatactgaggtcagtcaccacgaacaggggcactcggcatgctgccccagcactggagaagcagcgctgtg

SEQ ID NO: 106686 - DNA, 74 bp, Homo sapiens
gcagagagacaagaagagaaactgaagaataacaacagagatctatcaatgggtctgctcttgataaaataaca

SEQ ID NO: 106687 - DNA, 74 bp, Homo sapiens
ctggctttgagagttatgaggcgcttccccagcacaaactgacctgcttcaggctattggatgttgtcactgtg

SEQ ID NO: 106688 - DNA, 75 bp, Homo sapiens
ggtgcagtgcgagacgctagaggggtgtttgtgaaccgaagtttagcaatggaaaagataaagtgttttggtttt

SEQ ID NO: 106689 - DNA, 87 bp, Homo sapiens
ttctccgtccctttccagggagggaacaaagcccacagcaccggtcttgggcgtctttggtactggcttttttaggggtctgcctgg

SEQ ID NO: 106690 - DNA, 80 bp, Homo sapiens
gtgtccagggcggctgtggaggtgttcgggaagctgaaggaagctcttcgtgggcggtcttgactggagcacgacccaag

SEQ ID NO: 106691 - DNA, 100 bp, Homo sapiens
gttcacctcggtgtctgcagcaccctccgcttcctctcctaggcgacgagacccagtggctagccatgcctttcttggacatccagaaaaggttcggcct

SEQ ID NO: 106692 - DNA, 83 bp, Homo sapiens
attggcccagaaatttcagctgcagttatgaagatttttgatgctgccaaacaaggacacccaggcccattattttcctccag

SEQ ID NO: 106693 - DNA, 82 bp, Homo sapiens
gctttctagagaagaaggggccctgtgaccggagggttttcaggctgatttctgttgttccttcaaacttgataaagctgct

SEQ ID NO: 106694 - DNA, 90 bp, Homo sapiens
aggctctatcttttgaggaccaatttcaggtatgtcccaaaagtctgtgtgtgtctactcctggacatcgcactgatctttttcagaggg

SEQ ID NO: 106695 - DNA, 74 bp, Homo sapiens
accgtgctcagaaactagccagattgaagattgggaaaatgaggtacgttagtgttcgcgattttaaaggcaaa

SEQ ID NO: 106696 - DNA, 87 bp, Homo sapiens
cagaaccctgcgggtctaacagagctgggcccccaccggctcagcctcctgaaggagcacgcgatcgtctggggaatatttttcatc

SEQ ID NO: 106697 - DNA, 87 bp, Homo sapiens
accgtttgcggaggtacggatactcagttgtggagagctgattcccaaatctaaagagctacagagacttctgaagtggagagtctg

SEQ ID NO: 106698 - DNA, 100 bp, Homo sapiens
acgctctcatccggaggcaggaccagctgcagctgctaaggagaggcggctcctccaaaaccggcgtctggacttggatgcctgcaaagcgaggctgaag

SEQ ID NO: 106699 - DNA, 74 bp, Homo sapiens
ctttctggatttctcagagtcctatggatacctcccgagcacaacaaggagaggtgatgaggttggcatgtcgt

SEQ ID NO: 106700 - DNA, 74 bp, Homo sapiens
ctagaagagccgttgccttcaacaagcagtgaagaagaagatccccttgcgggctggcaggcgctggtgggcgc

SEQ ID NO: 106701 - DNA, 50 bp, Homo sapiens
gaccctcccggcctgcggcaccggctcagaggagaagaaagctatgctgc

SEQ ID NO: 106702 - DNA, 49 bp, Homo sapiens
cacggccggaatggcagcaagctcagattccaacaatgtctcacccatc

SEQ ID NO: 106703 - DNA, 100 bp, Homo sapiens
cgctcggtggagcagacgctactcccgctggtttctcaggtgtcccgacccaggctaagcttgagcatggctgagcaggagcccacagccgagcagctgg

SEQ ID NO: 106704 - DNA, 108 bp, Homo sapiens
gccgcagagctaaatgggggcctctccagggagtgctctgttcacggctccatcgctgttagcatcaagcatgatggaaccatgtgtgatacctgccgccagcaacca

SEQ ID NO: 106705 - DNA, 101 bp, Homo sapiens
tggagcgcggaaatctggaaccgggatggcgacgtctacactgagtcggaggcgaagatggactagaggcttttaccagatttcttaaaactgaattcagt

SEQ ID NO: 106706 - DNA, 100 bp, Homo sapiens
gggccgtgctgcttatggcggcgctggagagggggcgctgagctgttgggcaaatccagtttgctgatgacatgcaggagttcaccaaattccccaccaa

SEQ ID NO: 106707 - DNA, 50 bp, Homo sapiens
gcctgttctcgggctgtttggcggctcaccatggatgatgatatcgccgc

SEQ ID NO: 106708 - DNA, 83 bp, Homo sapiens
tactgtcaagacatttcttcggcattctgcaacaggccaagattgacagacacctaatattcatgacttgagaatattctgca

SEQ ID NO: 106709 - DNA, 75 bp, Homo sapiens
atatttttggacctgaaacagaaattctggaacacctatatggtgacaggagcctgttgcctctttctggctggg

SEQ ID NO: 106710 - DNA, 76 bp, Homo sapiens
ccagcatggctacttcatattttggaaagcagtttttaagacaagggatttcagtctccacatagttttggagccg

SEQ ID NO: 106711 - DNA, 100 bp, Homo sapiens
gttagcgtgagtgatcactctcaatcccgggttatgatgtgattgctcaagcccaatctgggactgggaaaacggccacatttgccatatcgattctgca

SEQ ID NO: 106712 - DNA, 75 bp, Homo sapiens
ggagccgctgtcctcgtccccagcggtcccgcccaacgcccgactctttaccttatcccatatcacacaactggt

SEQ ID NO: 106713 - DNA, 74 bp, Homo sapiens
ggcgccttgcggagggaccccaatgatgtctttctacctaaagatattgacctagacagtgtggatatggatga

SEQ ID NO: 106714 - DNA, 83 bp, Homo sapiens
gccgaagcaggacccgaagcctaaattccaggaggcaaaatgatgcttcaacacccaggccaggtctctgcctcggaagtgag

SEQ ID NO: 106715 - DNA, 100 bp, Homo sapiens
ccgggcccggggactgccttacaccatggacgcgttcatgcttggcatggggatgctggacatatctgaagagatggattaagaatgctttggattaagg

SEQ ID NO: 106716 - DNA, 100 bp, Homo sapiens
acagttcattcatattcagcatgagcgtgaagccgtgcagaagaagaccttcaccaagtgggtcaattcccaccttgcccgtgtgtcctgccggatcaca

SEQ ID NO: 106717 - DNA, 75 bp, Homo sapiens
gattttgcactcaccattaaatctatcagggacttcagtactagtgctaataacatccagattgataaaaccaag

SEQ ID NO: 106718 - DNA, 100 bp, Homo sapiens
gatctactactcggacaagtacttcgacgaacactacgagtaccggtaaaaaagctccagttttatttaataaagaaatgattgagtcaatgaaggaagg

SEQ ID NO: 106719 - DNA, 115 bp, Homo sapiens
cttccgacggggcggccgggggctcagagatccaagtgcgcgccctggcgggtccggaccaagatcctgaggaggatgaaggggctggccctggaggccgagagtgagctggaga

SEQ ID NO: 106720 - DNA, 100 bp, Homo sapiens
cacagatgagatttccaaccactcttccgcctccaagtaatgttggtcccatcttggggtctcctgtctattctaaacctatctacaagacctcttgtgc

SEQ ID NO: 106721 - DNA, 106 bp, Homo sapiens
ctgaatggcaatggcacaaagttctctcgatcagggcatacatctttcttcgacaaagggaccactatgagacctcagtccttctatgatggaagtcattcttgtg

SEQ ID NO: 106722 - DNA, 73 bp, Homo sapiens
aatcccaacactttgggaggccgaggtgaatgccctggatgggtataaccgaacagccctccactatgcagca

SEQ ID NO: 106723 - DNA, 100 bp, Homo sapiens
tctacgtcagccgcatcaaagaaaatggggctgcggccctggatgggcggctccaggagggtgataagatcctttcgctgcgttcctttgcctgcaacag

SEQ ID NO: 106724 - DNA, 100 bp, Homo sapiens
cagctccagacatgtggctcttcttcgggatcactggattgctgacggcagccctctcagggggaaatttgcagtggtgagaaaatgtataaagaaagat

SEQ ID NO: 106725 - DNA, 82 bp, Homo sapiens
ctttgtgatcgaaaccctgaccggatcccataaacactgtcgaaatgcactcggtgatggaaagagagccactattctgaag

SEQ ID NO: 106726 - DNA, 75 bp, Homo sapiens
tctactcctgagctggatatggacaaagatctcagtggatataaaggttcaagagttgtggaaagtaaaaatgta

SEQ ID NO: 106727 - DNA, 100 bp, Homo sapiens
agtgcgcaaattcaccaagagagacgtcttcctggagcggctgccttgcgaagaccagatcatcctcctgaaggggtgctgcatggagatcatgtccctg

SEQ ID NO: 106728 - DNA, 96 bp, Homo sapiens
gactaaggaccggggacttcttgattgaggtcatcccagactggaaggagcaggaatgggaccccgaaaagcccaacgcctacgcgggcatcttcc

SEQ ID NO: 106729 - DNA, 83 bp, Homo sapiens
gctcctcagcccccacctgccaaagtcagcaagcttcttggacacttaatgattgttggcaagaaatgtgctgctgatctggg

SEQ ID NO: 106730 - DNA, 100 bp, Homo sapiens
ggtacgtcgaaggccttgtgaacaggtggagaacgaccaggagcggttcctgagtgacctgcgtcgtgatgtccagaaggttgttggctttgatgctgtg

SEQ ID NO: 106731 - DNA, 75 bp, Homo sapiens
gaactcgagttggaagaggcgagtccggtctcaaaatggagcatggcatcgtgtgctgaaccctctgagccctct

SEQ ID NO: 106732 - DNA, 110 bp, Homo sapiens
tgctcttgaggttcacagatgatacctttgatccagaacttgcagcaacaatagggaccagttactctccacaagaaaattcacacaaccacagtgctcttcatagttca

SEQ ID NO: 106733 - DNA, 74 bp, Homo sapiens
tatcttagaattttaagatacttcagagaaagtttcattgtgcaaatctaacttcatggcctcgctggctgtat

SEQ ID NO: 106734 - DNA, 80 bp, Homo sapiens
gcatctgcaaagaaggttaaatcaggatggctggataaactctctcctcaaggatctcagccagcttttatgcaaagcag

SEQ ID NO: 106735 - DNA, 82 bp, Homo sapiens
ctgccctttgggactctgggagtacacaagggaaacgtgttcgttagtcttggaggccaaggctgagtgggtttatctctgt

SEQ ID NO: 106736 - DNA, 100 bp, Homo sapiens
aggcccgggagcgcgatgtggagcgcttctttaagggctacgggaagatcctggaggtggatctgaagaacggttctttggggtgactttcaagatggac

SEQ ID NO: 106737 - DNA, 101 bp, Homo sapiens
cttttatattcatctcaaaaacaaaattctgaactcaggacttggcaagaacagtggaggccatgtgtcttttggcagtcagtccagatgggaattggcta

SEQ ID NO: 106738 - DNA, 75 bp, Homo sapiens
aaaagaaaaatattgctgtacctaaattcaagtctgtgtgaaaatgtgtgaccctgccaaaggagcagctggcca

SEQ ID NO: 106739 - DNA, 112 bp, Homo sapiens
tggaacgtgccagttgattctgaccatttctcatgaacagaaacacctaggaagggagaactggataccatacttgcagagctccttcagatacataaagaacacattgtag

SEQ ID NO: 106740 - DNA, 114 bp, Homo sapiens
taaaagacagtcctcgtcagcactgactttcagctatggaatcgttttccaagagataacttcaccaagatgtccagtgataggcaaaggtccgatgatgagagccccagcacc

SEQ ID NO: 106741 - DNA, 75 bp, Homo sapiens
aaagggaccacggtcaccgtctcctcagttcaaatctgaacatcaatgatgtactagggaactactcattgactc

SEQ ID NO: 106742 - DNA, 71 bp, Homo sapiens
gctatcaggggaagatatgcatcagttccatcgagccattactacagggtgtccgcaatgttgccagtgtc

SEQ ID NO: 106743 - DNA, 100 bp, Homo sapiens
tgtggtctgttgtaccccactgctggggtggtggttccaatgagacagggcacaccaaactccatctgtagagacggggtttcaccatgttagccaggat

SEQ ID NO: 106744 - DNA, 87 bp, Homo sapiens
tggacagatgatgccagttaattactttgaatgaaaatatgttgtgttcttcttttaccctcttgacttcacctttgtgtgccccac

SEQ ID NO: 106745 - DNA, 75 bp, Homo sapiens
ccaacccaccatgttacaagacaatggatgagggcctcgggaaggacaaccagcgcagcttccaggccctgtaca

SEQ ID NO: 106746 - DNA, 50 bp, Homo sapiens
cctcaaacgtctaccattacagtggttcactattatgaagatggcaatgt

SEQ ID NO: 106747 - DNA, 136 bp, Homo sapiens
ggaagaccgcgcgcagggcctgcagcgggagctggacggcgagcgcgagcggcgcgagaaaatgatatcatcaagttgaatcgaaaggaagggaagaagcagaattttccaagactaaatagaagactcctccagc

SEQ ID NO: 106748 - DNA, 100 bp, Homo sapiens
attgggagatccacagctaagacgccaggacccactggaagcctagaaatgaggctgaggggatctggcggtggagcgctaggatcagacgcccccgcga

SEQ ID NO: 106749 - DNA, 76 bp, Homo sapiens
ttaaagacctggaaaccaagtcatatgaaagaatggatcttggagaatgtctgaaagtccatgacctggctttaag

SEQ ID NO: 106750 - DNA, 104 bp, Homo sapiens
attcattccacttaaaacctgaaaacattggaccacacaaagtcttactgccctcttctgggtcacgctagaatcagatctgctctccagcatcttctgtttcc

SEQ ID NO: 106751 - DNA, 82 bp, Homo sapiens
attgacgccatgtcgggttattcgagtgaccgagaccgcggccgggaccgagggaccagatggcctttgaggatgtggctgt

SEQ ID NO: 106752 - DNA, 83 bp, Homo sapiens
ccggcttcggagcgggagtgttcgttgtgccagcgactaaaaagaggctataccccagctttggcctgtgctcccaataagga

SEQ ID NO: 106753 - DNA, 96 bp, Homo sapiens
ctctcaagttttctctcacccatccatgggaagccctgctactgctggattagcgccaggccaagaagcttgagagaagaaaaatttcagaaaaat

SEQ ID NO: 106754 - DNA, 75 bp, Homo sapiens
cgcgcccgccctgcagctgcccaagcaatgaggacggggacttggttgccttttccagtgacgaggaattgacaa

SEQ ID NO: 106755 - DNA, 74 bp, Homo sapiens
ggaggttcaggctacggtgagccgaagccaagaccattgtgatgattcccgactcccagaagctcctgcgatgt

SEQ ID NO: 106756 - DNA, 90 bp, Homo sapiens
gagcaagcagatttgaacctatctgctttcaagctggtcatcatgatgaaacttagacacagtatgatctcgtgaaaccttgagagaaac

SEQ ID NO: 106757 - DNA, 97 bp, Homo sapiens
gtggaagccaaattcatcaattatgtgaagaattgcttccggatgactgaccaagaggctattgagggcacctacattgacaagaaatgccccttca

SEQ ID NO: 106758 - DNA, 83 bp, Homo sapiens
ctctatgccgacatcgacgccgcctggcaggccctgcgcaccaggattttttatcaagcagaaatgcatcgaacaacgagaat

SEQ ID NO: 106759 - DNA, 101 bp, Homo sapiens
cactgagcgccatggccctgcctctgctgccgggcaacagcttcaaccgcaacgtatcattgcccagtgcctaagatcttttatgttcagctcactgtagg

SEQ ID NO: 106760 - DNA, 90 bp, Homo sapiens
ggggtcctgagcctgccccagccagtaccagcgccgtggattttttatcaagcagaaatgcatcgaacaacgagaatcaagatcactgag

SEQ ID NO: 106761 - DNA, 100 bp, Homo sapiens
cccaaccaaaaccagaagcagggccgcttccgcagcctggaggaagcactgaaagctgtgctacgcatgatggtcggagtaaatatctcagatgagcagc

SEQ ID NO: 106762 - DNA, 89 bp, Homo sapiens
agcgggtgcgtctgccgcagagtcggcacctgaaggacatggaggtcaaaatgcagatcttcgtgaaaacccttaccggcaagaccatc

SEQ ID NO: 106763 - DNA, 100 bp, Homo sapiens
caccacagtccttctgcagtccctcgtccagccacccccaggatcatgaggatgagaatgaagaaggtggtgaggtcccctgggccccgcctgaaggatc

SEQ ID NO: 106764 - DNA, 101 bp, Homo sapiens
ttttgacagagtacaccttaaagtatcagccaagtcaattgttgggatgactatgtataatcaagccacacaggaaattgcaaaaccttcagaacttctaa

SEQ ID NO: 106765 - DNA, 101 bp, Homo sapiens
cccagccgcaacccctgctgcctgtgctggtgctgctgctgtagctgctcctggacgggagagccgcgtctgctgtggccgtctgctccttcctgtgcttc

SEQ ID NO: 106766 - DNA, 74 bp, Homo sapiens
agctccactgaacagataagggccgtggaggagctcctggagaccctggatctggaaaagaaggcggtggctgt

SEQ ID NO: 106767 - DNA, 90 bp, Homo sapiens
cgggtgaggtacaggctcagtctgcggccaagactccgtcctgcaagggtcctcctggtccccaaggtgtcaaaggtgaacgtggcagtc

SEQ ID NO: 106768 - DNA, 100 bp, Homo sapiens
agagataaaagtattcgaatgagaacaagagtagcaggaaaaacgaaattacttgcaattatgccagttgcaggatgtgagtttgaatctatggaatgtc

SEQ ID NO: 106769 - DNA, 96 bp, Homo sapiens
gccttcctgcataccctggaccagcagaaacctagagtgacgttggacctctcgaacaaccagctgagcgagatccctgcagagcttgcggactgc

SEQ ID NO: 106770 - DNA, 83 bp, Homo sapiens
ccgctctccagcccgcttgaacgcaaaatgatgcttcaacacccaggccaggtctctgcctcggaagtgagtgcttctgccat

SEQ ID NO: 106771 - DNA, 89 bp, Homo sapiens
aggtgaatttccatgtcaacatagtccagtacagaacctgctaaggccatcaaacctattgatcggaagtcagtccatcagatttgctc

SEQ ID NO: 106772 - DNA, 75 bp, Homo sapiens
gcgcgcaggccgcggggagcacctggacacttcgtgtatgatcatgtgttcgctgagaagatcacttccttgcaa

SEQ ID NO: 106773 - DNA, 98 bp, Homo sapiens
atgccttatggactggagaaaagttccctcaaacagcactgaaactgtaatagaatctggctcccttcacgtgggggatgagatcctagaaatcaatg

SEQ ID NO: 106774 - DNA, 98 bp, Homo sapiens
aaaagatgaaaatagagctgaaaaagactcatgctgctgagacagagatgacactggaaaaggctggacgtaaagaaagaagtgatgcactcaattct

SEQ ID NO: 106775 - DNA, 90 bp, Homo sapiens
ctcttccccaatttcaatgcgagccccagcagctactattaatgagtgtctggaatatgttcctggcatttcacctaccctctctccaat

SEQ ID NO: 106776 - DNA, 100 bp, Homo sapiens
aatggttactgcatccatggaaaatgtgaattcatctattctactcagaaggcttcttgtaggagcaccatactggaccaacacagaaaagatggaaaag

SEQ ID NO: 106777 - DNA, 98 bp, Homo sapiens
cgatttcttgataaagtcttggttgctgccaacaagcactggatgtgtgtgagaagtggggagaaatgccaccactacaacccaaacatatgagggaa

SEQ ID NO: 106778 - DNA, 84 bp, Homo sapiens
tttgggtttagcacgatgagctcaatcggcactgggcatcgccctgagcaactggtggtttgtggcccacctgacagacctgct

SEQ ID NO: 106779 - DNA, 74 bp, Homo sapiens
gccgcagtcggcaaggagagacgtcgctgaggggcttgcctgaagcgagggctgcagggaagtcaacatttgtg

SEQ ID NO: 106780 - DNA, 83 bp, Homo sapiens
cctaactacaagagcaagatcttaaggcttctttgtacagtgaacatcattcatggcagtgattcagtaaaaagtgctgaaaa

SEQ ID NO: 106781 - DNA, 100 bp, Homo sapiens
gtgatgccattccagcactggactcatggaggctgagcatttattcagggcagcatctcatcacggcagttgctgaccatctatttaagctgaagacaac

SEQ ID NO: 106782 - DNA, 88 bp, Homo sapiens
accgcagcagtggtggctatgaacccagaggtcgtggaggtggccgtggaggcagaggtggcatgggactttgagaatcactacaaga

SEQ ID NO: 106783 - DNA, 96 bp, Homo sapiens
tcctccatgctgctcactagaaaaggggctgtgaactacaagttggatggcttgaggactggtactaaaaggaaacgtgactgggaggccattgcc

SEQ ID NO: 106784 - DNA, 100 bp, Homo sapiens
ccaggttcttcgaaaactgaagcagatgttgaacaacaagaacttcttggtatacatgaacaagcagcagtaggatttttaacactaatggaagctttaa

SEQ ID NO: 106785 - DNA, 51 bp, Homo sapiens
ggaatcttggattataatcatgaggacagcacatgtggctttcctgcaatg

SEQ ID NO: 106786 - DNA, 98 bp, Homo sapiens
tgaaatggctttctgtagaggacatcctggccgtccgagctgctgttatcaaagaacagcttcaagagactcagggattgtgtgaatatgctatctat

SEQ ID NO: 106787 - DNA, 82 bp, Homo sapiens
gacgggccgagcctgccactaatgcgtcaacctttgaggatgtcacccaggtgtcctctgcctaccagaagacagtacctgt

SEQ ID NO: 106788 - DNA, 75 bp, Homo sapiens
cgcggcttccggatccttggtctgcggcttgggcactgtttaaaggaaagttccgagaaggcatcgacaagccgg

SEQ ID NO: 106789 - DNA, 148 bp, Homo sapiens
atgacaacttgacttctctggggactctgaacttccctggtcgaacagttttttctaatggctattcaagtgttgctaacaaccacaagcagaatttgatgacggtggcaaaccttggtgtggtgtttggacccactctgctgaggcc

SEQ ID NO: 106790 - DNA, 100 bp, Homo sapiens
tttccgcctaccaaatacttaccctaattcatcatcaccaggttggctgatcaagatgacactgagtaacccttcagaactagatgaacttatgagtgaa

SEQ ID NO: 106791 - DNA, 74 bp, Homo sapiens
ccagaaggcatgaaccagcaatattaccctgatggattcactttggacagatcactagcaatcaaatgcttgtg

SEQ ID NO: 106792 - DNA, 82 bp, Homo sapiens
caccgtgaacggacagtcccccccaggcgacgttgtggacgtttaccagcgggagttcctggcgctgcgcgatcggttgcac

SEQ ID NO: 106793 - DNA, 132 bp, Homo sapiens
ggggaagcagcgtgagcagccggaggatcgcggagtcccaatgaaacgggcagccatggccctccacagcccgcaggttactataacaacagtaccaaggtggctgtgaaaaccctgaagccaggaactatg

SEQ ID NO: 106794 - DNA, 50 bp, Homo sapiens
gttgaagatgactcggacattttacatgaaacacaactggttttgagaat

SEQ ID NO: 106795 - DNA, 83 bp, Homo sapiens
caacttacggttttcgtggagaagccttggggtcaatttgttgtatagctgaggatgagaacaagttgagcagtgccaacggc

SEQ ID NO: 106796 - DNA, 75 bp, Homo sapiens
ctgagaactgataagaagataattctggttgaagttccttttttgccaggagattcagaccttgatcagctaaca

SEQ ID NO: 106797 - DNA, 74 bp, Homo sapiens
gaaaagtaattggtgtaaaatctgaaggagaagggaaggtgtggctcattgactttaatccatttggtgaagtc

SEQ ID NO: 106798 - DNA, 100 bp, Homo sapiens
ccggccgcggtggcggcgctgccgcctgaagtgcgggcgcagctggcggagctggagctggagctctcggaggattgccttgggtccccagtgtttactc

SEQ ID NO: 106799 - DNA, 75 bp, Homo sapiens
tgctgctggagacctggatctcgcgccacaaggagatggcggctgtggtgcttcaggcagctttcaggggacatc

SEQ ID NO: 106800 - DNA, 90 bp, Homo sapiens
ctggattgaattaaacaagacgtgcaaagcaagtggttcacgagggcagagcggcttgggtaaatccaccttaatcaacaccctcttcaa

SEQ ID NO: 106801 - DNA, 119 bp, Homo sapiens
ctgaaccacgctgaggggctgggagccgcgcacaccaccatcacaaatggtgatttctttgctaacatggtagtagatgctgtacttgctattaaatacacagacataagaggccagcc

SEQ ID NO: 106802 - DNA, 82 bp, Homo sapiens
gtatgcatactccacagcacctggtagctacagcaagctgggtagcaggcagatccaaaggatatcatgaagtttccagggc

SEQ ID NO: 106803 - DNA, 76 bp, Homo sapiens
ccacaccagaaactagcaccagccccaaatttcttgtcgccgtgatcctgaaggcgctgacctacgacgagaagcg

SEQ ID NO: 106804 - DNA, 75 bp, Homo sapiens
aggcaaggagctaaagcagcgtgcgttcagccctggggacactttcttcatgagcaacaaaccccaaagatacaa

SEQ ID NO: 106805 - DNA, 90 bp, Homo sapiens
caggcgcaaggcttcaggcgacccgtactgggcctactctggtgctggagaatctggtaaaagcaccattgtgaagcagatgaggatcct

SEQ ID NO: 106806 - DNA, 99 bp, Homo sapiens
tcaagtccaaggaggccgaggagtaccggttgaaggagcactatctcaccttcgaggacctacctgacttggaagatgatgatgaaacaggcaaatctc

SEQ ID NO: 106807 - DNA, 75 bp, Homo sapiens
gaatttatatagagatgtgatgttggagaactacagaaacctcgtctccctggcaaaagatacagatattgtgga

SEQ ID NO: 106808 - DNA, 84 bp, Homo sapiens
gcggtagcgaaggccgccgaacctgcctggctagccggcgacttgagtgacgaggaaatcctcattgacgattcaatttgttga

SEQ ID NO: 106809 - DNA, 83 bp, Homo sapiens
cgtcaccttaccttaaaccttttaagcaaggaaattgaactaagaaatggagagggccatgatccaaaggaaccagagcagtt

SEQ ID NO: 106810 - DNA, 100 bp, Homo sapiens
tgcagagccctgagaagttgcgcgatgccatcaaagtcatgcagaggttcgcggggctgccggagaccggccgcatggacagggtctcactctgtggccc

SEQ ID NO: 106811 - DNA, 100 bp, Homo sapiens
gagaagttgtaccagcacgttcgcgcttggctccctgcctacgctaccccccatttcatccgcatccaggttatgatgtgattgctcaagcccaatctgg

SEQ ID NO: 106812 - DNA, 100 bp, Homo sapiens
cggaactcggggcgcgcatcccgcaagtcggaacccggcggatcggatcccgcagatcggagacggggcctggagtgcatactccttccacgttactgca

SEQ ID NO: 106813 - DNA, 97 bp, Homo sapiens
attgaagattttaaggatcacattccaagggaaactgatatgaagagctccttaataagcatttatagtcagtttttggcagcaatagaatcactaa

SEQ ID NO: 106814 - DNA, 75 bp, Homo sapiens
gccctgggcactcaggagtgagctgcgaggaaggtttttctattgggaaagctactgatcggatggatgctttca

SEQ ID NO: 106815 - DNA, 100 bp, Homo sapiens
ggatttggctggcgtcccgcgaatacaggagtttccagaaaatataaaaaattgtaaagttttgacaattgtggaggccagtgtaaaccctatttccaag

SEQ ID NO: 106816 - DNA, 90 bp, Homo sapiens
caaagtgaccgttggagtttaatgagaggaatatactcatcatcagtctatttagaagaggtttttggctcttgtccaaggaagaacatg

SEQ ID NO: 106817 - DNA, 82 bp, Homo sapiens
cctcgagtttagccacaccaggctggagaatatggtgcagaggccctccacgcctctacggcagacacatgcaggccaaccc

SEQ ID NO: 106818 - DNA, 111 bp, Homo sapiens
agccatgaggcgccagcctgcgaaggtggcggcgctgctgctcgggctgctcttggaggcagtcatggatcaggtaatgcagtttgttgagccaagtcggcagtttgtaaa

SEQ ID NO: 106819 - DNA, 90 bp, Homo sapiens
cccttgttaactacaacagaccatctgaggcggggtttcaccatgttgcccagactggtcttgaactcctgagcttaagcaatccacctg

SEQ ID NO: 106820 - DNA, 75 bp, Homo sapiens
acaagatgtctaagggacacatgttggcagatgtcgttgccatcataggaatgatgagaagacagcagctgatta

SEQ ID NO: 106821 - DNA, 83 bp, Homo sapiens
tgcagatcgagctgggcaagtgcaaggcggaacacgaccagctgctcctcaaacctgcctagagctggaacgttacctccaga

SEQ ID NO: 106822 - DNA, 88 bp, Homo sapiens
gcagtccgttccacccctgccgaagatgactcccgttggaaaagagactgttcaaaccactgaggatcagattttgaagagagatatg

SEQ ID NO: 106823 - DNA, 79 bp, Homo sapiens
aagaactccctcaagtttcatttgtgaaggaccaggcctcctcttcccacctgtccagcagcatgaaagcagcatgatt

SEQ ID NO: 106824 - DNA, 82 bp, Homo sapiens
ttggacaacatgtcccaacattacatcccaattgtcctgggtcacataatgccagctgagcgtaaaaagccagcaagtatgg

SEQ ID NO: 106825 - DNA, 97 bp, Homo sapiens
atcagctcgtgcccgtcttattgatcctggctttggaatatataagcgagaaaatgtcattgaatataaacactgtttgattacaaaaaatgagaat

SEQ ID NO: 106826 - DNA, 82 bp, Homo sapiens
atcaaatataccaaaaatgtagaagttctccatcttgggaaagtctggtgatcctgcagcatatcctgacatggagtctgat

SEQ ID NO: 106827 - DNA, 80 bp, Homo sapiens
acaagaggaaagacacacctaccaagaagccagtcaagcggccagggaaatcctcattgacgattcaatttgttgaaggc

SEQ ID NO: 106828 - DNA, 75 bp, Homo sapiens
attttggtggagaattatccaacaagaaaaagacctgtggctattaagatagggcagctgcaatgactctccgca

SEQ ID NO: 106829 - DNA, 100 bp, Homo sapiens
tctcctgcctcagcctcccgagtagctgggactatagcttctgcagaaagccgtcattacacctgattttgaaaaaaaccactgtgttccaccatatagt

SEQ ID NO: 106830 - DNA, 80 bp, Homo sapiens
taacagccaagatgctgcggaatctgctgtcattttgtccagtgatgatgatgatgacaacgacagaactaacagaagag

SEQ ID NO: 106831 - DNA, 82 bp, Homo sapiens
cgttcatgtaaacagcatgacgtgaggccgtggatgcaggcattaaggttggtcaaagaaaaagtgatgtatgaaaaagagg

SEQ ID NO: 106832 - DNA, 101 bp, Homo sapiens
gaggatggtgcaggagcgcgagaaggatatcctgacggccatcgccgccgacctgtgcaaggttcataatggctgagctcattcaaactgaaaaggcttat

SEQ ID NO: 106833 - DNA, 82 bp, Homo sapiens
gtattctgtggtgactcatctcgcacgtgacccccctccctcttcaaggtgtttgatgcgatcatgaatttcaagaaagagg

SEQ ID NO: 106834 - DNA, 100 bp, Homo sapiens
ggcgtgcgcggacggtgtgcggccttgttgtcctcctggtgcgaagagctcggccgcctgctgctgctccgacatcagaagagccgccagagcgatcccc

SEQ ID NO: 106835 - DNA, 100 bp, Homo sapiens
ttattatggtgttattaaggaacctatgggaggatttgacagctaaggatattgaagaaattattgatgagctcaaggctggcaaaatcccaaaaccagg

SEQ ID NO: 106836 - DNA, 48 bp, Homo sapiens
accggtagcgcttgcagcatggctactgcagcactggggtgtcagttg

SEQ ID NO: 106837 - DNA, 100 bp, Homo sapiens
agcaggctggattggatttggcacttctttactgaagctgcacatcattgactcctgggcccaactgtgaccgatttaaactgcacataccatatgctgg

SEQ ID NO: 106838 - DNA, 100 bp, Homo sapiens
ccctgaacagcattctatcatggaaggaggagatgaagggcaagggccaaaatgatgaactgataaatttcaaacggaagagagtggcagcatttagaaa

SEQ ID NO: 106839 - DNA, 100 bp, Homo sapiens
ggcgaccccgagggccccgaagcaggggacgaaccgcgtgctgtccgagcgccggtccgagcagcggcggctgctgagcgccatcggtacctccgccatc

SEQ ID NO: 106840 - DNA, 96 bp, Homo sapiens
aattgttcagttgcaaaaagaaactggagccaccatcaagctgtctaagtccaaagatttttacccagacaattcctcctcgcttcaagaagatga

SEQ ID NO: 106841 - DNA, 75 bp, Homo sapiens
ggtggcggcttggacgactcggagagccggtgctggagaatctggtaaaagcaccattgtgaagcagatgaggat

SEQ ID NO: 106842 - DNA, 100 bp, Homo sapiens
acggggatgtatggggaccctgcagaaatgggtgccggaatctgtctcctgatcatcattcagatctcaggatggacccaagctctgccggacatggtgg

SEQ ID NO: 106843 - DNA, 83 bp, Homo sapiens
tgtcacagaaagagctgttaacacttcctagataacggggggatatgagactttctactcggaatatcctgagtgttgcgtgg

SEQ ID NO: 106844 - DNA, 75 bp, Homo sapiens
ccatgggcaccatgatctgtggctgggataagagaggccctggaactgtggctgcaccatctgtcttcatcttcc

SEQ ID NO: 106845 - DNA, 100 bp, Homo sapiens
tggacagtgagacagccatgttttctgtctacgatggacatggagaaactatgttccaacttcctgtcaacaatcttggcagtttaagaaaagcccggaa

SEQ ID NO: 106846 - DNA, 83 bp, Homo sapiens
gaagccaaagaactggctaggcaaataagctttaagctggtcctgctgatgatgaagcccctgatgctgaaaccactgctgct

SEQ ID NO: 106847 - DNA, 100 bp, Homo sapiens
tagctgcacagacataccatggctgctgctcttcatcctcttctgcattgggatgatttgcttggaacggtagaagaaatccttccaagcctctcagaaa

SEQ ID NO: 106848 - DNA, 114 bp, Homo sapiens
cttgactttaaatccattcatgttcaagaaccacaggagccttcattacagggtgacgcaagacgcggagctcggctgcacgacgctggcgcaagcgcgggggcaagagcgccg

SEQ ID NO: 106849 - DNA, 122 bp, Homo sapiens
gtcagcacttgctttagctatcaaagtactaaataagaccatggatgttagtaaactctctgctgaaaaaggttgttgaagattggaaattcatagcccaggttcttgatcggatgtttctg

SEQ ID NO: 106850 - DNA, 50 bp, Homo sapiens
agtggtggtggtgggggtagcagacagcaatggatcaacttcatatgcac

SEQ ID NO: 106851 - DNA, 83 bp, Homo sapiens
gggccagcgggtcatcgggcactacgctggagaagatgcaacgcttggtgatccagctatttttcctgccgtaattgtggaac

SEQ ID NO: 106852 - DNA, 74 bp, Homo sapiens
agccaggagtcatgagcgacagcggcgagcagaactacggcgagcgggaataactcaagtcacctgtactggaa

SEQ ID NO: 106853 - DNA, 74 bp, Homo sapiens
aagtgcctcacccctttctacaaggagggcaagtttgcttccaagccacctggtttccatcgggcctatagttc

SEQ ID NO: 106854 - DNA, 82 bp, Homo sapiens
atgccctacctcaacaagtacatcctggacaagttctttatagctccaagctctacagattcttcaaatatattgagaatag

SEQ ID NO: 106855 - DNA, 100 bp, Homo sapiens
gtagtgaataccgggagtcctggccccctaactcaagatgaccatgaaagctgtggttctaattctaccaaccgtagtactgctgagagcacaaaatcat

SEQ ID NO: 106856 - DNA, 75 bp, Homo sapiens
tgatgtggagggagccaggtgcctatatctttctccagggcctcgtcctcctgcctaagacggagtgcgacgtgc

SEQ ID NO: 106857 - DNA, 83 bp, Homo sapiens
ttacgctgcgggaccccgggcactgttgctgctgcgggaggttttgctgttactgctcagtgtagtcacaccttgaataagaa

SEQ ID NO: 106858 - DNA, 51 bp, Homo sapiens
cgccagtcaggccctggaggaggtagacaagggcgtggtccccctggcagg

SEQ ID NO: 106859 - DNA, 75 bp, Homo sapiens
ggaggcagaggtggaggcgctttgaaaggctgctttgaatgctgcatcaagtgtctgggaggagtcccctacgcc

SEQ ID NO: 106860 - DNA, 87 bp, Homo sapiens
cgtctctaccgagcacaaactccacgaagccaacgcccagaaaactgaatatcctgatgttgcttggccattgagatttcgcatcct

SEQ ID NO: 106861 - DNA, 82 bp, Homo sapiens
gcgtgttgctgcgagtgggacgcgcactggtcggtgccggctcaggagccggggtcatgatgatgggcagcgcccgagtggc

SEQ ID NO: 106862 - DNA, 98 bp, Homo sapiens
ttggtcccgtcagccggaccccacctggacggctggggccacttgtggtcgccgggaggtaggtgatgctctgatgctgctgcctcttatgaattgac

SEQ ID NO: 106863 - DNA, 50 bp, Homo sapiens
aagagacacagcccatttttttaggttttgaagggagcacctgtgagagg

SEQ ID NO: 106864 - DNA, 100 bp, Homo sapiens
ctgaaatttacagaaacaaactacatctcaggattaccagagactgatgactgtggcggagacgattacagctctcatgtttcctttccagtggcagcat

SEQ ID NO: 106865 - DNA, 88 bp, Homo sapiens
gaagagctgaagagacctggagccgacagacggacagaagtcggtcctaggccccccaggctctgaccttctttcccaggatgaggtg

SEQ ID NO: 106866 - DNA, 100 bp, Homo sapiens
ccgtctggatctggagaggaagattgagtcgctggaggaggagatccggttcttgaggaagatccacgaggaggcttccgaggaggcagaggaggaggag

SEQ ID NO: 106867 - DNA, 136 bp, Homo sapiens
tcatggcggctgcgctgttcgtgctgctgggattcgcgctgctgggcacccacggagcctccggggctggtgagaagccctaccactgcaactgggacggctgcggctggaagtttgcgcgctcagacgagctcac

SEQ ID NO: 106868 - DNA, 75 bp, Homo sapiens
acaagattagacaacagagtcattgatcttagggatagcactataatatgcagaaatctacaaattctgatactt

SEQ ID NO: 106869 - DNA, 82 bp, Homo sapiens
gcggccaatgtgggatcgatgtttcaatattggaagcgctttgatttacagcagctgcagaacatccagtcatggataaaaa

SEQ ID NO: 106870 - DNA, 75 bp, Homo sapiens
gcaagatggacggtttcgccggcagtctcggcaaaatccatgtttggtgaccagagctgtatatattgatattct

SEQ ID NO: 106871 - DNA, 90 bp, Homo sapiens
gtccgctggacaagcacgagggcgcgctcgagacgctcctgaggtcactacaggaaaagatatcttcattaaagtgcaacagcacactga

SEQ ID NO: 106872 - DNA, 82 bp, Homo sapiens
cactctcaacttcgagtacgccgtggagcgcgtcctcgcaggtccactccatactcggcatacgacccagagacgtacacag

SEQ ID NO: 106873 - DNA, 100 bp, Homo sapiens
agctgagcgagctgtcagagcccggggacggcgaggccctcatgtaccacacgaaggggaaactgaggcccaaggaaattgagtatctctgcaaagtcac

SEQ ID NO: 106874 - DNA, 96 bp, Homo sapiens
gtggattttgtcgctggacgtctagagatgtgggcatggcagacaaatctgtaggtgtagaatgagccaaggagactcaaacccagcagctattcc

SEQ ID NO: 106875 - DNA, 73 bp, Homo sapiens
gaagccctctgccatccagcagcgagccattctaccttgtatcaagggatgctctggagttttggctgcaagc

SEQ ID NO: 106876 - DNA, 101 bp, Homo sapiens
gcgggcgccttgcaaggaacacccggcagagcccacatccacgggagctggttttctgtctcaactggtctctgacaagcctctgactgaatgtatccgtg

SEQ ID NO: 106877 - DNA, 100 bp, Homo sapiens
tggaaacaccatggctgcggcggcccagctctctctgacacagcattgcagtgtcgagatggctatgaaccctgtgtaaatgaaggaatgtgtgttacct

SEQ ID NO: 106878 - DNA, 100 bp, Homo sapiens
cctgccagatagctcttattttgagattccagcaagattatggaagagcatagctacatacaaaaggagctagatttacaaaatggtagcttagaggaag

SEQ ID NO: 106879 - DNA, 75 bp, Homo sapiens
taagacgtgcacgactcgccccacagggccctcagaccccttccttccaaagggccaaacgtaccaagaaagtcg

SEQ ID NO: 106880 - DNA, 75 bp, Homo sapiens
cagaagcttaaaggaagcagaaaatgtgtggcggattactgggacagatgagcattccccatatggtccctcacc

SEQ ID NO: 106881 - DNA, 76 bp, Homo sapiens
ggacgttgtctaaatttcggtagccatggcacaagaatatagaggaggaagccaagaatctggtgagcgaagccat

SEQ ID NO: 106882 - DNA, 100 bp, Homo sapiens
tgaacgagctctttcagcccaccgtcagcgggatcatccagcacataggtgagacacagtaacctggttgaactctgcatctggaaagctgaagactgaa

SEQ ID NO: 106883 - DNA, 75 bp, Homo sapiens
tagacaggggtggcagggtgccacttcccattaatgacctgaaggagggaacttctgttcagtgccgtggaagcc

SEQ ID NO: 106884 - DNA, 75 bp, Homo sapiens
caaacaccacatgttgtctcttagaagtgggagctgaacgagtacccaaaggcaagtggaacagctctaatgggg

SEQ ID NO: 106885 - DNA, 104 bp, Homo sapiens
agactttctgccatttttaacaaaccctaatacaggagatatgtatactccagctttgacattgtaaaccacagacgaattggagcttggcattgaaaggaggt

SEQ ID NO: 106886 - DNA, 111 bp, Homo sapiens
ccgctgtgtggttgcaacggagataaattcccggaaccgcgattcggcgtgtcagcaattctgtggtgttcttggtcacacatttatggagtttctgaagggcagtggaga

SEQ ID NO: 106887 - DNA, 48 bp, Homo sapiens
cgtgtggaggaggccatgtacagggtttttaatgaccacaacaagcaa

SEQ ID NO: 106888 - DNA, 75 bp, Homo sapiens
ctttatgatgatccattcccacttactgaataaggcggggtttcaccatgttgcccagactggtcttgaactcct

SEQ ID NO: 106889 - DNA, 101 bp, Homo sapiens
gctgcagtaaaatgggtgatgtcaaagagaactatcttgaaacatttatttccagtccaaaccctattacttatgcctgggaaggtggaaaattgatatca

SEQ ID NO: 106890 - DNA, 100 bp, Homo sapiens
cttgctcgggatggtgccacaggaggctgtgcgggccccgctccgcttcgaatgggtttgaagtttgaggaaattcaaaaaagatttggtgaagagttct

SEQ ID NO: 106891 - DNA, 89 bp, Homo sapiens
gttggtgctgttggcatggcctgtgccatcagtatcttaatgaagactgtagactgctttgggattacgtctatcagttgctttctgac

SEQ ID NO: 106892 - DNA, 75 bp, Homo sapiens
cgcccctcggcctcggagcaacgagcgcagcgccggttcattttccagacactgaaagagcagaatggctaaata

SEQ ID NO: 106893 - DNA, 98 bp, Homo sapiens
gtggggcctcagagcactgggactgcaaggtggtttcctgtaaaaactgcagcatccagcgtggacttaagaaggcacagttggcgggcagctcccag

SEQ ID NO: 106894 - DNA, 117 bp, Homo sapiens
aacatcgctcggttggaacttaattactgcgtccccatgggagtacagacaggcgacaggtggatccataaagaacccagccaacccgcagagggaggggaggggctgagctgtgag

SEQ ID NO: 106895 - DNA, 89 bp, Homo sapiens
tatcctctgtggagaacacccccccatggaggcgaggtagagttggggtcgcagctgagattggggattttgatgaagccttggacaga

SEQ ID NO: 106896 - DNA, 98 bp, Homo sapiens
agtgtcaatgcggcgctcccgctgaaggagggaaacgcggcgcgtccaggtaaaagagaacctgctttcatgcaagatgctgctgcactgcaaacggg

SEQ ID NO: 106897 - DNA, 75 bp, Homo sapiens
gtgcggggtgcgccggcagaggatccagtgttcaccatcctggccccggaagagacaagaggagcagcagcggca

SEQ ID NO: 106898 - DNA, 100 bp, Homo sapiens
ccaacttctgcgggatcttcaaccacctcgagcggctgctggacgaagagcttgtcaggaagatcggaggtgccaagtagcagagaaagcatcccccagc

SEQ ID NO: 106899 - DNA, 82 bp, Homo sapiens
cttcgaaatcgcctgctacaaaaacaaggtcgtcggctggcggagcggcgtctcaccatggatgatgatatcgccgcgctcg

SEQ ID NO: 106900 - DNA, 50 bp, Homo sapiens
cggcgccatggcagggcttgcaggctttccttaaagtttcccatgtctca

SEQ ID NO: 106901 - DNA, 80 bp, Homo sapiens
acgaggagctgagcaagctgggcctgctggacaaccactcctcggagttcaatccagaatgacagggtccagaaactggc

SEQ ID NO: 106902 - DNA, 75 bp, Homo sapiens
caatggagtcgagtctagaattcacacagagccacctaggtgcccagggtggctccgtggcccgcacactcctgg

SEQ ID NO: 106903 - DNA, 100 bp, Homo sapiens
catctggtcttacctatagcacttaacaaaggtgttagtaaaatggcctttcgccatttaattgagttcacatatacagcaaaattaatgatacaaggag

SEQ ID NO: 106904 - DNA, 100 bp, Homo sapiens
tgctagaatctactactgtctggccactggctgctgagcctggagtgctcagattgctgacctacagcagaagctgctggatgcagaaagtgaagacaga

SEQ ID NO: 106905 - DNA, 87 bp, Homo sapiens
acaatagctcaaggaaacctttccaacacagatgtccaagctgccaagacagtggggggtggacgcccatcatctgggctgcagagc

SEQ ID NO: 106906 - DNA, 98 bp, Homo sapiens
gccgggagggggccctgagcctcctgcaacacctgcggcctcactgggacccccaggaggtgaccctgcaggatgatggcctcccagaaaatgaacat

SEQ ID NO: 106907 - DNA, 82 bp, Homo sapiens
attggactacagattagaggataataaagaacattcatttgaggtggataattactgtaccttcctcatggaaaaagtttta

SEQ ID NO: 106908 - DNA, 50 bp, Homo sapiens
cgtggaacggctgcttttggaagatccggagttaggtgttggcacgctac

SEQ ID NO: 106909 - DNA, 51 bp, Homo sapiens
gaatagcagctcaagacttgttgctgttgccgatatggagctgctgagcca

SEQ ID NO: 106910 - DNA, 90 bp, Homo sapiens
gcgggatctgtccaccctcctaactatgtttggcctgccccagtgacagtgggacgggctgccctgacggaagctcctgttttcttgtca

SEQ ID NO: 106911 - DNA, 75 bp, Homo sapiens
cacagacaacagcctggtggcagcgatctttgcagattatcctgtggaaggaaaatgcctaaagtcaaaagaagc

SEQ ID NO: 106912 - DNA, 73 bp, Homo sapiens
ccacaggccctgggggatgcaccctccacgtccgtcagcctgacgacagagcactgcagtttcctcctgaagg

SEQ ID NO: 106913 - DNA, 142 bp, Homo sapiens
cttcaacaggaagtccaccagctacaagaaaagttagcaatgatggaaagtggggtgagagactatagcaagcaggctgccaaacgagggattctttcatctggtcggggcagaggaattcattcaagaggtcgaggtgcag

SEQ ID NO: 106914 - DNA, 88 bp, Homo sapiens
cagaaccaggcccccaactcagccatctgcggaggtcaaggtatgaggatacatgggctgcacttcacagaagagccaaagactgtgc

SEQ ID NO: 106915 - DNA, 71 bp, Homo sapiens
caggccagtcgcctccaggccaagagggatccttcacccgtgtctggtatctacgagaccccagcaggcac

SEQ ID NO: 106916 - DNA, 83 bp, Homo sapiens
cgcacacctgagccgcccggagaggagcctcggccccgtacccagtaaaatgtttattggaggcttgagctgggatacaagca

SEQ ID NO: 106917 - DNA, 100 bp, Homo sapiens
attatattctcttcttagtcagtgtatctaccgtcatcgtaaagattatgacaaatcacaacttgtagagatattgatgatgttaagaagttcaaaccgg

SEQ ID NO: 106918 - DNA, 98 bp, Homo sapiens
ctgaagccacccaggtgtaccccaagctgtacttgtcacctcgaattgagcagattctaaactgccttcctcggttcgcagtacacttctggaactgt

SEQ ID NO: 106919 - DNA, 98 bp, Homo sapiens
ccgagtctatcttcacactttggcagagagtatttgcaaactgattttcccagagatctgggacttggctagtggcaaattaaaactgtcattgactg

SEQ ID NO: 106920 - DNA, 100 bp, Homo sapiens
aacaattagggtgacgtgtgcattgagtaaacggtcagtatagaccttctgatttgctgtgccctgagacatatgtttgggtacccattgagcaatgcct

SEQ ID NO: 106921 - DNA, 100 bp, Homo sapiens
gcagaacgatcctcgaattcagcacaggtattttgcaaatgaaccatttgctgacttccaccgagtggaaggattgcaaggagtctacattgctactctg

SEQ ID NO: 106922 - DNA, 100 bp, Homo sapiens
tcggcaccgcgctcgcctccctcggctcggcccaaagcagcagcttcagccccgaagatgccgcagctgagcctgtcctggctgggcctcgggcccgtgg

SEQ ID NO: 106923 - DNA, 75 bp, Homo sapiens
taaaaaccccggagtcttcctgatccatggacccgatgaacatagacacagattagccgatgaattacatatgcc

SEQ ID NO: 106924 - DNA, 75 bp, Homo sapiens
gacgtgggcgccctccccgccaaggcccgtgcgaggttatgaagacagtatggagtttccagaccatagtagaca

SEQ ID NO: 106925 - DNA, 75 bp, Homo sapiens
ggccagagctcgagcccgacgcgctgtctggagtcgtaggacccccgcagcaaacacaagtttaagatccacacg

SEQ ID NO: 106926 - DNA, 98 bp, Homo sapiens
cctggaggaagaagaggatggagaggagctcattggagatggcatggaaagggacttccaaggaagatgccatgaaagcttacatcaacaaagtagaa

SEQ ID NO: 106927 - DNA, 100 bp, Homo sapiens
acctggaccacggcgcagacgcgggcgagctgcggctcggacgccagcggacacgcgggcgagcaatcccacagagtattgatgaggaaactgaagtttg

SEQ ID NO: 106928 - DNA, 83 bp, Homo sapiens
cgcggggacgccgcgtgctcccaacgtcgccccggtttgacgcacacggcaccaaactgatatgggtctgcaggatggagttc

SEQ ID NO: 106929 - DNA, 100 bp, Homo sapiens
caagaactttggtgtggtctgagaaagagcaggtggaaaagtctgcttatgagttttctgaggaggagctgacaagcacaagtgtggaacacatcattgt

SEQ ID NO: 106930 - DNA, 74 bp, Homo sapiens
cacagtattaaaacgcctcaaggaaatcatggaggggaaaagccagtgattcgcctttgccagtctcatctcgt

SEQ ID NO: 106931 - DNA, 82 bp, Homo sapiens
gcagaggacgccggaacaccctggaagccgagaaatgagctccacgcaggagatcggtgaggagctgatcaacggagtcatc

SEQ ID NO: 106932 - DNA, 100 bp, Homo sapiens
ccgcgacctggctgatgttgcagcccgggaggccgaacgggagggcgctacggaagaggcggtccgggagagtggaagacctggagcggaacaacggctc

SEQ ID NO: 106933 - DNA, 100 bp, Homo sapiens
ggtacagaccaagtatgtggaagccaaggactgtctgaacgtgctgaacaagagcaacgaggaaatggcacctcgaaaggggaaggaaaagaaggaagaa

SEQ ID NO: 106934 - DNA, 75 bp, Homo sapiens
gtcgccggagcctggagccgtgaacccagccgcgccagatgaatgatttcggaatcaagaatatggaccaggtag

SEQ ID NO: 106935 - DNA, 75 bp, Homo sapiens
cagccatgctgaactcgtatggagagttaccggtattgtaagaacaagccgtacccaaagtctcgcttctgccga

SEQ ID NO: 106936 - DNA, 76 bp, Homo sapiens
gcttataccatggagaaggagcccaggtccattgcaaaagaacttgcagactggcttattagcaacaatgtggtgg

SEQ ID NO: 106937 - DNA, 74 bp, Homo sapiens
cccactcaaggatatgcacagaccacccagctgctgtgttgaaatatgaaaacaatgtcatgaatatcaggcag

SEQ ID NO: 106938 - DNA, 75 bp, Homo sapiens
ccagacggcagggagtgcatcaaaggtgtgaacacagccatccagtccaatggatcagatgggcaagatgagacc

SEQ ID NO: 106939 - DNA, 90 bp, Homo sapiens
cccacgtcgcttgggggccacggcgcggacgccatgctgctggagtacttagggaagggcaaaagcatcgtggatgtggggctggcccag

SEQ ID NO: 106940 - DNA, 100 bp, Homo sapiens
ctctgaatcgtgttcctgaatgaaagaagtcaggtcagtactcctgcatttgtaccaacgaaaactcacgtgctgcttcatcgaatgagtggaaaaggac

SEQ ID NO: 106941 - DNA, 75 bp, Homo sapiens
ggaagggccggcccgcctccctggccggggcgcagttcggaggttcaggtcattaaatttgacggtggagaggaa

SEQ ID NO: 106942 - DNA, 100 bp, Homo sapiens
gaccttaaaatacccgcaacagccccttcgtcccaagcaagacaccttcatggaaaattatttcactagccaacgggacaacatcttccgaaatgtggag

SEQ ID NO: 106943 - DNA, 88 bp, Homo sapiens
caaacagtttgaagctgaggattttggaacaacctatcttcagcactcgagctcatgtcttccaaattgacccaaacacaaagaagaa

SEQ ID NO: 106944 - DNA, 89 bp, Homo sapiens
ggcgacacgtggatccaagatggcgacggcgatggcaccatgactcctgtgaggatgcagcactccctggcaggtcagacctatgccgt

SEQ ID NO: 106945 - DNA, 74 bp, Homo sapiens
tagaatatacaaagacaaaaggagattctgatgaagaagttattcaagatggatgtggagagcatcttgtgcgc

SEQ ID NO: 106946 - DNA, 100 bp, Homo sapiens
cccctccgcccggcagctgccccgtctgagaagacctgctgaagctcacacccgtggaccacccagactgcctgccgctacaggatgccctccgcatctc

SEQ ID NO: 106947 - DNA, 100 bp, Homo sapiens
gctgctggcctcggccacccagccgtctcctgtgaaggccatatttgataaacaggaacttgagggaatgaccctgcataaaaaggcagctgaagataga

SEQ ID NO: 106948 - DNA, 75 bp, Homo sapiens
ccaagaacgctgtgctggagcacatggaggaactgcaggagcaagtggcgctggagggtgaggacaaaatcttct

SEQ ID NO: 106949 - DNA, 82 bp, Homo sapiens
gccgcgcacttcgtcatgttcttcgcgccctgcccgagcgggaagaagttccgcagcaagccgcagctggcgcgctacctgg

SEQ ID NO: 106950 - DNA, 97 bp, Homo sapiens
ctggacaaagcgtccatcatccgcctcaccacgagctacctgaagatgcgcgccgtcttccccgaagcatgtctgtacttcatctgcaaagctttgg

SEQ ID NO: 106951 - DNA, 90 bp, Homo sapiens
atgaagtcaatttcatacagaaccttgtgttttacattgaagctgcatataaaactgctgaaacaacagttccaggccaggtgcgatggc

SEQ ID NO: 106952 - DNA, 90 bp, Homo sapiens
tgagatcgtcagcgctgactccatgcagaacaagttgaaatcatcgcagaaggataaagttcgtcagtttatgatcttcacacaatctag

SEQ ID NO: 106953 - DNA, 90 bp, Homo sapiens
ctctgccacaagcaccatctttaaacctcctccagctcgcttaggatgggggcctatgtcttcatcggcgtgggggcagtcactatgctc

SEQ ID NO: 106954 - DNA, 100 bp, Homo sapiens
cagcgagccgtgagatgcgtggtccaccatcggtgacctcaccgcctcggttcgccctcagccgccccggtgaatgaaaactttgccattgatttgatag

SEQ ID NO: 106955 - DNA, 75 bp, Homo sapiens
acttgtgcccttctggagtttcaaatcctgctctactcacagcgagtctgcactatggaaacaacctgtcaatcc

SEQ ID NO: 106956 - DNA, 100 bp, Homo sapiens
cgttatattaaagaagtcccaagaaaccatactcaggaggtctttgtctccaagaaacagcccgggaaggcagcagcatctctccaccatggttcatggc

SEQ ID NO: 106957 - DNA, 98 bp, Homo sapiens
gtcccggtcccagaccaccctcctccaccgtcgcctcccactgcaaaaaggcctgggcctctccttccgatgaaaagagaaaggaagaatggactaca

SEQ ID NO: 106958 - DNA, 100 bp, Homo sapiens
agaagagccatgggtcctcgacctgcagggagcagaggggacagaggcaccaaggacctccaagacagaagttggtgagatggcaaagcagtatatagag

SEQ ID NO: 106959 - DNA, 98 bp, Homo sapiens
gattacctttccaagccaatgcccaagacattataaacatatgggcacggttatgaaatattttgtgttacttgtaacagttcaaagactctgcttgc

SEQ ID NO: 106960 - DNA, 101 bp, Homo sapiens
aagaagactgatggagcaggcttgcaatattaaaaacttgtttcctgtccacgcaatgtgtctgaatgcagccatgactgtgttctgacatcagaaggtcc

SEQ ID NO: 106961 - DNA, 83 bp, Homo sapiens
acagctctgcggctcgggccctgagatgtgctggtggacggacagccatgtgaccgcgaggctgtggcggcctgccaggtggg

SEQ ID NO: 106962 - DNA, 100 bp, Homo sapiens
tttcagacagaaaaaacaattatgttcagcatgttagaactcatacaggtccttccatagtgacgccccccaaggacatctggaatgtcactggtgccca

SEQ ID NO: 106963 - DNA, 50 bp, Homo sapiens
tggcaaaccagatatatgacttggttagcatggcctcattgaaagaacta

SEQ ID NO: 106964 - DNA, 100 bp, Homo sapiens
accttgtggccctgggctttaccatctttgtggctgtgcttgccaggcctggctccagctctgtgtgctccgggatggagcaggtgtgcagagggtgaga

SEQ ID NO: 106965 - DNA, 75 bp, Homo sapiens
ttaaaagaggagcagcatggcatttcagtcactggtttgcagagtccaggtcttcatgtacgtttaagcaggctg

SEQ ID NO: 106966 - DNA, 101 bp, Homo sapiens
aaagttggaacacagcagagggtgtgtaataaaatacaggaactaccaggttgtttttcaaagcagcggcactattttgcatttccaccagcagtgtgtga

SEQ ID NO: 106967 - DNA, 95 bp, Homo sapiens
gtccctgagagagctcatctcagatctggagcatcggctgcaggggtcagtgatggagctgcttcagaattctgcttggtcagaatcgtgatggc

SEQ ID NO: 106968 - DNA, 100 bp, Homo sapiens
agataacactttagtacagtcgccaactgatgtctacagcttcatcagcaatggaagtggctgatatgtggactctgcagattatataaccttcctaagc

SEQ ID NO: 106969 - DNA, 97 bp, Homo sapiens
ccaaagagaggtgttctgaacaagttcaaggaggccttacatcgggaacaaatgttggaacagaagttagccacgcttcagcggctactagccatca

SEQ ID NO: 106970 - DNA, 99 bp, Homo sapiens
catcaatccctaccactataagagagtagaaagccctggtgtatgcaacagcgttattgcaacaggctaacgaaaacagacaaaattcaactggaaaag

SEQ ID NO: 106971 - DNA, 75 bp, Homo sapiens
cggcggggagcacacggagcactgcaggcgccggcctcccgcgacgatgcccctcaacgttagcttcaccaacag

SEQ ID NO: 106972 - DNA, 80 bp, Homo sapiens
cgaaccctcctcctgctactctcgggggccctggccctgacccagacctgggcgggctgctggtggtctacccttggacc

SEQ ID NO: 106973 - DNA, 100 bp, Homo sapiens
ccctcgttctgggcttcgttttcatgttgctggtggaccagattggtaactcccatgtgcattctactgacgctaatcttccagtaccaacaattgcagc

SEQ ID NO: 106974 - DNA, 83 bp, Homo sapiens
agatcttcaacaagaggacccaggagaaattcgccctcaaagcaggtaacttgcagactcacttacgacggcattctggtgaa

SEQ ID NO: 106975 - DNA, 122 bp, Homo sapiens
caaatcccatgagaagcagcagccgcagacaggagatccttccaagagtagctccaattccgatcggatcctcagatgaagactggcccatttgcagagcactccaaccagctgtggaacat

SEQ ID NO: 106976 - DNA, 107 bp, Homo sapiens
gatctctctcgctgtgagacatgtctgagactcctgctcagtgtagcattaaggttttaaaatcaaagatgggaaaatcggagaaaattgcccttccccatggccag

SEQ ID NO: 106977 - DNA, 98 bp, Homo sapiens
gaggggacaagtacctttatgaaccagtgtatcccaatattctaccttgtaaatactgttatttgtatatactgtaaatgatgacatcggtgggcact

SEQ ID NO: 106978 - DNA, 100 bp, Homo sapiens
actgtgtgttttcagcaaatgaagatcatgaaaccatccgaaactatgctcagagtggatcaatctccgagatgggcccatcaccatatctgactcctca

SEQ ID NO: 106979 - DNA, 99 bp, Homo sapiens
ctccagctctgcctggagcactcgctggccgactgcgccgagctgcacgtcctcgaacgcgaggccaacagccccggatgtacagttacccagcacgtg

SEQ ID NO: 106980 - DNA, 83 bp, Homo sapiens
tatgaatatgaaagaattccgagagaacgagcacctcctcgaagtcatcccagtacaatgcagatcttcgtgaagactctgac

SEQ ID NO: 106981 - DNA, 100 bp, Homo sapiens
agggactggcagctccactgccgtcaactcctgttctcctcagagcctggttggtgttcgaggaagagacattgttgttcttggtgtggagaagaagtca

SEQ ID NO: 106982 - DNA, 100 bp, Homo sapiens
cgcacctccgtagctgactcgagatggacagagacgtatgtgcgttggtctcctaagggcacctacctggctacctttcatcaaagaggcattgctctat

SEQ ID NO: 106983 - DNA, 100 bp, Homo sapiens
ttgcccttggccccctcgtcgtctgccccaggtgatgtgtccaatctagatcccaacttctcatttgaaggcaccaaactggatgtggggaacattgtgc

SEQ ID NO: 106984 - DNA, 100 bp, Homo sapiens
cccagaagttgttctaacgctgcctttgctttaaaacagtattacttgcgatagaagaagtcagagatgccatggaaaatgaaatgagaacccagcttcg

SEQ ID NO: 106985 - DNA, 100 bp, Homo sapiens
tgtggctcctgtctgcccagagaggactgcctgctggggaaagggggtactcctgagctcctgacagcccagcttcagtggatgacgtagtagatgaaag

SEQ ID NO: 106986 - DNA, 100 bp, Homo sapiens
cccatcgcagccgccccgaaggagccagaacgccaatctgaattgccaacgcaaagcaaagcgagcttccccagtattctcagtgacccagacccggatt

SEQ ID NO: 106987 - DNA, 83 bp, Homo sapiens
cgcgtctctctgctgcggcgcggggaccgctgtgctctcggctcaggtggccttccttcagggagagaggaaagggcaggaga

SEQ ID NO: 106988 - DNA, 75 bp, Homo sapiens
ttcgaagtgacctcagcagggcatccagggagtggagcttggtttcgggatctcggtgctgcagacggcgagacc

SEQ ID NO: 106989 - DNA, 82 bp, Homo sapiens
gctcgcgctactctctctttctggcctggaggctatccagccccagctcaacattggcaatgtgctccctgtgggcaccatg

SEQ ID NO: 106990 - DNA, 100 bp, Homo sapiens
atgcagctggctagagatatggcaaacaaagctagagaagatttgctgaaaattcagaaagaacgtgattttcatcgaatgcatcataagcgaatagtcc

SEQ ID NO: 106991 - DNA, 50 bp, Homo sapiens
cttctgttcagttttgagaaaaaagaatggcgatcagtccacgaagcgat

SEQ ID NO: 106992 - DNA, 75 bp, Homo sapiens
cacagaggaaggacagtggagtctggcatcttattggtcagcccaaggccaaccccactgtcactctgttcccgc

SEQ ID NO: 106993 - DNA, 75 bp, Homo sapiens
cggcggccggcgatagcccggcgctcatgacagatagttttgaggcagctgtgccatcaaatagccacattgttt

SEQ ID NO: 106994 - DNA, 76 bp, Homo sapiens
agcaccttttggcccaatgaatatcaggaagttggtgaaccatctaaagaagagaaggctgtggccaagtatcttc

SEQ ID NO: 106995 - DNA, 98 bp, Homo sapiens
cctggtcccagtgtccgggacctcgctggctgtcggcatcgacttccacgctggaggaagagcaagcaggccctgagggactataagaaggttcagat

SEQ ID NO: 106996 - DNA, 76 bp, Homo sapiens
aaggaaatgaaggcacaggagcagagggtgagagcacagtaaggactattgctatggatggtacagaaggcttggt

SEQ ID NO: 106997 - DNA, 101 bp, Homo sapiens
ggcgacccggcggctgtggaggccacgctcagctcgccaggcggcgcagggtgctggagaatctggtaaaagcaccattgtgaagcagatgaggatcctgc

SEQ ID NO: 106998 - DNA, 78 bp, Homo sapiens
cgggctgctgctcaagaagctcaaggacgagggctgccgggcgttctacctggaagattacaccaccaccttcactgt

SEQ ID NO: 106999 - DNA, 101 bp, Homo sapiens
cgggagacgagaagcctgaaaagtcgcagcgagctggagccgccggaggagatacaactcgtcaacgaatcaaattcagtgatgacagagtatgcaagagt

SEQ ID NO: 107000 - DNA, 50 bp, Homo sapiens
ggtcccactgcagccctccaagcagatttgcttgtaaatgcatcacgaag

SEQ ID NO: 107001 - DNA, 50 bp, Homo sapiens
cataagaccctgaagctggtcgtcaaaagcctgcaggacgctggcatcgg

SEQ ID NO: 107002 - DNA, 75 bp, Homo sapiens
tccgcacaggcctgctgaactgggtgctttatataggctgcagaaccttggcctgaaaatgctacattatatcag

SEQ ID NO: 107003 - DNA, 109 bp, Homo sapiens
cagaccctggagcctcagttggaagcagccgatccagcctgcggagcctgtggggcagatctattaatgagatgaagcggttggaagaaatgtcaaatatgtttcagag

SEQ ID NO: 107004 - DNA, 83 bp, Homo sapiens
cccgtagcgcccccagcagtcctgctcctcgccgtaccaaacagttatctcagcatcgagtgacaagagactgtatatgggag

SEQ ID NO: 107005 - DNA, 90 bp, Homo sapiens
aaatctgaggttatcaatgacgaggaacgcctttttacccaagtcagccggtgtatcagtcagcacctatcatagtgcctacgcagcaac

SEQ ID NO: 107006 - DNA, 100 bp, Homo sapiens
ctgcacacctggatccaggataacggaggctgggatgaaggtttaaggctcagaaaggtagcacattcggataaacctggatcaacctcaactgcatcct

SEQ ID NO: 107007 - DNA, 82 bp, Homo sapiens
cggagcgcatgatggcctactgcgaccagatcttccaggacgagacgggcaagaaccggatcttcaccaaggttgtgctgga

SEQ ID NO: 107008 - DNA, 75 bp, Homo sapiens
ctcaaaacctggctgttttccttcagagcactggcctccaattgtgcctcattgcattcttgggcgtcttcttaa

SEQ ID NO: 107009 - DNA, 101 bp, Homo sapiens
tggaggtgtcagtgttaaaggaacctctacaacgaaggtgaagccacggaagataaggcactagggatacagcgatgagctcccatggatttacagtggtg

SEQ ID NO: 107010 - DNA, 100 bp, Homo sapiens
ggctgggcagctatgtcatcaacgggcgcaccaaggccatccgggatggtgtcattgaggccagcatcaaccacgagaagggctatgtccaatccaagga

SEQ ID NO: 107011 - DNA, 75 bp, Homo sapiens
cctcgcctttgccgatccgccgcccgtccacacccgccgccaggattttgacacttcatgacatgtcattattta

SEQ ID NO: 107012 - DNA, 100 bp, Homo sapiens
gtttggagaaaatcagaagtacagttttatctagccacatcttggagtgatccgtatgtgaaactttcattgtacgtagcggatgagaatagagaacttg

SEQ ID NO: 107013 - DNA, 80 bp, Homo sapiens
tttggttggaggaaaccatcagagcgaccagatgactggactctctctgctggtggcagtggaacaatttatggatgggg

SEQ ID NO: 107014 - DNA, 75 bp, Homo sapiens
cgagctgtttgacccctttgacctcttcgatgtgcgagactttggaaagcttgatcctctcccagaaaaggtttt

SEQ ID NO: 107015 - DNA, 100 bp, Homo sapiens
tcatccgggtgtgtgagaagaacatcaagaggttcaggtcgttccaggggtagaggaggcatgaaggatgaccgtcgggacagatactctgcgggcaaaa

SEQ ID NO: 107016 - DNA, 101 bp, Homo sapiens
cgcgctggctcggactccgctccccgccccgccgcggccatggaggacgagcggaaaaacggagcctacgatctttaatctcatgaagtacgacagctaca

SEQ ID NO: 107017 - DNA, 80 bp, Homo sapiens
agaagagggcggagcggagacgggagtattatgaaaagatcgtcaaaatgcagatcttcgtgaaaacccttaccggcaag

SEQ ID NO: 107018 - DNA, 86 bp, Homo sapiens
gaagagctatggtgaaacaccactgaagcattgccaagagtgtgaacatggctacgcctcttcattcccgtccatgccgagccccc

SEQ ID NO: 107019 - DNA, 80 bp, Homo sapiens
gttggggatggcgtgcagcgcaaccacgagacggccttccaaggttggcgttgcaaacgctatggtcaccgaacgggtga

SEQ ID NO: 107020 - DNA, 100 bp, Homo sapiens
caaagataaatccaaatactgcatatcagaaacaacagcatgacgtatcccagactttactcaaggcaacactggacagtgttgtagaagaatgtgtcag

SEQ ID NO: 107021 - DNA, 75 bp, Homo sapiens
cctggaccaggaggaggttttcaggaccaaaattgtggaaaagtcactctgtgtactaatggtcacttgatgtgc

SEQ ID NO: 107022 - DNA, 89 bp, Homo sapiens
cagggaggatgtcgggacaccccggaagctgggaaatgtgcgcgtcccgggacgactggcgctgtgcgcgctccatgcacgagttttcc

SEQ ID NO: 107023 - DNA, 90 bp, Homo sapiens
gatgagaatgaggacctcatcaacaggtttgcagtacccgaagccctgagcacaatacagaaagctgaggaggttctgtcgctgcactgt

SEQ ID NO: 107024 - DNA, 96 bp, Homo sapiens
tttcagaggttgtgaagttagctccaaatcccagactagctgctaccccaagcccgggagcttctcaggtgtccttgctggtcatgacaaccgtgt

SEQ ID NO: 107025 - DNA, 90 bp, Homo sapiens
aggagatggagagagggctgctcagtcttttgaatgatttccactctggaaaacttcaagcatttgccatgctgtgacctacaagcaaac

SEQ ID NO: 107026 - DNA, 100 bp, Homo sapiens
gtttcccagaaaaaatgcccagcgcggcgcggggctgcggagtcgtccggagccgctgcgcggtgtaggagctgcacgatctgggaacctcacgtttatg

SEQ ID NO: 107027 - DNA, 75 bp, Homo sapiens
atgtgtgataaacacacagcttctgtggaaaaatcccagctccataatgggagaagtaaagaacaaagacttaag

SEQ ID NO: 107028 - DNA, 100 bp, Homo sapiens
gagaagccagtcacgccgggagctggtacacagcctcaggggcttgcttctgacatgtctgatgagcgcattcctgctgttgctcctggctattacaagg

SEQ ID NO: 107029 - DNA, 100 bp, Homo sapiens
gcattagacagaaagctggaagttgaaatgtgagccgaacctgctcgtccgtgcctgcaaccagttgggccagtttctgcagcaccgcgagaccaacctg

SEQ ID NO: 107030 - DNA, 99 bp, Homo sapiens
gcctaattttatggatgtcttcacgtggtctttaccgtttgttggagaaaaaggtgaccaagaatatggcccaggtgaccaaagccctggacaaggccc

SEQ ID NO: 107031 - DNA, 80 bp, Homo sapiens
acgataaccaaggacgaccgcgaaccaagggtcatgatcagagttcgactcttgcccaacactctgttgaactgacttta

SEQ ID NO: 107032 - DNA, 83 bp, Homo sapiens
tgcgctgccgccgctctgaggagttaaaggagaactacgatgacccgcacaaaacccctgcctccccagttgtccacatcagg

SEQ ID NO: 107033 - DNA, 51 bp, Homo sapiens
ccaacacagatgtccaagctgccaatgctttgtattgaaggaggaaccttg

SEQ ID NO: 107034 - DNA, 82 bp, Homo sapiens
gttggaagcagccgatccagcctgcggagcctgtggggcagctgtgcggtcagagaagaaacgccttaggaagccaagcaag

SEQ ID NO: 107035 - DNA, 100 bp, Homo sapiens
aataccagccactgcagatagagacatatggaccacatgttcctgagcttgagatgctaggaagacttggttatgccccgtggtgccctgcttgtcaaaa

SEQ ID NO: 107036 - DNA, 96 bp, Homo sapiens
aacaagactggggctgctcccatcattgatgtggtgcgatcgaacaccttccaccatgaccacctcagcaagttcccacttaaataaaggcatcaa

SEQ ID NO: 107037 - DNA, 100 bp, Homo sapiens
cctgggtatgatcagtatccagggcccagccagccagtagacaagatttgactctggaggtgacgtctgagccaataggtatttggagtctggagaaaaa

SEQ ID NO: 107038 - DNA, 90 bp, Homo sapiens
tgcggggacagcggcctggctaactcctgccaggcagtgcccttcccggagcgtgccctcgccgctggaattaaaattggcctggaagac

SEQ ID NO: 107039 - DNA, 100 bp, Homo sapiens
ctctgatgcaagcgaagaaccttttccctaatacgtacctcattgtgggaggcgcagttgtgtagcagttgagtaatgctggttagctgttaaggtggcg

SEQ ID NO: 107040 - DNA, 87 bp, Homo sapiens
tgaatgctggaagtgggtctcgcagggtgagaggagtcaccaggtggtcctgacaaccaagtccactttgaagggtaccaggtgtcc

SEQ ID NO: 107041 - DNA, 82 bp, Homo sapiens
cggggctttggacgccggtggagacgcaggcgaggttttaaaatcaaagatgggaaaatcggagaaaattgcccttccccat

SEQ ID NO: 107042 - DNA, 50 bp, Homo sapiens
cagatcccatcagaggcaccccagacacacagggtaccaccatcttaagg

SEQ ID NO: 107043 - DNA, 90 bp, Homo sapiens
gtaactcccatgtgcattctactgacgatgaggagcgggaaggcctcctgcaccctggagaccgtgtgggaagacaagcacaagtatgag

SEQ ID NO: 107044 - DNA, 51 bp, Homo sapiens
ccgagtatgaaagtcaagtcaaaggcttgcattgatgacaatgttgatatg

SEQ ID NO: 107045 - DNA, 100 bp, Homo sapiens
aacggaccttttaccatgaatagttctactccttctacaggtggagccgccaccaaaatgcagattttcgtgaaaacccttacggggaagaccatcaccc

SEQ ID NO: 107046 - DNA, 75 bp, Homo sapiens
cagaagtctctaccaatggtgcttcagaagtttcatactttcaggtcctcatggaaattacaattaaaggacttc

SEQ ID NO: 107047 - DNA, 96 bp, Homo sapiens
tgaacgtggacagcctcatcacccggctgctggaggaccatgccacagggctatacaatgtatgggacacagatgcctttgcagcagacatcgcag

SEQ ID NO: 107048 - DNA, 83 bp, Homo sapiens
tgggcagccacggccgggggcgtctttcagagcattacgacatgaagagtatttctggagaagaatcatcccatggagtgatt

SEQ ID NO: 107049 - DNA, 100 bp, Homo sapiens
tgcccgtttaataaaagaatatggaaactgaacagccagaagaaaccttccctaacactgaaaccaatggtgaatttggcaattaagttggaatatgcaa

SEQ ID NO: 107050 - DNA, 100 bp, Homo sapiens
ggaaaatttcgatattgaagtgtcaaaatccatagatggaaaagatggtgtaaagaagacattccagtgtgagctttgcagttacacgtgtccacggcgt

SEQ ID NO: 107051 - DNA, 101 bp, Homo sapiens
gctgagactgaagtcgcccgtgggggctgagcccgccgtctacccgtggccgctgccggtctacatcccgactgggcctcctacactctgggcgtcttcat

SEQ ID NO: 107052 - DNA, 75 bp, Homo sapiens
gatgctattgtggttgaacaatggacagtcctggaagtagttacttttggtgacgctgtccagttcccacaatgt

SEQ ID NO: 107053 - DNA, 90 bp, Homo sapiens
agaagcagcaggttcgagtctccacgccgtcagctgagaagagtgaggaccatgctcgacagctgaccaaggccatgatgcgaaaggcca

SEQ ID NO: 107054 - DNA, 75 bp, Homo sapiens
aagacgttcaacgacttactggggagagaaagaaaaggaacgggagctgagagtatgcaggaattaacattggcc

SEQ ID NO: 107055 - DNA, 90 bp, Homo sapiens
cactgttttgccttcatccaccagctccagctccgatggcaacctgtggggcccagcagtgtacctgtgctataaggtgggcctggcgaa

SEQ ID NO: 107056 - DNA, 100 bp, Homo sapiens
ttgaccccattgacgatctttttcttgctgcgaagaagattcctggaatctcatcaactggttctctacttttagagtcgaaaataaatcctaacactgc

SEQ ID NO: 107057 - DNA, 83 bp, Homo sapiens
acctacggacaagacctccaccacgcagagaatccagcctgagccaaatctcctcagccacctgttgaagaagaagatgaaca

SEQ ID NO: 107058 - DNA, 80 bp, Homo sapiens
acgaagacagtccctggatcaccgacagcacagacagaatccctgctaccagtctgtctgggaaccctgcagatctggag

SEQ ID NO: 107059 - DNA, 96 bp, Homo sapiens
gccgcagagcgccgaggaggctttcctgctggtggcaaccgcctacgagacactcaagaaggacagaataacgggctcccagattcacaagcccca

SEQ ID NO: 107060 - DNA, 82 bp, Homo sapiens
accctggagcctcagttggaagcagccgatccagcctgcggagcctgtggggcagatggagtttcactcttgtctcccaggc

SEQ ID NO: 107061 - DNA, 97 bp, Homo sapiens
ttgatagacgacctgaagtcagaactgagtggcaacttcgagcagtgctcttacagatggaaggtgggggccagctcctaggagcactgcagaccat

SEQ ID NO: 107062 - DNA, 100 bp, Homo sapiens
gtgaaggggaagaggcccaccctggagtaaccctcactggagaatccagaggtgcacctggtataatctcagcctctccgtatgcaggagctggtttccc

SEQ ID NO: 107063 - DNA, 98 bp, Homo sapiens
tgaaggcctggagagccgcccagcagcacaacacagggaagcttggggaggcacgtgtggttctcaaatataggcattctgatgggaacttgtgtgtt

SEQ ID NO: 107064 - DNA, 82 bp, Homo sapiens
ggcaacccagacgtgcaacaaagtgcgatggtgtggacactgccagcggctgcagccgacttggaatgacctgggagacaaa

SEQ ID NO: 107065 - DNA, 80 bp, Homo sapiens
taaaaacatcatggatcaatctcaaacaaagaaacctctgtagaggagcaggatgcaaccgacaggctgtggccggacag

SEQ ID NO: 107066 - DNA, 51 bp, Homo sapiens
gctttgcacagtttgaaaatctactggtgggcgacatgaccaacagaaagc

SEQ ID NO: 107067 - DNA, 82 bp, Homo sapiens
gtgagcgcccatatgggggttctggagagcggggtgtgggaggctgggaggcggcagaatgcagccagaggagggcacaggc

SEQ ID NO: 107068 - DNA, 89 bp, Homo sapiens
gcggcggccgggccctcgagacggggacggttcttcccaggagactctgccggccttttccccaccagccccagcttggccatccctca

SEQ ID NO: 107069 - DNA, 100 bp, Homo sapiens
agaatctgcaggacttggtccgcggcatccgtaaccacaaggaggacgaggtggggcaggagaccctgtaggaggaccccgggccgcaggcccctgagga

SEQ ID NO: 107070 - DNA, 90 bp, Homo sapiens
cgaggatatcgtgtctggagcagtggagcccaaagacccctggagacatgccgccgccgcgccgccgtcgctctccaacgccagcgccgc

SEQ ID NO: 107071 - DNA, 82 bp, Homo sapiens
tccatccccaccaaccgcctcacccagcgcatcatccccaggctacctcggacctgaacagctgcctgactgcctgaaaggt

SEQ ID NO: 107072 - DNA, 82 bp, Homo sapiens
caccctcctgggcaccatggccctcctccaatggaaaccaaggtgtatgttggtaacctgggaactggcgctggcaaaggag

SEQ ID NO: 107073 - DNA, 75 bp, Homo sapiens
gaatgttaaaagacaacaaaaagaattggagaagagtttataagaatgattgaagatagtgggaaaagaggaaat

SEQ ID NO: 107074 - DNA, 74 bp, Homo sapiens
ggaacctgaagaattttcaaagagctccaaacgagaatggaagccgctggaggaccgtagctgcacagacatac

SEQ ID NO: 107075 - DNA, 100 bp, Homo sapiens
gctgtggtcagcacccctgcagatcatcctggcgatctacttcctctggcagacacctggatttcattagcatcatgacctacgattttcatggagcctg

SEQ ID NO: 107076 - DNA, 85 bp, Homo sapiens
ggggacaccagcagcttaatagatccagacacttcattaagtgaattgcgggttgagcgcattgagaagagatgtctggagctgt

SEQ ID NO: 107077 - DNA, 101 bp, Homo sapiens
gtcaaattggccctgaaaaaagacagagaaactatgggacacagatatgttgaagaaactaatctggattcactccctctggttgatacccactcaaaaag

SEQ ID NO: 107078 - DNA, 101 bp, Homo sapiens
tcgcagactacggacctgtctgggtctcagccgccaaagaccccgtccggtagagcggttccgccaccccagccgcagatgtttggtgaagagctgcctga

SEQ ID NO: 107079 - DNA, 98 bp, Homo sapiens
ctaatacttatggaagtaaccctatttccgtgtatatcgggtacacaatttgggggtcagtaatgtgctactatatttcatgaactggtatataaaca

SEQ ID NO: 107080 - DNA, 100 bp, Homo sapiens
gcaaggatgctcagccctctttctctgctgaggatatagccaagatcaagaagttcagtaaaacccgatccaaggaccctgatgctcccataagacagaa

SEQ ID NO: 107081 - DNA, 100 bp, Homo sapiens
agcagagctctgccaggcagaaggcctctctcctgatacagcaggcgctcaccatgttccctggagagcactgcagtttcctcctgaaggctggctccgg

SEQ ID NO: 107082 - DNA, 75 bp, Homo sapiens
cagtgtgcctgcaacctgtccggggatcccagggagcgtttagtgggctacagatggcatggcatctaaaacctt

SEQ ID NO: 107083 - DNA, 75 bp, Homo sapiens
gggcagtcctcgccggcgagttcagcctctacgaactcgacggggaccccaagaggaaggaattcctggatgact

SEQ ID NO: 107084 - DNA, 75 bp, Homo sapiens
gccgacccggcccgtagtgtggaagcagcttcagaacaatcttgatgatgggccgctacgtggagcccatcgagg

SEQ ID NO: 107085 - DNA, 75 bp, Homo sapiens
gaacctggacattgaggagctcaaggcaagctaatgaagaatatcaaatactggcgaactcctggcgctattcat

SEQ ID NO: 107086 - DNA, 51 bp, Homo sapiens
gtccagcatgaatcccgaatagaagctgaagtcttcagcagaaccctgacc

SEQ ID NO: 107087 - DNA, 75 bp, Homo sapiens
ctggagtgggcgcggaggcgaccgccatggcgttcctcaaactccgtgaccagagttgcatgctgagaatttgaa

SEQ ID NO: 107088 - DNA, 100 bp, Homo sapiens
gctgcccaagctgcggaccctggatgtgttttctggctgcggggggttgtcggagggattccaccaagcagtctctggcatctctatcccctatgaggca

SEQ ID NO: 107089 - DNA, 100 bp, Homo sapiens
aaatcgacttggactcagatggctttctcactgaaatgaagaactgttctaccagatactcatttatgattttgccaattttggtgttctcaggttatcg

SEQ ID NO: 107090 - DNA, 51 bp, Homo sapiens
gtgagccaccacacccagccactaaggaactttatattgctgttggaatat

SEQ ID NO: 107091 - DNA, 76 bp, Homo sapiens
caagttcccactctgcatggtgttccacatcattgacttactgctttgtgaggaaatgagtggcttatactctcct

SEQ ID NO: 107092 - DNA, 90 bp, Homo sapiens
gaaatagggagctggctaccagcgttgagtcccctgtaaagcatgaacaggctgaacactttgccacgaggcttcggctccctgccagct

SEQ ID NO: 107093 - DNA, 116 bp, Homo sapiens
ctacaggaacctgctttctctcgatgaggataacatccctccagaagatgtttgcctgagaatacagatcaacccacagaacaaagcggatttccaaggcatctccccagagcgag

SEQ ID NO: 107094 - DNA, 90 bp, Homo sapiens
tgaaaaatcttttaggagggttcttgagtattttaacacaggatgattctgattttcaagatacgatgaatggattaaagcagataaaat

SEQ ID NO: 107095 - DNA, 100 bp, Homo sapiens
ggactggggggaccagtactctgccgagtgcggcggtctggccgtgggcctgggcttcggggcactggcagaggtcgccaagaagagcctgcgctccgag

SEQ ID NO: 107096 - DNA, 98 bp, Homo sapiens
ctcgccctggtcttcgggctgtcgctcgtctacttcctcagcagcaccttcaagcaggttttgccagtcagtcagatgatgatcaggtgaatgtaatg

SEQ ID NO: 107097 - DNA, 100 bp, Homo sapiens
tgccggagatccctcagccctggctggctctcaaaattagagagatgtgtaattgtccaccactgtctaatccagaccctcgattactattcaaactcag

SEQ ID NO: 107098 - DNA, 100 bp, Homo sapiens
gcagagggtgagatggatgagtccagcattctaagacgaagagggctccaggtagtggaggacatgctagaggacgaggaagaagaagatgacaaagatg

SEQ ID NO: 107099 - DNA, 90 bp, Homo sapiens
caggaagtcagactcccgaaccattgctccaaatatccgttgaagcagaccagaacttctgactcacagtaccactgaagttactcagcc

SEQ ID NO: 107100 - DNA, 50 bp, Homo sapiens
caaagatgcactgcagagagcccggcagtaactctgggtggattttaact

SEQ ID NO: 107101 - DNA, 100 bp, Homo sapiens
cacgcaagatgaaatttgctctgctaaaaggctccttcagtgagcaaggcatcaacgagtttctcagccagcttaccaaaacctgaggcagaaagtggat

SEQ ID NO: 107102 - DNA, 80 bp, Homo sapiens
ccgcggagcagtagccgccgtgggagggagccatgaagcattacgagcctgacatttaccccggtaactgctgggcattt

SEQ ID NO: 107103 - DNA, 100 bp, Homo sapiens
attattacctggaaaccagctctcagccggcattgcacatcctgaccaccttgcaagagccacatgacaaggtggacccaagtggagagattgtggaact

SEQ ID NO: 107104 - DNA, 101 bp, Homo sapiens
cacgcggaaagaagtaccttcgccggtcaccggctcctgcagggtactccaaagattcaggtttactcacgtcatccagcagagaatggaaagtcaaattt

SEQ ID NO: 107105 - DNA, 128 bp, Homo sapiens
gcagaacactccgctgcctctccagagccaggcacacagcaggcgctccataaatgttcgttggacgaagttatacggaagcgtctcctcattgatggagatggtgctggagatgatcggagaattaa

SEQ ID NO: 107106 - DNA, 83 bp, Homo sapiens
acctgcggcgcttcctgacgcagccgcaggtggtggcgcgcgccgtgtgcttggtagttgatgtcacttggcgatattcctgc

SEQ ID NO: 107107 - DNA, 87 bp, Homo sapiens
tgttttcaccaccatttttccggtctcctctgagcctccggcctccataagacccaaaacagatgacacctcttcccagtcccccgc

SEQ ID NO: 107108 - DNA, 101 bp, Homo sapiens
tgttccttcagccaaagaaacaagccgtggaataggtgtatcaagtaatggtgcaaagcctgaatttgaagtacccttggacatatcattaagcaactcag

SEQ ID NO: 107109 - DNA, 75 bp, Homo sapiens
ctcccagaagaggatgccagttctcagtcatctaaaactaatcatcactcttcaactcttgtttgaagcatcaga

SEQ ID NO: 107110 - DNA, 90 bp, Homo sapiens
cagtggaggccacatcaactcggcgccttgggaaccgctcgagcctaccaggatagagtggtgacttccaagcttcatgcagaaccggac

SEQ ID NO: 107111 - DNA, 50 bp, Homo sapiens
ttgtgcgttgcggccagtcgccactgctagccgagactgtctgaagctgg

SEQ ID NO: 107112 - DNA, 74 bp, Homo sapiens
gaaacaggtgtaattaccccagaagagggtggctgtcaatagattggcccaaaaggaagaacaaggaaaagggc

SEQ ID NO: 107113 - DNA, 75 bp, Homo sapiens
cggaatgctgccatggagatctgcttgaatgtgctgatgacagggctgtgcgtgttacaaaacccaaaatcccag

SEQ ID NO: 107114 - DNA, 100 bp, Homo sapiens
ggagaggcctggaggacaccaacatggcttctctacagtttagcctttaatgccaggtttctgagacatctttggtttctaatatcttccatgtcaacac

SEQ ID NO: 107115 - DNA, 100 bp, Homo sapiens
tgaggaattttgaagtacaccgtggtgacattgtatcattggtggatgaagatgcccctgctaagattccagatgaagaggccacaaaacccgaaggctg

SEQ ID NO: 107116 - DNA, 100 bp, Homo sapiens
tctttaagggctacgggaagatcctggaggtggatctgaagaacgggccaaacttccagatctgcaaccatttccttctccagatggtgatacagtgacc

SEQ ID NO: 107117 - DNA, 82 bp, Homo sapiens
agccgcgagcgctgagggtgagtgccgggagctctgaggtgaaaatgcctcgtgtaaaagcagctcaagctggaagacagag

SEQ ID NO: 107118 - DNA, 98 bp, Homo sapiens
tgagtcgtgagctggcaggacacacagattgagaggatccagaatccagatctctggaatagctaccaggcaaagaaaaaaactatggatgccaagaa

SEQ ID NO: 107119 - DNA, 50 bp, Homo sapiens
cgccgctctccagcccgcttgaacggtcagcccaaggccaaccccactgt

SEQ ID NO: 107120 - DNA, 75 bp, Homo sapiens
tgtggattgcctattaaaatctatgggagaatggccaaagtgggcagtttcagccagaatgtggaactcctcaac

SEQ ID NO: 107121 - DNA, 100 bp, Homo sapiens
ccgccgccccagccgccagggacatgtctaacctcggaggccgtaggaacgggcctgtcgaagtgcgcctgacagaccattactgggacttccaccccca

SEQ ID NO: 107122 - DNA, 96 bp, Homo sapiens
ctgaagtcagcatcgaccagtccaagctgcctggagtcaaggaagaaaccaggaatggatctggcagacacctatattatgtttgttcggcaaaac

SEQ ID NO: 107123 - DNA, 82 bp, Homo sapiens
gacaatggtcaccgtctcttcagttatttctcaaactctgaggctgcggagttcacacattgaaatctgtcatctttttcag

SEQ ID NO: 107124 - DNA, 82 bp, Homo sapiens
ctggaatcacgaagcacagctgtcacccggacatcaagtattcaccagttaatagcaccagaagaatcggactctgaaatac

SEQ ID NO: 107125 - DNA, 83 bp, Homo sapiens
gcggccgcggccatggcgtacgcctatctcttcaagtacatcataatcggcgacacaggtcagaagttgagtagcaggggcct

SEQ ID NO: 107126 - DNA, 74 bp, Homo sapiens
agcagtgaggctggccgcctgcagcggccagcctcccaactacgagatgctcaaggaggagcaggaagtggcta

SEQ ID NO: 107127 - DNA, 98 bp, Homo sapiens
tggcgctcccggggggctcggacccgcccccgactcgccgagccaggttgggcccgaaggcatcctgcagaacggggctgtggacgacagtgtagcca

SEQ ID NO: 107128 - DNA, 75 bp, Homo sapiens
cagtgagctgtccctgctggaggagcgcttccggccaaaactggacaagccaaggcatctgtagccaaagtaaac

SEQ ID NO: 107129 - DNA, 100 bp, Homo sapiens
cgagtgcgccttctcctacgactctcccgtgtaggagctgcacgatctgggaacctcacgtttatggtgggaggagttgaagatgaatttgctgctgccc

SEQ ID NO: 107130 - DNA, 75 bp, Homo sapiens
caaggaatgtcctgaccaacttggacccagatgtgttcagagcaacattgttttgttgacacaagcatttagaag

SEQ ID NO: 107131 - DNA, 75 bp, Homo sapiens
aacaaggtcattagatataaaggaacctgaagaattttcaaagatgaattttgataagaggcaacatgaagcaag

SEQ ID NO: 107132 - DNA, 90 bp, Homo sapiens
cgcttcggactgcgcaacgctgcgctctgggctgacagagtgcgcgcgcaggatgaagaagtgcatcaggtgccaggtggtcgtcagcaa

SEQ ID NO: 107133 - DNA, 83 bp, Homo sapiens
gatgtgaaagatcctaactatgatgatgaccaggatcctgatggtgaacatgccaggagagcaatgcaaaaggtgatggctac

SEQ ID NO: 107134 - DNA, 50 bp, Homo sapiens
ggattttgtcagcttgtcgtcaagcaaacatgtcttgacggaagacatag

SEQ ID NO: 107135 - DNA, 90 bp, Homo sapiens
agccgacagaggcagacacagaaggccgacaccctgcacctgacaagttggatggcttgaggactggtactaaaaggaaacgtgactggg

SEQ ID NO: 107136 - DNA, 75 bp, Homo sapiens
agacacatgcggacaaaatggaaaaggagaaaacaattttggaagctcaaagctcatcatgtcactacagtgaac

SEQ ID NO: 107137 - DNA, 151 bp, Homo sapiens
gctgctctcaacatccttgccctgtcaccccctgcccaaaatttgctacttaaatcgtacttctctgaagaaggtatcctgtggtctgaggccatcttcctcgaggcaaggccccagaggaggaccaagagcgtggatgccctgaagaagt

SEQ ID NO: 107138 - DNA, 74 bp, Homo sapiens
gagattgtactggtcgacgacttcagtgatcgaggttctcttagaagcacaagatatggcagtgagagaccata

SEQ ID NO: 107139 - DNA, 83 bp, Homo sapiens
ggaagcgagactcatacgcaacctcaatggttgctccgactgtgtgttccaggagtggtggctctgaggtgtgaccctgccca

SEQ ID NO: 107140 - DNA, 75 bp, Homo sapiens
gggatcttcacaatcagtgaccacccagcagaacagcgtgggatgttcacaaagatggggtcgaggatttggtct

SEQ ID NO: 107141 - DNA, 74 bp, Homo sapiens
cctagcgctggccgcgaccccggcgtacttcctcgcgtattgctaaaggaggagttgaccacaccaaaatgagt

SEQ ID NO: 107142 - DNA, 100 bp, Homo sapiens
gcattaccacctcagccaccctgaccactatcatcaccatggaaaaagtgacttgagcaggacctcagcagccatgtcgaagccccatagtgaagccggg

SEQ ID NO: 107143 - DNA, 50 bp, Homo sapiens
caataccgcagcaagtctcctgcttgaccatgcagcaggtggccaggaca

SEQ ID NO: 107144 - DNA, 108 bp, Homo sapiens
tgttggggagaagaggattggaggtgtcagtgttaaaggaacctctacaacgaaggtgaagccacggaagataaggagccaagccgccatggcctaccacagcttcct

SEQ ID NO: 107145 - DNA, 75 bp, Homo sapiens
tttccgagtcaactggcccggcaccgagttctctctgggcgataatctgatggctttggcagaagcaacagttgc

SEQ ID NO: 107146 - DNA, 90 bp, Homo sapiens
cagatggggacacacagtcagagaaaccggggcaacctggagttgagacagacgactgggatggaccagtagctctataaatcagtcagc

SEQ ID NO: 107147 - DNA, 75 bp, Homo sapiens
gctggacccggcctgggagaagcagcagcgcaagtgggcatccccaccatcagatggtgcggggcagagggggac

SEQ ID NO: 107148 - DNA, 95 bp, Homo sapiens
caggtgggtgagctccatggcaacttgtcacagacgcagcggctggaggccctccggaaagtggagaatgaggacatgaataaagaccagatctt

SEQ ID NO: 107149 - DNA, 100 bp, Homo sapiens
caggtctctgtcgagcagcggacgccggtctctgttccgcaggatgtactatactggcaattgctggagaagattttgcaattgttgcttctgatactcg

SEQ ID NO: 107150 - DNA, 83 bp, Homo sapiens
cttcaacaagaggacccaggagaaattcgccctcaaagtgtggaaacaggaagagaactagaactggaagtaaagcattgaag

SEQ ID NO: 107151 - DNA, 101 bp, Homo sapiens
tccccgcagaggaccccccgacaccagcatggactgctgcaccgtgtctgacttccagcaactgctggcctgtgccagggtgcaagctgagcactggagtg

SEQ ID NO: 107152 - DNA, 100 bp, Homo sapiens
gtggtgctgacagattttggtctgagtaaggagtttgtggctgatgaagtcagatgggcagacctggaagagaagaaggatgcagataggaaaagggcca

SEQ ID NO: 107153 - DNA, 100 bp, Homo sapiens
aaggaagaagaaatgaaacagatgtttgtgcagcgagtaaaggagaaagaagccatattgaaagaagctgagagagagctgtgttggagtagaagaacat

SEQ ID NO: 107154 - DNA, 76 bp, Homo sapiens
gttatatcccctttagaatatatcaggctcgggttatgtatgattttgctgctgaacctggaaataatgaactgac

SEQ ID NO: 107155 - DNA, 100 bp, Homo sapiens
gccacggccatttccttgatgcgcaagttcattgcctaccagttcacagacacggtgccaagtcctgccctgccaacttcttggcagctgccgacgacaa

SEQ ID NO: 107156 - DNA, 100 bp, Homo sapiens
cagaatttaaaacctataggctcaggagctcaaggaatagtatgcttctactgaaactaaaattgatgtggccagcatcaaggaaaaggttaagaaagca

SEQ ID NO: 107157 - DNA, 82 bp, Homo sapiens
gaaatttggagtgtgcgtgcgcgccgagcggtgaatgaaaactttgccattgatttgatagcagagcagcccgtgagcgagg

SEQ ID NO: 107158 - DNA, 75 bp, Homo sapiens
gatgaagaaccgcagatccagcttgttagcagtggcacaagatcttacagaggatgaagaaacagtagaagattc

SEQ ID NO: 107159 - DNA, 51 bp, Homo sapiens
tcagcactgactttcagctatggaatcgatgaagactggcccatttgcaga

SEQ ID NO: 107160 - DNA, 101 bp, Homo sapiens
ggccaatcatcaagacaagccagcagctcgctcagtacaagagccaagaaggatcaagaaggtggagaagaaaagaaatctgtgcaaaagaaaaaagtaaa

SEQ ID NO: 107161 - DNA, 98 bp, Homo sapiens
ggagggtgcaggagtcaaccaaagtactaagggagctggagatctctcttcgcaccaaccacattgggccccttcccagctgcctgcctgccctagcc

SEQ ID NO: 107162 - DNA, 75 bp, Homo sapiens
agcggagcgaacccgagagcgtggagcgggctgggccagggagttgaccacatttggccatttcccagaagggcc

SEQ ID NO: 107163 - DNA, 100 bp, Homo sapiens
agggctacaaccagtggcagcagggtttccccaggtcacatcaaaagcattccaacatgacacatggaattctgggctaacagttgcttccatctctaca

SEQ ID NO: 107164 - DNA, 98 bp, Homo sapiens
atggagaaatccttcgcaatgtcaccatcctacgagttcacttagcagccatggaaggccaccttcactgtttcaaattcctagtcagtagaatgagc

SEQ ID NO: 107165 - DNA, 100 bp, Homo sapiens
caagaaggccctggacacagcaatatctctgggctttcacagtgagaacaatctccaggaagatctcttcgaccagatcttggctgggaagctggagttt

SEQ ID NO: 107166 - DNA, 74 bp, Homo sapiens
gactactagaaggggaggggagtggaaaggctctcagtgaaaaaggatctcctgtatcgaaggtctaggtcact

SEQ ID NO: 107167 - DNA, 100 bp, Homo sapiens
ggaagttcctttttgaagtagttccagaaaatccttccaacattcactttattgaacagcttggtggactggaagggtccctccaagaaacaaatctgca

SEQ ID NO: 107168 - DNA, 100 bp, Homo sapiens
caggacatcctggaacctgggaaagggttcttgggtgtctctggggagtccctgggccagaccttcctccagactccagcccacctcttcggagcagctc

SEQ ID NO: 107169 - DNA, 100 bp, Homo sapiens
gcaaagattccccgaagtgccaacaactggcaaagaataacctgttggccctgccgcgaccatcggctttagacctcctgccccccgaggtctgcagtct

SEQ ID NO: 107170 - DNA, 90 bp, Homo sapiens
cgctgggtgcgtggggctgcctcgccgcgtctcgccacggactcgctcagcagcagcctgaaaacttgctacaagtatctcaatcagacc

SEQ ID NO: 107171 - DNA, 90 bp, Homo sapiens
caaggagacccccctgacaacatgaagaatgcagagagcagtttgcagcagaagaatgaagccatcacatcctttgaaggaaaaaccaac

SEQ ID NO: 107172 - DNA, 82 bp, Homo sapiens
gtggatggacttgattctgatgagagccctgcctctttcttgtcgcagtcagtttcatcatcagatagaaacagtgttacag

SEQ ID NO: 107173 - DNA, 50 bp, Homo sapiens
acactgagggcctgggagatatagagaagcgattgaacaggagaagcaag

SEQ ID NO: 107174 - DNA, 100 bp, Homo sapiens
cgcacagattgagccgagttgtcgccccgctgggagaagtgaccctcctgcgcctggtattatacctgaagaaccttagccctcgggtgactgaaagaga

SEQ ID NO: 107175 - DNA, 98 bp, Homo sapiens
tgtgaagctgaagctgacggtgacggacacgcccggcttcggggaccagatcaacaatgacaactgctcactgcaaatctaacttcatcatggtgaac

SEQ ID NO: 107176 - DNA, 90 bp, Homo sapiens
gtgcgacagcctcatgatctgggtatagtggaggattacaagccaccgttctacgatgtggttcccaatgacccaagttttgaagatatg

SEQ ID NO: 107177 - DNA, 100 bp, Homo sapiens
gcgacccggcggcgggacaggcttgctgcttcctcctcctcggcctcacccactattcctgatcagagaactccagttgcttcaacacacagtatcagta

SEQ ID NO: 107178 - DNA, 100 bp, Homo sapiens
gatcgcgagcggctgcggaccatttataaccgcgacttcaagatcaggtaacacaagtggcaagacagccgggaacccctaccccatccccttattcagc

SEQ ID NO: 107179 - DNA, 100 bp, Homo sapiens
acacttttgtccatgtcactgatctttctggcaagagtggttaatgtgttgctaacaactccactctgggtggtaaacaccagactgaagcttcaaggag

SEQ ID NO: 107180 - DNA, 100 bp, Homo sapiens
tgttgctgctgcctttgtgacgggatcgctttctcccatcgaaccttctagttgcttattgcagagaactaattatgggggaagaccctgcccagccccg

SEQ ID NO: 107181 - DNA, 100 bp, Homo sapiens
ctgctttctatgcatcaccagcctgaccctgctcttaccaaggagtttgatattggctcaagctacccaggaaagaacggatctttatgcaaagcagggt

SEQ ID NO: 107182 - DNA, 75 bp, Homo sapiens
gatcaacctggagctctacgcctcctacgtttacctgtccatgttcatggcctcccacgggaacgacgccgcgag

SEQ ID NO: 107183 - DNA, 97 bp, Homo sapiens
cctccctctaccaccgggagaagcaggcagactgccagattcacttacagccccagctaattccaccaaacatggaggagtacatgaacagccttct

SEQ ID NO: 107184 - DNA, 98 bp, Homo sapiens
cgggagcctggtgcagagcttgaatgccaccgcatcccctcttattcaagaagcatctataggagtgaaaaggctctcagtgtctgagttaaatgaaa

SEQ ID NO: 107185 - DNA, 117 bp, Homo sapiens
ccgcagatgttgtcaaggtggcctaccaggaggccaggggtgtcgccatggtcttggtcttgatgccaagtttgggaaaggagctaagaagacatcccactaggaagagagagacta

SEQ ID NO: 107186 - DNA, 100 bp, Homo sapiens
gacgacttgtgacacggacggcgcgtcctgctgaccccagccggcgccgagggcttggaatctcgagcgggaaaaggacctaagaaaagctggattgctg

SEQ ID NO: 107187 - DNA, 73 bp, Homo sapiens
ggagataatgcatctgctttcaagcattccatggcaatagattctggtttcaggaactctggcataacggtgg

SEQ ID NO: 107188 - DNA, 100 bp, Homo sapiens
cgcctggctcggagcagcagcctctgaggatctgagtgatgagacgtgtccccactgaggtgccccacagcagcaggtgttgagcatgggctgagaagct

SEQ ID NO: 107189 - DNA, 100 bp, Homo sapiens
ggattgctactgcacggtgaacctggaccaggaggaggttttcaggaccaaaattgtggaaaagtcactctgcatccgcagtgtcatgcagaagtacctg

SEQ ID NO: 107190 - DNA, 101 bp, Homo sapiens
attaacctggagttaaggaacagatccccggaggaggatgctccagaccttgtatgattacttctggtgggaacgtctgtggctgcctgtgaacttgacct

SEQ ID NO: 107191 - DNA, 90 bp, Homo sapiens
tttaaccagcatggctacttcatattttggaaagcagtttttaagacaaaaagtggtggagagagagctggatgctcttttggaacagca

SEQ ID NO: 107192 - DNA, 100 bp, Homo sapiens
aaaacggagacttggatgaggtgaaagactatgtggccaagattgttgtgtccactgtatcctggcttgcttgttctgcgaattcctgaccctttgcaac

SEQ ID NO: 107193 - DNA, 135 bp, Homo sapiens
taaagcagaagttgacatggacacagatgctccacaagttagtcacaagcctggtggagagccaaagatcaaaagggctggtttttaagtttggccgcactgaagacttatggcagtgaacacatctgatttccc

SEQ ID NO: 107194 - DNA, 104 bp, Homo sapiens
cgtggccaccgcctccagcttgccaccaaagacctgcgactttgctcaggccgggctctcgccatgggtcactgtcgcctctgccacgggaagttttcctcgag

SEQ ID NO: 107195 - DNA, 75 bp, Homo sapiens
agatctttctgacaacaaactcgaagactggcatgagtggccctgttccagtattggttatgagtcttctgttca

SEQ ID NO: 107196 - DNA, 51 bp, Homo sapiens
cctgcgcgccgctgcccgcgccacagattttaggacagcaaattaatgact

SEQ ID NO: 107197 - DNA, 82 bp, Homo sapiens
cgggaggaaggaacgaggcaaggagctaaagcagcgtgcgttcagccctgggtgctgagcttgcaagacctctgctgccggg

SEQ ID NO: 107198 - DNA, 100 bp, Homo sapiens
cctctatcttttgttctctggcatggaaggggtcctcagagttactggggttcggctttccagtttggcagcagcactacaaatttcaacttcacaaaca

SEQ ID NO: 107199 - DNA, 115 bp, Homo sapiens
ctgctggcgctcacctccgcggtcgccaaaaagaaagccgccttgctccgaaccttcagctttttgggctttgagattgtgagaccggggcatccccttgtccccaagagacccg

SEQ ID NO: 107200 - DNA, 100 bp, Homo sapiens
accatcaaaaccaaccctgacgacagaagaatcatcatgtgcgcttggaatccaagagcgcgttccttcacctcgggcagaataactttgcagaagccca

SEQ ID NO: 107201 - DNA, 90 bp, Homo sapiens
atggggctgttactagtccaacctctacccttgaaagcagagatagtggcatcattgatatgcaatatgatgaggatgatgatgaaatca

SEQ ID NO: 107202 - DNA, 74 bp, Homo sapiens
tgaaattttgaacaacattaacactattatttgtgatcttcagcctcaacagaaatgttgtaaagcttccagaa

SEQ ID NO: 107203 - DNA, 75 bp, Homo sapiens
ttcgttctgcacggggcccactcagctctgcaccagcctacgaggacaagcagaaactcaagcggaccgagatca

SEQ ID NO: 107204 - DNA, 75 bp, Homo sapiens
ggaagattctcatgcacagattgaaaccctctgagatatcaaccccctagcccattgctagctgtgtcctttgcc

SEQ ID NO: 107205 - DNA, 83 bp, Homo sapiens
ctccaggcccgcgaccgtccgccagtcgtcccgaggatgcagcagtctcggccctggctgctctatgcagtgaatattacatg

SEQ ID NO: 107206 - DNA, 100 bp, Homo sapiens
gcagagtgctgaagacggggtagccacgaggtagtgtacactgataaaggtagggcgcggtggactctgcccctgtaaccgttccggagaatgcgttgag

SEQ ID NO: 107207 - DNA, 83 bp, Homo sapiens
gctctggctctggctgtgcgcgctggcgctgagcctgcagccggccctgccggactgggcgttcatcaacaccaacatctttg

SEQ ID NO: 107208 - DNA, 97 bp, Homo sapiens
ccggacccaaagtgccatgtctttaatgtgatcgccatgatcaaaggcctgcaggtgctgatgggcaggatggagagcgtgttcaaccacgccatcc

SEQ ID NO: 107209 - DNA, 98 bp, Homo sapiens
cgagatccgctgctgctgaggagaggagcgtcaacagcagcaccatggggactcctttccatttgatcaacaatttaacattttgatgagatttattg

SEQ ID NO: 107210 - DNA, 83 bp, Homo sapiens
gctgggactacagacatgcgccagcacgcctgtgtgtttcctgtaacaaatcgttcaagaaactctggtcccttcatgaacat

SEQ ID NO: 107211 - DNA, 116 bp, Homo sapiens
aatttgggaccaagctgaacagctttccaaagagcaaaaagatgcggcattccaaaagaactcactgtcctgattgggatagcagagaaagctggggacatgaaagctatcgtgga

SEQ ID NO: 107212 - DNA, 74 bp, Homo sapiens
gattgatcatcatatgggttgctgtgggtgagcgtggaggatgctcagatgcacaccgtcaccatctggctcac

SEQ ID NO: 107213 - DNA, 100 bp, Homo sapiens
tattaaggtggtgccaaggcgcagaagggcccagtttaccctcaatttaccctcttctacatcttccacatctgcaccaatctggggagatgaagaaact

SEQ ID NO: 107214 - DNA, 100 bp, Homo sapiens
tctggaagaagattgtaccttggagcttctcaagtttgaggatgaggaagctcaggcagaagagaaacgtctcagagaaaaggaagagcaaaagaaactt

SEQ ID NO: 107215 - DNA, 74 bp, Homo sapiens
gtggacttatcatgacctcagactatcaggtgccacacattgaagcacttctgaaaagaaagctatcagaacaa

SEQ ID NO: 107216 - DNA, 51 bp, Homo sapiens
atccagaacctccactctttcgagtccctgtgaagcaggaagagtgagggc

SEQ ID NO: 107217 - DNA, 148 bp, Homo sapiens
ggagccagcccagggggacctcgggtgcgggtccccgccccaccggcccccggcgccgtccagcccggagggacctgttgaccacgttgttcctgagcctgggacaagcctgctcgctgcctttgaccagtggagggaatgggccgac

SEQ ID NO: 107218 - DNA, 75 bp, Homo sapiens
taaaaattgtataccgcagattcagacgagagattaaacagttattgtctgagttggatgaagagaagaaaatcc

SEQ ID NO: 107219 - DNA, 75 bp, Homo sapiens
agcacctgaggacagaacatatcaggatccaaggattctgtagctacaatgttgtcaagactttttcgaatgcat

SEQ ID NO: 107220 - DNA, 100 bp, Homo sapiens
ttgacgttgcagacttggctagtgcaagccttgtttattttcctcaccactgaatctacaggtgcgggagatggaggcagagctggaggacgagaggaag

SEQ ID NO: 107221 - DNA, 75 bp, Homo sapiens
acgataattaaagagtaaagttgtgctcaacggcccctggatcctcctggaatccccgatccctcttgctccctg

SEQ ID NO: 107222 - DNA, 74 bp, Homo sapiens
accaggttcttcgaaaactgaagcagatgttgaacaacaagtgacagactggatattggaaagagatccccatg

SEQ ID NO: 107223 - DNA, 51 bp, Homo sapiens
cggagaaacacgagtcccagagagagttcaaggaggccttccagctgtttg

SEQ ID NO: 107224 - DNA, 98 bp, Homo sapiens
aaaaaggaagtttgtcctgtcctggatcagtttctttgtcatgtagccaagactggagaaacaattgcggatttgcgaggcgcgccctggagctgcta

SEQ ID NO: 107225 - DNA, 75 bp, Homo sapiens
gctcctcggagcccctcgcctcccccaagtcccagctctaagcgaaagacatgaggcctcagcctgaaatgaggt

SEQ ID NO: 107226 - DNA, 100 bp, Homo sapiens
agtactacagaagttaggtcaagatgaagacatggatgtcaaatactttgcacaggaagctataagtggactccaacctgtctgtgcacacagaaaaccc

SEQ ID NO: 107227 - DNA, 89 bp, Homo sapiens
ggaggccatgggcgacccagcccccgcccgcagcctggacgacatcgacctgtccgccctgcgggtttccctaatgtgggaaagtcctc

SEQ ID NO: 107228 - DNA, 100 bp, Homo sapiens
aggctggccgactccggcagcgtgccccacgttgtgaccgagattcccgacgagagagactgaggggaagagaggaaggaggggcgggctcctggcaagg

SEQ ID NO: 107229 - DNA, 75 bp, Homo sapiens
ggcggacccgtggcagaagatggctgtggagagcccgtccgacagcgctgaggggccacctacagatgctcctgc

SEQ ID NO: 107230 - DNA, 123 bp, Homo sapiens
tttgggagatccaagagattcagtatcactcgctcccttgatgatcttgaggtgctggagaatctggtaaaagcaccattgtgaagcagatgaggatcctgcatgttaatgggtttaatggag

SEQ ID NO: 107231 - DNA, 75 bp, Homo sapiens
ggaagcagcagctcaccgaggacggggactctattctaccttgtaaatactgttatttgtatatactgtaaatga

SEQ ID NO: 107232 - DNA, 87 bp, Homo sapiens
gggaataggagctggggagcccttctgcgccacagattttaccaaatgttgcaagaactctggagttcttatggtagtaaaatgccg

SEQ ID NO: 107233 - DNA, 90 bp, Homo sapiens
ggagtggtggatcagaccaaagatggaccaaactgcagctggaatacccagtacagttctgcttactacacttcaagaaagatctgaaag

SEQ ID NO: 107234 - DNA, 75 bp, Homo sapiens
cgggatggcagctgctgatttgtcccatgggagccatggctgccacgtactccgcactcaacagctccaagccca

SEQ ID NO: 107235 - DNA, 75 bp, Homo sapiens
cgtctctctcatcgaggcccaaaccgccaaggcccattacgcagtccaggcaagaagatcccggagcatcactag

SEQ ID NO: 107236 - DNA, 74 bp, Homo sapiens
ggaagtactcagccgctaaatccaaggttgatctcacacacctggagggtgaagtggaaaaaagaaagcacgct

SEQ ID NO: 107237 - DNA, 51 bp, Homo sapiens
catctggttggatacttctctaagaccctctttcccagctgcccgctcctc

SEQ ID NO: 107238 - DNA, 90 bp, Homo sapiens
gacagtctgcatgtgcagttttcaggtgtgttccagagaacaagccttcagacatttgctatattgacgctgagctgtcaggggactcag

SEQ ID NO: 107239 - DNA, 86 bp, Homo sapiens
tggaagacacaaagcctgcgaaagtgctcgggaagagggagagcaaacttggctcagcccaaattaaagctatagagagtcccaac

SEQ ID NO: 107240 - DNA, 100 bp, Homo sapiens
ccagggggagagtttggagtgaagtttaatgttgccaatggagctcactggacagccagtgctcattggtggcaccatgggaacctgtagttatgttctt

SEQ ID NO: 107241 - DNA, 83 bp, Homo sapiens
gccgaccagggacctgcccgcctgcggctgctccggtgagtcagatggcaaccccagcactgaagatgaatccagcaagggac

SEQ ID NO: 107242 - DNA, 75 bp, Homo sapiens
aatacgtctgggcagccacggccgggggcgtctttcagagcattacgctggaagccgacactgagtatttagacc

SEQ ID NO: 107243 - DNA, 101 bp, Homo sapiens
gtggtaacgtggctgcaaccttagcgacatcaggaagaacagggtcgaggatcgaggtctagtgatccttcactgtgtggtggcagatgggaattccacca

SEQ ID NO: 107244 - DNA, 100 bp, Homo sapiens
ctaggagttatacataagccattttccgaatatacagacattgtatgcaaacctgttccattctttcttcgtggacaacccattccaaaaagaatgcttc

SEQ ID NO: 107245 - DNA, 75 bp, Homo sapiens
agaagtatcttcgaacagatgacagagtagaacgtgtacgcagaatggagatgtatgcatttcgattcttcatcc

SEQ ID NO: 107246 - DNA, 100 bp, Homo sapiens
cgccaacaagcgggaccgagcaggaatccgtatctgggaacagattgaaggcctgatggatgatgtggacttcaaggcaaaagtgactcgtgtggaattt

SEQ ID NO: 107247 - DNA, 90 bp, Homo sapiens
cgcaccgactggaccgggaaggagcatcccaggacctaccagaatctggtggcccgacgttggggcattcagaaaaacaggccagctatg

SEQ ID NO: 107248 - DNA, 100 bp, Homo sapiens
cgaagaggctggactcggattcgttgcctgagttcatccatgagctcggatttcccacattacaacttcaggatgcctaatattggattccagaatctgc

SEQ ID NO: 107249 - DNA, 88 bp, Homo sapiens
ggagcccgcagaacctccacagtcaagaggacggaagcttgccttgaaatatcaccccgacaagaaccccgacaacccggaggccgcg

SEQ ID NO: 107250 - DNA, 100 bp, Homo sapiens
aagcactaggagcagcttccgaaagatgtgtctccagacccttcaagtagtaagcattaataatgtctttcatctttgagtggatctacaatggcttcag

SEQ ID NO: 107251 - DNA, 101 bp, Homo sapiens
gcagaaaggctatctgaagaaaagtagaaggaaaaacagaacgttgcaaactctggaaaaaaacttgggacacagccagtgtgaagtcctctagtagtctt

SEQ ID NO: 107252 - DNA, 98 bp, Homo sapiens
caagctctacctgaccatcatcctgctcctgggtgccgtggcatgtcgatttgtccttcactacaggtgtctttcctgaagactatcttcccgtctca

SEQ ID NO: 107253 - DNA, 76 bp, Homo sapiens
ccaagtgaagcttgggattcactccctaaccaaaggttttactgggatttaataatgcttataatgatggttggaa

SEQ ID NO: 107254 - DNA, 51 bp, Homo sapiens
gggaactcaaacagcagatgcagaagcatgttgtggagacattttttggat

SEQ ID NO: 107255 - DNA, 75 bp, Homo sapiens
ttcattgttggactattgtggttggcttctgttacgctaggaatatggcaaactactatactggcaattgctgga

SEQ ID NO: 107256 - DNA, 75 bp, Homo sapiens
agggacctgatgaagcgaagatcaagagacagggcagggcattgttcatgcactgaccgacctcagcagccccgg

SEQ ID NO: 107257 - DNA, 50 bp, Homo sapiens
cgaagccacccccaccctcaccaaaaggaaggggagttcaccctgcacgg

SEQ ID NO: 107258 - DNA, 90 bp, Homo sapiens
cgagaaccgtttggcaatatgtacgacgcggatgaggaattagaagtgcgtctcaccaaccagccaagatgaacatggtgaagaggatca

SEQ ID NO: 107259 - DNA, 90 bp, Homo sapiens
cccgccggtgcccgctcagaagttctcggcgctcacggttgaaatcacaaagattagacacctttttagataggtgttcttcagcaccac

SEQ ID NO: 107260 - DNA, 50 bp, Homo sapiens
ccccattccgctttgccagaagaggctgcaagaaagcgtaagattgccat

SEQ ID NO: 107261 - DNA, 98 bp, Homo sapiens
gtttgagtccgcatcgccacagctgaaggctgcgagggactaagagcagaatatgattctataacagactcttccagaaatgatatgaagaggaaatt

SEQ ID NO: 107262 - DNA, 75 bp, Homo sapiens
cagcctcacctgacccggtccttcagtggactgagaggggctgccgacaggacagtcattttgtttactcattca

SEQ ID NO: 107263 - DNA, 82 bp, Homo sapiens
cgcaagccgagaccaaatccttgagtttcaggtccctggtgctgaaccgcctgcgtccagttgccagcgggggtgggaaagc

SEQ ID NO: 107264 - DNA, 100 bp, Homo sapiens
ggcttctctgcttcctttgaacagagctctaggcagaaaggtctcatcctgaacatttcttctgggatagccctgtttccttggcctctctactccatgt

SEQ ID NO: 107265 - DNA, 50 bp, Homo sapiens
ccggccgagaccccgtctgggaggcttcagaagaagtgtctaaatcactg

SEQ ID NO: 107266 - DNA, 99 bp, Homo sapiens
tcacctacactaccacggccacactcaccactccatggccacacaggtcagctcaagtaatgtcgtcttgaagacgggatttgattttctggacaattg

SEQ ID NO: 107267 - DNA, 83 bp, Homo sapiens
cccggtgtgtggcgcgcccagagccccgcgtttcagccctagggaagtacttggaccatgagactgtttcagccactttcatc

SEQ ID NO: 107268 - DNA, 83 bp, Homo sapiens
cgatggtctcattccgtggacgaggttttgtaagacaatgcagatcttcgtgaagactctgactggtaagaccatcaccctcg

SEQ ID NO: 107269 - DNA, 80 bp, Homo sapiens
aaaagttaaacccaggaagctttggatcagacttttgtgttgcagttcggtctcaaaccatgaattatgtgggacagctg

SEQ ID NO: 107270 - DNA, 90 bp, Homo sapiens
gtgtcctcggagcgcggtccctgtattggtctcctgctcctagagtctcacaccattttgctggtacagcctaccaagaggccagaaggc

SEQ ID NO: 107271 - DNA, 75 bp, Homo sapiens
ctgtgggatttattattttgaagtaaaaattgtcagtaagggaagagatggggcagcttttggcaaggagtctga

SEQ ID NO: 107272 - DNA, 97 bp, Homo sapiens
agaattagacctttcacatgggaaaaaagatgcttttgttttggagatcctttacctcctgctaggtttggagtcagtaaagagaagacgacttcaa

SEQ ID NO: 107273 - DNA, 50 bp, Homo sapiens
aaaggaaagaaacgaaggagagatccagaaacctgctcctccaaagccag

SEQ ID NO: 107274 - DNA, 115 bp, Homo sapiens
cctggtcttcaagctcactgccgacttcagggaggatccggacccccgcaaggtcaacctgggagtgggagccaggtctctagacaaactttataactttgctgattgctctgga

SEQ ID NO: 107275 - DNA, 82 bp, Homo sapiens
aatgtcccaaaggatcctcaagaggagatgatggcggggaatgggcccatgcagaatctccaccatgtgtagacaacctaaa

SEQ ID NO: 107276 - DNA, 75 bp, Homo sapiens
tttgtgcttctgcccaacgacatcgatggcctggagaagggagctctgtccagcagattggcctcagtgttcctg

SEQ ID NO: 107277 - DNA, 75 bp, Homo sapiens
ccctgctgtcgctcctggtcggcgcgtggctcaagctagccgggcccctcagatgagagctgcacccaggccagc

SEQ ID NO: 107278 - DNA, 83 bp, Homo sapiens
tggaattcttctttttttctttttttcagtttgtatgccagaagaagggtttaaaggtcatcatcagatttgaaatatttaaa

SEQ ID NO: 107279 - DNA, 82 bp, Homo sapiens
gattgagcgccaccctgtggacatcagcgccatccccgagcagcggtggaagctgggaacccgagcgtcatgttagggtgaa

SEQ ID NO: 107280 - DNA, 75 bp, Homo sapiens
tgggatccggccagatgattacttgaacctgtccctgctggtggtgggtgtcggcgccgtgttctcactgctatt

SEQ ID NO: 107281 - DNA, 75 bp, Homo sapiens
cagagcacgagtagtagtcttaagagatcggaaaatagaagatcttcgacagtgcctgaacaggtacaagaaaat

SEQ ID NO: 107282 - DNA, 100 bp, Homo sapiens
ccgtggtcggtggaggagatccgcaggagcagccagagctggtcgctggcggccgacgcgggcgttccgaatctattccaaccattctgcactggagtcg

SEQ ID NO: 107283 - DNA, 103 bp, Homo sapiens
ccgctgacagcagccatcgaggcgagccagagcctgcagtcccacacggttgaaatcacaaagattagacacctttttagataggtgttcttcagcaccactg

SEQ ID NO: 107284 - DNA, 90 bp, Homo sapiens
ctgaccccagagtggcagaaaggctgatgcagcagattatggtgacaagctgaacatggagctgagtgagaaatacaagctggacaaaga

SEQ ID NO: 107285 - DNA, 105 bp, Homo sapiens
gagcggcggtttccttgcccggggccgcgggaaggccgaccgactgccgcgtcagcagataagcagagagccctagaagaaaccaaagcctacaccacccaatcc

SEQ ID NO: 107286 - DNA, 90 bp, Homo sapiens
tttgagccatacttaagtagccagacaaatcaggtgttggtaaatcatgcttattgctacagtttacagacaagaggtttcagccagtgc

SEQ ID NO: 107287 - DNA, 75 bp, Homo sapiens
gctgctgctgctgacgctgctgctgcccggcctcgggcaaatgaagaaacacccctgccgccagtgtgacaagtc

SEQ ID NO: 107288 - DNA, 96 bp, Homo sapiens
gcttctgggccaccatttgccagggcctcgctcgagatactttgacgaaggtaattgggactcccatcaagtctccacacagctagcagccacgtg

SEQ ID NO: 107289 - DNA, 100 bp, Homo sapiens
cacctctgattccaccaccggtgatcctgccatgaagcagtttctgctgtacttggatgagtccaatgccctggggaagaagttcatcattcaagacatt

SEQ ID NO: 107290 - DNA, 131 bp, Homo sapiens
gagagcgagctgagtggttgtgtggtcgcgtctcggaaaccggtagcgcttgcagcatgctaaaccaggtggacaggtgaaatgtcagtatatctctgctgtggataaagttatatttgtggatgattatg

SEQ ID NO: 107291 - DNA, 82 bp, Homo sapiens
tcaagcagtacagttagaagatggtaccacagcatttattcaccacacctccaaagggatttcttcagtgccaaccccttca

SEQ ID NO: 107292 - DNA, 100 bp, Homo sapiens
gtttgaacaaactcgaagaacagctgtggaaagaagttgcaaaacactgggttccctctcccagcctgtgctgactcagccatcttcccattctgcatct

SEQ ID NO: 107293 - DNA, 75 bp, Homo sapiens
atttaaagatgtcaaacaacctccgtgttctaagggatacaccaacatcagctggaccaaactccttcaataaag

SEQ ID NO: 107294 - DNA, 74 bp, Homo sapiens
ctttcgcccgcggctcctgagggatcggtctcagccgcgcggccaactgggtacatggaaaactcagtctccta

SEQ ID NO: 107295 - DNA, 100 bp, Homo sapiens
ctgagcgctgtgcccagccaggagcactcccaggaggaactgactgcttccgttttcccagaattctatcaaatatctttcaagtgtccacatgtaccca

SEQ ID NO: 107296 - DNA, 100 bp, Homo sapiens
cggcccgcgggggagccccgggagccgcacgattcttggatgaagtacagtcctactcgggagttaacaaaatgagtgtgcagaacttggcaacggtctt

SEQ ID NO: 107297 - DNA, 100 bp, Homo sapiens
gtacgattccggagaatcgcgaggcagagcgggagcgcgcagccagctgaactgtcccaagcaataaacagtggtacattgttatcaaaaccgtccccac

SEQ ID NO: 107298 - DNA, 75 bp, Homo sapiens
gacgcacacggcaccaaactgagagattaaacagattctagaaaatgaacttcagatacctgtgtccaaaatgct

SEQ ID NO: 107299 - DNA, 100 bp, Homo sapiens
ccacatggagggctgctcacccacagaggtgcagagggtgccacctccaccagccaccttgaagatcctgaacaactacctccagtttgaggtgtcccac

SEQ ID NO: 107300 - DNA, 100 bp, Homo sapiens
attattttttgttatgtgacgttttaccagaagatagaattcttagagaagagcttcagaaacagagactgtttctggcatcactaccactactgattaa

SEQ ID NO: 107301 - DNA, 100 bp, Homo sapiens
ggagtggagggacctcaaagttgtctataagagaacattgatgatggcacctcagatcgcccctacagccatgctctggtggctggaattgaccgctacc

SEQ ID NO: 107302 - DNA, 75 bp, Homo sapiens
tggagatacgcggtgcagctgccgacaccccagcctgttgctgacactagtgtatatgtctcgagtccacggtat

SEQ ID NO: 107303 - DNA, 80 bp, Homo sapiens
ctcccgagtagctgagactacagctacggagccgagatggctctgagtacctgatccagcacgactcggaggccatcatc

SEQ ID NO: 107304 - DNA, 80 bp, Homo sapiens
gaaaaactggagagcttcatcaaaaatagtgatagctttgataagttgcctgtggctggagaaaggaatgtgctcatcac

SEQ ID NO: 107305 - DNA, 82 bp, Homo sapiens
cgcgtcatgcggctcctcggctggtgtgcaagcatctcttggcagtttacctgagtcaggttatgaggacctgtcagcagct

SEQ ID NO: 107306 - DNA, 75 bp, Homo sapiens
ggacgaggccgggacttggccgagcggatcctaataaggggaaaatgaaacgggctgtaaaggcagaaaaccacg

SEQ ID NO: 107307 - DNA, 100 bp, Homo sapiens
cccggggctcggagaatgggcagttcgttcccacatgcagggcagcacaaggagaatgggcgtcatgactgatgtccaccggcgcttcctccagttgctg

SEQ ID NO: 107308 - DNA, 75 bp, Homo sapiens
atacatccaggaaagacatggagattctcttaaaaagtgttgacatccctgcctgcgctggcggtcccacccccg

SEQ ID NO: 107309 - DNA, 83 bp, Homo sapiens
ggacgacgaggaggagacgtaccggctctggaaaatccgcaagaccatcatgcagtagagacgggatttcaccgtgttagcca

SEQ ID NO: 107310 - DNA, 75 bp, Homo sapiens
ccagcagcttgcttatggcatctatgtcatccaccaggatattctgtgccgtctggagcatacaacgttgaggaa

SEQ ID NO: 107311 - DNA, 99 bp, Homo sapiens
ctggtcagagcgcggatggccgtaaccccgaaggaaatgaagtgcacctttgacatgttcaacttcctggcctcccagcaccgggtgctccctgagggg

SEQ ID NO: 107312 - DNA, 100 bp, Homo sapiens
tagtatgcaggctaggcaaactgcctctaagaaatatgtctccaaagaacttgccaaagagattcgtgtcaaagcagaaccatttataaaatggttgaag

SEQ ID NO: 107313 - DNA, 90 bp, Homo sapiens
aagacagcctgtctacatcattatggaactggtttcaggcaaaagatgtgattgaagagcatggtccttcagaaaaggcaataaacggcc

SEQ ID NO: 107314 - DNA, 82 bp, Homo sapiens
agccgggcagtccctggagcgggccagagtctctggtaagaagagtgaaagcaaagaagccaagaagtctgaagaaccaaga

SEQ ID NO: 107315 - DNA, 100 bp, Homo sapiens
cccagaggacctggagagcagggaggccatgggatgtgtcttggtgagctagtcattaacccccaccagcagcacatggatgcattctattgggtgattg

SEQ ID NO: 107316 - DNA, 113 bp, Homo sapiens
tccaagtctccgaacagagccacacgactcccgctggctcaatgctacctgaacgacctggagcgtattgcacagagtgactacatccccacacagcaagatgtgctacggac

SEQ ID NO: 107317 - DNA, 98 bp, Homo sapiens
cccggggtgtaataatgttaactgagatcacaaaatttgtccaggatagacatagagctagaagaaacagacttcgtaaagatcaacttaagaaactt

SEQ ID NO: 107318 - DNA, 80 bp, Homo sapiens
tataaagctgagtgtgatgaagatgcagaaaatgttggggggacttgatctcatcttcatgccaggccttgggtttgaca

SEQ ID NO: 107319 - DNA, 74 bp, Homo sapiens
ctttccgccctaatggaggtctccagtttcgggtgtccgcaatgttgccagtgtctgtctgcagattggctacc

SEQ ID NO: 107320 - DNA, 100 bp, Homo sapiens
tgttgagcatgtcattcatctgttcaaggaggaagtaatgaccaaattaagtcattttcgagaatcgttgacagaaggctacgttggggccctgcacgag

SEQ ID NO: 107321 - DNA, 90 bp, Homo sapiens
gacgcgcccggcccggagcccccagcgcagcggccgcgctggagaatgctggaggagaccttaaggatggccaccaccactatgaaggag

SEQ ID NO: 107322 - DNA, 82 bp, Homo sapiens
cgacaagccgctggcagccgcggatctcaccgccgctcagggttgggttaacggcatggagaacagtcaccccccccaccac

SEQ ID NO: 107323 - DNA, 82 bp, Homo sapiens
gccagggcctcaagtgcgatggcaccttcagtgccccgtgggctgccctggcccacagccgtgagcagtactgcctggcctg

SEQ ID NO: 107324 - DNA, 97 bp, Homo sapiens
ataagatgaccttcagtgtgctgctcaaaaacaggtgtgtgtgtgcaggccacagcagcatgcccttggtgtagtcagtgccgaaaggggtctgttc

SEQ ID NO: 107325 - DNA, 82 bp, Homo sapiens
cagaaggtgcacagccacagcgccgagatggaggtgatgtgtccaatctagatcccaacttctcatttgaaggcaccaaact

SEQ ID NO: 107326 - DNA, 112 bp, Homo sapiens
gaggcgcaccagatgtaccggaccctgttcttcaggactccagaagacctttccagattcgtggttgagctgcagcagagggagcttgccttgaaggacaagaacagcgccg

SEQ ID NO: 107327 - DNA, 82 bp, Homo sapiens
gaagtggccaagaaggagaagcagctgcggaaaatgctagaaggaagaagggactctgatcatcgaggggctcctcaacatt

SEQ ID NO: 107328 - DNA, 75 bp, Homo sapiens
ttctatcttcccatcataaaaaagcttgagaaagagatccaagatcttgaaaaagctgaactgcaaatctcaacg

SEQ ID NO: 107329 - DNA, 90 bp, Homo sapiens
gtgtccttccagcagtcgagcaccgccaagtcggccacctggacgggtcctgcagttctgagcttgggttccctttgcctggacaccaac

SEQ ID NO: 107330 - DNA, 50 bp, Homo sapiens
aggtgtcatccgcagtgtcacgagcccaaatcttgtgacaaaactcacac

SEQ ID NO: 107331 - DNA, 75 bp, Homo sapiens
agccgtcgcagtcgccgtcccacacgggctgcggacaccaagggttgctaagctccacctggaggggaacttcct

SEQ ID NO: 107332 - DNA, 98 bp, Homo sapiens
gcctgttctcatcaccatggcaacaggtggacgccctgcttcatctggcccgccagaatcgggctgtggcccgcacagcccagaatgaacggtcatca

SEQ ID NO: 107333 - DNA, 75 bp, Homo sapiens
cgagcggccgcgagcagagccgcccagccctgccagctgcgccgggacggtacagacagtgtttgtgtgttcctg

SEQ ID NO: 107334 - DNA, 100 bp, Homo sapiens
cacctccggttaccccttggatcaaccacagatgcagaagataaatgtgtaatagaaggcaacaactgcacatttgttcgtgacttgagtagaattaaac

SEQ ID NO: 107335 - DNA, 83 bp, Homo sapiens
cgccgagggctccgtcaatggcttcatcagcactttgggcacgagggccgggaggaggatcagcggttgatcaacttggtagg

SEQ ID NO: 107336 - DNA, 74 bp, Homo sapiens
cttcatgcccaaatcccggaaactccagcgtgtctccagccgtgtgcaagagaagcctgagccagtgccgctgg

SEQ ID NO: 107337 - DNA, 98 bp, Homo sapiens
agcccgtgcctgtcttcagatcttcacagcacagttcctgggaaggtggagccaccagcctctccctgggtgacatccagcagctgctctttgtctcg

SEQ ID NO: 107338 - DNA, 50 bp, Homo sapiens
gggatatggatttgccacccagaggatgctgaaaacgccattcaacagat

SEQ ID NO: 107339 - DNA, 100 bp, Homo sapiens
agggacatctgctcctccaaggcagagcggctcccccctttcggagccaaaaacctgtatatcatctccgtgaaggggatcaagggacggctgaacagac

SEQ ID NO: 107340 - DNA, 75 bp, Homo sapiens
ccaattctgtttactctgaattaccatcagctgaagggaaaatgaaggctttaaaggagatagatgaagttgggg

SEQ ID NO: 107341 - DNA, 50 bp, Homo sapiens
tttcaacatgcctctgacaatctctagtctgattttcacacccgctacca

SEQ ID NO: 107342 - DNA, 100 bp, Homo sapiens
ctcagaagacctcctgtcctatgaggccctccccatggctttaggctgggatatgaagaacaacagcctgaggttccaattctttatcatgatgtaacat

SEQ ID NO: 107343 - DNA, 82 bp, Homo sapiens
cgaaaaagaaggacgtatgctctacaagcaaatgcagccctgaggatttggctactgcatataacaacagggggcaaatcaa

SEQ ID NO: 107344 - DNA, 90 bp, Homo sapiens
ggttctccatcgcgcgcacggcagcctagcgcaatgaggcgggcagcactgcgtcatccgtccttggctcaggatttggagagcttgcac

SEQ ID NO: 107345 - DNA, 50 bp, Homo sapiens
acgtgcggctacaggagcgcacgagcggctgagtccagattggcaggtgg

SEQ ID NO: 107346 - DNA, 100 bp, Homo sapiens
aagatctcgcccgcccttccgtcccaggatagtgtgattgcgggaccatggaatttacaaggtttggaattcacccagttgcaggccgaatgcctggtca

SEQ ID NO: 107347 - DNA, 100 bp, Homo sapiens
aaactccggaccagttgaagaaggaagattcacactgtaacattattcacactgagatctttgatggaaaacagattccacagagaatggttgatggatg

SEQ ID NO: 107348 - DNA, 98 bp, Homo sapiens
gcaagcgcagggggacggggaccagcagctgtcgccgccgctctcagcctctgcgcttagataccttcatgaaaacagaatcatccatcgggatctaa

SEQ ID NO: 107349 - DNA, 82 bp, Homo sapiens
cgtggagttcgaggagtgcgtcaaggactccccgcgcttcagctgctgcggactctggagcgtgagaaccagcgcctggagg

SEQ ID NO: 107350 - DNA, 83 bp, Homo sapiens
cgacaaacaccacgagaattccgcagcccacacgggctttgttcgcgggggtcacagctctcatggctgcagctagcgtgacc

SEQ ID NO: 107351 - DNA, 75 bp, Homo sapiens
aagaatttgttcacataaacagattggaaaatatataccatgatctacaggaacttggtagtagtcaatcagcag

SEQ ID NO: 107352 - DNA, 90 bp, Homo sapiens
atcgctgtcattaaaaattaagcgtggcttttgaggaagatgtgacaactaccggagctatatgttctcctttcagccaagacctttcac

SEQ ID NO: 107353 - DNA, 100 bp, Homo sapiens
gacaaaattgagaagaactcataaacttggcttcctcgcttctgctcctcaggtgctgttggcagcagcggtctgcacaaaagcaggaaaggctattgtt

SEQ ID NO: 107354 - DNA, 100 bp, Homo sapiens
ggactacaggcacgcgccactacactcgggtgcaggtgggaagcacacctcaggaccaaagaatcgtcgggtacatcgcctgcacacacctgcatgcccc

SEQ ID NO: 107355 - DNA, 75 bp, Homo sapiens
cagagccgcccagccctgccagctgcgccgggacggtgacttaagagattaaaattaatttggttgctgttggtt

SEQ ID NO: 107356 - DNA, 75 bp, Homo sapiens
gtggtctgtggagctggtcaacgaccgcggggcgcaggttccctctcccagcctgtgctgactcagccatcttcc

SEQ ID NO: 107357 - DNA, 100 bp, Homo sapiens
ctggcacagggagctggacttgaatctcatggcaagaaataccgcccacgaatggatcaggaagtctctgaccaagccattagcagagaatgaagaagga

SEQ ID NO: 107358 - DNA, 96 bp, Homo sapiens
cccaagtctgcaatcttaccagggaggccaagcgaccacccaaagaaggatttcggctgaatgcgtcttcttggcccatgttccttttgaagacgc

SEQ ID NO: 107359 - DNA, 100 bp, Homo sapiens
caatggcaacatgtacaagagcatcctggcgggcagggctgggcagcggcctgagtctcagcggacttgtccacccggagttgagtcggagtggcgagct

SEQ ID NO: 107360 - DNA, 90 bp, Homo sapiens
atgctgtagacatttctttgtggtttatctaaaaaccaaaggttcttgggtgtctctggggagtccctgggccagaccttcctccagact

SEQ ID NO: 107361 - DNA, 75 bp, Homo sapiens
gtcaagtcctggctgaagccacggctgggacaggaagccacattctgggaggtgatcagtgatgaacatggcatc

SEQ ID NO: 107362 - DNA, 83 bp, Homo sapiens
cggacagccgcgcgctgagggtctcggggcgggcgccgcgggacctctccgggccatgggtcgcgtggggcaggcagtggcgc

SEQ ID NO: 107363 - DNA, 75 bp, Homo sapiens
tggggttcggcgctatggaggagctcgatggcgagccaacagtcactgttatcaatactctggctgaccatcatc

SEQ ID NO: 107364 - DNA, 98 bp, Homo sapiens
gcgcccagacaggcctggagcacggtgataaaagaaaatgtggctgaagttacccgaagttcagcttgcagtgtaattcagaagagttaagaccagaa

SEQ ID NO: 107365 - DNA, 100 bp, Homo sapiens
ggaaggccaacgtggaggcctcacgcagctccacagacagccccagctcggtgttcctcaggctggacgtaaagaaagaagtgatgcactcaattctgca

SEQ ID NO: 107366 - DNA, 100 bp, Homo sapiens
gccgtttccaccgaggaaaaggaatcgtatcgtatgtccgctatccagaacctccactctttcgtgcatctgggggaggtgttgtagccattgacaacaa

SEQ ID NO: 107367 - DNA, 102 bp, Homo sapiens
cagaccctggagcctcagttggaagcagccgatccagcctgcggagcctgtggggcagtttgggagagcccatggtgactgcgtgagtggagcccagctgtg

SEQ ID NO: 107368 - DNA, 101 bp, Homo sapiens
tcgcccgcggctcctgagggatcggtctcagccgcgcgggtgggcaaacgcagaggcgggaacaaactagccctcaagacgggaatagtagccaagaagca

SEQ ID NO: 107369 - DNA, 97 bp, Homo sapiens
tgggagaatccaccgccatccgccaccatggctgcaagatcaaggccctgcgggccaagacaaacacctacatcaagaccccagtgcggggcgagga

SEQ ID NO: 107370 - DNA, 110 bp, Homo sapiens
aagaagaagaagttgcgaaggatccccaacggggaggccaacgtgaagaagagcatcagatccatgctgctgctgactcggagccccacagcttggcacaggctctctca

SEQ ID NO: 107371 - DNA, 100 bp, Homo sapiens
ctcaactctgcctggacaggctgcagctggaggctattcataaggttggccgttgtccaatgtgttgctgttatctggaactcctacctgtcctggaagg

SEQ ID NO: 107372 - DNA, 100 bp, Homo sapiens
ccctgacatcatctctgtgcactgataataaccctgcagctctttcgacgtgtagcagcagctttgccgggaatggaaagcacacaggacagaagcagag

SEQ ID NO: 107373 - DNA, 100 bp, Homo sapiens
gcctacttgaagaacttcaacatgaacaaggtcaaagcccgggtcatcctctcaggaaaggccagtaacaatccagacactcctgggtttattgtgaacc

SEQ ID NO: 107374 - DNA, 50 bp, Homo sapiens
cttccagcctggaagtgttgcagagttacagaatgtctgaaggggacagt

SEQ ID NO: 107375 - DNA, 88 bp, Homo sapiens
gagcgtcccgcgtcctcctccacccgcggagcggccgggctggatggaaaagggcggtgaactggcacaaaggttaatctcaagatgc

SEQ ID NO: 107376 - DNA, 98 bp, Homo sapiens
ctcatgtacaaaactgagcggaatggagctgtgagcacgcatcaggtgctgtttcaggcctggcacgtagtagagactcgctctccgtctccagcaat

SEQ ID NO: 107377 - DNA, 98 bp, Homo sapiens
gcggaacccgtgggcctgtggactgcagcctcggcggtcagcagggcatttgtttacctgagcaatctgctgtatcccgtgcccctgatccacagggt

SEQ ID NO: 107378 - DNA, 82 bp, Homo sapiens
tctgcccctgcccagatccggaagaacggtgaatttcccccgcagcagcctcccgcgacgatgcccctcaacgttagcttca

SEQ ID NO: 107379 - DNA, 50 bp, Homo sapiens
gtatcaagtaatggtgcaaagcctgaaggtgtgggccgaagatatgctca

SEQ ID NO: 107380 - DNA, 100 bp, Homo sapiens
cgtgcagctccaagagctgtggcccgggggcctcttctggaccaggaaactctccacccaggctatgatgaccttaatcctgattggaggctctctactg

SEQ ID NO: 107381 - DNA, 100 bp, Homo sapiens
ggtctcggggcgggcgccgcgggacctctccgggccatgggtgacagagctgaatgaacctctctccaatgaagatcgaaatctcctctctgtggcctac

SEQ ID NO: 107382 - DNA, 100 bp, Homo sapiens
gccccctggaaaatcatctgcccggcctgtgggatgcaagtgggaggtctttgatttgcgtcagtgtcatcgacagatgcagcagcaggcggctactgca

SEQ ID NO: 107383 - DNA, 75 bp, Homo sapiens
aggtgcaggcctctcagctttcctccctgccacagcaaaccagtccagctacgggggcccagccagccagcagct

SEQ ID NO: 107384 - DNA, 99 bp, Homo sapiens
tggtgttgtcgtcgttgcaaattctgtcacgtttgtggaaggcaacatcaggctacaaaggacttcctcgttctgcccatcttcctaacaaggctatgg

SEQ ID NO: 107385 - DNA, 100 bp, Homo sapiens
acaattgtattggcagctagagaggaactaattccagagttctactacctaccagagatgtttgtcaacagtaatggatataatcttggagtcagagaag

SEQ ID NO: 107386 - DNA, 100 bp, Homo sapiens
ctacaagtactgaaaaggcacaggtcctgggaactccaacaagggagcaaatcagagaaatgaacccaaactacacagaatttaaattccctcaaattaa

SEQ ID NO: 107387 - DNA, 90 bp, Homo sapiens
gtggcccttccaaataagcggcataaagcaattgagaattcagttttacagctcccagcacagtaggaaagagaaatttgagtcctagtc

SEQ ID NO: 107388 - DNA, 121 bp, Homo sapiens
aaactttactttgcctcatttgaggagtgggaacaggcttcggcgaacacaaaggtgctggagaatctggtaaaagcaccattgtgaagcagatgaggatcctgcatgttaatgggtttaa

SEQ ID NO: 107389 - DNA, 82 bp, Homo sapiens
aaatactctgatgacctactgaagaagcttctcaaaggcttgaagtagaaaatgccatgatgagaaaaactattaaaaaaca

SEQ ID NO: 107390 - DNA, 100 bp, Homo sapiens
caggatctgccccagagaaagtcctcgctcgtcaccagcaagcttgcggggctgtgtttgatgtggacaagaagaaagggttgactctgattgagctctg

SEQ ID NO: 107391 - DNA, 75 bp, Homo sapiens
ctgacatcgcctgcagccgagcgggcccgttccgccggagctgaggaccaggctccatggtccccttctcgatgc

SEQ ID NO: 107392 - DNA, 100 bp, Homo sapiens
ggaaagatgttagaattgaagcctataatatttgtcacctgaactacttcacattttccccaatatatggtgtctgatgatttgtgagcctcaagtgact

SEQ ID NO: 107393 - DNA, 74 bp, Homo sapiens
agaaactttgctacagcctcctttgaccagatccatgactgttggtgggtaaggtagccgaacgtggtacccac

SEQ ID NO: 107394 - DNA, 87 bp, Homo sapiens
gtgttggcaagaatggatccactatagcagtctggagaaaatgatgtggaatataacaacatggaattagaagagggagaactcatg

SEQ ID NO: 107395 - DNA, 50 bp, Homo sapiens
tgggagcgggagctgcggaaaggtgctgcttttactgaaggcttatcaag

SEQ ID NO: 107396 - DNA, 100 bp, Homo sapiens
ctccaaatggttgaaaacagatatacaggaaatggtgttcacactggccctgaatcaagggaacaccagttttcacatgctggcagaagcaatggccggg

SEQ ID NO: 107397 - DNA, 80 bp, Homo sapiens
cagaagcggaacagccacagcagcctcccaaggagtctgcaagttgggaacatttacggatgagaagtcaaaagcttccc

SEQ ID NO: 107398 - DNA, 100 bp, Homo sapiens
ggctcatgcgggatttcaagcgcatctgtccgatctttcctgtttcccccactccattcccttcctatccatcccacagccagaggaagtggatggcctc

SEQ ID NO: 107399 - DNA, 75 bp, Homo sapiens
atccgagttactcatgagaccagtgcccatgaaggtcagactgaggatcaatgtgactctaagaacaaatggatg

SEQ ID NO: 107400 - DNA, 83 bp, Homo sapiens
cgggctgcccaagcgacagctgtcagaggggcaggagcttctgggagccaccgtctgaagacctgcctagagctggaacgtta

SEQ ID NO: 107401 - DNA, 101 bp, Homo sapiens
gaccagaagggacaccttttgaagatggatctagtgaaaagccatttgatgtatgcggtcagagaagaagtggaggtcctcaaagagcaaatcaaagaact

SEQ ID NO: 107402 - DNA, 100 bp, Homo sapiens
gatggaaaaccagttattgaatatcaagaggaggagttgttggatgcagaaaatgcgattgtgcatatgggcggtcagtggttgggtggtcgtcaaatcc

SEQ ID NO: 107403 - DNA, 100 bp, Homo sapiens
gcgttacgggcggtacggaggagccctgggcgctgcctatggcacagccaagagcggtaccggcattgcggccatgtctgtcatgcggccggagcagatc

SEQ ID NO: 107404 - DNA, 99 bp, Homo sapiens
accaaccagactggcggttcatggagagcaaggagaaggatcgccaggtgctggaggacttcccaacggtatggcccatctcctgtacgcttggagcga

SEQ ID NO: 107405 - DNA, 80 bp, Homo sapiens
gccccggagtggggtgtcggcgcctcattcgggtggagctgagccggagacagacctgcctagagctggaacgttacctc

SEQ ID NO: 107406 - DNA, 100 bp, Homo sapiens
gtgagttgttgctcccgcctgagcccagcccccagaaaggattgtgacatatcgttggacccagaattgagaggaggaggtggaggaggaggaggatgga

SEQ ID NO: 107407 - DNA, 89 bp, Homo sapiens
ctatggattctctggtagacatgccatttgctactgtagatattcaggatgactgtggaaatgaagttgcggagaataatgaacatgat

SEQ ID NO: 107408 - DNA, 101 bp, Homo sapiens
aggagatctaccgctacagccgcagcctggaggagctgctgctcgacgccaaccagctgcgcgagctgcccaaggcatagaatgtcaagctaaccaggcgt

SEQ ID NO: 107409 - DNA, 50 bp, Homo sapiens
cacgacctctcggacacggtgcaggcagaaggagctggcaaacagccctg

SEQ ID NO: 107410 - DNA, 75 bp, Homo sapiens
cctcgtctcccgctccgccctcccttttccctggatgacgtagctttgccaaagacttagaagctaagcagaaaa

SEQ ID NO: 107411 - DNA, 107 bp, Homo sapiens
gctcgcgctactctctctttctggcctggaggctatccagcgcctccggtgtggctgtctctgatggtgtcatcaaggtgttcaacgacatgaaggtgcgtaagtct

SEQ ID NO: 107412 - DNA, 100 bp, Homo sapiens
tgccttagtaagatacctgtgtgttacaggatggagtggaagatagatgataagcctgtaaaaattgacaagtgggatggatcagctgtgaaaaactctt

SEQ ID NO: 107413 - DNA, 129 bp, Homo sapiens
gtgttgactttacaagaatatgaattcgaaaagcagttcaacgagaatgaagccatccaatggatgcaggaaaactgatattgatgatgttaagaagttcaaaccgggttacctggaagctactcttaa

SEQ ID NO: 107414 - DNA, 88 bp, Homo sapiens
gtccgccgccaacgcgcaggtgctagcggccccttcgccctgcaggtggtcttcaagctgacagagaagctgacggaacagaaggagt

SEQ ID NO: 107415 - DNA, 82 bp, Homo sapiens
tattgcgcgtggaacggctgcttttggaagcagcctcccgcgacgatgcccctcaacgttagcttcaccaacaggaactatg

SEQ ID NO: 107416 - DNA, 90 bp, Homo sapiens
ccctgctgtagtgatactgagctggaagccatctgccctcactatcagcagccagatcctgtgccccagaaaccgtgagatgtctcaatt

SEQ ID NO: 107417 - DNA, 100 bp, Homo sapiens
cttttgccctagagcaattgaaggctattttggcattctgctggatatatgttcgtaaataccaaagtcggcgggaaagtgaagttgtctccaccataac

SEQ ID NO: 107418 - DNA, 100 bp, Homo sapiens
gaacaatgggaacctgagctgagcagggagaagatgtcaaccggacactagaaggtggaaggaaacctcttcattatgcagcagattgtgggcagcttga

SEQ ID NO: 107419 - DNA, 82 bp, Homo sapiens
atggatatccaggtgctgagccaggagcagcagcctttctatgtgtatatctcatgattgatatggagaaactagtcatggg

SEQ ID NO: 107420 - DNA, 75 bp, Homo sapiens
cgctgcagcgcgatctgcgcgaccagaccggcccccccgaggctgcctctaagaatcaaacttcactcttgggag

SEQ ID NO: 107421 - DNA, 98 bp, Homo sapiens
gcggagggaagacgccctggtgctcaccaagcaaggtgaaatgacaatggatgctctgttggctcgattgaaacttctgaatccagatgaccttagag

SEQ ID NO: 107422 - DNA, 87 bp, Homo sapiens
gctccccgaaatccacagcgcctgtcatggatttgttgggccttggaactgttaaccttcaaggacgtatctgtggacttcactcag

SEQ ID NO: 107423 - DNA, 74 bp, Homo sapiens
tgctggaaggggccagtctggagacagtcaagtgccttgctttccatgacatttcccctcaagcaccaacacat

SEQ ID NO: 107424 - DNA, 75 bp, Homo sapiens
caggtggccatcaaagtgattccccggaatcgtgtgctgggctggtcccccttgagtacaggggctcaggtccag

SEQ ID NO: 107425 - DNA, 98 bp, Homo sapiens
ggatttgtaaacaggatggcttgtttcaatgcatcaaagctactgacatctcatggcatgggcatccaggttccgctgaatgcaacagagttcaacta

SEQ ID NO: 107426 - DNA, 83 bp, Homo sapiens
ccgaagaagactcccccacatctgggctgtctgtccccagaccccagagcacgtccggcaccaccatgactgggctgttgaag

SEQ ID NO: 107427 - DNA, 90 bp, Homo sapiens
cgccaccctgacgccgtggcctgggccaacctcaccaacgccatccgcgagactggccttacgaaggatgaatccaaaaggccaaagtat

SEQ ID NO: 107428 - DNA, 100 bp, Homo sapiens
tgtggatctcaagtactaccggccaactgaagtgcaaaatgatgcttcaacacccaggccaggtctctgcctcggaagtgagtgcttctgccatcgtccc

SEQ ID NO: 107429 - DNA, 75 bp, Homo sapiens
cgctctcgcttcgtcctacacttgcgcaaatgtctccgccaatgttttcagttgcaccaagcttagccaccaatg

SEQ ID NO: 107430 - DNA, 115 bp, Homo sapiens
gtgttaccatggtttgaacagctgcttccattaattgtcaacctcattgataaatgctgtatccaatgctcaggtgagaggtgatagctatgaaagcggctgtttaggaagaaca

SEQ ID NO: 107431 - DNA, 82 bp, Homo sapiens
agaacgagcggtggagattgatggggagcgcatcaaggcatggaagaggagatggttcgtgttacgcagtggccgtttaact

SEQ ID NO: 107432 - DNA, 82 bp, Homo sapiens
tgggcgcggattcgccgaggcaccgaggcactcagaggagaaagaagcttccggttctgaggtcctggaggtgccatttccc

SEQ ID NO: 107433 - DNA, 75 bp, Homo sapiens
gtaggatgcagaaaatctcatcactacataaatcatttgtttatgccagttattcagacagaaagtgaacacaag

SEQ ID NO: 107434 - DNA, 100 bp, Homo sapiens
tcctgtcccgctggccctctgtctgcctgtgtccctgaccatggctccctgcagtaccctttaacgcacccttacccttctgaagaacagaaaaagcagt

SEQ ID NO: 107435 - DNA, 100 bp, Homo sapiens
gcgcgacgtcgtgtcgagttcccaaaaagctccgcaggggctgtagggaggaggactcagagagagtaatgataattaccggaccaaacatgggtggaaa

SEQ ID NO: 107436 - DNA, 75 bp, Homo sapiens
ccttaaagttccagaaagattttgagcagtatttggcagtcgtattcagagataaacccctggagctatgggatg

SEQ ID NO: 107437 - DNA, 100 bp, Homo sapiens
gtcgcagcgctcatccgcgccgggagcccttggctgcgtcgcccggcagccgcgctccagcgttctatgagcgccggtcttgtctcccccagctaaattg

SEQ ID NO: 107438 - DNA, 83 bp, Homo sapiens
gtctgttagaggaagacgacgagtttgaagagttccctgccgaagccgttggacataccagatggtcgaagagctccacttcc

SEQ ID NO: 107439 - DNA, 82 bp, Homo sapiens
tatcagccactaatgaagttgggaactcagaccgtaccttgcaacaaggtagagttggctttgtgggacacagctgggcagg

SEQ ID NO: 107440 - DNA, 100 bp, Homo sapiens
ttcgccgatgggaaacccggagaccaaatccttgacggaatcagtccccaatgcctggaaattcctcattggattactgtgttttaaacagaatttcgtg

SEQ ID NO: 107441 - DNA, 75 bp, Homo sapiens
gaaaccaacattcccaacagccaccaccaccaccagatgatgtgaagttcatttccaatccgccctccatggtgg

SEQ ID NO: 107442 - DNA, 50 bp, Homo sapiens
tgccacagtccacatgtcccggacctacagacctggtacctggatttttg

SEQ ID NO: 107443 - DNA, 98 bp, Homo sapiens
atctaagaagaattggaaggttcaggtttcccaggcagctgcagacttgaaacagttctgtctgcagaatgctcaacatgaccctctgctgactggag

SEQ ID NO: 107444 - DNA, 100 bp, Homo sapiens
gacagtgttacagagggacttgaagctcagtgagaaaaggagcctcctcaacaagcccaagagtgagatgaccccagaggagctgcagaagcgagaggag

SEQ ID NO: 107445 - DNA, 83 bp, Homo sapiens
caaactctttgattctacaatagctgatgagggaacatggactttgggcacaacgaggccctcttggaggaggcgaagatgat

SEQ ID NO: 107446 - DNA, 90 bp, Homo sapiens
gctgatcaagtatatgactgaagaagcccagtggttcccagacacaggtaatcttgggcacctccaagagcaaagtttaggagaagaggg

SEQ ID NO: 107447 - DNA, 101 bp, Homo sapiens
aaactcttggatctaaagaaacagttggctgtagctgaggggaaaccccctgaagcccctaaaggtgctttgtaacagagccagactggtttcctatctcc

SEQ ID NO: 107448 - DNA, 75 bp, Homo sapiens
tggaggctgagcatttattcagattcatgatgttgctatcaaaagttgagaaattgtcagaagaaatcatggaga

SEQ ID NO: 107449 - DNA, 75 bp, Homo sapiens
tgaaggcacttagtgcccacaaccgcaccaagaagcacgacctgctgagaataatccagaatggctactctgatc

SEQ ID NO: 107450 - DNA, 90 bp, Homo sapiens
aaagcacataaaaacactttctgaagctcatgaagactgtgtaaataatatcagaccaagatcactccatggatgaaatgacagctgtgg

SEQ ID NO: 107451 - DNA, 75 bp, Homo sapiens
aaataattttcacaaccttcaagaaattcggaatgttggctcaattaagaaacatcagggagataaattcaaccc

SEQ ID NO: 107452 - DNA, 50 bp, Homo sapiens
aaggactgcggggacctggtggccatcggaaacctgtaggaagtgtcagg

SEQ ID NO: 107453 - DNA, 101 bp, Homo sapiens
gaggaactgttcagtcaggtggggccggtgaagcagtgcttcgtggtgactgaaaaaggtgaatgaaaactttgccattgatttgatagcagagcagcccg

SEQ ID NO: 107454 - DNA, 100 bp, Homo sapiens
cagcgaagaagatcgaaaattaaacctcaggtggacccccaaaagtacaagggcatatttaacggattctcagttacacttaaagaggatggtgttcgtg

SEQ ID NO: 107455 - DNA, 100 bp, Homo sapiens
tgaaagcagagttcagagtctttcgtttgcagaacccaaaagccagagtgcctgaacaacggattgagctatatcagcaggaaccgaatattgtatctga

SEQ ID NO: 107456 - DNA, 100 bp, Homo sapiens
gttgtctctgctgctgttgcacactgggttgcagcctatggcctgttatttgtctcaacaaaagaagcatgctgtcaaggtcctttaattccaattttac

SEQ ID NO: 107457 - DNA, 95 bp, Homo sapiens
gaggccctgccctcagagacgcgccccctagtggaagcagagtgggaagcagaggaagaacttgtcgcttttcctaagcattagtttgttaattt

SEQ ID NO: 107458 - DNA, 100 bp, Homo sapiens
atggagtgcagctttgtagttttgcgtgtgttgaaagtacaattctattgcacatcaatgatatcatcccagtttgcagaaaaaacttcagcatgtgcca

SEQ ID NO: 107459 - DNA, 150 bp, Homo sapiens
agattccgaggtgcagaagttgtctgagtgcgttggtcggcggcagtcgggccagacccaggactctgcgactttacgtgaaaggtgtagcagtcactcggcctacacccacagcatcgaccttgtgaacccagcgacctgactgccttg

SEQ ID NO: 107460 - DNA, 82 bp, Homo sapiens
ttcacacttagtggcaaatggctgtcaccaactcagtcacatgtccaccaggaaccaagtaagagaattccttcttggagtg

SEQ ID NO: 107461 - DNA, 84 bp, Homo sapiens
atgcatcagcaacgatcgtggactatctgggcttccatcagtgcacagagaacacccctagcatgaacagtgtgaggattccac

SEQ ID NO: 107462 - DNA, 107 bp, Homo sapiens
gaggattctcttttccgattgggtcactcttggttgcttctggttcgtagtaggggttagtgaagtatgatgggcatcttccaatagaaataaaagctgttcctgag

SEQ ID NO: 107463 - DNA, 90 bp, Homo sapiens
gatgtcagaggaggaattacaacttcattttacttatgaagaaaaatctcctggcaattacaatcgtaaaaaggaccttgtaaaactaca

SEQ ID NO: 107464 - DNA, 101 bp, Homo sapiens
agtactcggtgaaatcctgtcctgaagactgtaagaaaaaagcttggccagaccacaagcgggaatgcaaatgccttaaaagctgcaaacccagatatcct

SEQ ID NO: 107465 - DNA, 98 bp, Homo sapiens
gccgctcagggccacgatccccttccagctgcagcagccgcaccagcgccgggacgggggtggccgtgcagacccagacagtcatccacacagtgcag

SEQ ID NO: 107466 - DNA, 74 bp, Homo sapiens
gtgactcggttctgccccctcgaggtggaggccatagtggagtttgactaccaggcccagcacgatgatgagct

SEQ ID NO: 107467 - DNA, 82 bp, Homo sapiens
tcgagatcacatgcaggactctttcttaatgcagcctgaggaaaagaagatatgcttcttaaacaaggtcagatgtatatgg

SEQ ID NO: 107468 - DNA, 90 bp, Homo sapiens
cttgtgtgctccatagtttatcaaaaggatttggagttccatggagtgatgagattttattttcaagataaagctgctggaaactttgca

SEQ ID NO: 107469 - DNA, 51 bp, Homo sapiens
tgttgccaacaacggctcttctcaagatgaaacgaggaggaagagatagtg

SEQ ID NO: 107470 - DNA, 100 bp, Homo sapiens
cttacgctcagggcttggcctcccctcagtgagaaagatcagtctaaagaaaaggagaagaaagtgaaaaaaacaattccttcctgggctaccctttctg

SEQ ID NO: 107471 - DNA, 100 bp, Homo sapiens
agccacgcgggcgagcggctgtgtggatgtcggcgaagccgcgggcgagacatgggaaagcggaaccaccaaaaggagtgatgatcaacgatctcatgat

SEQ ID NO: 107472 - DNA, 75 bp, Homo sapiens
cggaggaggaagaagaagtgttatatgtcctaaagtaaggtttcaggcttccagcatagagaacaagcaggactg

SEQ ID NO: 107473 - DNA, 82 bp, Homo sapiens
cggagaaggatgacaccggagtttgacgaagaggtggtttttgaggaaaacacaaaatgttctcccacatcacaccccgcct

SEQ ID NO: 107474 - DNA, 97 bp, Homo sapiens
atgcatcgttaacaatgtttcagcagaaactgtacaaactgtcagatacaagtagtgaatggaaaacccgttatgagacacaacttgaattaaatga

SEQ ID NO: 107475 - DNA, 100 bp, Homo sapiens
atatgtggaattcaccgggagagatagcatcacctgtctcacgtgccaggggacaggctacattccaacaggtatgccattttgaagactgagacgttgg

SEQ ID NO: 107476 - DNA, 100 bp, Homo sapiens
tagacatcctctgcagccagaagaacaagaagtaggcattgaccccttgtccagttactctaacaagtctggagggatggttgtgcgagctgttacgctg

SEQ ID NO: 107477 - DNA, 96 bp, Homo sapiens
cgccatgagcgcgatggagcctcaccacgtgaacggatccctggaccctctgtcctttggcctgtactggagtctgacttgtccagcagcacattg

SEQ ID NO: 107478 - DNA, 109 bp, Homo sapiens
gcttggtttcgggatctcggtgctgcagacggcgagacctcctgcacaggccaagactaaggggctgcagagcggggtggacattggcgtcaagtactcggagaagcag

SEQ ID NO: 107479 - DNA, 49 bp, Homo sapiens
gtagaaaactggtcaaggaagctggccaccactgtacgttacaaagggc

SEQ ID NO: 107480 - DNA, 100 bp, Homo sapiens
gagttccctgcaacccgtgcttatgcagatagttactattatgaagatggaggagtcagtggatcggtggggaaaatgctgcttaccctgggccctgggc

SEQ ID NO: 107481 - DNA, 90 bp, Homo sapiens
aaggattttaactgacccagccaaagtttttgaacacaacatgtgacactcttgcactcctgtaatgagcctggcactgtgatgaaacac

SEQ ID NO: 107482 - DNA, 74 bp, Homo sapiens
tggaagacttcataaagcaaagcagcgaagattcgagtcaccaggtgaaagtgggagatacattggatcttctc

SEQ ID NO: 107483 - DNA, 50 bp, Homo sapiens
cagatatccgtgaaggctctaggttcttccaggttggaaagagaatatgc

SEQ ID NO: 107484 - DNA, 80 bp, Homo sapiens
agggcctgcagcgggagctggacggcgagcgcgagcggcgcgagaaaaaaaagcttgtggtgaaggggggcaaaaaaaag

SEQ ID NO: 107485 - DNA, 92 bp, Homo sapiens
tctgggtctcagccgccaaagaccccgtccgttgttagaactgtggccagagtcagccccaggtcagaatgctggtcagcagcagactcaca

SEQ ID NO: 107486 - DNA, 75 bp, Homo sapiens
gagaagatggcggtctccacagttattgattctgcagaactgcaggcgtatccagcacttgtggtggagaaaatg

SEQ ID NO: 107487 - DNA, 100 bp, Homo sapiens
aagcatcgttaaagtctctcttcaccctgccgtcatgtctaagtcagagctatatgttctcctttcagccaagacctttcaccagtgcaggggatagaag

SEQ ID NO: 107488 - DNA, 97 bp, Homo sapiens
ctcctccttggtcgccgcgtccttggctggcgtggttttggccaaattgggcgagggcacaaaataaccacttaccccttctcaccgaggaagagcg

SEQ ID NO: 107489 - DNA, 75 bp, Homo sapiens
cacttatctcgaaagcctatcagcatagttaaggttgatgataattagaagcatgctttccactgaacttcccga

SEQ ID NO: 107490 - DNA, 51 bp, Homo sapiens
cacgaattccagagcaagcagcaggcgctcttccgccctctctggatgagg

SEQ ID NO: 107491 - DNA, 82 bp, Homo sapiens
atcgtgggcgacgccacagagaaagcctatgaaagagacaaccagcaccaagatgaagcagaaggagatccaggtaatagac

SEQ ID NO: 107492 - DNA, 83 bp, Homo sapiens
cttgcctgtgtcccacttgttcgcggcctatagcatttgacattgtgcagcaaagaaatggttatggagaagcccagtccgct

SEQ ID NO: 107493 - DNA, 87 bp, Homo sapiens
ctgcaggatgcagaggaagctgtggagttggtccagtatgcttactttaagaaggtgacttaagagattaaaattaatttggttgct

SEQ ID NO: 107494 - DNA, 83 bp, Homo sapiens
cccagatgattttggcaggacttgtctacatgcagctgcagctggagggtttggtgcacctcgatttggaggaagtagggcag

SEQ ID NO: 107495 - DNA, 98 bp, Homo sapiens
cagcccagccaccggggaggaccctgagggctcagacatcctgtctgcgggccaggcatcgacatccgcaacgactatcagcagctgaagcgcctgga

SEQ ID NO: 107496 - DNA, 74 bp, Homo sapiens
tttcggtgggtgtgccctgcacctgcctcttcccccattctcaagtcctgtgtatggaaactcacatgagtcag

SEQ ID NO: 107497 - DNA, 100 bp, Homo sapiens
ctcgccactcctgagacatggacaacgccgctgtccgtacctggcggtgaaaatcacccctgccatccctgcagtcgctggcatcctgttcttctttgtg

SEQ ID NO: 107498 - DNA, 100 bp, Homo sapiens
ctttactactaagcaccgttggtatcctcatggacggtagaagactttttgaatctctccacacagctgtctggatttcatatttgtattgacaaaggga

SEQ ID NO: 107499 - DNA, 75 bp, Homo sapiens
gcaaccctatcatcgtctcctgtggctgggacaagctggtcaagaatctacctgttactcgtattttggacaatc

SEQ ID NO: 107500 - DNA, 82 bp, Homo sapiens
ttttgatatggattatacccttgctgattctctaaccatggcacaggtagagaaacgtggaggtttgctccggaaatcttca

SEQ ID NO: 107501 - DNA, 100 bp, Homo sapiens
tttccggatcaatccagatggcagccagtcagtggtggaggacaacactcgcatctcctcagccgggtgcctaggggaactgtgtgcctttttgactgaa

SEQ ID NO: 107502 - DNA, 98 bp, Homo sapiens
ggcagcccaagcacctgctgctcgtggaccccgagggcgtggatcatccagcagctcgtcaacggcatcatcacgcccgccaccatccccagcctggg

SEQ ID NO: 107503 - DNA, 117 bp, Homo sapiens
cggccatggcttcctcaattatctgccaggagcactgccagatctcgggccaggatgaatgctatcaagtaagacaagtgtttgcccagaaacttcacaaaggcctttcccgtttac

SEQ ID NO: 107504 - DNA, 75 bp, Homo sapiens
ctggactcatggaggctgagcatttattcaggtccggcgccagctgccagtcgaggaaccgaacccagccaaaag

SEQ ID NO: 107505 - DNA, 100 bp, Homo sapiens
cacgaaaggcagccgcggatcgccgcgctcagcgacaaacaagtcttattgaagttaaaacagatgagtttcctcgccatgggagcaacatagaagccat

SEQ ID NO: 107506 - DNA, 100 bp, Homo sapiens
tgcacttcgcattttggcattgacatttaattttagggtcctttatatagaagggagagtaggtttgacaactattcagccaatgtgatggtggacagca

SEQ ID NO: 107507 - DNA, 90 bp, Homo sapiens
ggggggcctggccgcgcagccggcgcatattaaatttcctattgactacccctattcaccacctaccttcagattcttgaccaaaatgtg

SEQ ID NO: 107508 - DNA, 85 bp, Homo sapiens
ggacaacaagtactgcgccgactgcgaggccaaaggcactgtttagtacagctgttgaaatgaagataaaacaatcagcagaaca

SEQ ID NO: 107509 - DNA, 75 bp, Homo sapiens
cggcccgtagctacgacctgtcagacatcacccaggctgcaatggctgccatccggaagaaactggtgattgttg

SEQ ID NO: 107510 - DNA, 100 bp, Homo sapiens
ggacgctcggggcacctgcgtccagcgagaggagcgcggcagggggccgggggcccagatcaggatcctcatgaccagccaaagagaagaagaattagga

SEQ ID NO: 107511 - DNA, 90 bp, Homo sapiens
ccggccggtgccagcacctttcggcttctgagacggcggcagcagcggcattcagggttttggccaaattgggcgagggcacaaaataac

SEQ ID NO: 107512 - DNA, 100 bp, Homo sapiens
agcagctttggataatgacgacagcaacccgaagacagggaaatttagtgaactccggagacggcattgactacagccagcagaagagggagaacattgg

SEQ ID NO: 107513 - DNA, 82 bp, Homo sapiens
tcatgagctttgtgaacctggaatccacattcatctcaatggaaggatcctgccttaagtcaacttatttgtttttgccggg

SEQ ID NO: 107514 - DNA, 52 bp, Homo sapiens
cttcgtctatgtggcgcccggcatagacatcaccatggcagcccagaatgga

SEQ ID NO: 107515 - DNA, 100 bp, Homo sapiens
tcgatgccaatctctgcttgaaaggagaagacttggattctcaggatttctctctgatcaaacggacagttcaggactcagaatctaaggatgaatgttc

SEQ ID NO: 107516 - DNA, 83 bp, Homo sapiens
ttcgggtgcgctgctcaaggacacggtctacaccgacttcgacggccctgggctgcatcttgtacctgctgtgcttccggcag

SEQ ID NO: 107517 - DNA, 75 bp, Homo sapiens
gagcgtcattgttgtctttctgggaactcattcccatgaggtggaacctaacttcttgtggaacaagtgttgcca

SEQ ID NO: 107518 - DNA, 75 bp, Homo sapiens
gcaaaagtggaagcgaagccgaaaaaggcagcagcgaagatacggactcagaggaagacgaagaattcctgaagg

SEQ ID NO: 107519 - DNA, 50 bp, Homo sapiens
cgacatcaacacctctaagactggagaagtaacggcacagccaacaagat

SEQ ID NO: 107520 - DNA, 48 bp, Homo sapiens
agccgtgcaggggggcggagcctactatatttgtcaggatacgaatca

SEQ ID NO: 107521 - DNA, 74 bp, Homo sapiens
gtggagccttgggagctggctgggtggctgcctgctggtgtcagtgttatagttttgccgctggactcttccct

SEQ ID NO: 107522 - DNA, 98 bp, Homo sapiens
aaactgattgactgggctggcgttaactgtgcggaggcagtactatactggcaattgctggagaagattttgcaattgttgcttctgatactcgattg

SEQ ID NO: 107523 - DNA, 99 bp, Homo sapiens
cagctggaaaatcaaggactatctggaggagctgtgggtccaggctcagtacatcacagacgcagaagacaccatcatccgagcagtattgatttttgc

SEQ ID NO: 107524 - DNA, 98 bp, Homo sapiens
gaactaaggagaaagtcctacaacagtttggcgtgcaacatggggcttgagaaaggggcttcttggatttgaagacaatttttcttctatgaatttgg

SEQ ID NO: 107525 - DNA, 100 bp, Homo sapiens
cggggtgatggcggtggagactctgtccccggactgggagtttgaccgcgttgacgacggctcgcagaactggtcgaattgacaaatcttaccctacagt

SEQ ID NO: 107526 - DNA, 100 bp, Homo sapiens
cacacagaggcagacgacgacagaaccctgtacaatttgatagtcattcgtaatcagcaggccaaagactcagaggaaatctatacctttggaagaatat

SEQ ID NO: 107527 - DNA, 97 bp, Homo sapiens
ggatgatcgagaggatctggtgtaccaggcgaagctggccgagcaggctgagcgatacgacgctattggaatcagatgcaaagatggtgttgtcttt

SEQ ID NO: 107528 - DNA, 98 bp, Homo sapiens
agagctaaacgttttagagtaccaaccattgtgtgctgtgaggtaaagacatgcttcagcttatcaacaaccaagacagtgacttccctggcctattt

SEQ ID NO: 107529 - DNA, 99 bp, Homo sapiens
tgaggaagagtactacagattttatacaccaccaaactttgttcttgctcttgttttgccctcaattgtaattctggcaggagcgagaacccgagcagc

SEQ ID NO: 107530 - DNA, 74 bp, Homo sapiens
tccacccaccgccgccgcctcccaggtctcgtcagcctatctcggcccctctcttttcatgtcctgacaaaaac

SEQ ID NO: 107531 - DNA, 75 bp, Homo sapiens
ctggacgcttgcatggcgcttgagttcagacttggttccttcaacctagagaaagttgaaaacccagctgaagtc

SEQ ID NO: 107532 - DNA, 100 bp, Homo sapiens
ttataagaaaaaatcaattcaatttggaagatcctcatcaaaaggagttgtttttatacagtttatgtaacttgatggaagaaaatggaattactccaaa

SEQ ID NO: 107533 - DNA, 75 bp, Homo sapiens
gtgcggcagcgcacgctgcagtccagctgcaagatcaaggccctgcgggccaagacaaacacctacatcaagacc

SEQ ID NO: 107534 - DNA, 82 bp, Homo sapiens
tacactgaaattcatcctgagatgagggggatatgagactttctactcggaatatcctgagtgttgcgtggatgtaaaaccc

SEQ ID NO: 107535 - DNA, 98 bp, Homo sapiens
cagccatggagttctacttagaggcagtgaaatcaactgtgcagaccatcactgttggaggagtgagcacatcacagtttaagacaattattcctctg

SEQ ID NO: 107536 - DNA, 98 bp, Homo sapiens
agagctccgtgcgggtggctgtcaggatcaactcactatcctgaaggtccattctcccaagaagaggggacagaaagacagatctatttgtaagaaag

SEQ ID NO: 107537 - DNA, 75 bp, Homo sapiens
gggcctttcctgaggacggcgtacggagtgtggattgagaggatccagaatccagatctctggaatagctaccag

SEQ ID NO: 107538 - DNA, 100 bp, Homo sapiens
gagagccgcgagcgcccggccgaacccgcgatggaataatgcccagcggcccgccaggtcccggttaatgttgaagaaggaaaatgcggaagtcgtcatt

SEQ ID NO: 107539 - DNA, 74 bp, Homo sapiens
gaagagcatgatcggcatgtccaccaaggagccttcacgtaaatgggtccagtcatgcctcccagtaagaagcc

SEQ ID NO: 107540 - DNA, 96 bp, Homo sapiens
ggatcaagcaggttttaaatcaagatttaacattccaacacataaaaattatttatccaacagctcctcccagctgttcaacggttttgtgtatag

SEQ ID NO: 107541 - DNA, 106 bp, Homo sapiens
gaccccgaactccaggacagcatccaggcctcattggacagcattcgagggggggccctcagcctcttggccttgaacgggctgttcatcttgattcacaaacaca

SEQ ID NO: 107542 - DNA, 51 bp, Homo sapiens
ctccacccaggaacctcgccatccagaagtgctggagaatctggtaaaagc

SEQ ID NO: 107543 - DNA, 74 bp, Homo sapiens
aacaaagctgaatgaactcattcaggttgggactgctgtgtaagctatggtggcatgtggtaccttaaagggac

SEQ ID NO: 107544 - DNA, 95 bp, Homo sapiens
ccagtgaaagtggaagaacaaaggaagatgagtcaggatagtgtccatcacacctcaggtaactgcaaaaacaatggctcagcatgaagaactga

SEQ ID NO: 107545 - DNA, 101 bp, Homo sapiens
tagaaccgtagccagacatgggactggaggacgagcaaaagatgcttaccgaatccggagatcctgaggagaggagaaggcagagcccccccaggctatga

SEQ ID NO: 107546 - DNA, 50 bp, Homo sapiens
aggtcatcaccacccgcaagcaggtttgttatccaggcataagaccaaga

SEQ ID NO: 107547 - DNA, 100 bp, Homo sapiens
aaccaacggctcaagaatttcaagaacaaaggccgcgacttggagaacatccagtcatggataaaaatgagctggttcagaaggccaaactggccgagca

SEQ ID NO: 107548 - DNA, 74 bp, Homo sapiens
gcagagaccaagccgaaatactggaagggtgtaaacgtcctacttcggggcaacttgccagagatagaagagag

SEQ ID NO: 107549 - DNA, 115 bp, Homo sapiens
cttgaacttctcttgactgcaaaaggcctttctctgctcgaaacacacatcttggcgcgttgcacgacccgtccaagaagcagggaccatggctggaggaagaagaagaagccta

SEQ ID NO: 107550 - DNA, 75 bp, Homo sapiens
actcacggggccctcagtgccaccaccatcttcaggacccttgaacatctgtgaagaaatgactattctgcatgg

SEQ ID NO: 107551 - DNA, 74 bp, Homo sapiens
gttgctggaaaccatgacattggcttccattatgaaatgaagagttgagtatcttatatccagctgccattgtg

SEQ ID NO: 107552 - DNA, 100 bp, Homo sapiens
attgccactgatgcttgctgagccgacccttcaaagttgtacaagaaagcagatgatgttgcagccattgaatgccagtctgaagaagtcatccgtcttc

SEQ ID NO: 107553 - DNA, 98 bp, Homo sapiens
tctcgcaggcccccccgcgccgaccgcgttcctatggacagacgcacagacacctgcaggttcgagaacttgtcttggacaattgcaaatcaaatgat

SEQ ID NO: 107554 - DNA, 100 bp, Homo sapiens
agtaataaatatccacaggctgttttcttggaagtcgatgtacatcagtgtcagggttacacatcattttggaatgactgtatatcatctggattacgtg

SEQ ID NO: 107555 - DNA, 136 bp, Homo sapiens
cttctgagcgtgtgccagaagatccagctttgttgaaaagcgaagccgttagtcccttaatacaaagggccatggtaggggaggagtgtgtaggtgccatcgtttgcaagttggatatgcacaaaaagatgttccg

SEQ ID NO: 107556 - DNA, 110 bp, Homo sapiens
gctcaagttgctactcgggacgctgcacctcccgcgccgcacggtggacgaggctgaaggtgatgtggccgccctcaaccgacgcatccagctcgttgaggaggagttgg

SEQ ID NO: 107557 - DNA, 99 bp, Homo sapiens
aggagcagcagatggtgatgagaggccaccgagagacctccatggtccatgaactcaaccgttgggatgctgtctatgagagagaactgcaaactttcc

SEQ ID NO: 107558 - DNA, 75 bp, Homo sapiens
catcaacgtccacctccgggctgggtacatcatccccctgcagggcattccaatatcacagtaaagagcaacaat

SEQ ID NO: 107559 - DNA, 87 bp, Homo sapiens
atctacctaccaatcgtgaaaactatattcacagtactatactggcaattgctggagaagattttgcaattgttgcttctgatactc

SEQ ID NO: 107560 - DNA, 90 bp, Homo sapiens
aaaagcctctgctctgcctccggggacaagaaactagagcaaataaccgttttgaaattgcttttaaagaagcagttttttcaccgagcc
